United States Patent Application Publication US 2021/0199660 A1 - sequence listing, part 32

SEQ ID NO: 451898 - DNA, 120 bp, Artificial Sequence
  ENSG00000155893_83 (sequence is synthesized)
accggcaggcacttcggcgatgcccggggctccgctccctttctgttgatagttgtaggcgtcatttctggcagctgctgcagctcgatgcagggaaggaaggggccacccaccaatcac

SEQ ID NO: 451899 - DNA, 120 bp, Artificial Sequence
  ENSG00000155893_84 (sequence is synthesized)
ctctttctgatgccacatttttgacgttcatggaagaggcctgtctcagagctccctaagctgacaatctttgggcagccatctctattcttctcctggctggtgcactccttacaataa

SEQ ID NO: 451900 - DNA, 90 bp, Artificial Sequence
  ENSG00000155893_85 (sequence is synthesized)
agcgatagaacccgcaacaggaaaacggaaaggccgtgcgccggaagaacagatggggtcttgctctgtcacccaggcggtgggttgaac

SEQ ID NO: 451901 - DNA, 120 bp, Artificial Sequence
  ENSG00000155893_86 (sequence is synthesized)
aggtgcatgccaccatgcctggttaattctttctatttttgagagatgggatctcactacattgcccacattgttctcaaactctggtcccaagttgctggaattacaggcttaaaccac

SEQ ID NO: 451902 - DNA, 120 bp, Artificial Sequence
  ENSG00000155893_87 (sequence is synthesized)
ggcttaaaccaccacacctgttttgtaacctgagcgcctccagacttctagccacatgtgcgatctcaatggattctggcgtagtctctctctcccctagggtcaggcaagatatcatca

SEQ ID NO: 451903 - DNA, 120 bp, Artificial Sequence
  ENSG00000155893_88 (sequence is synthesized)
tttgtcatacatacatatacagcgtctatcagattctctcacaaaaagccctcatgaatagatatatactggggtggctgccataccctgaatccactttagacccctttaggaattcat

SEQ ID NO: 451904 - DNA, 120 bp, Artificial Sequence
  ENSG00000155893_89 (sequence is synthesized)
ctgagcaccttctaaatggaagtccacaagaggcataaaggtggcctcactacaccatggttgagtgagtggacctgctcccagtgtgatcaccgtatgtggtcccagggtccctccctc

SEQ ID NO: 451905 - DNA, 120 bp, Artificial Sequence
  ENSG00000155893_90 (sequence is synthesized)
tcaccaaagggcctttgggctaggaaagcaaatttctcttaatgtaactcttagaaattcataaatcaaagacaagtttccttctcttaatgtaactcttagaaatccataaacctgtta

SEQ ID NO: 451906 - DNA, 120 bp, Artificial Sequence
  ENSG00000155893_91 (sequence is synthesized)
ccagttgaacatcctaatcccaaaatctgaaacccaaaatgctccaaaatttgaaactttttgagtgcccatatgatgctcaaagaaaatgcttactggacattttggattttggatttt

SEQ ID NO: 451907 - DNA, 120 bp, Artificial Sequence
  ENSG00000155893_92 (sequence is synthesized)
cagattaaggatgctgaactggtaagtataatgcaaatattcagaaatctgaaaaagtccaaaatacccctggtcccaagcattttggataagtgatacacaagctataataaaattatt

SEQ ID NO: 451908 - DNA, 87 bp, Artificial Sequence
  ENSG00000155893_93 (sequence is synthesized)
gtcacccaggctggaatgcagtggtgtaatcagagctcactgtagcctcaacctttgagtgtctgggcatacaggagagtgccacca

SEQ ID NO: 451909 - DNA, 120 bp, Artificial Sequence
  ENSG00000155893_94 (sequence is synthesized)
cttctgagtgtctgggcatacaggagagtgccaccacacccagctcctgtgataatattagagaattaaataattcaattaacaagattagtagatacttgagcaaaatttgggctttgc

SEQ ID NO: 451910 - DNA, 120 bp, Artificial Sequence
  ENSG00000155893_95 (sequence is synthesized)
caacatggaagacagggcatgactattaggtaggcacaaaaaaatgcctgctacaattccctgtatatatttaaattatttccacaataaaatatattgcctacatgattaaagaaggaa

SEQ ID NO: 451911 - DNA, 120 bp, Artificial Sequence
  ENSG00000155893_96 (sequence is synthesized)
agaaataaaggtaatgaatatgaggggaaaatggaaatataaaactaagaagtgatgtcatattttgaggtatttgagaagacatgctggtaaaataaacagactaatttgctaaaagcc

SEQ ID NO: 451912 - DNA, 120 bp, Artificial Sequence
  ENSG00000155893_97 (sequence is synthesized)
aattcaatgattgaccaattcaccacatttacttgctccttttacttatttacaaggtttttggcaattcatactggatggtattcttttaacagtttttgaacatttctgcaaaatatt

SEQ ID NO: 451913 - DNA, 120 bp, Artificial Sequence
  ENSG00000155893_98 (sequence is synthesized)
tgttggccagtattcctttatatctgtataacagcattttaaggaatattcaatctgtctcagcccagttagttagaagacagggtatatgtagaagaaaaatattcacaagataaataa

SEQ ID NO: 451914 - DNA, 120 bp, Artificial Sequence
  ENSG00000155893_99 (sequence is synthesized)
gaagaacagcagcctgagctctttgaagactccttagtctaaagcctctgatggccaatggtctgcatctttcccatgtgctcctgaggtacaaaatggacatttcagctgcttttaata

SEQ ID NO: 451915 - DNA, 120 bp, Artificial Sequence
  ENSG00000155893_100 (sequence is synthesized)
gaaactcactgtgtcactcataaaactcaggaagctgtcccaaatcctgggaggacatgaaaagaggctcactctgtagtcaagcacaggtatgcctaaggtgtgcaggtcccaagactc

SEQ ID NO: 451916 - DNA, 120 bp, Artificial Sequence
  ENSG00000155893_101 (sequence is synthesized)
tcccacttctctcttagtttggagtgggcattcttttaagaagtggaggaccctgtggtcactggcttccttagtggtgaatcatagggcaatcagagagcaggaatctgcaaaggggcg

SEQ ID NO: 451917 - DNA, 120 bp, Artificial Sequence
  ENSG00000155893_102 (sequence is synthesized)
ctgtcatgtgctgaattgtatctcctcaacatttatagattgaagccctagcctccagtatctcaggatgtgacagtatttggaggtggggcttttaaagaggtggttaagttaaaatga

SEQ ID NO: 451918 - DNA, 120 bp, Artificial Sequence
  ENSG00000155893_103 (sequence is synthesized)
agccattagagtggtccttaatccaatatgactggtctccttataagaagaaacttgtacacagaagagatacacaagggacatggaggcacagagaaaagcccatgtgaagaggcagca

SEQ ID NO: 451919 - DNA, 120 bp, Artificial Sequence
  ENSG00000155893_104 (sequence is synthesized)
aaagagtggccatgtgcaatccaagaagagaggcctcagaggaagccagccctgccaacactttgatcttgaactttcgggttccagactgtgagaaaataaatttttattgtttaagcc

SEQ ID NO: 451920 - DNA, 120 bp, Artificial Sequence
  ENSG00000155893_105 (sequence is synthesized)
ttttccatcctttggttggagaggtaggatgttacagtcaaccctgattttattttgagaggctgacaggttctgagacatgaatgtgtgttacttgtgtttgtggcatttctcttgcat

SEQ ID NO: 451921 - DNA, 120 bp, Artificial Sequence
  ENSG00000155893_106 (sequence is synthesized)
gagctggtttccacgtcactgaattggcctgtgtgttttgcttatataactcttctgaaagtaccttctgttttaggaaagccaattttcagccatacttttttaaggaaaattttgcag

SEQ ID NO: 451922 - DNA, 120 bp, Artificial Sequence
  ENSG00000155897_0 (sequence is synthesized)
atcccggcgcaatggagttctccgaagggcgatgattccagccacatctgctaacttcgcacccatcgctgccgccggtcaccgccggccaggccccctgcagccgcggagcagtgggcg

SEQ ID NO: 451923 - DNA, 120 bp, Artificial Sequence
  ENSG00000155897_1 (sequence is synthesized)
tccaaagcccagtgcagcagccaggacccgcccgacgcgcagcagaagcacggcgcccaggcgcttaggcgtctcttggagagcaaaggctgcgccaaaacgctgagcctagaatcaacc

SEQ ID NO: 451924 - DNA, 120 bp, Artificial Sequence
  ENSG00000155897_2 (sequence is synthesized)
aaggagcctgagcccaggaaggggctgcgtggctcacagcgctgcggctcctgaggacaaatagccactgccgctgcgtacccaagctgcgccggctggcgggagagcagcacgcaagga

SEQ ID NO: 451925 - DNA, 120 bp, Artificial Sequence
  ENSG00000155897_3 (sequence is synthesized)
cgccgaggtccgccgcgatcttccaggtgccctttgcccctgggcacagtatgacccgacctacagggagccctagcgcagggctcctgcaacggggcagcctaggataaaaaggatcct

SEQ ID NO: 451926 - DNA, 120 bp, Artificial Sequence
  ENSG00000155897_4 (sequence is synthesized)
tgccaagctcctaccaggccgcctttgagtctttaggaacccctcctccggctgcctccccaaggttctgggcctccttccctgcggcccagagccatggagctctccgatgtgcgctgc

SEQ ID NO: 451927 - DNA, 120 bp, Artificial Sequence
  ENSG00000155897_5 (sequence is synthesized)
cttacaggcagcgaggaactctacaccatccacccgacgcccccggccggcgacggcaggagcgcctcccggccgcagcggctgctgtggcagacggcggtgcgacacatcacggagcag

SEQ ID NO: 451928 - DNA, 120 bp, Artificial Sequence
  ENSG00000155897_6 (sequence is synthesized)
cgcttcattcacgggcaccggggaggcagcggcagcgggagtggaggctcgggcaaagcctcggaccctgcgggcggcggccccaaccaccacgcgccgcagctgtcaggcgactcggcg

SEQ ID NO: 451929 - DNA, 120 bp, Artificial Sequence
  ENSG00000155897_7 (sequence is synthesized)
ctgcccctctactcgctgggcccgggagagcgagcgcacagcacctgcggcaccaaagtcttcccggaacgcagcgggagcggcagtgccagcggcagcggaggcgggggcgacctgggc

SEQ ID NO: 451930 - DNA, 120 bp, Artificial Sequence
  ENSG00000155897_8 (sequence is synthesized)
ttcctgcaccttgactgtgcccctagcaactcggatttctttcttaatgggggctatagctaccgaggggtcattttccccaccctgcgcaactccttcaaatctcgggatttggaacgc

SEQ ID NO: 451931 - DNA, 120 bp, Artificial Sequence
  ENSG00000155897_9 (sequence is synthesized)
ctctaccagcgctatttcttgggccaaaggcgcaaatcggaagtggtgatgaacgtgctggacgtgctgaccaaactcactctcttggtcctacacttgagcctggcctcggcccccatg

SEQ ID NO: 451932 - DNA, 120 bp, Artificial Sequence
  ENSG00000155897_10 (sequence is synthesized)
gacccgctcaagggcatcctgctgggcttcttcaccggcattgaggtagtgatctgcgccctggtggtggtcaggaaggacaccacctcccacacgtacctgcagtacagcggcgtggtc

SEQ ID NO: 451933 - DNA, 120 bp, Artificial Sequence
  ENSG00000155897_11 (sequence is synthesized)
acctgggtggccatgaccacccagatcctggcagcaggcctcggctacgggctcctgggcgacggcataggctacgtgctcttcacgctcttcgccacctacagtatgctgccgctgccg

SEQ ID NO: 451934 - DNA, 120 bp, Artificial Sequence
  ENSG00000155897_12 (sequence is synthesized)
ctcacctgggccatcctggccggcctgggcacctcgctgctgcaggtcatcctccaagtggtcataccccggctggcggtcatttccatcaaccaggttgtggcccaggcagtgctattc

SEQ ID NO: 451935 - DNA, 120 bp, Artificial Sequence
  ENSG00000155897_13 (sequence is synthesized)
atgtgtatgaacacagctggaatcttcatcagttacctgtcagaccgggcccagcgccaagctttcctggagactcggaggtgtgtggaggccaggctgcgcctggagacagagaaccaa

SEQ ID NO: 451936 - DNA, 120 bp, Artificial Sequence
  ENSG00000155897_14 (sequence is synthesized)
agacaggagcggctcgtgctttctgtgctcccccggtttgttgtcctggaaatgatcaacgacatgaccaatgtggaagatgagcacctgcagcaccagttccatcggatctacatccat

SEQ ID NO: 451937 - DNA, 120 bp, Artificial Sequence
  ENSG00000155897_15 (sequence is synthesized)
cgctatgagaacgtcagtattctttttgcagatgttaaaggatttaccaacctctccacgaccttgtctgctcaggagctggtcaggatgctcaacgagctctttgccagatttgatcga

SEQ ID NO: 451938 - DNA, 120 bp, Artificial Sequence
  ENSG00000155897_16 (sequence is synthesized)
ctggcccatgagcatcactgccttcgtattaaaatcctgggggactgctactactgcgtgtctggacttcctgagccccgccaggaccatgcccactgctgtgttgaaatgggtctcagc

SEQ ID NO: 451939 - DNA, 120 bp, Artificial Sequence
  ENSG00000155897_17 (sequence is synthesized)
atgatcaaaaccatcaggtatgtgcggtcaaggacaaaacacgatgttgacatgaggattggaatccactccggctcggtgctgtgcggtgttttgggactaaggaagtggcagtttgat

SEQ ID NO: 451940 - DNA, 120 bp, Artificial Sequence
  ENSG00000155897_18 (sequence is synthesized)
ctataacgtggaagagggccatggtaaagagaggaatgaattcctgaggaagcataatatcgaaacttacttaattaagcagcctgaggacagtctgctgtccttgcctgaagatatcgt

SEQ ID NO: 451941 - DNA, 120 bp, Artificial Sequence
  ENSG00000155897_19 (sequence is synthesized)
caaggagtcagtgagctcctcagaccggagaaacagtggggccacattcactgaaggatcctggagccctgaactgccctttgataatatcgtggggaaacagaatactctggctgccct

SEQ ID NO: 451942 - DNA, 120 bp, Artificial Sequence
  ENSG00000155897_20 (sequence is synthesized)
aacaagaaattcaataaatctgcttccaaaccatcttgcacaagctttgcatgtccagtctgggcctgaggaaattaacaagagaatagaacataccatcgacttgcggagtggcgataa

SEQ ID NO: 451943 - DNA, 120 bp, Artificial Sequence
  ENSG00000155897_21 (sequence is synthesized)
attgagaagagagcatatcaagccattctcactgatgtttaaagactccagcctggagcacaagtattctcaaatgagggatgaagtgttcaagtcaaacttggtctgtgcatttatcgt

SEQ ID NO: 451944 - DNA, 120 bp, Artificial Sequence
  ENSG00000155897_22 (sequence is synthesized)
tcttctatttatcacggcaatacaaagtttgcttccttcttcaagagtgatgccaatgaccatccagttctccattctgattatgctgcactcggctctggtcctcatcaccacagcaga

SEQ ID NO: 451945 - DNA, 120 bp, Artificial Sequence
  ENSG00000155897_23 (sequence is synthesized)
ggattataaatgtttgcccctcatcctccggaaaacttgctgttggattaatgagacctatttggcccggaacgtcatcatctttgcatccattttgattaatttcctgggtgccatctt

SEQ ID NO: 451946 - DNA, 120 bp, Artificial Sequence
  ENSG00000155897_24 (sequence is synthesized)
aaatatcctgtggtgtgattttgacaagtcgatacccttgaagaacctgactttcaattcctcagctgtgtttacagatatctgctcctacccagagtactttgtcttcacgggggtgtt

SEQ ID NO: 451947 - DNA, 120 bp, Artificial Sequence
  ENSG00000155897_25 (sequence is synthesized)
ggccatggtgacctgtgcagttttcctccggctgaactccgtcctgaagctggcagtgctgctgatcatgattgccatctatgccctgctcactgagaccgtctacgcaggcctctttct

SEQ ID NO: 451948 - DNA, 120 bp, Artificial Sequence
  ENSG00000155897_26 (sequence is synthesized)
gcgttatgacaacctcaaccacagtggagaagatttcctggggaccaaggaggtatcactgctactgatggccatgttcctcctggctgtgttctaccatggacagcagctggagtacac

SEQ ID NO: 451949 - DNA, 120 bp, Artificial Sequence
  ENSG00000155897_27 (sequence is synthesized)
agcccgcctggacttcctttggcgagtacaggccaaagaggagatcaatgagatgaaggagctgagggaacacaatgagaacatgctccggaatatcttacccagccatgtggcccgcca

SEQ ID NO: 451950 - DNA, 120 bp, Artificial Sequence
  ENSG00000155897_28 (sequence is synthesized)
tttcctagagaaggaccgagacaatgaggagctgtattctcaatcctatgatgctgttggggtgatgtttgcctccatcccaggatttgcggacttttactctcagactgaaatgaataa

SEQ ID NO: 451951 - DNA, 120 bp, Artificial Sequence
  ENSG00000155897_29 (sequence is synthesized)
ccagggagtggaatgcctgcgcttgctcaatgagatcattgctgacttcgatgagttgcttggtgaagaccgatttcaagacattgaaaagattaagaccattggcagcacctacatggc

SEQ ID NO: 451952 - DNA, 120 bp, Artificial Sequence
  ENSG00000155897_30 (sequence is synthesized)
cgtgtcaggcctgtcacctgaaaaacagcaatgtgaagacaagtggggacatttgtgtgctctggctgacttctcactcgccctgacagaaagcatacaggagatcaacaagcattcatt

SEQ ID NO: 451953 - DNA, 120 bp, Artificial Sequence
  ENSG00000155897_31 (sequence is synthesized)
caacaattttgaactccggattggcatcagccacggctcagtggtagctggcgttatcggcgctaagaaaccacagtatgacatttggggcaaaactgtgaacctggcaagccgaatgga

SEQ ID NO: 451954 - DNA, 120 bp, Artificial Sequence
  ENSG00000155897_32 (sequence is synthesized)
cagcacgggggttagtggccggatccaagtcccagaggagacctatctcatcctgaaggaccagggctttgcctttgattaccgaggggagatctatgtgaagggtatcagtgaacagga

SEQ ID NO: 451955 - DNA, 120 bp, Artificial Sequence
  ENSG00000155897_33 (sequence is synthesized)
aggaaaaatcaaaacgtactttcttctgggaagagtccaacccaacccattcatcttgcccccaagaagactgcctgggcagtactccctggccgcggttgtcctgggacttgtccagtc

SEQ ID NO: 451956 - DNA, 120 bp, Artificial Sequence
  ENSG00000155897_34 (sequence is synthesized)
cctcaataggcaaaggcagaagcagctactcaatgagaacaacaacacaggaatcatcaagggtcattacaaccggcggactttgttgtcacccagcggcacagagcctggagcccaggc

SEQ ID NO: 451957 - DNA, 120 bp, Artificial Sequence
  ENSG00000155897_35 (sequence is synthesized)
tgaaggcaccgacaaatctgatttgccataaaagcattttctttctgttttttttttttgtatttcttttatatataaaataaatatactaataaaaaggtttaattttttttagaacaa

SEQ ID NO: 451958 - DNA, 120 bp, Artificial Sequence
  ENSG00000155897_36 (sequence is synthesized)
ctggtgaaggggagacagataaggttgtggcccaggcagtgctattcatgtgtatgaacacagctggaatcttcatcagttacctgtcagaccgggcccagcgccaagctttcctggaga

SEQ ID NO: 451959 - DNA, 120 bp, Artificial Sequence
  ENSG00000155903_0 (sequence is synthesized)
acgggccgggcggcaccatggcggcggcggcgcctgctgctgcggcggcttcttccgaggcgccagcggcgagtgcgactgcagagcccgaggccggggaccaggacagtcgcgaggttc

SEQ ID NO: 451960 - DNA, 120 bp, Artificial Sequence
  ENSG00000155903_1 (sequence is synthesized)
gcagagcccgaggccggggaccaggacagtcgcgaggttcgagtgttgcagagcctgcggggcaagatctgtgaagcaaaaaatttattgccatatcttggaccccacaaaatgagagat

SEQ ID NO: 451961 - DNA, 120 bp, Artificial Sequence
  ENSG00000155903_2 (sequence is synthesized)
tgtttctgtaccataaatttggaccaggaagaagtttatcgtacccaagttgtggaaaaatctttaagcccatttttcagtgaagaattttactttgagattccaagaactttccagtat

SEQ ID NO: 451962 - DNA, 120 bp, Artificial Sequence
  ENSG00000155903_3 (sequence is synthesized)
ttgtctttctatgtttatgataagaatgttttacaaagagatctccgtataggaaaagtagccatcaaaaaagaagacttgtgtaatcacagtggcaaagaaacttggttttcattacag

SEQ ID NO: 451963 - DNA, 120 bp, Artificial Sequence
  ENSG00000155903_4 (sequence is synthesized)
cctgttgactccaattcagaggttcagggtaaagttcaccttgaattaaaactgaatgaactgataacggagaatggaactgtatgccagcagcttgttgtacacatcaaggcatgccat

SEQ ID NO: 451964 - DNA, 120 bp, Artificial Sequence
  ENSG00000155903_5 (sequence is synthesized)
gggttgcctctcataaatggccaaagctgtgacccttatgcaacagtttctctagtgggcccttctaggaatgaccaaaagaagacaaaagtaaagaagaaaacaagcaatccgcagttt

SEQ ID NO: 451965 - DNA, 120 bp, Artificial Sequence
  ENSG00000155903_6 (sequence is synthesized)
aatgaaatcttttattttgaggtaaccagatccagtagttacaccagaaagtcccagttccaggtagaagaggaggacattgaaaagctagaaatcaggatcgacttgtggaacaatgga

SEQ ID NO: 451966 - DNA, 120 bp, Artificial Sequence
  ENSG00000155903_7 (sequence is synthesized)
aacctagtccaagatgttttcctaggtgagattaaggttcctgtgaacgtattaagaactgattcctctcatcaagcctggtacttgctacagccaagagacaatggaaacaagtcatcc

SEQ ID NO: 451967 - DNA, 120 bp, Artificial Sequence
  ENSG00000155903_8 (sequence is synthesized)
aaaactgatgacctggggtctcttcgattaaatatatgttatacagaagactacgtgcttccttcagagtactatggtcctttgaaaactttgctgctaaaatcaccagatgttcaacca

SEQ ID NO: 451968 - DNA, 120 bp, Artificial Sequence
  ENSG00000155903_9 (sequence is synthesized)
atatctgcctcagctgcttacattttgagtgaaatatgtcgagataaaaatgatgctgttttgccccttgtacgactgctgctgcaccatgataaacttgttccttttgccactgctgtg

SEQ ID NO: 451969 - DNA, 120 bp, Artificial Sequence
  ENSG00000155903_10 (sequence is synthesized)
gctgaattagacttgaaggatacacaagatgcaaacacaatttttagaggaaattccctggctacccgatgtctggatgagatgatgaaaatagtgggagggcactacctgaaagtaaca

SEQ ID NO: 451970 - DNA, 120 bp, Artificial Sequence
  ENSG00000155903_11 (sequence is synthesized)
ttaaaacctattcttgatgagatatgtgactcctcaaaatcctgtgaaatcgatcctattaaattgaaagagggagataatgtagaaaataataaggagaatctgcgctactatgtagac

SEQ ID NO: 451971 - DNA, 120 bp, Artificial Sequence
  ENSG00000155903_12 (sequence is synthesized)
aagttattcaatacaattgtaaaatcaagtatgagctgccccactgtaatgtgtgatatcttttattctctaaggcagatggctactcagagatttcctaatgaccctcatgttcagtat

SEQ ID NO: 451972 - DNA, 120 bp, Artificial Sequence
  ENSG00000155903_13 (sequence is synthesized)
tctgcagtgagcagctttgtatttcttcgtttctttgctgtagccgtagtatcacctcatacttttcatttgcgacctcatcatccagatgcacagacaattagaacattaactctcatc

SEQ ID NO: 451973 - DNA, 120 bp, Artificial Sequence
  ENSG00000155903_14 (sequence is synthesized)
tcaaaaactatacaaactttgggaagctgggggagtctgtccaaaagcaagtcaagtttcaaagagacattcatgtgtgaatttttcaaaatgtttcaagaagaaggatatattatagca

SEQ ID NO: 451974 - DNA, 120 bp, Artificial Sequence
  ENSG00000155903_15 (sequence is synthesized)
gttaaaaagttcttggatgaaatttcatctactgaaactaaagagtccagtggtacgagtgagcctgtgcacctgaaagaaggtgagatgtataaaagagctcaaggaagaactcggatt

SEQ ID NO: 451975 - DNA, 120 bp, Artificial Sequence
  ENSG00000155903_16 (sequence is synthesized)
ggaaaaaagaattttaagaaacgatggttctgcttaacaagcagagagctcacctaccacaaacagccaggcaaagatgcaatctacacaatcccagtaaaaaacattcttgctgtggaa

SEQ ID NO: 451976 - DNA, 120 bp, Artificial Sequence
  ENSG00000155903_17 (sequence is synthesized)
aaactggaagagagctctttcaacaagaaaaatatgttccaagtaatacatacggagaaaccactctatgtccaggcaaataactgtgtagaagctaatgaatggatagacgtactctgc

SEQ ID NO: 451977 - DNA, 120 bp, Artificial Sequence
  ENSG00000155903_18 (sequence is synthesized)
agggtgagccgatgcaatcaaaacaggctcagtttttatcatccctctgtgtatctgaacggaaattggctctgctgtcaggagactggtgaaaacactctcggctgcaagccatgtact

SEQ ID NO: 451978 - DNA, 120 bp, Artificial Sequence
  ENSG00000155903_19 (sequence is synthesized)
gcaggtgtccctgcagacatccaaatagatattgatgaagacagagaaacagaaagaatttattccctttttaccctcagtttacttaagctgcagaagatggaagaggcttgtggaact

SEQ ID NO: 451979 - DNA, 120 bp, Artificial Sequence
  ENSG00000155903_20 (sequence is synthesized)
attgcagtctatcaaggaccacagaaagagcctgatgattattctaactttgtaatcgaggattctgtaacaacctttaagacaattcagcaaataaaaagcataattgagaagctggat

SEQ ID NO: 451980 - DNA, 120 bp, Artificial Sequence
  ENSG00000155903_21 (sequence is synthesized)
gaacctcatgaaaaatataggaagaaaagatccagtagtgcaaaatatgggagcaaggaaaatccaattgttgggaaagcatcttagagtttaacagattggttcagaagaactggaaaa

SEQ ID NO: 451981 - DNA, 120 bp, Artificial Sequence
  ENSG00000155903_22 (sequence is synthesized)
tattatttttcttggagcttttcaattcatcatgtattttgttcatggtatttaagaatgagcatccgcttcaatgtcatctgcctccacattgtatttaatatttaataattgaaatta

SEQ ID NO: 451982 - DNA, 120 bp, Artificial Sequence
  ENSG00000155903_23 (sequence is synthesized)
aatcctggtattgatgtattactagagaatttaaagcccaagattcccttcatacctgtgtgaccaaatccatgtttctgcaacttctttttaatcgaaagaatcttcctagaaaagctt

SEQ ID NO: 451983 - DNA, 120 bp, Artificial Sequence
  ENSG00000155903_24 (sequence is synthesized)
tgtaacaaagggagaactcctccgtagcaagaaaccatctcttcttgtaacactctgttctgtggacttgttttcactaccatcagtgcctgctctatactgccaacattgtgttttact

SEQ ID NO: 451984 - DNA, 120 bp, Artificial Sequence
  ENSG00000155903_25 (sequence is synthesized)
agaaaattccaattcatgacagttcagagcttttcatttagttcatgtagaccctcccactttaaaaaagaaaaaaaataagaagtgtttttcctttggtccatcagtcattacaggttc

SEQ ID NO: 451985 - DNA, 120 bp, Artificial Sequence
  ENSG00000155903_26 (sequence is synthesized)
cattcaagacagtgatagaaactttagaaaactgccagagcatacttgaaagttggtagatccttttgcctaaagatgtaaacaaaactcaagacagaaggaatcagggaatatgtgcta

SEQ ID NO: 451986 - DNA, 120 bp, Artificial Sequence
  ENSG00000155903_27 (sequence is synthesized)
ttgtgtgcatcttgtttacatttgggatcagtgatggcaaaagaagtaatgagaccactgaaattgttttcattgttttaaataccaggtactcattttcttgatttgaaagtttaacat

SEQ ID NO: 451987 - DNA, 120 bp, Artificial Sequence
  ENSG00000155903_28 (sequence is synthesized)
gacttctaaggacatctcttcaaaaagaaagtaaacagggaatgaaggtggtgggaaaatcacttcacttcacccactatttcatgttgtaataagggccaccataaggatgccctcctc

SEQ ID NO: 451988 - DNA, 120 bp, Artificial Sequence
  ENSG00000155903_29 (sequence is synthesized)
atagtgttcggttctgatcttcctcgagaacagtcacttggcgcactttaataatctggactgctccagatttgactttagatactccatggtatctagtctttatgatcagttgaatga

SEQ ID NO: 451989 - DNA, 120 bp, Artificial Sequence
  ENSG00000155903_30 (sequence is synthesized)
tcagtgtttaagtctaaaaataatgctttcctgaaaatgtttatatttcattgctgtttccttattgcctgctagccaaatggaatttgggcaagcaactctttgaagacttttttaccc

SEQ ID NO: 451990 - DNA, 120 bp, Artificial Sequence
  ENSG00000155903_31 (sequence is synthesized)
tagaaatttacttttgtcctaaaaaccctaactgtaaataagcagtcgaagcaagttgccaccttgaagttgagggatacactttgcttcatcagtattaaaaaccatggtactcttatt

SEQ ID NO: 451991 - DNA, 120 bp, Artificial Sequence
  ENSG00000155903_32 (sequence is synthesized)
ttgtcttttttaattcaaaacattttctaaatgtggtactttgaaccttggagtatttacatgtttctgttcaaaactgtgacttattaatgtaagtctgctagtagtactttttttgtc

SEQ ID NO: 451992 - DNA, 120 bp, Artificial Sequence
  ENSG00000155903_33 (sequence is synthesized)
tgagcataagctatatttcaagatatactttgccaattttgttattggtgggtaatcatttttaaattatattgttattaggtaattatttttaaagactactggcatacaatcaaagtt

SEQ ID NO: 451993 - DNA, 120 bp, Artificial Sequence
  ENSG00000155903_34 (sequence is synthesized)
gttccataaaagaatataactgagcaatgtatttctctaaatgacttgtaaaaatcaatgaattatgtttaagtctgcattatggtaggttattactcccagctcattttaaagacaagt

SEQ ID NO: 451994 - DNA, 120 bp, Artificial Sequence
  ENSG00000155903_35 (sequence is synthesized)
ttgaaagagtcctttaaattttataagcttgtagattccataaactacactgatttatacatttgaaagaatttagccatttaataaatttcttattctcaaattgcatttagattaaaa

SEQ ID NO: 451995 - DNA, 120 bp, Artificial Sequence
  ENSG00000155903_36 (sequence is synthesized)
ttccttttaagagtgtctgaaatgtctgcctgcgaagaacatgtaaacattgccagataccagtcattattctttagtggctttttagtcctctgcttttttttttaaggcaaaagaaat

SEQ ID NO: 451996 - DNA, 120 bp, Artificial Sequence
  ENSG00000155903_37 (sequence is synthesized)
atgcatctagcatttctaataccaaatccccaattgtgattgttttaaagatcatggtatgatcacagggaccaaggctgtgtgcatatataactctggatttgaaaggaggagagttca

SEQ ID NO: 451997 - DNA, 120 bp, Artificial Sequence
  ENSG00000155903_38 (sequence is synthesized)
gccatctagttcttttcttcacatgacacttttaaacagccagtttgactggaattaaccaacttggcacagcctaaaaaaggagtaatgtgaaattaaattatttttctttgaaagtct

SEQ ID NO: 451998 - DNA, 120 bp, Artificial Sequence
  ENSG00000155903_39 (sequence is synthesized)
tttgaaataagagaccatgtaagtaggaccctaagacaaccaaggaatttgcttccagggccctcattcctctgctgttacttacaaatgttttaatttttactacctgatattctttct

SEQ ID NO: 451999 - DNA, 120 bp, Artificial Sequence
  ENSG00000155903_40 (sequence is synthesized)
ctaccttttccacatttgaaaatatacaaggcagctcacttcatcctaaaaacctaaaaactccaggaaggaaagaaaaggatgatatggggaaatttgccataaatgccggttctggtt

SEQ ID NO: 452000 - DNA, 120 bp, Artificial Sequence
  ENSG00000155903_41 (sequence is synthesized)
cttagtttagccatttccatcagttgaaattgtggtgtgatctgttgcttgtttcgttgttgttttgtttttgtgtagctttgttttttaatattcatttaataagatgatgggcaatag

SEQ ID NO: 452001 - DNA, 120 bp, Artificial Sequence
  ENSG00000155903_42 (sequence is synthesized)
caaacatttttactcccaggaatataatttatcaaattgaactattttatttgccaaagaaacttgtttttaatatcacgggtaatgggtaagtgtgaaaactaggcttttttttatgaa

SEQ ID NO: 452002 - DNA, 120 bp, Artificial Sequence
  ENSG00000155903_43 (sequence is synthesized)
acaaaaaaaggtgacgaataatatggcttttgtttctgtttctgaagcctgatttcatttatgccaggttttgaaaaacagatctttttcttaagtgaaagcacctttaatttgctctaa

SEQ ID NO: 452003 - DNA, 120 bp, Artificial Sequence
  ENSG00000155903_44 (sequence is synthesized)
cggtacatcctgtaaagacagaattctgcatagccttttaggtgtttttacagtatgtgaaaaatacaagactcattctagagttaaattaccaatcttggttgatattatctgcttcca

SEQ ID NO: 452004 - DNA, 120 bp, Artificial Sequence
  ENSG00000155903_45 (sequence is synthesized)
tttttattaatttggaaattaatatgttgctagtaaatattggtttttacagtacccagtttgaaaatgtaagttatcaaaacttaatgtagtgaatttgtgtaaccatgttgtattgtt

SEQ ID NO: 452005 - DNA, 120 bp, Artificial Sequence
  ENSG00000155903_46 (sequence is synthesized)
gagaatgtatttttatttaaattttattttcttatcaagagtattataaaaattaacttttgtaactgtcgcttggaaataactcaaataaattacaagaagcctgtctgttctttgtga

SEQ ID NO: 452006 - DNA, 120 bp, Artificial Sequence
  ENSG00000155903_47 (sequence is synthesized)
acttaactttgtgagaactgaatagaaccatgttgcagtggcagcaccacgccctttcttgccaaaggataaatggtctgtgagtagccccagcagagagtgggccagtgtccttttgtt

SEQ ID NO: 452007 - DNA, 120 bp, Artificial Sequence
  ENSG00000155903_48 (sequence is synthesized)
cagggctgtccattctgtggctttgttactaaagctgcacagaactctgaggcagtgaaagcgtggtagcaacattctggacataaacagaacacctacttctgaacttatagacaggcc

SEQ ID NO: 452008 - DNA, 120 bp, Artificial Sequence
  ENSG00000155903_49 (sequence is synthesized)
tgaaaaacctcttggataatagacccaaataatcaccctctggatgcacagacaattagaacattaactctcatctcaaaaactatacaaactttgggaagctgggggagtctgtccaaa

SEQ ID NO: 452009 - DNA, 120 bp, Artificial Sequence
  ENSG00000155906_0 (sequence is synthesized)
gcagtagcgggggtgggcgggagcgcccttccaggagatgggttggctgcagtagtgagaggctgggggtgcggctctttccctgcagtcctgccgaggaagcgtgcgtccctggcgctt

SEQ ID NO: 452010 - DNA, 120 bp, Artificial Sequence
  ENSG00000155906_1 (sequence is synthesized)
ccttcttctcttccggcggagaggacctaatgcactgcacagcatttgcaacggcagatgagtatcatctgggaaatctgtctcaagatctggcctcccacggatatgttgaagtaacaa

SEQ ID NO: 452011 - DNA, 120 bp, Artificial Sequence
  ENSG00000155906_2 (sequence is synthesized)
gcttgcctagagatgcagcaaatattttggtgatgggtgtggaaaattctgcaaaagaaggtgatcctggaacaatattcttcttcagggaaggagctgctgtgttttggaatgtgaaag

SEQ ID NO: 452012 - DNA, 120 bp, Artificial Sequence
  ENSG00000155906_3 (sequence is synthesized)
acaaaactatgaagcatgtgatgaaagttctagaaaaacatgaaattcagccctatgaaatcgcactggtacactgggaaaatgaagaacttaactacataaaaatagagggacagtcaa

SEQ ID NO: 452013 - DNA, 120 bp, Artificial Sequence
  ENSG00000155906_4 (sequence is synthesized)
aacttcacaggggggaaatcaagttaaattcagagctggatttagatgatgccattctagagaagtttgctttctccaatgctctatgcctttctgtaaaactggcaatttgggaagcat

SEQ ID NO: 452014 - DNA, 120 bp, Artificial Sequence
  ENSG00000155906_5 (sequence is synthesized)
tctattcagtcaattcctgaggctttaaaagctgggaagaaagtgaaactatctcatgaagaagttatgcagaaaatcggtgaactctttgctctaaggcaccgtataaacttgagttca

SEQ ID NO: 452015 - DNA, 120 bp, Artificial Sequence
  ENSG00000155906_6 (sequence is synthesized)
gacttcctgattactcctgatttctactgggacagagaaaacctggaaggactttacgataaaacgtgtcaattccttagcattggccgaagagttaaggtcatgaatgaaaaacttcag

SEQ ID NO: 452016 - DNA, 120 bp, Artificial Sequence
  ENSG00000155906_7 (sequence is synthesized)
cactgcatggaactaacagatctaatgcggaatcacctgaatgagaagagggcactccgcttggagtggatgattgtcatcctcattaccatagaggtaatgtttgagctgggacgagta

SEQ ID NO: 452017 - DNA, 120 bp, Artificial Sequence
  ENSG00000155906_8 (sequence is synthesized)
ctgggacgagtatttttctgatcaagtgataaccaaagtgtcactgcaagagatattcaagttctacaatcaaaaattaaatgttcggcccggcgcggtgcctcatgcctgtaatcccag

SEQ ID NO: 452018 - DNA, 120 bp, Artificial Sequence
  ENSG00000155906_9 (sequence is synthesized)
cagatctcatcatatattatcaaaagcacatcagtgccgaagaatcggtcatctaatgttaaaaccacttaaggaatttgaaaatacaacatgcagcacactgacaatacgtcaaagctt

SEQ ID NO: 452019 - DNA, 120 bp, Artificial Sequence
  ENSG00000155906_10 (sequence is synthesized)
ggatttgttccttcctgataaaacagctagtggtttgaataagtctcagatcctggaaatgaaccaaaaaaagtcagataccagcatgctgtctccattaaatgctgctcgttgccaaga

SEQ ID NO: 452020 - DNA, 120 bp, Artificial Sequence
  ENSG00000155906_11 (sequence is synthesized)
tgaaaaggcacaccttccaaccatgaaatcctttggtactcacaggagagtgacccacaaaccaaatctgttgggttctaaatggtttataaaaatattaaagaggcatttctcatctgt

SEQ ID NO: 452021 - DNA, 120 bp, Artificial Sequence
  ENSG00000155906_12 (sequence is synthesized)
atcaacggaaacatttgttccaaaacaagacttcccacaggtgaagagaccactaaaagcatccaggaccagacagccatccaggaccaaccttccagttctgtctgtgaacgaggacct

SEQ ID NO: 452022 - DNA, 120 bp, Artificial Sequence
  ENSG00000155906_13 (sequence is synthesized)
tttgacttccattcaaatctctttatatttccccttcttgtcctctgtacagtcacttcaattttttgtgtcaaaggatcttctgatattagctctacagactagataaggttggtgaat

SEQ ID NO: 452023 - DNA, 120 bp, Artificial Sequence
  ENSG00000155906_14 (sequence is synthesized)
aagatgagagtttggaagcctaatggtccatcagtaagttcttgtcaagtttcaagcaagagttcatgactgcttctgatctgtcatggtgacagtgagaatagaaataaatttaagaaa

SEQ ID NO: 452024 - DNA, 120 bp, Artificial Sequence
  ENSG00000155906_15 (sequence is synthesized)
gaatcatgtaagacaaatcaagtgatgggtaataagaggccatggagaagaaagaataaaggatgactgatgtttgcctggaggtgacaagtagaaaggtggaaaaacaataatgagagg

SEQ ID NO: 452025 - DNA, 120 bp, Artificial Sequence
  ENSG00000155906_16 (sequence is synthesized)
tcagagaggggaggtgacagactaaatctaagatatgctgagattagagtagcaacaagatatccaattagctccgtcatgcaggcatttagaagggcagaagcaaagtcgggaaaagag

SEQ ID NO: 452026 - DNA, 71 bp, Artificial Sequence
  ENSG00000155906_17 (sequence is synthesized)
agggcaacagtgagactcagtctcaaaaataaacaataaaataaataaataaatgttcactactgggtgat

SEQ ID NO: 452027 - DNA, 120 bp, Artificial Sequence
  ENSG00000155906_18 (sequence is synthesized)
aacaataaaataaataaataaatgttcactactgggtgatcatttaataggtgtttttttaatcaagaaattatctttttcagcccagtatatcgtgtgaataaaattatgaagaatcta

SEQ ID NO: 452028 - DNA, 120 bp, Artificial Sequence
  ENSG00000155906_19 (sequence is synthesized)
atcaactttaaagatattttaaacttgatgaagacttctgaatctatcagaaaacaggttagaatgtctgtcttcaagtcttgattctgaaaagtagcccctgagcctgtttcattttgg

SEQ ID NO: 452029 - DNA, 120 bp, Artificial Sequence
  ENSG00000155906_20 (sequence is synthesized)
ccagttgagtgtggcttccctttcagaataatccattccatctttttgcctggcgggagggagcaagttcttttcaagattgagctgaaatttgcctcccagtaacttcattctcttcat

SEQ ID NO: 452030 - DNA, 120 bp, Artificial Sequence
  ENSG00000155906_21 (sequence is synthesized)
cttcatcccatcccttgtatcacccttggagatgtttgaagaaaattctggagttctagctttgcagaatggagtccagtagggtgctcagcagccgtcacagatgcttcagcctcttgg

SEQ ID NO: 452031 - DNA, 120 bp, Artificial Sequence
  ENSG00000155906_22 (sequence is synthesized)
cccatagttctgtggtgaagagcaaacatttacacgtttatgggaactgtagctgttttcatttcattgattataagcagggagaactcttacccattagaagtagttgggctgtgttaa

SEQ ID NO: 452032 - DNA, 120 bp, Artificial Sequence
  ENSG00000155906_23 (sequence is synthesized)
gactgtactgaaagaaatcacgcatgtgcaaaagagatcacgattcatctacattaaacccacattaaggagcacagtaggtgttctttgaaggtagaaagacatattcctgaatttggt

SEQ ID NO: 452033 - DNA, 120 bp, Artificial Sequence
  ENSG00000155906_24 (sequence is synthesized)
taatgggaattctctgtaaaaatatatcactgcatcataatgctaaataggcttaattgctacagaaaagtttctttgaatctgagacaccaagatgccactggagagaaaaactgctgc

SEQ ID NO: 452034 - DNA, 120 bp, Artificial Sequence
  ENSG00000155906_25 (sequence is synthesized)
cagttaaactatgacaatactttttttatcagaggattaaaattttacacttactgaaatatcttttaatcttagctggatataaattatatcacattccctcttgggcatatatgaaaa

SEQ ID NO: 452035 - DNA, 120 bp, Artificial Sequence
  ENSG00000155906_26 (sequence is synthesized)
cattttcttttgaaaggattgtatcataaaagtggatgttgaatctctttataaagatgacaaagttaagaattaaaatgtatttacagagaactcattaaaatcagtatgatttattaa

SEQ ID NO: 452036 - DNA, 120 bp, Artificial Sequence
  ENSG00000155906_27 (sequence is synthesized)
tagcagtcactcagacttcttcatcaaggtctttgaagcctaataaatatccaaagggattcagaatcttaatttttaacaattaatgatacatataaaaacaaaatacaggtgataaca

SEQ ID NO: 452037 - DNA, 120 bp, Artificial Sequence
  ENSG00000155906_28 (sequence is synthesized)
aacacatgaaaatagagtttataaaagatttggttattggtctaaggaaactgaaaaagaggaccaatattaagtccagtctaagaatgggactgtaaaaaaaaataaaataaaaaaaaa

SEQ ID NO: 452038 - DNA, 120 bp, Artificial Sequence
  ENSG00000155906_29 (sequence is synthesized)
aagagttaaggtcagaagtctggcatggcctaaagttaagatgttgattcctctttggagactgcgagtggaatccatttcctcaccttttccagtgactggaggccacccatattcctt

SEQ ID NO: 452039 - DNA, 120 bp, Artificial Sequence
  ENSG00000155906_30 (sequence is synthesized)
gctcatggccccctcctccatctagcaaaggcctgtggaatcctcatattgtatcattctgaactcttctgccccgcatttccacttttaaggacccttgtgattacattgggcttaccc

SEQ ID NO: 452040 - DNA, 120 bp, Artificial Sequence
  ENSG00000155906_31 (sequence is synthesized)
caggaagaaggccaaatgttgctaaaggcaaagtggcagaaacactgtacttatatttttaaccttgttcttttactagaattaacttagaatgtatctgttttacaaatttttctaaca

SEQ ID NO: 452041 - DNA, 120 bp, Artificial Sequence
  ENSG00000155906_32 (sequence is synthesized)
gaaatatgcctgctacctagggaaatattatatatgttttaaacattaatttaaaaacttgaactttgaattccttttcttttagcttgggatgtggtaatgccagccacactcctcaga

SEQ ID NO: 452042 - DNA, 120 bp, Artificial Sequence
  ENSG00000155918_0 (sequence is synthesized)
gatttcatcttccaggatccaccttgattaaatctcttgtccccagccctcctggtccccaatggcagcagccgccatcccagctttgcttctgtgcctcccgcttctgttcctgctgtt

SEQ ID NO: 452043 - DNA, 120 bp, Artificial Sequence
  ENSG00000155918_1 (sequence is synthesized)
cggctggtcccgggctaggcgagacgaccctcactctctttgctatgacatcaccgtcatccctaagttcagacctggaccacggtggtgtgcggttcaaggccaggtggatgaaaagac

SEQ ID NO: 452044 - DNA, 120 bp, Artificial Sequence
  ENSG00000155918_2 (sequence is synthesized)
ttttcttcactatgactgtggcaacaagacagtcacacccgtcagtcccctggggaagaaactaaatgtcacaatggcctggaaagcacagaacccagtactgagagaggtggtggacat

SEQ ID NO: 452045 - DNA, 120 bp, Artificial Sequence
  ENSG00000155918_3 (sequence is synthesized)
gagcagaaagctgaaggacacagcagtggatcttggcagttcagtatcgatggacagaccttcctactctttgactcagagaagagaatgtggacaacggttcatcctggagccagaaag

SEQ ID NO: 452046 - DNA, 120 bp, Artificial Sequence
  ENSG00000155918_4 (sequence is synthesized)
atgaaagaaaagtgggagaatgacaaggatgtggccatgtccttccattacatctcaatgggagactgcataggatggcttgaggacttcttgatgggcatggacagcaccctggagcca

SEQ ID NO: 452047 - DNA, 120 bp, Artificial Sequence
  ENSG00000155918_5 (sequence is synthesized)
agtgcaggagcaccactcgccatgtcctcaggcacaacccaactcagggccacagccaccaccctcatcctttgctgcctcctcatcatcctcccctgcttcatcctccctggcatctga

SEQ ID NO: 452048 - DNA, 120 bp, Artificial Sequence
  ENSG00000155918_6 (sequence is synthesized)
tcaacctcgcccttctgtctggccagctgcccaccacctacggtgtatgtccagcagcctccagcagatgatgatgacaccatggacccaatagctcattcactgccttgattccttttg

SEQ ID NO: 452049 - DNA, 120 bp, Artificial Sequence
  ENSG00000155918_7 (sequence is synthesized)
ccaacaatttaaccagtgattattcctaacatattatgcaattttctcttggtgctacctgatggaattcctgcacttaaagttctggctgactaaacaagatatgtcaacattttcttt

SEQ ID NO: 452050 - DNA, 120 bp, Artificial Sequence
  ENSG00000155918_8 (sequence is synthesized)
cttctctttttgtttggaaaatcaagtacttctttgaatgatgatttctttctttcattactgacatgattgtcagtaaaacaatcatgttagacttcagacctccagggattctttcca

SEQ ID NO: 452051 - DNA, 120 bp, Artificial Sequence
  ENSG00000155918_9 (sequence is synthesized)
tccatgtcctgaaagagaattgtttaattatttaataagaaaaaaatttatattaatgattgtttcctttagtaatttattgctgtgtactgatatttaaataaagagttatatttccca

SEQ ID NO: 452052 - DNA, 120 bp, Artificial Sequence
  ENSG00000155926_0 (sequence is synthesized)
atcatttgctgcgaatggagaacatctcaggcagccctgatgctccaccgtccttgcagagagaagcttgctcagagtggttactgaaaacaggaacctgcccttctgcaagccctgtgc

SEQ ID NO: 452053 - DNA, 120 bp, Artificial Sequence
  ENSG00000155926_1 (sequence is synthesized)
cttcctcgttcctagcagaggaagtatgcggccagtttagcaactgcagttcttctgtgtagcatgggctgcttctccacaaccgcgagaagcccggctgcctgtttattctggagcagc

SEQ ID NO: 452054 - DNA, 120 bp, Artificial Sequence
  ENSG00000155926_2 (sequence is synthesized)
agcagttgacagacggagaggcagtgactctgcacccagcaatccctctgcagacagctcccacaggagtcatgcccagtgtgtgaaggctctgggcatcaccagcggccccagggaaaa

SEQ ID NO: 452055 - DNA, 120 bp, Artificial Sequence
  ENSG00000155926_3 (sequence is synthesized)
agaaagaaatgggaaacagcatgaaatccacccctgcgcctgccgagaggcccctgcccaacccggagggactggatagcgacttccttgccgtgctaagtgactacccgtctcctgaca

SEQ ID NO: 452056 - DNA, 120 bp, Artificial Sequence
  ENSG00000155926_4 (sequence is synthesized)
tcagccccccgatattccgccgaggggagaaactgcgtgtgatttctgatgaagggggctggtggaaagctatttctcttagcactggtcgagagagttacatccctggaatatgtgtgg

SEQ ID NO: 452057 - DNA, 120 bp, Artificial Sequence
  ENSG00000155926_5 (sequence is synthesized)
ccagagtttaccatggctggctgtttgagggcctgggcagagacaaggccgaggagctgctgcagctgccagacacaaaggtcggctccttcatgatcagagagagtgagaccaagaaag

SEQ ID NO: 452058 - DNA, 120 bp, Artificial Sequence
  ENSG00000155926_6 (sequence is synthesized)
ggttttactcactgtcggtgagacacaggcaggtaaagcattaccgcattttccgtctgcccaacaactggtactacatttccccgaggctcaccttccagtgcctggaggacctggtga

SEQ ID NO: 452059 - DNA, 120 bp, Artificial Sequence
  ENSG00000155926_7 (sequence is synthesized)
accactattctgaggtggctgatggcctgtgctgtgtgctcaccacgccctgcctgacacaaagcacggctgccccagcagtgagggcctccagctcacctgtcaccttgcgtcagaaga

SEQ ID NO: 452060 - DNA, 120 bp, Artificial Sequence
  ENSG00000155926_8 (sequence is synthesized)
ctgtggactggaggagagtgtccagactgcaggaggaccccgagggaacagagaacccgcttggggtagacgagtcccttttcagctatggccttcgagagagcattgcctcttacctgt

SEQ ID NO: 452061 - DNA, 120 bp, Artificial Sequence
  ENSG00000155926_9 (sequence is synthesized)
ccctgaccagtgaggacaacacctcctttgatcgaaagaagaaaagcatctccctgatgtatggtggcagcaagagaaagagctcattcttctcatcaccaccttactttgaggactagc

SEQ ID NO: 452062 - DNA, 120 bp, Artificial Sequence
  ENSG00000155926_10 (sequence is synthesized)
caagaacagacacaatggttcatgcccaaaaggaacagaagttccaactattgcctgggatcttgcgaaaagcgaggttccctgatccctgggagcctcacgtattttagaagccaagag

SEQ ID NO: 452063 - DNA, 120 bp, Artificial Sequence
  ENSG00000155926_11 (sequence is synthesized)
aagccacatggagactcaaattcgcatcttctctatccacatcatgaccaaaggaacccctccctggtgtctgatcagggctgtggcatcacgaaacattggatcatgacatgtcgggcg

SEQ ID NO: 452064 - DNA, 120 bp, Artificial Sequence
  ENSG00000155926_12 (sequence is synthesized)
acagttacactccaaggtcattggagagaacttctgtatgggcaagcctgagagggagaggaaacaaaagctgtgtcctggcagaaggtctgggtttgcagatgggtgccctgaatggaa

SEQ ID NO: 452065 - DNA, 120 bp, Artificial Sequence
  ENSG00000155926_13 (sequence is synthesized)
ctactttaactaatccatagggacttctggtatgctttcctctctttttaaaggaacttcgtgacactaaacattagcccaaaggacttcttagccttcaattgggagatacctttggtc

SEQ ID NO: 452066 - DNA, 120 bp, Artificial Sequence
  ENSG00000155926_14 (sequence is synthesized)
tgctcctgcaccaaagccatatgggtggaagtcagttggcctccctggttctgcagagggccagaagaatgagagagaggaagactgctggcagggaaatcgaggaggcgagactagaac

SEQ ID NO: 452067 - DNA, 120 bp, Artificial Sequence
  ENSG00000155926_15 (sequence is synthesized)
tgcaccagcttccctgatgtctgcagccatggctttgcagcgcagacagagcttctctgggatgctgggattcttgcctgtatgaatgcatcaagtattcatttattgcccgaataggca

SEQ ID NO: 452068 - DNA, 120 bp, Artificial Sequence
  ENSG00000155926_16 (sequence is synthesized)
ttgcattaagtcctctgtaaggtgtcaggcaagccaaaaaaaaaaaaaagatgcgtaagtcctaacccccaacagaggtgttcacagtgtagacagggaaaaaatgtataaacaaatgtg

SEQ ID NO: 452069 - DNA, 120 bp, Artificial Sequence
  ENSG00000155926_17 (sequence is synthesized)
taaaaagagaaatcagctcatggcttaggatggaattagagacaggtgagggacactcaggagctcattttccagctgctcttcagagtggaagggctggctggatcgggtaggtaagaa

SEQ ID NO: 452070 - DNA, 120 bp, Artificial Sequence
  ENSG00000155926_18 (sequence is synthesized)
tagctggattttttagaaaagaaatggatacagtctaaagaattaactcacccggtactttattctaagaagggtctggcatccatatgaggaaaaatgctcagctccaggaaagatggg

SEQ ID NO: 452071 - DNA, 120 bp, Artificial Sequence
  ENSG00000155926_19 (sequence is synthesized)
gagtccaagtggattaatgatgtcatgcataattttaagagacaagggagaaaacacaatgtatagccagagaaggagaagctcccatccaaatcctactaggaagagagtgggctgcag

SEQ ID NO: 452072 - DNA, 120 bp, Artificial Sequence
  ENSG00000155926_20 (sequence is synthesized)
atgaatctgtgactcatgtttccctgtttcaaagggatcctggggaaggaggggaacatgcttgcagtatctctccctgtctgtctgctcacataagcattccgtccatctgagctcatc

SEQ ID NO: 452073 - DNA, 120 bp, Artificial Sequence
  ENSG00000155926_21 (sequence is synthesized)
gtgctactggtatgtgtatgtgcagttacacagttttctgtatcatagattctagtgtgtttatacaaggagacatctgtggtttccccaaccgttccaaaaggctatttcaaaggaacc

SEQ ID NO: 452074 - DNA, 120 bp, Artificial Sequence
  ENSG00000155926_22 (sequence is synthesized)
agccaacgtatgagaaatgaatgtaacactgtggacattgacttcccgcataaggcagggtgaccccctgaactccagatgtctgcacagtatcttatgtgttgttttccgttgtgacga

SEQ ID NO: 452075 - DNA, 120 bp, Artificial Sequence
  ENSG00000155926_23 (sequence is synthesized)
atgtgattggaacatttggggagcacccagagggatttctcagtgggaagcattacactttgctaaatcatgtatttattcctgattaaaacaaacctaataaatatttaacccttggca

SEQ ID NO: 452076 - DNA, 120 bp, Artificial Sequence
  ENSG00000155926_24 (sequence is synthesized)
aactttgctgtcattgggaccccctgggtgggccataggtggcctggggtggtatgtgggggagggtcttcagagggacttgatggatcctgtacccaccctccgtctttggtctgaaga

SEQ ID NO: 452077 - DNA, 120 bp, Artificial Sequence
  ENSG00000155926_25 (sequence is synthesized)
gatgcacgatgctctctaaactgggtcattctccacttggagggctcagggcacggttgactttccccgtctgtctcctataccacaggctctgggcatcaccagcggccccagggaaaa

SEQ ID NO: 452078 - DNA, 120 bp, Artificial Sequence
  ENSG00000155926_26 (sequence is synthesized)
tcagccccccgatattccgccgaggggagaaactgcgtgtgatttctgagtgagtcagctctccaaaacttgtgcaatcttcaaagcaggataaacttggtttgggagaaaagtatttga

SEQ ID NO: 452079 - DNA, 120 bp, Artificial Sequence
  ENSG00000155926_27 (sequence is synthesized)
aaatttgacccatactgcaaccttcctctttaatgtggccagtgctctagaaccttccatagctccccactgcctggtagatcaaatttaaattccttaacttggcttttgagatccttt

SEQ ID NO: 452080 - DNA, 120 bp, Artificial Sequence
  ENSG00000155926_28 (sequence is synthesized)
atgatccagcctcttctcatattcttcttatctcccaccacatgtgcagtgttgatgttatgtaggaatgaagaccgggaaggcagcccccagggtctggaaatccttcggatgagaaaa

SEQ ID NO: 452081 - DNA, 120 bp, Artificial Sequence
  ENSG00000155926_29 (sequence is synthesized)
aacaaaaatttgccttctctcctcttacctctgcagtctgattcaatatgggctatagaacatgacagaagttctaagccccttttatttagatcttcactgattcagatatatgaaact

SEQ ID NO: 452082 - DNA, 120 bp, Artificial Sequence
  ENSG00000155926_30 (sequence is synthesized)
atctttggctatactgcagagcataaatcaacatagtaaacatttatttttaaaaagcctccaacagttgggaacattagctgctaatccctgaaaagcagctatttctagcacatggga

SEQ ID NO: 452083 - DNA, 120 bp, Artificial Sequence
  ENSG00000155926_31 (sequence is synthesized)
aaaataagatcatttgctgcgaatggagaacatctcaggcagccctgatgctccaccgctaaatcccagtttgtggaatatgccttgctcaataaagttttactaaagaaatgacaggga

SEQ ID NO: 452084 - DNA, 120 bp, Artificial Sequence
  ENSG00000155926_32 (sequence is synthesized)
ctgtttattctggagcagcagcagttgacagacggagaggcagtgactctgcacccagcaatccctctgcagacagctcccacaggagtcatgcccagctctgggcatcaccagcggccc

SEQ ID NO: 452085 - DNA, 120 bp, Artificial Sequence
  ENSG00000155926_33 (sequence is synthesized)
agctccctgcagcccacacgctgctggggaggccagtggggaagcaaggggactagagacaggcagtggggagccggctgggcactgccacgggcctggccaacatcaggcctgatgact

SEQ ID NO: 452086 - DNA, 120 bp, Artificial Sequence
  ENSG00000155926_34 (sequence is synthesized)
cctgctggaaatttttccagcaactgagaacaaaactgaacgcagtgtgtaggcagcatgctgtgcagatagaatgtggcctttggtatgggcctgggctgtgctctcaagctctgtgac

SEQ ID NO: 452087 - DNA, 120 bp, Artificial Sequence
  ENSG00000155926_35 (sequence is synthesized)
tgatttgtctgaactcagttttctcatctgtgaaatggagagaacacctctcccttgtaagggtgtggtgagattcaaatgtcatagtatttgtgttgctcttgctgcacagacagtccc

SEQ ID NO: 452088 - DNA, 120 bp, Artificial Sequence
  ENSG00000155926_36 (sequence is synthesized)
gatatcagtttcctctgtgctccgtaactaaatcagacagctccgagaatcacatgtgtcctctcacacagtcaccatcatcactagcattacaatttccttgcatcatatgcattaagt

SEQ ID NO: 452089 - DNA, 120 bp, Artificial Sequence
  ENSG00000155926_37 (sequence is synthesized)
accacagtaaaaacacaaatagagtgagctctttgtcatgatgcaaagcaagggtcccaagttccaattttagccttacaaattactaatttactgcttctctctctctaagcctcagct

SEQ ID NO: 452090 - DNA, 120 bp, Artificial Sequence
  ENSG00000155926_38 (sequence is synthesized)
actgctacccacagggcccccactccacctgctcccagacgaggccaactcctggccaagcttaggggcacagcggaggcgctctgtttctgatttttctcgccttccttggagatgcct

SEQ ID NO: 452091 - DNA, 120 bp, Artificial Sequence
  ENSG00000155926_39 (sequence is synthesized)
gtgcttggaagggaaggcagaacattgcatcttggaacaaatctgcttttgatcatgcaaatgaatgcctggataatgtaggcagactgtcaatttcaccagttagaaagaaagagaaaa

SEQ ID NO: 452092 - DNA, 120 bp, Artificial Sequence
  ENSG00000155926_40 (sequence is synthesized)
gggggagaaattccccatgacagcgactgatgaagaatttcaatagaaagctgctacttcagaaaataagatcatttgctgcgaatggagaacatctcaggcagccctgatgctccaccg

SEQ ID NO: 452093 - DNA, 120 bp, Artificial Sequence
  ENSG00000155926_41 (sequence is synthesized)
agctcaagcaggcaattcccaggcaatcttggggtcagcattccagaaattttacctgtttcatcaataagctctgaagccccatgtgcctgagtttctctgcttgagactcacgtactt

SEQ ID NO: 452094 - DNA, 120 bp, Artificial Sequence
  ENSG00000155926_42 (sequence is synthesized)
gcccagtgtgtgaagatctacaatctagatcagagcagcaagatggcaacatagaaagattgtgccgtaatagctgcacctgtgtcaacattctgggtcggccaccaaagaactctgtga

SEQ ID NO: 452095 - DNA, 120 bp, Artificial Sequence
  ENSG00000155926_43 (sequence is synthesized)
ctctgtacaagtcactttgccccttcgagtattttccttgtaaaaagaagaccagtttctctgtatgtttgaaagaagtttacatgtactatctaggagataataggtactaaataggag

SEQ ID NO: 452096 - DNA, 120 bp, Artificial Sequence
  ENSG00000155926_44 (sequence is synthesized)
ctattggtatcatttctaaatcagacaattaaaatatatccaatcccttttacatttcctaggcagaaagctattaataaacagtgttaaatatgatggattaaacagctaaagcaatga

SEQ ID NO: 452097 - DNA, 120 bp, Artificial Sequence
  ENSG00000155926_45 (sequence is synthesized)
attccccatgacagcgactgatgaagaatttcaatagaaagctgctacttcagaaaataagatcatttgctgcgaatggagaacatctcaggcagccctgatgctccaccgctggaggag

SEQ ID NO: 452098 - DNA, 120 bp, Artificial Sequence
  ENSG00000155926_46 (sequence is synthesized)
gtcacgtgacattcacaggcatccagtcccagggtacctcctgctgcctggccccactgggtttatttgaatagtctgacttgatcaatccacagagccttctaacaattcaagtccttg

SEQ ID NO: 452099 - DNA, 120 bp, Artificial Sequence
  ENSG00000155926_47 (sequence is synthesized)
gcagagtataccagggcacgcttacatttctcaaacagctgggcgcgtgactttcagcattgtcaccacctaccatgcccctttgaaatctcaggcccagttccccatggcagcagccag

SEQ ID NO: 452100 - DNA, 120 bp, Artificial Sequence
  ENSG00000155926_48 (sequence is synthesized)
tcactggcgcagatggctgccctgtctgccgagcctgacagggaagtggactgagccaggttcctgcgctgcctccaggactggatagcgacttccttgccgtgctaagtgactacccgt

SEQ ID NO: 452101 - DNA, 120 bp, Artificial Sequence
  ENSG00000155926_49 (sequence is synthesized)
gtgtgaagcccggacacagcaccttctgtcacggagactgaactctgactggcaagacagaacgggtgggagtgcaagcaacagcagagaagactgttagcgtagaagaacccaggcctc

SEQ ID NO: 452102 - DNA, 120 bp, Artificial Sequence
  ENSG00000155926_50 (sequence is synthesized)
taggactgactcaaactttctcatctcatgaccctgggctctgggcatcaccagcggccccagggaaaaagaaagaaatgggaaacagcatgaaatccacccctgcgcctgccgagaggc

SEQ ID NO: 452103 - DNA, 120 bp, Artificial Sequence
  ENSG00000155926_51 (sequence is synthesized)
attatcctcatctgtcaagtgtcggaagctggaagttggcaaagaaatgcaaagcacattggaaatggaaaagaaagaaggaggcatccattgataaacactaagttacttcttcatgtc

SEQ ID NO: 452104 - DNA, 120 bp, Artificial Sequence
  ENSG00000155926_52 (sequence is synthesized)
cagaggactctacatgccacatgctcatcttgcaaaacagagataaccacctgaatcctttgaagactggaattctgcgagtttaattttagtattcatgatcttaattgtgaataccag

SEQ ID NO: 452105 - DNA, 120 bp, Artificial Sequence
  ENSG00000155926_53 (sequence is synthesized)
atgccacttccatgcttaggatgatgaagctaaacaaaactgaagcaggagctgccgtgggagtcacgttctgaaagagatgggagtcacgtgactctcctacatcagctgcttgccctg

SEQ ID NO: 452106 - DNA, 120 bp, Artificial Sequence
  ENSG00000155926_54 (sequence is synthesized)
gagccattcattcactagcaagcatgcatcaatgccttcatgctgaagatgtgaggctgcagctggcacgagctgggggtggtaaggaaccaggaggagtgacataattatgaccctatg

SEQ ID NO: 452107 - DNA, 120 bp, Artificial Sequence
  ENSG00000155926_55 (sequence is synthesized)
agaaagctgctacttcagaaaataagatcatttgctgcgaatggagaacatctcaggcagccctgatgctccaccggactggatagcgacttccttgccgtgctaagtgactacccgtct

SEQ ID NO: 452108 - DNA, 120 bp, Artificial Sequence
  ENSG00000155926_56 (sequence is synthesized)
agaaaataagatcatttgctgcgaatggagaacatctcaggcagccctgatgctccaccggcaaagtgagtcacaaagaagcataagtctcaagccccatttaggcggatgctttttaaa

SEQ ID NO: 452109 - DNA, 120 bp, Artificial Sequence
  ENSG00000155926_57 (sequence is synthesized)
taaggaaggcactgggtcaagaagagatagtcctgctcccaacccagtcaataaggaaaggagcaaccttgggctaacttatctcttctgctctctgggactcaacttctccctcagtaa

SEQ ID NO: 452110 - DNA, 120 bp, Artificial Sequence
  ENSG00000155926_58 (sequence is synthesized)
aatgaaggaagttggacctttcagctctaacatggtgctcctggcacagagtggtaaacagctgggaaatgttatgggagggcacagcacagtgcagagactagaagtcagtgtgtctag

SEQ ID NO: 452111 - DNA, 120 bp, Artificial Sequence
  ENSG00000155926_59 (sequence is synthesized)
gttcaaatcctgcctctgtcacttactggctgtgtgccagtgaacaagctttttatgcatcagttccctttcctcacctgtcaagtagagatcataacatagaacgacagggataataat

SEQ ID NO: 452112 - DNA, 120 bp, Artificial Sequence
  ENSG00000155926_60 (sequence is synthesized)
atatgataatatgatcaaagtgtagggttgttaggagaataagatgtaatgatacatgtgtagttcttggagcaatgccaggcattacagtaagcactcgataaatattagctctattct

SEQ ID NO: 452113 - DNA, 120 bp, Artificial Sequence
  ENSG00000155926_61 (sequence is synthesized)
ccagtgaggcctctgcagcctcctgggtggctttggagccctgaacacctgggcacaaatcttggcttccttccttccatgtgagggtcctgtaaaagtcgcttcacctcctggagttac

SEQ ID NO: 452114 - DNA, 120 bp, Artificial Sequence
  ENSG00000155957_0 (sequence is synthesized)
ctcgctcggtgttcgcccgccgacgccgcacggcttgctggggctgggctcttcctcgcggaagtggggaggaggcggttgcggttagtggaccgggaccggtaggggtgctgttgccat

SEQ ID NO: 452115 - DNA, 120 bp, Artificial Sequence
  ENSG00000155957_1 (sequence is synthesized)
catggctgaccccgacccccggtaccctcgctcctcgatcgaggacgacttcaactatggcagcagcgtggcctccgccaccgtgcacatccgaatggcctttctgagaaaagtctacag

SEQ ID NO: 452116 - DNA, 120 bp, Artificial Sequence
  ENSG00000155957_2 (sequence is synthesized)
cattctttctctgcaggttctcttaactacagtgacttcaacagtttttttatactttgagtctgtacggacatttgtacatgagagtcctgccttaattttgctgtttgccctcggatc

SEQ ID NO: 452117 - DNA, 120 bp, Artificial Sequence
  ENSG00000155957_3 (sequence is synthesized)
tctgggtttgatttttgcgttgattttaaacagacataagtatccccttaacctgtacctactttttggatttacgctgttggaagctctgactgtggcagttgttgttactttctatga

SEQ ID NO: 452118 - DNA, 120 bp, Artificial Sequence
  ENSG00000155957_4 (sequence is synthesized)
tgtatatattattctgcaagctttcatactgactactacagtattttttggtttgactgtgtatactctacaatctaagaaggatttcagcaaatttggagcagggctgtttgctctttt

SEQ ID NO: 452119 - DNA, 120 bp, Artificial Sequence
  ENSG00000155957_5 (sequence is synthesized)
gtggatattgtgcctgtcaggattcttgaagttttttttttatagtgagataatggagttggtcttagccgctgcaggagcccttcttttctgtggattcatcatctatgacacacactc

SEQ ID NO: 452120 - DNA, 120 bp, Artificial Sequence
  ENSG00000155957_6 (sequence is synthesized)
actgatgcataaactgtcacctgaagagtacgtattagctgccatcagcctctacttggatatcatcaatctattcctgcacctgttacggtttctggaagcagttaataaaaagtaatt

SEQ ID NO: 452121 - DNA, 120 bp, Artificial Sequence
  ENSG00000155957_7 (sequence is synthesized)
aaaagtatctcagctcaactgaagaacaacaaaaaaaatttaatgagaaaaaaggattaaagtaattggaagcagtatatagaaactgtttcattaagtaataaagtttgaaacaatgat

SEQ ID NO: 452122 - DNA, 120 bp, Artificial Sequence
  ENSG00000155957_8 (sequence is synthesized)
taaatactgttacaatctttatttgtatcatatgtaattttgagagctttaaaatcttactattctttatgatacctcatttctaaatccttgatttaggatctcagttaagagctatca

SEQ ID NO: 452123 - DNA, 71 bp, Artificial Sequence
  ENSG00000155957_9 (sequence is synthesized)
ttctaaatccttgatttaggatctcagttaagagctatcaaaattctattaaaaatgcttaccgaggcagg

SEQ ID NO: 452124 - DNA, 80 bp, Artificial Sequence
  ENSG00000155957_10 (sequence is synthesized)
ttttcttcctaaattagccacgcatagcagttcgtttgcaattcaaaaataattttatgagtagataagaatatcagttt

SEQ ID NO: 452125 - DNA, 120 bp, Artificial Sequence
  ENSG00000155957_11 (sequence is synthesized)
ctgaattattaagtaatattgatttggctttgattctgaagtagtagagtctttaccattataaactgtaaatctctttttgcttaaaaggaaaaaaatgtaaaagataaattccacaga

SEQ ID NO: 452126 - DNA, 120 bp, Artificial Sequence
  ENSG00000155957_12 (sequence is synthesized)
cagagaattattcagtattacattaaaatgttaatgactttttattttaaattgtactaacattaaaagttggcctgaaagtcagatattatgacaaaatttgacattaattgtttttaa

SEQ ID NO: 452127 - DNA, 120 bp, Artificial Sequence
  ENSG00000155957_13 (sequence is synthesized)
tagatttcatttgaaattatagaatggtaatgtggttagaggacaccaaagatactgggtcatcagccattaagtatatctatttcaaaattaaaatatttgggaagtattgtcttatgg

SEQ ID NO: 452128 - DNA, 120 bp, Artificial Sequence
  ENSG00000155957_14 (sequence is synthesized)
tttcatttgtgttggtccacacagcatgttaggtcagtgtaccagtaaccaatgaaattttgtcaaattccctcactgtactagtttgttaggctgccataacaaagttctacagcttgg

SEQ ID NO: 452129 - DNA, 120 bp, Artificial Sequence
  ENSG00000155957_15 (sequence is synthesized)
gtggcttcaacaagaaatttgttttcccacagttctggaggctaaaagtccaagatcaaggtgttagcagggttggtttcctttgaggcctttctctttgatttgtagatggccatcttc

SEQ ID NO: 452130 - DNA, 120 bp, Artificial Sequence
  ENSG00000155957_16 (sequence is synthesized)
tccctgtgtctttaaatggccttccctctgtacttgtctgtgcccaaatttcttcttcttatgaggacaccagtcatactggattagggcccacactgaggacctcatttttccttaatt

SEQ ID NO: 452131 - DNA, 120 bp, Artificial Sequence
  ENSG00000155957_17 (sequence is synthesized)
atctctttcaaaacctatctccaaatacagtcacattctgaagtgctgggattaggatttcttcatgtgaattttggggggactacaactcagcccataacaccccctaagtatttccca

SEQ ID NO: 452132 - DNA, 120 bp, Artificial Sequence
  ENSG00000155957_18 (sequence is synthesized)
gctattaagttgaaataaacttgtagtatcaatttaagcttgcatgatttgtagatgtaaatttgactttattatcattaactgttgaattatcaagtgtatgatgcagtgcaatcaagt

SEQ ID NO: 452133 - DNA, 120 bp, Artificial Sequence
  ENSG00000155957_19 (sequence is synthesized)
ttaacagcatggtgggtaagagcatctagattagaatcattgcagtccaaccaggtgcttaagtgacatttggcgaattatttatccttccttaggtcttctgcctcatcttcataatgg

SEQ ID NO: 452134 - DNA, 120 bp, Artificial Sequence
  ENSG00000155957_20 (sequence is synthesized)
gaataatgatgtctagcttattgggctgttataaggattaaatgagatagataaataaactaaactaagtgcttaattaatgtcagctgatggtattaataccattttcttttttttttt

SEQ ID NO: 452135 - DNA, 120 bp, Artificial Sequence
  ENSG00000155957_21 (sequence is synthesized)
gtggatattgcctgtcaggattcttgaagtttttttttatagtgagataatggagttggtcttagccgctgcaggagcccttcttttctgtggattcatcatctatgacacacactcact

SEQ ID NO: 452136 - DNA, 120 bp, Artificial Sequence
  ENSG00000155957_22 (sequence is synthesized)
gtcgtggaaatgagtcggttgatcactgtgactgacgtacacacgagtggaatccacggcctgatgtttttgttctgtggggtttcgcgttacaggcttatatttaccgtcctgtgctag

SEQ ID NO: 452137 - DNA, 120 bp, Artificial Sequence
  ENSG00000155957_23 (sequence is synthesized)
gctggaagctccctgacggcactatttcctctccgcagggcccagaatgcaacaggtctttgaggattattgaggaagttgctcaacacagaagcttcctaagtcagtctaaattgtgtt

SEQ ID NO: 452138 - DNA, 120 bp, Artificial Sequence
  ENSG00000155957_24 (sequence is synthesized)
ttaagttattacgtagtagccaatgggcagaaatttttgaatttaaaatgctcagcttcatctacgtggaagccattgcctgctctagtttggtcatttgatcgccgaaacagccccaga

SEQ ID NO: 452139 - DNA, 120 bp, Artificial Sequence
  ENSG00000155957_25 (sequence is synthesized)
ctttcagcctgtttaggcagctggaacttgttctggaaaaggaaagatgaagatagttctgatgtgctaagaatcttagtgcctagaacttgttctggaaaaggaaagatgaagatagtt

SEQ ID NO: 452140 - DNA, 120 bp, Artificial Sequence
  ENSG00000155957_26 (sequence is synthesized)
ctgatgcaccaagaatcttggtgcctagcatttatatttttggaattgaattttgaaattattttggccagtgaactcagcttttttttaaaaaaaattaattgtggtaaaatacagcct

SEQ ID NO: 452141 - DNA, 120 bp, Artificial Sequence
  ENSG00000155957_27 (sequence is synthesized)
gtgttaagttattcacatggttgtgcactgttaaaagaaaaactttagacacattaaatctaacggagtttgagcacagaatgatttgcgaattgggcaggtcccggaaccagaataagg

SEQ ID NO: 452142 - DNA, 120 bp, Artificial Sequence
  ENSG00000155957_28 (sequence is synthesized)
agatccaagatgggcattatattcattgtatgtttacaaattcttacattttagttattcttcagcaaaaaatccagatggatgtttttttcagaaagtgttgaatgggtttacaaagtt

SEQ ID NO: 452143 - DNA, 120 bp, Artificial Sequence
  ENSG00000155957_29 (sequence is synthesized)
ctgttgccatcatggctgaccccgacccccggtaccctcgctcctcgatcgaggacgacttcaactatggcagcagcgtggcctccgccaccgtgcacatccgaatggttctccagagag

SEQ ID NO: 452144 - DNA, 120 bp, Artificial Sequence
  ENSG00000155957_30 (sequence is synthesized)
attgtaccttcagcaaacaatatatgaggataccttctgcaccctcagccacactgaatatcatcagattttttcatctccggcaatctggtagatcagggatggtgaacattttctaca

SEQ ID NO: 452145 - DNA, 120 bp, Artificial Sequence
  ENSG00000155959_0 (sequence is synthesized)
agtcgcgcgctcgcatccccaagatggcggccgttaaggacagttgtggcaaaggagaaatggccacagggaatgggcggcggctccacctggggattcctgaggccgtgtttgtggaag

SEQ ID NO: 452146 - DNA, 120 bp, Artificial Sequence
  ENSG00000155959_1 (sequence is synthesized)
atgtagattccttcatgaaacagcctgggaatgagactgcagatacagtattaaagaagctggatgaacagtaccagaagtataagtttatggaactcaaccttgctcaaaagaaaagaa

SEQ ID NO: 452147 - DNA, 120 bp, Artificial Sequence
  ENSG00000155959_2 (sequence is synthesized)
ggctaaaaggtcagattcctgaaattaaacagactttggaaattctaaaatacatgcagaagaaaaaagagtccaccaactcaatggagaccagattcttgctggcagataacctgtatt

SEQ ID NO: 452148 - DNA, 120 bp, Artificial Sequence
  ENSG00000155959_3 (sequence is synthesized)
gcaaagcttcagttcctcctaccgataaagtgtgtctgtggttgggggctaatgtaatgcttgaatatgatattgatgaagctcaggcattgttggaaaagaatttatcgactgccacaa

SEQ ID NO: 452149 - DNA, 120 bp, Artificial Sequence
  ENSG00000155959_4 (sequence is synthesized)
agaatcttgattccctggaggaagaccttgactttcttcgagatcaatttactaccacagaagtcaatatggccagggtttataattgggatgtaaaaagaagaaacaaggatgactcta

SEQ ID NO: 452150 - DNA, 120 bp, Artificial Sequence
  ENSG00000155959_5 (sequence is synthesized)
ccaagaacaaagcataatgctggcaattaaaaatgtggtttagttttccaaacatgttatcttaaatacccctttatccttacaggttgacataactttgaatgttttaacagcaagaat

SEQ ID NO: 452151 - DNA, 120 bp, Artificial Sequence
  ENSG00000155959_6 (sequence is synthesized)
tatttttgacattgtgatttttttttccacatttctcagcaaagctaatggtattttaatcattatttttgcctgtcataagaaaactcttagctgaaatggccgaaaactgtgagacat

SEQ ID NO: 452152 - DNA, 120 bp, Artificial Sequence
  ENSG00000155959_7 (sequence is synthesized)
gctatggaagctgaatgccggacgctagcacagtttactttttccctttctaattggctgatgttactctcacttgatgtggttaaaccattttagaggtagagaagacagacagtttga

SEQ ID NO: 452153 - DNA, 120 bp, Artificial Sequence
  ENSG00000155959_8 (sequence is synthesized)
atatttgtaaacttgtttttctttggtatatttaggacttagtggtcctctgttgctattgtcttctataagtggagtttcatgacttactgcttaacgaataactaactactatgatat

SEQ ID NO: 452154 - DNA, 120 bp, Artificial Sequence
  ENSG00000155959_9 (sequence is synthesized)
tctggacattttaggaaatggtaatttgccttgctacacattaagagggctattaagactacattttttctaacctcagataagtgcagtgtctttgcaatgccaacataagggagatct

SEQ ID NO: 452155 - DNA, 120 bp, Artificial Sequence
  ENSG00000155959_10 (sequence is synthesized)
tggccaacgtgaaataaaattactcattcaaaactctgcctaaggtgattttgtagttcttaacagttctccagagcatcttgaacaggaatattaagataaatgtgaatctgcaatggc

SEQ ID NO: 452156 - DNA, 120 bp, Artificial Sequence
  ENSG00000155959_11 (sequence is synthesized)
tgaaaagagttgtgagcttttttattcatgataaaaccttataggaatagtataaaaaatccctgtggaaagctactagtacattgaccagcgctgggtgatacagattctgataaaaac

SEQ ID NO: 452157 - DNA, 120 bp, Artificial Sequence
  ENSG00000155959_12 (sequence is synthesized)
ataaatgtattagttcatctccatgtagtaaaaagtatacttatacaatgttttgtacttgtatttcatgaaattaaaacagtgatgctaaaactatggcagagcacttttttcatgtta

SEQ ID NO: 452158 - DNA, 120 bp, Artificial Sequence
  ENSG00000155959_13 (sequence is synthesized)
attactcagcttttcatctgctgtgttgaaagccaacttatcatttttcacattattgtatacatctaaaagacatcataaacgaagactggaagtgaaaactgaaaaactgagaaagtt

SEQ ID NO: 452159 - DNA, 120 bp, Artificial Sequence
  ENSG00000155959_14 (sequence is synthesized)
ttatttgttggaggttccaactccattgggagctccttctctaatggcacctcaacccatgattcatacccagcaaggcctaaggaccagtagtccttccactccatccccagagcatca

SEQ ID NO: 452160 - DNA, 120 bp, Artificial Sequence
  ENSG00000155961_0 (sequence is synthesized)
gctgccatttcatcacctttgcgagcgcagcatccatccctccgctctcccggcgcctgggcctacccagcttcgggctcccaggccagcgatgcgctcgcggctgagctagatcctgcc

SEQ ID NO: 452161 - DNA, 120 bp, Artificial Sequence
  ENSG00000155961_1 (sequence is synthesized)
gagccgcgctctctgaggcgtcggcggggcgccccctcccgccgtccccggtccgggccaaggagacctgcagagccgcggccatggaggccatctggctgtaccagttccggctcattg

SEQ ID NO: 452162 - DNA, 120 bp, Artificial Sequence
  ENSG00000155961_2 (sequence is synthesized)
tcatcggggattccacagtgggcaagtcctgcctgatccgccgcttcaccgagggtcgctttgcccaggtttctgaccccaccgtgggggtggattttttctcccgcttggtggagatcg

SEQ ID NO: 452163 - DNA, 120 bp, Artificial Sequence
  ENSG00000155961_3 (sequence is synthesized)
agccaggaaaacgcatcaagctccagatctgggataccgcgggtcaagagaggttcagatccatcactcgcgcctactacaggaactcagtaggtggtcttctcttatttgacattacca

SEQ ID NO: 452164 - DNA, 120 bp, Artificial Sequence
  ENSG00000155961_4 (sequence is synthesized)
accgcaggtccttccagaatgtccatgagtggttagaagagaccaaagtacacgttcagccctaccaaattgtatttgttctggtgggtcacaagtgtgacctggatacacagaggcaag

SEQ ID NO: 452165 - DNA, 120 bp, Artificial Sequence
  ENSG00000155961_5 (sequence is synthesized)
tgactcgccacgaggccgagaaactggctgctgcatacggcatgaagtacattgaaacgtcagcccgagatgccattaatgtggagaaagccttcacagacctgacaagagacatatatg

SEQ ID NO: 452166 - DNA, 120 bp, Artificial Sequence
  ENSG00000155961_6 (sequence is synthesized)
agctggttaaaaggggggagattacaatccaggagggctgggaaggggtgaagagtggatttgtaccaaatgtggttcactcttcagaagaggttgtcaaatcagagaggagatgtttgt

SEQ ID NO: 452167 - DNA, 120 bp, Artificial Sequence
  ENSG00000155961_7 (sequence is synthesized)
gctagtcagttcttttatttccaaaacatgctctcctacttgaactgaaaagtaagagaaataaatagaatctttgtgtaactgatgagaactcaacctccatttggataccaagtgagc

SEQ ID NO: 452168 - DNA, 120 bp, Artificial Sequence
  ENSG00000155961_8 (sequence is synthesized)
ctccctctcagggggactctgacagactcgtgtgcgggtggatgggggtgcctgagtgctgtgaccaagggactgaattgctgacatgggccaggccaggcactgttttgtggcccatgc

SEQ ID NO: 452169 - DNA, 120 bp, Artificial Sequence
  ENSG00000155961_9 (sequence is synthesized)
taggcagtggctgctccatgagccctttgtggaccacatgttaaaggcctggggtttaggaagctaagtcccaggaaaacatacctacagacaggacaactgttccttggtatttgagct

SEQ ID NO: 452170 - DNA, 120 bp, Artificial Sequence
  ENSG00000155961_10 (sequence is synthesized)
cacttataggccatgaacataaagaaatacataaaggggaaaaaagtttcacaatggggacaattagcataactaaacaaagattatgagctctacttattccgtgagaataccctgcac

SEQ ID NO: 452171 - DNA, 120 bp, Artificial Sequence
  ENSG00000155961_11 (sequence is synthesized)
caaaggtgtttgctgggtttggttaaaaggtaccaattagcttttaacagctttctgtaaaatgaggaacacagaccaaaaggtctggtgttcaagtaaaaatgatgtgactatggaaag

SEQ ID NO: 452172 - DNA, 120 bp, Artificial Sequence
  ENSG00000155961_12 (sequence is synthesized)
gaaggcaatcgacacagttattagcacatttcagaaaatgaacacccttgtgatagaattaccagctgtatgaaacaaattgtcccatgcaaattaccctataactaggaaagagacact

SEQ ID NO: 452173 - DNA, 120 bp, Artificial Sequence
  ENSG00000155961_13 (sequence is synthesized)
ataacccaaatgccataccccctttttcctttgaccatgcctggggtttcaatgccttggcacctgcaatctggaagtaaacagtctgcttgcttcttcaggcacgtgacagtgacaaca

SEQ ID NO: 452174 - DNA, 120 bp, Artificial Sequence
  ENSG00000155961_14 (sequence is synthesized)
ggaggcactgtaacccttacaaacagcttacagttacttgggctacttatttgatcatcataacaggcctacgaggtttttgccccattttacagaatagtaaactaagagccatgaaaa

SEQ ID NO: 452175 - DNA, 120 bp, Artificial Sequence
  ENSG00000155961_15 (sequence is synthesized)
tcacttggccagggtcaaggactcgtgactcctagctcttttcactgcatcatactgctgtcagatgaataaatgattatgaatttgtttacttgggaagagatatgactataaataaat

SEQ ID NO: 452176 - DNA, 120 bp, Artificial Sequence
  ENSG00000155961_16 (sequence is synthesized)
gttctctacatgttaggatatgttttccttattgattacaactcagctataatcctgagggaacatgggaaggaatcaaaggtaaagcccattcaggcattattgacaagagggctttaa

SEQ ID NO: 452177 - DNA, 120 bp, Artificial Sequence
  ENSG00000155961_17 (sequence is synthesized)
acaagtgaataattgcacaactaaaaagacattagaactgtgtgggctataagtgttcttatcactgagacacagtggatttttattgaaaggaaccacgtacagcaatgcggagtggga

SEQ ID NO: 452178 - DNA, 120 bp, Artificial Sequence
  ENSG00000155961_18 (sequence is synthesized)
tagggataaaatacccaccccaaaatgaccttggccacctgtctgccatatacgtacactgagttcctgtctacccaagagagtcagcccttaattctcaggtgaacaaacagctaactg

SEQ ID NO: 452179 - DNA, 120 bp, Artificial Sequence
  ENSG00000155961_19 (sequence is synthesized)
catcagcaaattggaatggctggcttgaagtttccattattttcttgaagagaggtgatgctttaaattactttttggattgtagccagttcagctaggcaaaagccatacttttcacaa

SEQ ID NO: 452180 - DNA, 120 bp, Artificial Sequence
  ENSG00000155961_20 (sequence is synthesized)
ttaaaaaaaaaaactattctgactagagtcaggtttctcatatccattgtgataggaaggcctaagaatggcaaatcgctttgagatataatattgaacttcagtatgaatgtgaccgaa

SEQ ID NO: 452181 - DNA, 120 bp, Artificial Sequence
  ENSG00000155961_21 (sequence is synthesized)
tctgaaactttgggaatttgctttagccagaataaagaaaccaaatcatgaaaattatggaagactattctgccacctgtgccccaagttggatgagcaaaccactttggatcagttcac

SEQ ID NO: 452182 - DNA, 120 bp, Artificial Sequence
  ENSG00000155961_22 (sequence is synthesized)
agcattaactacaagtgaactgatcatcttctctatattcatttcacaagagctggcttaggtggggtaattaaattgccaccttcgtggttgtaaaagacaaacaaaacatggcaaatt

SEQ ID NO: 452183 - DNA, 120 bp, Artificial Sequence
  ENSG00000155961_23 (sequence is synthesized)
tcattaacacaaaatttcatcaactgctatactgaattatgtttagaagattctgaaagcaagattatccagtgggtaaatgagagtcgactggattctgtcagttcaaaaaaggaaaga

SEQ ID NO: 452184 - DNA, 120 bp, Artificial Sequence
  ENSG00000155961_24 (sequence is synthesized)
aacaaaacttccctacaattttcttcactaaaatttattatatgtacagtattcccactcctggcattttctggcaggtttaaaaatattcagcataaatccagcagaggtggctgagct

SEQ ID NO: 452185 - DNA, 120 bp, Artificial Sequence
  ENSG00000155961_25 (sequence is synthesized)
taattgcttaaataagttctagaaaatttaaaaatcattttagtagaattcagtaccattgtcactgcaataagtgggttttagaaaataagtgtgaaaagaatcaggtgttaatataat

SEQ ID NO: 452186 - DNA, 120 bp, Artificial Sequence
  ENSG00000155961_26 (sequence is synthesized)
actaaggataaagctttagaagctattttactacataggtaaagaaaagataaactaacttgtaacaaagaccacaactgcatgttggattagattgtctcatatttcagaataaaatgt

SEQ ID NO: 452187 - DNA, 120 bp, Artificial Sequence
  ENSG00000155961_27 (sequence is synthesized)
actgtatacttttcctcactttgttgtgcactgtaatgaaatgtgaaaaatgctttatttagctgtatgtgaatgaaaatatgcttgtatttagtaaaatgattgattatgtgactgtga

SEQ ID NO: 452188 - DNA, 120 bp, Artificial Sequence
  ENSG00000155962_0 (sequence is synthesized)
aattttctgcgtcacacctcttgagagaagagactggctccaggtctgactcagtccactacaagctagacggtcttcttaaagcaccaacattacttgagtctttggataaaattgaga

SEQ ID NO: 452189 - DNA, 120 bp, Artificial Sequence
  ENSG00000155962_1 (sequence is synthesized)
aaagagtctacaagtattgtggactctacaggaggcaggaggctgacaactggcagtaaagacaaagatgtcaggcctgcggcccggcactcaagtggaccctgagattgagctttttgt

SEQ ID NO: 452190 - DNA, 120 bp, Artificial Sequence
  ENSG00000155962_2 (sequence is synthesized)
aaaggctggaagtgatggagagagtattggaaactgtcccttttgccaacgccttttcatgatcctctggcttaaaggagttaaatttaatgtgacaactgttgacatgaccagaaagcc

SEQ ID NO: 452191 - DNA, 120 bp, Artificial Sequence
  ENSG00000155962_3 (sequence is synthesized)
tgaagaactaaaggacttagccccaggtaccaatcctccgttcctggtgtataacaaggagttgaaaacagacttcattaaaattgaggagtttttagaacaaaccctggctcctccaag

SEQ ID NO: 452192 - DNA, 120 bp, Artificial Sequence
  ENSG00000155962_4 (sequence is synthesized)
gtaccctcacctgagtcccaagtacaaggagtcttttgatgtgggctgtaacctctttgccaagttttctgcatacattaagaatacacaaaaggaggcaaataagaattttgaaaaatc

SEQ ID NO: 452193 - DNA, 120 bp, Artificial Sequence
  ENSG00000155962_5 (sequence is synthesized)
tctgctcaaagaattcaagcgtctggatgactacttaaacaccccacttctggatgaaattgatccagacagtgctgaggaacccccagtttccagaagactattcttggatggggacca

SEQ ID NO: 452194 - DNA, 120 bp, Artificial Sequence
  ENSG00000155962_6 (sequence is synthesized)
gctaacactggctgattgtagcttgttacccaagctgaacattattaaagttgctgccaagaaatatcgtgactttgacattccagcagaattctcaggagtctggcgttatctccacaa

SEQ ID NO: 452195 - DNA, 120 bp, Artificial Sequence
  ENSG00000155962_7 (sequence is synthesized)
tgcctatgcccgtgaagaatttacccacacgtgtcctgaagacaaagaaattgaaaatacttacgcaaatgtggctaaacagaagagttaggagagctcttacaggagacaaggctatat

SEQ ID NO: 452196 - DNA, 120 bp, Artificial Sequence
  ENSG00000155962_8 (sequence is synthesized)
ttgtgatcagattttacttattgacatattagaaaggtttttgcaaataagaatatgaaaaatactgtttcttctatccaactctcttatgaaaaggaactctgtattttctattagcca

SEQ ID NO: 452197 - DNA, 120 bp, Artificial Sequence
  ENSG00000155962_9 (sequence is synthesized)
taaataatctgtccactgtattttacaggtcttcatacttttacttaattttctttatctgtatggcaaaccactgcaatcctgaatgacatggaaagcatcacaatcttttgccctttg

SEQ ID NO: 452198 - DNA, 120 bp, Artificial Sequence
  ENSG00000155962_10 (sequence is synthesized)
tataaatcgctaaaataatttcacatttttgttagtttaatatatacatgagtttatttctgatataaataataaatacagagagtgagcatatcagagaggcaaattcttaaagaatga

SEQ ID NO: 452199 - DNA, 120 bp, Artificial Sequence
  ENSG00000155962_11 (sequence is synthesized)
tttttaaaatcagctctaggaagagctcaagatcaattggtcatagaacagcatttgacgcctagaactatgaccacctcatggtcagagatgagaatgtagcctttgtgaccagattat

SEQ ID NO: 452200 - DNA, 120 bp, Artificial Sequence
  ENSG00000155962_12 (sequence is synthesized)
attatttttaaatgaagaagcactcattaaataaaacataattttaaaaaacaatataagaaacaaagtcaactgaatcttttattcatagaaatgaaaaggaaaataaaaactgtggct

SEQ ID NO: 452201 - DNA, 120 bp, Artificial Sequence
  ENSG00000155962_13 (sequence is synthesized)
gaccaaaaggtcttcttgttgtccataaaaggataaggtaaacagtccttagataattacaaaactttctacaaaagttaaaatgttacattactatacgtattcagattcacttgttaa

SEQ ID NO: 452202 - DNA, 120 bp, Artificial Sequence
  ENSG00000155962_14 (sequence is synthesized)
agtactcttaaatcattcaaatctggaaacaaaagctgaacttaactcttgctccctcaaaagagaaacacaagcataagtgcagcttcaaaaaaggaaaatattttaggctttggtgga

SEQ ID NO: 452203 - DNA, 120 bp, Artificial Sequence
  ENSG00000155962_15 (sequence is synthesized)
agggtggagtttagataaaatttaaatgaagtagcgttttaataggttcaaagaaaagtaaggcaatgagcaaactcaaagtactgtccttgaaaaccatagagtcaagataaatgtata

SEQ ID NO: 452204 - DNA, 120 bp, Artificial Sequence
  ENSG00000155962_16 (sequence is synthesized)
gtgtatggttaggtggcagagaaatgcaatcatgttgataatctttgagatacatcctgtcatcagtatatttcagaatacatgcaatgcactagcaagttacaattgatagaatacatt

SEQ ID NO: 452205 - DNA, 120 bp, Artificial Sequence
  ENSG00000155962_17 (sequence is synthesized)
ataagccaggcacagaaagacaaacaccacatgatctcactcatatgtggaattttaaaaagttgatctcactcatatgtggaattttaaaaagttgatctcacacaagtagagggtaga

SEQ ID NO: 452206 - DNA, 120 bp, Artificial Sequence
  ENSG00000155962_18 (sequence is synthesized)
acaagtagagggtagaatcgtggttaccaggggctagggagagaaagaaggcagaggcactgaaagatgttggtcaatgggtataaagttacacctaggaagaataaattttggcattca

SEQ ID NO: 452207 - DNA, 120 bp, Artificial Sequence
  ENSG00000155962_19 (sequence is synthesized)
ccacagtagggtgactatagcaaataataatgtagcatgtatttcaagatagctagaaaagcaggtttttaaatgtcaccacaaagaaataacaaatgtttatagtggtggatatggtaa

SEQ ID NO: 452208 - DNA, 120 bp, Artificial Sequence
  ENSG00000155962_20 (sequence is synthesized)
ttacgcctatttgatcattatactgtgtgtacatgcattgaaacaccacattgtatcccatatatatgtacaattatgtgcccattatacatttaaaaaataaattttaaaaaccttcaa

SEQ ID NO: 452209 - DNA, 78 bp, Artificial Sequence
  ENSG00000155962_21 (sequence is synthesized)
aggcttattgcaacccccacctctgaggctcaagcagtcctcccaccccactcttgagtagctgggactacaggttgc

SEQ ID NO: 452210 - DNA, 120 bp, Artificial Sequence
  ENSG00000155962_22 (sequence is synthesized)
cctcccaccccactcttgagtagctgggactacaggttgctgccaagaaatatcgtgactttgacattccagcagaattctcaggagtctggcgttatctccacaatgcctatgcccgtg

SEQ ID NO: 452211 - DNA, 80 bp, Artificial Sequence
  ENSG00000155966_0 (sequence is synthesized)
gcccagcccgcctgagcccgcagcggctgccgccgcagcgtcgggtcgctgggtgcgcgggctaccgcggaccgagcgga

SEQ ID NO: 452212 - DNA, 120 bp, Artificial Sequence
  ENSG00000155966_1 (sequence is synthesized)
cccgagtgggcgaccaggcgcttgcccgcccagtgccactgccgccgcttcctcgccggagcacaggaccagacacctccagcgcccgctgctgctgccgatgcggcccggacactttta

SEQ ID NO: 452213 - DNA, 120 bp, Artificial Sequence
  ENSG00000155966_2 (sequence is synthesized)
cacttttagctgggcgggagggctggagagccgggggccgccgagaaccgccagcgagctgtgccgagagccgcgccgacccgctgcgatcagggacaggcgcccgcccgccgccgccgc

SEQ ID NO: 452214 - DNA, 120 bp, Artificial Sequence
  ENSG00000155966_3 (sequence is synthesized)
tatggatctattcgactttttcagagactgggacttggagcagcagtgtcactatgaacaagaccgtagtgcacttaaaaaaagggaatgggagcggaggaatcaagaagtccagcaaga

SEQ ID NO: 452215 - DNA, 120 bp, Artificial Sequence
  ENSG00000155966_4 (sequence is synthesized)
agacgatctcttttcttcaggctttgatctttttggggagccatacaaggtagctgaatatacaaacaaaggtgatgcacttgccaaccgagtccagaacacgcttggaaactatgatga

SEQ ID NO: 452216 - DNA, 120 bp, Artificial Sequence
  ENSG00000155966_5 (sequence is synthesized)
aatgaagaatttgctaactaaccattctaatcagaatcacctagtgggaattccaaagaattctgtgccccagaatcccaacaacaaaaatgaaccaagcttttttccagaacaaaagaa

SEQ ID NO: 452217 - DNA, 120 bp, Artificial Sequence
  ENSG00000155966_6 (sequence is synthesized)
cagaataattccacctcaccaggataatacccatccttcagcaccaatgcctccaccttctgttgtgatactgaattcaactctaatacacagcaacagaaaatcaaaacctgagtggtc

SEQ ID NO: 452218 - DNA, 120 bp, Artificial Sequence
  ENSG00000155966_7 (sequence is synthesized)
acgtgatagtcataaccctagcactgtactggcaagccaggccagtggtcagccaaacaagatgcagactttgacacaggaccagtctcaagccaaactggaagacttctttgtctaccc

SEQ ID NO: 452219 - DNA, 120 bp, Artificial Sequence
  ENSG00000155966_8 (sequence is synthesized)
agctgaacagccccagattggagaagttgaagagtcaaacccatctgcaaaggaagacagtaaccctaattctagtggagaagatgctttcaaagaaatctttcaatccaattcaccgga

SEQ ID NO: 452220 - DNA, 120 bp, Artificial Sequence
  ENSG00000155966_9 (sequence is synthesized)
agaatctgaattcgccgtgcaagcgcctgggtctcccctagtggcttcctctttattagctcctagcagtggcctttcagttcaaaacttcccaccagggctttactgcaaaacaagcat

SEQ ID NO: 452221 - DNA, 120 bp, Artificial Sequence
  ENSG00000155966_10 (sequence is synthesized)
ggggcagcaaaagccaactgcatacgtcagacccatggatggccaggaccaggcaccggacatctcaccaacactgaaaccttcaattgaatttgagaacagctttgggaatctgtcatt

SEQ ID NO: 452222 - DNA, 120 bp, Artificial Sequence
  ENSG00000155966_11 (sequence is synthesized)
tggaacactcttggatggaaaacccagtgcagccagttcaaagactaaactgccaaagttcaccatcctccaaacaagtgaagtaagccttcccagtgatccaagctgtgttgaagaaat

SEQ ID NO: 452223 - DNA, 120 bp, Artificial Sequence
  ENSG00000155966_12 (sequence is synthesized)
cttgcgggagatgacccattcctggcctactcctctcacttccatgcatactgctggacactctgagcagagcaccttttccatcccaggacaggaatcgcagcatctgaccccaggatt

SEQ ID NO: 452224 - DNA, 120 bp, Artificial Sequence
  ENSG00000155966_13 (sequence is synthesized)
caccttacaaaagtggaatgacccaaccaccagagcttctacaaagtcagtgtctttcaaatcgatgcttgaggatgacctgaagctgagcagtgatgaagatgaccttgagcctgtgaa

SEQ ID NO: 452225 - DNA, 120 bp, Artificial Sequence
  ENSG00000155966_14 (sequence is synthesized)
gaccttgaccactcagtgcactgccactgagctctaccaggctgttgaaaaggcaaaacctaggaataatcctgtgaacccacccttggccactccccagcccccacctgcagtgcaagc

SEQ ID NO: 452226 - DNA, 120 bp, Artificial Sequence
  ENSG00000155966_15 (sequence is synthesized)
cagcgggggttctggcagctccagcgaatcggagagcagctctgagtcggattcagacactgaaagtagcaccactgacagcgaatctaatgaggcacctcgtgtggcaactccagagcc

SEQ ID NO: 452227 - DNA, 120 bp, Artificial Sequence
  ENSG00000155966_16 (sequence is synthesized)
tgagccaccctcaaccaacaagtggcaactggataaatggcttaacaaagtgacatcccagaacaagtcttttatttgtggccaaaatgaaacacccatggagactatttctctgcctcc

SEQ ID NO: 452228 - DNA, 120 bp, Artificial Sequence
  ENSG00000155966_17 (sequence is synthesized)
tccaatcatccaaccaatggaagtccagatgaaagtgaagacgaatgccagtcaggtcccagctgaacccaaagaaaggcctctcctcagtctcattagggagaaagcccgtccacggcc

SEQ ID NO: 452229 - DNA, 120 bp, Artificial Sequence
  ENSG00000155966_18 (sequence is synthesized)
cactcagaaaattccagaaacaaaggctttgaagcataagttgtcaacaactagtgagacagtgtctcaaaggacaattgggaaaaaacagcccaaaaaagttgagaagaacaccagcac

SEQ ID NO: 452230 - DNA, 120 bp, Artificial Sequence
  ENSG00000155966_19 (sequence is synthesized)
tgacgagtttacctggcccaaaccaaatattaccagcagcactcccaaagaaaaagaaagtgtggagcttcatgacccaccaagaggccgcaacaaagccactgcccacaaaccagcccc

SEQ ID NO: 452231 - DNA, 120 bp, Artificial Sequence
  ENSG00000155966_20 (sequence is synthesized)
taggaaagaaccaagacctaacatccctttggctcccgagaagaagaagtacagagggcctggcaagattgtgccaaagtctcgggaattcattgaaacagattcatctacatctgactc

SEQ ID NO: 452232 - DNA, 120 bp, Artificial Sequence
  ENSG00000155966_21 (sequence is synthesized)
caacacagatcaggaagagaccctgcaaatcaaagtcctgcctccgtgcattatttctggaggtaatactgccaaatccaaggaaatctgtggtgccagcctgaccctcagcaccttaat

SEQ ID NO: 452233 - DNA, 120 bp, Artificial Sequence
  ENSG00000155966_22 (sequence is synthesized)
gagtagcagtggcagcaacaacaacttatccatcagtaatgaagagccaacattttcacctattcctgtcatgcaaactgaaatcctgtcccctctgcgagatcatgagaacctgaaaaa

SEQ ID NO: 452234 - DNA, 120 bp, Artificial Sequence
  ENSG00000155966_23 (sequence is synthesized)
cctctgggtgaagattgaccttgacttactctctagagtacctggccacagctcactccatgcagcacctgccaagccagaccacaaggagactgccacaaaacccaagcgtcagacagc

SEQ ID NO: 452235 - DNA, 120 bp, Artificial Sequence
  ENSG00000155966_24 (sequence is synthesized)
tgtcacagctgtggagaaaccagcccctaagggcaaacgtaagcacaagccaatagaagttgcagagaagatccctgagaagaagcagcgcctggaggaggccacaactatctgcttgct

SEQ ID NO: 452236 - DNA, 120 bp, Artificial Sequence
  ENSG00000155966_25 (sequence is synthesized)
ccctccttgcatctcaccagccccaccccacaagcctcccaacactagagaaaataattcatccaggagagcaaatagaagaaaggaagaaaaactatttcctcctccactttccccact

SEQ ID NO: 452237 - DNA, 120 bp, Artificial Sequence
  ENSG00000155966_26 (sequence is synthesized)
gccagaggaccctccacgccgcagaaatgtcagtggcaataatggtccctttggtcaagacaaaaacatcgccatgactggacaaatcacatctaccaaacctaagagaactgaaggcaa

SEQ ID NO: 452238 - DNA, 120 bp, Artificial Sequence
  ENSG00000155966_27 (sequence is synthesized)
attctgtgctactttcaaagggatatcggtaaatgagggagacactccaaaaaaggcatcctctgccaccatcactgtcaccaatactgctattgccactgctactgtcactgctactgc

SEQ ID NO: 452239 - DNA, 120 bp, Artificial Sequence
  ENSG00000155966_28 (sequence is synthesized)
cattgtcaccaccactgtcacagctactgccaccgccacggccaccaccacaactactaccactaccatttccaccatcacctctaccatcactactggcctcatggatagcagtcacct

SEQ ID NO: 452240 - DNA, 120 bp, Artificial Sequence
  ENSG00000155966_29 (sequence is synthesized)
ggagatgacgtcctgggcggctctgccccttctatccagcagcagcactaatgtccggagacccaagctcacttttgatgactcggttcacaatgctgattattacatgcaagaagctaa

SEQ ID NO: 452241 - DNA, 120 bp, Artificial Sequence
  ENSG00000155966_30 (sequence is synthesized)
gaagctgaagcacaaagctgatgcactgttcgagaaatttggcaaagctgtgaattatgctgatgccgccctctccttcactgaatgtggcaatgccatggaacgcgaccctctggaagc

SEQ ID NO: 452242 - DNA, 120 bp, Artificial Sequence
  ENSG00000155966_31 (sequence is synthesized)
aaagtccccatacaccatgtactctgagactgtggagctcctcaggtatgcaatgaggctgaagaactttgcaagtcccttggcttcggatggggacaaaaagctagcagtactatgcta

SEQ ID NO: 452243 - DNA, 120 bp, Artificial Sequence
  ENSG00000155966_32 (sequence is synthesized)
ccgatgtttatcactcctctatttgagaatgtttaagctgaagaaggaccatgctatgaagtactccagatcactgatggaatattttaagcaaaatgcttcaaaagtcgcacagatacc

SEQ ID NO: 452244 - DNA, 120 bp, Artificial Sequence
  ENSG00000155966_33 (sequence is synthesized)
ctctccatgggtaagcaatggaaagaacactccatccccagtgtctctcaacaacgtctcccccatcaacgcaatggggaactgtaacaatggcccagtcaccattccccagcgcattca

SEQ ID NO: 452245 - DNA, 120 bp, Artificial Sequence
  ENSG00000155966_34 (sequence is synthesized)
ccacatggctgccagccacgtcaacatcactagcaatgtgttacggggctatgaacactgggatatggccgacaaactgacaagagaaaacaaagaattctttggtgatctggacacgct

SEQ ID NO: 452246 - DNA, 120 bp, Artificial Sequence
  ENSG00000155966_35 (sequence is synthesized)
gatggggcctctgacccagcacagcagcatgaccaatcttgtccgctacgttcgccaaggactgtgttggctgcgcatcgatgcccacttgttgtagtgggtgttctcagatctctagca

SEQ ID NO: 452247 - DNA, 120 bp, Artificial Sequence
  ENSG00000155966_36 (sequence is synthesized)
tcacgacccatcactctacctctaccagcgcactgatggtcactggtggaactccactcactggggaacgttctctttggttatgtttgtttttatgcttcttttgttatctgtaaaaaa

SEQ ID NO: 452248 - DNA, 120 bp, Artificial Sequence
  ENSG00000155966_37 (sequence is synthesized)
cagaagtcattgtaagttgacactacaacttaagggcagtgtacgttttattacttagtcattttttttcttttagcatttgatatgcatttctcagattccaccatctttttgtgcttt

SEQ ID NO: 452249 - DNA, 120 bp, Artificial Sequence
  ENSG00000155966_38 (sequence is synthesized)
atggaatgacagtccctacaatattgttttaagcccacactacccaaaacaaagaatgggaagcacttgtgataaagacaggctcctgagaaatgcaacaagtggtcttacatatacatg

SEQ ID NO: 452250 - DNA, 120 bp, Artificial Sequence
  ENSG00000155966_39 (sequence is synthesized)
agaacttagacacaagggaccatcccccaaactctactcttatacccagaaaagaacatatttcagaatctgtcaaacttttgtgtatcccacagattcaatcttcaggtgagaattttc

SEQ ID NO: 452251 - DNA, 120 bp, Artificial Sequence
  ENSG00000155966_40 (sequence is synthesized)
attgtcaaaacccactggttagatgttgtagcaacatcataaaatcaagagtatcaagaaaataaatgagcatagcaatgctactcttaaaaagatgctatgccacacaaccagaggact

SEQ ID NO: 452252 - DNA, 120 bp, Artificial Sequence
  ENSG00000155966_41 (sequence is synthesized)
ttcttgttagcatccctttcctgattccctattttgttaattttaatgataagaagaaagggtgacatttattttgacaagttttaggcatcagctggcatcagtgtttttcaactccat

SEQ ID NO: 452253 - DNA, 120 bp, Artificial Sequence
  ENSG00000155966_42 (sequence is synthesized)
tatttgaagtgtaaatcctcacctggggttctctgtgtgcaaagctgtccttttgaagaacagtttggttgatgcatgccttagtagccaaaatgctacactctagacttacaagtggga

SEQ ID NO: 452254 - DNA, 120 bp, Artificial Sequence
  ENSG00000155966_43 (sequence is synthesized)
gttaagagaggtctggaaagtgtccaacaaggaattcacacctctgcctcctttgcaacaacaacatttacacagttggtaagtgggtccataactggcaggatttttaaattgtatttt

SEQ ID NO: 452255 - DNA, 120 bp, Artificial Sequence
  ENSG00000155966_44 (sequence is synthesized)
gctcaaatctatgggaacaaaagtcaaggtatcactacctagaagtaatgatatacagttttcttcctagtggcttgaaaatctggacttcctcaattattattcacattttctctctta

SEQ ID NO: 452256 - DNA, 120 bp, Artificial Sequence
  ENSG00000155966_45 (sequence is synthesized)
taggttttctgttttctactttcttttttctcttatctgtgtttccctttcctttgtttggctcattaacttttgactgaattacaattactccttttattaaagtccatattattgtga

SEQ ID NO: 452257 - DNA, 120 bp, Artificial Sequence
  ENSG00000155966_46 (sequence is synthesized)
atcatttccatgaaaatttctaagaaaactccaaactctctaaatagtagctaacttttatttttttaaaatgagtcgtggggtagtgcttcaccttgagatgctttgaaagagccctaa

SEQ ID NO: 452258 - DNA, 120 bp, Artificial Sequence
  ENSG00000155966_47 (sequence is synthesized)
acattgggaaccattcacctaatttggagacatttctcactggttgtgactacccccttatgatccttcacattcattttatgtccctaaacatcacaatgtaaatatcatttttgatgt

SEQ ID NO: 452259 - DNA, 120 bp, Artificial Sequence
  ENSG00000155966_48 (sequence is synthesized)
tccagctcaccagaagattcttacacttggggtaaacactatccatgcattacttactggtaattacctgctggtatataattccatgtagcctttaatatgctgggttatcaaattctg

SEQ ID NO: 452260 - DNA, 120 bp, Artificial Sequence
  ENSG00000155966_49 (sequence is synthesized)
ttcactgagttatgaccagataaataatagatatgcacatgaaagatgcaaacttgtgtgattattaaagccagccatgcaggtccatgatagaaacagcaggtgatgactctgcactct

SEQ ID NO: 452261 - DNA, 120 bp, Artificial Sequence
  ENSG00000155966_50 (sequence is synthesized)
cattgtcaaggttagatatatccccagttgcaaaacagccagacttgagctgtgctctggtcatctttgagtttaaggccttttgttgtataaggctgtggaagttgtactccaatggct

SEQ ID NO: 452262 - DNA, 120 bp, Artificial Sequence
  ENSG00000155966_51 (sequence is synthesized)
gaagccatgttgttaatatggctgatgggagcatccctgcagctgaacccagcactttttatgctcccactgtggttgagctttatgtttacagtctcagcaacaacacttatgcatcca

SEQ ID NO: 452263 - DNA, 120 bp, Artificial Sequence
  ENSG00000155966_52 (sequence is synthesized)
aacactcacaaatgaaacctgaaagaatcttttctgagcctcttaaaagaggaaaatgatgataacattaaagactctgaacacccaaggttggtgtcacatataaaaattaagctgatg

SEQ ID NO: 452264 - DNA, 120 bp, Artificial Sequence
  ENSG00000155966_53 (sequence is synthesized)
actttgcagtgactcaagttgtctctttatcatggtttaccaggtagagtgcctggctattactatataatgaagcccactggcttgacttgtaagttcaacctaaaccacaatcctaga

SEQ ID NO: 452265 - DNA, 120 bp, Artificial Sequence
  ENSG00000155966_54 (sequence is synthesized)
ccatcatggatttaggagtagattcttcttgaaatcccacatccagaaactagacattagaatgttgaggcagtttcccagagaaacaagcatattgcctcatggatgaaagacttgtag

SEQ ID NO: 452266 - DNA, 120 bp, Artificial Sequence
  ENSG00000155966_55 (sequence is synthesized)
ttctagtttcagtgacttgttatatctacttacatacaacagggaggcaagaggattctctgtcatctctggtgactgagtgtaaaatatgtgccaagtctgcagcacagtgaccaaatc

SEQ ID NO: 452267 - DNA, 120 bp, Artificial Sequence
  ENSG00000155966_56 (sequence is synthesized)
attaaacatggaggatgaattaccttcctatcccttgagataagacatctttcagtttcatgattaaggattgttgctgttttatagttactctgttcatcacagtgtaaatggtgatgc

SEQ ID NO: 452268 - DNA, 120 bp, Artificial Sequence
  ENSG00000155966_57 (sequence is synthesized)
gtgtcgtaggtgtgcagctatttgagggactaagggatggagatattctgtcaaatgaatctcttcagtataccagtttgtgggagggatatgagacatgtggatggcagtgagagatcg

SEQ ID NO: 452269 - DNA, 120 bp, Artificial Sequence
  ENSG00000155966_58 (sequence is synthesized)
tgcctctagatcttgatggaggcttggtgagacacacttaaataagcacgtggaggttagaatagagggcagagtaaaaggaagctccatctgagcaagtacaccaaatgatctcagccc

SEQ ID NO: 452270 - DNA, 120 bp, Artificial Sequence
  ENSG00000155966_59 (sequence is synthesized)
tgcaacttgacccaggtagggccaccactacgccttcacttgtcacccaagctccaaccacagagagtttgacaagtttgtgttatgatgttggcttggctttgtatttttaattaactt

SEQ ID NO: 452271 - DNA, 120 bp, Artificial Sequence
  ENSG00000155966_60 (sequence is synthesized)
tggatttttagtggttttgtcatataactgtctgagtttggtaggtaggattactttgaaaagggtttactagtgtggtcctccgggtagaatttagctgtaagcatgttgttagccagc

SEQ ID NO: 452272 - DNA, 120 bp, Artificial Sequence
  ENSG00000155966_61 (sequence is synthesized)
ctgtagactgttaattacttaataatctcattgggaaaatactagtagttttatatttggatgacataattggaaaagcagattagctgctactacttttaaaagacttaaggtcgggat

SEQ ID NO: 452273 - DNA, 120 bp, Artificial Sequence
  ENSG00000155966_62 (sequence is synthesized)
gcctttttttccatgtaaggaaatgaaaagaccaaaatcttcaggcaaaaagcaagttgcaaaattagaaaccattggctaaaaatgtgttttgttgagtttccaaatggatgaattttc

SEQ ID NO: 452274 - DNA, 120 bp, Artificial Sequence
  ENSG00000155966_63 (sequence is synthesized)
atttggacattacatcactaaattcattagattttgtctgcattggaaagatactcttctagcatatctttcccaaagatatctaatttggattctgtttcatgcaaatttgcatcccgg

SEQ ID NO: 452275 - DNA, 120 bp, Artificial Sequence
  ENSG00000155966_64 (sequence is synthesized)
aggttgaagttggagtttgaggttggaaaatatctttgaaggcagaatcagttgagttgtgagggtgaagcctcacatacttctcaacagacatgataaaattcacctgcatgagttggc

SEQ ID NO: 452276 - DNA, 120 bp, Artificial Sequence
  ENSG00000155966_65 (sequence is synthesized)
aggtgggagaaccaaactggatcactgggtaagactactcagtaaagcaatgaactgcttgcttagagaagcatcactatccccattgagaaaaatgtgtggcaagatgatacagctaca

SEQ ID NO: 452277 - DNA, 120 bp, Artificial Sequence
  ENSG00000155966_66 (sequence is synthesized)
cagtatcaaatgaatgggtcaattcagcacccccaaatttaattctgtggggaaaaattattgagccagttgtcagtgttctgttacatgactggcagactaaattcttcatcgttgttg

SEQ ID NO: 452278 - DNA, 120 bp, Artificial Sequence
  ENSG00000155966_67 (sequence is synthesized)
ttattgttgttgttgtttctcattttcactcgcacggccttattctcataattaaaatctaattcattttctctttagtgttagtagactccaacaacagaagtggcatctgtgtattca

SEQ ID NO: 452279 - DNA, 120 bp, Artificial Sequence
  ENSG00000155966_68 (sequence is synthesized)
taatcagcatttaccctggcaggagactaatcagataggccggtctcagacattaatcctaccatctgatatttttggtgaaggaaaaagtattaattctctttccatcctcctcctcag

SEQ ID NO: 452280 - DNA, 120 bp, Artificial Sequence
  ENSG00000155966_69 (sequence is synthesized)
tcagaaatatagaagccctctttaccaaaatcatcacattttactctgtaatctaccagctaaaagaaaattgcattgtggggagggcagaaagggggtgggggtgggggcgggggggtg

SEQ ID NO: 452281 - DNA, 120 bp, Artificial Sequence
  ENSG00000155966_70 (sequence is synthesized)
gtggggaagccccacaaagccagattgcagttcttgcccctttttgcgtctgacatgagatgttaaagaattattcatagtgctcacattgggttaggggacactgaactgctttttaga

SEQ ID NO: 452282 - DNA, 120 bp, Artificial Sequence
  ENSG00000155966_71 (sequence is synthesized)
tccatgatcagtcatcattcttctaagagattggagctttgctgtttcattaactgtgcagtgtagactaatggtgtttaataaaaatcattcaaaatttcaaactcttttgccagtgac

SEQ ID NO: 452283 - DNA, 120 bp, Artificial Sequence
  ENSG00000155966_72 (sequence is synthesized)
ctcaattttgttggctctgtgatttgtatcagactttgaggagggaagggggaagtgaaggaagcctacgtccaggcccctgacaggatgctgcagtagcaagctcaagctcgcctgcct

SEQ ID NO: 452284 - DNA, 120 bp, Artificial Sequence
  ENSG00000155966_73 (sequence is synthesized)
gccagcagttgctggtgagcagcagcatgcagaccagctgtgggaagcctcctgaagaatgccccagctgatgctttcagctgggaatagtttgttcctattggggaactcattgttctc

SEQ ID NO: 452285 - DNA, 120 bp, Artificial Sequence
  ENSG00000155966_74 (sequence is synthesized)
cagtctctgcagcaggaagccagctgtcatattcggagggaatttcagatgctttacctttttggttttgtcctgcatcactcatgtggctacgaaagtgtctctgagaatagagcccaa

SEQ ID NO: 452286 - DNA, 120 bp, Artificial Sequence
  ENSG00000155966_75 (sequence is synthesized)
tgtggtgacaatgggtagtcaaatgcaccccagatgctcaagccctgttgtggttctgcagtgtttatgaaattgggaggaaggagaccctggacagtaagcaaaattggagacactcca

SEQ ID NO: 452287 - DNA, 120 bp, Artificial Sequence
  ENSG00000155966_76 (sequence is synthesized)
acgaggctaagttaatgccgtgttgcccagaacaagatctagcttctcatttggtcagcctagcatgcaaccagtggtgtgctggtaaaatgtttaacaaccagctcgctgagaatagaa

SEQ ID NO: 452288 - DNA, 120 bp, Artificial Sequence
  ENSG00000155966_77 (sequence is synthesized)
agcacctggtttgcaccatttgccaatttccatggcataaatactaccactttagatgattttaagctaccaactgtgatgtcactgaacacatggttggaaagagatgcacgcagttgg

SEQ ID NO: 452289 - DNA, 120 bp, Artificial Sequence
  ENSG00000155966_78 (sequence is synthesized)
ctcttgcaagcctgggcaaaaatgcttcaacacgccactggatgcagccagtcagagggttcatatttaatatatgtgttcatgtggacacacacagacacacacacacaaactcaccct

SEQ ID NO: 452290 - DNA, 120 bp, Artificial Sequence
  ENSG00000155966_79 (sequence is synthesized)
tacacacacacttcgatgactaaaacaattacatagttttaagatatgaatcaatgtgtgaatgtagaaagcttatgataaggccctagaggtatgggttgccctggaagcctaggtttt

SEQ ID NO: 452291 - DNA, 120 bp, Artificial Sequence
  ENSG00000155966_80 (sequence is synthesized)
aagcaggagaatagctgagaagaatgaagccctcctgagctgaaaggagagatggatcaatggagatggttccatcatctccttccatatctcacaggtaaaatgggcactcagaaaacc

SEQ ID NO: 452292 - DNA, 120 bp, Artificial Sequence
  ENSG00000155966_81 (sequence is synthesized)
aaccctcacgattgattttttaaaaagataagtgagtgttttttattttattattattgtcatcattattttgatttacaaatgctatttgtaacttttacatgtaactaggataaagta

SEQ ID NO: 452293 - DNA, 120 bp, Artificial Sequence
  ENSG00000155966_82 (sequence is synthesized)
cgggaactctatggagaatagcacaatccagaatttactgtgtttttcttttatgtgacgtggaaactcagtaattctcccaccttcacattgttgttcataagaattttactttagtta

SEQ ID NO: 452294 - DNA, 120 bp, Artificial Sequence
  ENSG00000155966_83 (sequence is synthesized)
ttagggaatctaagttttttgttaacatttgtttttagttaaaagtatctacttactgttttagctctgaactcaaaccagaatatctctgtatcaattgcatgactattcagaaacaat

SEQ ID NO: 452295 - DNA, 120 bp, Artificial Sequence
  ENSG00000155966_84 (sequence is synthesized)
aatccaaaccaaaataattctttttccacccagtacgaagaaaactaagctcagtaacaagaaggcataaactaaagtatataatgaggctttcattaaatacacacacacacacactca

SEQ ID NO: 452296 - DNA, 120 bp, Artificial Sequence
  ENSG00000155966_85 (sequence is synthesized)
cacacacacacatacactttttaaatttttaaattaggcctccacacataaatcattttgaaagtagaatagaaaatctcaaagaattcattctcctggtcctgtgcatcttctgcagtt

SEQ ID NO: 452297 - DNA, 120 bp, Artificial Sequence
  ENSG00000155966_86 (sequence is synthesized)
aataagaggtttgtatctggaaagatggaagaacttgttctaaaatcttatttttcaaaaaaaaatttccattttctctctgggcctgtatccatggttgaatgttagccctggaggaga

SEQ ID NO: 452298 - DNA, 120 bp, Artificial Sequence
  ENSG00000155966_87 (sequence is synthesized)
tccatgtcttactcgctctttctggcccttctgtcttttgcctctgcaattctttttgtagctggcacgatagcagggactgggggtctatcctttcatggtattgctacaatatttgtc

SEQ ID NO: 452299 - DNA, 120 bp, Artificial Sequence
  ENSG00000155966_88 (sequence is synthesized)
cttactggaaaatggtaacatccgggtctgatttaattggcattacacttacacagggactctgagcacccccgtcaccacaccagacagtggaccagttttcacagctacaaagagcta

SEQ ID NO: 452300 - DNA, 120 bp, Artificial Sequence
  ENSG00000155966_89 (sequence is synthesized)
gaaatgtgtttaacatcatccagtgcatcccctaattcaaaaccatcctcactaatcaatcatattcacccataaatattacaaatgagattgattccatctcaagacaatttgtcaaat

SEQ ID NO: 452301 - DNA, 120 bp, Artificial Sequence
  ENSG00000155966_90 (sequence is synthesized)
acttaattttcttcctggatgattctacttactggatattttagaaagagaaatgtctgagataaaatccctcacatttactcaatataacaaattactgtttctactcctattctgagt

SEQ ID NO: 452302 - DNA, 120 bp, Artificial Sequence
  ENSG00000155966_91 (sequence is synthesized)
agtgcttctgaagattgtttgctgtagtgttgtctttgataaaatgaatgtcagtagtgagccttttagagataccatgctcagaaatcctctttgggatcagaagatacctaaaattct

SEQ ID NO: 452303 - DNA, 120 bp, Artificial Sequence
  ENSG00000155966_92 (sequence is synthesized)
ccccttttgcccacttggttagatgagtgatatattctttggatcctgcaaagaagagattggtttattttcttttctggtggtggtagtggttgtatctgtggctgtgatggttgttgt

SEQ ID NO: 452304 - DNA, 120 bp, Artificial Sequence
  ENSG00000155966_93 (sequence is synthesized)
tacttgtctctctctctctctggctctggcttttgctttcctgctagtgttctttctctttccaaacaaatagttaaattaaatgtgagcttctgaattgtacttgttcatactttcaaa

SEQ ID NO: 452305 - DNA, 120 bp, Artificial Sequence
  ENSG00000155966_94 (sequence is synthesized)
acataacagattaataaaaatagatgtgtcctgatttaaaacatgccccctggaaaggcatgctgtattatgaaatcgtgataatataactgcattattacatggcagtataaatattag

SEQ ID NO: 452306 - DNA, 120 bp, Artificial Sequence
  ENSG00000155966_95 (sequence is synthesized)
tctgttgaattcatttgtccaattgtataactttgtggagcagtgttttgacctttgatacataattctggagcaagtggagtggttgcaggcagatgagacagtgttatatcaggattt

SEQ ID NO: 452307 - DNA, 120 bp, Artificial Sequence
  ENSG00000155966_96 (sequence is synthesized)
ttcaatcaactttagttggaggcctggcaattacaaacatcttcagatgtttctgtaaccattataaatatgaaaaaaacctcttcaaaaaatttcccatagtacttcagtcaagacttt

SEQ ID NO: 452308 - DNA, 120 bp, Artificial Sequence
  ENSG00000155966_97 (sequence is synthesized)
ttaggtttatcttttttttttcatttctccttttccttttccattatttttcgatgggggggttgttatcattgactgaagaaatattttgattgcaatggtctctctctctctccccct

SEQ ID NO: 452309 - DNA, 120 bp, Artificial Sequence
  ENSG00000155966_98 (sequence is synthesized)
ctctctctctctcctctattctttcctccttccctctgtccatcacccctcattaaaatattgaaatctggagtctttgataaatctgcattagaccaggctatatgctaggaatgaaat

SEQ ID NO: 452310 - DNA, 120 bp, Artificial Sequence
  ENSG00000155966_99 (sequence is synthesized)
ctgggcaaatatcgatgggttttcaaagaatgctccatgttcattgggccctttcacaccccacagtgataaatgaaaaggatagaggtagttttttcaaaagagcactttaataatatc

SEQ ID NO: 452311 - DNA, 120 bp, Artificial Sequence
  ENSG00000155966_100 (sequence is synthesized)
ctctgagacctaatgcagtttaacaaatgactccacctatttttccagtaggtaaattgactgagacttgcaaaatacccctgagagttgtcaggggtgtcttctgcctggtctatagcg

SEQ ID NO: 452312 - DNA, 120 bp, Artificial Sequence
  ENSG00000155966_101 (sequence is synthesized)
tgtgtgtttgctttgtatctaacaggcacattcacgtctcgtgtactcatatgaagtatttcctaacattcccattagcctgtatataagaatcagaaagataatcccaacatgttgtaa

SEQ ID NO: 452313 - DNA, 120 bp, Artificial Sequence
  ENSG00000155966_102 (sequence is synthesized)
atgaagatgtgactctataacctttctcttcttcctggaaaaaaaaggacattttcatgcatattttaaacagaaattttgtatatttaagtgtcatagaaaatatttattgagtaactg

SEQ ID NO: 452314 - DNA, 120 bp, Artificial Sequence
  ENSG00000155966_103 (sequence is synthesized)
ggacacaaatgggaatttaattgtcatcatatgctttgtgtgtggggatgcttaccaacaccatgtcgctggaccattgtggcaagccataactgcacaaagagtacacatcgtcagtgt

SEQ ID NO: 452315 - DNA, 120 bp, Artificial Sequence
  ENSG00000155966_104 (sequence is synthesized)
gtgtgtgtgtgtgtgtgtgcgcgcacacacgtgcgtgtgtgtgtccctgcatgtgcaacatgtctagcttgctgtccttcatgggattttagctttcccttcttgaaaaacattatttta

SEQ ID NO: 452316 - DNA, 120 bp, Artificial Sequence
  ENSG00000155966_105 (sequence is synthesized)
cagttccaggaggccctggttacattactatatgaaggcagtgatttgaaatgaaaattcctttcctcttggaagctttggtcataatatcatggttcaattaaacggattccaccggac

SEQ ID NO: 452317 - DNA, 120 bp, Artificial Sequence
  ENSG00000155966_106 (sequence is synthesized)
tttgtgatgaaaaaggctctgttaaaatccaattgagtttccaagaggaaattgtagtaggtcaagatgcatgagagggaagatggaggccacctcaactggagaacatgagctgagttg

SEQ ID NO: 452318 - DNA, 120 bp, Artificial Sequence
  ENSG00000155966_107 (sequence is synthesized)
agccctcagtgttgaagttgacttgctccaagctgcagtctaaaaccctggggcccgtgcctggcctatgctccctcccaagtaagtagaggagcagaaccatcaggaacagcctgcctg

SEQ ID NO: 452319 - DNA, 120 bp, Artificial Sequence
  ENSG00000155966_108 (sequence is synthesized)
gctcctatgaagaaaacttcctgacgtcctgtccccaaaggaagaccctttccccaagggcaccccaggtggccattaaattgtgatgatcattcagaaagtgcccccttggctttatga

SEQ ID NO: 452320 - DNA, 120 bp, Artificial Sequence
  ENSG00000155966_109 (sequence is synthesized)
gaatccaattagtcttctgaaccaccttttcttgggtgcagatttccaacattcatgctcattgcagatccaccaactgtcactgttcttaacaagcatgctcgtcttgtcagaatttca

SEQ ID NO: 452321 - DNA, 120 bp, Artificial Sequence
  ENSG00000155966_110 (sequence is synthesized)
gtaagttccaatttcctgtacagaccagggtaaactgttctaaaatcaatcaattaatgaaatgttatctggtttttaaaagctggtttcatgtgctttatgtgtataaaactatatctg

SEQ ID NO: 452322 - DNA, 120 bp, Artificial Sequence
  ENSG00000155966_111 (sequence is synthesized)
cctgtgtggctttgcatttcaaatgtgtggcgcacaagcgttttgttggtgctttgttctcagtacagtaactctgtgtacaaacattttaatgtggttttgttgttttccaacaagatg

SEQ ID NO: 452323 - DNA, 120 bp, Artificial Sequence
  ENSG00000155966_112 (sequence is synthesized)
tctctgtaaaaatgatattggctgagctggtgcgttggtttctctcatagaggcattaactatactgccaatgcattgaattatttaaaaatgcaaaataaaatttttatgaaaatctca

SEQ ID NO: 452324 - DNA, 120 bp, Artificial Sequence
  ENSG00000155966_113 (sequence is synthesized)
agttttggttgtggcaacccagaggaaggttgcagtggcccatctatctatcccagatgtaagatatgcttcacccctctttcttgatccatgaagttcaaaaggaggcaccaagcattt

SEQ ID NO: 452325 - DNA, 120 bp, Artificial Sequence
  ENSG00000155966_114 (sequence is synthesized)
agtaagttattatttttattagttgcaaatgttaattttaacggactcgatgcatgtgaaaaaataaggtcataaaagagaccttggattttgagttaatctctattcatgacaatttaa

SEQ ID NO: 452326 - DNA, 120 bp, Artificial Sequence
  ENSG00000155966_115 (sequence is synthesized)
gatttgtgagagggagaatggatttgctctctgttgagtctaggcctgtgaaaagggaactggcatacccaggctttcattctggtggtaagccttcccagtgatccaagctgtgttgaa

SEQ ID NO: 452327 - DNA, 120 bp, Artificial Sequence
  ENSG00000155966_116 (sequence is synthesized)
gtgtggactatagagagcaagactccagctgcaaggtagaaggtacaggaaagcacgtggcaactcctaactggcagatcattctcacaattaaaggatgcttgaggatgacctgaagct

SEQ ID NO: 452328 - DNA, 120 bp, Artificial Sequence
  ENSG00000155970_0 (sequence is synthesized)
gttctctgccccctcccagctctggtgtgggcggcctccgctatggctgcgctgcgaaggctcttgtggccgccaccccgggtgtctcctccactctgcgctcaccagcccctccttggg

SEQ ID NO: 452329 - DNA, 120 bp, Artificial Sequence
  ENSG00000155970_1 (sequence is synthesized)
ccgtgggggcggcctgcggtgaccaccctgggccttcctggccggcccttctcctcccgagaggatgaggagagggctgtggcggaggcggcatggaggcggcggcggcgctggggggag

SEQ ID NO: 452330 - DNA, 120 bp, Artificial Sequence
  ENSG00000155970_2 (sequence is synthesized)
ctgagcgtggcggcggcggccggcggggggctggtcggcctggtatgctaccagctgtacggggaccccagggccggctcgccggcgaccgggcgaccctcaaagagcgcggccacggag

SEQ ID NO: 452331 - DNA, 120 bp, Artificial Sequence
  ENSG00000155970_3 (sequence is synthesized)
cccgaggacccgccccgcggccgggggatgctgcccatcccagtggcggctgccaaggagacggttgctattggcagaacagacattgaagacttagacctttatgccacatctcgggag

SEQ ID NO: 452332 - DNA, 120 bp, Artificial Sequence
  ENSG00000155970_4 (sequence is synthesized)
aggcgatttcgtttatttgcttctatagaatgtgaagggcagttattcatgactccgtatgattttattttggctgttacaacagatgagcccaaagttgccaaaacttggaagtcactt

SEQ ID NO: 452333 - DNA, 120 bp, Artificial Sequence
  ENSG00000155970_5 (sequence is synthesized)
tccaaacaggaattaaatcaaatgctcgcagaaacaccaccagtttggaaaggctcatcgaagctatttcgaaatcttaaagaaaaaggtgtgatttcttacacagaatatctttttctt

SEQ ID NO: 452334 - DNA, 120 bp, Artificial Sequence
  ENSG00000155970_6 (sequence is synthesized)
ttatgtattttaacaaagccacatgcagggttcagaatagctttcaacatgtttgacactgatggcaatgagatggtggataaaaaagagtttttggtgcttcaagagatattcaggaaa

SEQ ID NO: 452335 - DNA, 120 bp, Artificial Sequence
  ENSG00000155970_7 (sequence is synthesized)
aaaaatgaaaagagagaaattaaaggagatgaagaaaagcgtgcaatgctgcgtcttcaactttatggataccattctcctactaatagtgtacttaaaacagatgctgaggaacttgtc

SEQ ID NO: 452336 - DNA, 120 bp, Artificial Sequence
  ENSG00000155970_8 (sequence is synthesized)
tccagaagctattgggatacactgagacgtaacacaagccaagcactgttttcagacctcgcagagcgtgctgatgacatcacaagtttagtaacagatactacacttcttgtacacttt

SEQ ID NO: 452337 - DNA, 120 bp, Artificial Sequence
  ENSG00000155970_9 (sequence is synthesized)
tttggaaagaaaggaaaagctgagctcaactttgaagatttttatagattcatggataatctccaaacagaagttctagaaatagaattcctttcctactcaaatggaatgaataccatc

SEQ ID NO: 452338 - DNA, 120 bp, Artificial Sequence
  ENSG00000155970_10 (sequence is synthesized)
agtgaagaagattttgctcatattcttttacgatatacaaatgtggaaaatacatcagtatttttagaaaatgtgcgttacagtatacctgaagaaaagggcatcacatttgatgaattc

SEQ ID NO: 452339 - DNA, 120 bp, Artificial Sequence
  ENSG00000155970_11 (sequence is synthesized)
aggtcatttttccagtttttaaacaacctagaagactttgcaatagccctgaatatgtataactttgcaagtcgttctatagggcaagatgaatttaaacgtgccgtctatgtagctact

SEQ ID NO: 452340 - DNA, 120 bp, Artificial Sequence
  ENSG00000155970_12 (sequence is synthesized)
ggactcaaattttcaccacatttagtgaacactgtcttcaagatttttgatgttgacaaagatgatcaattaagttataaagaatttattggaattatgaaagacagactccatagagga

SEQ ID NO: 452341 - DNA, 120 bp, Artificial Sequence
  ENSG00000155970_13 (sequence is synthesized)
ttccggggttataaaacagtccagaagtaccccactttcaaatcctgcctgaagaaagaacttcacagcagataaatactcctaaaacaaagtttaaaggattactatctgtgtgacaaa

SEQ ID NO: 452342 - DNA, 120 bp, Artificial Sequence
  ENSG00000155970_14 (sequence is synthesized)
taacaagaagcaacattttgagaatggaagcaggtctgaggtcagaagaagtagagaatgaaggaaaaggtgaatgctatgaaattgatattttttctggaactgaattcttaaacataa

SEQ ID NO: 452343 - DNA, 120 bp, Artificial Sequence
  ENSG00000155970_15 (sequence is synthesized)
aacagataaaatgcatcttgttactacaaatgttatatatataaaatcaagttgagctttgccttgatttgctgaactctctgcactttttcattcccttcagaagtatatagatacttc

SEQ ID NO: 452344 - DNA, 120 bp, Artificial Sequence
  ENSG00000155970_16 (sequence is synthesized)
ttatttttttatttattcattagaaattttcctcatttcaaaataatttatgactcatggaatgttgatcgcctaaaaatgaacatcgcattttctttgattttggactgtgaacttatt

SEQ ID NO: 452345 - DNA, 120 bp, Artificial Sequence
  ENSG00000155970_17 (sequence is synthesized)
ttcagagatgaatattgcttgagatttataatacccttagaattaaattcctgttatttgcccagtttttaattacactgagataattttgaaaagaaatagaaattaagctactatata

SEQ ID NO: 452346 - DNA, 120 bp, Artificial Sequence
  ENSG00000155970_18 (sequence is synthesized)
aaacaattgtttacgtgtacttttaacttttaaaagtacttaattaacatatgttgtttgacttgtataaagtttttaaaaattgttgtttatttgccaaagtcaacagaatgtctgtta

SEQ ID NO: 452347 - DNA, 120 bp, Artificial Sequence
  ENSG00000155970_19 (sequence is synthesized)
ttgttttatgtatacggtaaagaaatttaaagtgtagaattttcctcccccaaaaagtcatgtgttgatagtagaagcagtggtagttgttgtaacagtaatcattgtcattgtcattat

SEQ ID NO: 452348 - DNA, 120 bp, Artificial Sequence
  ENSG00000155970_20 (sequence is synthesized)
cttcttaaacatgaagctgctcctgatcataggtggtacacgttaataacactagtaaaaataacgtcttacactctgtaacttactgcatattgttaatgtatgtctagcatcaaatga

SEQ ID NO: 452349 - DNA, 120 bp, Artificial Sequence
  ENSG00000155970_21 (sequence is synthesized)
gtattgtaaaagactaatataaaatggtttataagactgatgtatatattaagtagaagctaatatttttgtttcttgcaaaaggaccacttgaaaagtgatgctaaacagccagtaata

SEQ ID NO: 452350 - DNA, 120 bp, Artificial Sequence
  ENSG00000155970_22 (sequence is synthesized)
taatttattatttcaaaagaatatgtcttaaaagggaaaataaaaactttctgttgaatcacaacaaaattagatttgtacatagagaaacaatttgataatacttaatagaaatctgtt

SEQ ID NO: 452351 - DNA, 120 bp, Artificial Sequence
  ENSG00000155970_23 (sequence is synthesized)
tagaaatctgttcaattaaaaatgcttagtttatacaaagatactacacaaaaatagaacaattagtctgaattaacgtatttacatattgcatatggaagataagttcatttatcttcc

SEQ ID NO: 452352 - DNA, 120 bp, Artificial Sequence
  ENSG00000155970_24 (sequence is synthesized)
tttctaagacatatttaatgtaggttacatacactccaactattactttgcttttgcatatgaaactagaaaacactgactttgtttttataagttattaaatgtgaaattgatctgcat

SEQ ID NO: 452353 - DNA, 120 bp, Artificial Sequence
  ENSG00000155970_25 (sequence is synthesized)
gcatcagcttatttataaaagtaatgttatttccaagaaaatgttactcttagcattgattttgtatgttagactttttacattgtttatctaatattatttatgacagtaattttaaaa

SEQ ID NO: 452354 - DNA, 120 bp, Artificial Sequence
  ENSG00000155970_26 (sequence is synthesized)
ttattcataagttcaaggatcccatatagtataagaatataatttcacttgctttgaaagttgatttaattgactgactaaatgaaaatgcctacccactcatataacatacctcaggtc

SEQ ID NO: 452355 - DNA, 120 bp, Artificial Sequence
  ENSG00000155970_27 (sequence is synthesized)
tattttaccttacactgaatgttcttaatatgatttggtacctaaagtaattgaaaaaaatgcagtttcctttaatccttgactataagttatactatgttgcgtacatggcaaatcctg

SEQ ID NO: 452356 - DNA, 120 bp, Artificial Sequence
  ENSG00000155970_28 (sequence is synthesized)
caaatatagattaaaaattaaattagcccattgaaatcctttataattctgtcattttcccaaggaagaatagcattgtacatatgcaatctttattttattctttattgcttatcagag

SEQ ID NO: 452357 - DNA, 120 bp, Artificial Sequence
  ENSG00000155970_29 (sequence is synthesized)
tgagtggatgaaaacatttgtaaggctgcaacataatattaaaatgtgaataaataaatgttctgataaaatagaaaagaaagtaaattacagtgatttccatcatattatcactcttga

SEQ ID NO: 452358 - DNA, 120 bp, Artificial Sequence
  ENSG00000155970_30 (sequence is synthesized)
attttatcatctataaaatgagagataaaaatatctcactgaattgttacttatatcaatttaaaatttgctagtggtttgaaaataataatgtactgactacatgtatgctgttattgt

SEQ ID NO: 452359 - DNA, 120 bp, Artificial Sequence
  ENSG00000155970_31 (sequence is synthesized)
cagtgtttccttctataaactgttctttggaaaaattaagttatacataaaattcatattaaactttttacagaaagcatacatgataaacagtttatggtacttctcagaatcatttca

SEQ ID NO: 452360 - DNA, 120 bp, Artificial Sequence
  ENSG00000155970_32 (sequence is synthesized)
taataagcaatttatttagcttaagttccaacttactgttcttattataaattgcaaagcaacctgtcttacattcttacattatcttaaaataaatatttctgcccttgaatcaagaaa

SEQ ID NO: 452361 - DNA, 120 bp, Artificial Sequence
  ENSG00000155970_33 (sequence is synthesized)
ttttaactttatcctcaaaattgttgttatggttaggattattcccattttatagataagaaagctgaaggttaaaaaaagtcagtgacccatgtcttctaattttaaattttgttctat

SEQ ID NO: 452362 - DNA, 120 bp, Artificial Sequence
  ENSG00000155970_34 (sequence is synthesized)
tagagcaggctgcctcttcaacttaaagttctggggacagtaatgcctttgagagctactccaattatactagtctcccctcacttatggagccccacaagactggcaccactaatatcc

SEQ ID NO: 452363 - DNA, 120 bp, Artificial Sequence
  ENSG00000155970_35 (sequence is synthesized)
accattctcctactaatagtgtatgtacaatactttaaatgttctttatgtatatagccctcacctgttatacttgataatgttatttctttatataaagctatatctgctgtttactaa

SEQ ID NO: 452364 - DNA, 120 bp, Artificial Sequence
  ENSG00000155970_36 (sequence is synthesized)
tgtattttaacaagtaagtatacttattgcttttatttctggatgcagctttattttttaaacgaatcttggaaagcagatcttaggttctcttactcttgaaaatcaatatccatgctg

SEQ ID NO: 452365 - DNA, 120 bp, Artificial Sequence
  ENSG00000155970_37 (sequence is synthesized)
ttctgcaaaattcatgtttaatgctacagaaaaatgctaagcatagcactgtaaagagtcaaaaacataaatgctacagcttatggtatagtaataaatgctcataaattataaatttaa

SEQ ID NO: 452366 - DNA, 120 bp, Artificial Sequence
  ENSG00000155974_0 (sequence is synthesized)
ctgctgctgctgcagccaccagagcagagagccttgagtacactttgccacagaaagcagtgagcaagaatgatagctgtctcttttaaatgccgttgtcaaattctgaggcgacttact

SEQ ID NO: 452367 - DNA, 120 bp, Artificial Sequence
  ENSG00000155974_1 (sequence is synthesized)
aaagatgagagtccctacactaaatccgccagccagacaaagccgcctgatggagcgttggctgtgaggagacagagcatcccagaggaattcaagggctccacagtcgtcgagctgatg

SEQ ID NO: 452368 - DNA, 120 bp, Artificial Sequence
  ENSG00000155974_2 (sequence is synthesized)
aagaaggaaggcactaccctgggtctgacggtatcgggaggaattgataaggatggcaagccaagagtatctaatctgcggcaaggaggaattgctgctagaagtgaccagctggatgtg

SEQ ID NO: 452369 - DNA, 120 bp, Artificial Sequence
  ENSG00000155974_3 (sequence is synthesized)
ggtgactacatcaaagcagtgaatggaatcaacctggccaaattccgccatgacgagatcatcagcttgctgaagaatgtgggagaaagagtggttcttgaagtagagtacgagcttcca

SEQ ID NO: 452370 - DNA, 120 bp, Artificial Sequence
  ENSG00000155974_4 (sequence is synthesized)
ccggtctctgtgcaaggatcaagtgttattttccgaacagtggaggtcacattacataaagaaggcaatacctttggttttgtaattcgagggggagcacatgatgatagaaataaatct

SEQ ID NO: 452371 - DNA, 120 bp, Artificial Sequence
  ENSG00000155974_5 (sequence is synthesized)
cgtccagttgtgataacatgtgttcgtcctggagggcctgctgacagagagggcacgatcaaacccggtgacaggttgctcagtgtggatggaattcggcttcttggaactacgcatgct

SEQ ID NO: 452372 - DNA, 120 bp, Artificial Sequence
  ENSG00000155974_6 (sequence is synthesized)
gaagccatgagtattcttaaacaatgtggacaagaagcagcactgctgatagaatatgatgtctcagtaatggactctgtggcaacagcatccgggccactactagtcgaagttgccaaa

SEQ ID NO: 452373 - DNA, 120 bp, Artificial Sequence
  ENSG00000155974_7 (sequence is synthesized)
actcctggtgccagccttggggttgccctaactacctcgatgtgctgtaacaaacaagtcattgtcatagacaaaatcaaatctgcaagtattgcagacagatgtggcgcattgcatgtg

SEQ ID NO: 452374 - DNA, 120 bp, Artificial Sequence
  ENSG00000155974_8 (sequence is synthesized)
ggagatcacatcctctccatcgatggaaccagcatggagtactgtacacttgcagaagcaacccagttcctggccaacaccactgaccaggtcaagcttgagatccttccccatcatcag

SEQ ID NO: 452375 - DNA, 120 bp, Artificial Sequence
  ENSG00000155974_9 (sequence is synthesized)
acccggctggccctaaaggggcccgaccatgcagctttggtgtcttcatccttctctcctacctccatgagtgcatacagcctgagttccctgaacatggggactctacctcgaagcctc

SEQ ID NO: 452376 - DNA, 120 bp, Artificial Sequence
  ENSG00000155974_10 (sequence is synthesized)
tactccaccagcccacgtggaaccatgatgaggaggagactgaaaaagaaagacttcaaaagctcattgtccttagcctccagcacagtaggattggctgggcaggttgttcacacagaa

SEQ ID NO: 452377 - DNA, 120 bp, Artificial Sequence
  ENSG00000155974_11 (sequence is synthesized)
accacagaggttgtgctgacggcagatcctgtcacaggatttgggatccaactgcagggcagtgtgtttgccacagaaactctctcttctccacctctgatttcctatatcgaagctgac

SEQ ID NO: 452378 - DNA, 120 bp, Artificial Sequence
  ENSG00000155974_12 (sequence is synthesized)
agcccagcagagagatgtggggtgctacagattggagacagagtgatggccatcaatggaattccaacagaagacagcaccttcgaagaagccagtcagctcctccgagactcttcaatc

SEQ ID NO: 452379 - DNA, 120 bp, Artificial Sequence
  ENSG00000155974_13 (sequence is synthesized)
acgagcaaggtcacactggaaatcgagtttgatgttgcagagtctgtcatcccaagtagtggaacatttcatgtaaagctgcctaagaagcacaatgtggaacttggaataaccataagt

SEQ ID NO: 452380 - DNA, 120 bp, Artificial Sequence
  ENSG00000155974_14 (sequence is synthesized)
tcaccatccagtagaaaaccaggagaccccctcgtcatttcagatatcaagaaagggagtgtggcacacagaactgggaccctggaacttggggataaattgctcgcaatagataatatc

SEQ ID NO: 452381 - DNA, 120 bp, Artificial Sequence
  ENSG00000155974_15 (sequence is synthesized)
cggctggacaactgttccatggaagatgcagttcagatcctccagcaatgtgaagacctggtgaagctcaaaatccgcaaagatgaagataattcagatgagcaagaaagttccggagca

SEQ ID NO: 452382 - DNA, 120 bp, Artificial Sequence
  ENSG00000155974_16 (sequence is synthesized)
attatttacaccgtggagcttaaacgctacggggggccccttggcatcacaatttcaggaactgaagagccgtttgatcctataatcatttcaagcctcactaaagggggattagctgaa

SEQ ID NO: 452383 - DNA, 120 bp, Artificial Sequence
  ENSG00000155974_17 (sequence is synthesized)
agaactggcgcaatccacataggagaccgaatcctagccatcaatagcagcagcttgaaagggaagcctctgagtgaagccatccatttgttacagatggcaggagagactgtcaccttg

SEQ ID NO: 452384 - DNA, 120 bp, Artificial Sequence
  ENSG00000155974_18 (sequence is synthesized)
aaaattaagaaacagacagatgcccagtcagcatcgagccccaagaagttccctatttctagccatttgagtgacctgggggatgtggaggaggactcctcaccagcacagaagccaggc

SEQ ID NO: 452385 - DNA, 120 bp, Artificial Sequence
  ENSG00000155974_19 (sequence is synthesized)
aagctctccgacatgtacccctccacggtgcccagtgtggacagtgctgtggattcatgggatgggtctgcaatagacaccagctatggaactcaaggcactagttttcaggcctcagga

SEQ ID NO: 452386 - DNA, 120 bp, Artificial Sequence
  ENSG00000155974_20 (sequence is synthesized)
atgtggggctgagttatgaagactgggaccggtccacagccagtggttttgcaggggctgccgatagtgcagagacagaacaagaggagaacttctggtctcaagcgctggaggatttgg

SEQ ID NO: 452387 - DNA, 120 bp, Artificial Sequence
  ENSG00000155974_21 (sequence is synthesized)
aaacctgcggacagtcaggaattctgagagaactggaggagaaagctgacaggcgtgtgtctttgagaaacatgactctcttggcaacaatcatgtcggggagcacgatgagtttgaatc

SEQ ID NO: 452388 - DNA, 120 bp, Artificial Sequence
  ENSG00000155974_22 (sequence is synthesized)
atgaggctccaacacctcgcagtcagctggggcgacaggccagcttccaggagcgcagcagctcgcggccgcactacagccaaacaactcggagcaacaccctgccttcagatgtgggta

SEQ ID NO: 452389 - DNA, 120 bp, Artificial Sequence
  ENSG00000155974_23 (sequence is synthesized)
ggaagtcagtaaccctgagaaaaatgaaacaagaaataaaggagatcatgtctccaactcctgtggagctgcacaaggtgaccttgtacaaggactctgacatggaggactttgggttca

SEQ ID NO: 452390 - DNA, 120 bp, Artificial Sequence
  ENSG00000155974_24 (sequence is synthesized)
gtgtagcagatggcttactggagaaaggagtgtatgtcaaaaatattcgcccagctgggccaggagatcttggtggcttaaagccctatgacaggctcttacaggtgaatcatgtccgaa

SEQ ID NO: 452391 - DNA, 120 bp, Artificial Sequence
  ENSG00000155974_25 (sequence is synthesized)
ccagagactttgactgctgccttgttgtgcccctcatagcagaatccgggaataagctggacctggttattagtagaaacccactggcttcacagaagtctatagaccaacagagtctac

SEQ ID NO: 452392 - DNA, 120 bp, Artificial Sequence
  ENSG00000155974_26 (sequence is synthesized)
caggagattggagtgaacagaacagtgcttttttccagcagcctagccacggtggtaatttggagacacgagaacccactaatacattatagcaacgctttttataaagcaggacaaaag

SEQ ID NO: 452393 - DNA, 120 bp, Artificial Sequence
  ENSG00000155974_27 (sequence is synthesized)
acaatatctacatggtgctaaaaatcctttaagatttctgtgacctttgaagcacagataatcaatcaacgtggcattaactgcaagcacaggggtcttttaaatctctctcatggctca

SEQ ID NO: 452394 - DNA, 120 bp, Artificial Sequence
  ENSG00000155974_28 (sequence is synthesized)
tgttcacttcccttttcaagttgaagaggtttcttttttggtgaccactatggtatatggtgggcaatgccctgccagtcccaacggtagagaaaaataggccgtcccccacaactctac

SEQ ID NO: 452395 - DNA, 120 bp, Artificial Sequence
  ENSG00000155974_29 (sequence is synthesized)
aattaacatcagaggaaattttttacaagttcatcttactatcactttttaaaaagagaaacatctgtttgaaaatattctctgtgatgatttccttaattcactttgaaatcagtttct

SEQ ID NO: 452396 - DNA, 120 bp, Artificial Sequence
  ENSG00000155974_30 (sequence is synthesized)
tactatgaagtcattaatgtaagaacttggccaacaaagcttttcttctcataggctggctctactaggggaactagtgtttggtaaactgctgggactaccacaatgggaggggtacag

SEQ ID NO: 452397 - DNA, 120 bp, Artificial Sequence
  ENSG00000155974_31 (sequence is synthesized)
gtataaaattaagttatcttaaaatgtttcagcaatgatgcacgtaggagaccataataggtggtggtaaatgttttgcccacgtataggaatgattttaactaagatgtatgctattcc

SEQ ID NO: 452398 - DNA, 120 bp, Artificial Sequence
  ENSG00000155974_32 (sequence is synthesized)
ctatgcaacaaattatcaaacaggatatgtcttgtgacctgttttttttttaaggacacatttttaatagctgaaaatctctgataatgaattagagtgtgtagtaaacatgagaattag

SEQ ID NO: 452399 - DNA, 120 bp, Artificial Sequence
  ENSG00000155974_33 (sequence is synthesized)
ttatattatcttatttttaaaattcaagactaagaacttcagagaatgaagagtctattaaaatgaggttcatcttaatgataggcaaaccaaactcatactgcttgacatgttttgaaa

SEQ ID NO: 452400 - DNA, 120 bp, Artificial Sequence
  ENSG00000155974_34 (sequence is synthesized)
actggtaatattgagggtgtacagcacatgtacttaaaaatgacactggactatcttttgctctgagccatgccacttaccgaaattgtaaatacatttttcacaaatgcattgccaatt

SEQ ID NO: 452401 - DNA, 120 bp, Artificial Sequence
  ENSG00000155974_35 (sequence is synthesized)
attaccatccctcaaagcaataaattgtgacagttgctttaaatgtttgtcagcaactgttttcatttgttcagatattttgaatagctacactaataactgttattatttggtgaacat

SEQ ID NO: 452402 - DNA, 120 bp, Artificial Sequence
  ENSG00000155974_36 (sequence is synthesized)
aaaaaaataaatagatctgtatattgatggtagactctccatattgaaatgattattttccaaacattttcattttggtcaataattcaaactaccacttaggcaaagtattcgaacact

SEQ ID NO: 452403 - DNA, 120 bp, Artificial Sequence
  ENSG00000155974_37 (sequence is synthesized)
gtgtcctttgtttaaggaaatataaaaaaaaaatcacctttctttttgtgcaaaaaaaatattatttcaatcacatttcagaaccgccagggcaagaaagtataaagcaggatcatgtta

SEQ ID NO: 452404 - DNA, 120 bp, Artificial Sequence
  ENSG00000155974_38 (sequence is synthesized)
tcatgttaagaaaaaagaaaaaaagatcatgagtcacttaaatatgtatttttatttgtaacaaacaagtattaaactgtaaagtatttttgtacaaatttaatactttaatagcatggt

SEQ ID NO: 452405 - DNA, 120 bp, Artificial Sequence
  ENSG00000155974_39 (sequence is synthesized)
tctatgtatggttttggggaattcaaaattgttcaaatatttgtatggaaaaaaataaaaccctctaccaaatggaataaacagtgattttaaaaagccaaataaagaggatatgcatta

SEQ ID NO: 452406 - DNA, 120 bp, Artificial Sequence
  ENSG00000155974_40 (sequence is synthesized)
gtgattgtgaagggggaggaggctgtggcaggcaggggtggtagtagtagtgaatgacacagatttgccagatgacatgtagcggacctctgcatcagccaagaggaattaagctttgtc

SEQ ID NO: 452407 - DNA, 120 bp, Artificial Sequence
  ENSG00000155974_41 (sequence is synthesized)
ttcctgggccagcaaccacagcagccttcacaccaaccatcactataacacgtaccaccctgaccattgcagagtaccagccctgacattcccgaaagcacctcctccaaacagccctcc

SEQ ID NO: 452408 - DNA, 120 bp, Artificial Sequence
  ENSG00000155974_42 (sequence is synthesized)
gatggaccgcttcctgggttttgtcaaggcgataagaagatctaggagaagaaaggggaaaaagtaccgaccagaagaggattaccacgagggctatgaggatgtctattattacgcttc

SEQ ID NO: 452409 - DNA, 120 bp, Artificial Sequence
  ENSG00000155974_43 (sequence is synthesized)
agaagaggattaccacgagggctatgaggatgtctattattacgcttcagagcattttcgaagtaagcgcttctctccatcctccggttccttctcgcatgctggggctaacaataaacc

SEQ ID NO: 452410 - DNA, 120 bp, Artificial Sequence
  ENSG00000155974_44 (sequence is synthesized)
gaatatccctatctgcttgcaggcagaggagcaggagagaggaagaagattgctgtctggtttgaactggaatttctcgctatgtcccactggaggtatgtcatagtctgctcttctcac

SEQ ID NO: 452411 - DNA, 120 bp, Artificial Sequence
  ENSG00000155974_45 (sequence is synthesized)
atatccctatctgcttgcaggcagaggagcaggagagagatgagagtccctacactaaatccgccagccagacaaagccgcctgatggagcgttggctgtgaggagacagagcatcccag

SEQ ID NO: 452412 - DNA, 120 bp, Artificial Sequence
  ENSG00000155974_46 (sequence is synthesized)
ggtgtccattgagaagttcttaattcgtttctgtaagatatattcaaggtggcctcatgaatcccatctgttagagcccactgagtggaaagtgaatgcttaaaatgtagtttacagtaa

SEQ ID NO: 452413 - DNA, 120 bp, Artificial Sequence
  ENSG00000155974_47 (sequence is synthesized)
gcaaatgttagagcatttcaatttgcctcaaaactgccaggggtggtatttgattaaataaactcaatggcttaagtacttaaattggatttgagatgtgcattataaatgtcacttgca

SEQ ID NO: 452414 - DNA, 120 bp, Artificial Sequence
  ENSG00000155974_48 (sequence is synthesized)
aagcattttccagactttcatagttcaattagtacatccattttccagcctttggttttgccctgaagagactgtatttttacctcgcagaaggagaaatgtgcttactgttgagcacca

SEQ ID NO: 452415 - DNA, 120 bp, Artificial Sequence
  ENSG00000155974_49 (sequence is synthesized)
taaagtgatagtgcagaaagaagactggatgtggaatgagaactgaagttagagttttaagtcctcacaaaaggatttgcctgatacctgtccttagaggaattcaagggctccacagtc

SEQ ID NO: 452416 - DNA, 120 bp, Artificial Sequence
  ENSG00000155974_50 (sequence is synthesized)
agagcattttcgaaagtctcgctctgttgcccgggctggagtgtggtggcttgatcctggttcaacctctgcctcccaggttcaaggagtctcgtgcctcagcctcctaagtacctggga

SEQ ID NO: 452417 - DNA, 120 bp, Artificial Sequence
  ENSG00000155974_51 (sequence is synthesized)
ttacagagtcatttctacagaaagaagcaggactgtttctcatcaggattctatgctcgtgtccagaactgtgaaatgaggagtggtgacgctgactatacctccttttaattgagacag

SEQ ID NO: 452418 - DNA, 120 bp, Artificial Sequence
  ENSG00000155974_52 (sequence is synthesized)
acactttgccacagaaagcagtgagcaagaatgatagctgtctcttttaaatgccgttgtcaaattctgaggcgacttactaaagaggaattcaagggctccacagtcgtcgagctgatg

SEQ ID NO: 452419 - DNA, 120 bp, Artificial Sequence
  ENSG00000155975_0 (sequence is synthesized)
gctgggcggccaggctccctggctggccggtttgggcgtctgggccgtgaaggtgggacctcctgttccgggccgcaagtttccctctccagccgcccgccgttcgtagcatgtccccca

SEQ ID NO: 452420 - DNA, 120 bp, Artificial Sequence
  ENSG00000155975_1 (sequence is synthesized)
gaactcggggagcgcaggcaggacaggcttagagaagacgcggtccccagcgcttgggccacggacgtcccaccccgctcctctgtcgctggagaaccgccgggccgagccactgggaga

SEQ ID NO: 452421 - DNA, 120 bp, Artificial Sequence
  ENSG00000155975_2 (sequence is synthesized)
agcaggccagagccttccagggcctccggcccgtggacccgaggaggatgagctggctttttcccctgaccaagagcgcctcctcctccgcggctgggtcccccggtggcctcaccagcc

SEQ ID NO: 452422 - DNA, 120 bp, Artificial Sequence
  ENSG00000155975_3 (sequence is synthesized)
tccagcagcagaagcagcgcctgatcgagtccctccggaactcacactccagtatagccgaaatacagaaagatgtggaatacagattgccattcaccataaacaacctgacaattaaca

SEQ ID NO: 452423 - DNA, 120 bp, Artificial Sequence
  ENSG00000155975_4 (sequence is synthesized)
ttaatatattgcttcctccacagtttcctcaggaaaaaccagtgatcagtgtttatccaccaatacgacatcacttaatggataaacaaggagtgtatgttacctctccattagtaaaca

SEQ ID NO: 452424 - DNA, 120 bp, Artificial Sequence
  ENSG00000155975_5 (sequence is synthesized)
attttacaatgcactcagatcttggaaaaattattcagagtctgttggatgagttttggaagaatcctccagttttagctcctacttcaacagcatttccttatctatacagtaacccaa

SEQ ID NO: 452425 - DNA, 120 bp, Artificial Sequence
  ENSG00000155975_6 (sequence is synthesized)
gtgggatgtctccttatgcttctcagggttttccatttcttcctccatatcctccacaagaagcaaacaggagtatcacttctttatctgttgctgacactgtttcttcttcaacaacaa

SEQ ID NO: 452426 - DNA, 120 bp, Artificial Sequence
  ENSG00000155975_7 (sequence is synthesized)
gtcataccacagccaagcctgccgctccttcatttggtgtcctttcaaatctgccattacccattcccacagtggatgcttcaataccgacaagccaaaatggttttgggtacaagatgc

SEQ ID NO: 452427 - DNA, 120 bp, Artificial Sequence
  ENSG00000155975_8 (sequence is synthesized)
cagatgtccctgatgcatttccagaactctcagaactaagtgtgtcacaactcacagatatgaatgaacaagaggaggtattactagaacagtttctgactttgcctcaactaaaacaaa

SEQ ID NO: 452428 - DNA, 120 bp, Artificial Sequence
  ENSG00000155975_9 (sequence is synthesized)
ttattaccgacaaagatgacttagtaaaaagtattgaggaactagcaagaaaaaatctccttttggagcccagcttggaagccaaaagacaaactgttttagataagtatgaattactta

SEQ ID NO: 452429 - DNA, 120 bp, Artificial Sequence
  ENSG00000155975_10 (sequence is synthesized)
cacagatgaagtccactttcgaaaagaagatgcaaaggcagcatgaacttagtgagagctgtagtgcaagtgcccttcaggcaagattgaaagtagctgcacatgaagctgaggaagaat

SEQ ID NO: 452430 - DNA, 120 bp, Artificial Sequence
  ENSG00000155975_11 (sequence is synthesized)
ctgataatattgcagaagacttcttggagggaaagatggaaatagatgattttctcagtagcttcatggaaaagagaacaatttgccactgtagaagagccaaggaagagaaacttcagc

SEQ ID NO: 452431 - DNA, 120 bp, Artificial Sequence
  ENSG00000155975_12 (sequence is synthesized)
aggcgatagcaatgcacagccaatttcatgctccactatagattttcctggaaacatgaactgccaagagaggaatgggacacaaaaccaaacactgttttatatttatggtttgcaaac

SEQ ID NO: 452432 - DNA, 120 bp, Artificial Sequence
  ENSG00000155975_13 (sequence is synthesized)
tggcatttcatcagtggctaaattcacagatatcctatatagattgtatacagaactgagactgattttgtaccgattagaatgattgctatgatctttgagaaatttttctgcactatt

SEQ ID NO: 452433 - DNA, 120 bp, Artificial Sequence
  ENSG00000155975_14 (sequence is synthesized)
tgcactgaaatgtttatttattgttgataaattgtatcatatttaagttccactgctgttcctcttaccttgattaaatgcctatgcatgtacttttagctagtttttaatattttataa

SEQ ID NO: 452434 - DNA, 120 bp, Artificial Sequence
  ENSG00000155975_15 (sequence is synthesized)
aacttcatttaaatttgtatttttaacttgaagttccatttctttatcaaggatggtatttagatttttttcctcttaaccttttttcaaaaactattttcaactgtgaggaaaccctta

SEQ ID NO: 452435 - DNA, 120 bp, Artificial Sequence
  ENSG00000155975_16 (sequence is synthesized)
tttttctttctttgtggataaaactttcaaaagcaatttaagatattcatagtgttaggaaacaccaaacctgcctatgtgccatctcacaaaagaaacttttaatacctacaataaatc

SEQ ID NO: 452436 - DNA, 120 bp, Artificial Sequence
  ENSG00000155975_17 (sequence is synthesized)
aaaagaataaaccagctgttcttatatattgtttcatttttaaaactaaagatgcatttaagaagcaatacaagtaaatattttacctaataggaaaaaaaaaagttgcctttcatttaa

SEQ ID NO: 452437 - DNA, 120 bp, Artificial Sequence
  ENSG00000155975_18 (sequence is synthesized)
ttcctaatgttaaaaacaatctttatgttaatatacactaaatctatacacaaaaaaagtcagtgaacttttctgacctttactgtgagttaccttttcctaagaggaaagctatagtaa

SEQ ID NO: 452438 - DNA, 120 bp, Artificial Sequence
  ENSG00000155975_19 (sequence is synthesized)
taagtaaaatttaatttttaggcaatcctgatttttaatgaatttaattgagtgttcttgtatactacattgagcagtttgcttctataccgtgtcacaaaattcatgtatttcttgaga

SEQ ID NO: 452439 - DNA, 120 bp, Artificial Sequence
  ENSG00000155975_20 (sequence is synthesized)
agccctaaaagctcataaaggaaaatgccgtgaactatgtagctcaggcttggtaaggtgccatctaaattacaaaacaaactaatgcataattttgcttaaatttcatcccagtatgat

SEQ ID NO: 452440 - DNA, 120 bp, Artificial Sequence
  ENSG00000155975_21 (sequence is synthesized)
tgtcttcccaacaccagcatatagtatagattgtctgtcttttttatattttttagttcttcctgtacatgtttttggcaataaagttataggaagaacaaaattattttgttagaatta

SEQ ID NO: 452441 - DNA, 120 bp, Artificial Sequence
  ENSG00000155975_22 (sequence is synthesized)
aaacatgcttaatatttagtctgtttgtggagggcaggtattcacgtggactgagatacaatgttggatacagaaaataactttcattgtcttcctgacactgtgctaaggacatgctgt

SEQ ID NO: 452442 - DNA, 120 bp, Artificial Sequence
  ENSG00000155975_23 (sequence is synthesized)
taaagcttcaaagtgaccagatgaggaaggaataattaattattactcctgatttgtagataactgaggtaagagtgtttcaaatttatgatagtcttttgggtattcagaaacctttcc

SEQ ID NO: 452443 - DNA, 120 bp, Artificial Sequence
  ENSG00000155975_24 (sequence is synthesized)
ttatactgcactggccaccagagcttaattttcccagcagttacagcaatgggagatagaacagtctcaatcttttgccaaccatcaggttcctagaaaccaggtaggtgtatcccataa

SEQ ID NO: 452444 - DNA, 120 bp, Artificial Sequence
  ENSG00000155975_25 (sequence is synthesized)
caagggaggagcataccacagcccctcatttgattaattcatttgatctatctatgttattaagtacctactaggaataaggcattgtggaaatactatacaaagataaacattgtttag

SEQ ID NO: 452445 - DNA, 120 bp, Artificial Sequence
  ENSG00000155975_26 (sequence is synthesized)
atgcttatctactttccttttcaccagaaaaacagaaaaaaaagaaacattttcttacagagtaaaaatgttctacataatcacatgagtagttcatctcagtgttttttattctttaaa

SEQ ID NO: 452446 - DNA, 120 bp, Artificial Sequence
  ENSG00000155975_27 (sequence is synthesized)
gttgaactatcccagtttcattctataccattcattggataaccttgttacaacccagtcatgaaacagagcagtgtgatcagttatctgcatttaacaaatagacaaatcagtttacat

SEQ ID NO: 452447 - DNA, 120 bp, Artificial Sequence
  ENSG00000155975_28 (sequence is synthesized)
aaaggttatgtatgtcacccacgatgaaaagaatctgcatttgaatatgcccgtatgaatgtgggttctgtttttgcaacagagattaagtgaccattttttctaattttatggctatat

SEQ ID NO: 452448 - DNA, 120 bp, Artificial Sequence
  ENSG00000155975_29 (sequence is synthesized)
attttcttcataaaaattggtcacatcggagaagcagtgccacaggaaaaatgaaatgcatgtgaaagtttgtattctgattttacaagatgagatagaaatcagaattaaagaggaata

SEQ ID NO: 452449 - DNA, 120 bp, Artificial Sequence
  ENSG00000155975_30 (sequence is synthesized)
cttaggagttactaggctaatcagtgtacgaatttgtcataggtagagatttaaaggttaatatcttaaaatagaagaaaattctaaatcaatcaatcagtgagatataaactaaacaga

SEQ ID NO: 452450 - DNA, 120 bp, Artificial Sequence
  ENSG00000155975_31 (sequence is synthesized)
cccacttcaaagttgaaagaaatttctaggcataaattgagactaggaaatttatatcagaatagagggtgcttgacacatatatatgcttaaattgaaggacagctcagattcattttt

SEQ ID NO: 452451 - DNA, 120 bp, Artificial Sequence
  ENSG00000155975_32 (sequence is synthesized)
aggagaagaaagtaaactaatgtgctcttaaagaataaaaatttattctatggtttctgtctctgatcatcaccttccattctataaaaagctcagttactgatttgctgggtcatggtc

SEQ ID NO: 452452 - DNA, 120 bp, Artificial Sequence
  ENSG00000155975_33 (sequence is synthesized)
aaaattcttacctatttatttcatatcaactttaaaaaataaattacttgcattctatatattactaattgggaagtaatatgcctcaaatcagttttatactggattattccctatgct

SEQ ID NO: 452453 - DNA, 120 bp, Artificial Sequence
  ENSG00000155975_34 (sequence is synthesized)
ttaaaccactgctctcaataaaacacttcctgattaatgtttgattattagatattttagtcttgttggggatattttagtcttgttgggttagccatgctctgaagaatctgtgaaagt

SEQ ID NO: 452454 - DNA, 120 bp, Artificial Sequence
  ENSG00000155975_35 (sequence is synthesized)
acagtaaagttttaataagcaataaatgtaaccttttatataaatctcagtgctaggttaacttctaataagcagacgaacatgttacataaattataatgtctgtcttgtaaaaaagtt

SEQ ID NO: 452455 - DNA, 120 bp, Artificial Sequence
  ENSG00000155975_36 (sequence is synthesized)
gaggggactaaaagtttatgactctgatatggaagttgtcatattaaaaaactacattttaaaacatcaaatatttatactatttgcttttcaaataaaagcatagtgctgtttggcata

SEQ ID NO: 452456 - DNA, 120 bp, Artificial Sequence
  ENSG00000155975_37 (sequence is synthesized)
cgcgatctcggttcactgcaacctccgtctcccggattcaagcaatcatcctccctcagctccccacacccctccgagtagctgggattacagattgcttcctccacagtttcctcagga

SEQ ID NO: 452457 - DNA, 120 bp, Artificial Sequence
  ENSG00000155975_38 (sequence is synthesized)
tacagattgcttcctccacagtttcctcaggaaaaaccagtgatcagtgtttatccaccaatacgacatcacttaatggataaacaaggagtgtatgttacctctccattagtaaacaat

SEQ ID NO: 452458 - DNA, 120 bp, Artificial Sequence
  ENSG00000155975_39 (sequence is synthesized)
ttccttatactgcactggccaccagagcttaattttcccagcagttacagcaatgggagatagaacagtctcaatcttttgccaaccatcaggttcctagaaaccagacatacactgtca

SEQ ID NO: 452459 - DNA, 120 bp, Artificial Sequence
  ENSG00000155975_40 (sequence is synthesized)
aacggaagaaattaaagccacatcctcaatattaggcaacagagtttctaagagtggacagctccaagaaggttgtgaaggaaacttcaggcagtgagaaacacggcttcatcagaatcc

SEQ ID NO: 452460 - DNA, 120 bp, Artificial Sequence
  ENSG00000155975_41 (sequence is synthesized)
gcatgctcaccaccacttggagaccgacagctcaaatcctccaccccggactcttggtcactgttggctgacagatctggatctgaacttttcagattgtcttgggttagaatcagagca

SEQ ID NO: 452461 - DNA, 120 bp, Artificial Sequence
  ENSG00000155975_42 (sequence is synthesized)
gaatcttcatcgccttgtgaagggctccgggatggaaatgatttcatattcccactgtaatcctggggagtgttggctatgctgttgtctgaggtagaaaaccctgagtgcttgctgggc

SEQ ID NO: 452462 - DNA, 120 bp, Artificial Sequence
  ENSG00000155975_43 (sequence is synthesized)
tcactttgcttactcttcaccttagtgcaatttaactggaccttttgaattttttccagcctctaagaaagaaataacaatttcaggggaaaaatcataaataacttatctttttctata

SEQ ID NO: 452463 - DNA, 120 bp, Artificial Sequence
  ENSG00000155975_44 (sequence is synthesized)
gttaacggtgcctgttcatcagccttaagcataattctgtcattatagttactgtgctatgtaacatagaatgctttgtattatataataagcataatataaacatataactagtagaaa

SEQ ID NO: 452464 - DNA, 120 bp, Artificial Sequence
  ENSG00000155975_45 (sequence is synthesized)
aggtcactgtataactgtgaacacttccccacggttgtgatttttaaagaaagtagatatatcgatatatccattggaccaaaatttacttttacagattctgtcaagaatatattacag

SEQ ID NO: 452465 - DNA, 120 bp, Artificial Sequence
  ENSG00000155975_46 (sequence is synthesized)
actgctctatgttccattgtggttgatgttttatttgattttaaggttaaaactggcagccttaggtgtatatgtaaaaattatttagaaccctatcagttaactaaagctgaaaaattg

SEQ ID NO: 452466 - DNA, 120 bp, Artificial Sequence
  ENSG00000155975_47 (sequence is synthesized)
gtttcacaaagaatggaaaatagaactgttgcaacatcaaaggaaagggaagccagagttttcatcagtgaatgcttctcgtctgagagtcacttatcacgtagtcagtcttcttgagtc

SEQ ID NO: 452467 - DNA, 120 bp, Artificial Sequence
  ENSG00000155975_48 (sequence is synthesized)
tctaagatttaccctgttggagcagtctctccccatctcacagcgaccagtgcatgtacatttctcacttctttcatagtcttgtccccacgctcaagaattactttatgttcatcttga

SEQ ID NO: 452468 - DNA, 120 bp, Artificial Sequence
  ENSG00000155975_49 (sequence is synthesized)
aatattaggcaacagagtttctaagagtggacagctccaagaaggttgtgaagtaatctgtaactgactgtcggggctgcatccccttttcaaagcggttatacattccactccaaaacc

SEQ ID NO: 452469 - DNA, 120 bp, Artificial Sequence
  ENSG00000155975_50 (sequence is synthesized)
accaccttatcacagtctgaaaattcacatcctcaagtcttctaaggtatctatgataccacagtcttaataataaccaaatgcaaatttcagcctcaaaaaagccactacttaaggtaa

SEQ ID NO: 452470 - DNA, 120 bp, Artificial Sequence
  ENSG00000155975_51 (sequence is synthesized)
ctatccagattctgtgattaaaaataaagtatagccgaaatacagaaagatgtggaatacagattgccattcaccataaacaacctgacaattaacattaatatattgcttcctccacag

SEQ ID NO: 452471 - DNA, 120 bp, Artificial Sequence
  ENSG00000155980_0 (sequence is synthesized)
agagagcccgaaaggaccagacgcccaggtcgcccgcatcccgctgccgcaggagagagacagcgcgccccggccctgctccccaggcttcgcccgggcgccctcaactctgtccccaga

SEQ ID NO: 452472 - DNA, 120 bp, Artificial Sequence
  ENSG00000155980_1 (sequence is synthesized)
gactgagcacctgtcctccgcctcggcctctgctgagagccctctcctctggagcacacaccacccctgcagcccaagaagagtcccagccccacgccggctaccaccatggcggagacc

SEQ ID NO: 452473 - DNA, 120 bp, Artificial Sequence
  ENSG00000155980_2 (sequence is synthesized)
aacaacgaatgtagcatcaaggtgctctgccgattccggcccctgaaccaggctgagattctgcggggagacaagttcatccccattttccaaggggacgacagcgtcgttattgggggg

SEQ ID NO: 452474 - DNA, 120 bp, Artificial Sequence
  ENSG00000155980_3 (sequence is synthesized)
aagccatatgtttttgaccgtgtattccccccaaacacgactcaagagcaagtttatcatgcatgtgccatgcagattgtcaaagatgtccttgctggctacaatggcaccatttttgct

SEQ ID NO: 452475 - DNA, 120 bp, Artificial Sequence
  ENSG00000155980_4 (sequence is synthesized)
tatggacagacatcctcagggaaaacacataccatggagggaaagctgcacgaccctcagctgatgggaatcattcctcgaattgcccgagacatcttcaaccacatctactccatggat

SEQ ID NO: 452476 - DNA, 120 bp, Artificial Sequence
  ENSG00000155980_5 (sequence is synthesized)
gagaaccttgagttccacatcaaggtttcttactttgaaatttacctggacaaaattcgtgaccttctggatgtgaccaagacaaatctgtccgtgcacgaggacaagaaccgggtgcca

SEQ ID NO: 452477 - DNA, 120 bp, Artificial Sequence
  ENSG00000155980_6 (sequence is synthesized)
tttgtcaagggttgtactgaacgctttgtgtccagcccggaggagattctggatgtgattgatgaagggaaatcaaatcgtcatgtggctgtcaccaacatgaatgaacacagctctcgg

SEQ ID NO: 452478 - DNA, 120 bp, Artificial Sequence
  ENSG00000155980_7 (sequence is synthesized)
agccacagcatcttcctcatcaacatcaagcaggagaacatggaaacggagcagaagctcagtgggaagctgtatctggtggacctggcagggagtgagaaggtcagcaagactggagca

SEQ ID NO: 452479 - DNA, 120 bp, Artificial Sequence
  ENSG00000155980_8 (sequence is synthesized)
gagggagccgtgctggacgaggcaaagaatatcaacaagtcactgtcagctctgggcaatgtgatctccgcactggctgagggcactaaaagctatgttccatatcgtgacagcaaaatg

SEQ ID NO: 452480 - DNA, 120 bp, Artificial Sequence
  ENSG00000155980_9 (sequence is synthesized)
acaaggattctccaggactctctcgggggaaactgccggacgactatgttcatctgttgctcaccatccagttataatgatgcagagaccaagtccaccctgatgtttgggcagcgggca

SEQ ID NO: 452481 - DNA, 120 bp, Artificial Sequence
  ENSG00000155980_10 (sequence is synthesized)
aagaccattaagaacactgcctcagtaaatttggagttgactgctgagcagtggaagaagaaatatgagaaggagaaggagaagacaaaggcccagaaggagacgattgcgaagctggag

SEQ ID NO: 452482 - DNA, 120 bp, Artificial Sequence
  ENSG00000155980_11 (sequence is synthesized)
gctgagctgagccggtggcgcaatggagagaatgtgcctgagacagagcgcctggctggggaggaggcagccctgggagccgagctctgtgaggagacccctgtgaatgacaactcatcc

SEQ ID NO: 452483 - DNA, 120 bp, Artificial Sequence
  ENSG00000155980_12 (sequence is synthesized)
atcgtggtgcgcatcgcgcccgaggagcggcagaaatacgaggaggagatccgccgtctctataagcagcttgacgacaaggatgatgaaatcaaccaacaaagccaactcatagagaag

SEQ ID NO: 452484 - DNA, 120 bp, Artificial Sequence
  ENSG00000155980_13 (sequence is synthesized)
ctcaagcagcaaatgctggaccaggaagagctgctggtgtccacccgaggagacaacgagaaggtccagcgggagctgagccacctgcaatcagagaacgatgccgctaaggatgaggtg

SEQ ID NO: 452485 - DNA, 120 bp, Artificial Sequence
  ENSG00000155980_14 (sequence is synthesized)
aaggaagtgctgcaggccctggaggagctggctgtgaactatgaccagaagtcccaggaggtggaggagaagagccagcagaaccagcttctggtggatgagctgtctcagaaggtggcc

SEQ ID NO: 452486 - DNA, 120 bp, Artificial Sequence
  ENSG00000155980_15 (sequence is synthesized)
accatgctgtccctggagtctgagttgcagcggctacaggaggtcagtggacaccagcgaaaacgaattgctgaggtgctgaacgggctgatgaaggatctgagcgagttcagtgtcatt

SEQ ID NO: 452487 - DNA, 120 bp, Artificial Sequence
  ENSG00000155980_16 (sequence is synthesized)
gtgggcaacggggagattaagctgccagtggagatcagtggggccatcgaggaggagttcactgtggcccgactctacatcagcaaaatcaaatcagaagtcaagtctgtggtcaagcgg

SEQ ID NO: 452488 - DNA, 120 bp, Artificial Sequence
  ENSG00000155980_17 (sequence is synthesized)
tgccggcagctggagaacctccaggtggagtgtcaccgcaagatggaagtgaccgggcgggagctctcatcctgccagctcctcatctctcagcatgaggccaagatccgctcgcttacg

SEQ ID NO: 452489 - DNA, 120 bp, Artificial Sequence
  ENSG00000155980_18 (sequence is synthesized)
gaatacatgcagagcgtggagctaaagaagcggcacctggaagagtcctatgactccttgagcgatgagctggccaagctccaggcccaggaaactgtgcatgaagtggccctgaaggac

SEQ ID NO: 452490 - DNA, 120 bp, Artificial Sequence
  ENSG00000155980_19 (sequence is synthesized)
aaggagcctgacactcaggatgcagatgaagtgaagaaggctctggagctgcagatggagagtcaccgggaggcccatcaccggcagctggcccggctccgggacgagatcaacgagaag

SEQ ID NO: 452491 - DNA, 120 bp, Artificial Sequence
  ENSG00000155980_20 (sequence is synthesized)
cagaagaccattgatgagctcaaagacctaaatcagaagctccagttagagctagagaagcttcaggctgactacgagaagctgaagagcgaagaacacgagaagagcaccaagctgcag

SEQ ID NO: 452492 - DNA, 120 bp, Artificial Sequence
  ENSG00000155980_21 (sequence is synthesized)
gagctgacatttctgtacgagcgacatgagcagtccaagcaggacctcaagggtctggaggagacagttgcccgggaactccagaccctccacaaccttcgcaagctgttcgttcaagac

SEQ ID NO: 452493 - DNA, 120 bp, Artificial Sequence
  ENSG00000155980_22 (sequence is synthesized)
gtcacgactcgagtcaagaaaagtgcagaaatggagcccgaagacagtggggggattcactcccaaaagcagaagatttcctttcttgagaacaacctggaacagcttacaaaggttcac

SEQ ID NO: 452494 - DNA, 120 bp, Artificial Sequence
  ENSG00000155980_23 (sequence is synthesized)
aaacagctggtacgtgacaatgcagatctgcgttgtgagcttcctaaattggaaaaacgacttagggctacggctgagagagttaaggccctggagggtgcactgaaggaggccaaggag

SEQ ID NO: 452495 - DNA, 120 bp, Artificial Sequence
  ENSG00000155980_24 (sequence is synthesized)
gccggtaccagcaggaggtggaccgcatcaaggaggccgttcgctacaagagctcgggcaaacggggccattctgcccagattgccaaacccgtccggcctggccactacccagcatcct

SEQ ID NO: 452496 - DNA, 120 bp, Artificial Sequence
  ENSG00000155980_25 (sequence is synthesized)
cacccaccaacccctatggcacccggagccctgagtgcatcagttacaccaacagcctcttccagaactaccagaatctctacctgcaggccacacccagctccacctcagatatgtact

SEQ ID NO: 452497 - DNA, 120 bp, Artificial Sequence
  ENSG00000155980_26 (sequence is synthesized)
ttgcaaactcctgtaccagcagtggagccacatcttctggcggccccttggcttcctaccagaaggccaacatggacaatggaaatgccacagatatcaatgacaataggagtgacctgc

SEQ ID NO: 452498 - DNA, 120 bp, Artificial Sequence
  ENSG00000155980_27 (sequence is synthesized)
cgtgtggctatgaggctgaggaccaggccaagcttttccctctccaccaagagacagcagccagctaatctcccacacccacggctgcatacctgcactttcagtttctaagagggactg

SEQ ID NO: 452499 - DNA, 120 bp, Artificial Sequence
  ENSG00000155980_28 (sequence is synthesized)
aggcctcttctcagcatgctgcaaacctgtggtctctgatactaactccctccccaacccctgttgttggactgtactatgtttgatgtcttctcttacttactctgtatctctttgtac

SEQ ID NO: 452500 - DNA, 120 bp, Artificial Sequence
  ENSG00000155980_29 (sequence is synthesized)
tctgtatctatatatcaaaagctgctgctatgtctctcttctgtcttattctcaagtatctactgatgtatttagcaatttcaaagcatagtctaccttccttatttggggcaataggga

SEQ ID NO: 452501 - DNA, 120 bp, Artificial Sequence
  ENSG00000155980_30 (sequence is synthesized)
ggagggtgaatgtttcttctttctcatctactcgtctcacactgagtggtgttagtcactgagtagaggtcacagagatgacaaaaggaaaaatgggagctagagggttgtgacccttca

SEQ ID NO: 452502 - DNA, 120 bp, Artificial Sequence
  ENSG00000155980_31 (sequence is synthesized)
tacacacacgcacgcacgcacacaaacatgcacacacgcatgcacacacacaaagccttaagcagaagaatgtcttagcatcatgagacagagaaatagactcttcctccctcctctttc

SEQ ID NO: 452503 - DNA, 120 bp, Artificial Sequence
  ENSG00000155980_32 (sequence is synthesized)
acatatagcacaggggaaggtaaaatggaagggctgctaattgagacatataattttcttcatacacccctcaccttaatcaaaggattcaggtgttacttctgccctacaaagtctgcc

SEQ ID NO: 452504 - DNA, 120 bp, Artificial Sequence
  ENSG00000155980_33 (sequence is synthesized)
ttttgcctccctcttcctgttttcccctggactgagaaatgggttgctcaagggaccatttccctttttcttcaagctccttttgatattccctgccccagagctcatgaccagaaccca

SEQ ID NO: 452505 - DNA, 120 bp, Artificial Sequence
  ENSG00000155980_34 (sequence is synthesized)
gagctgatttaaaatattttgaaaaatggaggaggcagactgctcccagcagcctgtcaatggctgctcatctgtccatggagatggttacaggcaggtgtagtcaaaatgattgattcc

SEQ ID NO: 452506 - DNA, 120 bp, Artificial Sequence
  ENSG00000155980_35 (sequence is synthesized)
ttgggtttgggggtgaataggctgggaaatttctgagccttttttttttgtcacagtgccctcaagttgaagtgatgagctggatttctttcttgttccatactgggcggcatgctcctc

SEQ ID NO: 452507 - DNA, 120 bp, Artificial Sequence
  ENSG00000155980_36 (sequence is synthesized)
ccatctccaccccttggtttgggggcttccagctcattggcaaaatctctctagttgccttcctttcaagctggagcctgacttttccccaatgtacattttttttttctccacaaagag

SEQ ID NO: 452508 - DNA, 120 bp, Artificial Sequence
  ENSG00000155980_37 (sequence is synthesized)
ttccttctctaatgtccccatctggtattaagtgcactttaaagaaaggggcagggtggattttcaagaggtgggaagctctaaggcttgaccctgaggggtcttctcccagccattctc

SEQ ID NO: 452509 - DNA, 120 bp, Artificial Sequence
  ENSG00000155980_38 (sequence is synthesized)
agcccatatgcagcaccctccatactgaagaggactgttgttttagtttcagacggtcctttccttccacatggtgctaaggtggttttctaggtaactgcagggatggaggtcactagc

SEQ ID NO: 452510 - DNA, 120 bp, Artificial Sequence
  ENSG00000155980_39 (sequence is synthesized)
cattccaaaccaggagagaaagtctggtgtcctgatatccagtcttttctaggaggaagaccaagattctccagcggcagggcagcctatcacccaacttctaagtcaggaaaggaagct

SEQ ID NO: 452511 - DNA, 120 bp, Artificial Sequence
  ENSG00000155980_40 (sequence is synthesized)
gagtgggaatgccagctggtaagcgcaggctgcactggcccatgactccttcaaggaaaagaggccctgctccctttacctgctgagctccttttagcagttagggagaactgcaggggg

SEQ ID NO: 452512 - DNA, 120 bp, Artificial Sequence
  ENSG00000155980_41 (sequence is synthesized)
aaaaataccagtggagtgtggaataaatccaaagcagtgatttttaaatgtttttcaaaaacaaatcttacatagaaccccaatataaaaaataaagtaatgcagacctgggcagtttgc

SEQ ID NO: 452513 - DNA, 120 bp, Artificial Sequence
  ENSG00000155980_42 (sequence is synthesized)
atttttttttttttttttttttggtggaagaagtctcagcgtctcttaggactgactgttcaaaggctcctcagcaaatgagcccttgaacagtcctaagagaccctgaggattctgtgg

SEQ ID NO: 452514 - DNA, 120 bp, Artificial Sequence
  ENSG00000155980_43 (sequence is synthesized)
agtagtttgaaaaccattgttctgaggaagggggtccaatctggctcctctgcactaaagctgcaactcatggaaaagagggcaacggtggggtagacaagccatgctgtctccagaccc

SEQ ID NO: 452515 - DNA, 120 bp, Artificial Sequence
  ENSG00000155980_44 (sequence is synthesized)
actagggtggaaggaaggttcctgtgggcctgtggacttaggctaatatttgctgtcagcagggcacttaagaatccagggggttttatgtaatgttgccaccacatggttcttttaaaa

SEQ ID NO: 452516 - DNA, 120 bp, Artificial Sequence
  ENSG00000155980_45 (sequence is synthesized)
acacataaggaaatgtgagggtgtagcgcagatgaggagagagatgacacagagggagcagccttctctttagcaagatgtaagggaaatataattcacttacataaaaaagaaacaaca

SEQ ID NO: 452517 - DNA, 120 bp, Artificial Sequence
  ENSG00000155980_46 (sequence is synthesized)
cacacgcaaacccttcaccagaagcttcacactacatcctcctcctcctcctgctccccaccttcaccgcatccctttcagagccagggtcactgcaaggggcacctggcctgcccactc

SEQ ID NO: 452518 - DNA, 120 bp, Artificial Sequence
  ENSG00000155980_47 (sequence is synthesized)
acatctgccaaaatgttgcatgccagcgtggaagacaaaccaaactgcgcaaccccctgtgtgtatttacttggtgtacatagataactttaaaataaaataaattcaatgataactcta

SEQ ID NO: 452519 - DNA, 120 bp, Artificial Sequence
  ENSG00000155980_48 (sequence is synthesized)
ttctcaacttcatgcctatgattagaaggtaggtgtctgccctcccagcctgtggccatgtttgttttcctctgctctctggggatggggagggctgagcagctctatcactgaggatga

SEQ ID NO: 452520 - DNA, 120 bp, Artificial Sequence
  ENSG00000155980_49 (sequence is synthesized)
gtgtggattagtggtcctcagactagtggagggtgggtgtcagaggctgcctctttcctctgctccatccagctttgcaaactcctgtaccagcagtggagccacatcttctggcggccc

SEQ ID NO: 452521 - DNA, 120 bp, Artificial Sequence
  ENSG00000155980_50 (sequence is synthesized)
acagtccccactacccctgggttctctgggtgggaccagaagaaatgattaaatttcccttgtgccccacttggaggttcctggagcctttggggaagggggagggagtgagactcattc

SEQ ID NO: 452522 - DNA, 120 bp, Artificial Sequence
  ENSG00000155980_51 (sequence is synthesized)
ttttcatcactgtgttgtccaggagatccagtcattcccctgcctcagtgcagaatatctcccctcctccaatcccatctgtggcttctccctattccagtgataaggtctggacgaaaa

SEQ ID NO: 452523 - DNA, 120 bp, Artificial Sequence
  ENSG00000156006_0 (sequence is synthesized)
actttattacagaccttggaagcaagaggattgcattcagcctagttcctggttgctggccaaagggatcatggacattgaagcatattttgaaagaattggctataagaactctaggaa

SEQ ID NO: 452524 - DNA, 120 bp, Artificial Sequence
  ENSG00000156006_1 (sequence is synthesized)
caaattggacttggaaacattaactgacattcttgagcaccagatccgggctgttccctttgagaaccttaacatgcattgtgggcaagccatggagttgggcttagaggctatttttga

SEQ ID NO: 452525 - DNA, 120 bp, Artificial Sequence
  ENSG00000156006_2 (sequence is synthesized)
tcacattgtaagaagaaaccggggtgggtggtgtctccaggtcaatcaacttctgtactgggctctgaccacaatcggttttcagaccacaatgttaggagggtatttttacatccctcc

SEQ ID NO: 452526 - DNA, 120 bp, Artificial Sequence
  ENSG00000156006_3 (sequence is synthesized)
agttaacaaatacagcactggcatggttcaccttctcctgcaggtgaccattgacggcaggaattacattgtcgatgctgggtctggaagctcctcccagatgtggcagcctctagaatt

SEQ ID NO: 452527 - DNA, 120 bp, Artificial Sequence
  ENSG00000156006_4 (sequence is synthesized)
aatttctgggaaggatcagcctcaggtgccttgcattttctgcttgacagaagagagaggaatctggtacctggaccaaatcaggagagagcagtatattacaaacaaagaatttcttaa

SEQ ID NO: 452528 - DNA, 120 bp, Artificial Sequence
  ENSG00000156006_5 (sequence is synthesized)
aatacatacctgcagacgtctccaacatcttcatttataaccacatcattttgttccttgcagaccccagaaggggtttactgtttggtgggcttcatcctcacctatagaaaattcaat

SEQ ID NO: 452529 - DNA, 120 bp, Artificial Sequence
  ENSG00000156006_6 (sequence is synthesized)
tataaagacaatacagatctggtcgagtttaaaactctcactgaggaagaggttgaagaagtgctgagaaatatatttaagatttccttggggagaaatctcgtgcccaaacctggtgat

SEQ ID NO: 452530 - DNA, 120 bp, Artificial Sequence
  ENSG00000156006_7 (sequence is synthesized)
ggatcccttactatttagaataaggaacaaaataaacccttgtgtatgtatcacccaactcactaattatcaacttatgtgctatcagatatcctctctaccctcacgttattttgaaga

SEQ ID NO: 452531 - DNA, 120 bp, Artificial Sequence
  ENSG00000156006_8 (sequence is synthesized)
aaatcctaaacatcaaatactttcatccataaaaatgtcagcatttattaaaaaacaataactttttaaagaaacataaggacacattttcaaattaataaaaataaaggcattttaagg

SEQ ID NO: 452532 - DNA, 120 bp, Artificial Sequence
  ENSG00000156006_9 (sequence is synthesized)
atggcctgtgattatcttgggaagcagagtgattcatgctagaaaacatttaatattgatttattgttgaattcatagtaaatttttactggtaaatgaataaagaatattgtggaaaaa

SEQ ID NO: 452533 - DNA, 120 bp, Artificial Sequence
  ENSG00000156009_0 (sequence is synthesized)
actgacgtggccgcggggatcagagagaagcgagggcctggttctgaggggtcggcttgagatcggctgagggaagcgggctcagggtctgtgaggaggcaaggttcgcagagaacaggc

SEQ ID NO: 452534 - DNA, 120 bp, Artificial Sequence
  ENSG00000156009_1 (sequence is synthesized)
cagccaggaggtcaggaggccccagagaagcactgaagaagacctgcctgtgggtctcaattgcccagctccggcccacactctcctgctgccctgacctgagtcatcatgcttcttggg

SEQ ID NO: 452535 - DNA, 120 bp, Artificial Sequence
  ENSG00000156009_2 (sequence is synthesized)
cagaagagtcagcgctacaaggctgaggaaggccttcaggcccaaggagaggcaccagggcttatggatgtgcagattcccacagctgaggagcagaaggctgcatcctcctcctctact

SEQ ID NO: 452536 - DNA, 120 bp, Artificial Sequence
  ENSG00000156009_3 (sequence is synthesized)
ctgatcatgggaacccttgaggaggtgactgattctgggtcaccaagtcctccccagagtcctgagggtgcctcctcttccctgactgtcaccgacagcactctgtggagccaatccgat

SEQ ID NO: 452537 - DNA, 120 bp, Artificial Sequence
  ENSG00000156009_4 (sequence is synthesized)
gagggttccagcagcaatgaagaggaggggccaagcacctccccggacccagctcacctggagtccctgttccgggaagcacttgatgagaaagtggctgagttagttcgtttcctgctc

SEQ ID NO: 452538 - DNA, 120 bp, Artificial Sequence
  ENSG00000156009_5 (sequence is synthesized)
cgcaaatatcaaattaaggagccggtcacaaaggcagaaatgcttgagagtgtcatcaaaaattacaagaaccactttcctgatatcttcagcaaagcctctgagtgcatgcaggtgatc

SEQ ID NO: 452539 - DNA, 120 bp, Artificial Sequence
  ENSG00000156009_6 (sequence is synthesized)
tttggcattgatgtgaaggaagtggaccctgccggccactcctacatccttgtcacctgcctgggcctctcctatgatggcctgctgggtgatgatcagagtacgcccaagaccggcctc

SEQ ID NO: 452540 - DNA, 120 bp, Artificial Sequence
  ENSG00000156009_7 (sequence is synthesized)
gcacagtgtctattggaagctcaggaagctgctcacccaagagtgggtgcaggagaactacctggagtaccgccaggcgcccggcagtgatcctgtgcgctacgagttcctgtggggtcc

SEQ ID NO: 452541 - DNA, 120 bp, Artificial Sequence
  ENSG00000156009_8 (sequence is synthesized)
aagggcccttgctgaaaccagctatgtgaaagtcctggagcatgtggtcagggtcaatgcaagagttcgcatttcctacccatccctgcatgaagaggctttgggagaggagaaaggagt

SEQ ID NO: 452542 - DNA, 120 bp, Artificial Sequence
  ENSG00000156009_9 (sequence is synthesized)
ttgagcaggagttgcagctagggccagtggggcaggttgtgggagggcctgggccagtgcacgttccagggccacatccaccactttccctgctctgttacatgaggcccattcttcact

SEQ ID NO: 452543 - DNA, 120 bp, Artificial Sequence
  ENSG00000156009_10 (sequence is synthesized)
ctgtgtttgaagagagcagtcacagttctcagtagtggggagcatgttgggtgtgagggaacacagtgtggaccatctctcagttcctgttctattgggcgatttggaggtttatctttg

SEQ ID NO: 452544 - DNA, 120 bp, Artificial Sequence
  ENSG00000156009_11 (sequence is synthesized)
tttccttttggaattgttccaatgttccttctaatggatggtgtaatgaacttcaacattcattttatgtatgacagtagacagacttactgctttttatatagtttaggagtaagagtc

SEQ ID NO: 452545 - DNA, 120 bp, Artificial Sequence
  ENSG00000156009_12 (sequence is synthesized)
ttgcttttcatttatactgggaaacccatgttatttcttgaattcagacactacaagagcagaggattaaggtttttttagaaatgtgaaacaacatagcagtaaaatacatgagataaa

SEQ ID NO: 452546 - DNA, 120 bp, Artificial Sequence
  ENSG00000156009_13 (sequence is synthesized)
gacataaagaaattaaacaatagttaattcttgccttacctgtacctcttagtgtaccctatgtacctgaatttgcttggcttctttgagaatgaaattgaattaaatatgaataaataa

SEQ ID NO: 452547 - DNA, 120 bp, Artificial Sequence
  ENSG00000156009_14 (sequence is synthesized)
gttgtccacccaggtgagccctgggtggacggatgtgacgccactgacgtggccgcggggatcagagagaagcgagggcctggttctgaggggtcggcttgagatcggctgagggaagcg

SEQ ID NO: 452548 - DNA, 120 bp, Artificial Sequence
  ENSG00000156009_15 (sequence is synthesized)
ggctcagggtctgtgaggaggcaagcaggcaaaaaacagatgggggcccaacagaaatctgcccggcctcttttgtcacccctgagagcatgagcaggactatcagctgaggcccctgtg

SEQ ID NO: 452549 - DNA, 120 bp, Artificial Sequence
  ENSG00000156009_16 (sequence is synthesized)
ttataccagactcattggtctcagggagaagaaggccttggtctgagggcactgcattcaggtcagcagagcgggggtccaaggccctgccaggagtcagggactcagaggacaccactc

SEQ ID NO: 452550 - DNA, 120 bp, Artificial Sequence
  ENSG00000156009_17 (sequence is synthesized)
ggctcagggtctgtgaggaggcaaggagctccaggaaccaggctgtgaggtcttggtctgaggcagtatcttcaatcacagagcataagaggcccaggcagtagtagcagtcaagctgag

SEQ ID NO: 452551 - DNA, 120 bp, Artificial Sequence
  ENSG00000156009_18 (sequence is synthesized)
gtggtgtttcccctgtatgtataccagaggcccctctggcatcagaacagcaggaaccccacagttcctggccctaccagcccttttgtcagtcctggagccttggcctttgccaggagg

SEQ ID NO: 452552 - DNA, 120 bp, Artificial Sequence
  ENSG00000156011_0 (sequence is synthesized)
aggctcggcagtcactgaacttgggagctgaagaatactggacggggcttcggagaggaaggatggtccaggcgcaccccaggggttgcgatgggctcttcttggtgtctgtatggttgc

SEQ ID NO: 452553 - DNA, 120 bp, Artificial Sequence
  ENSG00000156011_1 (sequence is synthesized)
tgcaatgctggggtgaaaacaacacggctagaagctcattctgaaatggggagcactgaaattttggaaaaggagaccccagaaaatctcagtaatggtaccagcagcaatgtggaagca

SEQ ID NO: 452554 - DNA, 120 bp, Artificial Sequence
  ENSG00000156011_2 (sequence is synthesized)
gccaaaaggttggccaaacgcctttatcagctggacagattcaaaagatcagatgttgcaaaacaccttggcaagaacaacgaatttagcaaactagttgcagaagaatatctgaagttt

SEQ ID NO: 452555 - DNA, 120 bp, Artificial Sequence
  ENSG00000156011_3 (sequence is synthesized)
tttgattttacaggaatgacgctggatcagtcactcaggtatttctttaaagcattctctcttgtgggagaaactcaagaacgagagagagttttaatacacttctccaatagatatttt

SEQ ID NO: 452556 - DNA, 120 bp, Artificial Sequence
  ENSG00000156011_4 (sequence is synthesized)
tattgtaacccagataccattgcttcacaagatggagtccattgccttacctgtgcaataatgcttcttaataccgatctacatggccacaatattggaaagaagatgacctgtcaggag

SEQ ID NO: 452557 - DNA, 120 bp, Artificial Sequence
  ENSG00000156011_5 (sequence is synthesized)
ttcattgcaaatctgcaaggggtaaatgagggtgttgatttctccaaggatctgctgaaagctctgtacaactcaatcaagaatgagaagcttgaatgggcagtagatgatgaagagaaa

SEQ ID NO: 452558 - DNA, 120 bp, Artificial Sequence
  ENSG00000156011_6 (sequence is synthesized)
aaaaagtctccctcagaaagtactgaggagaaagctaacggaacacatccaaagaccatcagtcgtattggaagtactactaacccatttttggacattcctcatgatccaaatgctgct

SEQ ID NO: 452559 - DNA, 120 bp, Artificial Sequence
  ENSG00000156011_7 (sequence is synthesized)
gtgtacaaaagtggattcttggctcggaaaattcatgcagatatggatggaaagaagactccaagaggaaaacgaggatggaaaaccttttatgctgtactgaagggaacagttctttac

SEQ ID NO: 452560 - DNA, 120 bp, Artificial Sequence
  ENSG00000156011_8 (sequence is synthesized)
ttgcaaaaggatgaatacaagccagaaaaggccttgtctgaagaggacttgaaaaacgctgtgagtgtgcaccacgcattggcatccaaggccacggactatgagaagaaaccaaacgtg

SEQ ID NO: 452561 - DNA, 120 bp, Artificial Sequence
  ENSG00000156011_9 (sequence is synthesized)
tttaaacttaaaactgccgactggagggtcttgctttttcaaactcagagcccagaggaaatgcaagggtggataaacaaaatcaattgtgtggcagctgtattttctgcaccaccattt

SEQ ID NO: 452562 - DNA, 120 bp, Artificial Sequence
  ENSG00000156011_10 (sequence is synthesized)
ccagcagcaatcggctctcagaagaagtttagccgcccacttctgcctgccactacaacaaaactgtctcaggaggagcaactgaagtcacatgaaagtaagctgaagcagatcaccacc

SEQ ID NO: 452563 - DNA, 120 bp, Artificial Sequence
  ENSG00000156011_11 (sequence is synthesized)
gagctggccgagcaccgctcatatccccccgacaagaaggtcaaagccaaggacgtcgatgagtacaaactgaaagaccactatctggagtttgagaaaacccgctatgaaatgtatgtc

SEQ ID NO: 452564 - DNA, 120 bp, Artificial Sequence
  ENSG00000156011_12 (sequence is synthesized)
agcattctcaaggaaggaggcaaagagctactgagtaacgatgaaagcgaggctgcaggactgaagaagtcgcactcgagtccttcgctgaacccggatacttctccaatcactgccaaa

SEQ ID NO: 452565 - DNA, 120 bp, Artificial Sequence
  ENSG00000156011_13 (sequence is synthesized)
gtcaagcgtaacgtgtcagagaggaaggatcaccgacctgaaacaccaagcattaagcaaaaagttacttagagtccatctgcggccaggaagtgctggtcatggagcaaaatagggttt

SEQ ID NO: 452566 - DNA, 120 bp, Artificial Sequence
  ENSG00000156011_14 (sequence is synthesized)
ttcaagatctttctggtaatccgtgaatatatttaaaaaaaaaaagtctgtgacaaaacggtgcattagtaattttttctattgtatatttttgttagtttctgtacagattgtctttgc

SEQ ID NO: 452567 - DNA, 120 bp, Artificial Sequence
  ENSG00000156011_15 (sequence is synthesized)
tcttgatttcttttgctttgatgatttttgcaacttgatagctaatgcaccttttctgtgaggaggaggggatcgtgatttcagaatgaattatgtatcccttctcttttggttttctct

SEQ ID NO: 452568 - DNA, 120 bp, Artificial Sequence
  ENSG00000156011_16 (sequence is synthesized)
tgtttgcagtctgctcagttgttttatgtattctcatatcaactgttaaacttttttttaaggttaaagaatttaatccattgtgaaacacttaactggacaaactgtagttttagtaaa

SEQ ID NO: 452569 - DNA, 120 bp, Artificial Sequence
  ENSG00000156011_17 (sequence is synthesized)
ttctagctggagttaatatacgcctttatatgtgaaatcttgcccagtcacagaggtagaattgagcactcacagatgctccagtaagaatcacagtgctgggaatctagttgctccaat

SEQ ID NO: 452570 - DNA, 120 bp, Artificial Sequence
  ENSG00000156011_18 (sequence is synthesized)
atgaggcagcttcatgtgcagcttagcacttgttgttgagatcggaccctgctggaagcagggaaaagaagcgtgaagatcgtaggattgagaacttagggaagcacattagcttgcttg

SEQ ID NO: 452571 - DNA, 120 bp, Artificial Sequence
  ENSG00000156011_19 (sequence is synthesized)
aagtgctgattccatttcagccaagcaagggaaagaggaagtggagtcattttgcctttgaaggctgaggaaagattgatacccagttaattttgtttgctaaaggatgggggcaataat

SEQ ID NO: 452572 - DNA, 120 bp, Artificial Sequence
  ENSG00000156011_20 (sequence is synthesized)
cggcccttgaggagctgcagcagtaggcatgtgctcagtctgcaggaattgttacctcactcccacagggtctagactagaaatccatcatctctatcgttgatatccttccatccagga

SEQ ID NO: 452573 - DNA, 120 bp, Artificial Sequence
  ENSG00000156011_21 (sequence is synthesized)
atagatttttcttactctacatatgtgtgtgtgcgtgcgtgtgtgtgcgtgtgtgggcatggggttgtgtcctggttgtgatattgaggtcttccttcctaacaaattaatactaaaatg

SEQ ID NO: 452574 - DNA, 120 bp, Artificial Sequence
  ENSG00000156011_22 (sequence is synthesized)
aaacagcttttcttgtgtccttaagacaaaataaggaaggaaaacgtagctgcagttgtccacgatggatattggttctttaaaatatatctgaaagtagtagtcagaatgaattatggt

SEQ ID NO: 452575 - DNA, 120 bp, Artificial Sequence
  ENSG00000156011_23 (sequence is synthesized)
tggaaaactgaggaatcttctggttgcaggtgcaaagtgactttgtttattcttgtctcagtctccttgatagccacttcactctgctactactcaactttctcctaaaaatacttcatc

SEQ ID NO: 452576 - DNA, 120 bp, Artificial Sequence
  ENSG00000156011_24 (sequence is synthesized)
tattttcagtcctttctttctgtctactcaaaatggttctattaactttgcagtcatgagcttgttccagttacagtccctttgaagttcagggtgataaacagaatattcttctgtaga

SEQ ID NO: 452577 - DNA, 120 bp, Artificial Sequence
  ENSG00000156011_25 (sequence is synthesized)
ggaagagaaaggagtgaaagtttagcccactgagacctagagctttgtgatttcctaaccttgaaactctgtaatccctaaagttaaaatctccgcaagtggcacaacttcagaactaat

SEQ ID NO: 452578 - DNA, 120 bp, Artificial Sequence
  ENSG00000156011_26 (sequence is synthesized)
agtatcactttgatttttctttttcctcccttagaaagtttctctagttctatagtttatttgttgaaggtactatgaccaaagaatcagctgctctacaggaatagcatggttccagtg

SEQ ID NO: 452579 - DNA, 120 bp, Artificial Sequence
  ENSG00000156011_27 (sequence is synthesized)
catttatttacagaattatttattaacgtttacttccttcccctctgtaaatgtccatgactattgcccagagaaggcttacccctctctagggttgcagttgctttctttgtaataagt

SEQ ID NO: 452580 - DNA, 120 bp, Artificial Sequence
  ENSG00000156011_28 (sequence is synthesized)
attttgccacacctgtaaaaaaaaaaacctcacttttaactctctgccttgtttgggtaaaggcagtaactaagtttatgtttcagaactgcaaaacaaacaggatagttaccaatatgg

SEQ ID NO: 452581 - DNA, 120 bp, Artificial Sequence
  ENSG00000156011_29 (sequence is synthesized)
cccatgtatcagattgatttttgtagcctctcactgaatccaacatatccacaagcaagttatctgtctttctacctgataatctaaattatcaggatatttgttttctgcctaaatgtt

SEQ ID NO: 452582 - DNA, 120 bp, Artificial Sequence
  ENSG00000156011_30 (sequence is synthesized)
tatactaagccgaggggagagaggtacctagaccatgtcatctacaagcttcagtaactaaagaaaaaggaacttccctgagtggcttgaatgtgtttgcccacagtctatatctatgta

SEQ ID NO: 452583 - DNA, 120 bp, Artificial Sequence
  ENSG00000156011_31 (sequence is synthesized)
tatagaatgtctgtatgtattttacttatttaatatacattgaatggtaccttgctacagtatttctgacatttagagtagtgttgaaatactcggctagcatcagcaccactatagcac

SEQ ID NO: 452584 - DNA, 120 bp, Artificial Sequence
  ENSG00000156011_32 (sequence is synthesized)
tgtccgtgtcatatgagtcactaatattaactccagggacttctggataggctaatagatcattggatacgaagggctcttttgaagcttcagtataccatgtttgcatagtttatcttt

SEQ ID NO: 452585 - DNA, 120 bp, Artificial Sequence
  ENSG00000156011_33 (sequence is synthesized)
aaaaacaactttaaaggttcttttgtgagccaggatctcagactgccgtagcatgatgctgtccatctttagcgcatgggctgagaacacctcttccctgaggcttctgaaggttgctgt

SEQ ID NO: 452586 - DNA, 120 bp, Artificial Sequence
  ENSG00000156011_34 (sequence is synthesized)
ctgtcatgagtgcatgaaggaggccaagagtttatgctatgggaggaaacagtcactgatttgcctagattctgagagtctggcccatagccaaccacattttcctttgggataatttat

SEQ ID NO: 452587 - DNA, 120 bp, Artificial Sequence
  ENSG00000156011_35 (sequence is synthesized)
ttcctgtggcatctagccagaagaaattgaggatgtttcctttcacagctgctccaagcctgttgcccaattcacggtacaagggagcaccccttccctttcctctgaaggtacgccacc

SEQ ID NO: 452588 - DNA, 120 bp, Artificial Sequence
  ENSG00000156011_36 (sequence is synthesized)
cacctccgtcgcccacctcagcgcccaggagccttgggacttccttccatatgataaatcattcttcttcacgtcaatacacttcatattaatttctagtacagaaaatcttgacagcta

SEQ ID NO: 452589 - DNA, 120 bp, Artificial Sequence
  ENSG00000156011_37 (sequence is synthesized)
tcagaatgccttggtcatagtgttgttgcaaaattgaccatacaggtggcccatgtataaaatctgaattttaggggtttgtccccacctcgcatgctggcttttacagggaggtgtctg

SEQ ID NO: 452590 - DNA, 120 bp, Artificial Sequence
  ENSG00000156011_38 (sequence is synthesized)
ggattcctcattagcaatcaaaacttaattactgggatgcagagtccttactttatcgccagcccgtaggcatttctgaagtgcacttttttgaaacatcattttgctaactctcagcag

SEQ ID NO: 452591 - DNA, 120 bp, Artificial Sequence
  ENSG00000156011_39 (sequence is synthesized)
tgtctaattaaactgagcaatacttttgtgaattttaattaatctcagcaaaaccatgatgggagagagtcctctgatggaaatgtagtccctggattatgtgtaacctttttattcctc

SEQ ID NO: 452592 - DNA, 120 bp, Artificial Sequence
  ENSG00000156011_40 (sequence is synthesized)
ttagatgcagaggatagaaagcattttttggtgcagtggtcttgtggcaaacacaagaccctctatgcgtctccaactgttatcctaatctagaaaatgaggactggcccctgggcaaaa

SEQ ID NO: 452593 - DNA, 120 bp, Artificial Sequence
  ENSG00000156011_41 (sequence is synthesized)
gtgacatgaggaatttactctggaagaggaaaatctgggtggctttccaaggctaagataggtttgtatttcaccctgtggccaagctacagaacttctgagattgtggaagaatttttg

SEQ ID NO: 452594 - DNA, 120 bp, Artificial Sequence
  ENSG00000156011_42 (sequence is synthesized)
caaccagcagggaaagaggcctcttactgcctaaacacaaagttacactgagcttttctactgtcctttgcctattgctccctctatcatgtaaagatctgggaaggatgagaggcaggg

SEQ ID NO: 452595 - DNA, 120 bp, Artificial Sequence
  ENSG00000156011_43 (sequence is synthesized)
cctgcttgtcatgagctgcactcttttctttttaactaatcattgacaattggaagaaaattgacgttaaagaagtttctccattgtcttactaacaaaaccttttgggtttcattaatt

SEQ ID NO: 452596 - DNA, 120 bp, Artificial Sequence
  ENSG00000156011_44 (sequence is synthesized)
gtccttgaaattgagttcctttggcatttttccttgcagtcatcagttaagcatgttgcatcctgaattcacagaagtttagctttgcaggtttgaatctctgtaatttaactcccgtgg

SEQ ID NO: 452597 - DNA, 120 bp, Artificial Sequence
  ENSG00000156011_45 (sequence is synthesized)
acttggtcgagttttcagcaggttgggagccacctctcttcatttcagcagtgagtcatcccttgacttttcaaatgacagaattttttccaattgtaaaattagcactgtaaaacaaag

SEQ ID NO: 452598 - DNA, 120 bp, Artificial Sequence
  ENSG00000156011_46 (sequence is synthesized)
aaccaaagtggcatcctaagagttgttaaacctgaagtctagtttatgaggaattgtccaagttggagtttaaatagtatctgcttttgtctcaaagcatctaagttattctgacagaaa

SEQ ID NO: 452599 - DNA, 120 bp, Artificial Sequence
  ENSG00000156011_47 (sequence is synthesized)
atggtaagtcagctttgcaggcagatgcgcctctgggcctcctaccttgctccacagctttctggccatcttgtctcccaggccatgccactgctctgccacatgtcagcaaatttcttt

SEQ ID NO: 452600 - DNA, 120 bp, Artificial Sequence
  ENSG00000156011_48 (sequence is synthesized)
ccaccagtcttatagcatcttacatgatcaaatcatcacagaataaccccgtgatagattattgatagcaatagagaggggctttgtcactgatttttctctcagattccttttccatct

SEQ ID NO: 452601 - DNA, 120 bp, Artificial Sequence
  ENSG00000156011_49 (sequence is synthesized)
ctcatccataaaggaaggactgaaatccaaaggcattctccttttgtacctacagtatccagaacccacgtgggcagccttctgcttatgacaataattggcccattgcatgcagagaga

SEQ ID NO: 452602 - DNA, 120 bp, Artificial Sequence
  ENSG00000156011_50 (sequence is synthesized)
atgtcttcatagagagaatgtcattaaatacttgaatctgcatgacagtttgacttgaatgcaacagcaggaaaattttgcaagttacataattgtatatacagtaggttttcttaagtc

SEQ ID NO: 452603 - DNA, 120 bp, Artificial Sequence
  ENSG00000156011_51 (sequence is synthesized)
tcttcggttcatcctttgtaatttgtgtgtgtatctgtagtattgcaggcttttggagactattcttacaggcagtatgtcagtcatcaaagaaaatgctgtcacctgccattgttgtat

SEQ ID NO: 452604 - DNA, 120 bp, Artificial Sequence
  ENSG00000156011_52 (sequence is synthesized)
ttgtgggtatttatagttgtatgtatgtaaatgcatcagtgtgtagattgcatatcagtgtatggtacatgtacatcaaaattatttttgtccttaatcagtgtgatatgaaaagcaagt

SEQ ID NO: 452605 - DNA, 120 bp, Artificial Sequence
  ENSG00000156011_53 (sequence is synthesized)
aagcaagtacaacctcataggactgattatataatgaagttgttgagagtatatatagtggtattgttttattaaacttaaactcaaataatattttgattaaaatttttaataagactt

SEQ ID NO: 452606 - DNA, 120 bp, Artificial Sequence
  ENSG00000156011_54 (sequence is synthesized)
aaaattctttgagctttgaatcaccagggcaaaaatgactttcaactaaccttgtgaatcttttgcagtgtactgtgtgcaataccaagggcatagctccctgtaatttgggaaatacag

SEQ ID NO: 452607 - DNA, 120 bp, Artificial Sequence
  ENSG00000156011_55 (sequence is synthesized)
gtcccgggagctcaacaaagagcacgcggcgctggccgccggcactcgcgccctgaggctgcggccccggagcgcccggcggcggtttcggcgcgcggccgggctggcgatggaagatgg

SEQ ID NO: 452608 - DNA, 120 bp, Artificial Sequence
  ENSG00000156011_56 (sequence is synthesized)
atggaaggaaggagcgcagcggcagagacatttgtttgggtgaacaatgcatctgcacattcccagagtgttgccaaggccaaatatgaatttttatttggcagatctgaagggaaagct

SEQ ID NO: 452609 - DNA, 120 bp, Artificial Sequence
  ENSG00000156011_57 (sequence is synthesized)
ccagatactagtgatcatggaggaagcactttactcccaccaaatgtcacaaatgaatttccagaatatgggaccatggaggaaggtggagaaggcctaagggcttctctggaatttgat

SEQ ID NO: 452610 - DNA, 120 bp, Artificial Sequence
  ENSG00000156011_58 (sequence is synthesized)
ggtgaggctctgccatgccacccacaagagcagcagggtgtccagcctcttactggctgccactctgggctcgacagtgttacagaaggaccaaaagatgtcagagaggccccctctcaa

SEQ ID NO: 452611 - DNA, 120 bp, Artificial Sequence
  ENSG00000156011_59 (sequence is synthesized)
agtcatctcaaggaacaaagtttacagcccattgactctttgatttcagctctgaaagccacagaagccagaatcatttccggaacattacaggctacaaaggtactggaccaagatgct

SEQ ID NO: 452612 - DNA, 120 bp, Artificial Sequence
  ENSG00000156011_60 (sequence is synthesized)
gtttctagtttttcagttcagcaggtggaaaaagagctggacactgccagtcgtaaaacacagagagtcaacaaaacgctccctgctggccaaaaaaatttaccagaaatacctctttca

SEQ ID NO: 452613 - DNA, 120 bp, Artificial Sequence
  ENSG00000156011_61 (sequence is synthesized)
gctgaagtaacaacggaggaaagtttttatttgagcatccagaaagatctcaccgcgctgttaactggagacactcaggcagagatttcccagataatgaataatgggaggaaaggggct

SEQ ID NO: 452614 - DNA, 120 bp, Artificial Sequence
  ENSG00000156011_62 (sequence is synthesized)
gtctgtgtgcaggagccatcttgtcctttggcctccctcgggagctcagcagtgacctgccactctgcaggcagtgttggtttcttgaaagagcagaggtctgctcttgggagagagcac

SEQ ID NO: 452615 - DNA, 120 bp, Artificial Sequence
  ENSG00000156011_63 (sequence is synthesized)
ccagggggatgtgatcgaagcagctccatgggacgcccaggccgggtcaaacatgtggaatttcaaggagtggaaatactgtggacaggaggagacaagagagagacccagcatcctata

SEQ ID NO: 452616 - DNA, 120 bp, Artificial Sequence
  ENSG00000156011_64 (sequence is synthesized)
gattttgagacatcactgcaaagaacagcctctcctgacagcaaagagtcttccaaagtgccacgccatctcatctcatcagctggtttgtgtaattcaagtagtttaactgagaatgtt

SEQ ID NO: 452617 - DNA, 120 bp, Artificial Sequence
  ENSG00000156011_65 (sequence is synthesized)
tgggatgaatcctggaaagctccttcagagaggcctggcactagctcggggacattttcccctgtgcgtcttgatgagagtggagaggatgaagtcttcctacaggaaaacaaacagcat

SEQ ID NO: 452618 - DNA, 120 bp, Artificial Sequence
  ENSG00000156011_66 (sequence is synthesized)
cttgagaagacacctaaaccagagagagacagggaaaggatcagcgaacaagaggagcacgttaagggggaagatgaagacatccttgggcctggatatacggaggactccaccgacgtg

SEQ ID NO: 452619 - DNA, 120 bp, Artificial Sequence
  ENSG00000156011_67 (sequence is synthesized)
tacagctcccagtttgaaaccattttggacaacacttctttatactacagtgcagagtccctggagacattatactcagagcctgatagctattttagctttgaaatgcccctcactcca

SEQ ID NO: 452620 - DNA, 120 bp, Artificial Sequence
  ENSG00000156011_68 (sequence is synthesized)
atgatacaacagcgcattaaagaaggtggtcagttcttggagaggacatcagggggaggacatcaggatatcctgagtgtgtctgcagatggtggcatcgtgatgggctattctagtggc

SEQ ID NO: 452621 - DNA, 120 bp, Artificial Sequence
  ENSG00000156011_69 (sequence is synthesized)
ctttagtattaagagcacttaaagtcaaactgacaattttgggcttattacaaaatgtgatgctttaaagcacacgttctttattgttgttgtaattagtccataaaaaatatagctttc

SEQ ID NO: 452622 - DNA, 120 bp, Artificial Sequence
  ENSG00000156011_70 (sequence is synthesized)
ggaagaattaagtacccaccatatcatttatgtatttgtgtatgttttacgggagatcaaaccactctcgtggtgccgcatccgtactcgcttgacttggaagaaatatcacaagcacta

SEQ ID NO: 452623 - DNA, 120 bp, Artificial Sequence
  ENSG00000156011_71 (sequence is synthesized)
aagtatatcagggcatcccaggattgggtactgtatcctaggtttgcagttgcagaaattagcatctagtgtcacaggtaaaagaatttcaggaccaggtttaaactttattttaaatat

SEQ ID NO: 452624 - DNA, 120 bp, Artificial Sequence
  ENSG00000156011_72 (sequence is synthesized)
ttttatacttaggtctctttttcctgcctctccccaaagaagagccactggccttagttgtttgagcttactgcttatattatagagtgtaaataggtaactagagactaaaattttatt

SEQ ID NO: 452625 - DNA, 120 bp, Artificial Sequence
  ENSG00000156011_73 (sequence is synthesized)
aaccagcatgtttggtatatttaaagcagtgactgagtgtgtttgagtgagtggctgagtgcagtgtcttttgtttaaacacactgcctcgtgtctttgtagctgattcagagagtttga

SEQ ID NO: 452626 - DNA, 120 bp, Artificial Sequence
  ENSG00000156011_74 (sequence is synthesized)
attgtggggtgggagactaacttcagctccaggctgcagtaatgtgttggtagttacacttgaggcatttttttgttgttgttaattaactctatagtctcaaactatttttgcaaatat

SEQ ID NO: 452627 - DNA, 120 bp, Artificial Sequence
  ENSG00000156011_75 (sequence is synthesized)
atcatttttcctaattggttcttgacgtgcagtggactggctctgtgaatgattggcagggtcttagttttgcgagagtatttccttctaagaattattgtgatctgcagaaacagccat

SEQ ID NO: 452628 - DNA, 120 bp, Artificial Sequence
  ENSG00000156011_76 (sequence is synthesized)
ttgattcaaaaatcatgtagaaaaggagtaggagaagcaaaacgtttcatttttgggccttaaccatttgaaatgtttggactttaaacataaagccatggagtttataaagccaagtaa

SEQ ID NO: 452629 - DNA, 120 bp, Artificial Sequence
  ENSG00000156011_77 (sequence is synthesized)
ccatttgatatggataataatatctactctagagagagtatatatatgcacattgatttttaatgctgttaagatacttttgtaaaactgtaggaacaagagtaattagaccaaattgaa

SEQ ID NO: 452630 - DNA, 120 bp, Artificial Sequence
  ENSG00000156011_78 (sequence is synthesized)
gcttaggggacagtaaagtggttgctttccatttagggtaaccatgcatgtggttagtcctctcctcctgagattcagaaccagttgactgtccccttaggtgtataaggagaaaagttg

SEQ ID NO: 452631 - DNA, 120 bp, Artificial Sequence
  ENSG00000156011_79 (sequence is synthesized)
acatgtctgggacctctgacatgtgtacacatgcttgcacacatgcacacacagtgaatgttttaagttatacaaacataagaccttaagatgcaaagagccagaatattctaaagaggt

SEQ ID NO: 452632 - DNA, 120 bp, Artificial Sequence
  ENSG00000156011_80 (sequence is synthesized)
gatgaacagagggggtggaaactgcatcacagatgttttccaagggccagggtggaatctgagctctagtgtctgactttgagatgcattatatttttaacacataaatgaggggatcca

SEQ ID NO: 452633 - DNA, 120 bp, Artificial Sequence
  ENSG00000156011_81 (sequence is synthesized)
tatcacattctttcttgtggaccaccaaattgaaggctttcttgtaattcacaagcagcagctctccagcatctctccgtagcctgggtgaagtcccagaagctggtgtgcatcattttc

SEQ ID NO: 452634 - DNA, 120 bp, Artificial Sequence
  ENSG00000156011_82 (sequence is synthesized)
caaggtggcagagctgcttgctctgcagatcattcctttgagagaggagtacaagtgaagaaacaaggaggcacttcctgtaggagcactgatgtgccttgtccacactcccctctgagc

SEQ ID NO: 452635 - DNA, 120 bp, Artificial Sequence
  ENSG00000156011_83 (sequence is synthesized)
tttactggtaagagagctccgactgaacatgctgagcagttgagcacttttccatcagcaacaacagcgaggatggaaatggaaaggaaccgaactaaaatgcatttccctttgcagggc

SEQ ID NO: 452636 - DNA, 120 bp, Artificial Sequence
  ENSG00000156011_84 (sequence is synthesized)
agagagctaagctcttaggaatagtgttatagaaataagcaccctaacttcaattcctgaaaatgttggttaatggagagaattttggagtttcacttaatattttcccatcggtcgcca

SEQ ID NO: 452637 - DNA, 120 bp, Artificial Sequence
  ENSG00000156011_85 (sequence is synthesized)
taaataagtcttcaggcgctcctagaagagtcccagcccaaggctcgattaaggaccacactgcaggtctgaggctcactgctctgagtcctgaacaccagagccctgcagagagtggtg

SEQ ID NO: 452638 - DNA, 120 bp, Artificial Sequence
  ENSG00000156011_86 (sequence is synthesized)
ataacacatcatctctgcaaagaggaacctctcccccggccgccacttcactcaggcttctactgagcagcaaggacagcctgggtttcaaatgccacttcccctgctttagggatccag

SEQ ID NO: 452639 - DNA, 120 bp, Artificial Sequence
  ENSG00000156011_87 (sequence is synthesized)
gtgtcctgatagcgtgaccctgctgaggcaaggtatcaactccgagagtgactgagtcactgagcgtggcacatgaacaaacgtcatgacaaagattctctgagtgaagttaacaccacg

SEQ ID NO: 452640 - DNA, 120 bp, Artificial Sequence
  ENSG00000156011_88 (sequence is synthesized)
tattttacctttgcaaaaaacaaactggcaccctgagttctaactacggacggacgatatctttgcctccacacccagattcctggaaatggctaacgtttcctttctaggggaagggtc

SEQ ID NO: 452641 - DNA, 120 bp, Artificial Sequence
  ENSG00000156011_89 (sequence is synthesized)
gaggaatactcaagtgctagcttagcagctttgttcagtccagatcagagctgttaggtaaaggcctaaccacctccctgcagtctcttatatctcaagctttaggaacccatttctaaa

SEQ ID NO: 452642 - DNA, 120 bp, Artificial Sequence
  ENSG00000156011_90 (sequence is synthesized)
tgtacactagcggagaatttatattgtcagccttgattaccataggacaggcagaaaggcgataatttgtatcttttaatataaaagaagcttttaacttttccagcctattataataac

SEQ ID NO: 452643 - DNA, 120 bp, Artificial Sequence
  ENSG00000156011_91 (sequence is synthesized)
tgagttatattcactgtggctcaaactaattggcattgtggaacatttctttaccttcaaagttttctccaccaatcatttcagttctattgcagtcctggtgccatatgtcccctgcaa

SEQ ID NO: 452644 - DNA, 120 bp, Artificial Sequence
  ENSG00000156011_92 (sequence is synthesized)
attgtgaaagtaattagtgacaaaatagcagcctgctccttttcaatggcgaaactgtcggcattagcagttttgggtaagctggcggtactataacacgtactggaaacctgttcctca

SEQ ID NO: 452645 - DNA, 120 bp, Artificial Sequence
  ENSG00000156011_93 (sequence is synthesized)
tcaccacctaccagattctggaaatgccgtcttctagaaaacgatggcgtttgtggtggtcttcttttgaaaggaacagtaatttgtgtggatattgttaaagtgtttaaagaatatttt

SEQ ID NO: 452646 - DNA, 120 bp, Artificial Sequence
  ENSG00000156011_94 (sequence is synthesized)
gacaattaagtttacattttacaattgctttattttttattaaaatagttgtatataaatattaccctatttcactgttgttcaagtaaatctaaaccttgtagacaagtgagtcatctg

SEQ ID NO: 452647 - DNA, 120 bp, Artificial Sequence
  ENSG00000156011_95 (sequence is synthesized)
atatgtatagaagctgtgatatatagagtacatttattgtgtaaatgtttatgaatataattgttcctgtgtttttataagttggggatattttgttgttttacggcaacaaaatttatt

SEQ ID NO: 452648 - DNA, 120 bp, Artificial Sequence
  ENSG00000156011_96 (sequence is synthesized)
gcatttaaatggtttttatgtaatagaaatcacgcaaaatagtgaaggatttaaaatatgtatatgatacatgtaaatgtacaaactttagaaagaaataaatccaacaaatttcaatca

SEQ ID NO: 452649 - DNA, 120 bp, Artificial Sequence
  ENSG00000156011_97 (sequence is synthesized)
ggagggaagctgtgttgagagaggaggctgggaagagggggacgtcctccttcaacttctttcaagttcgtatccctgagcccctgagggatccagtggcattctgggagaatgtcactg

SEQ ID NO: 452650 - DNA, 120 bp, Artificial Sequence
  ENSG00000156011_98 (sequence is synthesized)
cggagtcagtgtgtagcagtttgtacttgcaacagaagcagctttagaagtacattaaaagagcccttgcggaagatgaaagtttgctgagcagatggaatgggagaatgctcttcaatt

SEQ ID NO: 452651 - DNA, 120 bp, Artificial Sequence
  ENSG00000156011_99 (sequence is synthesized)
gtgatagtctgagcgtactttgaacacggcttcattcggaagctttagcgccttcaagccttgctcctcaaagctggtctgtggatcatggtcaccagggaacttttaggaatgcggagt

SEQ ID NO: 452652 - DNA, 120 bp, Artificial Sequence
  ENSG00000156011_100 (sequence is synthesized)
cccaggccccaccttaacctgctcagtttctgttttaagaagattccaggtgattcgtatatacaacagagtacgaagaccattggtcgagagcagtggttcacaaagaagatggctcct

SEQ ID NO: 452653 - DNA, 120 bp, Artificial Sequence
  ENSG00000156011_101 (sequence is synthesized)
gtaccagcaacatcagcatcacctgaaaaattgttagaaaatgcagattcgcaggccccacagacctacggcatcagaaactctgggatggaccccagcagtacgtgttttacttggtgc

SEQ ID NO: 452654 - DNA, 120 bp, Artificial Sequence
  ENSG00000156011_102 (sequence is synthesized)
atgcatctgcacattcccagagtgttgccaaggccaaatatgaatttttatttggcagatctgaagggaaagctccagatactatgcaaagaagaagctgaataattctgaataacagat

SEQ ID NO: 452655 - DNA, 120 bp, Artificial Sequence
  ENSG00000156011_103 (sequence is synthesized)
agaatgtgttgggtgaatgttgagcgtctgctttaggtagacgcctcaccatacacacggaattcctggagagcaagacaagaaaaaagtagcatggcagctcagcccctactcatgcct

SEQ ID NO: 452656 - DNA, 120 bp, Artificial Sequence
  ENSG00000156011_104 (sequence is synthesized)
attcagatctttgcatctggctgcaggacccaggaaacctacgagttattgctttaggaaaaatgtgggctgggatagaataccacaaataaacaaaggaagaaatgacaaatctgctaa

SEQ ID NO: 452657 - DNA, 120 bp, Artificial Sequence
  ENSG00000156011_105 (sequence is synthesized)
tgctgaaaccaaatgggcacctgtcctcagagatcacagactactgagaaatattggaggtgtctttctccataaaataaacagttattccatgttgaaataaaagtataagccaaattc

SEQ ID NO: 452658 - DNA, 120 bp, Artificial Sequence
  ENSG00000156011_106 (sequence is synthesized)
actcgctgcaaacagggtagttgaagatgctgggggaggcagcctggtgcttcttaagctaacgcggatcacggcgctcaggagctgctcaggcacaaccccgcagagttcctccagcgt

SEQ ID NO: 452659 - DNA, 120 bp, Artificial Sequence
  ENSG00000156011_107 (sequence is synthesized)
gagagccttggaacggttggaaagtgcctttttatttctctaaaccccttccttagttgaccttcgaaaatgattggcgtgaatagtgtccagagtgccagcaagggtggataaacaaaa

SEQ ID NO: 452660 - DNA, 120 bp, Artificial Sequence
  ENSG00000156011_108 (sequence is synthesized)
agcagttctcctgaatcagcctcccgaataactgggactacaggaaaatgaatctacattgtcaagtgagggtcatctggattcatctcaaataaacagtgctcttagtgactccgagta

SEQ ID NO: 452661 - DNA, 120 bp, Artificial Sequence
  ENSG00000156011_109 (sequence is synthesized)
tctcacaggtcaaagtccatgaaaatttccaactcctcagagttttctgctaaggagaacaaggctctgtacaactcaatcaagaatgagaagcttgaatgggcagtagatgatgaagag

SEQ ID NO: 452662 - DNA, 120 bp, Artificial Sequence
  ENSG00000156011_110 (sequence is synthesized)
ccaaaacatgtcgggcttatctctgcttttatgttcaaacacatttattttctgcctccccgtttcccattctctacatggttcccatggcaggtgaataaaaagaaatctttgaaaaaa

SEQ ID NO: 452663 - DNA, 120 bp, Artificial Sequence
  ENSG00000156011_111 (sequence is synthesized)
aaaaaaggtgcgggtccggggcactaatgttcgaaaatgcagttttaagtgacctctccccgcgcacgcactgtcggtgggggcagtcccgaggccaggctgcggggcgcctggggggac

SEQ ID NO: 452664 - DNA, 120 bp, Artificial Sequence
  ENSG00000156011_112 (sequence is synthesized)
tcgcctcagggggaaatggccctttcagggctcgacgggtccccgggactaaacgctccggccgcggatcggtgccgggggagcccggtcagagaggccgggaccccgagggacgcctag

SEQ ID NO: 452665 - DNA, 120 bp, Artificial Sequence
  ENSG00000156011_113 (sequence is synthesized)
tcccgaagcccgcgtacctccagccccggcgagacggcgcccaactcgcggctccagtcacacggcccttcctgagaggaaacaccagggaaagcacctctcacttttctcagggtggga

SEQ ID NO: 452666 - DNA, 120 bp, Artificial Sequence
  ENSG00000156011_114 (sequence is synthesized)
aaactgtgaaggaagaagacaaagcaacaggcagagacatttgtttgggtgaacaatgcatctgcacattcccagagtgttgccaaggccaaatatgaatttttatttggcagatctgaa

SEQ ID NO: 452667 - DNA, 120 bp, Artificial Sequence
  ENSG00000156011_115 (sequence is synthesized)
atatcaatggttattttccttattatgaaagttaaattttattgtgagaaattatgtatcttcagttacctagtgataactattaacacttctgtttacttcattctagtctatttaata

SEQ ID NO: 452668 - DNA, 120 bp, Artificial Sequence
  ENSG00000156011_116 (sequence is synthesized)
tttaatgtcaaattggaattagagttttgtttttagctgcctttttatttcattgtgagcattttctcatgtcattaaatattctttaaaagcataatatttaaggacagcatgatatcc

SEQ ID NO: 452669 - DNA, 120 bp, Artificial Sequence
  ENSG00000156011_117 (sequence is synthesized)
cctgagacggaggaatcagctgctttcacttgctctgctccaaaggaaaagaaggaagggaggaaaaaatcccaggatccggacgtaagcaggggtggtgattgcagatccccacatcac

SEQ ID NO: 452670 - DNA, 120 bp, Artificial Sequence
  ENSG00000156011_118 (sequence is synthesized)
aggcattgccaggcccctgcctccaagacactgggctggctacagcccctggcatggaggcttcctagcccagctcccatcatgagtgatgaaagcagcagtccctccatgggctggaag

SEQ ID NO: 452671 - DNA, 120 bp, Artificial Sequence
  ENSG00000156011_119 (sequence is synthesized)
gatctgtggggcatggacccccgatgcagggatgccttgggatgctcccctccaagggctgtcctggtccacgctgcagatggagcggaaaggactgtgctgaggagaggcgccgagacc

SEQ ID NO: 452672 - DNA, 120 bp, Artificial Sequence
  ENSG00000156011_120 (sequence is synthesized)
tgccaaatactccccaggagctgtaaggaggccacaggtaccacagcgcaggcgacaagggcatggctctacaggtactgtccagctgtgcacaccagcaagggctgcccagccccgcct

SEQ ID NO: 452673 - DNA, 120 bp, Artificial Sequence
  ENSG00000156011_121 (sequence is synthesized)
gccactctgcctctcaaggcagagacatttgtttgggtgaacaatgcatctgcacattcccagagtgttgccaaggccaaatatgaatttttatttggcagatctgaagggaaagctcca

SEQ ID NO: 452674 - DNA, 120 bp, Artificial Sequence
  ENSG00000156011_122 (sequence is synthesized)
attagttcttagagaagaaagtaatgtcttctagctagaatcttattttttttttttaaacctccatgtataggtggagtattccttctccaaaatgtttgggtccataagtgttgtgga

SEQ ID NO: 452675 - DNA, 120 bp, Artificial Sequence
  ENSG00000156017_0 (sequence is synthesized)
ggccgagggccgcggcggcgatgcagcgacggcgtcgccctccgccgcccacctcccggctgcccgagggctgcgggggaggaggcggtggcagcgaggaggtggaagtgcagttttccg

SEQ ID NO: 452676 - DNA, 120 bp, Artificial Sequence
  ENSG00000156017_1 (sequence is synthesized)
tggcagcgaggaggtggaagtgcagttttccgccgggcgttggggctcggccgcggcggtttcggcggcagcggcggcggccacgcgcagcaccgaggaggaggaggagaggcttgagcg

SEQ ID NO: 452677 - DNA, 120 bp, Artificial Sequence
  ENSG00000156017_2 (sequence is synthesized)
tgagcacttctggaagatcattaatgccttccgctactacggcaccagtatgcatgagcgggtgaaccgaacagaaagacagtttcgatcacttccagctaaccaacagaaactacttcc

SEQ ID NO: 452678 - DNA, 120 bp, Artificial Sequence
  ENSG00000156017_3 (sequence is synthesized)
tcagtttcttcttcacttggacaagatccggaaatgcattgatcataatcaagaaatactactgaccattgtgaatgattgcatacatatgtttgaaaataaagaatatggagaagatgg

SEQ ID NO: 452679 - DNA, 120 bp, Artificial Sequence
  ENSG00000156017_4 (sequence is synthesized)
gaatggaaagattatgccagcatctacatttgacatggataagttaaaatccacgctgaaacagtttgtgagagactggagtgaaactgggaaagcagaaagggatgcctgttaccagcc

SEQ ID NO: 452680 - DNA, 120 bp, Artificial Sequence
  ENSG00000156017_5 (sequence is synthesized)
aatcattaaagaaattttaaaaaattttccaaaagagagatgggatccttctaaagtaaatattctggtacctggtgctggactaggaagactggcctgggaaatagctatgctaggtta

SEQ ID NO: 452681 - DNA, 120 bp, Artificial Sequence
  ENSG00000156017_6 (sequence is synthesized)
tgcttgtcaaggaaatgaatggagtttttttatgctcttttcttccaactttgtactcaacagatgttctgaaattaataaatataaactttatccttggatccatcagtttagcaataa

SEQ ID NO: 452682 - DNA, 120 bp, Artificial Sequence
  ENSG00000156017_7 (sequence is synthesized)
ccggagatcagctgatcagattcgacccatctttttccctgatgttgacccccacagtcttcctcctggttctaacttttctatgacagcaggagattttcaagagatttattcagaatg

SEQ ID NO: 452683 - DNA, 120 bp, Artificial Sequence
  ENSG00000156017_8 (sequence is synthesized)
caatacctgggactgtattgctacctgtttcttcatagacacagctcacaatgtaattgattatattgatacaatatggaaaatactcaagccaggtggaatttggataaatctaggtcc

SEQ ID NO: 452684 - DNA, 120 bp, Artificial Sequence
  ENSG00000156017_9 (sequence is synthesized)
tctgctgtaccactttgaaaatctggcaaatgaactttccatagaattgagctatgaggatataaaaaacgttgttctgcagtatggattcaaggtagaggtggaaaaagaatctgtatt

SEQ ID NO: 452685 - DNA, 120 bp, Artificial Sequence
  ENSG00000156017_10 (sequence is synthesized)
gtcaacatatactgtgaatgatctctctatgatgaaatactactatgaatgtgtcttgtttgtggtccgtaagccacaataatggtctcaagtgataccacctggaaaaaagtttagtaa

SEQ ID NO: 452686 - DNA, 120 bp, Artificial Sequence
  ENSG00000156017_11 (sequence is synthesized)
gaacaaatgctgaaatcaacgactcaaaatcaactatcagtgatgacaggacacaacctcaaatcagtggtgccttcttattcctaacgaaatttagaaatagtgtctattttcttaata

SEQ ID NO: 452687 - DNA, 120 bp, Artificial Sequence
  ENSG00000156017_12 (sequence is synthesized)
tgtctattgctttttcagaaatatactatgccatgcagatttgtactacacaagtaaaaatggaggaaatgtcttgaagtatactttttccttgaagcccagaattgtgtttcagtagga

SEQ ID NO: 452688 - DNA, 120 bp, Artificial Sequence
  ENSG00000156017_13 (sequence is synthesized)
aaaaaacctaatctccagtgtcttcatgatgctgtccattgcaagtctgccgaattaatgactaatagtattgaagtacataataatcttcctttttttgttgttttgtatgcattgcac

SEQ ID NO: 452689 - DNA, 120 bp, Artificial Sequence
  ENSG00000156017_14 (sequence is synthesized)
atgtaacttttagaagagtctaaggatcctcagtcatattcaacatctggagttgggactttgttcactttcaatctaagaaaactatgcgtaaaatatgtctttttttttttttttctt

SEQ ID NO: 452690 - DNA, 87 bp, Artificial Sequence
  ENSG00000156017_15 (sequence is synthesized)
gtggcaactcaagcgatcttcctgccttagccttagcctcctgagtagctaggactgtaggcatgtaccaccgcgcctggcctgtgt

SEQ ID NO: 452691 - DNA, 120 bp, Artificial Sequence
  ENSG00000156017_16 (sequence is synthesized)
gctaggactgtaggcatgtaccaccgcgcctggcctgtgtctattttatcattcagattaatttaattttgtattttctggctcagatgaacttaaagaagcatcaaacatttctttttt

SEQ ID NO: 452692 - DNA, 120 bp, Artificial Sequence
  ENSG00000156017_17 (sequence is synthesized)
atcaaagtcttttggccacaataaactgaacactttatgaaagcatactcatcatggatcactttgaaatatacgagatctcaacattcaaagtgagaaataaaaagcctttattaaaag

SEQ ID NO: 452693 - DNA, 120 bp, Artificial Sequence
  ENSG00000156017_18 (sequence is synthesized)
tagtgctaggaaacagagaaaataagaataaaatttacccatttgaaatatgtgattttcagactctaaatgaatacagagtttgacagtgtgatgtttacaataatgtcttttctttag

SEQ ID NO: 452694 - DNA, 120 bp, Artificial Sequence
  ENSG00000156017_19 (sequence is synthesized)
aatatctggattatgaaagcaagcacttttttcattaaaaaaattatatactaggaaaaactgtcataatagtattaatgtggggaattttgattatgaaattcagggatatattactgc

SEQ ID NO: 452695 - DNA, 120 bp, Artificial Sequence
  ENSG00000156017_20 (sequence is synthesized)
ccgtggtctgtgtcttcaatattgtaagcagcagccatcatgtaatttcagattaataccaattttgttccctgatagatggagcttaaacagtatatgctgctttaaatttctacctct

SEQ ID NO: 452696 - DNA, 120 bp, Artificial Sequence
  ENSG00000156017_21 (sequence is synthesized)
agcagatctttattggagggagttttcctttgtattttttaatgtatgatattctgtttccagtagcttggaaagtagagatgactaatgttttagccttttcttggagaaaaggaagaa

SEQ ID NO: 452697 - DNA, 120 bp, Artificial Sequence
  ENSG00000156017_22 (sequence is synthesized)
ctcttcttgaatattttcacagatgattgtgattgctttaaatgacctctgtggcaatttaaattagatggatttaatctcagtaatgtgctggtcgcataaatgtcatgttttaatagg

SEQ ID NO: 452698 - DNA, 120 bp, Artificial Sequence
  ENSG00000156017_23 (sequence is synthesized)
aaaagttacttgtaaatctttagacctttgttgtcacttaggctggggagtcactaccctatttggcatcttactagttggggggaccttttccgtgtacagtgatgggacttttgtgac

SEQ ID NO: 452699 - DNA, 120 bp, Artificial Sequence
  ENSG00000156017_24 (sequence is synthesized)
ctttactctcactatgcaatagagggtttcatgtagttaatctgacatgtcaaaattgggaagactgtaaccttttttttttttttttaagatttctcttttttgtgtccctcaatactt

SEQ ID NO: 452700 - DNA, 120 bp, Artificial Sequence
  ENSG00000156017_25 (sequence is synthesized)
agcagatgttcatttggtggaaattcttattacttacatgaatgagtttgaatttagtggcaaggaagaaaaaaaaaactcaaattattgttttaaaagaagaaaacttgcaaagtacat

SEQ ID NO: 452701 - DNA, 120 bp, Artificial Sequence
  ENSG00000156017_26 (sequence is synthesized)
aagtattttttaaaaatcaatcgaacagaaaggaatgcatgctgtttttcaatggcttagacatgctttttattcactgactagtattcacttttttacaacttgtatcaaaacaaatga

SEQ ID NO: 452702 - DNA, 120 bp, Artificial Sequence
  ENSG00000156017_27 (sequence is synthesized)
tctttgtttttgtcacaggcaaaaacaggttgacactggtgggttggctttattaattaattttttttctattaggttttctttaataatgttaaatttctaaattatagcatatgtttt

SEQ ID NO: 452703 - DNA, 120 bp, Artificial Sequence
  ENSG00000156017_28 (sequence is synthesized)
agttaattctgaaatcagttacttcatttgttaatttatccctcatatcatgaatattgttttttaaatgttctatacaaatttgcatcacttcttttcttacagcttttgcagttaata

SEQ ID NO: 452704 - DNA, 120 bp, Artificial Sequence
  ENSG00000156017_29 (sequence is synthesized)
tattctaaacttgaaaatgtggtatcaatcaataatagaagtatcactggaggatttatttagctttgtatttcttaattttagtcctagctactaaagtatgtaagccttaaagtttaa

SEQ ID NO: 452705 - DNA, 120 bp, Artificial Sequence
  ENSG00000156017_30 (sequence is synthesized)
aatgtttttcttaaattagctttatacacaaacattttcatttactttatgaaatgggaggagatagtccactgtgcttatgtttttttgtttaatttctatattctgaagcagtgcaga

SEQ ID NO: 452706 - DNA, 120 bp, Artificial Sequence
  ENSG00000156017_31 (sequence is synthesized)
tatagggtatgctaatcaagtgagcaaggtggaacatgtacaatataaggagaagctgtaaaaatcacagtataaaattatgaagtttggtaactgtaaaatgtactgtatttatatgta

SEQ ID NO: 452707 - DNA, 120 bp, Artificial Sequence
  ENSG00000156017_32 (sequence is synthesized)
actctcattctaaaagttgccacaaaagctgaattggaagcttcatgtctgcatgaaatttcctatatttttaatgtgtatgatgaaattaatttttcttgaatattaaagtctgccaat

SEQ ID NO: 452708 - DNA, 120 bp, Artificial Sequence
  ENSG00000156017_33 (sequence is synthesized)
tgctatgaaacgatagttgcttggttttcatctaaattaatgtaactatagatgtggggattttaatgagttgagcatatatacttttgaactcttggattagcctatttttatatgctt

SEQ ID NO: 452709 - DNA, 120 bp, Artificial Sequence
  ENSG00000156017_34 (sequence is synthesized)
ctaagaagtcagtaacatgaatacttcgccttataatatgccaggccttatactaactattttcactttgtttcattcaagttcactgtaataaagttagaatccattgaggaaaatgaa

SEQ ID NO: 452710 - DNA, 120 bp, Artificial Sequence
  ENSG00000156017_35 (sequence is synthesized)
ggagccctgaagacctggcggagcccagcgcggatggaggcctgagggtggcgggggcggagcgcgccgcgagctgggggcatgtccgcggcgggcgccgtctagaggaaggccaagcag

SEQ ID NO: 452711 - DNA, 120 bp, Artificial Sequence
  ENSG00000156017_36 (sequence is synthesized)
tctgtattttgaggtcttttattttctggatttcatttttataatctggcacaggctatttgctctactcagaaagttttaacttaaatgttcagtcatttgattaggcttaatagccag

SEQ ID NO: 452712 - DNA, 120 bp, Artificial Sequence
  ENSG00000156017_37 (sequence is synthesized)
agactggatctgttcacttgttttccttttttaagtactaatataactgttgagattttgatgcattttgacataatgttctgttttggaatacagggttagtgacttaaatttttaaaa

SEQ ID NO: 452713 - DNA, 120 bp, Artificial Sequence
  ENSG00000156017_38 (sequence is synthesized)
gcaactttactagctagaaattaatttcccttgcttaactcatattttttcagtgtcttgtatctattgctgttcatcttttattgtaagaaattgttttcacttataaatctcaaggga

SEQ ID NO: 452714 - DNA, 120 bp, Artificial Sequence
  ENSG00000156026_0 (sequence is synthesized)
ggcgccgtttccagttgagagatggcggccgccgcaggtagatcgctcctgctgctcctctcctctcggggcggcggcggcgggggcgccggcggctgcggggcgctgactgccggctgc

SEQ ID NO: 452715 - DNA, 120 bp, Artificial Sequence
  ENSG00000156026_1 (sequence is synthesized)
ttccctgggctgggcgtcagccgccaccggcagcagcagcaccaccggacggtacaccagaggatcgcttcctggcagaatttgggagctgtttattgcagcactgttgtgccctctgat

SEQ ID NO: 452716 - DNA, 120 bp, Artificial Sequence
  ENSG00000156026_2 (sequence is synthesized)
gatgttacagtggtttatcaaaatgggttacctgtgatatctgtgaggctaccatcccggcgtgaacgctgtcagttcacactcaagcctatctctgactctgttggtgtatttttacga

SEQ ID NO: 452717 - DNA, 120 bp, Artificial Sequence
  ENSG00000156026_3 (sequence is synthesized)
caactgcaagaagaggatcggggaattgacagagttgctatctattcaccagatggtgttcgcgttgctgcttcaacaggaatagacctcctcctccttgatgactttaagctggtcatt

SEQ ID NO: 452718 - DNA, 120 bp, Artificial Sequence
  ENSG00000156026_4 (sequence is synthesized)
aatgacttaacataccacgtacgaccaccaaaaagagacctcttaagtcatgaaaatgcagcaacgctgaatgatgtaaagacattggtccagcaactatacaccacactgtgcattgag

SEQ ID NO: 452719 - DNA, 120 bp, Artificial Sequence
  ENSG00000156026_5 (sequence is synthesized)
cagcaccagttaaacaaggaaagggagcttattgaaagactagaggatctcaaagagcagctggctcccctggaaaaggtacgaattgagattagcagaaaagctgagaagaggaccact

SEQ ID NO: 452720 - DNA, 120 bp, Artificial Sequence
  ENSG00000156026_6 (sequence is synthesized)
ttggtgctatggggtggccttgcctacatggccacacagtttggcattttggcccggcttacctggtgggaatattcctgggacatcatggagccagtaacatacttcatcacttatgga

SEQ ID NO: 452721 - DNA, 120 bp, Artificial Sequence
  ENSG00000156026_7 (sequence is synthesized)
agtgccatggcaatgtatgcatattttgtaatgacacgccaggaatatgtttatccagaagccagagacagacaatacttactatttttccataaaggagccaaaaagtcacgttttgac

SEQ ID NO: 452722 - DNA, 120 bp, Artificial Sequence
  ENSG00000156026_8 (sequence is synthesized)
ctagagaaatacaatcaactcaaggatgcaattgctcaggcagaaatggaccttaagagactgagagacccattacaagtacatctgcctctccgacaaattggtgaaaaagattgatct

SEQ ID NO: 452723 - DNA, 120 bp, Artificial Sequence
  ENSG00000156026_9 (sequence is synthesized)
gcaaaaagcctctgaatcctggcagaaggaacacctgtttgcctttttaattaaagcattgcaggtggaagctgggagccatgtggggggtagagcgtttttacctttaattataaaaca

SEQ ID NO: 452724 - DNA, 120 bp, Artificial Sequence
  ENSG00000156026_10 (sequence is synthesized)
aaaacagaaaggatctgagggaagaagggaatgttaaaacctgaggatcaggcattgtggaatataagctcaaagggcttagtgaatattgtcttaaccaagtatctcagtttctggatg

SEQ ID NO: 452725 - DNA, 120 bp, Artificial Sequence
  ENSG00000156026_11 (sequence is synthesized)
aaaatgatgcagttatatagttgagagattcataaagagaaaacaatgctgggggtgttcgtttcttgcatcttctttgcagagtcagcaaaagagtaacacaccagcaccccactcgac

SEQ ID NO: 452726 - DNA, 120 bp, Artificial Sequence
  ENSG00000156026_12 (sequence is synthesized)
ttctcatgatatgctaaaatatcattagcatttattttaaattggacccagtctctgcagagttaccaggaatctttccttccagcatccctttactgaccacctacctgtacctcttgg

SEQ ID NO: 452727 - DNA, 120 bp, Artificial Sequence
  ENSG00000156026_13 (sequence is synthesized)
ttacactcattttttccatttgataattggaaccaacttataactgtttaataattgacactttagattatctcttaataccttcttaaatgtctatatatcccagtgctctggatcagt

SEQ ID NO: 452728 - DNA, 120 bp, Artificial Sequence
  ENSG00000156026_14 (sequence is synthesized)
gtctaaaaatcactggcaacactgcatgaggttgttggttttgttttgttttattaattagtctttcacaggaggaataattgccctcctttatatacttatctattgataatcccctct

SEQ ID NO: 452729 - DNA, 120 bp, Artificial Sequence
  ENSG00000156026_15 (sequence is synthesized)
ccctccagaacacaaatcagagggaaagggggtgttcagctgtactaccaaatcaggaagatgtaaggtttacaaattggctaagaatcatggctctgtagccatttcaaccagaataat

SEQ ID NO: 452730 - DNA, 120 bp, Artificial Sequence
  ENSG00000156026_16 (sequence is synthesized)
tttattgctaatctgctttgtgtgacagcattccaggccagccagatgggactgccttgtctggaggctttgttcatctcgaaggacacacacttccacactgtttgtgagccctcccac

SEQ ID NO: 452731 - DNA, 120 bp, Artificial Sequence
  ENSG00000156026_17 (sequence is synthesized)
ctccacaacttcagttgtaaatcaagtgtgtggatctcaaagggtgcaatttatctttatataggaatacatttctagggcttccttcaagcccactctcttcaccctattttttcttat

SEQ ID NO: 452732 - DNA, 120 bp, Artificial Sequence
  ENSG00000156026_18 (sequence is synthesized)
cttaaattgagagaaagagaattaatcttatactttgtcaaaacattttctaccatatttccagatgacatctgcgcttgaagagtcaaaggaatctgtgtctaatatcctgtttttaac

SEQ ID NO: 452733 - DNA, 120 bp, Artificial Sequence
  ENSG00000156026_19 (sequence is synthesized)
tgctgtaggggcaggatggaaaggatgatgggggctgccacaccactgattggccttttctttcacgtgattcatccttcctcattgtggcaaggagtttctttctctttttcttcctcc

SEQ ID NO: 452734 - DNA, 120 bp, Artificial Sequence
  ENSG00000156026_20 (sequence is synthesized)
tttgggatcattgtgtatgaaaagaaaaactttaaatgacaaacccagactccaggtgccttgcaaaggttgaaggccagccaggattgctgctgctgctgctactcctgccaacacccc

SEQ ID NO: 452735 - DNA, 120 bp, Artificial Sequence
  ENSG00000156026_21 (sequence is synthesized)
tttcattggcatgacggaatgaaaggatgcatgtctccacttcctgaccctccgcccacttccttctccctccaccacccccagtcgtcagctccttccctcatttatttttgttaagtt

SEQ ID NO: 452736 - DNA, 120 bp, Artificial Sequence
  ENSG00000156026_22 (sequence is synthesized)
gtgtgaattatttttaacccatttatcctgtttgtgcatagggtttttaagaagaaacagcacagtgcaacgagcaaatctttttggggtgtgtgggaagcaagggagggaggacatgga

SEQ ID NO: 452737 - DNA, 120 bp, Artificial Sequence
  ENSG00000156026_23 (sequence is synthesized)
gaaaagttctttaaacaaatagcaaactattgaacatgtgtaaaatcctgtatcatttatgaaatatgtataaaaagcaatgtaccttctggaacaataaatacttattcaatttttgaa

SEQ ID NO: 452738 - DNA, 120 bp, Artificial Sequence
  ENSG00000156026_24 (sequence is synthesized)
cttcgttcttaacagccctgccccaaggctccctgaacggagccagatggaagttgtcccctttccctcctcctccgggcgggttggggagttctgagttgccgcggccgccttgtgtgt

SEQ ID NO: 452739 - DNA, 120 bp, Artificial Sequence
  ENSG00000156026_25 (sequence is synthesized)
gccaggagagtggcagtgccatgctgctgggagctgccccggagagcagcccaggaccccggcggggccgcccctcgtcctctctcgtccccgaggggtcgggcaggaaggaaaatcaaa

SEQ ID NO: 452740 - DNA, 120 bp, Artificial Sequence
  ENSG00000156026_26 (sequence is synthesized)
ctttattcccctctgtgacttcctctgtgtgtgtgcatggggaaccggctccctcgagatggatgctgcattgcttcaggaggcaagcttcatcctcttgggtccttaaaggtgcttttg

SEQ ID NO: 452741 - DNA, 120 bp, Artificial Sequence
  ENSG00000156026_27 (sequence is synthesized)
ggggtcctttcgagggctactgtataagcgtgttcacgcgtgcctgaagcgggaagggtggtcagcaggcacaggagaagcgaatatggtacaccagaggatcgcttcctggcagaattt

SEQ ID NO: 452742 - DNA, 120 bp, Artificial Sequence
  ENSG00000156026_28 (sequence is synthesized)
agatggggttttgccatgttggccagaatggttttgaactcctgacctcaagttatctacctgcctcagcctcccaaagtgccgagattatagccgtacgaattgagattagcagaaaag

SEQ ID NO: 452743 - DNA, 120 bp, Artificial Sequence
  ENSG00000156026_29 (sequence is synthesized)
catcttagctgctagagtgtggagctggcctgtgggagtcaagtattggtgatgtgacctgttcacgcaggggaaacttgaacattcgcagatggttctgttatatcccccagagaccaa

SEQ ID NO: 452744 - DNA, 120 bp, Artificial Sequence
  ENSG00000156026_30 (sequence is synthesized)
gggttggccctttatgcttattaggaaagaaggattatgaccaacacttgcatcctgggtacaccagaggatcgcttcctggcagaatttgggagctgtttattgcagcactgttgtgcc

SEQ ID NO: 452745 - DNA, 120 bp, Artificial Sequence
  ENSG00000156026_31 (sequence is synthesized)
ggcgtcagccgccaccggcagcagcagcaccaccggacggtattggtgatgtgacctgttcacgcaggggaaacttgaacattcgcagagagggtctcaccccgtcacccaggctgaagt

SEQ ID NO: 452746 - DNA, 120 bp, Artificial Sequence
  ENSG00000156026_32 (sequence is synthesized)
aaactcctgggctcaagcaatccttctttctcagcatcctgaatagctagtactacaggtacaccagaggatcgcttcctggcagaatttgggagctgtttattgcagcactgttgtgcc

SEQ ID NO: 452747 - DNA, 120 bp, Artificial Sequence
  ENSG00000156026_33 (sequence is synthesized)
aatactttgctaaccccagcgtctatctctactgaattattggcaactaatcagtgactatactgaaaagtaccatatgtcagaaaatttttttttgactcaaccagcttccattatagg

SEQ ID NO: 452748 - DNA, 120 bp, Artificial Sequence
  ENSG00000156026_34 (sequence is synthesized)
cagtattaagcccatacagctgtcccagtgaccctagatttccaatgtacacctatagaactatgaccattaattatttcacttgttcatatagttcacaggaaaagctgttgttaaatc

SEQ ID NO: 452749 - DNA, 120 bp, Artificial Sequence
  ENSG00000156026_35 (sequence is synthesized)
aaactttgtttgcataggaaatgaggcaaaaagttaactgaaattttaaaaggaagaggtaatttttaaaaacgattttgaagattgaattttcctgaccattcttgaataattatggac

SEQ ID NO: 452750 - DNA, 120 bp, Artificial Sequence
  ENSG00000156026_36 (sequence is synthesized)
ggcgtcagccgccaccggcagcagcagcaccaccggacgggagtggaggaagaggtgaagatgtggaaagcccagagagttggagagttgagagaaggaagaaagcagttaaggtctttc

SEQ ID NO: 452751 - DNA, 120 bp, Artificial Sequence
  ENSG00000156026_37 (sequence is synthesized)
tttgtacttcctgagagaaggcagagaagaagaatgttttattacatagatgaacatgtcttgtacaagatacagagcagcatctgccacaaaacagtacaccagaggatcgcttcctgg

SEQ ID NO: 452752 - DNA, 120 bp, Artificial Sequence
  ENSG00000156030_0 (sequence is synthesized)
gtgccagaaccctgtggagcatcatgaactgggaagagtagctgagccccagagcctctctggaagagaaaggaagagccagcagttctttctcccagtgtccgacctcactgtccagcg

SEQ ID NO: 452753 - DNA, 120 bp, Artificial Sequence
  ENSG00000156030_1 (sequence is synthesized)
tcttcctctgcccctgctctgccctccctggctcctggactagagcccggcttccagcaggacgtttccccaggggatgggcgactgttgaaggggatctcaccgccagggctcagttgg

SEQ ID NO: 452754 - DNA, 120 bp, Artificial Sequence
  ENSG00000156030_2 (sequence is synthesized)
ccacatcatgaacctccaggcccagcccaaggctcagaacaagcggaagcgttgcctcttcgggggccaggaaccagctcccaaggagcagccccctcccctgcagcccccccagcagtc

SEQ ID NO: 452755 - DNA, 120 bp, Artificial Sequence
  ENSG00000156030_3 (sequence is synthesized)
catcagagtgaaggaggagcagtacctcgggcacgagggtccaggaggggcagtctccacctctcagcctgtggaactgccccctcctagcagcctggccctgctgaactctgtggtata

SEQ ID NO: 452756 - DNA, 120 bp, Artificial Sequence
  ENSG00000156030_4 (sequence is synthesized)
tgggcctgagcggacctcagcagccatgctgtcccagcaggtggcctcagtaaagtggcccaactctgtgatggctccagggcggggcccggagcgtggaggaggtgggggtgtcagtga

SEQ ID NO: 452757 - DNA, 120 bp, Artificial Sequence
  ENSG00000156030_5 (sequence is synthesized)
cagcagctggcagcagcagccaggccagcctccaccccattcaacatggaactgccacagtctgtccctctacagtgcaaccaaggggagcccgcatcctggagtgggagtcccgactta

SEQ ID NO: 452758 - DNA, 120 bp, Artificial Sequence
  ENSG00000156030_6 (sequence is synthesized)
ctataaccaccctgaggcactgaagcgggagaaagcggggggcccacagctggaccgctatgtgcgaccaatgatgccacagaaggtgcagctggaggtagggcggccccaggcacccct

SEQ ID NO: 452759 - DNA, 120 bp, Artificial Sequence
  ENSG00000156030_7 (sequence is synthesized)
gaattctttccacgcagccaagaaacccccaaaccagtcactgcccctgcaacccttccagctggcattcggccaccaggtgaaccggcaggtcttccggcagggcccaccgcccccaaa

SEQ ID NO: 452760 - DNA, 120 bp, Artificial Sequence
  ENSG00000156030_8 (sequence is synthesized)
cccggtggctgccttccctccacagaagcagcagcagcagcagcaaccacagcagcagcagcagcagcagcaggcagccctaccccagatgccgctctttgagaacttctattccatgcc

SEQ ID NO: 452761 - DNA, 120 bp, Artificial Sequence
  ENSG00000156030_9 (sequence is synthesized)
gcagcaaccctcgcagcaaccccaggactttggcctgcagccagctgggccactgggacagtcccacctggctcaccacagcatggcaccctaccccttcccccccaacccagatatgaa

SEQ ID NO: 452762 - DNA, 120 bp, Artificial Sequence
  ENSG00000156030_10 (sequence is synthesized)
cccagaactgcgcaaggcccttctgcaggactcagccccgcagccagcgctacctcaggtccagatccccttcccccgccgctcccgccgcctctctaaggagggtatcctgcctcccag

SEQ ID NO: 452763 - DNA, 120 bp, Artificial Sequence
  ENSG00000156030_11 (sequence is synthesized)
cgccctggatggggctggcacccagcctgggcaggaggccactggcaacctgttcctacatcactggcccctgcagcagccgccacctggctccctggggcagccccatcctgaagctct

SEQ ID NO: 452764 - DNA, 120 bp, Artificial Sequence
  ENSG00000156030_12 (sequence is synthesized)
gggattcccgctggagctgagggagtcgcagctactgcctgatggggagagactagcacccaatggccgggagcgagaggctcctgccatgggcagcgaggagggcatgagggcagtgag

SEQ ID NO: 452765 - DNA, 120 bp, Artificial Sequence
  ENSG00000156030_13 (sequence is synthesized)
cacaggggactgtgggcaggtgctacggggcggagtgatccagagcacgcgacggaggcgccgggcatcccaggaggccaatttgctgaccctggcccagaaggctgtggagctggcctc

SEQ ID NO: 452766 - DNA, 120 bp, Artificial Sequence
  ENSG00000156030_14 (sequence is synthesized)
aagtgtggggtggagttttctgagccttccttagccaccaagcgagcacgagaagacagtgggatggtacccctcatcatcccagtgtctgtgcctgtgcgaactgtggacccaactgag

SEQ ID NO: 452767 - DNA, 120 bp, Artificial Sequence
  ENSG00000156030_15 (sequence is synthesized)
gcagcccaggctggaggtcttgatgaggacgggaagggtcctgaacagaaccctgctgagcacaagccatcagtcatcgtcacccgcaggcggtccacccgaatccccgggacagatgct

SEQ ID NO: 452768 - DNA, 120 bp, Artificial Sequence
  ENSG00000156030_16 (sequence is synthesized)
caagctcaggcagaggacatgaatgtcaagttggagggggagccttccgtgcggaaaccaaagcagcggcccaggcccgagcccctcatcatccccaccaaggcgggcactttcatcgcc

SEQ ID NO: 452769 - DNA, 120 bp, Artificial Sequence
  ENSG00000156030_17 (sequence is synthesized)
cctcccgtctactccaacatcaccccataccagagccacctgcgctctcccgtgcgcctagctgaccacccctctgagcggagctttgagctacctccctacacgccgccccccatcctc

SEQ ID NO: 452770 - DNA, 120 bp, Artificial Sequence
  ENSG00000156030_18 (sequence is synthesized)
agccctgtgcgggaaggctctggcctctacttcaatgccatcatatcaaccagcaccatccctgcccctcctcccatcacgcctaagagtgcccatcgcacgctgctccggactaacagt

SEQ ID NO: 452771 - DNA, 120 bp, Artificial Sequence
  ENSG00000156030_19 (sequence is synthesized)
gctgaagtaaccccgcctgtcctctctgtgatgggggaggccaccccagtgagcatcgagccacggatcaacgtgggctcccggttccaggcagaaatccccttgatgagggaccgtgcc

SEQ ID NO: 452772 - DNA, 120 bp, Artificial Sequence
  ENSG00000156030_20 (sequence is synthesized)
ctggcagctgcagatccccacaaggctgacttggtgtggcagccatgggaggacctagagagcagccgggagaagcagaggcaagtggaagacctgctgacagccgcctgctccagcatt

SEQ ID NO: 452773 - DNA, 120 bp, Artificial Sequence
  ENSG00000156030_21 (sequence is synthesized)
ttccctggtgctggcaccaaccaggagctggccctgcactgtctgcacgaatccagaggagacatcctggaaacgctgaataagctgctgctgaagaagcccctgcggccccacaaccat

SEQ ID NO: 452774 - DNA, 120 bp, Artificial Sequence
  ENSG00000156030_22 (sequence is synthesized)
ccgctggcaacttatcactacacaggctctgaccagtggaagatggccgagaggaagctgttcaacaaaggcattgccatctacaagaaggatttcttcctggtgcagaagctgatccag

SEQ ID NO: 452775 - DNA, 120 bp, Artificial Sequence
  ENSG00000156030_23 (sequence is synthesized)
accaagaccgtggcccagtgcgtggagttctactacacctacaagaagcaggtgaaaatcggccgcaatgggactctaacctttggggatgtggatacgagcgatgagaagtcggcccag

SEQ ID NO: 452776 - DNA, 120 bp, Artificial Sequence
  ENSG00000156030_24 (sequence is synthesized)
gaagaggttgaagtggatattaagacttcccaaaagttcccaagggtgcctcttcccagaagagagtccccaagtgaagagaggctggagcccaagagggaggtgaaggagcccaggaag

SEQ ID NO: 452777 - DNA, 120 bp, Artificial Sequence
  ENSG00000156030_25 (sequence is synthesized)
gagggggaggaggaggtgccagagatccaagagaaggaggagcaggaagaggggcgagagcgcagcaggcgggcagcggcagtcaaagccacgcagacactacaggccaatgagtcggcc

SEQ ID NO: 452778 - DNA, 120 bp, Artificial Sequence
  ENSG00000156030_26 (sequence is synthesized)
agtgacatcctcatcctccggagccacgagtccaacgcccctgggtctgccggtggccaggcctcggagaagccaagggaagggacagggaagtcacgaagggcactacctttttcagag

SEQ ID NO: 452779 - DNA, 120 bp, Artificial Sequence
  ENSG00000156030_27 (sequence is synthesized)
aagaagaaaaaaacagagacattcagtaagacccagaatcaggagaacactttcccctgtaaaaaatgtggcagggtgttttacaaggtgaagagccgcagtgcgcatatgaagagccac

SEQ ID NO: 452780 - DNA, 120 bp, Artificial Sequence
  ENSG00000156030_28 (sequence is synthesized)
gcagagcaggagaagaaggctgcagcgctgaggctgaaggagaaagaggccgctgctgccgccgccgccgcccaccagcaggccctgcgggaggagagcggtgcgggcgacaagggctga

SEQ ID NO: 452781 - DNA, 120 bp, Artificial Sequence
  ENSG00000156030_29 (sequence is synthesized)
ctgcagagggcaggttgaggaagacagtgtccctgacagccgcaaggagccctggaccgctgggttctcctctctatactgctggtgtcatagtaataatacattgtgttgatacacagg

SEQ ID NO: 452782 - DNA, 120 bp, Artificial Sequence
  ENSG00000156030_30 (sequence is synthesized)
gtaattttcccacaagattcacaccagcatcatcttcctatctccgcttagcagacctctaacactgtttctcaaacctcagtcattcttgtatcacctttttgatttctgccatatctg

SEQ ID NO: 452783 - DNA, 120 bp, Artificial Sequence
  ENSG00000156030_31 (sequence is synthesized)
cagccaggcgagcaggactagctggggctggtgaaccccccggccgggtcagaatctgtgctacagcagtgagacagagctctaggctcactgcccttgttcttgttccccatagacttc

SEQ ID NO: 452784 - DNA, 120 bp, Artificial Sequence
  ENSG00000156030_32 (sequence is synthesized)
aagtagattcctgccctggtcagggatggagtatgacatctctcctgcttcctgaaactttgttttatattttaaaagtaaataatttgttccagccagagaggaaatgatgctgagaga

SEQ ID NO: 452785 - DNA, 120 bp, Artificial Sequence
  ENSG00000156030_33 (sequence is synthesized)
aagacaccatcacgtggacagaatgttctccctcgccctggcagcagtgtggaggacaaagccctgactccacagccactgtttgggccaagccctcagggatcagggtaaatgcctgga

SEQ ID NO: 452786 - DNA, 120 bp, Artificial Sequence
  ENSG00000156030_34 (sequence is synthesized)
ggtcaggctgtcctcccaagcccctagaagccagactccctacacctagctgaggccttgctctgccggctccccctcatcttcttcccaccctgagggatcatcaagttctccgtcccc

SEQ ID NO: 452787 - DNA, 120 bp, Artificial Sequence
  ENSG00000156030_35 (sequence is synthesized)
gtggaggggagggggaagaggtacaggcggtgtccgcctcgtttctggttggctcagcgggtttctagggctgtgacgtcatggggcagctttcggaaaatgacgcgagctggccggccg

SEQ ID NO: 452788 - DNA, 120 bp, Artificial Sequence
  ENSG00000156030_36 (sequence is synthesized)
cggctgtgcagcgtgggggtgaaggtgaaggctggggctcctcgcgcacccgcgctgggggcccccgggtgggctaggccggttctgagcaacccccacccggctgcagggtgttttaca

SEQ ID NO: 452789 - DNA, 120 bp, Artificial Sequence
  ENSG00000156030_37 (sequence is synthesized)
gggagtgaggagaggattgcagggacttttccctgcgaaacaaatgagacaatgacataaacggctcttttatttatgaaggccctgggagcagcgttaagggctccaggatccagctct

SEQ ID NO: 452790 - DNA, 120 bp, Artificial Sequence
  ENSG00000156030_38 (sequence is synthesized)
ctttgcatttggtctgtcggaagctgtcctcgtgctttcctggaccgggagagtcccggtcccctcgggagggactccaccgcctctcacactccgatttctgctgctctgctgccccgc

SEQ ID NO: 452791 - DNA, 120 bp, Artificial Sequence
  ENSG00000156030_39 (sequence is synthesized)
agtcttttccctttatttgcttccccctcctcccctcggcctccaggaagccaccgtggccggccaagcacaagctcacccactttggagcagcatttctcctccccagaggacctcgaa

SEQ ID NO: 452792 - DNA, 120 bp, Artificial Sequence
  ENSG00000156030_40 (sequence is synthesized)
ggctgcaacggccctgccccaagccccagaaaaagaaactcttggagggagtctgcgggcttctctgagaaggggcgcagcctgacacctgtgctgtccctgcagtctctaggcctgtct

SEQ ID NO: 452793 - DNA, 120 bp, Artificial Sequence
  ENSG00000156030_41 (sequence is synthesized)
gagctgctcccgtgaccgtgtcctgagtggccacctcctccttgggagggaggccgcggcaggtactctccctttgctgcttgctggcggccttgctagggctagaaagttttctcagcg

SEQ ID NO: 452794 - DNA, 120 bp, Artificial Sequence
  ENSG00000156030_42 (sequence is synthesized)
ttgggggaggggctagcgttcttgtccaaagcactcatcctgctgcagggaagggagctgtacggaggctggaagctgcagggttaggcccgagagagcttttgacaagcctggctcttc

SEQ ID NO: 452795 - DNA, 120 bp, Artificial Sequence
  ENSG00000156030_43 (sequence is synthesized)
ctgcttcccacctttttggctgaatacctttgggtcctggaggctgccaagggcgcttcgccttgagcaggtcccggagaggctcagcctgcccctcctggggccagcctccttgcctct

SEQ ID NO: 452796 - DNA, 120 bp, Artificial Sequence
  ENSG00000156030_44 (sequence is synthesized)
gctctgacctcagcagctacacctaaccccaccgcaccctacccagtgtcgatatccacaacccagcccccaggcctgcactttggagatttctggatccttccctgggagggagaggtc

SEQ ID NO: 452797 - DNA, 120 bp, Artificial Sequence
  ENSG00000156030_45 (sequence is synthesized)
gactcgtgtcatttgggagctatttatttattcttagtatttaatttttaacatcctctcagggaccaggggcctcctgcttttcagaggcccgagtgcatttatcccaaaacgaggcat

SEQ ID NO: 452798 - DNA, 120 bp, Artificial Sequence
  ENSG00000156030_46 (sequence is synthesized)
cttgacatcccctatccccaccccctaaattcccaaggccctaaggtccctcacctggttgctctggaagctcttgctgataggaatgatagcaacactgaaagagcgtgggaaggtgga

SEQ ID NO: 452799 - DNA, 120 bp, Artificial Sequence
  ENSG00000156030_47 (sequence is synthesized)
gggtgtcaccagacccacacagagcaagggagattaaggcagttcttgctgccccttctctggctgtgctttgcctgagggaagagttggcaagaggccagaattctagtttggtttatg

SEQ ID NO: 452800 - DNA, 120 bp, Artificial Sequence
  ENSG00000156030_48 (sequence is synthesized)
gggcctggattctggcttgaagaagccatatttggcatgggtgaagtgaaagggccaggaggttctggaggccccttcacttccagtcccatagcggggctcagctatttttctgatctt

SEQ ID NO: 452801 - DNA, 120 bp, Artificial Sequence
  ENSG00000156030_49 (sequence is synthesized)
attcaactttagttgtgcaaaagaaattctaagtgaatgcgcgtatgacaggtcaacgtattaggaaggagccagaaagtattcatactgctactccttatgagatagccaagaagcatc

SEQ ID NO: 452802 - DNA, 120 bp, Artificial Sequence
  ENSG00000156030_50 (sequence is synthesized)
atgtcagtaactgggagtggagagggagttttgttttgaaactatgcaggtatttttcagcatccatttgtacattagtatggttctacaggaccccagctgtggaagtaacaaatttct

SEQ ID NO: 452803 - DNA, 120 bp, Artificial Sequence
  ENSG00000156030_51 (sequence is synthesized)
tctccctccagactcttggatgactacctagatccccagcttaccggttagtttcctccacaggcttccatgagctcagtgtcccaagacagcaaaaatctggtataccctgtagaagca

SEQ ID NO: 452804 - DNA, 120 bp, Artificial Sequence
  ENSG00000156030_52 (sequence is synthesized)
ggggggtagcaaatttaggctctcttcgaaattacttgtacaatacgagtgccttcgcagcttagccccaaagtgctacttatgtttcccaaggtcttttctattcaaatcatatttggt

SEQ ID NO: 452805 - DNA, 120 bp, Artificial Sequence
  ENSG00000156030_53 (sequence is synthesized)
tatttggtttcaggcccctttatgggcatacggtaacagaaacctccatcattcatatgagacccttttgtcagtggtaacatcttgtacttggaaaaaaaatttttttttttttttttt

SEQ ID NO: 452806 - DNA, 120 bp, Artificial Sequence
  ENSG00000156030_54 (sequence is synthesized)
cccaaagtgctggcattacaggcgtgaaccaccgtgcctggccggaagtctttaaaaaataaagtgattctactcttctaagcttacagagaccagaccaggtgaatgtaactggggaaa

SEQ ID NO: 452807 - DNA, 120 bp, Artificial Sequence
  ENSG00000156030_55 (sequence is synthesized)
tggggaaaatcaagatggtacctctctgcattatcccgccagacactgtattttatgcattcatgtctaggatacagtgtgaaaattaaaaagtttagagggcagatgcaattgtggcaa

SEQ ID NO: 452808 - DNA, 120 bp, Artificial Sequence
  ENSG00000156030_56 (sequence is synthesized)
gtgacctgccaataaagcaggtgcagctatagaagctggcataggtatatccttaatggtgctttctccctgggcttgtctttttgttgtttttttccccctatattcagagctccttga

SEQ ID NO: 452809 - DNA, 120 bp, Artificial Sequence
  ENSG00000156030_57 (sequence is synthesized)
gaagtgataaacacctccagctttctaacatcctccccacaccatctcaccatatccatctcccagcatccatctgcattcagctaagggcgggaaactgacctagtgcctgtgttgcag

SEQ ID NO: 452810 - DNA, 120 bp, Artificial Sequence
  ENSG00000156030_58 (sequence is synthesized)
accatttctgaggtctccaccatccaaggaggcacagccgtcattactgtcctccatgccttcagcagcccccctcacagctaaggtacataccaccccttctgccgcgcctccacccct

SEQ ID NO: 452811 - DNA, 120 bp, Artificial Sequence
  ENSG00000156030_59 (sequence is synthesized)
ggcaccaaggtcttctgctgcttatgtctaaagggatcacctatatttaactgcctcagtgacctaacctctttcttctcatgtgccagatgttaagatgaaggaggaatacaacacata

SEQ ID NO: 452812 - DNA, 120 bp, Artificial Sequence
  ENSG00000156030_60 (sequence is synthesized)
ctcaagcctcagcctgtttagttgttttcactggggctcgcttttctgggacggtatttattatcagactggcaagcctaactccataggtttacaggaagtagggatatttttataaaa

SEQ ID NO: 452813 - DNA, 120 bp, Artificial Sequence
  ENSG00000156030_61 (sequence is synthesized)
caattgtgtcctccccacattttgctatgttaatatttgcttctaacaatttgcagctgtttcactttttcctcatttgtctctaagttgaaggctttgttggaggggacagagcacagg

SEQ ID NO: 452814 - DNA, 120 bp, Artificial Sequence
  ENSG00000156030_62 (sequence is synthesized)
aacagccttgacagtctgtaattattgtacagatattttaatagcatataaataagtatattccttttattttgaaacaaaaatgatcagacactgccttttgtgtgtttgctgcctgtg

SEQ ID NO: 452815 - DNA, 120 bp, Artificial Sequence
  ENSG00000156030_63 (sequence is synthesized)
gcatccttttttaaaaagactgttacatattaaaatagtgtacatatataaatattacctcttttgctgtacagttgtgatagagactgaagattttattttttgtgtgctttttataag

SEQ ID NO: 452816 - DNA, 120 bp, Artificial Sequence
  ENSG00000156030_64 (sequence is synthesized)
aaaaaaattaatacactaaagaatcttgctgatgtgattgtaatgtacctatgtaacttatttacttttgaatgttcttctgtatctttaaaccttttattaaataaggttttaaaaatt

SEQ ID NO: 452817 - DNA, 120 bp, Artificial Sequence
  ENSG00000156030_65 (sequence is synthesized)
gatgaagtggtagagctggttcctgctcgccgcggtgccgcgcgcgccggccggccgctgggcgctccgcgctcccagcctcgagttgtgcaatcctttgtagcacgccagagtcctcct

SEQ ID NO: 452818 - DNA, 120 bp, Artificial Sequence
  ENSG00000156030_66 (sequence is synthesized)
cctccgctgttgcctctcgccctctctctttttttttttttcaagctgtgagctcaaccgatgagtcagagccgtgcaatcctgacactgcatcgcaggactgggggtgacacggaggga

SEQ ID NO: 452819 - DNA, 120 bp, Artificial Sequence
  ENSG00000156030_67 (sequence is synthesized)
ggcagagcgctcgcgaggcggacggcacgggtgcggggcgcgccgaggctcctgcatcgcaagcggggggtgacagcccgcgcgtcccgcccgggccctgccagcaaacttctcagcctc

SEQ ID NO: 452820 - DNA, 120 bp, Artificial Sequence
  ENSG00000156030_68 (sequence is synthesized)
gggaggcgcgggctggcggaagccccgcgagcgccgcggggaggcgacggcgcctgtttgtttttaaaatcgggagtgcgtgcaggcggctggagtcccggaggcgaccgaaggcggcga

SEQ ID NO: 452821 - DNA, 120 bp, Artificial Sequence
  ENSG00000156030_69 (sequence is synthesized)
ggcagatctagtctctggggctctcgaacagtctttttggccaaaagcagacattctggaaatattgggctggcttggggtgatgtactgctgaaaaatgttgcccactccataaagaga

SEQ ID NO: 452822 - DNA, 120 bp, Artificial Sequence
  ENSG00000156030_70 (sequence is synthesized)
tccatttcctctgcaaaatgggataatccaatcccttagggtggtagagaggattaagtggaagtagctagcttatagatgcctttggccaattaacctttgactgtgacctcacccatg

SEQ ID NO: 452823 - DNA, 120 bp, Artificial Sequence
  ENSG00000156030_71 (sequence is synthesized)
gtgtagctctctggtgccccctggtgtctgtggatgcaaaatgtttgccctaggctggccagccttctgtactgcttcctggggaggcttctccctggctaggctgtgtaggaagaggaa

SEQ ID NO: 452824 - DNA, 120 bp, Artificial Sequence
  ENSG00000156030_72 (sequence is synthesized)
gtcattgtagagatcagactggcagccagcgagaggtcagtctgtccacgagtatctaccgaacactcgggcgtaaggccttgtactgggtcctgtgagggctccaagaatgtacaggac

SEQ ID NO: 452825 - DNA, 120 bp, Artificial Sequence
  ENSG00000156030_73 (sequence is synthesized)
accatggtctgttctatagagaatgcaaggtcattagggagttgacatgaaagccttggagttgaaaaaacagaggttcccggtagtgtgggatctgcagccagtgagcaaagccccagc

SEQ ID NO: 452826 - DNA, 120 bp, Artificial Sequence
  ENSG00000156030_74 (sequence is synthesized)
agctagcctgggatggtgaggactgtattcaagaggggtggggccagagctgagccgcagcgatggaggagggcggggggcagggaggacacaccaggcggaggaaatgactggtgcaaa

SEQ ID NO: 452827 - DNA, 120 bp, Artificial Sequence
  ENSG00000156030_75 (sequence is synthesized)
ggcctgtagatgggaccgtgcagggagagtgaggggttgggaggtaagcagtcagctaggatgcaggtccaggcacatgggtggtgggaggtacaaatggaagcggaaccgccttgaacc

SEQ ID NO: 452828 - DNA, 120 bp, Artificial Sequence
  ENSG00000156030_76 (sequence is synthesized)
ctgaggggagggttgcaggttttatctcacattgcaggagggagtcagtaaagagcaaagatttttttttttttttttttttaagcaaaggagtgttttgatcatgtggggccttaagaa

SEQ ID NO: 452829 - DNA, 68 bp, Artificial Sequence
  ENSG00000156030_77 (sequence is synthesized)
ttaagcaaaggagtgttttgatcatgtggggccttaagaagaccaacttgggcctgggcacggtgact

SEQ ID NO: 452830 - DNA, 120 bp, Artificial Sequence
  ENSG00000156030_78 (sequence is synthesized)
actccagcctgggcggagacagagtgagactttgtctcaaaaagcaacaacaacaacaacaaaaacaaaaaaaaaactagcttgggagaaactgaggcagaaaatccaaagaggaagtga

SEQ ID NO: 452831 - DNA, 120 bp, Artificial Sequence
  ENSG00000156030_79 (sequence is synthesized)
gacgataactataaaacagcgatccccttcaccacctccctagtgtgctcaaagtttcagtctctttactagaaaaccacagctttatgttggagttagtgttggagcttctgggggcaa

SEQ ID NO: 452832 - DNA, 120 bp, Artificial Sequence
  ENSG00000156030_80 (sequence is synthesized)
ggatatggctttggtagtagaagcagtaataataatctttatcgagtgccaggctctgtgcattattttatccagttctcacattaaccgtaggagacaggtagtgatagccccttttgg

SEQ ID NO: 452833 - DNA, 120 bp, Artificial Sequence
  ENSG00000156030_81 (sequence is synthesized)
tgagtgtgaaaactgaggcacccaaatatttagtgaagggcctgcgttttcgtaggtgacaggctgcagagccaggactcaggtgcctgtgttccctgcgtgagctctgtgtgtcaccac

SEQ ID NO: 452834 - DNA, 120 bp, Artificial Sequence
  ENSG00000156030_82 (sequence is synthesized)
tgtgactcttgcacatacagggcagccactaggattgggggtgctttgctgaaaggggggtgctatttatcaacctgctctttgtcccatagacagtgctgaagtaaccccgcctgtcct

SEQ ID NO: 452835 - DNA, 120 bp, Artificial Sequence
  ENSG00000156030_83 (sequence is synthesized)
ctctgtgatgggggaggccaccccagtgagcatcgagccgtaagtgcagccctgcccctggccgaggggtgtgggtggccacactggtgcagtgtgtgcaggtgggccctgggagcaaca

SEQ ID NO: 452836 - DNA, 120 bp, Artificial Sequence
  ENSG00000156030_84 (sequence is synthesized)
ggagggttccgtggggcctgcagagggctgagagggcctccttgagcttctgtatgtggccctgggctttgctgtccccgccctgcctctgtgtggaagttgcagggaagggcaaggacc

SEQ ID NO: 452837 - DNA, 120 bp, Artificial Sequence
  ENSG00000156030_85 (sequence is synthesized)
ggctcagcttgaacttatctctaggagagttgaaaggggggtccagaggctctttcccatctgtaaacctgcagctgcttctcccctctccagcctctggaccttgcctttctggtggtg

SEQ ID NO: 452838 - DNA, 120 bp, Artificial Sequence
  ENSG00000156030_86 (sequence is synthesized)
cagtgaccaatccctcttaaaaagcagtcaggtcaatgctactgagtagcctcagagagaatttcctaaacaatacaagaaagagaaagataggtctcttttcccttttggttctaagca

SEQ ID NO: 452839 - DNA, 120 bp, Artificial Sequence
  ENSG00000156030_87 (sequence is synthesized)
tcctttcctcacttcagggtagggtggccaagctctggggtctcaatccagaaggaggcctaagtgggcatcagacttaaaataggcaggaggaagatgcggaggagggtggcaagtaga

SEQ ID NO: 452840 - DNA, 120 bp, Artificial Sequence
  ENSG00000156030_88 (sequence is synthesized)
ggtgagccattccccagaggaagatgcagggggagggcaccctggggtgaaggccactgagagccagcaagtgcctgcggagctgacctgggggcctctgcccacttcctttgacccaga

SEQ ID NO: 452841 - DNA, 120 bp, Artificial Sequence
  ENSG00000156030_89 (sequence is synthesized)
gttgccttccagtaactcagctgttcaagcccacattccctagatttatcttgtcctctctccatattcttctggaaaagcagatgctttgctaatccaaggaattgcatctttccagcc

SEQ ID NO: 452842 - DNA, 120 bp, Artificial Sequence
  ENSG00000156030_90 (sequence is synthesized)
ctgtctcacaaaatctgggctgtggggagagagaattgtgtggactgccaagggaaaagagtttttaaaaagagcatgccctttcctcttgggattgtagattgtattgggaacagccct

SEQ ID NO: 452843 - DNA, 120 bp, Artificial Sequence
  ENSG00000156030_91 (sequence is synthesized)
ggggactagacaaagtgctgatgatgaattcccctacaagggccctgttgtgaggagtcctttgctgtgttttagtaacacgctattccctgattgggcaatactgacgggaagtacacg

SEQ ID NO: 452844 - DNA, 120 bp, Artificial Sequence
  ENSG00000156030_92 (sequence is synthesized)
cccgtgaaattcacggaggcgcccctaatgcctaatgaaatgagcagacctttagtcagtcaaacaaagggtcagagagaattgacagtaaatgtgtaaatggcctaattaatacatgtg

SEQ ID NO: 452845 - DNA, 120 bp, Artificial Sequence
  ENSG00000156030_93 (sequence is synthesized)
tgacttggccatttctgtgagatgaaacatgtctgtttcctcctcagacacaaagggcccacactgacccctggcctctctggacaggagctcccagcccagcggtggctgagcaatgtg

SEQ ID NO: 452846 - DNA, 120 bp, Artificial Sequence
  ENSG00000156030_94 (sequence is synthesized)
cgagcctgtgtggtggtgtcagaggaaacagcctctgggtgtgggaaagttgcccaaaaactaaacccagtggccaaatagatttatgcaatgggagagctagaatttcagagcttgaga

SEQ ID NO: 452847 - DNA, 120 bp, Artificial Sequence
  ENSG00000156030_95 (sequence is synthesized)
ggcaggtccctggagatcatctagtcttacttaaccccatttgctatttacacatgaaaaaactgaaattagaaaagtgagtgacttgcctaagctcgaatagctgtgtggtagcagagt

SEQ ID NO: 452848 - DNA, 120 bp, Artificial Sequence
  ENSG00000156030_96 (sequence is synthesized)
caggaggaagacttaggcctttcgcttcctcctcaggttttccagggctttcttgtgagtttcccttgagttcctcccccgacaggggacactgtgacatttctgtatgctcacttctca

SEQ ID NO: 452849 - DNA, 120 bp, Artificial Sequence
  ENSG00000156030_97 (sequence is synthesized)
gccactgctccctggagagaaatgaaattgtttgcctggattaatgaaaagcgtctgtgttgccaggtcagggctggctttggatgtagatggtgcccagaccttttccctcaacttttc

SEQ ID NO: 452850 - DNA, 120 bp, Artificial Sequence
  ENSG00000156030_98 (sequence is synthesized)
agtttgaaaaatttcaaacttagaggaaaatggaaagaacagtagaatgaacacccatccaccccggacttagatttagcaatcgttaacattggctatatttgctttctctttctctat

SEQ ID NO: 452851 - DNA, 120 bp, Artificial Sequence
  ENSG00000156030_99 (sequence is synthesized)
gtctaaacatagacacacacatatacagctctctcttgttctctgattcagctaatcattaaaagtaagttacagtcatcctgtcacatgactaaaacctttcagcacgtatctcctaaa

SEQ ID NO: 452852 - DNA, 120 bp, Artificial Sequence
  ENSG00000156030_100 (sequence is synthesized)
aaccaagatattctacaaaaccacagtaccattagcacgcccacgaaatttaacctgataaaataattcaggccaggcgaggtagctcacgcctgtgattccagcactttgggaggcaga

SEQ ID NO: 452853 - DNA, 74 bp, Artificial Sequence
  ENSG00000156030_101 (sequence is synthesized)
gatcactccatgtctactaaaaatatttaaaaaaaactagctggttgtggtggcacacacctgtaatcccagct

SEQ ID NO: 452854 - DNA, 120 bp, Artificial Sequence
  ENSG00000156030_102 (sequence is synthesized)
gctgggtcacagcccgggccgcacagcccgggccgcaccgcccgctccgcgaggaagtgacgactgcgccgtcccgagagcaacaaagttagagtctgcgggccgcactcgcctgcgccc

SEQ ID NO: 452855 - DNA, 120 bp, Artificial Sequence
  ENSG00000156042_0 (sequence is synthesized)
agctcagcgtctcgctccctgctcccggccccagagggttatcgcgagtcttggaataaacttgctcgtgcgatggccaaaaagaccaaagaaaacagagggacttttcccagttggtga

SEQ ID NO: 452856 - DNA, 120 bp, Artificial Sequence
  ENSG00000156042_1 (sequence is synthesized)
tatggagcaagtgccatcagcaggcagactcgtgcagatcaccgtgacagagggatatgatttgaaaggttttaaaggagatactccagttacctttattcgagcagaattcaatcaagt

SEQ ID NO: 452857 - DNA, 120 bp, Artificial Sequence
  ENSG00000156042_2 (sequence is synthesized)
ggttctgggagactctgcaaaaattactgtttctccagaaggaagtgcaaaatacaacttcactagcagttttgagtttaatcctgaaggaggaatcacttcagatgacctcgctcacaa

SEQ ID NO: 452858 - DNA, 120 bp, Artificial Sequence
  ENSG00000156042_3 (sequence is synthesized)
acctgtgttcttaactgtgactgaagttttaccaaaggaaaagaaacagaaagaagagaagaccttaattcttggtcaggctgtggtggaccttcttcccttactggaaggacagagttc

SEQ ID NO: 452859 - DNA, 120 bp, Artificial Sequence
  ENSG00000156042_4 (sequence is synthesized)
atttcaaacaacagttccattgcaccctgtgcaaggctcacccttagaaactcctagatcaagtgctaagcagtgcagtcttgaagttaaagtattagtggcagagcctttactgaccac

SEQ ID NO: 452860 - DNA, 120 bp, Artificial Sequence
  ENSG00000156042_5 (sequence is synthesized)
agcccagatctcagggggcaatctactgaaggtcacgttggaggctgcttactctgtgcctgaatccttcattccaacaggtcctgggcagaactacatggtcggtctgcaagttccatc

SEQ ID NO: 452861 - DNA, 120 bp, Artificial Sequence
  ENSG00000156042_6 (sequence is synthesized)
acttggagagaaggactatcccattttatttaagaatggaactctgaagcttggaggggaaagggaacctgttccccggcccaaaaagtggccaattgccaacattctggctccaggagc

SEQ ID NO: 452862 - DNA, 120 bp, Artificial Sequence
  ENSG00000156042_7 (sequence is synthesized)
taataacattcctgatgcattcattgttggtggtccctatgaagaagaagaaggagaactcaaccatcctgaggacagcgaatttaggaatcaagcagagtgcataaagaaaaggattat

SEQ ID NO: 452863 - DNA, 120 bp, Artificial Sequence
  ENSG00000156042_8 (sequence is synthesized)
ttgggacttggaaagtcgctgctaccttgatccttctgcagtggtcagttttcagaagcgaattgccgattgccggctttggcctgtagagatcacaagagttcctctggtcactatacc

SEQ ID NO: 452864 - DNA, 120 bp, Artificial Sequence
  ENSG00000156042_9 (sequence is synthesized)
caaagggaaagctggcaaaactgaaaagactgatgaagaagctcagctttcgtttcatggtgtggcttatgttaatatggtcccattgttgtatccaggtgtgaagagaattcggggagc

SEQ ID NO: 452865 - DNA, 120 bp, Artificial Sequence
  ENSG00000156042_10 (sequence is synthesized)
ttttcatgtttacccttacctagacagtgtagtccatgaaaagaccaaatgtttattgagcttgttccgggatattggccatcacttgattcataataataaaataggaggaattaattc

SEQ ID NO: 452866 - DNA, 120 bp, Artificial Sequence
  ENSG00000156042_11 (sequence is synthesized)
tctgctgtccaaacaagctgtttctaagaatctgaaagaagataaaccagtgaaagaaaaggatatagatggaaggcctaggcctggggatgtgcaggcacctagtataaaatctcagag

SEQ ID NO: 452867 - DNA, 120 bp, Artificial Sequence
  ENSG00000156042_12 (sequence is synthesized)
ctcagatactcctttggaaggtgaaccccctctaagtcacaatcctgaaggacagcaatatgtagaagcagggacatacattgtgttggaaattcagctggacaaagccttggttccaaa

SEQ ID NO: 452868 - DNA, 120 bp, Artificial Sequence
  ENSG00000156042_13 (sequence is synthesized)
gcgaatgccagaggagctagccagaagggtcaaggaaatgattcctccaaggcctcctcttacccgtcggacaggaggagctcagaaggcaatgagtgactaccacatacagatcaagaa

SEQ ID NO: 452869 - DNA, 120 bp, Artificial Sequence
  ENSG00000156042_14 (sequence is synthesized)
tatttctagagccattctagatgaatactacagaatgtttggaaaacaggtggccaaactggagagtgatatggatagtgaaaccttggaggagcagaagtgccagctcagctatgaact

SEQ ID NO: 452870 - DNA, 120 bp, Artificial Sequence
  ENSG00000156042_15 (sequence is synthesized)
gaggaacttcagacatttatcagtgagctctatgtgttcttagtagatcagatgcatgtagccctaaaccagaccatgccagatgatgtccaaggcactgttgcaaccatttatacaagc

SEQ ID NO: 452871 - DNA, 120 bp, Artificial Sequence
  ENSG00000156042_16 (sequence is synthesized)
agtgaacagcttcaactctttgcatttgaagcagaagtcaatgagaactttgagatggcagcagcatattataaagagagattggtccgtgagccccagaatctggatcactggttggac

SEQ ID NO: 452872 - DNA, 120 bp, Artificial Sequence
  ENSG00000156042_17 (sequence is synthesized)
tatggtgccttctgcctcctaactgaagacaacatcaaagcacaagagtgttttcagaaagccctttccctcaaccagagtcatatccacagcttgttgctgtgtggtgtcctggctgtc

SEQ ID NO: 452873 - DNA, 120 bp, Artificial Sequence
  ENSG00000156042_18 (sequence is synthesized)
ctgttggagaactatgagcaagcagaaattttctttgaggatgctacttgcttggaaccaactaatgttgtagcctggactttacttggtttgtactatgaaattcaaaacaatgatatt

SEQ ID NO: 452874 - DNA, 120 bp, Artificial Sequence
  ENSG00000156042_19 (sequence is synthesized)
cgaatggaaatggcatttcatgaggcctccaaacagcttcaggcacggatgcttcaggcacaagtaacaaagcaaaagagcactggtgtagaagacactgaggaaagagggaagagagaa

SEQ ID NO: 452875 - DNA, 120 bp, Artificial Sequence
  ENSG00000156042_20 (sequence is synthesized)
tctagtttaggcccttggggaatcacaaatggttctgcaacagcaatcaaggtggaagccccagcaggaccaggagctgcattatctattctagacaaatttcttgaagaatcctccaaa

SEQ ID NO: 452876 - DNA, 120 bp, Artificial Sequence
  ENSG00000156042_21 (sequence is synthesized)
ctgcagtctgattcacaagaacccattttgactacacaaacttgggatccaagtataagccaaaaaccatctaacacatttatcaaggagataccaacaaagaaagaagcatcaaaatgt

SEQ ID NO: 452877 - DNA, 120 bp, Artificial Sequence
  ENSG00000156042_22 (sequence is synthesized)
caagattcatcagctcttctgcatcccggccttcattatggtgtttctcaaactaccaccatcttcatggagaccatacatttcttgatgaaagtcaaggctgtgcagtatgtgcacaga

SEQ ID NO: 452878 - DNA, 120 bp, Artificial Sequence
  ENSG00000156042_23 (sequence is synthesized)
gtgcttgcacatgagctgttatgccctcaaggaggccccagctgtgaatattacttggtgctggcccaaacacacattcttaagaagaactttgccaaggcagaggaataccttcaacaa

SEQ ID NO: 452879 - DNA, 120 bp, Artificial Sequence
  ENSG00000156042_24 (sequence is synthesized)
gcagcccagatggactacctgaaccccaatgtctggggcctgaagggccatctctattttctgagtggaaatcattctgaggccaaggcatgctatgaacgaaccattagctttgtagtg

SEQ ID NO: 452880 - DNA, 120 bp, Artificial Sequence
  ENSG00000156042_25 (sequence is synthesized)
gatgcttctgagatgcacttcatcttcctgagactggggctcatctatctggaagagaaagagtatgaaaaggcaaagaaaacctatatgcaagcctgtaagagatcaccttcatgcctt

SEQ ID NO: 452881 - DNA, 120 bp, Artificial Sequence
  ENSG00000156042_26 (sequence is synthesized)
acctggctaggactgggaatcgcctgctatcggctggaggagctcacagaggctgaggatgctctttctgaagccaatgcattgaacaactacaatgctgaagtatgggcatatctggct

SEQ ID NO: 452882 - DNA, 120 bp, Artificial Sequence
  ENSG00000156042_27 (sequence is synthesized)
ctggtctgcctgaaagttggacggcaattagaagctgagcaggcctacaagtacatgatcaagctgaaattgaaagatgaggctctgcttgcagagatccacacactacaggaaacagtt

SEQ ID NO: 452883 - DNA, 120 bp, Artificial Sequence
  ENSG00000156042_28 (sequence is synthesized)
ggctttggaaatccatctttctgatacccctccagctgaacaattttctgcatgggactctgagttcctttccttcccagagagttttaccgtatgaagcctggagctggagaacgaaag

SEQ ID NO: 452884 - DNA, 120 bp, Artificial Sequence
  ENSG00000156042_29 (sequence is synthesized)
aatcttcactataaacagagacccattcatttatttccattggctgtgttactggatgttttactggttgacgagaaactgggtcacaataaaaaaatggagatatgaaactcaaaattc

SEQ ID NO: 452885 - DNA, 120 bp, Artificial Sequence
  ENSG00000156042_30 (sequence is synthesized)
agcactttcttttctctgtagagcatcagagtcttctatgaataattccttcctttgtttattcaacgaatatttattgaagtgtctgctctgtgctaggcactgaaaacacaaagatga

SEQ ID NO: 452886 - DNA, 120 bp, Artificial Sequence
  ENSG00000156042_31 (sequence is synthesized)
gtaagaaactgcctaagcctaatcagtttaagactaattttggaaaaaaacaaggagatatgctctttcaatttcctagaaaaataaatttcacaactttaaaaaatgtgatggaattgt

SEQ ID NO: 452887 - DNA, 120 bp, Artificial Sequence
  ENSG00000156042_32 (sequence is synthesized)
caaaaatagattaaatatgttgcataaattgtgaaatgaaaattatcattctatttattctgtgaacaggtacaattcttaattttttattgaatatcataaaagcagagaaaaactttg

SEQ ID NO: 452888 - DNA, 120 bp, Artificial Sequence
  ENSG00000156042_33 (sequence is synthesized)
agttttcagatattatacccaaatgacagtgacacttcaaacatgccttttctgtttgactggtggtctgctgtcccacccacttttctgtttatatttgtaagtcttccatcttgcctt

SEQ ID NO: 452889 - DNA, 120 bp, Artificial Sequence
  ENSG00000156042_34 (sequence is synthesized)
catttgcttatttttatttgtattcaggggtagtttatttgaaaccagtgacaaagtcacagtctttttgtcccctggtagtgtctaaccatctgtgcctcctcaaattctttattctat

SEQ ID NO: 452890 - DNA, 120 bp, Artificial Sequence
  ENSG00000156042_35 (sequence is synthesized)
ttgcttttcccttccttgtttttcttctctaccaccatcacctcttgtttcactttgttctgtctttctggagaaggtaggacaggagtgtccagcatcaaaggattaagagaacagtcc

SEQ ID NO: 452891 - DNA, 120 bp, Artificial Sequence
  ENSG00000156042_36 (sequence is synthesized)
tgccttgggcatggatgatttgatttgaaaagcaattgagagtggagcatgagaaaaagaagttttgactttttcctcactagtagctgggagcaatacattgaattattttacactgag

SEQ ID NO: 452892 - DNA, 120 bp, Artificial Sequence
  ENSG00000156042_37 (sequence is synthesized)
gtataatatgatcaggtttacatttgctaaaacactctgatagcactatggaggatgagttagaggtgacaaaactgtgatgttagttgattattgcataataaggaggaaaaagtttaa

SEQ ID NO: 452893 - DNA, 120 bp, Artificial Sequence
  ENSG00000156042_38 (sequence is synthesized)
gttaagtttaagtttcaatgggtaattgatgccattcagtacttcttggttgatactaaaaagaaaagaaaaacattaaccaggacatggaatgcaattatgagtaaatttggtgggagg

SEQ ID NO: 452894 - DNA, 120 bp, Artificial Sequence
  ENSG00000156042_39 (sequence is synthesized)
cagatggtactgaattcgcttttgaacataggctctagtggggttttgcccaagacagagatctgagctagagatgagatttggggagctatgaaatatggatgctatggtcatagatga

SEQ ID NO: 452895 - DNA, 120 bp, Artificial Sequence
  ENSG00000156042_40 (sequence is synthesized)
actgcctgagaaaaacataagagagaagagagctggcagtagaactctaggaaataccaacatttaaggaatgaatgaaaaattgaaagagacaagtgggattgttaaagaggcaaagag

SEQ ID NO: 452896 - DNA, 120 bp, Artificial Sequence
  ENSG00000156042_41 (sequence is synthesized)
ccagagacaatggtgtcacagaagccaaaggaaaagaattttaaggaaaagtggtcaacattgttaaatactcctaggaattcaagaaaaacaaatctaaagtcttcactggatttgaca

SEQ ID NO: 452897 - DNA, 120 bp, Artificial Sequence
  ENSG00000156042_42 (sequence is synthesized)
aatgagcaatcaagaaacagatgaatataaattcaagttggatgacgaaggaaaaaactggaaaagtagtagctagaagttatagggattttcttccctccctccctccctcccttcctc

SEQ ID NO: 452898 - DNA, 120 bp, Artificial Sequence
  ENSG00000156042_43 (sequence is synthesized)
ccttcctcccttccttccttccttcatttctttctttctctttctctctctctctctttctccctttctctctttctttctcgcccaggctggagtgcagcagtgcaatcatggctcact

SEQ ID NO: 452899 - DNA, 75 bp, Artificial Sequence
  ENSG00000156042_44 (sequence is synthesized)
tcgcccaggctggagtgcagcagtgcaatcatggctcactatagcttcaacttcccaggctcaagcaatcctgcc

SEQ ID NO: 452900 - DNA, 80 bp, Artificial Sequence
  ENSG00000156042_45 (sequence is synthesized)
atccaccagccagctcctggcctgggattttctttttaagatgaaaaagacttgagcacatccacaggtttgggaaaaag

SEQ ID NO: 452901 - DNA, 120 bp, Artificial Sequence
  ENSG00000156042_46 (sequence is synthesized)
atgaaaaagacttgagcacatccacaggtttgggaaaaagtcagcagagtgggagaagctgaaaattgaggaaagagaggggataattgatggcaggctcagggtatacacctgggaaag

SEQ ID NO: 452902 - DNA, 120 bp, Artificial Sequence
  ENSG00000156042_47 (sequence is synthesized)
gaccaagaatttaaatggaaggattaactttggaacagtgcaggctgcaatacctctttctctgagactgaaaagaaagcgatacaatagatccagaaataaataatttagctagggagt

SEQ ID NO: 452903 - DNA, 120 bp, Artificial Sequence
  ENSG00000156042_48 (sequence is synthesized)
ataatagttgagggatttcttacttaatgatttctattatctctgtgaagtaaggtctttactgaaagtgaaggagatgaggattgaatgaaaaacttgaagaaagagaagaaaacttag

SEQ ID NO: 452904 - DNA, 120 bp, Artificial Sequence
  ENSG00000156042_49 (sequence is synthesized)
atactgcaaagcattatggaatatgctgctaagcaaagacaaatacatagattactaagggtattaaaggtctccagctaagactgaatgccacaagagcttgtggcagcttagatacca

SEQ ID NO: 452905 - DNA, 120 bp, Artificial Sequence
  ENSG00000156042_50 (sequence is synthesized)
atctctgtgtctatgcagttttccttaggaccagttagctgctcttgtcttggaatgaagaagtcagattgtgctattgttttaagttgagaattttcaggacaaatgcaggagaaggac

SEQ ID NO: 452906 - DNA, 120 bp, Artificial Sequence
  ENSG00000156042_51 (sequence is synthesized)
aaggatgcctgagatgaaagtatgctggtgagaaagtagcctgagtgggttatcatgaggttcagactgatccatctgggaagtgatgggcttattggaactgaaggaaataaagtcagc

SEQ ID NO: 452907 - DNA, 120 bp, Artificial Sequence
  ENSG00000156042_52 (sequence is synthesized)
agttttcagtgggctaagtaacaaaaaggtggaagacaagacatggagtgttggttctgggagtgggatattagagtattctgttttgggtgtagaagtgcatcgctgcagggatttggg

SEQ ID NO: 452908 - DNA, 120 bp, Artificial Sequence
  ENSG00000156042_53 (sequence is synthesized)
ggtcaagataatcaaaactaaaaagaacaggacaaaagtattaatcaatgatcagaaactctctttggcctatctcaaatttggctttactgtccacatttcttagcaattatccttatt

SEQ ID NO: 452909 - DNA, 120 bp, Artificial Sequence
  ENSG00000156042_54 (sequence is synthesized)
aaaatcactgatattattttgacttctaattaaagaattttgtggactctttcttgaccatagcttctgactcaggagattcctaattacaccagacctgctctcccaatctttgtgtat

SEQ ID NO: 452910 - DNA, 120 bp, Artificial Sequence
  ENSG00000156042_55 (sequence is synthesized)
aggatatattctttttctggttttcctcctacctttttgtttcctttgaaggatctatcagtctatatttcctactaaaactatagatttggcttctaaaggtttacccttaatctcctg

SEQ ID NO: 452911 - DNA, 120 bp, Artificial Sequence
  ENSG00000156042_56 (sequence is synthesized)
ttttcttcacatttaaagaccctagcgagggcttgccaacctttttcatgtcatgacacaaaaaaatgatagtatttgtcatatacactacagaaaatgaaggaagctgtttgaggtcag

SEQ ID NO: 452912 - DNA, 120 bp, Artificial Sequence
  ENSG00000156042_57 (sequence is synthesized)
aggtgacctgcatagggactatgaatgccctgagggttgaggcagttatttctgccctaagcaatttttacttacttccatgagctcagactgttggtattcagatacctgagcttctcc

SEQ ID NO: 452913 - DNA, 120 bp, Artificial Sequence
  ENSG00000156042_58 (sequence is synthesized)
ttcacccttgacatttctctcctggttcactcttattcttttacttttttggcaagactgtcattatagacatcaatcagtaacattttagacgtcataactggatctcacatcggattt

SEQ ID NO: 452914 - DNA, 120 bp, Artificial Sequence
  ENSG00000156049_0 (sequence is synthesized)
ccactcagtcttagtctgcggtcactgctgaggttttcagaactttccaggcaaaggccagccaggtcctttgcctccaacccactccgcgcctacctcccgcctggggacacccctagg

SEQ ID NO: 452915 - DNA, 120 bp, Artificial Sequence
  ENSG00000156049_1 (sequence is synthesized)
cccaggagatcctactctcccccgagcaccgacgttccaactcgtctgcgcccccgactgctgtccggctcctgtgccaaggggcgcgcgcatcttcccggggccagcaacgctcccaac

SEQ ID NO: 452916 - DNA, 120 bp, Artificial Sequence
  ENSG00000156049_2 (sequence is synthesized)
ttctcgactcgccctcctcctccccagagcgagagtggggcgggctgagcccggatccggggtgcactcgagcgttcccagcgctcggcattcaccccgcctcagagccgactttcgaag

SEQ ID NO: 452917 - DNA, 120 bp, Artificial Sequence
  ENSG00000156049_3 (sequence is synthesized)
ggggattgagcctcggaggtccaggcgtcttactccaaagctcaagtcggcccccgtcttttctttccacacccctgtgcccgtcgcatgctggccgggtgagcggccgggccgaggatt

SEQ ID NO: 452918 - DNA, 120 bp, Artificial Sequence
  ENSG00000156049_4 (sequence is synthesized)
cgggtgcccggggccgcgtcgccccgtcgggtactgagctgagcgcaccatggccggctgctgctgcctgtccgcggaggagaaggagtcgcagcgcatcagcgcggagatcgagcgaca

SEQ ID NO: 452919 - DNA, 120 bp, Artificial Sequence
  ENSG00000156049_5 (sequence is synthesized)
gcttcgtcgggacaagaaggacgcgcgccgtgagcttaagctgctgctgctgggaactggtgaaagtgggaaaagcacctttatcaagcagatgagaattatccatgggtctggttacag

SEQ ID NO: 452920 - DNA, 120 bp, Artificial Sequence
  ENSG00000156049_6 (sequence is synthesized)
cgacgaagacagaaaggggttcacgaagctggtttaccaaaacatattcaccgccatgcaagccatgatcagagcgatggacacgctaaggatacagtatgtgtgtgaacagaataagga

SEQ ID NO: 452921 - DNA, 120 bp, Artificial Sequence
  ENSG00000156049_7 (sequence is synthesized)
aaatgcccagataatcagagaagtggaagtggacaaggtctccatgctctccagggagcaggtggaggccatcaagcagctctggcaagatccaggcatccaggagtgttacgacaggag

SEQ ID NO: 452922 - DNA, 120 bp, Artificial Sequence
  ENSG00000156049_8 (sequence is synthesized)
gagggagtaccagctgtcggactctgccaaatattacctgactgacattgaccgcatcgccacaccatcattcgtgcctacccaacaagatgtgcttcgcgtccgagtgcccaccaccgg

SEQ ID NO: 452923 - DNA, 120 bp, Artificial Sequence
  ENSG00000156049_9 (sequence is synthesized)
catcattgagtatccatttgacttggaaaacatcatctttcggatggtggatgttggtggccaacgatcggaaagacggaagtggattcactgctttgagagtgtcacctccattatttt

SEQ ID NO: 452924 - DNA, 120 bp, Artificial Sequence
  ENSG00000156049_10 (sequence is synthesized)
tacccctggtttctgaattcgtctgtgattttattcttgaacaagaaggatcttttggaagagaaaatcatgtactctcatctaattagctatttcccagaatacacaggaccgaaacag

SEQ ID NO: 452925 - DNA, 120 bp, Artificial Sequence
  ENSG00000156049_11 (sequence is synthesized)
gatgtcagagctgccagagactttatcctgaagctttaccaagatcagaatcctgacaaagagaaagtcatctactctcacttcacatgtgctacagatacagacaatattcgctttgtg

SEQ ID NO: 452926 - DNA, 120 bp, Artificial Sequence
  ENSG00000156049_12 (sequence is synthesized)
tttgctgctgtcaaagacacaattctacagctaaacctaagggaattcaaccttgtctaaaagctgctgcccactcctcccctataacagaagatgtgatttgcaaactccttgttttat

SEQ ID NO: 452927 - DNA, 120 bp, Artificial Sequence
  ENSG00000156049_13 (sequence is synthesized)
ttgcaagtgcttctgacatcaccagagccagccccatgccaggaactaaggatgtcatgtagatcgtggggacagagatgggtgatggaacttggaagatatttgagtttaccaacatac

SEQ ID NO: 452928 - DNA, 120 bp, Artificial Sequence
  ENSG00000156049_14 (sequence is synthesized)
tttaaaagtccttacatcccaaattgtgtttataattattttcttgacttttggctataagattttgtgtaatttttgaatttggtgttttctagaatttttaaaagccactttgattta

SEQ ID NO: 452929 - DNA, 120 bp, Artificial Sequence
  ENSG00000156049_15 (sequence is synthesized)
gttttaaatatgtttaaaaatagcgattaaaattatgtaagcaaggagcctgttagtttatagatcatgccttcaaacctctagagttaatttgggtgacttttttaaaaataagaatgt

SEQ ID NO: 452930 - DNA, 120 bp, Artificial Sequence
  ENSG00000156049_16 (sequence is synthesized)
taatgggtttgaagctttttattaaaccttgtaatttagagacatttttaattgtgtttctcacctcatgctgaagggtgactcctttaacatgccaccaaagattttttttaaacactt

SEQ ID NO: 452931 - DNA, 120 bp, Artificial Sequence
  ENSG00000156049_17 (sequence is synthesized)
ggttctttttgtgtgttaactttctaagccaaattaatggatatataagtatatctaatttagctttgccacagtttgatcaccaagaagccaaagctgacatagagtaaatgggctcta

SEQ ID NO: 452932 - DNA, 120 bp, Artificial Sequence
  ENSG00000156049_18 (sequence is synthesized)
gatagcatatatgttttattggtgaaaaatgtgtgtgtgtgcacgtgtgtgtgtgtgtacatttttacccccaatgtatatgaccagatcttaaaaatgtatgaaatggctagaagtcca

SEQ ID NO: 452933 - DNA, 120 bp, Artificial Sequence
  ENSG00000156049_19 (sequence is synthesized)
cattgtttgacaaatgttacgtaaccctgccaaagttctgatggccaccacagatttgctgtttgaattatgtatgctgtgcctttctgaggaggctaagaatataccattctgctatta

SEQ ID NO: 452934 - DNA, 120 bp, Artificial Sequence
  ENSG00000156049_20 (sequence is synthesized)
ggagtgctctgcagatgtcccagaaggcgcatggaagtccttctgacccatattgtcttcaaaacagtcgtaggaaggatggagaagcctggcctggcactggctctcaggaaagtcatt

SEQ ID NO: 452935 - DNA, 120 bp, Artificial Sequence
  ENSG00000156049_21 (sequence is synthesized)
gatggaattcgtgtgtctgtgtggggctcactgtgagtggggggtgacttcctttgagtaggatggacatttccccctgctctaaaaggagagtcagttcctcgttctctaatatacagt

SEQ ID NO: 452936 - DNA, 120 bp, Artificial Sequence
  ENSG00000156050_0 (sequence is synthesized)
accacctgcgccaggacaccagcgggccgctgtggggagctgcacgcacagccccgcatcggctgacaagccgggccgccatggtgcagacctgcgccgtcgcactcagaactcccgcag

SEQ ID NO: 452937 - DNA, 120 bp, Artificial Sequence
  ENSG00000156050_1 (sequence is synthesized)
gcccacctacgtagtgcgtccggagcagagcactccaatcccgtcccgcttccgcggcgtcctcagaaccggaaataaaatgcgcggagaaaataggccaatcggaaaacgaaccttgcc

SEQ ID NO: 452938 - DNA, 120 bp, Artificial Sequence
  ENSG00000156050_2 (sequence is synthesized)
tcctcgggcgggatggatcggaggctgccctggaagccaaccagacgccaaagctagaaaggggtggaccctggccccgcatagctctcgctgccaccgctgctgccactatcgctgtca

SEQ ID NO: 452939 - DNA, 120 bp, Artificial Sequence
  ENSG00000156050_3 (sequence is synthesized)
ctgtcgctgctgcctctgtccagctgaaatgaccgtggggaggcctgagggagcccccggaggcgcggaggggagccgtcagatatttccccccgagtccttcgcagacacagaggcagg

SEQ ID NO: 452940 - DNA, 120 bp, Artificial Sequence
  ENSG00000156050_4 (sequence is synthesized)
agaggagctgtccggggatgggctggttttgcccagggccagcaaacttgacgagttcctcagcccagaggaggagatagattctacttctgactcaactgggagcatttaccagaactt

SEQ ID NO: 452941 - DNA, 120 bp, Artificial Sequence
  ENSG00000156050_5 (sequence is synthesized)
acaggaactgaagcagaaagggagatggtgtctgttggagtctctctttcagtctgacccagagagtgatgaaaacctctctgaagatgaggaggacctggagagtttcttccaagacaa

SEQ ID NO: 452942 - DNA, 120 bp, Artificial Sequence
  ENSG00000156050_6 (sequence is synthesized)
ggacagggggatggtgcaggtccagtgcccgcaggctctgaggtgtggctccacaaggcgctgcagctccctgaacaaccttccctccaacattcccaggcctcagacccagccaccctc

SEQ ID NO: 452943 - DNA, 120 bp, Artificial Sequence
  ENSG00000156050_7 (sequence is synthesized)
aggctcccggcctccctcccagcacagaagcgtcagctcctgggcatcatccattactgtccctcggccattccgcatgacgctgcgcgaggcccggaagaaggccgagtggctgggctc

SEQ ID NO: 452944 - DNA, 120 bp, Artificial Sequence
  ENSG00000156050_8 (sequence is synthesized)
acctgcctcctttgagcaggagaggcagcgggcccagaggcagggtgaggaagaggccgagtgccacaggcagttccgggcacagcctgtgcctgcacatgtctacctgcccctctacca

SEQ ID NO: 452945 - DNA, 120 bp, Artificial Sequence
  ENSG00000156050_9 (sequence is synthesized)
agagatcatggagcgcagcgaggcccgaaggcaggcagggatccagaagaggaaggaactgctcctctcttctttgaagcccttcagcttcctggagaaggaggagcagctaaaggaagc

SEQ ID NO: 452946 - DNA, 120 bp, Artificial Sequence
  ENSG00000156050_10 (sequence is synthesized)
tgctcgacagagagacttggcagccacagctgaagccaagatctccaagcagaaggccaccagaaggattcccaagtccattctggagccagcccttggggataaactccaggaagctga

SEQ ID NO: 452947 - DNA, 120 bp, Artificial Sequence
  ENSG00000156050_11 (sequence is synthesized)
gctcttcaggaaaattcgcatccaaatgagagccctggacatgctccagatggcctcttcccctatcgcctcctctagtaaccgggctaacccacagccccgcacagccacccgaaccca

SEQ ID NO: 452948 - DNA, 120 bp, Artificial Sequence
  ENSG00000156050_12 (sequence is synthesized)
gcaggaaaagcttgggtttctgcacactaacttcagattccagcctcgggtgaatcctgtggtccctgactatgagggcctttacaaggccttccagagaagagcagccaaaagaagaga

SEQ ID NO: 452949 - DNA, 120 bp, Artificial Sequence
  ENSG00000156050_13 (sequence is synthesized)
aacccaagaggccactcgcaacaagcccttcttgctgaggaccgccaacctgcgccaccctcagcggccctgtgatgctgccaccaccggaaggaggcaggattccccacagccaccagc

SEQ ID NO: 452950 - DNA, 120 bp, Artificial Sequence
  ENSG00000156050_14 (sequence is synthesized)
gcacttgaaaaaaagaacaaagcagatgagagtattcagtggctggagatacacaaaaagaagtctcaagcaatgtccaaatctgtgaccttgcgtgcaaaagccatggatccccataaa

SEQ ID NO: 452951 - DNA, 120 bp, Artificial Sequence
  ENSG00000156050_15 (sequence is synthesized)
agcctggaggaagtgttcaaagcaaagctgaaagagaaccggaacaatgaccgtaaaagagcgaaagaatataagaaagaactggaggaaatgaagcagcgaatacaaacaaggccctat

SEQ ID NO: 452952 - DNA, 120 bp, Artificial Sequence
  ENSG00000156050_16 (sequence is synthesized)
ctctttgaacaagttgccaaggatctagccaagaaagaagcagaacagtggtatctagacaccctgaagcaggctgggctggaggaagactttgtgagaaacaagggtcaaggcacccgg

SEQ ID NO: 452953 - DNA, 120 bp, Artificial Sequence
  ENSG00000156050_17 (sequence is synthesized)
gctgttcaagagaaagagaccaaaatcaaggattttcccaggttccaagaaactacaaaactcagcatcagagatccagagcagggtttagaaggatctctagaacagcctgcaagcccc

SEQ ID NO: 452954 - DNA, 120 bp, Artificial Sequence
  ENSG00000156050_18 (sequence is synthesized)
aggaaagtactggaggagctgtctcatcagtcaccagaaaatctcgtatcacttgcttaatcactacacttaaaattactgcttttgaaaaatattaagcagctaacttgggtttgagtc

SEQ ID NO: 452955 - DNA, 120 bp, Artificial Sequence
  ENSG00000156050_19 (sequence is synthesized)
aagcagctaacttgggtttgagtcaaggcagggaaaacttgggttttgagtcatggctactgttagaggatggacaaatgaagagtagcagattaacaggccaggcgcagtggctcacgc

SEQ ID NO: 452956 - DNA, 120 bp, Artificial Sequence
  ENSG00000156050_20 (sequence is synthesized)
atcacttgaacccaagaggcagaggttgtaatgagctgagatcactccacagcactccagcctgggcagcagagcaaaactctgtctgagaaaaaaaaagagcagcagataacagagaat

SEQ ID NO: 452957 - DNA, 120 bp, Artificial Sequence
  ENSG00000156050_21 (sequence is synthesized)
aaaaaaagagcagcagataacagagaatagttcaaggaaatcaaagtggggaggctcaggtggagggatggtagcctaaagttaagggttcctgctttgtgcctcacacttagagaatta

SEQ ID NO: 452958 - DNA, 120 bp, Artificial Sequence
  ENSG00000156050_22 (sequence is synthesized)
ggtacagaaaagagagcacaggcccaaatgcctataaggggctagtgcagaaacataaatgcgtccatggagtgggtgtagacagtaggagatagtagacactggaaagtatcaaatcct

SEQ ID NO: 452959 - DNA, 120 bp, Artificial Sequence
  ENSG00000156050_23 (sequence is synthesized)
gctggaatataggctcagagttactacatcaactacattttcatcaagccagaaatttgtatgctatcaactaatttaaaaattacttagaaatattgtatgggcaaaataaaatacatc

SEQ ID NO: 452960 - DNA, 120 bp, Artificial Sequence
  ENSG00000156050_24 (sequence is synthesized)
tgcatatcagatctagcccatgggggatgaaaaacttacaacttctagtacaggatttcttatcctcagtgctattaatattttgggccacctaattctttgttgagggttggggaaggg

SEQ ID NO: 452961 - DNA, 120 bp, Artificial Sequence
  ENSG00000156050_25 (sequence is synthesized)
aactgtcctgtacattgtagaatgtttagtagcatccctggccactacctgctagatgccagtagtacccctctccccagctgtgacaaccaaaaatgtctccagatattgcatatcccc

SEQ ID NO: 452962 - DNA, 120 bp, Artificial Sequence
  ENSG00000156050_26 (sequence is synthesized)
agggggcaaaaatgtgcctggctgagaaccactgctctaatataaatggctgcatgaagcaaaaactggcattctaagaatacaagtaattgccatgaacacagtctatgtactatgtga

SEQ ID NO: 452963 - DNA, 120 bp, Artificial Sequence
  ENSG00000156050_27 (sequence is synthesized)
ttatgcatgtcattaacaaattaagaatttaaaacaattctctcccgttatctgtttagaatgtgcctgtgtgtttatgtgagcatgaggttcattttaagtaaacttaaaatttcccag

SEQ ID NO: 452964 - DNA, 120 bp, Artificial Sequence
  ENSG00000156050_28 (sequence is synthesized)
aaaatttcccagacaaccaagattttctactagtaggtgaactttggaataattttcttctcaccaataataattggatattctggctcggtgcagtggttcatgcttgtaatcccagca

SEQ ID NO: 452965 - DNA, 120 bp, Artificial Sequence
  ENSG00000156050_29 (sequence is synthesized)
aaggcaggaggatcgcttgaagccaggcgttcaagaccagcctgggcaacacagacctcatttctaccaaaaaaaccacaaaaagttagctggactggtggtacatgcctatagtcctag

SEQ ID NO: 452966 - DNA, 120 bp, Artificial Sequence
  ENSG00000156050_30 (sequence is synthesized)
ggtggtacatgcctatagtcctagctattcaggaggctgaggtgggaggatgccttgagcgtaggagttcaaggttacattgagctatgattacactactgcactccagcctgggtgaca

SEQ ID NO: 452967 - DNA, 120 bp, Artificial Sequence
  ENSG00000156050_31 (sequence is synthesized)
aatgatgatgagtggatattttctcagtagctgtggagacaggatgactgatagcaagagtgcctgctctaactaaagcacctttctcaagcttttttaaaaaaactatctttgtggaaa

SEQ ID NO: 452968 - DNA, 120 bp, Artificial Sequence
  ENSG00000156050_32 (sequence is synthesized)
aattcagaagtatctgtttttattgccattttctcagatgcgtcttttttggtggtgacagagtaactatcacctgggcttaagaaatgaagatgttcttgttgtttcctaagactcctc

SEQ ID NO: 452969 - DNA, 120 bp, Artificial Sequence
  ENSG00000156050_33 (sequence is synthesized)
ggttcagttttactggtatggaatcctaagggtaaatcaatacactattttaaagggaaagattaaattcttaatctctaagaaaacaaattttgtataaaacaagagccaaagaactga

SEQ ID NO: 452970 - DNA, 120 bp, Artificial Sequence
  ENSG00000156050_34 (sequence is synthesized)
taactttaaaaaaacaaaaacatgaaatccctcttaacatgctactgtatgttccattaacgaagaaagcaaagtgaccaagtagaagtgtataggacaagatagtacctcagcctgggc

SEQ ID NO: 452971 - DNA, 120 bp, Artificial Sequence
  ENSG00000156050_35 (sequence is synthesized)
caaggggagattcaagtaatttatttttttgcagcccagtggcagagagtctcttactcaggttgctaaagggagaatgtaacaagagaattgacatcactcccttcttcaaagcaacaa

SEQ ID NO: 452972 - DNA, 120 bp, Artificial Sequence
  ENSG00000156050_36 (sequence is synthesized)
ggcatcttgaaaactcaacttcctggtgaagctctgttgttggtagcaggaattatttcatccatgtgaaaagacagctgagtctgggatgaaaactcttcaaaggaaaacctcccctca

SEQ ID NO: 452973 - DNA, 120 bp, Artificial Sequence
  ENSG00000156050_37 (sequence is synthesized)
acagtcagaatgaagaacttcagccaacacataatcaaattcacttttggtctatcccagaaatttgcagtgggaagagaggtaggtacagtttcccagcccacagtcattgcttcattc

SEQ ID NO: 452974 - DNA, 120 bp, Artificial Sequence
  ENSG00000156050_38 (sequence is synthesized)
cttgtctgatcagatggtagttagaaaagaagctctcctacatccatcttctataccaggaaagaggaagagtggcaaaagcagagtcttgtgccttcaaagattcattctggttctgtt

SEQ ID NO: 452975 - DNA, 120 bp, Artificial Sequence
  ENSG00000156050_39 (sequence is synthesized)
gtgggctaaggcatcctgttcccagtatacgcattttgagatcagatagagttgctcttccaggagtcagcacccacgctcatgtccgtctttcagttaaatctccttggtttagtaact

SEQ ID NO: 452976 - DNA, 80 bp, Artificial Sequence
  ENSG00000156052_0 (sequence is synthesized)
gacgggaaccgggtctgcgcgcgagccgggcggtgggcgcggacagggccgagggcgcccgggagccgtgtcaggcggcg

SEQ ID NO: 452977 - DNA, 80 bp, Artificial Sequence
  ENSG00000156052_1 (sequence is synthesized)
agccgtcggcggccgctcgctgcggggacaccccggtgaatgagctctcgccgccaggcgcacggcgtaggggagcctcg

SEQ ID NO: 452978 - DNA, 120 bp, Artificial Sequence
  ENSG00000156052_2 (sequence is synthesized)
ggggaaggaggcgcgggcgtctgagcgaggccgggcgcggcggccttctctcacgcgccccccgagccagcgcccgcctcccgcgcccgcctctcttctcccgtcggcccagactatccg

SEQ ID NO: 452979 - DNA, 80 bp, Artificial Sequence
  ENSG00000156052_3 (sequence is synthesized)
ctcttctcccgtcggcccagactatccgctcccaccgcgcccccggcccacctggtggccccggccctggccgccgcccc

SEQ ID NO: 452980 - DNA, 120 bp, Artificial Sequence
  ENSG00000156052_4 (sequence is synthesized)
gccaccgctgcctcgggggagcgagggcgggagggtgtgtgtgcgcgctgtgagcagggggtgccggcggggctgcagcggaggcactttggaagaatgactctggagtccatcatggcg

SEQ ID NO: 452981 - DNA, 120 bp, Artificial Sequence
  ENSG00000156052_5 (sequence is synthesized)
tgctgcctgagcgaggaggccaaggaagcccggcggatcaacgacgagatcgagcggcagctccgcagggacaagcgggacgcccgccgggagctcaagctgctgctgctcgggacagga

SEQ ID NO: 452982 - DNA, 120 bp, Artificial Sequence
  ENSG00000156052_6 (sequence is synthesized)
gagagtggcaagagtacgtttatcaagcagatgagaatcatccatgggtcaggatactctgatgaagataaaaggggcttcaccaagctggtgtatcagaacatcttcacggccatgcag

SEQ ID NO: 452983 - DNA, 120 bp, Artificial Sequence
  ENSG00000156052_7 (sequence is synthesized)
gccatgatcagagccatggacacactcaagatcccatacaagtatgagcacaataaggctcatgcacaattagttcgagaagttgatgtggagaaggtgtctgcttttgagaatccatat

SEQ ID NO: 452984 - DNA, 120 bp, Artificial Sequence
  ENSG00000156052_8 (sequence is synthesized)
gtagatgcaataaagagtttatggaatgatcctggaatccaggaatgctatgatagacgacgagaatatcaattatctgactctaccaaatactatcttaatgacttggaccgcgtagct

SEQ ID NO: 452985 - DNA, 120 bp, Artificial Sequence
  ENSG00000156052_9 (sequence is synthesized)
gaccctgcctacctgcctacgcaacaagatgtgcttagagttcgagtccccaccacagggatcatcgaatacccctttgacttacaaagtgtcattttcagaatggtcgatgtagggggc

SEQ ID NO: 452986 - DNA, 120 bp, Artificial Sequence
  ENSG00000156052_10 (sequence is synthesized)
caaaggtcagagagaagaaaatggatacactgctttgaaaatgtcacctctatcatgtttctagtagcgcttagtgaatatgatcaagttctcgtggagtcagacaatgagaaccgaatg

SEQ ID NO: 452987 - DNA, 120 bp, Artificial Sequence
  ENSG00000156052_11 (sequence is synthesized)
gaggaaagcaaggctctctttagaacaattatcacatacccctggttccagaactcctcggttattctgttcttaaacaagaaagatcttctagaggagaaaatcatgtattcccatcta

SEQ ID NO: 452988 - DNA, 120 bp, Artificial Sequence
  ENSG00000156052_12 (sequence is synthesized)
gtcgactacttcccagaatatgatggaccccagagagatgcccaggcagcccgagaattcattctgaagatgttcgtggacctgaacccagacagtgacaaaattatctactcccacttc

SEQ ID NO: 452989 - DNA, 120 bp, Artificial Sequence
  ENSG00000156052_13 (sequence is synthesized)
acgtgcgccacagacaccgagaatatccgctttgtctttgctgccgtcaaggacaccatcctccagttgaacctgaaggagtacaatctggtctaattgtgcctcctagacacccgccct

SEQ ID NO: 452990 - DNA, 120 bp, Artificial Sequence
  ENSG00000156052_14 (sequence is synthesized)
gcccttccctggtgggctattgaagatacacaagagggactgtatttctgtggaaaacaatttgcataatactaatttattgccgtcctggactctgtgtgagcgtgtccacagagtttg

SEQ ID NO: 452991 - DNA, 120 bp, Artificial Sequence
  ENSG00000156052_15 (sequence is synthesized)
tagtaaatattatgattttatttaaactattcagaggaaaaacagaggatgctgaagtacagtcccagcacatttcctctctatcttttttttaggcaaaaccttgtgactcagtgtatt

SEQ ID NO: 452992 - DNA, 120 bp, Artificial Sequence
  ENSG00000156052_16 (sequence is synthesized)
ttaaattctcagtcatgcactcacaaagataagacttgtttctttctgtctctctctctttttcttttctatggagcaaaacaaagctgatttcccttttttcttcccccgctaattcat

SEQ ID NO: 452993 - DNA, 120 bp, Artificial Sequence
  ENSG00000156052_17 (sequence is synthesized)
acctccctcctgatgtttttcccaggttacaatggcctttatcctagttccattcttggtcaagtttttctctcaaatgatacagtcaggacacatcgttcgatttaagccatcatcagc

SEQ ID NO: 452994 - DNA, 120 bp, Artificial Sequence
  ENSG00000156052_18 (sequence is synthesized)
ttaatttaagtttgtagtttttgctgaaggattatatgtattaatacttacggttttaaatgtgttgctttggatacacacatagtttcttttttaatagaatatactgtcttgtctcac

SEQ ID NO: 452995 - DNA, 120 bp, Artificial Sequence
  ENSG00000156052_19 (sequence is synthesized)
tttggactgggacagtggatgcccatctaaaagttaagtgtcatttcttttagatgtttaccttcagccatagcttgattgctcagagaaatatgcagaaggcaggatcaaagacacaca

SEQ ID NO: 452996 - DNA, 120 bp, Artificial Sequence
  ENSG00000156052_20 (sequence is synthesized)
ggagtcctttcttttgaaatgccacgtgccattgtctttcctcccttctttgcttctttttcttaccctctctttcaattgcagatgccaaaaaagatgccaacagacactacattaccc

SEQ ID NO: 452997 - DNA, 120 bp, Artificial Sequence
  ENSG00000156052_21 (sequence is synthesized)
taatggctgctacccagaacctttttataggttgttcttaatttttttgttgttgttgttcaagcttttcctttcttttttttcttggtgtttgggccacgattttaaaatgacttttat

SEQ ID NO: 452998 - DNA, 120 bp, Artificial Sequence
  ENSG00000156052_22 (sequence is synthesized)
tatgggtatgtgttgccaaagctggctttttgtcaaataaaatgaatacgaacttaaaaaataaaagctggtatcttaaaatgtaagagagtaagactgtgaagcctaaaatgactggct

SEQ ID NO: 452999 - DNA, 120 bp, Artificial Sequence
  ENSG00000156052_23 (sequence is synthesized)
gagaatgaaccagaaatgccatttgccaaacagttgtaactagaaatttgattctcacggtccattcttttctttgtccttaagatgacattgttagtgttcacgtcccatgttcagtgt

SEQ ID NO: 453000 - DNA, 120 bp, Artificial Sequence
  ENSG00000156052_24 (sequence is synthesized)
ccaaaccggcaatgtaaaaagtatcctgtgtggtttaacaggaaatctgtttatgtctctttatttgaaaccagttttactctcagtggttctttaagttcaatgaagtctgccaggaac

SEQ ID NO: 453001 - DNA, 120 bp, Artificial Sequence
  ENSG00000156052_25 (sequence is synthesized)
attggttggtagtattattccgacacctttaatttccaaaatctgaagttcctgctagtttaccaccttcatgatcttcttgaactggtaactgattaggttgaacttatggaagatttg

SEQ ID NO: 453002 - DNA, 120 bp, Artificial Sequence
  ENSG00000156052_26 (sequence is synthesized)
tggacttaactcaaaagtaacctctcagtgttctatagaacatgtatttgtgtaactgaacctaccaggagaaatgtttggaattctatatgtgcaatttttcaacaaatgcaaaaaaaa

SEQ ID NO: 453003 - DNA, 120 bp, Artificial Sequence
  ENSG00000156052_27 (sequence is synthesized)
tacagcacatgtattgacaagcttctgtcaagcagcttgagttgaaatttgatttaagaaaataaatcatgattgttcaaagctgctgggacgttagaattaggccatgatactggtctc

SEQ ID NO: 453004 - DNA, 120 bp, Artificial Sequence
  ENSG00000156052_28 (sequence is synthesized)
ataaatcactcttttggaacaacaaagggggagggagaaaaatcacggcctgttaaatgagtaccaaagccgcccaacagtaatgagatgttctcatccttgattctcccagcctcaaac

SEQ ID NO: 453005 - DNA, 120 bp, Artificial Sequence
  ENSG00000156052_29 (sequence is synthesized)
aacacagcttactttttttttcccttgctcagaaagtacctgtaatttaacaaacagactgcctgtaggtatagtgcaattacaaatgctctaatcattgtacatacatctctcttgata

SEQ ID NO: 453006 - DNA, 120 bp, Artificial Sequence
  ENSG00000156052_30 (sequence is synthesized)
ttgcagcatccatactggctttgtaatcattaattttttggcagattgaatgtgctgtattgatatgtatctatgtaattgtattgtatgtctatagctaattcacgttttgaataatgt

SEQ ID NO: 453007 - DNA, 120 bp, Artificial Sequence
  ENSG00000156052_31 (sequence is synthesized)
tattttatttacttttttaagagaggagaatgtaaatttgtcagtttatttctgactagggatattttctttccatttagaaaagaagaaaaaaaaaaaaccttactgtcatacagagcg

SEQ ID NO: 453008 - DNA, 120 bp, Artificial Sequence
  ENSG00000156052_32 (sequence is synthesized)
gtactagcgtcgtgctgtataaaatcatttgcacattcctgagtagaggtatactgattataagacccaaaggtaatttcatagcaaaatacataaaatcagtcggagcttttatacaaa

SEQ ID NO: 453009 - DNA, 120 bp, Artificial Sequence
  ENSG00000156052_33 (sequence is synthesized)
catggaaaccaactttgtagaacttttgccatttgatctaggattggaatatgagcttttatacaattcatattcttatttggcaaatgcacagtttagtattacctctctgatggcctt

SEQ ID NO: 453010 - DNA, 120 bp, Artificial Sequence
  ENSG00000156052_34 (sequence is synthesized)
tactagaaaggcagttttagaagctattgtgatccactaaggaaatgttttaacagctagagaccactgcttgcctgaaagggcgttcttaaatttggtgcagcaaaaaaaaaaaaaaaa

SEQ ID NO: 453011 - DNA, 120 bp, Artificial Sequence
  ENSG00000156052_35 (sequence is synthesized)
aaaaaaaaaattaaacaacaacatttgaaggcctacagtgtgtatagagaaaacctcatcacaagatcataagtgttacagttttagggaatcaagatattctatttaatagagctatag

SEQ ID NO: 453012 - DNA, 120 bp, Artificial Sequence
  ENSG00000156052_36 (sequence is synthesized)
taaatgtagtcaattaaacctgatctcaaagcttgaagaagctgagcaaaacagggaaagattgttatatttgtctttatgaaattgggatggaatttgctatgcagaattgaggtttgt

SEQ ID NO: 453013 - DNA, 120 bp, Artificial Sequence
  ENSG00000156052_37 (sequence is synthesized)
ggcttcgctgttcctgtagggtgcatgacaagatcccttctcttgagaaaggaaaaaattgatcaccctagcagcagtgatgcatagaaacctaattttagccacaccagtcaatcgaag

SEQ ID NO: 453014 - DNA, 120 bp, Artificial Sequence
  ENSG00000156052_38 (sequence is synthesized)
ctaaaggattttcttttttgtttcttcggggttttattgaaggggctaggggcgggacgggattcttttcagttttgtataaaaacaaagtttactcatgctttatattatattgtgatt

SEQ ID NO: 453015 - DNA, 120 bp, Artificial Sequence
  ENSG00000156052_39 (sequence is synthesized)
gcaagcgttataagcgtgtgccactggcctcctattgttgatgcttaggtaatggaggcctgtggtgagttttatggtgacttgggcatgtcttattcaaaaacaaaaacataaaacaca

SEQ ID NO: 453016 - DNA, 120 bp, Artificial Sequence
  ENSG00000156052_40 (sequence is synthesized)
gaaacctttcttcagcataccaaggcaagcagccatttcatgactcacttaacacattgcagtgtaccagtttacagatgatttttccctttttgcgtgacatggcagttctaaccccca

SEQ ID NO: 453017 - DNA, 120 bp, Artificial Sequence
  ENSG00000156052_41 (sequence is synthesized)
gagaattccttatttgtaaattggaagtttctactatgccttacagagcttaaattcagaagtttgtgcctcatatctgaaacaaagggaaataacacacccattcaaaagtaaataaat

SEQ ID NO: 453018 - DNA, 120 bp, Artificial Sequence
  ENSG00000156052_42 (sequence is synthesized)
ctcctagaagtttttgtttttaacatttccatataaagagctctgttgaatgtcatgaatagactggaaaaaaaaattttaagaacctgcatatgttgtttactagcagatgacaactac

SEQ ID NO: 453019 - DNA, 120 bp, Artificial Sequence
  ENSG00000156052_43 (sequence is synthesized)
aaaaggaatctgaagaacacgtaaaacttgtatttttttttttttggtagattaactagcaggcctattttaaaaaggtaattcagctaaagggcaatttacttttttgtacttcagact

SEQ ID NO: 453020 - DNA, 120 bp, Artificial Sequence
  ENSG00000156052_44 (sequence is synthesized)
atcttgattgtcaaagtgtacgaactgtaattttaaaatttatactgccacatgattgtaaattttagttgtcttaagttaggaattggtgaaaagctatttatgctggatttgggtcaa

SEQ ID NO: 453021 - DNA, 120 bp, Artificial Sequence
  ENSG00000156052_45 (sequence is synthesized)
aatgacttatttgcaaaaaaataaataatgggaagaaagggctgtataatgaaatactgcaagactcacatattggttggaaatttccctcaaatcacctaccgattacccttgatttcc

SEQ ID NO: 453022 - DNA, 120 bp, Artificial Sequence
  ENSG00000156052_46 (sequence is synthesized)
ctttgttttcagtttctcaaaacgaatgaaatgaaatatagcagaatgttaacccatataaaaataaagtgtacccaaatattgtaatgtatattgctgctcttcttcaaattaaataag

SEQ ID NO: 453023 - DNA, 120 bp, Artificial Sequence
  ENSG00000156052_47 (sequence is synthesized)
ggtttaaaaccacttaattggtaatcaacatctcaattgatacaaataaggtgtgcttggtatacattaatattttcttccaaagatatatctttggttagaaacacaaaaaaataaaac

SEQ ID NO: 453024 - DNA, 120 bp, Artificial Sequence
  ENSG00000156052_48 (sequence is synthesized)
tagtaatattgtatgtttatctatctctacatatttccagcatatgtagcgttaatagatctgtcctggtaactgtgtctttgggatttcattttggttccatcaaattaggaaaagaaa

SEQ ID NO: 453025 - DNA, 120 bp, Artificial Sequence
  ENSG00000156052_49 (sequence is synthesized)
tggcttagttgtatatgattagctagagatttttggagccagacacctgctgtttagtagataacttagtacagaccctaaacttgtcatttgtttttctcacagaatagccatttcctg

SEQ ID NO: 453026 - DNA, 120 bp, Artificial Sequence
  ENSG00000156052_50 (sequence is synthesized)
ctgtcttcccaatgatcactgccctttcaataacactcttgcctctagaatcatatgttcaaagtatgaatacacacctagcacatagtaggtgctcaaatattaatttcctccttgcct

SEQ ID NO: 453027 - DNA, 120 bp, Artificial Sequence
  ENSG00000156052_51 (sequence is synthesized)
tccttatctaccctgtgtcctccatttccccgtatgattccaacccaatatagcaaatgacatttacatgttatgaaaacatctattgggtaaaatcagatcttggataaagaaattctg

SEQ ID NO: 453028 - DNA, 120 bp, Artificial Sequence
  ENSG00000156052_52 (sequence is synthesized)
acttttatataagcttttggtagacagaaaaaacagaaaggtattcgttggtagaacatttttaagttcaggaaagaaagctggaataatactacgtaactttgtccaggttactttgac

SEQ ID NO: 453029 - DNA, 120 bp, Artificial Sequence
  ENSG00000156052_53 (sequence is synthesized)
tgaaacacgtttttggtggatttcttttcctcaaagaactctctaaatgcaactccttgctggattcctcacccatcatcctgttggaaacccttactagacctatgtatttagggagtt

SEQ ID NO: 453030 - DNA, 120 bp, Artificial Sequence
  ENSG00000156052_54 (sequence is synthesized)
ttgtcagaaaacatttttaacttgcagtatttaaaagaatatttactgttcctaaaatgtcattcaaatgcatgtactgtctattgtttggggatgggaactagttttgcaaaaaacacc

SEQ ID NO: 453031 - DNA, 120 bp, Artificial Sequence
  ENSG00000156052_55 (sequence is synthesized)
taatgttgtataataatgccccaatgatcttgctggttaaaaatacagtatttttggccataattttgtactatagtattcttcattgttgagttttgcttccattaaagttgcccgagc

SEQ ID NO: 453032 - DNA, 120 bp, Artificial Sequence
  ENSG00000156052_56 (sequence is synthesized)
ccctctcagaatgttttgtattagtaggagtactgaaatacatctttccttccttaacacaccttgtgcatattgcattttccaaaataaacaagtttaatggtttcaaaaaaaaaaaaa

SEQ ID NO: 453033 - DNA, 120 bp, Artificial Sequence
  ENSG00000156076_0 (sequence is synthesized)
aaacgggaacagccctggctgagggagctgcagcgcagcagagtatctgacggcgccaggttgcgtaggtgcggcacgaggagttttcccggcagcgaggaggtcctgagcagcatggcc

SEQ ID NO: 453034 - DNA, 120 bp, Artificial Sequence
  ENSG00000156076_1 (sequence is synthesized)
cggaggagcgccttccctgccgccgcgctctggctctggagcatcctcctgtgcctgctggcactgcgggcggaggccgggccgccgcaggaggagagcctgtacctatggatcgatgct

SEQ ID NO: 453035 - DNA, 120 bp, Artificial Sequence
  ENSG00000156076_2 (sequence is synthesized)
caccaggcaagagtactcataggatttgaagaagatatcctgattgtttcagaggggaaaatggcaccttttacacatgatttcagaaaagcacaacagagaatgccagctattcctgtc

SEQ ID NO: 453036 - DNA, 120 bp, Artificial Sequence
  ENSG00000156076_3 (sequence is synthesized)
aatatccattccatgaattttacctggcaagctgcagggcaggcagaatacttctatgaattcctgtccttgcgctccctggataaaggcatcatggcagatccaaccgtcaatgtccct

SEQ ID NO: 453037 - DNA, 120 bp, Artificial Sequence
  ENSG00000156076_4 (sequence is synthesized)
ctgctgggaacagtgcctcacaaggcatcagttgttcaagttggtttcccatgtcttggaaaacaggatggggtggcagcatttgaagtggatgtgattgttatgaattctgaaggcaac

SEQ ID NO: 453038 - DNA, 120 bp, Artificial Sequence
  ENSG00000156076_5 (sequence is synthesized)
accattctccaaacacctcaaaatgctatcttctttaaaacatgtcaacaagctgagtgcccaggcgggtgccgaaatggaggcttttgtaatgaaagacgcatctgcgagtgtcctgat

SEQ ID NO: 453039 - DNA, 120 bp, Artificial Sequence
  ENSG00000156076_6 (sequence is synthesized)
gggttccacggacctcactgtgagaaagccctttgtaccccacgatgtatgaatggtggactttgtgtgactcctggtttctgcatctgcccacctggattctatggagtgaactgtgac

SEQ ID NO: 453040 - DNA, 120 bp, Artificial Sequence
  ENSG00000156076_7 (sequence is synthesized)
aaagcaaactgctcaaccacctgctttaatggagggacctgtttctaccctggaaaatgtatttgccctccaggactagagggagagcagtgtgaaatcagcaaatgcccacaaccctgt

SEQ ID NO: 453041 - DNA, 120 bp, Artificial Sequence
  ENSG00000156076_8 (sequence is synthesized)
ggagacctctgttcaaagcctgtctgcgagcctggctgtggtgcacatggaacctgccatgaacccaacaaatgccaatgtcaagaaggttggcatggaagacactgcaataaaaggtac

SEQ ID NO: 453042 - DNA, 120 bp, Artificial Sequence
  ENSG00000156076_9 (sequence is synthesized)
gaagccagcctcatacatgccctgaggccagcaggcgcccagctcaggcagcacacgccttcacttaaaaaggccgaggagcggcgggatccacctgaatccaattacatctggtgaact

SEQ ID NO: 453043 - DNA, 120 bp, Artificial Sequence
  ENSG00000156076_10 (sequence is synthesized)
ccgacatctgaaacgttttaagttacaccaagttcatagcctttgttaacctttcatgtgttgaatgttcaaataatgttcattacacttaagaatactggcctgaattttattagcttc

SEQ ID NO: 453044 - DNA, 120 bp, Artificial Sequence
  ENSG00000156076_11 (sequence is synthesized)
attataaatcactgagctgatatttactcttccttttaagttttctaagtacgtctgtagcatgatggtatagattttcttgtttcagtgctttgggacagattttatattatgtcaatt

SEQ ID NO: 453045 - DNA, 120 bp, Artificial Sequence
  ENSG00000156076_12 (sequence is synthesized)
gatcaggttaaaattttcagtgtgtagttggcagatattttcaaaattacaatgcatttatggtgtctgggggcaggggaacatcagaaaggttaaattgggcaaaaatgcgtaagtcac

SEQ ID NO: 453046 - DNA, 120 bp, Artificial Sequence
  ENSG00000156076_13 (sequence is synthesized)
aagaatttggatggtgcagttaatgttgaagttacagcatttcagattttattgtcagatatttagatgtttgttacatttttaaaaattgctcttaatttttaaactctcaatacaata

SEQ ID NO: 453047 - DNA, 120 bp, Artificial Sequence
  ENSG00000156076_14 (sequence is synthesized)
tattttgaccttaccattattccagagattcagtattaaaaaaaaaaaaattacactgtggtagtggcatttaaacaatataatatattctaaacacaatgaaatagggaatataatgta

SEQ ID NO: 453048 - DNA, 120 bp, Artificial Sequence
  ENSG00000156076_15 (sequence is synthesized)
tgaactttttgcattggcttgaagcaatataatatattgtaaacaaaacacagctcttacctaataaacattttatactgtttgtatgtataaaataaaggtgctgctttagttttctga

SEQ ID NO: 453049 - DNA, 120 bp, Artificial Sequence
  ENSG00000156076_16 (sequence is synthesized)
gtactgaaggcagatgcttgtgaacagaaatgacccacactaattctttggttttctttttgcttgaaacttctgatttagatgatttcaagtctacctggtttgatcgttttattattt

SEQ ID NO: 453050 - DNA, 120 bp, Artificial Sequence
  ENSG00000156096_0 (sequence is synthesized)
agaaaggagcagcaactggaaaacaagcattgcattgcatcaggatgtctatgaaatggacttcagctcttctgctgatacagctgagctgttactttagctctgggagttgtggaaagg

SEQ ID NO: 453051 - DNA, 120 bp, Artificial Sequence
  ENSG00000156096_1 (sequence is synthesized)
tgctggtgtggcccacagaattcagccactggatgaatataaagacaatcctggatgaacttgtccagagaggtcatgaggtgactgtattggcatcttcagcttccatttctttcgatc

SEQ ID NO: 453052 - DNA, 120 bp, Artificial Sequence
  ENSG00000156096_2 (sequence is synthesized)
ccaacagcccatctactcttaaatttgaagtttatcctgtatctttaactaaaactgagtttgaggatattatcaagcagctggttaagagatgggcagaacttccaaaagacacatttt

SEQ ID NO: 453053 - DNA, 120 bp, Artificial Sequence
  ENSG00000156096_3 (sequence is synthesized)
ggtcatatttttcacaagtacaagaaatcatgtggacatttaatgacatacttagaaagttctgtaaggatatagtttcaaataagaaacttatgaagaaactacaggagtcaagatttg

SEQ ID NO: 453054 - DNA, 120 bp, Artificial Sequence
  ENSG00000156096_4 (sequence is synthesized)
atgttgttcttgcagatgctgttttcccctttggtgagctgctggccgagttacttaaaataccctttgtctacagcctccgcttctctcctggctacgcaattgaaaagcatagtggag

SEQ ID NO: 453055 - DNA, 120 bp, Artificial Sequence
  ENSG00000156096_5 (sequence is synthesized)
gacttctgttccctccttcctatgtgcctgttgttatgtcagaactaagtgaccaaatgactttcatagagagggtaaaaaatatgatctatgtgctttattttgaattttggttccaaa

SEQ ID NO: 453056 - DNA, 120 bp, Artificial Sequence
  ENSG00000156096_6 (sequence is synthesized)
tatttgacatgaagaagtgggatcagttctacagtgaagttctaggaagacccactacgttatctgagacaatggcaaaagctgacatatggcttattcgaaactactgggattttcaat

SEQ ID NO: 453057 - DNA, 120 bp, Artificial Sequence
  ENSG00000156096_7 (sequence is synthesized)
ttcctcacccactcttaccaaatgttgagttcgttggaggactccactgcaaacctgccaaacccctaccgaaggaaatggaagagtttgtccagagctctggagaaaatggtgttgtgg

SEQ ID NO: 453058 - DNA, 120 bp, Artificial Sequence
  ENSG00000156096_8 (sequence is synthesized)
cagcccttgccaagatcccacaaaaggttctgtggagatttgatgggaataaaccagatactttaggactcaatactcggctgtacaagtggataccccagaatgatcttcttggtcacc

SEQ ID NO: 453059 - DNA, 120 bp, Artificial Sequence
  ENSG00000156096_9 (sequence is synthesized)
caaaaaccagagcttttataactcatggtggagccaatggcatctatgaggcaatctaccatggaatccctatggtgggcgttccattgtttgcagatcaacctgataacattgcacaca

SEQ ID NO: 453060 - DNA, 120 bp, Artificial Sequence
  ENSG00000156096_10 (sequence is synthesized)
tgaaggccaagggagcagctgttagtttggacttccacacaatgtcgagtacagacttactcaatgcactgaagacagtaattaatgatcctttatataaagagaatgctatgaaattat

SEQ ID NO: 453061 - DNA, 120 bp, Artificial Sequence
  ENSG00000156096_11 (sequence is synthesized)
caagaattcatcatgatcaaccagtgaagccccttgatcgagcagtcttctggattgaatttgtcatgcgccataaaggagccaagcaccttcgggttgcagcccacgacctcacctggt

SEQ ID NO: 453062 - DNA, 120 bp, Artificial Sequence
  ENSG00000156096_12 (sequence is synthesized)
tccagtaccactctttggatgtgactgggttcctgctggcctgtgtggcaactgtgatattcatcatcacaaaatgtctgttttgtgtctggaagtttgttagaacaggaaagaagggga

SEQ ID NO: 453063 - DNA, 120 bp, Artificial Sequence
  ENSG00000156096_13 (sequence is synthesized)
aaagagattaattacgtctgaggctggaagctgggaaacccaataaatgaactcctttagtttattacaacaagaagacgttgtgatacaagagattcctttcttcttgtgacaaaacat

SEQ ID NO: 453064 - DNA, 120 bp, Artificial Sequence
  ENSG00000156096_14 (sequence is synthesized)
ctttcaaaacttaccttgtcaagtcaaaatttgttttagtacctgtttaaccattagaaatatttcatgtcaaggaggaaaacattagggaaaacaaaaatgatataaagccatatgagg

SEQ ID NO: 453065 - DNA, 120 bp, Artificial Sequence
  ENSG00000156096_15 (sequence is synthesized)
ttatattgaaatgtattgagcttatattgaaatttattgttccaattcacaggttacatgaaaaaaaatttactaagcttaactacatgtcacacattgtacatggaaacaagaacatta

SEQ ID NO: 453066 - DNA, 120 bp, Artificial Sequence
  ENSG00000156096_16 (sequence is synthesized)
agaagtccactgacagtatcagtactgttttgcaaatactcagcatactttggatccatttcatgcaggattgtgttgttttaactgttgttgaggaagctaataaataattaaattgta

SEQ ID NO: 453067 - DNA, 120 bp, Artificial Sequence
  ENSG00000156096_17 (sequence is synthesized)
cttggcctcccaaagtgctgggattaacggtgtgagccacctcgcccagcctggagccctttctttaatataaacataaatgttagtcaacttgtttaaatataaacatgtgagctgctt

SEQ ID NO: 453068 - DNA, 120 bp, Artificial Sequence
  ENSG00000156097_0 (sequence is synthesized)
gcagtgcttcaggcttcagcagccttggagaagcatcagctgagaggagctatcacatgggagccgggactgctcagcaaagatggatttatgaggaaactgaaattcagaagattcaca

SEQ ID NO: 453069 - DNA, 120 bp, Artificial Sequence
  ENSG00000156097_1 (sequence is synthesized)
gagttagtaatgcccagaactgggactagaaactaaattttgtgctccttctactccccagcagctcttgccattctgaggagacaagaaatcaggaaatttacataaggaaccctaaaa

SEQ ID NO: 453070 - DNA, 120 bp, Artificial Sequence
  ENSG00000156097_2 (sequence is synthesized)
ctgaggcactatcccagagatcagcaggaccctgggaaggagaaacaggatttagaatccccggctaacagttctggaaagggtagaagggtatggagaacaagaatggcagaaaggaga

SEQ ID NO: 453071 - DNA, 120 bp, Artificial Sequence
  ENSG00000156097_3 (sequence is synthesized)
tggaaaaggaagaggtgaaggccattccgaaagcggagtgttgagtgggtcaggctcctgcacctctcacgtctcctgcttcttagcagtcaccaaggcagaccctgcagctacctccgg

SEQ ID NO: 453072 - DNA, 120 bp, Artificial Sequence
  ENSG00000156097_4 (sequence is synthesized)
ccagaaaggggatgagcttctgatccttcagctgcctggcctggcgctctgtacgcagacaaacctgcccaagaggctccagtgggaggtgccccctacgaaaccaggaagcctgggcct

SEQ ID NO: 453073 - DNA, 120 bp, Artificial Sequence
  ENSG00000156097_5 (sequence is synthesized)
gggctcgccatcccagggtcgctggactaggatgggggatgggcctgtgacaggaggtaccctgggtgccctctttcggccccatggagtcctcacccatcccccagtcatcagggaact

SEQ ID NO: 453074 - DNA, 120 bp, Artificial Sequence
  ENSG00000156097_6 (sequence is synthesized)
cttccactttggggagggtccctcaaaccccaggtccctctactgccagtggggtcccggaggtggggctacgggatgttgcttcggaatctgtggccctcttcttcatgctcctgctgg

SEQ ID NO: 453075 - DNA, 120 bp, Artificial Sequence
  ENSG00000156097_7 (sequence is synthesized)
acttgactgctgtggctggcaatgccgctgtgatggccgtgatcgccaagacgcctgccctccgaaaatttgtcttcgtcttccacctctgcctggtggacctgctggctgccctgaccc

SEQ ID NO: 453076 - DNA, 120 bp, Artificial Sequence
  ENSG00000156097_8 (sequence is synthesized)
tcatgcccctggccatgctctccagctctgccctctttgaccacgccctctttggggaggtggcctgccgcctctacttgtttctgagcgtgtgctttgtcagcctggccatcctctcgg

SEQ ID NO: 453077 - DNA, 120 bp, Artificial Sequence
  ENSG00000156097_9 (sequence is synthesized)
tgtcagccatcaatgtggagcgctactattacgtagtccaccccatgcgctacgaggtgcgcatgacgctggggctggtggcctctgtgctggtgggtgtgtgggtgaaggccttggcca

SEQ ID NO: 453078 - DNA, 120 bp, Artificial Sequence
  ENSG00000156097_10 (sequence is synthesized)
tggcttctgtgccagtgttgggaagggtctcctgggaggaaggagctcccagtgtccccccaggctgttcactccagtggagccacagtgcctactgccagctttttgtggtggtctttg

SEQ ID NO: 453079 - DNA, 120 bp, Artificial Sequence
  ENSG00000156097_11 (sequence is synthesized)
ctgtcctttactttctgttgcccctgctcctcatacttgtggtctactgcagcatgttccgagtggcccgcgtggctgccatgcagcacgggccgctgcccacgtggatggagacacccc

SEQ ID NO: 453080 - DNA, 120 bp, Artificial Sequence
  ENSG00000156097_12 (sequence is synthesized)
ggcaacgctccgaatctctcagcagccgctccacgatggtcaccagctcgggggccccccagaccaccccacaccggacgtttgggggagggaaagcagcagtggttctcctggctgtgg

SEQ ID NO: 453081 - DNA, 120 bp, Artificial Sequence
  ENSG00000156097_13 (sequence is synthesized)
ggggacagttcctgctctgttggttgccctacttctctttccacctctatgttgccctgagtgctcagcccatttcaactgggcaggtggagagtgtggtcacctggattggctactttt

SEQ ID NO: 453082 - DNA, 120 bp, Artificial Sequence
  ENSG00000156097_14 (sequence is synthesized)
gcttcacttccaaccctttcttctatggatgtctcaaccggcagatccggggggagctcagcaagcagtttgtctgcttcttcaagccagctccagaggaggagctgaggctgcctagcc

SEQ ID NO: 453083 - DNA, 120 bp, Artificial Sequence
  ENSG00000156097_15 (sequence is synthesized)
gggagggctccattgaggagaacttcctgcagttccttcaggggactggctgtccttctgagtcctgggtttcccgacccctacccagccccaagcaggagccacctgctgttgactttc

SEQ ID NO: 453084 - DNA, 120 bp, Artificial Sequence
  ENSG00000156097_16 (sequence is synthesized)
gaatcccaggccagatagctgaggagacctctgagttcctggagcagcaactcaccagcgacatcatcatgtcagacagctacctccgtcctgccgcctcaccccggctggagtcatgat

SEQ ID NO: 453085 - DNA, 120 bp, Artificial Sequence
  ENSG00000156097_17 (sequence is synthesized)
gggccgctggacactcggagggatatggggctggggccagttatgattgcaaggaccaccttgtgggatcaccttttcccagctggctagggctgaggctggggtctctgcacacagctt

SEQ ID NO: 453086 - DNA, 120 bp, Artificial Sequence
  ENSG00000156097_18 (sequence is synthesized)
ttgcttagtgtttcctgggtcaggaacagagccaacaggatgaacgtgtgcaaaagccttggacttggctgtgatctttgactgctaggggagggaacctgggtatggtgagacggtgac

SEQ ID NO: 453087 - DNA, 120 bp, Artificial Sequence
  ENSG00000156097_19 (sequence is synthesized)
gagagaaaagggtcacaaaggtgaggtgaaacctctcaattggtgaaatttccatgcttccagaagcagggaattctctaagggtaggagttggaggatacagggcagcaggccaggttt

SEQ ID NO: 453088 - DNA, 120 bp, Artificial Sequence
  ENSG00000156097_20 (sequence is synthesized)
gagttattctaggggccatttaggatattttatttttcagtgtaattgtccagggcagtaattgcacccaagcaaggtaagaaaatgacccatgttttctcatttccttgctaggtttaa

SEQ ID NO: 453089 - DNA, 120 bp, Artificial Sequence
  ENSG00000156097_21 (sequence is synthesized)
aaagaactaaattatagccaagtgtttccacttgagttaatagatcatttttctggttttatacctgagatttccttaaaatgagaggaccagtagggtgtattcctttactgagtttgg

SEQ ID NO: 453090 - DNA, 120 bp, Artificial Sequence
  ENSG00000156097_22 (sequence is synthesized)
ccagaaacaaggcaaaatagaaattagggtacatggagtagaagataggaaagctgactgcagctctctctctcccacccttcaggaaaagcccttctgttctatttttctgtctctctc

SEQ ID NO: 453091 - DNA, 120 bp, Artificial Sequence
  ENSG00000156097_23 (sequence is synthesized)
ctgcacacaggagatcaagggtagagcctgatcttagcagagacaagaataaggcaggatggctttcctctcttttaggaggaagaattagaatgactgggggtcagacgggcgagggtg

SEQ ID NO: 453092 - DNA, 120 bp, Artificial Sequence
  ENSG00000156097_24 (sequence is synthesized)
gaggttagcatttgaattggtaaagtagctggaaacagagaggccaggtaatcagcctgatcaataatactgcgaatcttttctttccaggactggcctccctgatctctctcctcatgg

SEQ ID NO: 453093 - DNA, 120 bp, Artificial Sequence
  ENSG00000156097_25 (sequence is synthesized)
cagcgacccacctccagtcccctggacaatcgggtacaagagacttaaggttgggcatgggaagggtggggtttccatgatccattaaatgccttcctactcccattcatcgctctcaaa

SEQ ID NO: 453094 - DNA, 120 bp, Artificial Sequence
  ENSG00000156097_26 (sequence is synthesized)
attagcttcagtgacaaagacttaaatctctctcctatctgcagcactgggttggagagagggcacgggagttggtcttggctgttcattgattgagactgtaggaactgtgttggttgg

SEQ ID NO: 453095 - DNA, 120 bp, Artificial Sequence
  ENSG00000156097_27 (sequence is synthesized)
tattggtggtggtattttcaacaaacagggaataactgcaaactggacaggacacccatctgggaccacctgtccatcctacttccctcaattgaatcaggtaacactaacggatcaagg

SEQ ID NO: 453096 - DNA, 120 bp, Artificial Sequence
  ENSG00000156097_28 (sequence is synthesized)
cagggccagagggtggtgtggtctctatttgaacaaattcctggctcactgagcatcaaaaggggaaatgggctggtgggagtgggatagtctcccatttaagcagctaataaataattt

SEQ ID NO: 453097 - DNA, 120 bp, Artificial Sequence
  ENSG00000156097_29 (sequence is synthesized)
ttatgataaaaggttatactgataacaacattgactcctttagttcaattcagtgcataatagttgaacacccactagtccctgggacccacacagggcgtgtggtcattgcttttaagg

SEQ ID NO: 453098 - DNA, 120 bp, Artificial Sequence
  ENSG00000156097_30 (sequence is synthesized)
agttcatagtctaagttgatgagataccttatattttcacaaagcactttgatttgataaagcactacagaatgtgcttgagaaatatattggagaatatgtccatggctctaacttctg

SEQ ID NO: 453099 - DNA, 120 bp, Artificial Sequence
  ENSG00000156097_31 (sequence is synthesized)
agagttcagcccgtggcagcaagatgcataccttgaagcttcctgcagattgtggaaagcataggggttgtaaatgaaactctctaatgaagaaaaaaaattaaatgaaactgggcaaac

SEQ ID NO: 453100 - DNA, 120 bp, Artificial Sequence
  ENSG00000156097_32 (sequence is synthesized)
agctttccccctttgttctaggaaaatttctaggttgtcttcctaccactagattattataccagtctagtgcctattacattgtggaagttccctaaaaacatagtatatatagggagg

SEQ ID NO: 453101 - DNA, 120 bp, Artificial Sequence
  ENSG00000156097_33 (sequence is synthesized)
agagtcctttgtgattgaaaaacatgttcacctctcctccctattaaaataaatgcatacagaggaatcaatcattcctagacagggaaaaaactcttctttcaaacaccactgatcagc

SEQ ID NO: 453102 - DNA, 120 bp, Artificial Sequence
  ENSG00000156097_34 (sequence is synthesized)
tattagatccaaggaattgccagcaggtggcagtgtgagcccaatggaaggaggaaaggcgagtgtacgtggtgggaggaggaaggggagggcattaaacattgcctggcagccattttg

SEQ ID NO: 453103 - DNA, 120 bp, Artificial Sequence
  ENSG00000156097_35 (sequence is synthesized)
ttaatttattttgccttttcctttgactttgccctccagcccttccttcacatacatcaaagaagaaagttttaagagcaagggtatctttaattcaggctgaaatttcctgacactgtg

SEQ ID NO: 453104 - DNA, 120 bp, Artificial Sequence
  ENSG00000156097_36 (sequence is synthesized)
atctcactggtgtttattacagagtttgacatacatgggttcatttgccatttatttttccctgtaggagtggatcatgaaggaaataaaaatttctcttttattatgctgagaactttc

SEQ ID NO: 453105 - DNA, 120 bp, Artificial Sequence
  ENSG00000156097_37 (sequence is synthesized)
ccaacaatttctgctatgaccaccttccaggagttttctagtcaccagatgccttggtaaagttcaatacgtaatctttggctctgaaagctgttcctggacaaaatctgagctaactca

SEQ ID NO: 453106 - DNA, 120 bp, Artificial Sequence
  ENSG00000156097_38 (sequence is synthesized)
ctgaagaatcaacagattgaggcaaccatccggtcagttactttttcctgcatcctgctggtgttggggtaactcccaatcctagatgaaaaccttagactttctgttgtcaggtgtccc

SEQ ID NO: 453107 - DNA, 120 bp, Artificial Sequence
  ENSG00000156097_39 (sequence is synthesized)
caggcaatatcctacgggggcatgatagaaaagggtaactctggggtcagatagatgtacttactcactgtgtgaagttgggaaagctgcttaatttctctgagcctacttcctcacctg

SEQ ID NO: 453108 - DNA, 120 bp, Artificial Sequence
  ENSG00000156097_40 (sequence is synthesized)
taaaaatggggatcattattacctacctcacagggttgttgtgaggattaagagatgggatgtgggagcacctagccgtatctggcaaataggtactcaataaatactggttttacttcc

SEQ ID NO: 453109 - DNA, 120 bp, Artificial Sequence
  ENSG00000156097_41 (sequence is synthesized)
atgggagccgggactgctcagcaaaggtaggagttgccgactaggccaggaatgggggccagacccagagcctggtggtgagtgccaaggtatccccacagaagggtggctttccaagga

SEQ ID NO: 453110 - DNA, 120 bp, Artificial Sequence
  ENSG00000156103_0 (sequence is synthesized)
gagccggaaccgccggtgaacttaggcgccacgttcccggtgactgaccccggaggatggtgaacaggaactactgctgaccctgtcttcgccgctgcctctcgggggctgccgagcgcg

SEQ ID NO: 453111 - DNA, 120 bp, Artificial Sequence
  ENSG00000156103_1 (sequence is synthesized)
gggcccctgtctcctccccttgcccggctgtgggtgaacctgcaggctccttacccacccggaggacttttttttgaaaggaaacgagggagggagggagagggagagagggagaaaacg

SEQ ID NO: 453112 - DNA, 120 bp, Artificial Sequence
  ENSG00000156103_2 (sequence is synthesized)
aaggggagctcgtccatccattgaagcacagttcactatgatcttactcacattcagcactggaagacggttggatttcgtgcatcattcgggggtgtttttcttgcaaaccttgctttg

SEQ ID NO: 453113 - DNA, 120 bp, Artificial Sequence
  ENSG00000156103_3 (sequence is synthesized)
gattttatgtgctacagtctgcggaacggagcagtatttcaatgtggaggtttggttacaaaagtacggctaccttccaccgactgaccccagaatgtcagtgctgcgctctgcagagac

SEQ ID NO: 453114 - DNA, 120 bp, Artificial Sequence
  ENSG00000156103_4 (sequence is synthesized)
catgcagtctgccctagctgccatgcagcagttctatggcattaacatgacaggaaaagtggacagaaacacaattgactggatgaagaagccccgatgcggtgtacctgaccagacaag

SEQ ID NO: 453115 - DNA, 120 bp, Artificial Sequence
  ENSG00000156103_5 (sequence is synthesized)
aggtagctccaaatttcatattcgtcgaaagcgatatgcattgacaggacagaaatggcagcacaagcacatcacttacagtataaagaacgtaactccaaaagtaggagaccctgagac

SEQ ID NO: 453116 - DNA, 120 bp, Artificial Sequence
  ENSG00000156103_6 (sequence is synthesized)
tcgtaaagctattcgccgtgcctttgatgtgtggcagaatgtaactcctctgacatttgaagaagttccctacagtgaattagaaaatggcaaacgtgatgtggatataaccattatttt

SEQ ID NO: 453117 - DNA, 120 bp, Artificial Sequence
  ENSG00000156103_7 (sequence is synthesized)
tgcatctggtttccatggggacagctctccctttgatggagagggaggatttttggcacatgcctacttccctggaccaggaattggaggagatacccattttgactcagatgagccatg

SEQ ID NO: 453118 - DNA, 120 bp, Artificial Sequence
  ENSG00000156103_8 (sequence is synthesized)
gacactaggaaatcctaatcatgatggaaatgacttatttcttgtagcagtccatgaactgggacatgctctgggattggagcattccaatgaccccactgccatcatggctccatttta

SEQ ID NO: 453119 - DNA, 120 bp, Artificial Sequence
  ENSG00000156103_9 (sequence is synthesized)
ccagtacatggaaacagacaacttcaaactacctaatgatgatttacagggcatccagaagatatatggtccacctgacaagattcctccacctacaagacctctaccgacagtgccccc

SEQ ID NO: 453120 - DNA, 120 bp, Artificial Sequence
  ENSG00000156103_10 (sequence is synthesized)
acaccgctctattcctccggctgacccaaggaaaaatgacaggccaaaacctcctcggcctccaaccggcagaccctcctatcccggagccaaacccaacatctgtgatgggaactttaa

SEQ ID NO: 453121 - DNA, 120 bp, Artificial Sequence
  ENSG00000156103_11 (sequence is synthesized)
cactctagctattcttcgtcgtgagatgtttgttttcaaggaccagtggttttggcgagtgagaaacaacagggtgatggatggatacccaatgcaaattacttacttctggcggggctt

SEQ ID NO: 453122 - DNA, 120 bp, Artificial Sequence
  ENSG00000156103_12 (sequence is synthesized)
gcctcctagtatcgatgcagtttatgaaaatagcgacgggaattttgtgttctttaaaggtaacaaatattgggtgttcaaggatacaactcttcaacctggttaccctcatgacttgat

SEQ ID NO: 453123 - DNA, 120 bp, Artificial Sequence
  ENSG00000156103_13 (sequence is synthesized)
aacccttggaagtggaattccccctcatggtattgattcagccatttggtgggaggacgtcgggaaaacctatttcttcaagggagacagatattggagatatagtgaagaaatgaaaac

SEQ ID NO: 453124 - DNA, 120 bp, Artificial Sequence
  ENSG00000156103_14 (sequence is synthesized)
aatggaccctggctatcccaagccaatcacagtctggaaagggatccctgaatctcctcagggagcatttgtacacaaagaaaatggctttacgtatttctacaaaggaaaggagtattg

SEQ ID NO: 453125 - DNA, 120 bp, Artificial Sequence
  ENSG00000156103_15 (sequence is synthesized)
gaaattcaacaaccagatactcaaggtagaacctggatatccaagatccatcctcaaggattttatgggctgtgatggaccaacagacagagttaaagaaggacacagcccaccagatga

SEQ ID NO: 453126 - DNA, 120 bp, Artificial Sequence
  ENSG00000156103_16 (sequence is synthesized)
tgtagacattgtcatcaaactggacaacacagccagcactgtgaaagccatagctattgtcattccctgcatcttggccttatgcctccttgtattggtttacactgtgttccagttcaa

SEQ ID NO: 453127 - DNA, 120 bp, Artificial Sequence
  ENSG00000156103_17 (sequence is synthesized)
gaggaaaggaacaccccgccacatactgtactgtaaacgctctatgcaagagtgggtgtgatgtagggttttttcttctttctttcttttgcaggagtttgtggtaacttgagattcaag

SEQ ID NO: 453128 - DNA, 120 bp, Artificial Sequence
  ENSG00000156103_18 (sequence is synthesized)
acaagagctgttatgctgtttcctagctaggagcaggcttgtggcagcctgattcggggctgacctttcaaacccagagggttgctggtcctgcacatgagtggaaatacactcatgggg

SEQ ID NO: 453129 - DNA, 120 bp, Artificial Sequence
  ENSG00000156103_19 (sequence is synthesized)
aagcttccatgatgcacagtatctgctgttcttcagtcctttgtctttctttgtcattcagttctaggcctttcctctgcacgctcaatgcccagtaaaatttcaggattaactaaagaa

SEQ ID NO: 453130 - DNA, 120 bp, Artificial Sequence
  ENSG00000156103_20 (sequence is synthesized)
gaggagaaaaagaagaaaagattcttcttaaaagtttctaatgttattttccttctgaagtctgagcccatttctggggggagaaaaaaaaagcaaatcagaaaacccacggtttttctt

SEQ ID NO: 453131 - DNA, 120 bp, Artificial Sequence
  ENSG00000156103_21 (sequence is synthesized)
tttttctttttttctttttttgctttaaaacaaagggaaaaaagagtttaaacaaaaaacccacaattgaacttccaggaaagtgtgaagacccaaaacagctttgtctccaaagaagat

SEQ ID NO: 453132 - DNA, 120 bp, Artificial Sequence
  ENSG00000156103_22 (sequence is synthesized)
aagaagatagctctctgactgctttggatagtctcctacgcaccattttgtcaggtgggagatttggaatacacatgcaggacgttagactgttgggacagccattttccaacaaccaag

SEQ ID NO: 453133 - DNA, 120 bp, Artificial Sequence
  ENSG00000156103_23 (sequence is synthesized)
gggccaaaatatctgcaatatagtaacagccttaataatacatccatttttcgttttatacagctgttctcagctatgtcctcagtgtttcatcgcatttatattcatagctattttcaa

SEQ ID NO: 453134 - DNA, 120 bp, Artificial Sequence
  ENSG00000156103_24 (sequence is synthesized)
acacgaccttttaattgtttttgaagtatttctaaaccccttctttccaccttactcctccatcattgtgataatcttcccaagttgtattaggccattgccccaggccttccatgggtc

SEQ ID NO: 453135 - DNA, 120 bp, Artificial Sequence
  ENSG00000156103_25 (sequence is synthesized)
tgtcaggaatattcgttacaaagcagagcaagaagcagtatgtctctgaagtggattacagtggcagttattttacaaggatttgtgacactagtaacatacccgtgtaaccctttgaga

SEQ ID NO: 453136 - DNA, 120 bp, Artificial Sequence
  ENSG00000156103_26 (sequence is synthesized)
actatcagaccagctttcagagtcttaggattgtcggtcttgcgatctgataaattatagaactgggcaatggtaaaaacagtcacaagttcaagaagttcaggtttttaaaacagatat

SEQ ID NO: 453137 - DNA, 120 bp, Artificial Sequence
  ENSG00000156103_27 (sequence is synthesized)
cctataatgtcatataatttttaaatgatttacaagactacataaatgtgtttataacaaacagaaatgatgttacttgccaaaatttttctggcaaataaaaaaggtattttattaaga

SEQ ID NO: 453138 - DNA, 120 bp, Artificial Sequence
  ENSG00000156103_28 (sequence is synthesized)
ttctcataaatctgaaattttatttgaaaaactgataatagcctaagtcttcttttcttttttttaggcatactgaatttctgttttaaaatccattgcatgaaaattcaatttgccttg

SEQ ID NO: 453139 - DNA, 120 bp, Artificial Sequence
  ENSG00000156103_29 (sequence is synthesized)
gtatatgcagttagcattgccattttaaaaatgaattaaaacggtgactctgaagttgcatgaatatcctccagtgcattacctattgcatgtccaccatagttctcaaagggttagtgt

SEQ ID NO: 453140 - DNA, 120 bp, Artificial Sequence
  ENSG00000156103_30 (sequence is synthesized)
ggcttctggcatttagccgtccatttgatcactgacagagccaagagaccaccaaagcatttcattgttgagtgtaatttgtcctaacagcagtattgtcattttcatgtgacctgcaga

SEQ ID NO: 453141 - DNA, 120 bp, Artificial Sequence
  ENSG00000156103_31 (sequence is synthesized)
gcaggtttgtatcaatatttttttcctagagaaaagtcagcaactgacagacctctttattgatttttaggagctgcttcttgcagtgaaaggctttacagccactgggctgtgaactta

SEQ ID NO: 453142 - DNA, 120 bp, Artificial Sequence
  ENSG00000156103_32 (sequence is synthesized)
ttagagatggtcagaatgaatgcaccccatgagtcagacattggctttgtgtgaaagccagctttgaggggattagcttttgaaacaatgaacagcttgccttgaacttgattattgatc

SEQ ID NO: 453143 - DNA, 120 bp, Artificial Sequence
  ENSG00000156103_33 (sequence is synthesized)
tattgactgtcattaacaacaacttaaacattgtcttctgtgaaaattttccttgaagagtcctgttctatgtctttgccctttgacctttaacttgcaaactggcacaaactgaaggaa

SEQ ID NO: 453144 - DNA, 120 bp, Artificial Sequence
  ENSG00000156103_34 (sequence is synthesized)
atctggtgttgcttctccattggattagttgttctctaaaacctagtaagcatgagctgtttccttagagtggagagagtggtgatggcagatctgcagatggacactttgctctttaca

SEQ ID NO: 453145 - DNA, 120 bp, Artificial Sequence
  ENSG00000156103_35 (sequence is synthesized)
tgcacactctgaaaatgccctataggtagaagtgaattttaatttcattttaatataatttcaagtctaaattcatcattttagtacaaattacaaaaactataggaaaaaaaaaacctc

SEQ ID NO: 453146 - DNA, 120 bp, Artificial Sequence
  ENSG00000156103_36 (sequence is synthesized)
aaatacttgaatggccagtgtggcttttatataaagcaggaattttatactagtaaaaatttcttactcatttgctaatacacatttccagatgatttttaatgagtgtaggtatacatt

SEQ ID NO: 453147 - DNA, 120 bp, Artificial Sequence
  ENSG00000156103_37 (sequence is synthesized)
cttatttggaaatggatagtttggctgccttgaatttatatttatactcaacgtagcatgaaaattagaatgccttttggttaaactacatgtttatgatttggttggggaaaatatttt

SEQ ID NO: 453148 - DNA, 120 bp, Artificial Sequence
  ENSG00000156103_38 (sequence is synthesized)
ataattgtgggtggcatgctgcaaagccttgcagattgttatttcttacaacctgagcgtatatagtatgagcctaagaaaaaagaagagtaagaaaagaagaatggctttacagtaaaa

SEQ ID NO: 453149 - DNA, 120 bp, Artificial Sequence
  ENSG00000156103_39 (sequence is synthesized)
tatcatacaatgcagacaatattttaagaggatattggagattatgtacgcaagggccaagaaagcaagaaatgagaaccagagtcagccctgtagctttacttcagtgcttccattcta

SEQ ID NO: 453150 - DNA, 120 bp, Artificial Sequence
  ENSG00000156103_40 (sequence is synthesized)
gatgatgctgatattataaagagttagtcactgctgctaagcatggaggactatatacataagctcgtttatacagtgtttgcttgtgggagggtttaatccttttagggccttgatgtc

SEQ ID NO: 453151 - DNA, 120 bp, Artificial Sequence
  ENSG00000156103_41 (sequence is synthesized)
aagaaaaaaataactggaaactatattttgctaaagatagaaatgaggaactgtgtcattttgggacatgtgcaaatcattgaggaactccatcaccctgcattgaaaattgattttttt

SEQ ID NO: 453152 - DNA, 120 bp, Artificial Sequence
  ENSG00000156103_42 (sequence is synthesized)
ttcctctaaaatgagaaagaaactgaataagcaatctgttgcctctttactcattcatcacaatatcctgattcgtcataaggctatcagtatataagggctagaaaataatcatagcat

SEQ ID NO: 453153 - DNA, 120 bp, Artificial Sequence
  ENSG00000156103_43 (sequence is synthesized)
taagaaggaaggagtctatcattatgcttgaattctggcaaatgtcatgaataagggttgggtcatatttactttaatatgagacaagatttatgtgataagcaaaggcatataaggctg

SEQ ID NO: 453154 - DNA, 120 bp, Artificial Sequence
  ENSG00000156103_44 (sequence is synthesized)
ctcttttgaacagaacatttcagttatcaggctgtactattacaagagataagaagacaataaggacaatgtaatcacaaacagtgggattccatttgtttattgtacaccagctacttt

SEQ ID NO: 453155 - DNA, 120 bp, Artificial Sequence
  ENSG00000156103_45 (sequence is synthesized)
gtgggtatggttcctgactcctcttctacatgaggtttgggaaaaaagtctcaaaccaaatggaacagtgaaagggaaagtaattcatctagcacataagaatagtgattcaaaaccaat

SEQ ID NO: 453156 - DNA, 120 bp, Artificial Sequence
  ENSG00000156103_46 (sequence is synthesized)
gcagaataaatttccatgggtcaataacataaggtgtcagttcagtgttactagagatatgcaaggcataaaatattttcatcaccccatcactaataacatgaaaagctcagacatagg

SEQ ID NO: 453157 - DNA, 120 bp, Artificial Sequence
  ENSG00000156103_47 (sequence is synthesized)
atttcccaaattgaaatgaaaacacattcatgcctgcaaaaataattctccttctgcttcatttctcattactttatctaatataaacacaaatgtaaacaaggtaatggtcttcatgta

SEQ ID NO: 453158 - DNA, 120 bp, Artificial Sequence
  ENSG00000156103_48 (sequence is synthesized)
atattgttgttctgtgtattattaaacaaatgcaatgaagtattaaaatagctgatcagtttgaatttcctgtaaagcagtaattccgcatcagaattgtagataaggttgtgaatttat

SEQ ID NO: 453159 - DNA, 120 bp, Artificial Sequence
  ENSG00000156103_49 (sequence is synthesized)
tgactcatttcagaacagtgtctgttgacatggcagtcagagcaggtgaatacagatgctctttctgattgcaaaggttatagagctaaattagacagcattatgtgatactagcaaaga

SEQ ID NO: 453160 - DNA, 120 bp, Artificial Sequence
  ENSG00000156103_50 (sequence is synthesized)
caacttctgttataaatcagagggcaaggcttttctgaatcgatgtgataaattactaagtaatgattaccaaaaataattactaagtaataaaagatacagactggtttactgaaataa

SEQ ID NO: 453161 - DNA, 120 bp, Artificial Sequence
  ENSG00000156103_51 (sequence is synthesized)
gcaagtgttacatttaataattacctataatctttttttgttaacacataagcaagtgttacctttaataattacctataatctttttttgttaacacataatttggccatttcatatac

SEQ ID NO: 453162 - DNA, 120 bp, Artificial Sequence
  ENSG00000156103_52 (sequence is synthesized)
tgtgtacctattttcattccctctctgtgggtcattaaaaaacacaatgtggtggataagaacattgtccaaacttcactgctagttccaatacatagatgatggtgtgtaaactggatt

SEQ ID NO: 453163 - DNA, 120 bp, Artificial Sequence
  ENSG00000156103_53 (sequence is synthesized)
gtaggggtagtcatatttgcaagttctacatgttatgctaatatatctagtatggtacacatacacgcccacactttgtggatcttacagtggaataaatagtgtgtccatattaactaa

SEQ ID NO: 453164 - DNA, 120 bp, Artificial Sequence
  ENSG00000156103_54 (sequence is synthesized)
actcaaagtgctatctgaagaggaatggatgttataagcagacagacagactgagttaaactgagtcatgaaaaaatatatattttaaagtttttggaatcatttccagaaactaataaa

SEQ ID NO: 453165 - DNA, 120 bp, Artificial Sequence
  ENSG00000156103_55 (sequence is synthesized)
gggaattatttactggtagtattgagtctgtgagattgtagtatatactgaaacaatcttctggatggtggtaaggtcttttttagcaaacacagtaaagagcttatttcatttctgatg

SEQ ID NO: 453166 - DNA, 120 bp, Artificial Sequence
  ENSG00000156103_56 (sequence is synthesized)
ctttcaagggcatattccaaagtatcacagatgtcaaatagaatatgctatataaaccaaaaatgtgcatttcagatgacctattacagcaatctcagccaatatgtaatatcacaaaat

SEQ ID NO: 453167 - DNA, 120 bp, Artificial Sequence
  ENSG00000156103_57 (sequence is synthesized)
gtgtcaagtcaatcatataagaggatctaatcattcggctgtatttcatgtaccttcatgttgttgatatattgtgaccacaggaaataggtgccagagcatatgcagttaagttacagg

SEQ ID NO: 453168 - DNA, 120 bp, Artificial Sequence
  ENSG00000156103_58 (sequence is synthesized)
ctccacgttgcctaggagggaatcataactacatcagaaaatttttaacagttatatcttaaaaattagaattttatgtaataaataaagcggcaaccaggaatagcaacgcaacaaata

SEQ ID NO: 453169 - DNA, 120 bp, Artificial Sequence
  ENSG00000156103_59 (sequence is synthesized)
tgaaagctaattattatatttagctttcatatttatataatatgatggaaatggaggaggaaaaatgagtcttttgttaaatataaagacaaactataacactccttgataatacaactg

SEQ ID NO: 453170 - DNA, 120 bp, Artificial Sequence
  ENSG00000156103_60 (sequence is synthesized)
gaaattttactttagcaagcataaaatagtggaggaaaaaaatccaacttcaagctctttgcactagtgatgattatgtgatatatcaatgtaatatttagccagtggtcattagatgtt

SEQ ID NO: 453171 - DNA, 120 bp, Artificial Sequence
  ENSG00000156103_61 (sequence is synthesized)
actgtgcttaaacacatctgatactcatgcattgccttacaggctaaaaatgtaagaggtaggtgttcagtaacctcaagttggaaagatatataatgttagaatcccctgagacaagcc

SEQ ID NO: 453172 - DNA, 120 bp, Artificial Sequence
  ENSG00000156103_62 (sequence is synthesized)
atttccctgaaatagaaatttacctcaatactcatgtaatctaagacacttggcgtagtagcaaagaagttgccttcatgttctagtctcatctaattgtgacctttgtctttcatgtac

SEQ ID NO: 453173 - DNA, 120 bp, Artificial Sequence
  ENSG00000156103_63 (sequence is synthesized)
ttctgaaatcattttccactttttccactggtgtgattttgaaacaattctgaaatatttcaggtaagattaataacatccaattacaaatatatgtttcaatattttatacgtatgtct

SEQ ID NO: 453174 - DNA, 120 bp, Artificial Sequence
  ENSG00000156103_64 (sequence is synthesized)
actttgaaagttaaaccaatagtatagaaagcctaagaatgaacactgattggacatactcacagaaattaagggaaaaacacatattgtaaaattcctgtcaatgtttgagtagaatac

SEQ ID NO: 453175 - DNA, 120 bp, Artificial Sequence
  ENSG00000156103_65 (sequence is synthesized)
agaagtacatagcagtcttcaatttttaaacacaattatgggcttataactggacgtgacatgcatcatttattagaacaatattatttatttatactaagtaaggatataagatcacag

SEQ ID NO: 453176 - DNA, 120 bp, Artificial Sequence
  ENSG00000156103_66 (sequence is synthesized)
aagcttagtgttataacggagacttcacagacattcataactaatgttttctaaggcaaataagggcataaaccagaactcatggtcagtgcagagtaagtataaaaagttatgtatgaa

SEQ ID NO: 453177 - DNA, 120 bp, Artificial Sequence
  ENSG00000156103_67 (sequence is synthesized)
agacatttatttatagagatttctgaggattctatgccttttcaacttaaagatgagtgtgtcttagaatttgttttatgcatcattggactggggatgatattcaaatgtgcactcagc

SEQ ID NO: 453178 - DNA, 120 bp, Artificial Sequence
  ENSG00000156103_68 (sequence is synthesized)
gtgtcctcacattaaagggcacattgaacagtataggaaaatacatcataaactagaatgttgtacagattcatataactttcccatgtgctctgctgtagagctgaatttatatgccct

SEQ ID NO: 453179 - DNA, 120 bp, Artificial Sequence
  ENSG00000156103_69 (sequence is synthesized)
taaaaagggataagaatcaattaaatataaatacggaaatatacttatgttaggtcacttagcttcagagcaagatgtcattaacctttatttcacagagaaaaactggaagaaaagaat

SEQ ID NO: 453180 - DNA, 120 bp, Artificial Sequence
  ENSG00000156103_70 (sequence is synthesized)
ggtgaacaagaataaaatgataaactttttggcttatagagatgtttcttgggaattttttccacttgtttttatacatgaaaaaaatatcagtcacaatacagacatttctgtagtatt

SEQ ID NO: 453181 - DNA, 120 bp, Artificial Sequence
  ENSG00000156103_71 (sequence is synthesized)
tggtctgtgggtaaactggatcccaggcagaatactttttgacacaggcctttttatacatgctttatatatgatgaagctttggtgagatgtgactgcatggtaggatgcattttccta

SEQ ID NO: 453182 - DNA, 120 bp, Artificial Sequence
  ENSG00000156103_72 (sequence is synthesized)
ggataggatatggtgctgcttgtacttgccaccttttatatgaatgtatgtcgctacattggcctgtcttgccaagacatggttgaatgaagcctggtgtgagctgtctatttgaaaagt

SEQ ID NO: 453183 - DNA, 120 bp, Artificial Sequence
  ENSG00000156103_73 (sequence is synthesized)
cactaggatgcatgtttcatttgccgttacataatgccaatttgaacctgtttcctctatatattaacaatccaattgttaagataaaatatactttgcttgaatgaatgattttggtag

SEQ ID NO: 453184 - DNA, 120 bp, Artificial Sequence
  ENSG00000156103_74 (sequence is synthesized)
taatatgagcgttatccttaaatcaatgttacaatttttgctattactgaaataccgtcacagaggccacattattggctgtctataccattgcctgagtaaaattaggtttttaggtct

SEQ ID NO: 453185 - DNA, 120 bp, Artificial Sequence
  ENSG00000156103_75 (sequence is synthesized)
ttttggcatttacttcttttacagctgatgtggaatcaattattcctttatatgttcataagtacaaaatttcactatcttaattacttccaaacaaacaatttccaagcaagggtatgt

SEQ ID NO: 453186 - DNA, 120 bp, Artificial Sequence
  ENSG00000156103_76 (sequence is synthesized)
gtgcctggtttttctgctcctccaattctaagatcgttatttgtttgccttctgtttctcacccaaaaatacagatggttgggaaagatacatcttattgagttgtcctatgcagtctct

SEQ ID NO: 453187 - DNA, 120 bp, Artificial Sequence
  ENSG00000156103_77 (sequence is synthesized)
gtctatatttgcatttctttctattcctatcttgccttttttttttttttttacacagatttggttttcccttccctttgtgaaaaccagaattgagcagcattgtacatcagagatggt

SEQ ID NO: 453188 - DNA, 120 bp, Artificial Sequence
  ENSG00000156103_78 (sequence is synthesized)
acccaggaaatgtctttgttcctcagtatttttcgtcaaaacttccatgcaaagacagtcccagcaaagttgacatacatcccaacctctctcattggcttttctaactttttatagagc

SEQ ID NO: 453189 - DNA, 120 bp, Artificial Sequence
  ENSG00000156103_79 (sequence is synthesized)
tattcccctgagaaaagtgaaatgctgagtatgatgggtattgcctgttgataggatagctaaggaaatttgcttttggagaatgtatcttaaataattatacaggaaagtagtcacagt

SEQ ID NO: 453190 - DNA, 120 bp, Artificial Sequence
  ENSG00000156103_80 (sequence is synthesized)
atagtgttctgtttaaggtacatcatgggtacataaatgcctaaaaccttcatcctttggtctatttctctgtaagtgtaaattacatatatattagaaagagagatagaatcaaagaat

SEQ ID NO: 453191 - DNA, 120 bp, Artificial Sequence
  ENSG00000156103_81 (sequence is synthesized)
taggggtgttacagaggcagctttttgctgccttggttttgactgtatcagcatttctattgcagacctctattttcaggggttttagagactcgaccataaaaatttgtttcaggctta

SEQ ID NO: 453192 - DNA, 120 bp, Artificial Sequence
  ENSG00000156103_82 (sequence is synthesized)
aaagttttgaaagatttttttaggtatctgattttaaacaaatagatcttgtttttatattataggagggaaataaatggagtttactagttcaattttgcgctaatataacttttaata

SEQ ID NO: 453193 - DNA, 120 bp, Artificial Sequence
  ENSG00000156103_83 (sequence is synthesized)
aacttaactttttaaacaaaaacataaaatctaattagttcatagttggttgatgcttttttaaaagaatcaattattgaccttgagaaacttgcctgcttcatcagtatagtaacctat

SEQ ID NO: 453194 - DNA, 120 bp, Artificial Sequence
  ENSG00000156103_84 (sequence is synthesized)
ctttaagatattttaaaacgtgtatacctttattaacattatcttgattccagcggtggatcagtatgataatgcagatttatgacatccatataagctatctggtaatatagatttagg

SEQ ID NO: 453195 - DNA, 120 bp, Artificial Sequence
  ENSG00000156103_85 (sequence is synthesized)
gatacatatatatatatatatttactagatagattaaggagaaaaagctcccataaacttagtttgtcaaataaataccatatatttaaaaaatgcacagacatttatcattcagagtca

SEQ ID NO: 453196 - DNA, 120 bp, Artificial Sequence
  ENSG00000156103_86 (sequence is synthesized)
ttatcattcagagtcagaatgagattcaagtaattgcaaagggaagttgtctcttgggtaaacaatacacattttatagcttcttgtgaaactaattttttcctttctatattgtggtta

SEQ ID NO: 453197 - DNA, 120 bp, Artificial Sequence
  ENSG00000156103_87 (sequence is synthesized)
tgggaaagtaaaagaattaaaattaatacagactttatttaaataacattaaactgtgaagcagagagaaacgccaggaaattaaatatttaggccattatcttgtggttgtctgacaat

SEQ ID NO: 453198 - DNA, 120 bp, Artificial Sequence
  ENSG00000156103_88 (sequence is synthesized)
acttcacctttcttttaattccccatgatgttttcaattatggagagagtattaaaatctagatttaagtttctgcattgttctcattacactcaacactatttcattaagttcttgata

SEQ ID NO: 453199 - DNA, 120 bp, Artificial Sequence
  ENSG00000156103_89 (sequence is synthesized)
atatgtagtcttctgtgtgcaaggaaagaaataaataacacatttatttgctgaatgagttttaaggtgtgcaagttgtagtgatgtttttcccacacaggattctatacacttatacca

SEQ ID NO: 453200 - DNA, 120 bp, Artificial Sequence
  ENSG00000156103_90 (sequence is synthesized)
tcttaaatctggcattttttttttcagatagcttctactgacaaacacaaagcttgtttgtgtgcaaatataaggctaaataaatggtgctaaagtgtattatgactgtcagataaaatc

SEQ ID NO: 453201 - DNA, 120 bp, Artificial Sequence
  ENSG00000156103_91 (sequence is synthesized)
aggcaaaattttgtggtgcttaaattaattttttcattgattttattgatcagtgcattgaacagtgtttattattcacaagttgtcttttattagtaaatcaaggcctcatagcacatt

SEQ ID NO: 453202 - DNA, 120 bp, Artificial Sequence
  ENSG00000156103_92 (sequence is synthesized)
gttaaataaagtggttgactagtctatgtaacagctcaccaagctactatctcttttaactccttataatgttgcgtcattaaaggtcaaggggtcatgctattaatctcattgctatag

SEQ ID NO: 453203 - DNA, 120 bp, Artificial Sequence
  ENSG00000156103_93 (sequence is synthesized)
accattaacatgactgaacttttccacaaagtacttatgtttacaatgctataaccctttgactgctgcggcaacctttaaccacacaaatgtcacaagctagaatcatcagcatggttc

SEQ ID NO: 453204 - DNA, 120 bp, Artificial Sequence
  ENSG00000156103_94 (sequence is synthesized)
ttgccatggcaatcaaagagttaagggctgtgcagtgatttgttttgtatttattaatttatatttattttgtttccattcaaggaggggattaggggtggggcagtttttgtctgctgt

SEQ ID NO: 453205 - DNA, 120 bp, Artificial Sequence
  ENSG00000156103_95 (sequence is synthesized)
aagtgtcttaacctagggaagggttaaatggctttttatactattgcatcttctgtatttaccatcaattcattgtgttgtaattaaaagaaactgtcaataaataagagaacagaaaaa

SEQ ID NO: 453206 - DNA, 120 bp, Artificial Sequence
  ENSG00000156103_96 (sequence is synthesized)
ccccatatttcattactatttgttttgacacatagtttagtatcttctgcacgttgactacatgttaatatatagggatataatgttaacataagagatttaaaattgctattgagagga

SEQ ID NO: 453207 - DNA, 120 bp, Artificial Sequence
  ENSG00000156103_97 (sequence is synthesized)
cattggaaatggattctagaacaaaggcagtcagtgcctgtgctctcaagacaaactgaaaagcacaagacctatgaagaattatcttccatcacatactaacaaagaacaatcaggaat

SEQ ID NO: 453208 - DNA, 120 bp, Artificial Sequence
  ENSG00000156103_98 (sequence is synthesized)
tgaaaatttaaaataaaaggccatttacaattgcattcgtaaacaccaaataccgagggatcaatctgcaaaaaaatgtgcatgacctctacattgaaaacaacaaaacactactaaatg

SEQ ID NO: 453209 - DNA, 120 bp, Artificial Sequence
  ENSG00000156103_99 (sequence is synthesized)
aagaaagaatggagccgcccaagttcctgggtgcctgcctcggggatgcgggatgggagatactgtcgaagagctgtgctcaaaccagggcccttgtcgcgggctggatacctccgcact

SEQ ID NO: 453210 - DNA, 120 bp, Artificial Sequence
  ENSG00000156110_0 (sequence is synthesized)
agagagtggatggcagaggtgggctgtagagccaaagtggggtgggagcgcgaagatggcagctgctgaggaggagccgaagcccaaaaagctgaaggtggaggcgccgcaagcgctgag

SEQ ID NO: 453211 - DNA, 120 bp, Artificial Sequence
  ENSG00000156110_1 (sequence is synthesized)
agaaaatattctctttggaatgggaaatcctctgcttgacatctctgctgtagtggacaaagatttccttgataagtattctctgaaaccaaatgaccaaatcttggctgaagacaaaca

SEQ ID NO: 453212 - DNA, 120 bp, Artificial Sequence
  ENSG00000156110_2 (sequence is synthesized)
caaggaactgtttgatgaacttgtgaaaaaattcaaagtcgaatatcatgctggtggctctacccagaattcaattaaagtggctcagtggatgattcaacagccacacaaagcagcaac

SEQ ID NO: 453213 - DNA, 120 bp, Artificial Sequence
  ENSG00000156110_3 (sequence is synthesized)
attttttggatgcattgggatagataaatttggggagatcctgaagagaaaagctgctgaagcccatgtggatgctcattactacgagcagaatgagcagccaacaggaacttgtgctgc

SEQ ID NO: 453214 - DNA, 120 bp, Artificial Sequence
  ENSG00000156110_4 (sequence is synthesized)
atgcatcactggtgacaacaggtccctcatagctaatcttgctgctgccaattgttataaaaaggaaaaacatcttgatctggagaaaaactggatgttggtagaaaaagcaagagtttg

SEQ ID NO: 453215 - DNA, 120 bp, Artificial Sequence
  ENSG00000156110_5 (sequence is synthesized)
ttatatagcaggcttttttcttacagtttccccagagtcagtattaaaggtggctcaccatgcttctgaaaacaacaggattttcactttgaatctatctgcaccgtttattagccagtt

SEQ ID NO: 453216 - DNA, 120 bp, Artificial Sequence
  ENSG00000156110_6 (sequence is synthesized)
aagctgccacttttgctagagagcaaggctttgagactaaagacattaaagagatagccaaaaagacacaagccctgccaaagatgaactcaaagaggcagcgaatcgtgatcttcaccc

SEQ ID NO: 453217 - DNA, 120 bp, Artificial Sequence
  ENSG00000156110_7 (sequence is synthesized)
aagggagagatgacactataatggctacagaaagtgaagtcactgcttttgctgtcttggatcaagaccagaaagaaattattgataccaatggagctggagatgcatttgttggaggta

SEQ ID NO: 453218 - DNA, 120 bp, Artificial Sequence
  ENSG00000156110_8 (sequence is synthesized)
tacttataaaagcatataaaagttccaggaagaaacactccaaacagctaacagtggatgtactgggaggtggctgaatgaaataatcactttctactctgttttctgtctcaactggtc

SEQ ID NO: 453219 - DNA, 120 bp, Artificial Sequence
  ENSG00000156110_9 (sequence is synthesized)
tctgacaagcctctgactgaatgtatccgtgctggccactatgcagcaagcatcataattagacggactggctgcacctttcctgagaagccagacttccactgatggaagagctgaaaa

SEQ ID NO: 453220 - DNA, 120 bp, Artificial Sequence
  ENSG00000156110_10 (sequence is synthesized)
cacaagcccaggagtgcagacactgccctaattgcttcctgagaattcccatattaataaagaagaaaattatctgccattttttcctactataataatgctgaatcttaatttagaggg

SEQ ID NO: 453221 - DNA, 120 bp, Artificial Sequence
  ENSG00000156110_11 (sequence is synthesized)
tacaagggtatggtaatgcttgtagaatctttattatctcaacaatctaaaaaatgatgtttatttccatagtttgatagtgccacttaaatgccaattaaacaagaatataacatttca

SEQ ID NO: 453222 - DNA, 120 bp, Artificial Sequence
  ENSG00000156110_12 (sequence is synthesized)
atagaaatttttatttcattttcaattactttgtaaattcgtgtgtatttagtacactgatttgtttttttacatttctgctttgaatgcagatgcaatttaatataatagattttttaa

SEQ ID NO: 453223 - DNA, 120 bp, Artificial Sequence
  ENSG00000156110_13 (sequence is synthesized)
actaggactcaagatggccaccgcgcccgctagtcatctcgctagcccgcgcgccagtgagctggcacgagacacgcggtggcccacggcgtctggggacgatctccagcccttcgcacg

SEQ ID NO: 453224 - DNA, 120 bp, Artificial Sequence
  ENSG00000156110_14 (sequence is synthesized)
gggcggagcgcccgccttccctccaatcagcacgccgggccggctagccaggggccgcccgcgcgcggggtgtgtgaggacgcgctcccagtcgctgagtgcctgagccgggaagcagtt

SEQ ID NO: 453225 - DNA, 120 bp, Artificial Sequence
  ENSG00000156110_15 (sequence is synthesized)
atagtcaaataaggtacagaaattttatcttgtcaattatgccaaataatctctttaatgtgcactcaaacatgtaataaactttggataattaaataatgtgccaaatttaagttgtac

SEQ ID NO: 453226 - DNA, 120 bp, Artificial Sequence
  ENSG00000156110_16 (sequence is synthesized)
cacaatattcaaatcatagtcttatggaactctgtaattggacacaaacaaaaacttgtcatataggaatttttttctgtcttttccctgtgtacagcaaactgaggaagaaagatcatt

SEQ ID NO: 453227 - DNA, 120 bp, Artificial Sequence
  ENSG00000156110_17 (sequence is synthesized)
atttaatactgggccctgaaatgacacccaatttgttaatggaattatgaagaacagcaatataatacactgaagaataacttagtatcagagaccaataaatcacttttttaaggatga

SEQ ID NO: 453228 - DNA, 120 bp, Artificial Sequence
  ENSG00000156110_18 (sequence is synthesized)
aactctacctatggcctgccccacccgcatcctgtgcctgtaaagccccggactcagtaggtagagaggagagattctgccagactttcgggaaaagagatggcttgacttcggggaaga

SEQ ID NO: 453229 - DNA, 120 bp, Artificial Sequence
  ENSG00000156110_19 (sequence is synthesized)
gactactgctgtacttcagggaagaccacctactcttcccgtcccctctccagctcccctctccactgagagccatttccaccgctcagtaaaattctccaccttcaccatccttcaagt

SEQ ID NO: 453230 - DNA, 120 bp, Artificial Sequence
  ENSG00000156110_20 (sequence is synthesized)
gtcttcccagtaaatgaaactgagaagaaaaatcataacaaataacatgaaagaggacctaatcaatatgttcccactgggctgtcaataccagcctgtgttaatctaatatgatttagt

SEQ ID NO: 453231 - DNA, 120 bp, Artificial Sequence
  ENSG00000156110_21 (sequence is synthesized)
gtgggaatatggacaggacctacaaatcatctttagactgaaagtatacttataaaagcatataaaagttccaggaagaaacactccaaacagctaacagtggatgtactgggaggtggc

SEQ ID NO: 453232 - DNA, 120 bp, Artificial Sequence
  ENSG00000156110_22 (sequence is synthesized)
tgaatgaaataatcactttctactctgtatgtctgaatttttttttttttacaatgtgcccttattggctttgtaattagtgtaatctttaaataaataaaatcacatgtgtgtagcact

SEQ ID NO: 453233 - DNA, 120 bp, Artificial Sequence
  ENSG00000156110_23 (sequence is synthesized)
ggcagaggtgggctgtagagccaaagtggggtgggagcgcgaagatggcagctgctgaggaggagccgaagcccaaaaagctgaaggtggaggcgccgcaagcgctgaggcttgctactc

SEQ ID NO: 453234 - DNA, 120 bp, Artificial Sequence
  ENSG00000156110_24 (sequence is synthesized)
agtggccctcttgcttccaagtgtcttgaagctgccagccagatctctaacatacgtcagtacaggaaaaggcaagagaaggattgtgaaagctgtcatctataggtttcttcgacttca

SEQ ID NO: 453235 - DNA, 120 bp, Artificial Sequence
  ENSG00000156110_25 (sequence is synthesized)
tggcctttggatgagaagggctggttataagaaaaaattatggaaaaaggcacctgcaagaaaaaagcgattgagggaatttgtattcggcaataaaacccagagtaaactcttaagata

SEQ ID NO: 453236 - DNA, 120 bp, Artificial Sequence
  ENSG00000156110_26 (sequence is synthesized)
aaatgacgacgtccttctggaagaggtgaaactggtatgtccatgatccttatcagaagtgtcatgatcgaacaaacctgaaagtatagatcagaagtttcacttgtttctcagttattg

SEQ ID NO: 453237 - DNA, 120 bp, Artificial Sequence
  ENSG00000156110_27 (sequence is synthesized)
aatatgtatctttgtgtacatatctgcaaaaatggataagtaaaaatctcgatgtaaattgtatcaatgaatatgtaaacatacagtgacaacactgaacttataaaagttttaaaactt

SEQ ID NO: 453238 - DNA, 120 bp, Artificial Sequence
  ENSG00000156110_28 (sequence is synthesized)
tctcaccatgttgcccaggctggtctcagtctcctggcttcaagcagtccttctgccttggccttctaaagtgctgggattacagggtggatgattcaacagccacacaaagcagcaaca

SEQ ID NO: 453239 - DNA, 120 bp, Artificial Sequence
  ENSG00000156110_29 (sequence is synthesized)
caacctctgcctctcgggttcaagcgattaccctgcctcagcctcccaagtagctggcgactacaggttttctgtctcaactggtctctgacaagcctctgactgaatgtatccgtgctg

SEQ ID NO: 453240 - DNA, 120 bp, Artificial Sequence
  ENSG00000156110_30 (sequence is synthesized)
atatgaccttaggtaaatcttcgaacctcagtttcctttttgtaaaatgagataataacccttacatagaaggtcattgagatgatttgagcgagattaccaagtataagatatttgtta

SEQ ID NO: 453241 - DNA, 120 bp, Artificial Sequence
  ENSG00000156110_31 (sequence is synthesized)
taatgccttgtaaatgctttataagtagctgctgttattatcattatgattattttctttttgaagaaaaaaagataatgtttgtaaaactgaattcaaatcataggaaaggatttggcc

SEQ ID NO: 453242 - DNA, 65 bp, Artificial Sequence
  ENSG00000156110_32 (sequence is synthesized)
aagtgaggccccacctctacaaaaaaatttttaaattatccagccacaggctgggcacagtggct

SEQ ID NO: 453243 - DNA, 120 bp, Artificial Sequence
  ENSG00000156110_33 (sequence is synthesized)
aatttttaaattatccagccacaggctgggcacagtggcttacacctgtaattccaccactttgggatgaggcaggtatcactagaggtcaagagttcaagaccagcctggccgccatgt

SEQ ID NO: 453244 - DNA, 63 bp, Artificial Sequence
  ENSG00000156110_34 (sequence is synthesized)
actagaggtcaagagttcaagaccagcctggccgccatgacctgtaattccagctacttggga

SEQ ID NO: 453245 - DNA, 80 bp, Artificial Sequence
  ENSG00000156113_0 (sequence is synthesized)
gggagggggagctgcccgcgcactccatccccctcccccccgggcgggcggcggcggctcgctgtatatatctcggcgca

SEQ ID NO: 453246 - DNA, 120 bp, Artificial Sequence
  ENSG00000156113_1 (sequence is synthesized)
ccccgcccccctcccgcgctccgcggcggcggcggcggcggcagcagtagcagcaatatggctgttgatgggtgtttggggtggcgctggcggcgggaggagctcccccgagcccctgcg

SEQ ID NO: 453247 - DNA, 120 bp, Artificial Sequence
  ENSG00000156113_2 (sequence is synthesized)
ccggctgcccgttgctagctatggcaaatggtggcggcggcggcggcggcagcagcggcggcggcggcggcggcggaggcagcagtcttagaatgagtagcaatatccacgcgaaccatc

SEQ ID NO: 453248 - DNA, 120 bp, Artificial Sequence
  ENSG00000156113_3 (sequence is synthesized)
tcagcctagacgcgtcctcctcctcctcctcctcctcttcctcttcttcttcttcctcctcctcttcctcctcgtcctcggtccacgagcccaagatggatgcgctcatcatcccggtga

SEQ ID NO: 453249 - DNA, 120 bp, Artificial Sequence
  ENSG00000156113_4 (sequence is synthesized)
ccatggaggtgccgtgcgacagccggggccaacgcatgtggtgggctttcctggcctcctccatggtgactttcttcgggggcctcttcatcatcttgctctggcggacgctcaagtacc

SEQ ID NO: 453250 - DNA, 120 bp, Artificial Sequence
  ENSG00000156113_5 (sequence is synthesized)
tgtggaccgtgtgctgccactgcgggggcaagacgaaggaggcccagaagattaacaatggctcaagccaggcggatggcactctcaaaccagtggatgaaaaagaggaggcagtggccg

SEQ ID NO: 453251 - DNA, 120 bp, Artificial Sequence
  ENSG00000156113_6 (sequence is synthesized)
ccgaggtcggctggatgacctccgtgaaggactgggcgggggtgatgatatccgcccagacactgactggcagagtcctggttgtcttagtctttgctctcagcatcggtgcacttgtaa

SEQ ID NO: 453252 - DNA, 120 bp, Artificial Sequence
  ENSG00000156113_7 (sequence is synthesized)
tatacttcatagattcatcaaacccaatagaatcctgccagaatttctacaaagatttcacattacagatcgacatggctttcaacgtgttcttccttctctacttcggcttgcggttta

SEQ ID NO: 453253 - DNA, 120 bp, Artificial Sequence
  ENSG00000156113_8 (sequence is synthesized)
ttgcagccaacgataaattgtggttctggctggaagtgaactctgtagtggatttcttcacggtgccccccgtgtttgtgtctgtgtacttaaacagaagttggcttggtttgagatttt

SEQ ID NO: 453254 - DNA, 120 bp, Artificial Sequence
  ENSG00000156113_9 (sequence is synthesized)
taagagctctgagactgatacagttttcagaaattttgcagtttctgaatattcttaaaacaagtaattccatcaagctggtgaatctgctctccatatttatcagcacgtggctgactg

SEQ ID NO: 453255 - DNA, 120 bp, Artificial Sequence
  ENSG00000156113_10 (sequence is synthesized)
cagccgggttcatccatttggtggagaattcaggggacccatgggaaaatttccaaaacaaccaggctctcacctactgggaatgtgtctatttactcatggtcacaatgtccaccgttg

SEQ ID NO: 453256 - DNA, 120 bp, Artificial Sequence
  ENSG00000156113_11 (sequence is synthesized)
gttatggggatgtttatgcaaaaaccacacttgggcgcctcttcatggtcttcttcatcctcgggggactggccatgtttgccagctacgtccctgaaatcatagagttaataggaaacc

SEQ ID NO: 453257 - DNA, 120 bp, Artificial Sequence
  ENSG00000156113_12 (sequence is synthesized)
gcaagaaatacgggggctcctatagtgcggttagtggaagaaagcacattgtggtctgcggacacatcactctggagagtgtttccaacttcctgaaggactttctgcacaaggaccggg

SEQ ID NO: 453258 - DNA, 120 bp, Artificial Sequence
  ENSG00000156113_13 (sequence is synthesized)
atgacgtcaatgtggagatcgtttttcttcacaacatctcccccaacctggagcttgaagctctgttcaaacgacattttactcaggtggaattttatcagggttccgtcctcaatccac

SEQ ID NO: 453259 - DNA, 120 bp, Artificial Sequence
  ENSG00000156113_14 (sequence is synthesized)
atgatcttgcaagagtcaagatagagtcagcagatgcatgcctgatccttgccaacaagtactgcgctgacccggatgcggaggatgcctcgaatatcatgagagtaatctccataaaga

SEQ ID NO: 453260 - DNA, 120 bp, Artificial Sequence
  ENSG00000156113_15 (sequence is synthesized)
actaccatccgaagataagaatcatcactcaaatgctgcagtatcacaacaaggcccatctgctaaacatcccgagctggaattggaaagaaggtgatgacgcaatctgcctcgcagagt

SEQ ID NO: 453261 - DNA, 120 bp, Artificial Sequence
  ENSG00000156113_16 (sequence is synthesized)
tgaagttgggcttcatagcccagagctgcctggctcaaggcctctccaccatgcttgccaacctcttctccatgaggtcattcataaagattgaggaagacacatggcagaaatactact

SEQ ID NO: 453262 - DNA, 120 bp, Artificial Sequence
  ENSG00000156113_17 (sequence is synthesized)
tggaaggagtctcaaatgaaatgtacacagaatatctctccagtgccttcgtgggtctgtccttccctactgtttgtgagctgtgttttgtgaagctcaagctcctaatgatagccattg

SEQ ID NO: 453263 - DNA, 120 bp, Artificial Sequence
  ENSG00000156113_18 (sequence is synthesized)
agtacaagtctgccaaccgagagagccgtatattaattaatcctggaaaccatcttaagatccaagaaggtactttaggatttttcatcgcaagtgatgccaaagaagttaaaagggcat

SEQ ID NO: 453264 - DNA, 120 bp, Artificial Sequence
  ENSG00000156113_19 (sequence is synthesized)
ttttttactgcaaggcctgtcatgatgacatcacagatcccaaaagaataaaaaaatgtggctgcaaacggcttgaagatgagcagccgtcaacactatcaccaaaaaaaaagcaacgga

SEQ ID NO: 453265 - DNA, 120 bp, Artificial Sequence
  ENSG00000156113_20 (sequence is synthesized)
atggaggcatgcggaactcacccaacacctcgcctaagctgatgaggcatgaccccttgttaattcctggcaatgatcagattgacaacatggactccaatgtgaagaagtacgactcta

SEQ ID NO: 453266 - DNA, 120 bp, Artificial Sequence
  ENSG00000156113_21 (sequence is synthesized)
ctgggatgtttcactggtgtgcacccaaggagatagagaaagtcatcctgactcgaagtgaagctgccatgaccgtcctgagtggccatgtcgtggtctgcatctttggcgacgtcagct

SEQ ID NO: 453267 - DNA, 120 bp, Artificial Sequence
  ENSG00000156113_22 (sequence is synthesized)
cagccctgatcggcctccggaacctggtgatgccgctccgtgccagcaactttcattaccatgagctcaagcacattgtgtttgtgggctctattgagtacctcaagcgggaatgggaga

SEQ ID NO: 453268 - DNA, 120 bp, Artificial Sequence
  ENSG00000156113_23 (sequence is synthesized)
cgcttcataacttccccaaagtgtccatattgcctggtacgccattaagtcgggctgatttaagggctgtcaacatcaacctctgtgacatgtgcgttatcctgtcagccaatcagaata

SEQ ID NO: 453269 - DNA, 120 bp, Artificial Sequence
  ENSG00000156113_24 (sequence is synthesized)
atattgatgatacttcgctgcaggacaaggaatgcatcttggcgtcactcaacatcaaatctatgcagtttgatgacagcatcggagtcttgcaggctaattcccaagggttcacacctc

SEQ ID NO: 453270 - DNA, 120 bp, Artificial Sequence
  ENSG00000156113_25 (sequence is synthesized)
gtcaacatccccatcatcactgaactagtgaacgatactaatgttcagtttttggaccaagacgatgatgatgaccctgatacagaactgtacctcacgcagccctttgcctgtgggaca

SEQ ID NO: 453271 - DNA, 120 bp, Artificial Sequence
  ENSG00000156113_26 (sequence is synthesized)
gcatttgccgtcagtgtcctggactcactcatgagcgcgacgtacttcaatgacaatatcctcaccctgatacggaccctggtgaccggaggagccacgccggagctggaggctctgatt

SEQ ID NO: 453272 - DNA, 120 bp, Artificial Sequence
  ENSG00000156113_27 (sequence is synthesized)
gctgaggaaaacgcccttagaggtggctacagcaccccgcagacactggccaatagggaccgctgccgcgtggcccagttagctctgctcgatgggccatttgcggacttaggggatggt

SEQ ID NO: 453273 - DNA, 120 bp, Artificial Sequence
  ENSG00000156113_28 (sequence is synthesized)
ggttgttatggtgatctgttctgcaaagctctgaaaacatataatatgctttgttttggaatttaccggctgagagatgctcacctcagcacccccagtcagtgcacaaagaggtatgtc

SEQ ID NO: 453274 - DNA, 120 bp, Artificial Sequence
  ENSG00000156113_29 (sequence is synthesized)
atcaccaacccgccctatgagtttgagctcgtgccgacggacctgatcttctgcttaatgcagtttgaccacaatgccggccagtcccgggccagcctgtcccattcctcccactcgtcg

SEQ ID NO: 453275 - DNA, 120 bp, Artificial Sequence
  ENSG00000156113_30 (sequence is synthesized)
cagtcctccagcaagaagagctcctctgttcactccatcccatccacagcaaaccgacagaaccggcccaagtccagggagtcccgggacaaacagaagtacgtgcaggaagagcggctt

SEQ ID NO: 453276 - DNA, 120 bp, Artificial Sequence
  ENSG00000156113_31 (sequence is synthesized)
tgatatgtgtatccaccgccactgtgtgaaactgtatctgccactcatttccccagttggtgtttccaacaaagtaactttccctgttttcccctgtagtccccccctttttttttacac

SEQ ID NO: 453277 - DNA, 120 bp, Artificial Sequence
  ENSG00000156113_32 (sequence is synthesized)
atatttgcatatgtatgatagtgtgcatgtggttgtcatttttatttcaccaccataaaacccttgagcacaacagcaaataagcagacggaccaaaagttatttatgattctgggggaa

SEQ ID NO: 453278 - DNA, 120 bp, Artificial Sequence
  ENSG00000156113_33 (sequence is synthesized)
aaataacccaaaggcatgctccagacataaatagctcactgcaggaacgagttcacagattagaagggagcacttgtgatcaacgtcagttaggcagagcaagtttatttaatgtaaaag

SEQ ID NO: 453279 - DNA, 120 bp, Artificial Sequence
  ENSG00000156113_34 (sequence is synthesized)
aaaagttgattctgatttatcaggattatcagggtgctttgggttttgattttgttgttgttgttgttttcctttctttctttttttatacacacaataagttagcacatgtttatttga

SEQ ID NO: 453280 - DNA, 120 bp, Artificial Sequence
  ENSG00000156113_35 (sequence is synthesized)
aacaagcaaccaaacagcaatgaaaacatattgattgtttccagtctctgggccgaagtattgcgaagcatttgaaaagctttcacgatttgtgtagatgattatgaaggacctgcttgt

SEQ ID NO: 453281 - DNA, 120 bp, Artificial Sequence
  ENSG00000156113_36 (sequence is synthesized)
tgcaagagaacatcagtgatttttttagttactcaccaaggccttttgtcccagagccagttccctctgggagttcttatgaacatttctcaccttaatatggaggagagaatagtattc

SEQ ID NO: 453282 - DNA, 120 bp, Artificial Sequence
  ENSG00000156113_37 (sequence is synthesized)
caatcatggatgtatcaaattctagtcatttagtttaagtgaaaagaggtttgattgcatattaaattgttattctgtctccttatgttgccatatgaatagctattttttttctttcac

SEQ ID NO: 453283 - DNA, 120 bp, Artificial Sequence
  ENSG00000156113_38 (sequence is synthesized)
ttttgacatttgggatgaaaagccatatgtatcataaatatcagatgtaagtcattaaaaactgccttcctgggacttttacatcttttaaaaggtgaattacttaccttatgtacagaa

SEQ ID NO: 453284 - DNA, 120 bp, Artificial Sequence
  ENSG00000156113_39 (sequence is synthesized)
taaataatgctcaggaaagagcaagtatttttccatgcattctcaggggatctttttactcccctttgtttgattagttagggccccaatgccaggtaggaggaagggctggggcaatgg

SEQ ID NO: 453285 - DNA, 120 bp, Artificial Sequence
  ENSG00000156113_40 (sequence is synthesized)
tagagtgagaggaagacaaacccagctgcagatcatgcttttctaggagccgacatgctaaataaattagaatgtaggaggatcagccacagttgactcaacaaagacaaaagccagcca

SEQ ID NO: 453286 - DNA, 120 bp, Artificial Sequence
  ENSG00000156113_41 (sequence is synthesized)
ccaccttcaactgttggcacagctgtgcggtgctggctgtcccaatgcagaaagctggtgggaaggaattcctcatcatcactttctttaatgtagccaatttaggcagggtaatgacgg

SEQ ID NO: 453287 - DNA, 120 bp, Artificial Sequence
  ENSG00000156113_42 (sequence is synthesized)
gggtaatgacggcaatagagagctgctccttgtcattatgagacgtgggataagaagagtgcaacagtgagccaaacacattttggtatagttatttttttcttcttttgttttctttct

SEQ ID NO: 453288 - DNA, 120 bp, Artificial Sequence
  ENSG00000156113_43 (sequence is synthesized)
agtaagcatgagaggagaggtagaaaaatacccttttttcaacatatagttgtcagatgctttgtgcatgcaaatcatgctttaggcagtgcggtatttcttaaaaactggccaattcac

SEQ ID NO: 453289 - DNA, 120 bp, Artificial Sequence
  ENSG00000156113_44 (sequence is synthesized)
cataaccaatttcccttatggatggactaggctggtatatacatatttgaaaagttttacttcaaagaattccatcgaatagaataggggtaaaagggaggaggaaaacatgtcacagct

SEQ ID NO: 453290 - DNA, 120 bp, Artificial Sequence
  ENSG00000156113_45 (sequence is synthesized)
gtaccatctctaaaaaggtgtttttatggtgaatgttttggatttagattttggatcccccgtcccctcaagcatgatagttttggatatttgcttgctgtgtgaattgacaagcacttt

SEQ ID NO: 453291 - DNA, 120 bp, Artificial Sequence
  ENSG00000156113_46 (sequence is synthesized)
tactgacaaatggtgaggctcagtcagaacctccaccctcccccacaccaaagacaggggcagcgtagtattcaaaccagtattgtggtggggaataattgtatacatgtaaattatcaa

SEQ ID NO: 453292 - DNA, 120 bp, Artificial Sequence
  ENSG00000156113_47 (sequence is synthesized)
tggggaataattgtatacatgtaaattatcaagccctatgagtggaagaattttttcaaattatttttgtccctctatatattgatttatattatgtataactatctctttatataaact

SEQ ID NO: 453293 - DNA, 120 bp, Artificial Sequence
  ENSG00000156113_48 (sequence is synthesized)
atatatatataactatatatataactatatatatgtatcccctagtattggatcatgaagagctcttcatgcattctttgcaaaggaggttataaagttacgccctcagaacatttataa

SEQ ID NO: 453294 - DNA, 120 bp, Artificial Sequence
  ENSG00000156113_49 (sequence is synthesized)
ctataagaatgtgccagttaaagtgctcaacaggaaatatgacagtttaaaagcattgtaaaactcacatagcttacttctctctctaaagtgcaacaaggatgaatagaatgggccaag

SEQ ID NO: 453295 - DNA, 120 bp, Artificial Sequence
  ENSG00000156113_50 (sequence is synthesized)
gtatgacaattaatggttctgcatgacctagccactgctgggggttttcttctataacgttgtccttgtgaaaacttttgtgaaattaaaaaaaaaggagttacaaattttattctgtta

SEQ ID NO: 453296 - DNA, 120 bp, Artificial Sequence
  ENSG00000156113_51 (sequence is synthesized)
aatgagacgggcatgttgttttgattgcggacgttctgagcgtgactgctcatgcatgtcaggccgtgtgcgtggtaacgtggacacccttgagagagccttcccactttcttctgtctc

SEQ ID NO: 453297 - DNA, 120 bp, Artificial Sequence
  ENSG00000156113_52 (sequence is synthesized)
atcccaaaagaataaaaaaatgtggctgcaaacggcgttgggaagaacattgttctttgtggagactggaaagcaagggaaatgtgagaagattaaactactgcaggggtcagcaaactt

SEQ ID NO: 453298 - DNA, 120 bp, Artificial Sequence
  ENSG00000156113_53 (sequence is synthesized)
tctctgtcaaagtcaaggttgcagctagatcacgctattccaaagatccatttgagttcaagaaggagactcccaattctcggcttgtgaccgagccagttgaagatgagcagccgtcaa

SEQ ID NO: 453299 - DNA, 120 bp, Artificial Sequence
  ENSG00000156113_54 (sequence is synthesized)
cattcaaatcaagcccatgagtacccacatggctaaccagatcaaccaatataaatccacaagcagcttgattccaccaatcagagaagttgaagatgaatgttgactcccaggagacca

SEQ ID NO: 453300 - DNA, 120 bp, Artificial Sequence
  ENSG00000156113_55 (sequence is synthesized)
gcgagcggaggccgaggggctcagcggcgtggcgacaggactagggggtcccgagaacatgggctagcaggcggccacgggccggcggccggacgcggtgaacctgccgcggccgggcgc

SEQ ID NO: 453301 - DNA, 120 bp, Artificial Sequence
  ENSG00000156113_56 (sequence is synthesized)
gcactggcgcggcgagccggagccgagcgcagccgggggaggagggctggcgcaggggcgcccgggcggagggggccgattatccattattaacgagttaccacctaataagcggagagc

SEQ ID NO: 453302 - DNA, 120 bp, Artificial Sequence
  ENSG00000156113_57 (sequence is synthesized)
ctaataagcggagagcggctcgttagccgcgcgggaggcgctcggggaagggggtcaccggccgagcgcagcgcacacccgtggcgcacggcgggcggcgcggcgccgaggacacccggg

SEQ ID NO: 453303 - DNA, 120 bp, Artificial Sequence
  ENSG00000156113_58 (sequence is synthesized)
ccagataacagcccagtgcacgggatgttacgtcaaccatccatcacaactggggtcaacatccccatcatcactgaactagctaaaccgggcaagttgcctttggtatcagtcaatcag

SEQ ID NO: 453304 - DNA, 120 bp, Artificial Sequence
  ENSG00000156113_59 (sequence is synthesized)
aacgttaggataagcaagaattgccagaaaataaagtagacagatctttctctttgtctgccttgaatattgcttccatgtattttggaaaagaaaatgatttcatttataaatgaacat

SEQ ID NO: 453305 - DNA, 120 bp, Artificial Sequence
  ENSG00000156113_60 (sequence is synthesized)
atgaacatactaaaatagtcatgtatagcctctagcattttaaattatttttatttattagaaagaaaatatattttttcttttcattgtcaaatatcttccctatatctaaacaatgca

SEQ ID NO: 453306 - DNA, 120 bp, Artificial Sequence
  ENSG00000156113_61 (sequence is synthesized)
atgaataagtggtcagactccttaatgtgtttttctcttctttctctctttttctttgaggagaatgatggtcaccaccacaattaattgtaattaagggaaatgaattattaaaacaat

SEQ ID NO: 453307 - DNA, 120 bp, Artificial Sequence
  ENSG00000156113_62 (sequence is synthesized)
tttaaaatggccaatgatgtatacatgtattttagtaaatccagaaaagaagactaaggggacaggtgaatacctgctcctcgcctggatgggtgtgtattttgatctgcattgacacca

SEQ ID NO: 453308 - DNA, 120 bp, Artificial Sequence
  ENSG00000156113_63 (sequence is synthesized)
tgttcatcttggcaagacctactcaatcaagtgatgatgccagttgataaacttccctggaaaacatttacagctattccatttggcaaacttgcttctctgtcaatatttcatcctcct

SEQ ID NO: 453309 - DNA, 120 bp, Artificial Sequence
  ENSG00000156113_64 (sequence is synthesized)
ttaaaccaggagggttattaatggcaaaagcattggtcttctttatgcttgatcagtatgactcaaattaaaagtgttctgctgtgtatatcaactcagtagcccacacccagttatctg

SEQ ID NO: 453310 - DNA, 120 bp, Artificial Sequence
  ENSG00000156113_65 (sequence is synthesized)
ggagctgatggttcagtcactgtattacccaaatctttcctgccagctgcctttcagacatttgttaaatcccaaccagagaccgggcagatagagagaagtaaatccgaagtgcgtttt

SEQ ID NO: 453311 - DNA, 120 bp, Artificial Sequence
  ENSG00000156113_66 (sequence is synthesized)
agggttttaatgacttgcctggatattggtgtagtatgcatgccaactgatattcaatcaacatctcctgccagcataaaaaagtttaaggagactcgaagtgaagctgccatgaccgtc

SEQ ID NO: 453312 - DNA, 120 bp, Artificial Sequence
  ENSG00000156113_67 (sequence is synthesized)
aaacttatttattttcacagttgaaagtcatatttttgtagttctagttttcattctgtagttctcacccctttgttcatatttttaaagggaagaccttctgctgcttttctacaattg

SEQ ID NO: 453313 - DNA, 120 bp, Artificial Sequence
  ENSG00000156113_68 (sequence is synthesized)
gcagatcaggtttgtctggccaactaaggacaccaggagggttgtgggcacacctgggatgtggaagctgaggaccagatgcacacaaggcattgctctgtttgctgttctagtggtgga

SEQ ID NO: 453314 - DNA, 120 bp, Artificial Sequence
  ENSG00000156113_69 (sequence is synthesized)
gactcctacgtgctgttatgcttctcattttatatttccaaaccacctgagcgagtaatgtcaacttcgggagggtctggtggactttctccccactccccaagtctcagagcttttagc

SEQ ID NO: 453315 - DNA, 120 bp, Artificial Sequence
  ENSG00000156113_70 (sequence is synthesized)
ctggaagtttgtaaaactgattagtagttttactttaccataggatgtgagagggcagtcattcttctcactgagtttttgtttaaaaaccaggaaatttctacaatcatggagacagat

SEQ ID NO: 453316 - DNA, 120 bp, Artificial Sequence
  ENSG00000156113_71 (sequence is synthesized)
tttaatttgcatgctctcctttatttagttgctggggccaaacacatgaacttgttacaacaatttaaaaataataataacaaaaggaaagcaacgaatgcacttcatatagactgttag

SEQ ID NO: 453317 - DNA, 120 bp, Artificial Sequence
  ENSG00000156113_72 (sequence is synthesized)
aaaaggcctttgaaaattaccagcagtgaaatcaaataaattagccactttaaactgcggtcaaaagatttttctagccatcagatgcaattacgatgtctcagagctctgctatcgctt

SEQ ID NO: 453318 - DNA, 120 bp, Artificial Sequence
  ENSG00000156113_73 (sequence is synthesized)
gcatgctcggtgtacagtctcccggcaactgttttgttccaatcaacttagcaagtctttcaactttaaaattatcaatctttgatatgatcatcaaggtctctggagaagcatggatgt

SEQ ID NO: 453319 - DNA, 120 bp, Artificial Sequence
  ENSG00000156113_74 (sequence is synthesized)
aatagtgatttctattttcttaaaaaatgtaaactgtggacacttaatggaaccaagctaaccaaagtatctccccgaagtttcatgatatctagtccattaactctttgggccatgacc

SEQ ID NO: 453320 - DNA, 120 bp, Artificial Sequence
  ENSG00000156113_75 (sequence is synthesized)
tgtggtacctagttatggtagtgcaaatcagatcagagcaaagcaatgagatcatcatgaagacatatgtccactaagtactccaattaccagcgtaggcaaaatgagcttccacctctg

SEQ ID NO: 453321 - DNA, 120 bp, Artificial Sequence
  ENSG00000156113_76 (sequence is synthesized)
tccactccctgcagagccaatatagtcgtgcttccacctcgtaggcattgtcctgcagtgatttgtcggactgtggttactctgtcgtcacattttgtagaattagttctataaaagtat

SEQ ID NO: 453322 - DNA, 120 bp, Artificial Sequence
  ENSG00000156113_77 (sequence is synthesized)
tgtgaatacaatgtatgtccaattggattgtttaaaaactacttataattaatcactagcctactcagcagactaaaatgatgtcaacagtctatattcaggcttataaacatttcttgg

SEQ ID NO: 453323 - DNA, 120 bp, Artificial Sequence
  ENSG00000156113_78 (sequence is synthesized)
tttccaacagaagtcaaatgtgtttgtggggagaacgttttgctaggattttgacaactttcctgaaagctaggccttttttacataatgattttgcattggggtcaccttagtatattc

SEQ ID NO: 453324 - DNA, 120 bp, Artificial Sequence
  ENSG00000156113_79 (sequence is synthesized)
gtggtggccacataaaggatcttccattagagggacacaggacacaaagctccattcccatgaccctctcttccctgtgtctcccctaacaaggcaatctggaagcagaaatgcaaactc

SEQ ID NO: 453325 - DNA, 120 bp, Artificial Sequence
  ENSG00000156113_80 (sequence is synthesized)
cagccccaccacacatccaccgatgcatttgtggctagaaattttaatctaaactttttttaaaaaaaatcataatagttaggatagtttcctatagcaaagggctccttgattcataag

SEQ ID NO: 453326 - DNA, 120 bp, Artificial Sequence
  ENSG00000156113_81 (sequence is synthesized)
cacctcccccccaaaaaaaccaaattggtaaaaattcattttcttttaaatagagcaataagttcatactgtgttgccgttgtaataatgaattgttctggactagaaaacaaaatgagg

SEQ ID NO: 453327 - DNA, 120 bp, Artificial Sequence
  ENSG00000156113_82 (sequence is synthesized)
cattttgttaagggggtaggaaaatgactgattgttgggccctttggcaaaagctggtgcctggtaagtagaaacgaaatggaaacagaaataacatttgtgaaatcactggagggctca

SEQ ID NO: 453328 - DNA, 120 bp, Artificial Sequence
  ENSG00000156113_83 (sequence is synthesized)
agcaaatgccagagcttctccctggcttgttcctacttgttgagctctttggccctgagtcccatccatctccactgcaacagtctgtctttctgcctacatccgcctgagaccaaggag

SEQ ID NO: 453329 - DNA, 120 bp, Artificial Sequence
  ENSG00000156113_84 (sequence is synthesized)
ggtctttggtacagtccacattatgaggctctgatttcctatcccagtttagggctccagaaaagccattctcccaaactaatgattcttgggtgctgtgggtcaccaacaggctgttta

SEQ ID NO: 453330 - DNA, 120 bp, Artificial Sequence
  ENSG00000156113_85 (sequence is synthesized)
caaagcagaaaatatcatcaccatcataacctttctccttgagaaaacttttatttttgtctaagcaattttatattttagaatatcatcttgaaccattataaaacaccttaaataaaa

SEQ ID NO: 453331 - DNA, 120 bp, Artificial Sequence
  ENSG00000156113_86 (sequence is synthesized)
gtgattgtgactaaggcacgttggagaacattccaatctttcctcccaagggttctggcaccttatgatgtactttgtaaaaaaattgattgaagattttaaataaacaggaaattagaa

SEQ ID NO: 453332 - DNA, 120 bp, Artificial Sequence
  ENSG00000156113_87 (sequence is synthesized)
gtgttagggttagataaaggaaaagtgaaaaagcataagaaatttgggactttttcatgttgaaaggagaaaaagcacaagttccctagttaccatttaatatgagggtgcaagagccac

SEQ ID NO: 453333 - DNA, 120 bp, Artificial Sequence
  ENSG00000156113_88 (sequence is synthesized)
atttacaaacaacaaacttgatctttaaaaatgtttttaaaactctctgagtctcagtgacttcatttgtaaatgagagtgattcatctagatgactctaaggtctctttcaggtcccag

SEQ ID NO: 453334 - DNA, 120 bp, Artificial Sequence
  ENSG00000156113_89 (sequence is synthesized)
gggacgtgatctaagttaggagtgggaacatgggagtggctgcttctccttggctaagcccatgcagactattgtgtccaggactggaataaaggtcctttttgctgcatcacccaggca

SEQ ID NO: 453335 - DNA, 120 bp, Artificial Sequence
  ENSG00000156113_90 (sequence is synthesized)
acactcccagccttactcaggagtggtgaacattttctgctctggacatagaataggtaggttcattcctggtcttttcactttagattctctttaggttcaagatgcagatttctcaat

SEQ ID NO: 453336 - DNA, 120 bp, Artificial Sequence
  ENSG00000156113_91 (sequence is synthesized)
ttggacacacctgcatcacgttggtcaaattttgctgcctgtttctagggttttcttctcagtttcatccctgccttcccttttttgttgttttttttttggttcaaggcccagcttcag

SEQ ID NO: 453337 - DNA, 120 bp, Artificial Sequence
  ENSG00000156113_92 (sequence is synthesized)
ttaatcccttcatctctatgccatgtctccaattcctagtatgtaactagaggttcaagagaccccaaattcctgccattttccccatttatgtttccccatgtgaatcttcaggaagta

SEQ ID NO: 453338 - DNA, 120 bp, Artificial Sequence
  ENSG00000156113_93 (sequence is synthesized)
accagtcttccttctcacttcatttcctgtcctctgtttatttggttattttctttcattaataaactaaccatctcttagctacttacattcacaaatgtaattttaatctattgtgtt

SEQ ID NO: 453339 - DNA, 120 bp, Artificial Sequence
  ENSG00000156113_94 (sequence is synthesized)
tcattgtgaaagagaatctcattgaaggaaggaaggaagaaattgaggaataaaggtaggaagggagagaaacaaagactatccaaccaattgactgagatgtgagccggcttgactcct

SEQ ID NO: 453340 - DNA, 120 bp, Artificial Sequence
  ENSG00000156113_95 (sequence is synthesized)
aggagactaagtagatccattcagcttgaacactgagttccagggcagaatctgtccattttctgttttgttcttacttgctgcttttggaatggtggtaaagccaccagtcaccatgag

SEQ ID NO: 453341 - DNA, 120 bp, Artificial Sequence
  ENSG00000156113_96 (sequence is synthesized)
ccttgaaaggaccttcactaatgaggacttgactcaccctctttaaaaagcaaaagaaacagaatttacttacaatcttctggtaaattacctttctgatcctctccttattcccaaaag

SEQ ID NO: 453342 - DNA, 120 bp, Artificial Sequence
  ENSG00000156113_97 (sequence is synthesized)
gcaatttttttaatccagcagagatgatttagcatataaatcccaggtcatttgaggaggtgatgacgctatttggatttatttatgagacagtagtaattataaatgattcctaggcag

SEQ ID NO: 453343 - DNA, 120 bp, Artificial Sequence
  ENSG00000156113_98 (sequence is synthesized)
tttgtactagtttggtcatattggttgtttaagtggagtctcttctgattgtttgtttccaataaagtatcagttgttaataatttcaagatttccataaaaataagaaaacttggaaaa

SEQ ID NO: 453344 - DNA, 120 bp, Artificial Sequence
  ENSG00000156113_99 (sequence is synthesized)
catttttaattttatttcttaagagaccacagagcctaattttcaatttttatggtaagcttgcttaaaacatgtataaaaagaagcctacatgctcaaaggcagaggcacctttagccc

SEQ ID NO: 453345 - DNA, 120 bp, Artificial Sequence
  ENSG00000156113_100 (sequence is synthesized)
tacaacagttggaagctccatgatatcacagccccacatggatagattggagaaagaattctgacttagaccacctgtagcagaccttcctcttttggcatatttttttaatcacaaaaa

SEQ ID NO: 453346 - DNA, 120 bp, Artificial Sequence
  ENSG00000156113_101 (sequence is synthesized)
ggacctgagactccctatctaaagataagccaaacttggggtatacattaagaatctgggaagaaagaaaaaaaagaaaaagatataataagcagtattttaaaataccatgagttatgg

SEQ ID NO: 453347 - DNA, 120 bp, Artificial Sequence
  ENSG00000156113_102 (sequence is synthesized)
gcatgcatatggtacaaagagtagttctttgggttgaaagaaagaagagtttgcattgaactgcgtaggctggcaagaatgcagaggtatacaatgtttgatgggctttggaggcatttc

SEQ ID NO: 453348 - DNA, 120 bp, Artificial Sequence
  ENSG00000156113_103 (sequence is synthesized)
aatagtaaatgggtgacaggactggaaagatgtggaatatgagggttttccagggagatgggacttaatgggccatgatgtatttgtaggaatgtgatttcaatagattgactattttgt

SEQ ID NO: 453349 - DNA, 120 bp, Artificial Sequence
  ENSG00000156113_104 (sequence is synthesized)
ctactgtgataagtttgtgtaggggaactgaggaaaactgagatgagacttcatggaaggggctacaaagtacagtctaaaggcctagataaagtttgaaacttgatttagaaagtcatg

SEQ ID NO: 453350 - DNA, 120 bp, Artificial Sequence
  ENSG00000156113_105 (sequence is synthesized)
aaaagccactcagagttttaagcaaagagtgatggggcagcaatggctgtgcatttttcaggttgaaagtagtgagatgtcagttcttcctggaagatatcatgagaatgcacacaaaac

SEQ ID NO: 453351 - DNA, 120 bp, Artificial Sequence
  ENSG00000156113_106 (sequence is synthesized)
tgaacattttctcagcagcaaggagtgctaaagggtgcacactccaagtcaacaactcaccgtgtgcagcaccttcctcacacattttgctttgctttctgtcacaggaccatcagacgt

SEQ ID NO: 453352 - DNA, 120 bp, Artificial Sequence
  ENSG00000156113_107 (sequence is synthesized)
agaacgtcctgactctcctgaattactagaatgtcagcaacaaactcacaaagtagattagagggtaggaatagatacataaatttttaaaaacctgccaatcatactgttttctagaca

SEQ ID NO: 453353 - DNA, 120 bp, Artificial Sequence
  ENSG00000156113_108 (sequence is synthesized)
gtaatataataagaacatgaggcaggacatccacaaatagtagagaataattaatagtccagaactgccaaataggaattccccttatgaaaacacccttgcagctaatcaggtagccct

SEQ ID NO: 453354 - DNA, 120 bp, Artificial Sequence
  ENSG00000156113_109 (sequence is synthesized)
tgtttagaaaccaattagcactcataaaatatttgtacaaggagtgagtgggggagaaatgagcacaatatgggttctgccatcaatcagcttataatacaactaaagaaagaaaacatg

SEQ ID NO: 453355 - DNA, 120 bp, Artificial Sequence
  ENSG00000156113_110 (sequence is synthesized)
ctcaaagcaccattagagaaagggtgagccctaatgacatagtttcacattcaatatggtaggagttgaaacaagggagaaatgctgtggtttgaagtggttcaacaaggtaggatttct

SEQ ID NO: 453356 - DNA, 120 bp, Artificial Sequence
  ENSG00000156113_111 (sequence is synthesized)
agagaaaggggggtttaggagttagataagtagaggatcagcattctaggtatgaaggcaggattatctggcatgtggcagggtgaatgatgttaatcagtaactgctaattgatattta

SEQ ID NO: 453357 - DNA, 120 bp, Artificial Sequence
  ENSG00000156113_112 (sequence is synthesized)
ctgagcagctgctgtgtcctcacgatggtaagactattagaggaagacagcccacctgcctaactgggaacacaaggcacacatatattggaaagatcatgttgcacaaaacaggtgttc

SEQ ID NO: 453358 - DNA, 120 bp, Artificial Sequence
  ENSG00000156113_113 (sequence is synthesized)
aataaataatttttgaataaatgtgaacactgaatagcaaataaatgttatagatcgtaatagttgtagaagattggttgggattgtagggactggatgtggggcaatggctgtgggtct

SEQ ID NO: 453359 - DNA, 120 bp, Artificial Sequence
  ENSG00000156113_114 (sequence is synthesized)
agagtatattcattgtgcagtggacacacacctaatctgtcctcaaggacagaaccatgtggaggaataggaaaacaagagaagcaggcaagaagcggaggcagtgagtacagcagctaa

SEQ ID NO: 453360 - DNA, 120 bp, Artificial Sequence
  ENSG00000156113_115 (sequence is synthesized)
gaaatgttacattgggttcatccagagcaagaaaagctgagagctgtccgtgagggaaggccacacaggcaagaggagtgggacaggggagtaaaggagtgggctacaacaggccctgca

SEQ ID NO: 453361 - DNA, 120 bp, Artificial Sequence
  ENSG00000156113_116 (sequence is synthesized)
gatgtggaagccagacccacagaggcacttagaaagtgaggatcctggatgaattattttagggagaaagtgtaggtttagatcagctggcagatgtgtttgtgggctacagccaagttt

SEQ ID NO: 453362 - DNA, 120 bp, Artificial Sequence
  ENSG00000156113_117 (sequence is synthesized)
ttcaggactaagaaggagcaaaataagtagaacttcttgggacaggagatctagggtactccagaaccagggaaatgagaaacaagaggggaattttaagaaagagagggaagatcatct

SEQ ID NO: 453363 - DNA, 120 bp, Artificial Sequence
  ENSG00000156113_118 (sequence is synthesized)
atgaggttggagatgaaaggtgttggagatggtgaggcacaagtcaaaagactcactcgaagggcaggaactctgcttatttgtccatattcccagagtttgtcatgaggtctggcccac

SEQ ID NO: 453364 - DNA, 120 bp, Artificial Sequence
  ENSG00000156113_119 (sequence is synthesized)
gtgggcagtcactcggccactatgtatcactgtggctgccatggtggatggaggctggacagaacctgtggtgatcggcagtctttctggaggactcaccagggaggggtctcagggtgg

SEQ ID NO: 453365 - DNA, 120 bp, Artificial Sequence
  ENSG00000156113_120 (sequence is synthesized)
gcatctcctttcaccttcctgtgcatgtcactgcactgttcttcttccctccctgaacagcacacacactgcatccttagtttcaggggtctgaaaacaaatgctacgaccaccttgctt

SEQ ID NO: 453366 - DNA, 120 bp, Artificial Sequence
  ENSG00000156113_121 (sequence is synthesized)
tggtggcttttctgaacaggcattgtgagaagagatgttctggccaggtgaaagtggactttatttttaggtaggtttttcagtttagaaaggtttcctttgcttatcccttgaggactt

SEQ ID NO: 453367 - DNA, 120 bp, Artificial Sequence
  ENSG00000156113_122 (sequence is synthesized)
ctgtgctgctgcttctcctccatcttgctagttaacagaacaggggcagaagtgacaccaatgctctcggccatgcctgccttgggaagcactaccgggccccactgtttagaatcttag

SEQ ID NO: 453368 - DNA, 120 bp, Artificial Sequence
  ENSG00000156113_123 (sequence is synthesized)
atggaaatgtacacaaggcattgacacacgcctgcgggagtgacccagtgcttccctcccatgggactcagggtcagcgtgggaaggcagctggcagggacaggagccccgcccgcaagg

SEQ ID NO: 453369 - DNA, 120 bp, Artificial Sequence
  ENSG00000156113_124 (sequence is synthesized)
tggactgagcctcacttccacacaaaaccagagtcccatctgccccagagcgctcgctctcctccccttccttccgctcaatgcagcctgacacgcctttgaccagaactgcaacatttc

SEQ ID NO: 453370 - DNA, 120 bp, Artificial Sequence
  ENSG00000156113_125 (sequence is synthesized)
aaacacaaacccagatctgttgggaaatcctaattaaaaacgttgcattcccaggtggcacaatcacatcctgcctaaaacttctggcccacatcccaccacccagatgttgaaaagaaa

SEQ ID NO: 453371 - DNA, 120 bp, Artificial Sequence
  ENSG00000156113_126 (sequence is synthesized)
cctttctctgcttaacaccaaaacctgcacttcaaggtttctttaggggacaaagaaaaaaaaagtacacacatgcagagttcagcctacatgttcattgaggaaaaagagcgtggctta

SEQ ID NO: 453372 - DNA, 120 bp, Artificial Sequence
  ENSG00000156113_127 (sequence is synthesized)
ttcatctttcaatcttttgattgttggcattatgattatgattatgattaattactctgacctgacaggaattgaagaagagactatatgctggtgctctgaaatgatctacccaactct

SEQ ID NO: 453373 - DNA, 120 bp, Artificial Sequence
  ENSG00000156113_128 (sequence is synthesized)
gtcatctgtaacaaccagtgataactctcttgtcttgtaaaaagggtttgtacataacttgtacatggtttcattttgtatttttcgcagattaaaaatttatgtatttgtgttctaaaa

SEQ ID NO: 453374 - DNA, 120 bp, Artificial Sequence
  ENSG00000156113_129 (sequence is synthesized)
atggtcttcttcatcctcgggggactggcaatgtttgcccgctacgtgcccgaaattgctgctctcatcctgagtcggaataaattcggcgggacttttaacaaacatggaggcagaaag

SEQ ID NO: 453375 - DNA, 120 bp, Artificial Sequence
  ENSG00000156113_130 (sequence is synthesized)
ctggggccgtgagatgatctgtcggtgagataactccacctggggccctgcatctgataggcgctcaaaattactacctacttgaaactggacttgttttctgcgctcctatgaaactga

SEQ ID NO: 453376 - DNA, 120 bp, Artificial Sequence
  ENSG00000156113_131 (sequence is synthesized)
acagtggagggttgctcgtgaaggatctgggacatgtttcatatggagcacaagaaaaggacgtcgaacatgcaacggtctgcatccaggaggcccagaagattaacaatggctcaagcc

SEQ ID NO: 453377 - DNA, 120 bp, Artificial Sequence
  ENSG00000156113_132 (sequence is synthesized)
atgtagacacatttatgaagagtggcataaacccctgcctgtctgattctaagagggcaaaacaaatcttgccagcccctcaatgaaaggaattttaatctgtcttcccatcaagtctga

SEQ ID NO: 453378 - DNA, 120 bp, Artificial Sequence
  ENSG00000156113_133 (sequence is synthesized)
agctgaagaggggagagagacaccctccccacccccatatgaggatggtctgtgatgatatgcatgcaggggaagggacttatccaaggtccctgatagatagggactggaattttggca

SEQ ID NO: 453379 - DNA, 120 bp, Artificial Sequence
  ENSG00000156113_134 (sequence is synthesized)
gtgtcttttctagagtagaacaaatttatcagttgaatttgctgtagttctctgaaggtttctttggccacattagaatttttgagccctggcatccaagtaggccaacttcaaaatggc

SEQ ID NO: 453380 - DNA, 120 bp, Artificial Sequence
  ENSG00000156113_135 (sequence is synthesized)
tttttagcctattctgaactccaactgttccagttcctcttgctttccagaggtgtgagcacctggaagcccctgctctggtctacaccccaggctcaagattcatcctgctcactcagc

SEQ ID NO: 453381 - DNA, 120 bp, Artificial Sequence
  ENSG00000156113_136 (sequence is synthesized)
ggcagcaaaataccaaaagggaaaaccgtaaaaaacgattaataataattaaaacgacctcacccccaaactggcagcttgtgcaagacttcagtcggaagccctgttagctagatgcct

SEQ ID NO: 453382 - DNA, 120 bp, Artificial Sequence
  ENSG00000156113_137 (sequence is synthesized)
ttgtgttcaaaccactttgcatgactcttattctgagtgactccagtgtgaatatgacattactaatgacctgctaagtgtgtacagatgtgggtttctccagatgtggtgattaataac

SEQ ID NO: 453383 - DNA, 120 bp, Artificial Sequence
  ENSG00000156113_138 (sequence is synthesized)
ataatggagatagcggttgactcatgtttatgagttgtttgccttttattacgtttctgagtttatttgctttgaactgttttttaactccagccaataaactcacctttaaatcttaaa

SEQ ID NO: 453384 - DNA, 120 bp, Artificial Sequence
  ENSG00000156113_139 (sequence is synthesized)
gcatgtccagagggttgagccctactcagcctcatctgggtactgactgggggccaggactcaggtccagccagtttcacagcagagcctgtgctcttggccatgatgataatggcactt

SEQ ID NO: 453385 - DNA, 120 bp, Artificial Sequence
  ENSG00000156113_140 (sequence is synthesized)
tcccacccagtccttttttttttcaaatttatttattttgagtgctgcattctctaccttttatagttaagaatgttttcaaggtctggtgggaggttttcgtgttttgcatccatgaat

SEQ ID NO: 453386 - DNA, 120 bp, Artificial Sequence
  ENSG00000156113_141 (sequence is synthesized)
gcagtcagtgtttgcctgtaaatagggagggtcaattctcttgggctcctctgctgtgcacctcattgcccatagaatgctactctcggatcttgcactagagcactggatgatgaagtg

SEQ ID NO: 453387 - DNA, 120 bp, Artificial Sequence
  ENSG00000156113_142 (sequence is synthesized)
aagccttgcagagacctgtgagtctgggggaggaaaccaagactccagggtggagtgattggctgtatgtttcacctgcagccacgcgaggcccagaagtcttccagtgctttggaggtt

SEQ ID NO: 453388 - DNA, 120 bp, Artificial Sequence
  ENSG00000156113_143 (sequence is synthesized)
ccttctgagtgcagaagattttggaggaagctagtgctgtactgtactgattttctaaatgggaaagaaagttctcagaaggaaggctattttgagtctgctggcataggagggtgaggt

SEQ ID NO: 453389 - DNA, 120 bp, Artificial Sequence
  ENSG00000156113_144 (sequence is synthesized)
atatgaggtcaagtcttcttgctgggtattacttatttttaaagagctgtttcctaatgatgtatttgcactgaagatgtcaagtagttaagatgacttgatgggaatttgcaacttctg

SEQ ID NO: 453390 - DNA, 120 bp, Artificial Sequence
  ENSG00000156113_145 (sequence is synthesized)
ggagggtgacagtttcccacagatgagggtctgagccattcttgctatggttgtaggatccttttctcaattgggtttccaatgctttgatcttactggaggtcagattagaaagcatga

SEQ ID NO: 453391 - DNA, 120 bp, Artificial Sequence
  ENSG00000156113_146 (sequence is synthesized)
agaggtggaggccctggccatttgaggacttctagagtggacactcatgcagactccttgggtgccagccgaatggactggtgctccagagtgagcctgggtgacagatgataaagacct

SEQ ID NO: 453392 - DNA, 120 bp, Artificial Sequence
  ENSG00000156113_147 (sequence is synthesized)
tgcagaaggatgaagagggcacagactagaactgcaatgttgcagccagttctgccctgattcctgcaggtgccaaccctgaggaaataatttgttccaactatactattgcaaatcatg

SEQ ID NO: 453393 - DNA, 120 bp, Artificial Sequence
  ENSG00000156113_148 (sequence is synthesized)
aagttgatggcatctgggaaacaagctggagtctaactcattttctgttgtggcgtgaacttggcaactctggtgacaatggccttgagcttgttgcctttattgtccactgtgtgagtg

SEQ ID NO: 453394 - DNA, 120 bp, Artificial Sequence
  ENSG00000156113_149 (sequence is synthesized)
ttttgaactttaaactctatccctggcatggttggctactagactttgatactaggaaacctgcttggtgtgcctgttggctcagactctggtgtgcctgaattctgagcttagtgctcc

SEQ ID NO: 453395 - DNA, 120 bp, Artificial Sequence
  ENSG00000156113_150 (sequence is synthesized)
tttcctgtggcttgggatggtggtaatttcatgcacagctaaactcagaatttctcagagccatctggtcaccggccaaggattttgtgcatttgggtggagaggccaaaatgtcagtca

SEQ ID NO: 453396 - DNA, 120 bp, Artificial Sequence
  ENSG00000156113_151 (sequence is synthesized)
gggaaaacaaagcaaatatctcctttaataacctgtctctgggaatcagccaagtttaagcctatcagaggtccttcagcccaccccacatgcgaggctgggctgccctcacccatctca

SEQ ID NO: 453397 - DNA, 120 bp, Artificial Sequence
  ENSG00000156113_152 (sequence is synthesized)
gatggagagtcctttaaacgctgtcaggagacaagattccacatgctccctccatcagctctcccgagccaagaaagagaagagcttgtttaagtttggaagactcccattggcatgtca

SEQ ID NO: 453398 - DNA, 120 bp, Artificial Sequence
  ENSG00000156113_153 (sequence is synthesized)
ttgaaggtaagcccccttttaaatatttactgttaatgattctggatcctatttgtattgaactgaagatcctctaaagcccctggtcttatttctccaatctctctccaggggtgttct

SEQ ID NO: 453399 - DNA, 120 bp, Artificial Sequence
  ENSG00000156113_154 (sequence is synthesized)
tacatgtcgtggggtgcagaccctgccaacttccatgctgagactcaggaaagaggtttgggcttgaagcttgtatgtcccagagaaagaaaaccctaatgtggaggtgagtgtgttgat

SEQ ID NO: 453400 - DNA, 88 bp, Artificial Sequence
  ENSG00000156113_155 (sequence is synthesized)
cagagaaagaaaaccctaatgtggaggtgagtgtgttgatgggttagaagtccagatgcctcagccagcaccttccttccaccttttg

SEQ ID NO: 453401 - DNA, 120 bp, Artificial Sequence
  ENSG00000156113_156 (sequence is synthesized)
gggaggtctgtgtagctgtgtttagagacgagaccctgaagccagatgtagccacgtgtctcccagggatcttatgttcaacatgaaaagcccagactcaggataaaggactgtcaccac

SEQ ID NO: 453402 - DNA, 120 bp, Artificial Sequence
  ENSG00000156113_157 (sequence is synthesized)
gagaacttctctggctctttcaatcaagctctggtggttttcttccagggcatggcccatgggaccaagcacatggtgtgtggagctgtgctctgcttcctcgtgttgatgtaacatggg

SEQ ID NO: 453403 - DNA, 120 bp, Artificial Sequence
  ENSG00000156113_158 (sequence is synthesized)
ctttggcagggccccaccacagatggggccccttgacatgcgtatgttttgattttgtggtgcctgcatggtaactagagctgtctgtcaaggaaattaataaaatggatgtgatgctga

SEQ ID NO: 453404 - DNA, 120 bp, Artificial Sequence
  ENSG00000156113_159 (sequence is synthesized)
gcctttctgatgtggctgcgtgcatccagtgcccagagcatgccggggttcttgcaagagggactggagggtgagggaggagagagtgtctattggctccaccaggacatagatgctggt

SEQ ID NO: 453405 - DNA, 120 bp, Artificial Sequence
  ENSG00000156113_160 (sequence is synthesized)
gacccacactgcgctggacaggaggacctgtttgcagcacgggtcagaggaacacaggctcctccaggtctttccagagcattgactcctgcaagaagtgaatggaagggagccgaaagc

SEQ ID NO: 453406 - DNA, 120 bp, Artificial Sequence
  ENSG00000156113_161 (sequence is synthesized)
ctagcccatctccctccttctaccatgatccccagtaagattctggtgtaccgccacccatccagcagaaccggcacagagctttacagacccggcaggcgccgcaagaagtccctgggg

SEQ ID NO: 453407 - DNA, 120 bp, Artificial Sequence
  ENSG00000156113_162 (sequence is synthesized)
gacctgttccataatggctaccgggtgaagtctgggcctgctgctccggagaaggaggaaccgccgaacttccggcagtcattggtgtcttgctgtggtgtttgtgcatcctggggtttg

SEQ ID NO: 453408 - DNA, 120 bp, Artificial Sequence
  ENSG00000156113_163 (sequence is synthesized)
atcttgtgatgtatatctgggattgtccgaaaattatgaaatgaaagttgcatcacacttcatgaaacctcttgcggttgggctacttgaaagtgactttgaccttgtatagaaaggtat

SEQ ID NO: 453409 - DNA, 120 bp, Artificial Sequence
  ENSG00000156113_164 (sequence is synthesized)
gctggagcgggagtccgcctgaggccgcggttttacgcggagcgtcttccctggcgctcgaggtggctagatgtcgtcggctttagctattcctggtgcagacgcccaccggcactgagg

SEQ ID NO: 453410 - DNA, 120 bp, Artificial Sequence
  ENSG00000156113_165 (sequence is synthesized)
ctggcgacaccttcgatgtatggttgctaggctcactgcctggtctgtagtcgtgtccctagagatgtcttcccttccccacagccactggctggagtgggggacccgacactgatagaa

SEQ ID NO: 453411 - DNA, 120 bp, Artificial Sequence
  ENSG00000156113_166 (sequence is synthesized)
aactgcagaataaaaaagaaagaactggaaaaaagagagtgagccagctgccttctttctgagtaattcccatcctaggggacttcacgcgcgaaccgttttggagggaagggaaatcca

SEQ ID NO: 453412 - DNA, 120 bp, Artificial Sequence
  ENSG00000156113_167 (sequence is synthesized)
ggggaatagtgcagggtagatacacattgcagcctccacatgttcacatcttttctagtaaagttaaaccgaggacccctcaaacttctacagggcacagcaacttgtagcagcctcctt

SEQ ID NO: 453413 - DNA, 120 bp, Artificial Sequence
  ENSG00000156113_168 (sequence is synthesized)
ggcggctgagagaagtagggaagcctggggctatgggtgaaggctggctatgaaaacaccaggggggaaggagcctgtctctcctgatcattaattatacatcctgttgggtgctggagc

SEQ ID NO: 453414 - DNA, 120 bp, Artificial Sequence
  ENSG00000156113_169 (sequence is synthesized)
tcagctgtgttttgtggcagcacatttgtgttttggaaaatactggtgtattggaacaaagggagaaatatgaaaaccatcattctcttcgtcattctctggcttctccggaggcctgca

SEQ ID NO: 453415 - DNA, 120 bp, Artificial Sequence
  ENSG00000156113_170 (sequence is synthesized)
ggtgctggtcggagagttttctttggaattaccttctcagccgtagaggtttcttcttatttgttaaggaggcaaacctcccaccttccagagaagccctcaggttaagcaaagccctat

SEQ ID NO: 453416 - DNA, 120 bp, Artificial Sequence
  ENSG00000156113_171 (sequence is synthesized)
tctcctccacctcccccaacagtctcgggaattttgttccccggtttactgagattcagcgactgtctttaggggaaagatagctcatagttgtgtgcctctgaaatgttccctagatag

SEQ ID NO: 453417 - DNA, 120 bp, Artificial Sequence
  ENSG00000156113_172 (sequence is synthesized)
agtgatctgggtgaactttttaacagcttgctttctttcaggcagggggcaatttttatcataatgaaaactttttccatgattgaaaataagttgtggtgtttttgtgaacctggggtc

SEQ ID NO: 453418 - DNA, 120 bp, Artificial Sequence
  ENSG00000156113_173 (sequence is synthesized)
ctaaacacagcttccaaagtctttttatgttagggggtacataaatgcaattgcagtgtctgtaatgaaatgctaatcccatcgcacacacaaaggatctcctaaatgatgagcaagcat

SEQ ID NO: 453419 - DNA, 120 bp, Artificial Sequence
  ENSG00000156113_174 (sequence is synthesized)
aacttctgtcagtttactcaagaaaataggtttttggcaacgattagaaaaaacaattcgtaaatatttggctatgttttgtagccccaagacctgctgagtggacataactggaagtga

SEQ ID NO: 453420 - DNA, 120 bp, Artificial Sequence
  ENSG00000156113_175 (sequence is synthesized)
gttgctgtaagaaatctgccagggatgagaggtgatggtggtttgtttggaagatgtgaggccagtatagaatgagtgcaggttccttttgataccgtaagtccattttaaagcacacct

SEQ ID NO: 453421 - DNA, 120 bp, Artificial Sequence
  ENSG00000156113_176 (sequence is synthesized)
agaatctcttgatacctgcccctagatttgctcacttaagccataggtagccagctcattatatgcagtaacggtaagttaggccttttaaaagcttttctttctatgcttgaggtctgt

SEQ ID NO: 453422 - DNA, 120 bp, Artificial Sequence
  ENSG00000156113_177 (sequence is synthesized)
tgtgtgtgtgtgtgtgtgtgtttgtctttttttcttttttctttccaagtatttggtagttttgtcaagactcgatacacaggcatgtatttggcttaagcttagaataataatttttgt

SEQ ID NO: 453423 - DNA, 120 bp, Artificial Sequence
  ENSG00000156113_178 (sequence is synthesized)
ggcttaagcttagaataataatttttgtgctagatttcccaagaaaacataggctgcctttccagaaaattctaccagccctcagatgggttcaccctcaccctccttcagccccaagat

SEQ ID NO: 453424 - DNA, 120 bp, Artificial Sequence
  ENSG00000156113_179 (sequence is synthesized)
ggtttgatcaagagctggagtccagaggaaagcaggtctgaaattctgtgggagataaaattcagcaaggagctccaatttcatgagcgtttggtctctgggatcgcaccaaaccttttt

SEQ ID NO: 453425 - DNA, 120 bp, Artificial Sequence
  ENSG00000156113_180 (sequence is synthesized)
gatcaaaggaacccaagactgtggacatgcatcgtgggacatctcttcattagtacctttggcctctgaatctcaaacagtgaatgactttagtcttttgaaaagagtggcatgtggact

SEQ ID NO: 453426 - DNA, 120 bp, Artificial Sequence
  ENSG00000156113_181 (sequence is synthesized)
ttttcagaaagtgaagaagaaaacattacaatttcctcctgttgggaacttggtcacagtcattccagtactgtgttctttgctgtactttttcacattattgtttttttccttgtggga

SEQ ID NO: 453427 - DNA, 120 bp, Artificial Sequence
  ENSG00000156113_182 (sequence is synthesized)
tttcatcagagctctctattcacttgggtgtgacgttgtgaagttcaatcctgtcatagactatattgaatagggagctgctctggtagcctgaataaagccatgactttgaagaagtta

SEQ ID NO: 453428 - DNA, 120 bp, Artificial Sequence
  ENSG00000156113_183 (sequence is synthesized)
aatgagggggttagtcatatgggctttgggcataaaatttgggtgggtggctaagggaccttcatcaacctagcaggagagcaaagtgatcatgttaagacatctcttctgaagtagctc

SEQ ID NO: 453429 - DNA, 120 bp, Artificial Sequence
  ENSG00000156113_184 (sequence is synthesized)
attgacactcttccctcaccttggtggccgctgcgtgcctgattgctaagtgcaccaccgtaacaataacagtctataatggtgatattattaactgcatcgtgcatattattgatttac

SEQ ID NO: 453430 - DNA, 120 bp, Artificial Sequence
  ENSG00000156113_185 (sequence is synthesized)
tctttgttctgcatcattatcctttcaccaatgagtttactgcattattctcacatacttagtcaagcaccaaattacaacgaaagggcaggctcttataatggcatctaatggaacatt

SEQ ID NO: 453431 - DNA, 120 bp, Artificial Sequence
  ENSG00000156113_186 (sequence is synthesized)
gcataagccatcatcactgcctcctattatgagccacctccagccaatgagctttctgccttagtggaatgtgcacagagcaattatgaagtgcaagggacatggccattctaaatttta

SEQ ID NO: 453432 - DNA, 120 bp, Artificial Sequence
  ENSG00000156113_187 (sequence is synthesized)
cccaggaaattaccatgctgcatgttcaccacctgcccaagtctcagagcgcagctagagactcagatgctgtcactatgagcctggggggcacagggacaggagtcgagcctcttgcta

SEQ ID NO: 453433 - DNA, 120 bp, Artificial Sequence
  ENSG00000156113_188 (sequence is synthesized)
catacagtctcttcactagaagccagtggttttatctccacagtcagtccctggctttttgtcttgtggctgactcttgcatcaaatgctcactcctgactgggcattatgtggcacata

SEQ ID NO: 453434 - DNA, 120 bp, Artificial Sequence
  ENSG00000156113_189 (sequence is synthesized)
taagtggccatgacattgcctggtgccaaagtcagattggccaggagccccgagcggttggagggactgtcagtctcaacagttgtggggctcatctcttccgggtgagccactacttcc

SEQ ID NO: 453435 - DNA, 120 bp, Artificial Sequence
  ENSG00000156113_190 (sequence is synthesized)
agaaacagaagtccaaaccaccctcaaacaaggcgagcaattccagcctcatcccttcccagcatctccccatcttgaggtaaattcctttagctctcctggaaatcccgggcaccctaa

SEQ ID NO: 453436 - DNA, 120 bp, Artificial Sequence
  ENSG00000156113_191 (sequence is synthesized)
ggaagcagccctctggggacgcacagccagctggcatgatcttccattccataggcatcccagccccatttagccctgagtaatgctcacttactgtaaagtgttacatgcccccattgt

SEQ ID NO: 453437 - DNA, 120 bp, Artificial Sequence
  ENSG00000156113_192 (sequence is synthesized)
cggaggagttatagtggaaaaatgcaaaatttcctttttactgcttatggccagcagaacctataacgtgtcaggccgcacattagccaccctgataaaagtctgctttcttacacacaa

SEQ ID NO: 453438 - DNA, 120 bp, Artificial Sequence
  ENSG00000156113_193 (sequence is synthesized)
aatcatcgtttcagcaagatttgttatctcattacctgataagctctatgtcataaaccaagactcatacagtaaatctccccggaggacgctttgtgggcagaaagggagagatatgaa

SEQ ID NO: 453439 - DNA, 120 bp, Artificial Sequence
  ENSG00000156113_194 (sequence is synthesized)
cttattgttaaatgcataaaaccacttggccaaacagttgggcttttaataggattttgtgcagcatcaggtgagaagccatatggcttttctgtctaggagtctcagcacctgctagca

SEQ ID NO: 453440 - DNA, 120 bp, Artificial Sequence
  ENSG00000156113_195 (sequence is synthesized)
ccgctgctttgcctcactgccctctggggatgggagctgggcttttatggaggcggagggaggagatgaatgcttcccctgcagctgcctggcttctgctgtcttgccagggggtgggat

SEQ ID NO: 453441 - DNA, 120 bp, Artificial Sequence
  ENSG00000156113_196 (sequence is synthesized)
acctcctcaactctgtctccctttggctgcccagaaaaggtgctttcagagtgacaagcttgatatttttatttgactgagaaacgacatacttctgccccctcaaatatatatttgacc

SEQ ID NO: 453442 - DNA, 120 bp, Artificial Sequence
  ENSG00000156113_197 (sequence is synthesized)
agactgtgggaattttggtgttgtatttaacttccccaccaagggcccagggctcattgcccacatgtccccacgagtagcatcaaaggctgttctcaaaaatgaaagacgaatgagcag

SEQ ID NO: 453443 - DNA, 120 bp, Artificial Sequence
  ENSG00000156113_198 (sequence is synthesized)
acacagtgtgtcacatcagcaacttttttcccagtttctttgtaaatggaagtttatgaaaaggagcactaactcaaatcacagaatcctgtgtttgaaataaatggtcttgcaacaaac

SEQ ID NO: 453444 - DNA, 120 bp, Artificial Sequence
  ENSG00000156113_199 (sequence is synthesized)
agtgggctgtcatcgatcattccccgttccatggccacaggactgactgctgatgaaatctaaaagaccagcttgcagaaggcatggaaatcctggggttaggggcccctctgctatgga

SEQ ID NO: 453445 - DNA, 120 bp, Artificial Sequence
  ENSG00000156113_200 (sequence is synthesized)
ggttgtcttagtctttgctctcagcatcggtgcacttgtaatatacttcatagattcatcaaactcctggagacttcatggcaaaccaacatattgaatgcaggaaattccagggtggcc

SEQ ID NO: 453446 - DNA, 120 bp, Artificial Sequence
  ENSG00000156113_201 (sequence is synthesized)
ggcccattttgctgtgtggaggcccatcagaggctgtcactgagtggagcctgctgtcagtgactggcccaccatccagaacggctgactgctgccagccactgcccagccctcggcagg

SEQ ID NO: 453447 - DNA, 120 bp, Artificial Sequence
  ENSG00000156113_202 (sequence is synthesized)
tggctcccttgcagaacgtgttgttctccagccaacggatttggtggtgggcacccaaggtcacattcgcctgtttgtctctggaaaacccaaggacactgaagagataaagcccatctg

SEQ ID NO: 453448 - DNA, 120 bp, Artificial Sequence
  ENSG00000156113_203 (sequence is synthesized)
caggctaatacatctgcaaagcttattagtgggtgtctttgggcaagagcagtagagtgtgctgtggtgtttctaagtgaagcttcacattgcttagcaatctgtgtggtttagacattt

SEQ ID NO: 453449 - DNA, 120 bp, Artificial Sequence
  ENSG00000156113_204 (sequence is synthesized)
ggaaaacagcttttggtttccaatcccctgtgctgccctccatccctgccccgctgctgcatcatcagagatttcattcaatggcaacctcctccttcattccggggctctcctccaacc

SEQ ID NO: 453450 - DNA, 120 bp, Artificial Sequence
  ENSG00000156113_205 (sequence is synthesized)
tcaccagccccggtgctcctgtcttcatgggttgaaaaaggaccccgttggcacagccccacaagccctccctcctggcagttggagggataagagctgagttgggctggggattattga

SEQ ID NO: 453451 - DNA, 120 bp, Artificial Sequence
  ENSG00000156113_206 (sequence is synthesized)
gccagcatgcaccaatgtgccccgatctgattgaaacattggctgtcaaggccttgaatccttgcctcttttcaacgctctttctctggtatgcaggggttaggaaccagctaagttggt

SEQ ID NO: 453452 - DNA, 120 bp, Artificial Sequence
  ENSG00000156113_207 (sequence is synthesized)
tcatctggagaagcagcaggctggcagttatgctgacatttcaaatacaactttatttctgattttggttacaacaaaacgcagtctattactgggcaaagcaaagtaaccaaaattaac

SEQ ID NO: 453453 - DNA, 90 bp, Artificial Sequence
  ENSG00000156113_208 (sequence is synthesized)
gcagtctattactgggcaaagcaaagtaaccaaaattaactctaagaataatgataagtattttttttggtatacagataaatcaggcag

SEQ ID NO: 453454 - DNA, 120 bp, Artificial Sequence
  ENSG00000156113_209 (sequence is synthesized)
caaaggctggagtgtaaagaggtgttgccttcaccttctctaagccggcctctttgactaacacatttggtctttgtcattgggtcctaaaagacagccatgaattcctagtgagtgact

SEQ ID NO: 453455 - DNA, 120 bp, Artificial Sequence
  ENSG00000156113_210 (sequence is synthesized)
gagccttgagtgtgtgtcctttgatattttgcctgtattgcacagtctgccctcaaactgttcataatctcatgagctgcctgtatttccagttgaagatgagcagccgtcaacactatc

SEQ ID NO: 453456 - DNA, 120 bp, Artificial Sequence
  ENSG00000156113_211 (sequence is synthesized)
attcataaagctgtaatcacatatggattcttttatatgggtcttggcatggactgaacaaagagaaaggcagcacagaaagattacataacatatacacagagtccggtgcccagcgag

SEQ ID NO: 453457 - DNA, 120 bp, Artificial Sequence
  ENSG00000156113_212 (sequence is synthesized)
gatggggcccgagaagcggcaatggtcaggacttaatgcgaaaatccagtagaagctgacactcaccctggcccttctcggctggcaggatatagtcactgatgtgaaataagagccatc

SEQ ID NO: 453458 - DNA, 120 bp, Artificial Sequence
  ENSG00000156113_213 (sequence is synthesized)
ttattgaacaagcctctggccaagcatcagtctgagctctttcagagataattggcctttaattaattgcatgcattcctgagtccacctgggtatccacagactgggtctactctgcct

SEQ ID NO: 453459 - DNA, 120 bp, Artificial Sequence
  ENSG00000156113_214 (sequence is synthesized)
ccccactcttccaaatttttgactttggttttttgagtgccatccactgttagtgattgttacatgaaaatcgcaaagtcctatgtaagccataaggaataaaatatcagatttccttaa

SEQ ID NO: 453460 - DNA, 120 bp, Artificial Sequence
  ENSG00000156113_215 (sequence is synthesized)
gttctgtctttcaaaccatacaggatatgaggaggttggtttatttcttagccctttcaactttgtagctgctatggggtttgttttgagggggctgggaggaaggtatggggagaaata

SEQ ID NO: 453461 - DNA, 120 bp, Artificial Sequence
  ENSG00000156113_216 (sequence is synthesized)
tggcagattaccggaagggaaaactgatctatctttcttctgagatgaatagacagtttccttcatgctggtcactgttttcaaaggagcatgagatgatggatttgcgattggggcatt

SEQ ID NO: 453462 - DNA, 120 bp, Artificial Sequence
  ENSG00000156113_217 (sequence is synthesized)
caattgggaatggagaggaaaggaggaaaggcttagttcacggattctttctggtgatttttactgtaagaacctcttttgagcattctgtctggacagctcctacaatctgagtcctcc

SEQ ID NO: 453463 - DNA, 120 bp, Artificial Sequence
  ENSG00000156113_218 (sequence is synthesized)
actgatatacaaagcctcggatctaagccaaacccattttgggaacaaggtagaagccctgggctaatgtgtaataacttgacatttaacgtatcgtagttgaatatctcagccaaaagc

SEQ ID NO: 453464 - DNA, 120 bp, Artificial Sequence
  ENSG00000156113_219 (sequence is synthesized)
cattttcagcaaatgccattctggcccccaaaatgatggggttttgagggccatgttggttggacaatagaatctaacttctaacctggccatggcactccctgttaccattagtgagtg

SEQ ID NO: 453465 - DNA, 120 bp, Artificial Sequence
  ENSG00000156113_220 (sequence is synthesized)
tgcaaaactgtagagtggcctcttcccccaagacaaatgcaaactacctgtggtccggggtccctttacttgagaatgtttcctctgttattccctcactctcttctttttctgtacttt

SEQ ID NO: 453466 - DNA, 120 bp, Artificial Sequence
  ENSG00000156113_221 (sequence is synthesized)
cctccactccctttccccaacccttaaatgctgtatccaattagctaaaccgggcaagttgcctttggtatcagtcaatcaggaaaaaaacagtgggacgcacattctaatgataactga

SEQ ID NO: 453467 - DNA, 120 bp, Artificial Sequence
  ENSG00000156113_222 (sequence is synthesized)
actgggtaagaagcactgttttccttcacatcagtatctccttttgttctgttgttggtgtttccaactatcatcagcttgtttttatttcaccggctgtaacagaaaggctaccccatg

SEQ ID NO: 453468 - DNA, 120 bp, Artificial Sequence
  ENSG00000156113_223 (sequence is synthesized)
gcactgctttgaatgtgttttatttgtggctctggttggaatcgactgtcttgttctggcctttcttaatgattttttccccacacagcatcagtaaacctttgatcacacccatctgac

SEQ ID NO: 453469 - DNA, 120 bp, Artificial Sequence
  ENSG00000156113_224 (sequence is synthesized)
ctggcagttgtttccaaagcatatttgctctaattcattttctctggcctgagccttttttccccacttttttttgtcaccccgctctcccgccttctcccttctactcctcttccaaca

SEQ ID NO: 453470 - DNA, 120 bp, Artificial Sequence
  ENSG00000156113_225 (sequence is synthesized)
tactgtcagtttgaatgacatgtcttcacagctcttagaggaagtcaaaggagaatatcaaaattttaagataagaaacctaagatggcactttccctccagctgtttatttttctttat

SEQ ID NO: 453471 - DNA, 120 bp, Artificial Sequence
  ENSG00000156113_226 (sequence is synthesized)
tctgactttatttgccttttttttttttcccccctactagggcatttctcagaagctctggttctgaagccataaaaacacctggtccctaggagaactttttttactaaaggcagattt

SEQ ID NO: 453472 - DNA, 120 bp, Artificial Sequence
  ENSG00000156113_227 (sequence is synthesized)
caagaagggtgcggaggataaggttagcagccacccacgtgcagccctgcactctggcccccaatcccagcccagaatcctctctgggagattcacaatggactcaggtggacgataaag

SEQ ID NO: 453473 - DNA, 120 bp, Artificial Sequence
  ENSG00000156113_228 (sequence is synthesized)
gcctccagtcgtgactgcatttgttaggttcttccccacttccccgtgacttggttaataactccatgaagggcacccatcagcagcaagtctcagaactggggattgatcttctaaata

SEQ ID NO: 453474 - DNA, 120 bp, Artificial Sequence
  ENSG00000156113_229 (sequence is synthesized)
gagacagcaaaagtgctgctcagcagaggggtggatagagaggtgggagcacctgccttcacatgactcacaaatgaaatgaacaccccattttcttggcccaaaaatatatttcaaaat

SEQ ID NO: 453475 - DNA, 120 bp, Artificial Sequence
  ENSG00000156113_230 (sequence is synthesized)
aagggagcaggctttcaacacagtaatcttgcttgcgagatgtctagaaaccaaggaataaattgtccaccactcagcagtgcattattgtaggtatagctatttatcaggacaaattca

SEQ ID NO: 453476 - DNA, 120 bp, Artificial Sequence
  ENSG00000156113_231 (sequence is synthesized)
ctcaggtcagggagtatcacactattttctgtttccaaccataggaggggtatctttttcatgtttagtgtagttgtttaaaagccctaggtttctggattgctctcctcagaactggag

SEQ ID NO: 453477 - DNA, 120 bp, Artificial Sequence
  ENSG00000156113_232 (sequence is synthesized)
ggcaataagagacccagggctcatgtggtccacgcctctggttggaaaattaatccaaacatctccatctcacaaacctacagcagcatttcagaatcctcactgccgggaatttcattt

SEQ ID NO: 453478 - DNA, 120 bp, Artificial Sequence
  ENSG00000156113_233 (sequence is synthesized)
tctatttggaattcacgtgccgctgactaactaggatatcttaatttgtcattagtagacgagaaaaggaaaagcttggtgccccaaacctaaggcaacaattctggtatttgattagca

SEQ ID NO: 453479 - DNA, 120 bp, Artificial Sequence
  ENSG00000156113_234 (sequence is synthesized)
tcattgactctcctgaagcctttgtcccacaccagatttcttccttgtgttcagagaatctttcaggtgctcacaccacccttgtcttctgccttgaaacctatttctctagccactata

SEQ ID NO: 453480 - DNA, 120 bp, Artificial Sequence
  ENSG00000156113_235 (sequence is synthesized)
ccaccctcctcagaccatttcacctcccacatcccccacaaatacttcttatttatctacatgttctgagatgtgttctgcattatgccaggccagtataatgaattttaagagacacag

SEQ ID NO: 453481 - DNA, 120 bp, Artificial Sequence
  ENSG00000156113_236 (sequence is synthesized)
gactctcaattgatgttagcatggcaaaggctcctcagagtctcacaagaaaggactgtgttacagctgtttcacctgactattccaattgtatttgaccacatatgctttggggtgatt

SEQ ID NO: 453482 - DNA, 120 bp, Artificial Sequence
  ENSG00000156113_237 (sequence is synthesized)
acgtgggtacctcttagcacccacataattactgttctgtgaaataggccttgagtagcattgcttgctctccttctgagactgggtatttcagaacggtatacaaggtattcactggac

SEQ ID NO: 453483 - DNA, 120 bp, Artificial Sequence
  ENSG00000156113_238 (sequence is synthesized)
cctggctggtctcttggagcgcttttcctatgaccccagatgtctagctcactggcaatcgggagtcccctccccctacttggagtcacttcacctccatatctggtaccaacccttccc

SEQ ID NO: 453484 - DNA, 120 bp, Artificial Sequence
  ENSG00000156113_239 (sequence is synthesized)
catcttcctgataagaggtaacagatgctgtgcttttcggagcattgccacacacaccattggtggctattacaagtaactaaaactgcattcttccatatgtggtctccagtttacatt

SEQ ID NO: 453485 - DNA, 120 bp, Artificial Sequence
  ENSG00000156113_240 (sequence is synthesized)
ttctgattcacaaaacagaaagactaaacagtggcctacaacatccctttggacaagtgaagggaggtgaggaaaagctacctcttgaaagacccctgagcaagaccttcagtgtttcca

SEQ ID NO: 453486 - DNA, 120 bp, Artificial Sequence
  ENSG00000156113_241 (sequence is synthesized)
agagaggcagagggaagctgggtattttcatgctataatgggtggacaggtatttaatgtcagaagggagatcatgacagcagctggtatttatcaagtcatggcatgatccagatgctg

SEQ ID NO: 453487 - DNA, 120 bp, Artificial Sequence
  ENSG00000156113_242 (sequence is synthesized)
ggccaggcttactgggcaccatcccattcgtatgagcctcctgacagcctcatgagagagctgctgtaactcccccattttacagaaacaaactaaggtatagaatgatgaaatgctttg

SEQ ID NO: 453488 - DNA, 120 bp, Artificial Sequence
  ENSG00000156113_243 (sequence is synthesized)
cccaaggaagttggcagcacaggctggactgaagcccagttgtcagagcctggattttggactttcaccactagcctgcaattcaattgctgcttaaacaatggggacccaaatgtgacc

SEQ ID NO: 453489 - DNA, 120 bp, Artificial Sequence
  ENSG00000156113_244 (sequence is synthesized)
aattttggaagaacagagcaaagattttccccattagaatttttctctggggaaacaagatgatgtcattttaaaatactaattccatgcctagcctttcatgctagtatcatttattct

SEQ ID NO: 453490 - DNA, 120 bp, Artificial Sequence
  ENSG00000156113_245 (sequence is synthesized)
gcttcatacagtaaacaaaagttttttttttttaaaaaagaagagttatcaagaaagttgcttaaaaattaaaacaatcactctagaaaaaagaattagctgttgatacatttagaaagg

SEQ ID NO: 453491 - DNA, 120 bp, Artificial Sequence
  ENSG00000156113_246 (sequence is synthesized)
aatcagggaaaggaaacctcatctgttctcttcctaaaatcacaataattatttcagaaattttgagtgcccccttctcccatccccccaccgacttttcccctattacttgctctgcaa

SEQ ID NO: 453492 - DNA, 120 bp, Artificial Sequence
  ENSG00000156113_247 (sequence is synthesized)
aactgataatttccaaagccaagatgggaatggaaattaatttgtcatttaatttttaataagttaaagacatctgagtgacacaactaatcagcctgcacgtacatgcgggaggagtcc

SEQ ID NO: 453493 - DNA, 120 bp, Artificial Sequence
  ENSG00000156113_248 (sequence is synthesized)
ttgaggaatcctcagatggaaatgaaatacagcatccaatgctgcatctgcttgaatgcaagcatataaaagattgagctgtttaggatgggaaagggagaacgtgggcgtccccatgca

SEQ ID NO: 453494 - DNA, 120 bp, Artificial Sequence
  ENSG00000156113_249 (sequence is synthesized)
actcaaaattcagagcaagtccttgtcagcaagcagcaggagacagccaggcatccatcccacctggggtttcctgtgtattaaacagggcctattgggtgtggacctagatttagggcc

SEQ ID NO: 453495 - DNA, 120 bp, Artificial Sequence
  ENSG00000156113_250 (sequence is synthesized)
tgggaccccgggaactacccaggccaatcccagtgggtaggctgcgggttatgcctgtggctgaattccttgctatctgcctttgctgtgctccccttccagcgctctttactcccaata

SEQ ID NO: 453496 - DNA, 120 bp, Artificial Sequence
  ENSG00000156113_251 (sequence is synthesized)
agctgctttcttttcattgtggctaaaatgactatcccagcatggctgctcatcattgaaatatgtccatctctcaaaggacttggttaccaaaaaacactggaaagtgtttttaggtca

SEQ ID NO: 453497 - DNA, 120 bp, Artificial Sequence
  ENSG00000156113_252 (sequence is synthesized)
tgatcctaaagctatgccaaaggactggccagcacagtctattggtcctccagtggcctgccgtggagcaagcctgcttgaacttattgctctccaggtctcagacacttaaacagtgac

SEQ ID NO: 453498 - DNA, 120 bp, Artificial Sequence
  ENSG00000156113_253 (sequence is synthesized)
acaggaacagtccattgagtcccactgccccccttacccaaagatccatctacagcttattccatgcttttgtttccttctcaatgacttcagtatttctaaaccagtagcctggtctcc

SEQ ID NO: 453499 - DNA, 120 bp, Artificial Sequence
  ENSG00000156113_254 (sequence is synthesized)
gggggaaaatatatatttgcctggagaacacaccagtctggaaaagtgaagccagccaggttcagtgtgggtggagtctcccaccagggatcccaccctagcactaaccagggttgaggt

SEQ ID NO: 453500 - DNA, 120 bp, Artificial Sequence
  ENSG00000156113_255 (sequence is synthesized)
tggggccggggtcggggactcacaggctcgggtgccgtggtgcggggtggggacagccaactcagcggggacggaggaagctgggggcagctgggtgcgtgttttgcaccgctcacctgc

SEQ ID NO: 453501 - DNA, 120 bp, Artificial Sequence
  ENSG00000156113_256 (sequence is synthesized)
atgagttcgtggggtcagaaagaagggaaaaatcctttgggcaagggagagaataattttgcacaagggaatcccgggggaggagcatggcccgagataacagggggacttcgaggggcg

SEQ ID NO: 453502 - DNA, 120 bp, Artificial Sequence
  ENSG00000156113_257 (sequence is synthesized)
agagaagttggggagatccatcccactattgggggtagcccacggggctgccacttttggaatgtgtcgaggtcgcatatctgatgtaacctcccactccgtcccttaggtgctctagtg

SEQ ID NO: 453503 - DNA, 120 bp, Artificial Sequence
  ENSG00000156113_258 (sequence is synthesized)
tacctccatggtggagggcagatgtggccagttagctcctcatcttccatcctcctccactatctcaggcgacagatgccagggccagcccgccttccacttgagctttcttgtcaaggc

SEQ ID NO: 453504 - DNA, 120 bp, Artificial Sequence
  ENSG00000156113_259 (sequence is synthesized)
tctgccttgagcccaaatcctgacctttactgtatgaaataaagtactgatgaacaagcagaggtttgaattagagcaggcttggagcaaatgtcaagtccgtctctgcctctttcctcc

SEQ ID NO: 453505 - DNA, 120 bp, Artificial Sequence
  ENSG00000156113_260 (sequence is synthesized)
acctgcaccaggagcctcgattagacccagtgtggagtttgcagcgccttaggctttatgggtctggggagacataacttattaacaaagagttattaaatttttatcaattttacaaca

SEQ ID NO: 453506 - DNA, 120 bp, Artificial Sequence
  ENSG00000156113_261 (sequence is synthesized)
cgtggggtgcagaccctgccaacttccatgctgagactcaggaaagaggtttgggcttgaagcttgtatgtcccagagaaagaaaaccctaatgtggagcccaatagaatcctgccagaa

SEQ ID NO: 453507 - DNA, 120 bp, Artificial Sequence
  ENSG00000156113_262 (sequence is synthesized)
gaagactgtattatattccatggggtcagctagagaaaatctgtgataactttgttgaaaatgaaatacactttggatttttttttgcaagaattaaaaaaaggaacaataacccacatg

SEQ ID NO: 453508 - DNA, 120 bp, Artificial Sequence
  ENSG00000156113_263 (sequence is synthesized)
cattgagccttctatacatcatctctcttaattctctaaagattattgttaccattatccacctcttgtaggtaagaaagttgagttctagggatatttagtaactggcccaaagtcaaa

SEQ ID NO: 453509 - DNA, 120 bp, Artificial Sequence
  ENSG00000156113_264 (sequence is synthesized)
cagctattaagtggtagtgttggaatttggacccaaattctgattgcagagccagggcatgtaaaaactgccttgcaggaaaggaggttaaaaaaatgtgcaaaatttataatcctgcct

SEQ ID NO: 453510 - DNA, 120 bp, Artificial Sequence
  ENSG00000156113_265 (sequence is synthesized)
ttctaaaacatcatactgaattggctttgaaagataaattcatctaaactgtatgagctctaacacttcaccctcgtgattgcatgaagtcagagggcttgttatacccatgtgaagagt

SEQ ID NO: 453511 - DNA, 120 bp, Artificial Sequence
  ENSG00000156113_266 (sequence is synthesized)
tggcggaggggtcattaggaggtgcttatggagagccgctgctcagtgcaggccgtgctattagtgtggactgctgctgtctgatttgggaggaatctcactgctgcctgtggttgtagg

SEQ ID NO: 453512 - DNA, 120 bp, Artificial Sequence
  ENSG00000156113_267 (sequence is synthesized)
gcagaacagttaaatcttcatagccttttggtattattgagtgttaataatagtcatgacacaagtacagtttcctcctgtcaggtattgttataagtaatggtagatgttcttgtgacc

SEQ ID NO: 453513 - DNA, 120 bp, Artificial Sequence
  ENSG00000156113_268 (sequence is synthesized)
acaaaaaattattttgcaataatgatctgctcggaggtctcccaaccaggtgaacaaaggttcacctgggtccttcctgtatgactacagacgtatcacttcatgaccacaacacttctc

SEQ ID NO: 453514 - DNA, 120 bp, Artificial Sequence
  ENSG00000156113_269 (sequence is synthesized)
tggaatggtttatcagtaggaaaaaagattatgtgttaattaccatcctctatattttgattgtttggggcagctgagaacttcctttagactgattccaaatatctattaccttattaa

SEQ ID NO: 453515 - DNA, 120 bp, Artificial Sequence
  ENSG00000156113_270 (sequence is synthesized)
gcaacatcttttcagaacaaggaatacctctgttgtatctgttgttttattcagaatccctgaattcagtatccattaagcctgaagtcttttctcagtctctgcatcagacaatcttgt

SEQ ID NO: 453516 - DNA, 120 bp, Artificial Sequence
  ENSG00000156113_271 (sequence is synthesized)
attctgcttttgatctgcagaaaattaaacttgtttgtttcatccatttattagattaggatacatttatctcttctgtcagtccaaacacaacttggtccgctaatctatttatgccac

SEQ ID NO: 453517 - DNA, 120 bp, Artificial Sequence
  ENSG00000156113_272 (sequence is synthesized)
tttgaaataggacaatgtatatttaggttcccacttctctgcagggcaagtttttttaaggggaggtttgcatttgttttctcaatttgcctcaattaggacatgctagacacacatctt

SEQ ID NO: 453518 - DNA, 120 bp, Artificial Sequence
  ENSG00000156113_273 (sequence is synthesized)
attcaaacaccctgtacgtttttataaacagcagactggaattgttaagtatatccaactgctgacttaaaaaaaaaaactgtttgggtaaatccaattcttcctataaaggctgtacat

SEQ ID NO: 453519 - DNA, 120 bp, Artificial Sequence
  ENSG00000156113_274 (sequence is synthesized)
ggaatcaatttccatgtccttatcaatgtcatgaagacgttcagcttgcttccgcattggttacgggtgtcttgtaccattccctgcggtaatatgtggtgtgtgtacatgatgtttatg

SEQ ID NO: 453520 - DNA, 120 bp, Artificial Sequence
  ENSG00000156113_275 (sequence is synthesized)
tatatctataggggtcccattaatgctctgtcatttaatggaaaattgttgtagcaatagcttcatcaggccaataatgcttccgtgttgaccaccaatagcagtttcaaaaggaattta

SEQ ID NO: 453521 - DNA, 120 bp, Artificial Sequence
  ENSG00000156113_276 (sequence is synthesized)
ttctgatggactttgcttcaaatcatgtgcccatgatggcagctagactgctccattatataaacccaggccctaataccttgatttgctttgatttcctcaactgggagcatgccagcc

SEQ ID NO: 453522 - DNA, 120 bp, Artificial Sequence
  ENSG00000156113_277 (sequence is synthesized)
tgggaagtaagcagtagtgcttaatgatggcattatccaactaaatgtatggggcagtggacattggactctggacaaaatctttggggaaagctttagactagtgggccccctataaac

SEQ ID NO: 453523 - DNA, 120 bp, Artificial Sequence
  ENSG00000156113_278 (sequence is synthesized)
acaacagtatggtgtagccttcaaggttttattcagaacatgacctcacaaatgtatcttctctgtttgtttttgttcactgagcagtatattaattaatcctggaaaccatcttaagat

SEQ ID NO: 453524 - DNA, 120 bp, Artificial Sequence
  ENSG00000156113_279 (sequence is synthesized)
atatcttcatgtggcttccgcagcatgaaggcaagtgaaaatgccatagatggaggtgtattgtaattagccaaaatgtaggttaaataagagcttgtaaatttgcatcgtcatgaggta

SEQ ID NO: 453525 - DNA, 120 bp, Artificial Sequence
  ENSG00000156113_280 (sequence is synthesized)
catcatctgggatgcagtgccagctcagagagcagacaattatgctcagagatatgagtggtcccagagttgttcagacacctgtgaaaccctgggactgactatgaaattgtacctgtt

SEQ ID NO: 453526 - DNA, 120 bp, Artificial Sequence
  ENSG00000156113_281 (sequence is synthesized)
gatgagcaattctaaaagtcatgcactctttgactttcacacaatttcaggctaaaccaaggcccaacgattagtaggtgctcaataaatgtcagtgactgatcaaaaagatttgggtat

SEQ ID NO: 453527 - DNA, 120 bp, Artificial Sequence
  ENSG00000156113_282 (sequence is synthesized)
aactgatttcaacacagaagtgggaacatgttagggtcaaatcccaaagatttgacaaaacaataacctcccagcctgaccttctagatttatcattgcaatggataacctatagtgccc

SEQ ID NO: 453528 - DNA, 120 bp, Artificial Sequence
  ENSG00000156113_283 (sequence is synthesized)
tttgtttaaaaaaaattgactgtgtttttattagaacagttattcatacttcttgatgaaaatttggaaagcacagaaacatataaaagaagacatataaagaagaaacatataaaaata

SEQ ID NO: 453529 - DNA, 120 bp, Artificial Sequence
  ENSG00000156127_0 (sequence is synthesized)
aaagcgagcgacatgtccctttggggagcagtccctctgcaccccagagtgaggaggacgcaggggtcagaggtggctacagggcaggcagaggaggcacctgtagggggtggtgggctg

SEQ ID NO: 453530 - DNA, 120 bp, Artificial Sequence
  ENSG00000156127_1 (sequence is synthesized)
gtggcccaggagaagtcaggaagggagcccagctggtgacaagagagcccagaggtgcctggggctgagtgtgagagcccggaagatttcagccatgcctcacagctccgacagcagtga

SEQ ID NO: 453531 - DNA, 120 bp, Artificial Sequence
  ENSG00000156127_2 (sequence is synthesized)
ctccagcttcagccgctctcctccccctggcaaacaggactcatctgatgatgtgagaagagttcagaggagggagaaaaatcgtattgccgcccagaagagccgacagaggcagacaca

SEQ ID NO: 453532 - DNA, 120 bp, Artificial Sequence
  ENSG00000156127_3 (sequence is synthesized)
gaactgaagtacttcacgtcggtgctgaacagccacgagcccctgtgctcggtgctggccgccagcacgccctcgccccccgaggtggtgtacagcgcccacgcattccaccaacctcat

SEQ ID NO: 453533 - DNA, 120 bp, Artificial Sequence
  ENSG00000156127_4 (sequence is synthesized)
gtcagctccccgcgcttccagccctgagcttccgatgcggggagagcagagcctcgggaggggcacacagactgtggcagagctgcgcccatcccgcagaggcccctgtccacctggaga

SEQ ID NO: 453534 - DNA, 120 bp, Artificial Sequence
  ENSG00000156127_5 (sequence is synthesized)
cccggagacagaggcctggacaaggagtgaacacgggaactgtcacgactggaagggcgtgaggcctcccagcagtgccgcagcgtttcgaggggcgtgtgctggaccccaccactgtgg

SEQ ID NO: 453535 - DNA, 120 bp, Artificial Sequence
  ENSG00000156127_6 (sequence is synthesized)
gttgcaggcccaatgcagaagagtattaagaaagatgctcaagtcccatggcacagagcaaggcgggcagggaacggttatttttctaaataaatgctttaaaagaaaccagtctgacaa

SEQ ID NO: 453536 - DNA, 120 bp, Artificial Sequence
  ENSG00000156136_0 (sequence is synthesized)
agtgtcctcagctgcctccgcgcgccaaagtcaaaccccgacacccgccggcgggccggtgagctcactagctgacccggcaggtcaggatctggcttagcggcgccgcgagctccagtg

SEQ ID NO: 453537 - DNA, 120 bp, Artificial Sequence
  ENSG00000156136_1 (sequence is synthesized)
cgcgcacccgtggccgcctcccagccctctttgccggacgagctctgggccgccacaagactaaggaatggccaccccgcccaagagaagctgcccgtctttctcagccagctctgaggg

SEQ ID NO: 453538 - DNA, 120 bp, Artificial Sequence
  ENSG00000156136_2 (sequence is synthesized)
gacccgcatcaagaaaatctccatcgaagggaacatcgctgcagggaagtcaacatttgtgaatatccttaaacaattgtgtgaagattgggaagtggttcctgaacctgttgccagatg

SEQ ID NO: 453539 - DNA, 120 bp, Artificial Sequence
  ENSG00000156136_3 (sequence is synthesized)
gtgcaatgttcaaagtactcaagatgaatttgaggaacttacaatgtctcagaaaaatggtgggaatgttcttcagatgatgtatgagaaacctgaacgatggtcttttaccttccaaac

SEQ ID NO: 453540 - DNA, 120 bp, Artificial Sequence
  ENSG00000156136_4 (sequence is synthesized)
atatgcctgtctcagtcgaataagagctcagcttgcctctctgaatggcaagctcaaagatgcagagaaacctgtattattttttgaacgatctgtgtatagtgacaggtatatttttgc

SEQ ID NO: 453541 - DNA, 120 bp, Artificial Sequence
  ENSG00000156136_5 (sequence is synthesized)
atctaatttgtatgaatctgaatgcatgaatgagacagagtggacaatttatcaagactggcatgactggatgaataaccaatttggccaaagccttgaattggatggaatcatttatct

SEQ ID NO: 453542 - DNA, 120 bp, Artificial Sequence
  ENSG00000156136_6 (sequence is synthesized)
tcaagccactccagagacatgcttacatagaatatatttacggggaagaaatgaagagcaaggcattcctcttgaatatttagagaagcttcattataaacatgaaagctggctcctgca

SEQ ID NO: 453543 - DNA, 120 bp, Artificial Sequence
  ENSG00000156136_7 (sequence is synthesized)
taggacactgaaaaccaacttcgattatcttcaagaggtgcctatcttaacactggatgttaatgaagactttaaagacaaatatgaaagtctggttgaaaaggtcaaagagtttttgag

SEQ ID NO: 453544 - DNA, 120 bp, Artificial Sequence
  ENSG00000156136_8 (sequence is synthesized)
tactttgtgatcttgctgaagactacaggcagccaaatggttccagatacttcagctttgtgtatcttcgtaacttcatattaatataagtttctttagaaaacccaagtttttaatcgt

SEQ ID NO: 453545 - DNA, 120 bp, Artificial Sequence
  ENSG00000156136_9 (sequence is synthesized)
ttttgttttaaggaaaaaagatttttaaaatgaatcttatgcaaaactttttgaccagtttcttttcttttgttttttttttaaaaaagacatttaaagacaaagacattatttctcata

SEQ ID NO: 453546 - DNA, 120 bp, Artificial Sequence
  ENSG00000156136_10 (sequence is synthesized)
ggttggcttttttccctggtgcctctcacttcgttggtgaccagtttcttaaactgaaagctttaatgttacatagtaaatggtagtgtgtcctgtgtaaattagtgtacctattaaaag

SEQ ID NO: 453547 - DNA, 120 bp, Artificial Sequence
  ENSG00000156136_11 (sequence is synthesized)
ttgcaaagtggaattaaaggaatccctagaataaggattctgaagttttattttaaattattatcttcttaacagtttagtcccacctcttacttcctgcctcagtctgctttctctact

SEQ ID NO: 453548 - DNA, 120 bp, Artificial Sequence
  ENSG00000156136_12 (sequence is synthesized)
gtctggattaattaggcagcctgctataaagttaaagtcacacatttctattttgcaaacactgtgattactctttgctttgtagtttgctttgctttgtagggttctgcttttaagttt

SEQ ID NO: 453549 - DNA, 120 bp, Artificial Sequence
  ENSG00000156136_13 (sequence is synthesized)
ttctctttttcagacaaattactgataaaaatgatattgctctatatgtaatatatcctgaaagcattattttttgttgaataggaaataaaattaatgaagacagaggctagaaagcat

SEQ ID NO: 453550 - DNA, 120 bp, Artificial Sequence
  ENSG00000156136_14 (sequence is synthesized)
ccattaattaatgagacacacttaactacttatctctaaaccatctatgtgaatatttgtaaaaataatgaatggactcatcttagttctgtatataaatatattttctttctagtttgt

SEQ ID NO: 453551 - DNA, 120 bp, Artificial Sequence
  ENSG00000156136_15 (sequence is synthesized)
ttagttaaggtgtgcagtgtttttcctgtgtattaaacctttccattttacgttttagaaaattttatgtattttaaaataaggggaagagtcattttcacttttaaactactatttttc

SEQ ID NO: 453552 - DNA, 120 bp, Artificial Sequence
  ENSG00000156136_16 (sequence is synthesized)
tttccaagtcatttttgtttttggtttcttattcaaagatgataatttagtggattaaccagtccagacgcactgatctttgcaaaggagacttaatttcaaatctgtaattaccataca

SEQ ID NO: 453553 - DNA, 120 bp, Artificial Sequence
  ENSG00000156136_17 (sequence is synthesized)
taaactgtctcattatacgtatgcatttttttagtttgtttttgtttggtataaattaatttgttaattaaatatttcttaagtataaaccttatgaactacagtggagctacactcatt

SEQ ID NO: 453554 - DNA, 120 bp, Artificial Sequence
  ENSG00000156136_18 (sequence is synthesized)
tatgaactacagtggagctacactcattgaaatgtaatttcagttctaaaaagatgtaataatcattttagaattaaaatttattctacttttaaataaattatgaatattaaaggtgaa

SEQ ID NO: 453555 - DNA, 120 bp, Artificial Sequence
  ENSG00000156136_19 (sequence is synthesized)
taagtggagacatatttcagtgatttttagtaacctttaaaaatgtataatgacttttaaaatttgtagaattgaaaagacgctaataaaaatttattatttatttgtcatgactcaaaa

SEQ ID NO: 453556 - DNA, 120 bp, Artificial Sequence
  ENSG00000156136_20 (sequence is synthesized)
atcggtaaggagcctccggaaatgtgggacgcaaggctggggtgtcgcggcagtggctgaagcttcccttcgccgcatctctctgcagcaactcgctgcagggaagtcaacatttgtgaa

SEQ ID NO: 453557 - DNA, 120 bp, Artificial Sequence
  ENSG00000156136_21 (sequence is synthesized)
gaggacaatcagaggcgatgtggaaacttctgtcttgtaatcacaggagtgaaggtgtcgggcaggctgagttaacagctgaacagaaacctacctacccaacgtgctaacttctataca

SEQ ID NO: 453558 - DNA, 120 bp, Artificial Sequence
  ENSG00000156136_22 (sequence is synthesized)
atctgactacctaaattcccatcccagtttcacttactgactttgacacttggaacaagcagcctctcagtgcctgttttcccactggcaggtcaggatctggcttagcggcgccgcgag

SEQ ID NO: 453559 - DNA, 120 bp, Artificial Sequence
  ENSG00000156140_0 (sequence is synthesized)
ctctttctcccgctcccgctcgctcgtctctctcgctaatacttccccctgctgtgctccggggaacccaagcattctccgcgctaaccttagggaccaatggtgctcgaaaagcctcga

SEQ ID NO: 453560 - DNA, 120 bp, Artificial Sequence
  ENSG00000156140_1 (sequence is synthesized)
aaaagctgctttgggcagagatagttggaaagcccctcgtcccttccccctctcccaggcttagcctgtgcccgcttacagcaccttctcgctcctgcacactctgtgttgggaggacgg

SEQ ID NO: 453561 - DNA, 120 bp, Artificial Sequence
  ENSG00000156140_2 (sequence is synthesized)
ggtgagaaggtgaagtggaaaaaactgcagagcagagggggccagtctcagagctcaaatttcattttcattgaagcaaagcacagaagatcatttttttctatttcgcattttttccct

SEQ ID NO: 453562 - DNA, 120 bp, Artificial Sequence
  ENSG00000156140_3 (sequence is synthesized)
tttcctttttttcttaaagaaacttattttgggcggggggggtgggtttgctctgggcatttgctttgcccagtagttggaaagtgaactcgactcgtgatggttctcctgtcactttgg

SEQ ID NO: 453563 - DNA, 120 bp, Artificial Sequence
  ENSG00000156140_4 (sequence is synthesized)
ttgatagcagccgctctggtagaggttaggacttcagctgatggacaagctggtaatgaagaaatggtgcaaatagatttaccaataaagagatatagagagtatgagctggtgactcca

SEQ ID NO: 453564 - DNA, 120 bp, Artificial Sequence
  ENSG00000156140_5 (sequence is synthesized)
gtcagcacaaatctagaaggacgctatctctcccatactctttctgcgagtcacaaaaagaggtcagcgagggacgtgtcttccaaccctgagcagttgttctttaacatcacggcattt

SEQ ID NO: 453565 - DNA, 120 bp, Artificial Sequence
  ENSG00000156140_6 (sequence is synthesized)
ggaaaagattttcatctgcgactaaagcccaacactcaactagtagctcctggggctgttgtggagtggcatgagacatctctggtgcctgggaatataaccgatcccattaacaaccat

SEQ ID NO: 453566 - DNA, 120 bp, Artificial Sequence
  ENSG00000156140_7 (sequence is synthesized)
caaccaggaagtgctacgtatagaatccggagaacagagcctttgcagactaactgtgcttatgttggtgacatcgtggacattccaggaacctctgttgccatcagcaactgtgatggt

SEQ ID NO: 453567 - DNA, 120 bp, Artificial Sequence
  ENSG00000156140_8 (sequence is synthesized)
ctggctggaatgataaaaagtgataatgaagagtatttcattgaacccttggaaagaggtaaacagatggaggaagaaaaaggaaggattcatgttgtctacaagagatcagctgtagaa

SEQ ID NO: 453568 - DNA, 120 bp, Artificial Sequence
  ENSG00000156140_9 (sequence is synthesized)
caggctcccatagacatgtccaaagacttccactacagagagtcggacctggaaggccttgatgatctaggtactgtttatggcaacatccaccagcagctgaatgaaacaatgagacgc

SEQ ID NO: 453569 - DNA, 120 bp, Artificial Sequence
  ENSG00000156140_10 (sequence is synthesized)
cgcagacacgcgggagaaaacgattacaatatcgaggtactgctgggagtggatgactctgtggtccgtttccatggcaaagagcacgtccaaaactacctcctgaccctaatgaacatt

SEQ ID NO: 453570 - DNA, 120 bp, Artificial Sequence
  ENSG00000156140_11 (sequence is synthesized)
gtgaatgaaatttaccatgatgagtccctcggagtgcatataaatgtggtcctggtgcgcatgataatgctgggatatgcaaagtccatcagcctcatagaaaggggaaacccatccaga

SEQ ID NO: 453571 - DNA, 120 bp, Artificial Sequence
  ENSG00000156140_12 (sequence is synthesized)
agcttggagaatgtgtgtcgctgggcgtcccaacagcaaagatctgatctcaaccactctgaacaccatgaccatgcaatttttttaaccaggcaagactttggacctgctggaatgcaa

SEQ ID NO: 453572 - DNA, 120 bp, Artificial Sequence
  ENSG00000156140_13 (sequence is synthesized)
ggatatgctccagtcaccggcatgtgtcatccagtgagaagttgtaccctgaatcatgaggatggtttttcatctgcttttgtagtagcccatgaaacgggccatgtgttgggaatggag

SEQ ID NO: 453573 - DNA, 120 bp, Artificial Sequence
  ENSG00000156140_14 (sequence is synthesized)
catgatggacaaggcaacaggtgtggtgatgagactgctatgggaagtgtcatggctcccttggtacaagcagcattccatcgttaccactggtcccgatgcagtggtcaagaactgaaa

SEQ ID NO: 453574 - DNA, 120 bp, Artificial Sequence
  ENSG00000156140_15 (sequence is synthesized)
agatatatccattcctatgactgtctccttgatgacccttttgatcatgattggcctaaactcccagaacttcctggaatcaattattctatggatgagcaatgtcgttttgattttggt

SEQ ID NO: 453575 - DNA, 120 bp, Artificial Sequence
  ENSG00000156140_16 (sequence is synthesized)
gttggctataaaatgtgcaccgcgttccgaacctttgacccatgtaaacagctgtggtgtagccatcctgataatccctacttttgtaagactaaaaagggacctccacttgatgggact

SEQ ID NO: 453576 - DNA, 120 bp, Artificial Sequence
  ENSG00000156140_17 (sequence is synthesized)
gaatgtgctgctggaaaatggtgctataagggtcattgcatgtggaagaatgctaatcagcaaaaacaagatggcaattgggggtcatggactaaatttggctcctgttctcggacatgt

SEQ ID NO: 453577 - DNA, 120 bp, Artificial Sequence
  ENSG00000156140_18 (sequence is synthesized)
ggaactggtgttcgtttcagaacacgccagtgcaataatcccatgcccatcaatggtggtcaggattgtcctggtgttaattttgagtaccagctttgtaacacagaagaatgccaaaaa

SEQ ID NO: 453578 - DNA, 120 bp, Artificial Sequence
  ENSG00000156140_19 (sequence is synthesized)
cactttgaggacttcagagcacagcagtgtcagcagcgaaactcccactttgaataccagaataccaaacaccactggttgccatatgaacatcctgaccccaagaaaagatgccacctt

SEQ ID NO: 453579 - DNA, 120 bp, Artificial Sequence
  ENSG00000156140_20 (sequence is synthesized)
tactgtcagtccaaggagactggagatgttgcttacatgaaacaactggtgcatgatggaacgcactgttcttacaaagatccatatagcatatgtgtgcgaggagagtgtgtgaaagtg

SEQ ID NO: 453580 - DNA, 120 bp, Artificial Sequence
  ENSG00000156140_21 (sequence is synthesized)
ggctgtgataaagaaattggttctaataaggttgaggataagtgtggtgtctgtggaggagataattcccactgccgaaccgtgaaggggacatttaccagaactcccaggaagcttggg

SEQ ID NO: 453581 - DNA, 120 bp, Artificial Sequence
  ENSG00000156140_22 (sequence is synthesized)
taccttaagatgtttgatataccccctggggctagacatgtgttaatccaagaagacgaggcttctcctcatattcttgctattaagaaccaggctacaggccattatattttaaatggc

SEQ ID NO: 453582 - DNA, 120 bp, Artificial Sequence
  ENSG00000156140_23 (sequence is synthesized)
aaaggggaggaagccaagtcgcggaccttcatagatcttggtgtggagtgggattataacattgaagatgacattgaaagtcttcacaccgatggacctttacatgatcctgttattgtt

SEQ ID NO: 453583 - DNA, 120 bp, Artificial Sequence
  ENSG00000156140_24 (sequence is synthesized)
ttgattatacctcaagaaaatgatacccgctctagcctgacatataagtacatcatccatgaagactctgtacctacaatcaacagcaacaatgtcatccaggaagaattagatactttt

SEQ ID NO: 453584 - DNA, 120 bp, Artificial Sequence
  ENSG00000156140_25 (sequence is synthesized)
gagtgggctttgaagagctggtctcagtgttccaaaccctgtggtggaggtttccagtacactaaatatggatgccgtaggaaaagtgataataaaatggtccatcgcagcttctgtgag

SEQ ID NO: 453585 - DNA, 120 bp, Artificial Sequence
  ENSG00000156140_26 (sequence is synthesized)
acaaaaagccgaaacctattagacgaatgtgcaatattcaagagtgtacacatccactctgggtagcagaagaatgggaacactgcaccaaaacctgtggaagttctggctatcagcttc

SEQ ID NO: 453586 - DNA, 120 bp, Artificial Sequence
  ENSG00000156140_27 (sequence is synthesized)
gcactgtacgctgccttcagccactccttgatggcaccaaccgctctgtgcacagcaaatactgcatgggtgaccgtcccgagagccgccggccctgtaacagagtgccctgccctgcac

SEQ ID NO: 453587 - DNA, 120 bp, Artificial Sequence
  ENSG00000156140_28 (sequence is synthesized)
agtggaaaacaggaccctggagtgagtgttcagtgacctgcggtgaaggaacggaggtgaggcaggtcctctgcagggctggggaccactgtgatggtgaaaagcctgagtcggtcagag

SEQ ID NO: 453588 - DNA, 120 bp, Artificial Sequence
  ENSG00000156140_29 (sequence is synthesized)
cctgtcaactgcctccttgtaatgatgaaccatgtttgggagacaagtccatattctgtcaaatggaagtgttggcacgatactgctccataccaggttataacaagttatgttgtgagt

SEQ ID NO: 453589 - DNA, 120 bp, Artificial Sequence
  ENSG00000156140_30 (sequence is synthesized)
cctgcagcaagcgcagtagcaccctgccaccaccataccttctagaagctgctgaaactcatgatgatgtcatctctaaccctagtgacctccctagatctctagtgatgcctacatctt

SEQ ID NO: 453590 - DNA, 120 bp, Artificial Sequence
  ENSG00000156140_31 (sequence is synthesized)
tggttccttatcattcagagacccctgcaaagaagatgtctttgagtagcatctcttcagtgggaggtccaaatgcatatgctgctttcaggccaaacagtaaacctgatggtgctaatt

SEQ ID NO: 453591 - DNA, 120 bp, Artificial Sequence
  ENSG00000156140_32 (sequence is synthesized)
tacgccagaggagtgctcagcaagcaggaagtaagactgtgagactggtcaccgtaccatcctccccacccaccaagagggtccacctcagttcagcttcacaaatggctgctgcttcct

SEQ ID NO: 453592 - DNA, 120 bp, Artificial Sequence
  ENSG00000156140_33 (sequence is synthesized)
tctttgcagccagtgattcaataggtgcttcttctcaggcaagaacctcaaagaaagatggaaagatcattgacaacagacgtccgacaagatcatccaccttagaaagatgagaaagtg

SEQ ID NO: 453593 - DNA, 120 bp, Artificial Sequence
  ENSG00000156140_34 (sequence is synthesized)
aaccaaaaaggctagaaaccagaggaaaacctggacaacctctctcttcccatggtgcatatgcttgtttaaagtggaaatctctatagatcgtcagctcattttatctgtaattggaag

SEQ ID NO: 453594 - DNA, 120 bp, Artificial Sequence
  ENSG00000156140_35 (sequence is synthesized)
aacagaaagtgctggctcactttctagttgctttcatcctccttttgttctgcattgactcatttaccagaattcattggaagaaatcaccaaagattattacaaaagaaaaatatgttg

SEQ ID NO: 453595 - DNA, 120 bp, Artificial Sequence
  ENSG00000156140_36 (sequence is synthesized)
ctaagattgtgttggtcgctctctgaagcagaaaagggactggaaccaattgtgcatatcagctgactttttgtttgttttagaaaagttacagtaaaaattaaaaagagataccaatgg

SEQ ID NO: 453596 - DNA, 120 bp, Artificial Sequence
  ENSG00000156140_37 (sequence is synthesized)
tttacactttaacaagaaattttggatatggaacaaagaattcttagacttgtattcctatttatctatattagaaatattgtatgagcaaatttgcagctgttgtgtaaatactgtata

SEQ ID NO: 453597 - DNA, 120 bp, Artificial Sequence
  ENSG00000156140_38 (sequence is synthesized)
ttgcaaaaatcagtattattttaagagatgtgttctcaaatgattgtttactatattacatttctggatgttctaggtgcctgtcgttgagtattgccttgtttgacattctataggtta

SEQ ID NO: 453598 - DNA, 120 bp, Artificial Sequence
  ENSG00000156140_39 (sequence is synthesized)
attttcaaagcagagtattacaaaagagaagttagaattacagctactgacaatataaagggttttgttgaatcaacaatgtgatacgtaaattatagaaaaagaaaagaaacacaaaag

SEQ ID NO: 453599 - DNA, 120 bp, Artificial Sequence
  ENSG00000156140_40 (sequence is synthesized)
ctatagatatacagatatcagcttacctattgccttctatacttataatttaaaggattggtgtcttagtacacttgtggtcacagggatcaacgaatagtaaataatgaactcgtgcaa

SEQ ID NO: 453600 - DNA, 120 bp, Artificial Sequence
  ENSG00000156140_41 (sequence is synthesized)
gacaaaactgaaaccctctttccaggacctcagtaggcaccgttgaggtgtcctttgtttttgtgtgtgtgtgttcttttttaattttcgcattgttgacagatacaaacagttatactc

SEQ ID NO: 453601 - DNA, 120 bp, Artificial Sequence
  ENSG00000156140_42 (sequence is synthesized)
aatgtactgtaataatcgcaaaggaaaaagttttgggataacttatttgtatgttggtagctgagaaaaatatcatcagtctagaattgatatttgagtatagtagagctttggggcttt

SEQ ID NO: 453602 - DNA, 120 bp, Artificial Sequence
  ENSG00000156140_43 (sequence is synthesized)
gaaggcaggttcaagaaagcatatgtcgatggttgagatatttattttccatatggttcatgttcaaatgttcacaaccacaatgcatctgactgcaataatgtgctaataatttatgtc

SEQ ID NO: 453603 - DNA, 120 bp, Artificial Sequence
  ENSG00000156140_44 (sequence is synthesized)
agtagtcaccttgctcacagcaaagccagaaatgctctctccagggagtagatgtaaagtacttgtacatagaattcagaactgaagatatttattaaaagttgattttttttcttgata

SEQ ID NO: 453604 - DNA, 120 bp, Artificial Sequence
  ENSG00000156140_45 (sequence is synthesized)
gtatttttatgtactaaatatttacactaatatcaattacatattttggtaaactagagagacataattagagatgcatgctttgttctgtgcatagagacctttaagcaaactactaca

SEQ ID NO: 453605 - DNA, 120 bp, Artificial Sequence
  ENSG00000156140_46 (sequence is synthesized)
gccaactcaaaagctaaaactgaacaaatttgatgttatgcaaacatcttgcatttttagtagttgatattaagttgatgacttgtttcccttcaaggaaacattaaattgtatggactc

SEQ ID NO: 453606 - DNA, 120 bp, Artificial Sequence
  ENSG00000156140_47 (sequence is synthesized)
agctagctgttcaatgaaattgtgaattagaaacatttttaaaagtttttgaaagagataagtgcatcatgaattacatgtacatgagaggagatagtgatatcagcataatgattttga

SEQ ID NO: 453607 - DNA, 120 bp, Artificial Sequence
  ENSG00000156140_48 (sequence is synthesized)
ggtcagtacctgagctgtctaaaaatatattatacaaactaaaatgtagatgaattaacctctcaaagcacagaatgtgcaagaacttttgcattttaatcgttgtaaactaacagctta

SEQ ID NO: 453608 - DNA, 120 bp, Artificial Sequence
  ENSG00000156140_49 (sequence is synthesized)
aactattgactctatacctctaaagaattgctgctactttgtgcaagaactttgaaggtcaaattaggcaaattccagatagtaaaacaatccctaagccttaagtcttttttttttcct

SEQ ID NO: 453609 - DNA, 120 bp, Artificial Sequence
  ENSG00000156140_50 (sequence is synthesized)
aaaaattcccatagaataaaattctctctagtttacttgtgtgtgcatacatctcatccacaggggaagataaagatggtcacacaaacagtttccataaagatgtacatattcattata

SEQ ID NO: 453610 - DNA, 120 bp, Artificial Sequence
  ENSG00000156140_51 (sequence is synthesized)
cttctgacctttgggctttcttttctactaagctaaaaattcctttttatcaaagtgtacactactgatgctgtttgttgtactgagagcacgtaccaataaaaatgttaacaaaatata

SEQ ID NO: 453611 - DNA, 120 bp, Artificial Sequence
  ENSG00000156140_52 (sequence is synthesized)
cctagcccaggtgccaaacatgtgcatgagaatccactaaatgttcctagacctcagccattcaagtcacttccagctctttagatctgtccagctagtcttcagacattgtggagcaaa

SEQ ID NO: 453612 - DNA, 120 bp, Artificial Sequence
  ENSG00000156140_53 (sequence is synthesized)
gagaagccatctgcattgtgcctctctgaaatcctgacccatagaacccagagaaaacatgatggctggagttgcagcagtcatctagtgatcatgaaggaaaggccttgagaattgccc

SEQ ID NO: 453613 - DNA, 120 bp, Artificial Sequence
  ENSG00000156140_54 (sequence is synthesized)
tcgtgccagcctcaacgtcattaagttgtggaaccgatatcagtagccacttactggacttcttgtcaaggcttcccttttaatgttaatattgttggagagcaccagcagatggttctg

SEQ ID NO: 453614 - DNA, 120 bp, Artificial Sequence
  ENSG00000156140_55 (sequence is synthesized)
tgtggggaaaggctgtgaatatttaagctggtagcaacaacattgatgtgactgatgaataaaccaacaccagctctgtttagccttttccccatgacaaatgtgcagccttggaagaga

SEQ ID NO: 453615 - DNA, 120 bp, Artificial Sequence
  ENSG00000156140_56 (sequence is synthesized)
atggttactcacagtttaagctttgccagcacgaaccccatggactcttgatccctatgtggtaacttaggaaacttggtgcttataggagtaagttctcctgggtttctaagaataagg

SEQ ID NO: 453616 - DNA, 120 bp, Artificial Sequence
  ENSG00000156150_0 (sequence is synthesized)
ggcagcgcgagccccggagccccggaggcctgtgcgccctgagccggcatggaccccgagcactgcgcgcctttccgcgtggggcctgcacccggcccctatgtggcctcgggggacgag

SEQ ID NO: 453617 - DNA, 80 bp, Artificial Sequence
  ENSG00000156150_1 (sequence is synthesized)
ctgcgcctcacctgcaccccgcgccgccccgcggcccgcggctgacccgctttccggcctgcgggcccctggagccctac

SEQ ID NO: 453618 - DNA, 120 bp, Artificial Sequence
  ENSG00000156150_2 (sequence is synthesized)
ctcccagagccggccaagccgcccgccaagtacctgcaggacctcgggcccggcccggccctcaacggcggccacttctacgagggccccgcggaagctgaggagaagacctccaaagct

SEQ ID NO: 453619 - DNA, 120 bp, Artificial Sequence
  ENSG00000156150_3 (sequence is synthesized)
gccagcttcccccagctgcccttggactgccgagggggccccagagacgggccctctaacttgcaaggctccccaggcccctgcctggccagcctgcatcttcctctttccccgggactc

SEQ ID NO: 453620 - DNA, 120 bp, Artificial Sequence
  ENSG00000156150_4 (sequence is synthesized)
cctgactccatggagttggccaagaacaagagcaagaagcgtcgtaaccgcacgaccttcagcacattccagctggaggagctggagaaggtcttccagaaaacccactatcctgatgtg

SEQ ID NO: 453621 - DNA, 120 bp, Artificial Sequence
  ENSG00000156150_5 (sequence is synthesized)
tatgcccgggagcagctggccctgcgcacagacctgactgaggcccgggtacaggtctggttccagaaccgcagagccaagtggcggaagcgcgagcgttatgggaagatccaggagggg

SEQ ID NO: 453622 - DNA, 120 bp, Artificial Sequence
  ENSG00000156150_6 (sequence is synthesized)
cggaaccccttcacggctgcctatgacatctctgtgctgccccgtactgacagccaccctcagctgcagaactccctgtgggccagtccaggatctgggagccctggaggcccctgcctt

SEQ ID NO: 453623 - DNA, 120 bp, Artificial Sequence
  ENSG00000156150_7 (sequence is synthesized)
gtgtctccagagggcatcccctccccatgcatgtctccatattcccacccccatgggagtgtggctggcttcatgggggtgccagccccttctgcggctcaccctggcatctactccatc

SEQ ID NO: 453624 - DNA, 120 bp, Artificial Sequence
  ENSG00000156150_8 (sequence is synthesized)
tgagccttcctcagatggtgactataagtctccaagcctcgtctcgctcagggtaaagcccaaggagccacccggccttctgaactggaccacgtgatcggttgcatggacctgcagaat

SEQ ID NO: 453625 - DNA, 120 bp, Artificial Sequence
  ENSG00000156150_9 (sequence is synthesized)
gagctgcccacctctttttccattcccagtcgctcccagcccacctctgcctccaagccccagatggttctggaggctgcgagagcagctggcactgtcagcccccagcagggaacacgt

SEQ ID NO: 453626 - DNA, 120 bp, Artificial Sequence
  ENSG00000156150_10 (sequence is synthesized)
tacagggtcttttctcttagaacaaggtggggctgcctaggagaaggggcttcgaagcagccaggactcttcctaccacaaactgagtcccctcacctgaactctgggctggaggcaggg

SEQ ID NO: 453627 - DNA, 120 bp, Artificial Sequence
  ENSG00000156150_11 (sequence is synthesized)
agacactgccctgcttcctccagactttgtccaagtccattgtcatctctccagctaagacagcttacttggctcatcgttcagggaacccaggaaaatgggaggagaacgccgcgtgga

SEQ ID NO: 453628 - DNA, 120 bp, Artificial Sequence
  ENSG00000156150_12 (sequence is synthesized)
ctgaagctcttcatgatgagatggaaaccaaaagggagtctcccatgatggggtggagtcagccctgcttcccctccccaccagcagggggcgcactggtgtctgacactaaggagggtg

SEQ ID NO: 453629 - DNA, 120 bp, Artificial Sequence
  ENSG00000156150_13 (sequence is synthesized)
taaaggccaaggtcagcatagactgaggcacactggctcctcagctccagccaccctcactcctgccatgtgcctgcactcccagcatgccatgcagtcatcttcccctccaagggggca

SEQ ID NO: 453630 - DNA, 120 bp, Artificial Sequence
  ENSG00000156150_14 (sequence is synthesized)
gaaattccaccagaaatcaccacatatttggaatctcttccacgggaccagcccagagctatgccatggaaatgatattggatgttggtaagaataaaacagatttctacagactgagat

SEQ ID NO: 453631 - DNA, 120 bp, Artificial Sequence
  ENSG00000156150_15 (sequence is synthesized)
cctgatccccatttttgtacagacacttttgtgttttttttgtttaaaaaaaaaaaaaaggagagagagagaaaaaaaaggctgcccagcattctaataaaggtggtggtgttttttata

SEQ ID NO: 453632 - DNA, 120 bp, Artificial Sequence
  ENSG00000156162_0 (sequence is synthesized)
aggagcgggcccccggaggccgaggggttcggcgacgcggagggagggagagtctgggccgcgcgggagccgcagggcgccctagccttcgcagaaacgatggcggaggaagaaggacca

SEQ ID NO: 453633 - DNA, 120 bp, Artificial Sequence
  ENSG00000156162_1 (sequence is synthesized)
cctgtagagctgcgccaaagaaaaaagccaaagtcttcagaaaataaggaatctgccaaagaagagaaaatcagtgacattccaattcctgaaagagctccaaaacatgtattatttcaa

SEQ ID NO: 453634 - DNA, 120 bp, Artificial Sequence
  ENSG00000156162_2 (sequence is synthesized)
cgctttgcaaagattttcattggctgtcttgcagcggttactagtggtatgatgtatgctctctacttatcagcataccatgaacggaaattctggttttccaacaggcaggagcttgaa

SEQ ID NO: 453635 - DNA, 120 bp, Artificial Sequence
  ENSG00000156162_3 (sequence is synthesized)
cgggaaatcacgtttcagggtgacagtgccatttattactcctattataaagatatgttaaaggcaccttcatttgaaagaggtgtttacgaactgacacacaataacaaaactgtatct

SEQ ID NO: 453636 - DNA, 120 bp, Artificial Sequence
  ENSG00000156162_4 (sequence is synthesized)
ctgaagactataaatgcagtgcagcaaatgtctctgtatccggaacttattgctagcattttatatcaagccactggtagcaatgagattattgagccagtgtatttctatattggcatt

SEQ ID NO: 453637 - DNA, 120 bp, Artificial Sequence
  ENSG00000156162_5 (sequence is synthesized)
gtttttggattgcaaggaatatatgttactgctttatttgttacaagttggcttatgagtggaacatggctagcaggaatgcttactgttgcgtggttcgttattaacagggtagataca

SEQ ID NO: 453638 - DNA, 120 bp, Artificial Sequence
  ENSG00000156162_6 (sequence is synthesized)
acaagaattgaatactccattcctttaagagaaaactgggcactaccatattttgcatgccaaattgctgcacttacaggctatttaaaaagcaacttaaatacttatggagagaggttt

SEQ ID NO: 453639 - DNA, 120 bp, Artificial Sequence
  ENSG00000156162_7 (sequence is synthesized)
tgctacttgttgatgagtgcttcaacttacacatttatgatgatgtgggagtatagccactatctcctgtttcttcaagcaatatctctattcctgctagataccttttcagtggagcaa

SEQ ID NO: 453640 - DNA, 120 bp, Artificial Sequence
  ENSG00000156162_8 (sequence is synthesized)
agtgacaaggtttatgaagtttataaaatctacatattttccctctttctgggatatttactacagtttgagaatccagctttgttggtatctcctttattaagtttagtagcagcctta

SEQ ID NO: 453641 - DNA, 120 bp, Artificial Sequence
  ENSG00000156162_9 (sequence is synthesized)
atgcttgctaagtgccttcagctgaatgtgaagaaaggaagttttgtagctaaaataataaaagtgattaatttttacttggtgtgtactctgacaataacattgaatattataatgaag

SEQ ID NO: 453642 - DNA, 120 bp, Artificial Sequence
  ENSG00000156162_10 (sequence is synthesized)
atgtttgtcccacacaaagaaaatgggcacatgctgaaattccttgaagtaaaatttggactaaatatgaccaagaattttacaatgaattggctcctctgtcaagaatccctgcaggca

SEQ ID NO: 453643 - DNA, 120 bp, Artificial Sequence
  ENSG00000156162_11 (sequence is synthesized)
ccatctcaagatttttttctgcgattgacacagtcttctttattacctttctacattctagtgttaattatttgttttctttctatgttgcaagttatttttaggaggattaatggtaag

SEQ ID NO: 453644 - DNA, 120 bp, Artificial Sequence
  ENSG00000156162_12 (sequence is synthesized)
tccctgaaggaaactgttactcttgaagatggacgaattggagaaagaccagaaataatttatcatgtaattcacactattttattgggttctcttgcaatggttatagaaggcttgaag

SEQ ID NO: 453645 - DNA, 120 bp, Artificial Sequence
  ENSG00000156162_13 (sequence is synthesized)
tacatctggattccttatgtgtgcatgttagcagcatttggtgtatgttctcccgaactttggatgacacttttcaagtggcttcgattaagaactgtacacccaatattgttggctctt

SEQ ID NO: 453646 - DNA, 120 bp, Artificial Sequence
  ENSG00000156162_14 (sequence is synthesized)
attctgagcatggccgtgcctactataataggtctcagcttatggaaagagttttttcccagattaatgacagaattaatggaactacaggaattctatgacccagatacagtggaactt

SEQ ID NO: 453647 - DNA, 120 bp, Artificial Sequence
  ENSG00000156162_15 (sequence is synthesized)
atgacctggataaaaaggcaagctccagttgcagctgtgtttgcagggagtccacagttaatgggtgcgattaaattatgcactggatggatggtgacaagtttgcctctttacaatgat

SEQ ID NO: 453648 - DNA, 120 bp, Artificial Sequence
  ENSG00000156162_16 (sequence is synthesized)
gatgatcttctcaagagaaatgaaaatatctaccaaatctattcaaagcgatctgctgaggatatttataaaatactgacatcttacaaagctaattacctaattgtagaggatgctatc

SEQ ID NO: 453649 - DNA, 120 bp, Artificial Sequence
  ENSG00000156162_17 (sequence is synthesized)
tgcaatgaggtgggacccatgagaggctgtagggttaaagatttattagacattgcaaatggccacatggtttgtgaagaaggtgacaagctaacctactcaaaatatgggcgattttgt

SEQ ID NO: 453650 - DNA, 120 bp, Artificial Sequence
  ENSG00000156162_18 (sequence is synthesized)
catgaggtcaaaattaactattctccatatgtgaattatttcactagagtatactggaacagatcctactttgtatataaaatcaacactgtgatatccttccagtcttgaaaaataaca

SEQ ID NO: 453651 - DNA, 120 bp, Artificial Sequence
  ENSG00000156162_19 (sequence is synthesized)
gagccttcatttcaaagactacctgaagtaaaatgcagttttcttctacctactcggtgtcttttgcagatcagagtatggacatttgaaatattgctgcttctttcccccttctgctgt

SEQ ID NO: 453652 - DNA, 120 bp, Artificial Sequence
  ENSG00000156162_20 (sequence is synthesized)
taactggatccagagttctgtgggaaatagaagatcaagcattactgtcctttgattaaatgtgatatctaccactctgcaatattccagacaggtgtcttccttaccgttacatggtct

SEQ ID NO: 453653 - DNA, 120 bp, Artificial Sequence
  ENSG00000156162_21 (sequence is synthesized)
ttaacacttttactgattgcaatattttccccataaaatcttcattctattataatattgatcttgaatttgaatatgtgcaaggtcagatacatttctcaaacataacatttaataaat

SEQ ID NO: 453654 - DNA, 120 bp, Artificial Sequence
  ENSG00000156162_22 (sequence is synthesized)
aatgtgatataattatttaatagaaagaataattccgaccttcaagcaagtttctgaaggtattttatgatgtataacaactgaagttttacaataaaaactaatttaaatgttagctga

SEQ ID NO: 453655 - DNA, 120 bp, Artificial Sequence
  ENSG00000156162_23 (sequence is synthesized)
agatatgtggcatttaaattaaaatggaaattatataaaggaaagtgatttttaaggatatacataaagatatatttagaattttcatgatactgttctcctcatctactgcttatgtta

SEQ ID NO: 453656 - DNA, 120 bp, Artificial Sequence
  ENSG00000156162_24 (sequence is synthesized)
agtgagaactttcttagtaatacataatgcatgatgttactgcattttctaaatgactagtaagtgattagttttttcacttatgcctattaatttgataccaatttaatcatgataaaa

SEQ ID NO: 453657 - DNA, 120 bp, Artificial Sequence
  ENSG00000156162_25 (sequence is synthesized)
tggggcatacaatctattcacatgttttctactgaagtactaagtaaaaaaattaaatcattatcagaataaaaatatgtgttctaaaattagcaacaatttctggggatacatgcagat

SEQ ID NO: 453658 - DNA, 120 bp, Artificial Sequence
  ENSG00000156162_26 (sequence is synthesized)
gttgttaaacgtacctctgcatacagatatattataaaacacaagcaatgttatttatgaaactgtgatgcagtcttcaacatcaagaaaaaatgacaactataataaaatttacaacac

SEQ ID NO: 453659 - DNA, 120 bp, Artificial Sequence
  ENSG00000156162_27 (sequence is synthesized)
agtttcacagtctaaatgctatgttcctttaagtattttcatatttttaatcatttattaagagaaaattgtgaaaagttaatttggccttatagagagattcaggatagatgtagccta

SEQ ID NO: 453660 - DNA, 120 bp, Artificial Sequence
  ENSG00000156162_28 (sequence is synthesized)
tagatgtgtcattttaataagttgggatacatgtttagtttttccttatattcctgttcagtgaacagattttcataattctcacttgttaaagtgctgcaaaaattgcattttcagtac

SEQ ID NO: 453661 - DNA, 120 bp, Artificial Sequence
  ENSG00000156162_29 (sequence is synthesized)
tctaaattactacattagaagagagcatttctccattgtctttattttctgttatatatgtgttgtaaaagtacactacattagaagggagcttttccgttgtctttattttctgttata

SEQ ID NO: 453662 - DNA, 120 bp, Artificial Sequence
  ENSG00000156162_30 (sequence is synthesized)
catgtgttgttaaagtacatgcattcttagactaactctcagatgctttgctcttttggagctgaagaattgtttgatggtgatgtcatatatctgatagattagtttcagtggttctca

SEQ ID NO: 453663 - DNA, 120 bp, Artificial Sequence
  ENSG00000156162_31 (sequence is synthesized)
tttcacttttatacgtaatttcttaactatattaagatagttgcaggcagtgtacctcaggttgactctgtacatctgaatagtgagtcactagtattttgcttcaagccttctgaaaat

SEQ ID NO: 453664 - DNA, 120 bp, Artificial Sequence
  ENSG00000156162_32 (sequence is synthesized)
ataaccatagttacctaagcacacagtgaatagtcacatggtagtacttgtgattagagcatgtaaaacaatgtaattgaaaagtcagcttccatattttgtaggggaaatagaacaccc

SEQ ID NO: 453665 - DNA, 120 bp, Artificial Sequence
  ENSG00000156162_33 (sequence is synthesized)
tactttttatctagtgtgaaatatttaatcgaatttttgttgatttatattatgttacctgtgctgaattaggtttggtacttgtgttttgtttgacatattagtaagttgcttttgctt

SEQ ID NO: 453666 - DNA, 120 bp, Artificial Sequence
  ENSG00000156162_34 (sequence is synthesized)
ctttctgtcaacttattttttaaataaaattgatctggaaaaattgttaatgggatgttttaaataatgaatttttcatccagcatcagttgaaaaggaaaagaaagcttcattatggaa

SEQ ID NO: 453667 - DNA, 120 bp, Artificial Sequence
  ENSG00000156162_35 (sequence is synthesized)
atgacaatattgaatatgacagataagtttatttgcttctgttttaactgcagttaatagtactagacaactttaagtggaaagcatttagtttatttcttcacttatttgtagagtgaa

SEQ ID NO: 453668 - DNA, 120 bp, Artificial Sequence
  ENSG00000156162_36 (sequence is synthesized)
caaatgattcacaattctacaagtaattccacttaggtaacttacagttgttaggtttgacaataaagatctactatgagaggagaagaatttatgggttttgggtggaaggaatttctc

SEQ ID NO: 453669 - DNA, 120 bp, Artificial Sequence
  ENSG00000156162_37 (sequence is synthesized)
aaggaatttctcaaagaaataaaaaatgttctttgcccttgatactgcaaacccactgatacaagtgccttgaatttattattattattattttttatttttttgagatggagtttcact

SEQ ID NO: 453670 - DNA, 67 bp, Artificial Sequence
  ENSG00000156162_38 (sequence is synthesized)
cagatgatccactgcaagtctttgttaaaagtagagatggaggccaggcgcagtggctcactcctgt

SEQ ID NO: 453671 - DNA, 71 bp, Artificial Sequence
  ENSG00000156162_39 (sequence is synthesized)
gggcgcctgtagtcccagctactccgaggctgaagcaggagaatggcgtcaagcggcgaggcggagcttgc

SEQ ID NO: 453672 - DNA, 120 bp, Artificial Sequence
  ENSG00000156162_40 (sequence is synthesized)
tgggatctctagcctcctaagttaatttagcctcccaaatgccagacaaagaatctaacataaaatttaccttgaataagatatatgatattgattctgagctgctttgtattttttctg

SEQ ID NO: 453673 - DNA, 120 bp, Artificial Sequence
  ENSG00000156162_41 (sequence is synthesized)
actttggcatctgtatcttggtgctttctgttagactggtagagtttaagaacctaaggagtatgcattgtacttcagtgctaacttttttcttcatttactttctgtgtatataggcag

SEQ ID NO: 453674 - DNA, 120 bp, Artificial Sequence
  ENSG00000156162_42 (sequence is synthesized)
catattttttttgtagaacattaacccagattgctaatagcttcatgttacggcattcttccacacagtccagattgatttaaggaaaagcagaaatggaagtcaaagtgtgttataaat

SEQ ID NO: 453675 - DNA, 120 bp, Artificial Sequence
  ENSG00000156162_43 (sequence is synthesized)
tgagactgaaaaacatgctttaaaaaatagatttaatttcttacactgtgaatagccattgtattgttttgtttctgataaatcagttgttttgggcccctatttttgaactgttaaaaa

SEQ ID NO: 453676 - DNA, 120 bp, Artificial Sequence
  ENSG00000156162_44 (sequence is synthesized)
attttgatgcttttcgtggataaaagtagtgcctctctttatacaactgatggggttttaaaaagtgtaaattgccttttttgttaaacttattttaaatgctttagtatttaaagggtg

SEQ ID NO: 453677 - DNA, 120 bp, Artificial Sequence
  ENSG00000156162_45 (sequence is synthesized)
tatgttattaattaatctgcatatttgtaacgcaaataactacttcctgatttacatctcaatatattcttctttcatttgcccaatttaaaaaatacgtagtctctattgttgctgttt

SEQ ID NO: 453678 - DNA, 120 bp, Artificial Sequence
  ENSG00000156162_46 (sequence is synthesized)
actaatagttttagatcccaatgtgtattagaattatagctacaaaaagttgcaagtaaaatttagcaatttcctattcaaacaggatctcattagtatgttttttaatgtgtagaatta

SEQ ID NO: 453679 - DNA, 120 bp, Artificial Sequence
  ENSG00000156162_47 (sequence is synthesized)
acactttaaaataaacaggtgtgaaaattataaaggaatatatatgacaattattttctgtacattaatgtctaaacattatacttactttttcataataaaggaaattttggaaccaaa

SEQ ID NO: 453680 - DNA, 120 bp, Artificial Sequence
  ENSG00000156162_48 (sequence is synthesized)
ttgcacagacccctggtacagtgtgggaggtgacaacacaggatattaataccaggaggcaggaatcattgggaccgtcttggaggctggctaccacattcaattaactttgctattaat

SEQ ID NO: 453681 - DNA, 120 bp, Artificial Sequence
  ENSG00000156162_49 (sequence is synthesized)
ttcatgtaatccctatatctgtcttcatatttgaagaggaaaagatactttctcatgtaaacataatggttttaaagaataagactctcttatgctacttaaacaaaagaataagactct

SEQ ID NO: 453682 - DNA, 120 bp, Artificial Sequence
  ENSG00000156162_50 (sequence is synthesized)
ctttagagatcttagtgagaattgtaagaaataaaataaacagaagtctgactgccttatttgatgtcactgatgtatgttgtattgctggagtagaagttaaatagaaaaattgacctg

SEQ ID NO: 453683 - DNA, 120 bp, Artificial Sequence
  ENSG00000156162_51 (sequence is synthesized)
gtatattctactcaaatgtatcttttgacaattgaaatgttcttaatagctaagttttaaaaaatgcgtttgtttgctttttgtttatattttattggtatgtatcttgtactgcaaaat

SEQ ID NO: 453684 - DNA, 120 bp, Artificial Sequence
  ENSG00000156162_52 (sequence is synthesized)
acattttaatgccatgaaagaatatgctgtctctttattcatcagctttatagcttttatttatatatgacttcttagaaaagtataaaaagatattaaagtcattccattatattatga

SEQ ID NO: 453685 - DNA, 120 bp, Artificial Sequence
  ENSG00000156162_53 (sequence is synthesized)
ggcggcggccaggagctacagctgtgggctgcactcccggcgtggagtctccttcctgcccgcgcaggccccggcgccccagcgaaacgctccggccgctcccctctcccaacactctgg

SEQ ID NO: 453686 - DNA, 120 bp, Artificial Sequence
  ENSG00000156170_0 (sequence is synthesized)
gggcacgcagtgccggcgtcatggcggcctccgcgcacggctctgtctgggggccgttgcggcttggcatccccggcctgtgctgccgccggccgcctctgggtctgtacgcgcgcatgc

SEQ ID NO: 453687 - DNA, 120 bp, Artificial Sequence
  ENSG00000156170_1 (sequence is synthesized)
ggcggctgcccgggccggaggtgtctgggcggagcgtggctgcggccagcggaccgggcgcctggggcactgaccactactgcctggagctgctgcggaaacgggattatgaaggttatt

SEQ ID NO: 453688 - DNA, 120 bp, Artificial Sequence
  ENSG00000156170_2 (sequence is synthesized)
tatgctccctgctgctccctgcagaatcccgaagctctgtttttgcactgagggcctttaatgtggaactggctcaggttaaagactcagtctctgagaaaacaattggactgatgcgaa

SEQ ID NO: 453689 - DNA, 120 bp, Artificial Sequence
  ENSG00000156170_3 (sequence is synthesized)
tgcagttttggaaaaaaactgtggaagatatatactgtgacaatccaccacatcagcctgtggccattgaactatggaaggctgttaaaagacataatctgactaaaagatggcttatga

SEQ ID NO: 453690 - DNA, 120 bp, Artificial Sequence
  ENSG00000156170_4 (sequence is synthesized)
aaatcgtcgatgaaagagaaaaaaatctggatgacaaagcatatcgtaatatcaaggaactggaaaattatgctgaaaacacacagagctctcttctttacttaacactagaaatattgg

SEQ ID NO: 453691 - DNA, 120 bp, Artificial Sequence
  ENSG00000156170_5 (sequence is synthesized)
gtataaaggatcttcatgcagatcatgctgcaagtcatattggaaaagcacaaggcattgtcacttgcttgagagcaacaccatatcatgggagcagaagaaaggtgttccttcccatgg

SEQ ID NO: 453692 - DNA, 120 bp, Artificial Sequence
  ENSG00000156170_6 (sequence is synthesized)
atatttgtatgctgcatggtgtttcacaagaggactttctacggaggaaccaagataaaaatgtgagagatgtaatatatgacattgccagtcaagcacacttgcacctaaagcatgcta

SEQ ID NO: 453693 - DNA, 120 bp, Artificial Sequence
  ENSG00000156170_7 (sequence is synthesized)
tttacagcagaagaatacattacttccattatatttgtatattcagtcatggagaaaaacatattaaaataatttcatggcattgatgttaattctagtctattagttttataaaagtta

SEQ ID NO: 453694 - DNA, 120 bp, Artificial Sequence
  ENSG00000156170_8 (sequence is synthesized)
ggattcttatttaggaacaacaggaaatgactgttaaggagaaaatgaatttattgaatgggatgtcaagtagctcacaaaattgagaagttgccgtgggactagggtgccaagactgct

SEQ ID NO: 453695 - DNA, 120 bp, Artificial Sequence
  ENSG00000156170_9 (sequence is synthesized)
gagattctggcagaggcactgccattggcacccctggcccagacagtgtctgctgtgctgtccctggaagctggagctccaacagggaatattggtgtagctgtgcataggccataagcc

SEQ ID NO: 453696 - DNA, 120 bp, Artificial Sequence
  ENSG00000156170_10 (sequence is synthesized)
acacttgagccagtgggcagggagaaggaatgtcattctcccttcaccactggggaaggaaaggggaaagggctcaagttatcataggggcttacatgctgagcagctataacctaggtg

SEQ ID NO: 453697 - DNA, 120 bp, Artificial Sequence
  ENSG00000156170_11 (sequence is synthesized)
ttcagaacacctggaagatgcatttatttaggggtcacaaatagtgaaattaatatttgaggaatatcagtcacgtgttgtgggcttttatccttaacgtttaatttttacaatcttgtg

SEQ ID NO: 453698 - DNA, 120 bp, Artificial Sequence
  ENSG00000156170_12 (sequence is synthesized)
taaaaatttatccatgataataacataacttctttaaggttggagtggctggcaagagcagagccttaatttgactttagctctggctggtctggaagcttttacttttttgttaatccc

SEQ ID NO: 453699 - DNA, 120 bp, Artificial Sequence
  ENSG00000156170_13 (sequence is synthesized)
acttcctcactctgtcattcagcattatcatgatcgtgaacaaaattgtactgagaaagtttgtataagtgatatgaacggtattgtattgaacatccattaaagggttgctacacttta

SEQ ID NO: 453700 - DNA, 120 bp, Artificial Sequence
  ENSG00000156170_14 (sequence is synthesized)
aggaaaaagttattgataatgaaaaggaaatgatctgaaatgtttggtctagagggctactccatgtcagaggcaaagttgcctctgcttcctgaatatattatgcctttgaatatactg

SEQ ID NO: 453701 - DNA, 120 bp, Artificial Sequence
  ENSG00000156170_15 (sequence is synthesized)
tgttactgatttactggcaaagaaggctttatttaaacacccctatctggtgacttagtccattttcttttcatctgatgataacatctggcagcaccctcagttcccaagctctacagt

SEQ ID NO: 453702 - DNA, 120 bp, Artificial Sequence
  ENSG00000156170_16 (sequence is synthesized)
ttaagtttgactctgttttgccaagcttgtgtcacatgtttgttcctgagccaatcatagtgttcaggtggttttgtggctctgattggtcagcccttaggtgtgagtgagtcaacctta

SEQ ID NO: 453703 - DNA, 120 bp, Artificial Sequence
  ENSG00000156170_17 (sequence is synthesized)
cccctgtcaaatgtatggaggaaattccaaggaaaatcaacctgttgataccagaagagggagaaatggctgataggcaggcaaaaatctactgtactggtggttgttaggaacagagta

SEQ ID NO: 453704 - DNA, 120 bp, Artificial Sequence
  ENSG00000156170_18 (sequence is synthesized)
tggggccagatatagctcgatcaatcaatgactgttttctcacctgtaaagtggaaataataataatgcctgtttgagttggaatggataaataaatgccacacctttttcttaaccaaa

SEQ ID NO: 453705 - DNA, 120 bp, Artificial Sequence
  ENSG00000156170_19 (sequence is synthesized)
acaataagatattctaggatccttttgaatctctcccctgcctcacctttggaatcgcccatttctcgagagccctgattcctttaaggagaatggtagtagagacaagtgtctgggcac

SEQ ID NO: 453706 - DNA, 120 bp, Artificial Sequence
  ENSG00000156170_20 (sequence is synthesized)
cagcttaagcagcaatatgctgagcggtgaggctgtgttgatgaagaaggaagcagcatcatacctggcatggaagctgtcaggaggtggaggttggggagaaaagagataatggtatgg

SEQ ID NO: 453707 - DNA, 120 bp, Artificial Sequence
  ENSG00000156170_21 (sequence is synthesized)
tctggagctccaccctctgctcaagaggaacggcacatgacccaggcctatgccaatcagcatttcacattcctcatggttggttcaaaggtgcaagaagagttgttgatttttcagcct

SEQ ID NO: 453708 - DNA, 120 bp, Artificial Sequence
  ENSG00000156170_22 (sequence is synthesized)
gtccagctttgtagttgctgttaagatagaatggacttccaagctccttacgtgcagaagcagaaaccagaggtcctatcaaaatagttttaaattgtattaaacatacacaaaagtaga

SEQ ID NO: 453709 - DNA, 120 bp, Artificial Sequence
  ENSG00000156170_23 (sequence is synthesized)
tggccattgaactatggaagtgattgccaaaagagggtttctgtaacaggagccacccacagacctgacagtggtacacctcttctcaggtctgcacaccagcagaggcaggcccagttt

SEQ ID NO: 453710 - DNA, 120 bp, Artificial Sequence
  ENSG00000156170_24 (sequence is synthesized)
ctccccagtcccggtccgcgaccacccggagcccgctccgccggccttgcgcggcgcgcccagggaaggcatttccagcccgcccacccaggtctcttcttcggcctttctgacatggtg

SEQ ID NO: 453711 - DNA, 120 bp, Artificial Sequence
  ENSG00000156170_25 (sequence is synthesized)
ccagccctactggagtcagcaggagtccagcacaacagatggtggtcagtggtgacttcggcacaggcagttcgtgaggagtggttggtggccatggagtcctgactggagtaggttaaa

SEQ ID NO: 453712 - DNA, 120 bp, Artificial Sequence
  ENSG00000156170_26 (sequence is synthesized)
cgcctggccaagtgcggctctgctctccccagtcccggtccgcgaccacccggagcccgctccgccggccttgcgcggcgcgcccagggaaggcatttccagcccgcccacccaggactg

SEQ ID NO: 453713 - DNA, 120 bp, Artificial Sequence
  ENSG00000156170_27 (sequence is synthesized)
ttctagaaaaagtcttaaaggcctaccctcctactgatgacccagagactgtccctgcccagtcactgctactgttgaccttggctcctgcccagggatggaggctctcaactgggctgg

SEQ ID NO: 453714 - DNA, 120 bp, Artificial Sequence
  ENSG00000156170_28 (sequence is synthesized)
tactgaactgctcctgccaaggcccctccccatgtactctcaacgaaagttgcagccacccattctcattttgtggatataattccctgctttagttttctgagcacaagaaatcaactt

SEQ ID NO: 453715 - DNA, 85 bp, Artificial Sequence
  ENSG00000156170_29 (sequence is synthesized)
aattccctgctttagttttctgagcacaagaaatcaactttggctgcacattggaatatctgagaagcttaaaaatactgatgtt

SEQ ID NO: 453716 - DNA, 120 bp, Artificial Sequence
  ENSG00000156170_30 (sequence is synthesized)
cacagtggacttgttctcaagtctaattggccagatcagggaaatatgcactgtcctggaccagtcactggtgatgaaagggtaacacccaccaccggggttctgctactacacaggatg

SEQ ID NO: 453717 - DNA, 120 bp, Artificial Sequence
  ENSG00000156170_31 (sequence is synthesized)
gaggaacggcacatgacccaggcctatgccaatcagcatttcacattcctcatggttggttcaaagctcccacaggcccattctggtgactcatgacttgtatacacagaacaacagaga

SEQ ID NO: 453718 - DNA, 120 bp, Artificial Sequence
  ENSG00000156170_32 (sequence is synthesized)
aaagaaaaatagaattagataaacaagcaggggcaacagtgagggctatgtcttacaaagaaccatttttaattgaattcattttctctcttgaaattcttttttttttccctcaaaagt

SEQ ID NO: 453719 - DNA, 120 bp, Artificial Sequence
  ENSG00000156170_33 (sequence is synthesized)
gggaaaaaattctcaaataacaacagcaaaccaagaaagcagcttagtctgcactgcatttgcatttcttagtttcattccctattcaaaaatgtcttaggcaaatgtgtgggaatgaac

SEQ ID NO: 453720 - DNA, 120 bp, Artificial Sequence
  ENSG00000156170_34 (sequence is synthesized)
atgcactttaaaattatgggacctagtagatttaatggaatgagccctggattgggagccaggggacctggctttgaatggtcccaacccaggcacttatttaccttagtttcttcactt

SEQ ID NO: 453721 - DNA, 120 bp, Artificial Sequence
  ENSG00000156170_35 (sequence is synthesized)
ggacatgtgctataatgtggatgtgcgttaaagacattatgctaagtgaaagaagccagacacaaagaccatacatttcacgattccacttacatgaaatgtacagaatagctaaatcta

SEQ ID NO: 453722 - DNA, 120 bp, Artificial Sequence
  ENSG00000156170_36 (sequence is synthesized)
aggacataaagtaggttagctaatgggtacaggtttcattctgggttgatgaaatgttccaaaattgattgtgctgatggttgtatttaaaactctgcatatactgaaaaccatttaatt

SEQ ID NO: 453723 - DNA, 120 bp, Artificial Sequence
  ENSG00000156170_37 (sequence is synthesized)
gtacattttaaatgagtgaattgtatgctatgtgaattatatctcaataaagttgttcaaaaaaaagagaaaaaaatgaaacagtgatttccacccagcccagatatgttgtgaagctca

SEQ ID NO: 453724 - DNA, 120 bp, Artificial Sequence
  ENSG00000156170_38 (sequence is synthesized)
aatgaattgtttttacaaataagaaaaccacttaaaactatacaatgaaaattatttttaaacttaattatttcttaaattcgaggctgatatactaaaggaatttttccagtgacagtt

SEQ ID NO: 453725 - DNA, 120 bp, Artificial Sequence
  ENSG00000156170_39 (sequence is synthesized)
caccacatcagcctgtggccattgaactatggaaggtctgcacaccagcagaggcaggcccagtttctgggccccagattgacttcacagagccccagtaaagatggaaagccagaaccc

SEQ ID NO: 453726 - DNA, 120 bp, Artificial Sequence
  ENSG00000156170_40 (sequence is synthesized)
tcacaagaggactttctacggaggaaccaagataaaaatgtgagagatgtaatatatgacattgccagtcaagcacacttgcacctaaagcatgaaattaaggatgcagacactcagggc

SEQ ID NO: 453727 - DNA, 120 bp, Artificial Sequence
  ENSG00000156170_41 (sequence is synthesized)
ccacactggttggagctctcttgcacatactcagaggaacgcacacttctccattcaaacgactgcatcaggaagttagaagcataactttgactcagtcgaggcttttctagccacgta

SEQ ID NO: 453728 - DNA, 120 bp, Artificial Sequence
  ENSG00000156170_42 (sequence is synthesized)
tttcacatacgcgagctgtcagacctcggatgagggtctttacgcagcttcaagatgccgcagatggtgatttgttcttcagccatgatcactggggcctggatcatgctttttacaagt

SEQ ID NO: 453729 - DNA, 83 bp, Artificial Sequence
  ENSG00000156170_43 (sequence is synthesized)
agccatgatcactggggcctggatcatgctttttacaagtgactgtactcgctacttttttgttttgttttgtttgagatagg

SEQ ID NO: 453730 - DNA, 78 bp, Artificial Sequence
  ENSG00000156170_44 (sequence is synthesized)
gactaaaagatggcttatgaaaatcgtcgatgaaagaagtctcactcttgtcgcccaggctggagtacaatggcacga

SEQ ID NO: 453731 - DNA, 120 bp, Artificial Sequence
  ENSG00000156170_45 (sequence is synthesized)
aaaatgaagccaactgggagagagatttgaaggactctggttctaggcatgcgcacttctccaggtacttgagcttggaaaccttcttgcttaactagctctaggccaatcttgcttcac

SEQ ID NO: 453732 - DNA, 120 bp, Artificial Sequence
  ENSG00000156170_46 (sequence is synthesized)
tcgaacacgcacacacttctccttgcgctattttgaattaccagaggagaatctttgacaaacacaggtcgatgttagtgtgagccagactgggcaactacacaaaatcaaaatcaggaa

SEQ ID NO: 453733 - DNA, 120 bp, Artificial Sequence
  ENSG00000156170_47 (sequence is synthesized)
aggagagccactttgctggaatctcccagaaggctggtggggtggactccggggctttgaaatctctaaagagtggtgactcacctctcctagaaattgccctggttatatcataaaagg

SEQ ID NO: 453734 - DNA, 120 bp, Artificial Sequence
  ENSG00000156170_48 (sequence is synthesized)
gctcaatttttacatgaggtctcaatggtctttttacttaatgtgacatcattagaaaaatcaacctttgaccagaaagaggcagttccctccttcctcacacaattcacaattttctgg

SEQ ID NO: 453735 - DNA, 120 bp, Artificial Sequence
  ENSG00000156171_0 (sequence is synthesized)
aaggtaagtcgaagtaggggagaagggacaggccccagcgcttgcagcccgctccctctagaagggtgcgtcagagggtgggatctggcagctcggggaagtgggcgcagcctggagccc

SEQ ID NO: 453736 - DNA, 120 bp, Artificial Sequence
  ENSG00000156171_1 (sequence is synthesized)
ccttacccgcgtcgcaggcgcgcgagactcctgctggccctcattgcctccgggggctaccttatgccaggcgccagaggggggctggttggggcgggagctgcgggggtttccgggggc

SEQ ID NO: 453737 - DNA, 120 bp, Artificial Sequence
  ENSG00000156171_2 (sequence is synthesized)
ggggatgagtgcagctgggctcagctccccgtgccctacctttctgttctcttccttggtttcccctactctcctcctgccccaagcagtgcctgatgccgagttccgtctctcgcgtct

SEQ ID NO: 453738 - DNA, 120 bp, Artificial Sequence
  ENSG00000156171_3 (sequence is synthesized)
tttcctggtcccaggcaaagcggagcggagatcctcaaacggcctagtgcttcgcgcttccggagaaaatcagcggtctaattaattcctctggtttgttgaagcagttaccaagaatct

SEQ ID NO: 453739 - DNA, 120 bp, Artificial Sequence
  ENSG00000156171_4 (sequence is synthesized)
tcaaccctttcccacaaaagctaattgagtacacgttcctgttgagtacacgttcctgttgatttacaaaaggtgcaggtatgagcaggtctgaagactaacattttgtgaagttgtaaa

SEQ ID NO: 453740 - DNA, 120 bp, Artificial Sequence
  ENSG00000156171_5 (sequence is synthesized)
acagaaaacctgttagaaatgtggtggtttcagcaaggcctcagtttccttccttcagcccttgtaatttggacatctgctgctttcatattttcatacattactgcagtaacactccac

SEQ ID NO: 453741 - DNA, 120 bp, Artificial Sequence
  ENSG00000156171_6 (sequence is synthesized)
catatagacccggctttaccttatatcagtgacactggtacagtagctccagaaaaatgcttatttggggcaatgctaaatattgcggcagttttatgcattgctaccatttatgttcgt

SEQ ID NO: 453742 - DNA, 120 bp, Artificial Sequence
  ENSG00000156171_7 (sequence is synthesized)
tataagcaagttcatgctctgagtcctgaagagaacgttatcatcaaattaaacaaggctggccttgtacttggaatactgagttgtttaggactttctattgtggcaaacttccagaaa

SEQ ID NO: 453743 - DNA, 120 bp, Artificial Sequence
  ENSG00000156171_8 (sequence is synthesized)
acaaccctttttgctgcacatgtaagtggagctgtgcttacctttggtatgggctcattatatatgtttgttcagaccatcctttcctaccaaatgcagcccaaaatccatggcaaacaa

SEQ ID NO: 453744 - DNA, 120 bp, Artificial Sequence
  ENSG00000156171_9 (sequence is synthesized)
caattttgggactgatttagaacagaaactccattggaaccccgaggacaaaggttatgtgcttcacatgatcactactgcagcagaatggtctatgtcattttccttctttggtttttt

SEQ ID NO: 453745 - DNA, 120 bp, Artificial Sequence
  ENSG00000156171_10 (sequence is synthesized)
cctgacttacattcgtgattttcagaaaatttctttacgggtggaagccaatttacatggattaaccctctatgacactgcaccttgccctattaacaatgaacgaacacggctactttc

SEQ ID NO: 453746 - DNA, 120 bp, Artificial Sequence
  ENSG00000156171_11 (sequence is synthesized)
cagagatatttgatgaaaggataaaatatttctgtaatgattatgattctcagggattggggaaaggttcacagaagttgcttattcttctctgaaattttcaaccacttaatcaaggct

SEQ ID NO: 453747 - DNA, 120 bp, Artificial Sequence
  ENSG00000156171_12 (sequence is synthesized)
gacagtaacactgatgaatgctgataatcaggaaacatgaaagaagccatttgatagattattctaaaggatatcatcaagaagactattaaaaacacctatgcctatacttttttatct

SEQ ID NO: 453748 - DNA, 120 bp, Artificial Sequence
  ENSG00000156171_13 (sequence is synthesized)
cagaaaataaagtcaaaagactatgatatcatagttttttataccttatttaagagaaacaacctgacgtgcaccaatcagtctgcacatcccaacccttcacattttataaattattgt

SEQ ID NO: 453749 - DNA, 120 bp, Artificial Sequence
  ENSG00000156171_14 (sequence is synthesized)
agatcatgttttgttaggagcacttttatgagagacattttccatgactaaataatcagcattagtcagtaaatcctttagaactgggttttgaaatgggagttttatcatattaaatca

SEQ ID NO: 453750 - DNA, 120 bp, Artificial Sequence
  ENSG00000156171_15 (sequence is synthesized)
tttcttgtagtcttacattttttgttgttgttctggaatctacctgtaaaggaaagtagacctggattcatgtgggctcttccatggcttaagtgttgcccaagagattttgtaggtaac

SEQ ID NO: 453751 - DNA, 120 bp, Artificial Sequence
  ENSG00000156171_16 (sequence is synthesized)
gatttttttttttctggccacaatgccagatactaagctaattggtctatcatacacatgcttgcagtagtttcatgaagtttagtctctggcgtgaaattttaatcaccaatgaaggag

SEQ ID NO: 453752 - DNA, 120 bp, Artificial Sequence
  ENSG00000156171_17 (sequence is synthesized)
agaggcacctgtaggtaaatttactttagtcatattttatataaaacaagggttagtattcatgtaacattgagaagtttgggaataacagcagatatgattaataaaagtcataaccat

SEQ ID NO: 453753 - DNA, 120 bp, Artificial Sequence
  ENSG00000156171_18 (sequence is synthesized)
gcgattgccgtaaaggggaacaaggtttgaacgagcagcgccgcaggcgcgctcctcggtgccgtgagcgcgccccggggccggccggtctgctcgggagcgcgccccgtggcccagccc

SEQ ID NO: 453754 - DNA, 120 bp, Artificial Sequence
  ENSG00000156171_19 (sequence is synthesized)
taaagaagttcatttcatgaccaaactcttcagaaacatgtctttacaagcatatctcttgtattgctttctacactgttgaattgtctggcaatatttctgcagtggaaaatttgattt

SEQ ID NO: 453755 - DNA, 120 bp, Artificial Sequence
  ENSG00000156171_20 (sequence is synthesized)
agctagttcttgactgataaatatggtaaggtgggcttttccccctgtgtaattggctactatgtcttactgagccaagttgtaatttgaaataaaatgatatgagagtgacacaaataa

SEQ ID NO: 453756 - DNA, 120 bp, Artificial Sequence
  ENSG00000156171_21 (sequence is synthesized)
gttgagtacacgttcctgttgatttaaccattaggagaatattatgtttgtcaggaggccaagttagagtttagaaaagatttacaaaaggtgcaggtatgagcaggtctgaagactaac

SEQ ID NO: 453757 - DNA, 120 bp, Artificial Sequence
  ENSG00000156171_22 (sequence is synthesized)
attggaaccccgaggacaaaatattgtcaaaatatgaagagcattgcgatggcagaagagttttctgagaaattgactcccctaaatggttatgtgcttcacatgatcactactgcagca

SEQ ID NO: 453758 - DNA, 120 bp, Artificial Sequence
  ENSG00000156171_23 (sequence is synthesized)
aaggcacaatattagatttattcagtcagacttccttctcttagtccaggaaggtagactaagagaactttccataggcaactctcccgcctttttgaaaattaactgtttgtgatttgg

SEQ ID NO: 453759 - DNA, 120 bp, Artificial Sequence
  ENSG00000156171_24 (sequence is synthesized)
tatcataaacaagtgatgtaacttttcaggtgaattgtttctgtgtttaaagaagtagtgtattgctagcaagatttagccttgaaaatggggctataaaataaatttcagaaattctta

SEQ ID NO: 453760 - DNA, 120 bp, Artificial Sequence
  ENSG00000156172_0 (sequence is synthesized)
aggcgattcaagatggcggaggacctggacgagctcttggatgaagtcgagtccaagttttgcacacctgaccttctaagacggggtatggtcgagcagcccaaaggctgcggcggcggc

SEQ ID NO: 453761 - DNA, 120 bp, Artificial Sequence
  ENSG00000156172_1 (sequence is synthesized)
acccacagtagcgaccggaaccaagccaaggcgaaagagacgctcagatcaacagaaacatttaaaaaagaagatgatcttgacagtcttattaatgaaatacttgaagagcccaacttg

SEQ ID NO: 453762 - DNA, 120 bp, Artificial Sequence
  ENSG00000156172_2 (sequence is synthesized)
gacaaaaaaccctctaaattaaaatctaaatcttcaggtaacacatctgtcagagcttccattgaaggccttggtaaaagttgcagtccggtgtaccttggtggaagctctattccatgt

SEQ ID NO: 453763 - DNA, 120 bp, Artificial Sequence
  ENSG00000156172_3 (sequence is synthesized)
gggattggaacaaatatttcatggagagcatgtgaccatctgcgttgtatagcctgtgatttcttggtagtcagctatgatgactatatgtgggacaaatcgtgtgattatctgtttttc

SEQ ID NO: 453764 - DNA, 120 bp, Artificial Sequence
  ENSG00000156172_4 (sequence is synthesized)
aggaacaacatgccagaatttcacaaattaaaagcaaagttgataaagaagaaaggaacacgggcatatgcctgccagtgtagctggagaactattgaagaagtgactgaccttcagaca

SEQ ID NO: 453765 - DNA, 120 bp, Artificial Sequence
  ENSG00000156172_5 (sequence is synthesized)
gatcatcagcttcgctgggtttgtggtaaacattaagaatgcagactgcacattcggacagatgcatccatgagagtggtctccatgaatcatcatcatgtttagacaatagtccctagc

SEQ ID NO: 453766 - DNA, 120 bp, Artificial Sequence
  ENSG00000156172_6 (sequence is synthesized)
aataccattccctgtgggaaaaggcagtgaattttattgatacaactacatacatttttgaagaccaaatggactaaggaagatcatgtattataacactttggaattattcctgataca

SEQ ID NO: 453767 - DNA, 120 bp, Artificial Sequence
  ENSG00000156172_7 (sequence is synthesized)
tggatgtttcacttagtaacaggcatctacattctttactaatctgtcttctgtttaatagaggtttgattatggagttccatacaaatatctagtttttcattagcaactgcaatattg

SEQ ID NO: 453768 - DNA, 120 bp, Artificial Sequence
  ENSG00000156172_8 (sequence is synthesized)
attgctaatacgtttagcaaatcattccccaacttgtagcagttaaagtggataaagccggccagggcaaagagatcatttaggggtgtctacaacacttcttccagtcagatcttttgt

SEQ ID NO: 453769 - DNA, 120 bp, Artificial Sequence
  ENSG00000156172_9 (sequence is synthesized)
tgccaaagatcataatttggacatggcagaaaccaggtgatcagtggctgactgaagggtgttcagaagtagttacaggtattttgcaaaaacactgcctcatagctgatcttacctcat

SEQ ID NO: 453770 - DNA, 120 bp, Artificial Sequence
  ENSG00000156172_10 (sequence is synthesized)
caactcaaagcaatgttatgcacaatattaaatacatgttaccagttttagcttatttttccctcttttgttcatttaactatcaaaagttattttctattttgattacccaataatata

SEQ ID NO: 453771 - DNA, 120 bp, Artificial Sequence
  ENSG00000156172_11 (sequence is synthesized)
taaaaagagtttgatgcacccaaaatcacaaaaatcctaatacatacaggttattgttggattttccaagtactttctatcctttaatgcctaaaactccatcaagggaagtaaacagca

SEQ ID NO: 453772 - DNA, 120 bp, Artificial Sequence
  ENSG00000156172_12 (sequence is synthesized)
agtaatataatttttcaggcagcctgtggacttctctggtaggatcaggttgacatatcgtttattaggtgagtaagtgaaaagacaagtaaagcataactgaaccaacaggtaacctgt

SEQ ID NO: 453773 - DNA, 120 bp, Artificial Sequence
  ENSG00000156172_13 (sequence is synthesized)
gagattttgggagctttccaatctgccacaaactccctgctacatatgtactatatagttcaaatgtgtgatacagagcaccctgaaagggaataattgaaacaaagttataatcttctt

SEQ ID NO: 453774 - DNA, 120 bp, Artificial Sequence
  ENSG00000156172_14 (sequence is synthesized)
agtcttatgctaaatttattccagccaccctactgaagggaggaagatctgatcattagaatccttttcctagccatgacacatttacatacttgtaaaatttattgtagtaagtctagc

SEQ ID NO: 453775 - DNA, 120 bp, Artificial Sequence
  ENSG00000156172_15 (sequence is synthesized)
aaaatttattgtagtaagtctagcattgcaacagaatagatcttataatggccaatcctcacacttttgtattaaggatattatgacagactaagcatggtagctcacgcctgtaatccc

SEQ ID NO: 453776 - DNA, 85 bp, Artificial Sequence
  ENSG00000156172_16 (sequence is synthesized)
actactcgggaggccgaggcaggaaaatttagtcgcgccactgcgctccagcctggacaacacagtgagactctgtctcaaaaaa

SEQ ID NO: 453777 - DNA, 120 bp, Artificial Sequence
  ENSG00000156172_17 (sequence is synthesized)
gacattatgacagattttatcttttaataaaaatgtattatatccctaaagttatatctatatgtaattgagtcagaaacctagggggatgtcgattgaagtcgactgctggaaaaaaat

SEQ ID NO: 453778 - DNA, 120 bp, Artificial Sequence
  ENSG00000156172_18 (sequence is synthesized)
agcagagcaacaagatccacacatttagaacctcatagaatttgacacattattcataatggtgcaattctttcttttttattccagtaagcaaatttactaaatcactaatttgaaaaa

SEQ ID NO: 453779 - DNA, 73 bp, Artificial Sequence
  ENSG00000156172_19 (sequence is synthesized)
tttttttgagatggagtgtcactctgttgccggcagcttcaagtgattgtcctgcctcagcctccccagtagc

SEQ ID NO: 453780 - DNA, 120 bp, Artificial Sequence
  ENSG00000156172_20 (sequence is synthesized)
cgcctcagcctcccaaagtagcctacattgcctctactttgaagggacaaagttgtcctggtttttttttcccttttattatttcattataactatcctaaaacttacatacattgccta

SEQ ID NO: 453781 - DNA, 120 bp, Artificial Sequence
  ENSG00000156172_21 (sequence is synthesized)
tgtttggcattccataacataataattataataatcccccaatgtcagaaatgtatgtgtgagttcccatgtttattggcaatttataagctttttaatattgtactattttaaactaaa

SEQ ID NO: 453782 - DNA, 120 bp, Artificial Sequence
  ENSG00000156172_22 (sequence is synthesized)
atacagtcagataaattattaactgttgtaatttaagctgaaaatgaaactattttagtatcagtatagaagaaaagtatagtttctaatcatctataattttaaaatgcaaagcctata

SEQ ID NO: 453783 - DNA, 120 bp, Artificial Sequence
  ENSG00000156172_23 (sequence is synthesized)
taattttaaaatgcaaagcctataaaactttcaagatgttttgcctgtttgtttttaagatttataataattttctatctttagcaagtagctatttttaagccaggtaacttctttatt

SEQ ID NO: 453784 - DNA, 120 bp, Artificial Sequence
  ENSG00000156172_24 (sequence is synthesized)
tgaactgtattatactctcagaccctcatcctgcctagaaatgaataagtaataaataattactctgtattatttacttcttttattttatagtaaaatattcatttggatggacattaa

SEQ ID NO: 453785 - DNA, 120 bp, Artificial Sequence
  ENSG00000156194_0 (sequence is synthesized)
gtgaatacttggccagggctgtgaatgtcaccattgcttttcaggaagaagacatggcagactagggctgcaccttctttatgggctctgtaggtctgaaagaaatcagatcagcctggg

SEQ ID NO: 453786 - DNA, 120 bp, Artificial Sequence
  ENSG00000156194_1 (sequence is synthesized)
atccctcagccaactctgaagacaggatggggatcacgcctgcatgttaaagagatttctgccttgttgtgtctcatggtaaataaaaaacccagcaaagaagcaaacagctcactgtcc

SEQ ID NO: 453787 - DNA, 120 bp, Artificial Sequence
  ENSG00000156194_2 (sequence is synthesized)
tctggatctgctgcgtcctgcaggagcattgcgcttaaactatgggaagcggcacctccacccaacatcattttgctttccagaatgcagagagagccttcaaggcagcagccctgatcc

SEQ ID NO: 453788 - DNA, 120 bp, Artificial Sequence
  ENSG00000156194_3 (sequence is synthesized)
agagatggtaccggcgctacgtggcccgcctggagatgaggcggcgttgcacctggagcatcttccagtctatagaatatgctgggcagcaagaccaagtcaagctccatgacttcttca

SEQ ID NO: 453789 - DNA, 120 bp, Artificial Sequence
  ENSG00000156194_4 (sequence is synthesized)
gctatctcatggatcacttcatccccagcagccacaacgacagggacttcctgacccgcatattcactgaggacagattcgcccaggactccgagatgaagaaatgcagtgactatgaat

SEQ ID NO: 453790 - DNA, 120 bp, Artificial Sequence
  ENSG00000156194_5 (sequence is synthesized)
ccatagaggtacccgacagttacacggggccacgcctctccttcccactcctgcctgaccatgcaactgccctggtagaagcattcagactgaaacaacagctccatgctcgctacgtct

SEQ ID NO: 453791 - DNA, 120 bp, Artificial Sequence
  ENSG00000156194_6 (sequence is synthesized)
tgaaccttttgtatgaaaccaagaaacatctggtacagctgccaaacatcaaccgggtctcaacctgttacagtgaggagatcacagtgtgtggagacttacatggccaattggatgact

SEQ ID NO: 453792 - DNA, 120 bp, Artificial Sequence
  ENSG00000156194_7 (sequence is synthesized)
taatctttatattttataagaatggcctcccgtcgccagaacggtcatatgtgttcaacggtgactttgtggatcgaggcaaggattcagtagagatcctgatgattctttttgccttca

SEQ ID NO: 453793 - DNA, 120 bp, Artificial Sequence
  ENSG00000156194_8 (sequence is synthesized)
tgctggtttaccccaaagagttccatcttaacagaggaaaccatgaggaccatatggtgaacttacgatatggcttcaccaaggaagtgatgaataaatacaaggtacacgggaaggaaa

SEQ ID NO: 453794 - DNA, 120 bp, Artificial Sequence
  ENSG00000156194_9 (sequence is synthesized)
tactaagaaccctgcaagatgttttctgttggcttccactggccactctgatagatgagaaagttctaattcttcatggtggggtgtcagacataactgatctggagcttttggacaaaa

SEQ ID NO: 453795 - DNA, 120 bp, Artificial Sequence
  ENSG00000156194_10 (sequence is synthesized)
tagagaggagcaagatagtttccaccatgaggtgcaaaacgagacagaagagtgagaagcagatggaggagaagagaagagccaaccagaagagctctgcacagggacccatcccatggt

SEQ ID NO: 453796 - DNA, 120 bp, Artificial Sequence
  ENSG00000156194_11 (sequence is synthesized)
ttctccccgaaagccgctctcttccctcttcgccccttcggcttggctcctacaaggcccagaaaaccagcaggtcctccagcatcccctgcagcggttccctggacgggcgggagctct

SEQ ID NO: 453797 - DNA, 120 bp, Artificial Sequence
  ENSG00000156194_12 (sequence is synthesized)
cccggcaggtgcggagctccgtggaactggagctagagcggtgccggcagcaagcaggcctcctggtgaccggagagaaagaggagccctcccgctcagcctcagaagcagactctgaag

SEQ ID NO: 453798 - DNA, 120 bp, Artificial Sequence
  ENSG00000156194_13 (sequence is synthesized)
aggaggaggctgttattttgggcctgatgtgacacaacagttgctacaaaaatacaacatgcaattcctgatccgttcacatgaatgcaaacctgaaggctatgaattctgtcacaaccg

SEQ ID NO: 453799 - DNA, 120 bp, Artificial Sequence
  ENSG00000156194_14 (sequence is synthesized)
caaggtattaacaatcttttctgcctccaactactatgaagttggcagcaacagaggggcctatgtcaaactggggccagccctgaccccacatattgtgcagtatcaagctaacaaggt

SEQ ID NO: 453800 - DNA, 120 bp, Artificial Sequence
  ENSG00000156194_15 (sequence is synthesized)
gacccacacactcaccatgaggcaaaggattagcagagtggaggagtcggctctgagagctctgagggagaagctgtttgctcattcttcagatcttctcagtgaatttaagaagcatga

SEQ ID NO: 453801 - DNA, 120 bp, Artificial Sequence
  ENSG00000156194_16 (sequence is synthesized)
tgcagataaagtcggtttaatcaccttgagtgactgggcagcagcggtggagtctgtgttgcacctaggactgccatggcggatgctgaggccacagctggtgaacagctcagcagacaa

SEQ ID NO: 453802 - DNA, 120 bp, Artificial Sequence
  ENSG00000156194_17 (sequence is synthesized)
catgctggagtacaagtcttggctgaagaacttggccaaggaacaactgagtcgcgagaacatacaatcaagtttgctggaaacattgtatcgaaaccgatccaacctagagaccatttt

SEQ ID NO: 453803 - DNA, 120 bp, Artificial Sequence
  ENSG00000156194_18 (sequence is synthesized)
taggatcatagacagtgatcattcagggttcatctcactggacgagttcaggcagacctggaagctgttcagctctcacatgaatatcgacattacagatgactgcatctgtgaccttgc

SEQ ID NO: 453804 - DNA, 120 bp, Artificial Sequence
  ENSG00000156194_19 (sequence is synthesized)
tcggagcattgatttcaacaaagatggccacattgatatcaatgagttcctggaggccttccgccttgtggagaaatcctgcccagagggcgatgcctcagaatgcccacaagctacaaa

SEQ ID NO: 453805 - DNA, 120 bp, Artificial Sequence
  ENSG00000156194_20 (sequence is synthesized)
tgctaaagacagtggctgcagcagtccaggtgcacactaagaacagcctggtcttcatcacccaaagtgcctcataggcaatgctcagcttctcactagactatctcccttattctccat

SEQ ID NO: 453806 - DNA, 120 bp, Artificial Sequence
  ENSG00000156194_21 (sequence is synthesized)
gtgaaactttatgctgaaaatttacctatccatatgcatcagaatcacctgtgtatttcagtgtggaggggtgggttggggtgttgtgtatgtatgtgttttaagtatatgagtgcccca

SEQ ID NO: 453807 - DNA, 120 bp, Artificial Sequence
  ENSG00000156194_22 (sequence is synthesized)
accccacctcacaatcttcacaaagtagaacttaggtatagtgttttcaaattctaaagtccacttcagttaagaaccactgacaatgtaactctctcattgttttcattttatacgttt

SEQ ID NO: 453808 - DNA, 120 bp, Artificial Sequence
  ENSG00000156194_23 (sequence is synthesized)
aggcatgagccaccgcacccagcctattttatactttttatttattgtctttaacaatgtctattggtaaaggaaagttatttttaaaaattgtattgtaattccatgacccaagcatat

SEQ ID NO: 453809 - DNA, 120 bp, Artificial Sequence
  ENSG00000156194_24 (sequence is synthesized)
catgacccaagcatatggattttcttcattatttactttttcttacttgttactgtagtgtttatataattttatgttctacttttaaaaaaataaattaatatctaattgtaaaccctt

SEQ ID NO: 453810 - DNA, 120 bp, Artificial Sequence
  ENSG00000156194_25 (sequence is synthesized)
aggagcaaggaaatgctgctacaacatccatgacaacattttcctgggaagttccaaagacagggaacaatcagtctacttcagctttgggcaattctaatggatatggatatgaaagtc

SEQ ID NO: 453811 - DNA, 120 bp, Artificial Sequence
  ENSG00000156194_26 (sequence is synthesized)
tatgtatatgagacatacatgaaatgaaagaatacggctttagagtgagacagacctgggtttgaaccctggaataggcaattgttggctgaaatggcagtttggttctatgaagttgtc

SEQ ID NO: 453812 - DNA, 120 bp, Artificial Sequence
  ENSG00000156194_27 (sequence is synthesized)
cagagacccaggtttcttgttactctgccacccctaatgtgtggtttctagacttagctaccatttagcaagtaaggatatgactccttgtggtttggtaactagaaattgctgtgtccc

SEQ ID NO: 453813 - DNA, 120 bp, Artificial Sequence
  ENSG00000156194_28 (sequence is synthesized)
tgtggtttggtaactagaaattgctgtgtccctgtacacccaaactcagtgttttcacttacacatctgttatatctttttttgtttgtttgtttttgagacaaggtctcactctgtcat

SEQ ID NO: 453814 - DNA, 79 bp, Artificial Sequence
  ENSG00000156194_29 (sequence is synthesized)
gccacacacaatcatgcttggctaatttttaaaaaattatttgtagagggccgggtgtgatggctcacacctgtaatcc

SEQ ID NO: 453815 - DNA, 120 bp, Artificial Sequence
  ENSG00000156194_30 (sequence is synthesized)
aatagtgacagtgcccattatttctattacctgcagatagtaagaaggatgtcaggataaaaatatacacaccattgggcaggaaactagacttctaggtgacaaggcaacaggttagct

SEQ ID NO: 453816 - DNA, 120 bp, Artificial Sequence
  ENSG00000156194_31 (sequence is synthesized)
aatataaatgtcatcttacatgctgactgcagtcaactgattatggctgttaagagtgtggaggccattaagagtatggaggctgggcacagtgtctcacacctataaactcagcacttt

SEQ ID NO: 453817 - DNA, 73 bp, Artificial Sequence
  ENSG00000156194_32 (sequence is synthesized)
catttcctgggttcaagcgactctcctgcctcaccctcctgatagcagctccatgctcgctacgtcttgaacc

SEQ ID NO: 453818 - DNA, 120 bp, Artificial Sequence
  ENSG00000156194_33 (sequence is synthesized)
ttttttttttaatttacacattattttactattccaatgaaaccattgaatttgtttttgcatacacatactctatcatataaataatagagattcatgatagtaaagcaggaaatacag

SEQ ID NO: 453819 - DNA, 120 bp, Artificial Sequence
  ENSG00000156194_34 (sequence is synthesized)
ataagtaaaaggaagaaaattaaaatatcccataatttctctacccagggataatgacatagttttaaacattttggtgattattcctcagtctcttttctatgtatttaagtacatata

SEQ ID NO: 453820 - DNA, 120 bp, Artificial Sequence
  ENSG00000156194_35 (sequence is synthesized)
tcttctaaaaatgtgattatgccctgattattgtcacccagtttactctaatatctatttgtgcttctaaatctagatatggcttcaccaaggaagtgatgaataaatacaaggtacacg

SEQ ID NO: 453821 - DNA, 120 bp, Artificial Sequence
  ENSG00000156206_0 (sequence is synthesized)
gacgcgccacgctaacgcatggtgtcggagggaggcccacttgctgaacagcagggagcgatggcgcagaacgtgtatggtccgggagtccggataggcaactggaatgaggatgtctac

SEQ ID NO: 453822 - DNA, 120 bp, Artificial Sequence
  ENSG00000156206_1 (sequence is synthesized)
ctggaggaggagctcatgaaagacttcttagagaagagagacaaggggaaacttctcatacagagaagtagaagactaaaacagaatctcttgagaccgatgcaactttccgtaactgaa

SEQ ID NO: 453823 - DNA, 120 bp, Artificial Sequence
  ENSG00000156206_2 (sequence is synthesized)
gatggctatattcattacggtgacaaagtgatgcttgtgaatcctgatgatcctgacacagaagctgatgtgtttctgcgtggggacctgagcctgtgtatgactccagatgaaattcag

SEQ ID NO: 453824 - DNA, 120 bp, Artificial Sequence
  ENSG00000156206_3 (sequence is synthesized)
tcccatctgaaagacgaattagaggtaccctgtggcctgagcgcagttcaagccaagaccccaattggcagaaacacttttatcattttgagtgtacacagagatgccactggtcaagtc

SEQ ID NO: 453825 - DNA, 120 bp, Artificial Sequence
  ENSG00000156206_4 (sequence is synthesized)
cttagatatgggcaggacttttgcctggggataacaggaggatttgacaacaaaatgttgtatttgtcaagtgaccacaggaccctcctgaaatcgtctaagaggtcttggctccaggaa

SEQ ID NO: 453826 - DNA, 120 bp, Artificial Sequence
  ENSG00000156206_5 (sequence is synthesized)
gtgtacctaacagatgaggtctcccatgtgaactgctggcaggctgccttccctgacccccagttacgcctggaatatgaaggcttccccgtcccggcaaatgctaaaattctcatcaat

SEQ ID NO: 453827 - DNA, 120 bp, Artificial Sequence
  ENSG00000156206_6 (sequence is synthesized)
cctattttggaaaggaggctgaggttgtagctcacacatacctggattcacatagagttgagaaaccaaggaaccactggatgttggttactgggaatcccagggatgcctcgtcctcca

SEQ ID NO: 453828 - DNA, 120 bp, Artificial Sequence
  ENSG00000156206_7 (sequence is synthesized)
tgttggatctgcccaaaccacccacagaggacactcgagccatggagcaggccatgggccttgacacgcagtaacacgccaggcacgtgcatgttttccctggtcccgctctcatcaaat

SEQ ID NO: 453829 - DNA, 120 bp, Artificial Sequence
  ENSG00000156206_8 (sequence is synthesized)
gtagctttaaaagaaattaacaaccttggtcatgcctcaagctatttttgaatcagatgtgggactctctgggcactatattaaaataaagattacattaagattattgaatttgtggtg

SEQ ID NO: 453830 - DNA, 120 bp, Artificial Sequence
  ENSG00000156206_9 (sequence is synthesized)
ggagtctagggctgaagaaaaacagctctggagaataattagtatttgaaagtgacaaacaatagccttttgttgataaacaaattctgaagaactcagcttcctctacttatatccttc

SEQ ID NO: 453831 - DNA, 120 bp, Artificial Sequence
  ENSG00000156206_10 (sequence is synthesized)
attgtctacaaggacagtgcgttactttttaaagttatgtctatgtaataaagctgttggacctatactgaatttttggtaccacagtttccctcttgaatgtactaaaacacaaaaaac

SEQ ID NO: 453832 - DNA, 120 bp, Artificial Sequence
  ENSG00000156206_11 (sequence is synthesized)
tgacagctctgagctgtggccttaccttggaattaaacatttccacctttgtaaaacatcctatttttgtttctacctttggctttccaggtcaggacctctacctgatcagtaacctat

SEQ ID NO: 453833 - DNA, 120 bp, Artificial Sequence
  ENSG00000156206_12 (sequence is synthesized)
tattttgtaatgatttttaagctgcagaatctctaccttgtctttgaaactggcacattagttgtggcacccatgtgattagatagttcctgacaaaataaatgtatgtccttccatgta

SEQ ID NO: 453834 - DNA, 120 bp, Artificial Sequence
  ENSG00000156206_13 (sequence is synthesized)
attcatgtgtcaatgaagaattcctgccagacttccagtactgtcctcgaccatgggcagaatcccagctgcccctcccagaacactccatgccactggaactcaggagcgcaggtgggc

SEQ ID NO: 453835 - DNA, 120 bp, Artificial Sequence
  ENSG00000156206_14 (sequence is synthesized)
ttatctaaatcagatcccaaatagtatttaaaaagcctctaccaaaagaagaggaggggctcaacctgagagaaaactcaccagggcagaaaagatgacagccatggaagcagagctcaa

SEQ ID NO: 453836 - DNA, 120 bp, Artificial Sequence
  ENSG00000156218_0 (sequence is synthesized)
gcggcgccgcgggctggaggccggcgtcggggaaggtcctggtgccggattccgcacgaggtgttgacgggcggcttctgccaacttctccccagcgcgcgccgagcccgcgcggccccg

SEQ ID NO: 453837 - DNA, 120 bp, Artificial Sequence
  ENSG00000156218_1 (sequence is synthesized)
gggctgcacgtcccagatacttctgcggcgcaaggctacaactgagacccggaggagactagaccccatggcttcctggacgagcccctggtgggtgctgatagggatggtcttcatgca

SEQ ID NO: 453838 - DNA, 120 bp, Artificial Sequence
  ENSG00000156218_2 (sequence is synthesized)
ctctcccctcccgcagaccacagctgagaaatctcctggagcctatttccttcccgagtttgcactttctcctcagggaagttttctggaagacacaacaggggagcagttcctcactta

SEQ ID NO: 453839 - DNA, 120 bp, Artificial Sequence
  ENSG00000156218_3 (sequence is synthesized)
tcgctatgatgaccagacctcaagaaacactcgttcagatgaagacaaagatggcaactgggatgcttggggcgactggagtgactgctcccggacctgtgggggaggagcatcatattc

SEQ ID NO: 453840 - DNA, 120 bp, Artificial Sequence
  ENSG00000156218_4 (sequence is synthesized)
tctgcggagatgtttgactggaaggaattgtgaagggcagaacattcggtacaagacatgcagcaatcatgactgccctccagatgcagaagatttcagagcccagcagtgctcagccta

SEQ ID NO: 453841 - DNA, 120 bp, Artificial Sequence
  ENSG00000156218_5 (sequence is synthesized)
caatgatgtccagtatcaggggcattactatgaatggcttccacgatataatgatcctgctgccccgtgtgcactcaagtgtcatgcacaaggacaaaacttggtggtggagctggcacc

SEQ ID NO: 453842 - DNA, 120 bp, Artificial Sequence
  ENSG00000156218_6 (sequence is synthesized)
taaggtactggatggaactcgttgcaacacggactccttggacatgtgtatcagtggcatctgtcaggcagtgggctgcgatcggcaactgggaagcaatgccaaggaggacaactgtgg

SEQ ID NO: 453843 - DNA, 120 bp, Artificial Sequence
  ENSG00000156218_7 (sequence is synthesized)
agtctgtgccggcgatggctccacctgcaggcttgtacggggacaatcaaagtcacacgtttctcctgaaaaaagagaagaaaatgtaattgctgttcctttgggaagtcgaagtgtgag

SEQ ID NO: 453844 - DNA, 120 bp, Artificial Sequence
  ENSG00000156218_8 (sequence is synthesized)
aattacagtgaaaggacctgcccacctctttattgaatcaaaaacacttcaaggaagcaaaggagaacacagctttaacagccccggcgtctttctcgtagaaaacacaacagtggaatt

SEQ ID NO: 453845 - DNA, 120 bp, Artificial Sequence
  ENSG00000156218_9 (sequence is synthesized)
tcagaggggctccgagaggcaaacttttaagattccaggacctctgatggctgatttcatcttcaagaccaggtacactgcagccaaagacagcgtggttcagttcttcttttaccagcc

SEQ ID NO: 453846 - DNA, 120 bp, Artificial Sequence
  ENSG00000156218_10 (sequence is synthesized)
catcagtcatcagtggagacaaactgacttctttccctgcactgtgacgtgtggaggaggttatcagctcaattctgctgaatgtgtggatatccgcttgaagagggtagttcctgacca

SEQ ID NO: 453847 - DNA, 120 bp, Artificial Sequence
  ENSG00000156218_11 (sequence is synthesized)
ttattgtcactactaccctgaaaatgtaaaaccaaaaccaaaactgaaggaatgcagcatggatccctgcccatcaagtgatggatttaaagagataatgccctatgaccacttccaacc

SEQ ID NO: 453848 - DNA, 120 bp, Artificial Sequence
  ENSG00000156218_12 (sequence is synthesized)
tcttcctcgctgggaacataatccttggactgcatgttccgtgtcctgtggaggagggattcagagacggagctttgtgtgtgtagaggaatccatgcatggagagatattgcaggtgga

SEQ ID NO: 453849 - DNA, 120 bp, Artificial Sequence
  ENSG00000156218_13 (sequence is synthesized)
agaatggaagtgcatgtacgcacccaaacccaaggttatgcaaacttgtaatctgtttgattgccccaagtggattgccatggagtggtctcagtgcacagtgacttgtggccgagggtt

SEQ ID NO: 453850 - DNA, 120 bp, Artificial Sequence
  ENSG00000156218_14 (sequence is synthesized)
acggtaccgggttgttctgtgtattaaccaccgcggagagcatgttgggggctgcaatccacaactgaagttacacatcaaagaagaatgtgtcattcccatcccgtgttataaaccaaa

SEQ ID NO: 453851 - DNA, 120 bp, Artificial Sequence
  ENSG00000156218_15 (sequence is synthesized)
agaaaaaagtccagtggaagcaaaattgccttggctgaaacaagcacaagaactagaagagaccagaatagcaacagaagaaccaacgttcattccagaaccctggtcagcctgcagtac

SEQ ID NO: 453852 - DNA, 120 bp, Artificial Sequence
  ENSG00000156218_16 (sequence is synthesized)
cacgtgtgggccgggtgtgcaggtccgtgaggtgaagtgccgtgtgctcctcacattcacgcagactgagactgagctgcccgaggaagagtgtgaaggccccaagctgcccaccgaacg

SEQ ID NO: 453853 - DNA, 120 bp, Artificial Sequence
  ENSG00000156218_17 (sequence is synthesized)
gccctgcctcctggaagcatgtgatgagagcccggcctcccgagagctagacatccctctccctgaggacagtgagacgacttacgactgggagtacgctgggttcaccccttgcacagc

SEQ ID NO: 453854 - DNA, 120 bp, Artificial Sequence
  ENSG00000156218_18 (sequence is synthesized)
aacatgcgtgggaggccatcaagaagccatagcagtgtgcttacatatccagacccagcagacagtcaatgacagcttgtgtgatatggtccaccgtcctccagccatgagccaggcctg

SEQ ID NO: 453855 - DNA, 120 bp, Artificial Sequence
  ENSG00000156218_19 (sequence is synthesized)
taacacagagccctgtccccccaggtggcatgtgggctcttgggggccctgctcagctacctgtggagttggaattcagacccgagatgtgtactgcctgcacccaggggagacccctgc

SEQ ID NO: 453856 - DNA, 120 bp, Artificial Sequence
  ENSG00000156218_20 (sequence is synthesized)
ccctcctgaggagtgccgagatgaaaagccccatgctttacaagcatgcaatcagtttgactgccctcctggctggcacattgaagaatggcagcagtgttccaggacttgtggcggggg

SEQ ID NO: 453857 - DNA, 120 bp, Artificial Sequence
  ENSG00000156218_21 (sequence is synthesized)
aactcagaacagaagagtcacctgtcggcagctgctaacggatggcagctttttgaatctctcagatgaattgtgccaaggacccaaggcatcgtctcacaagtcctgtgccaggacaga

SEQ ID NO: 453858 - DNA, 120 bp, Artificial Sequence
  ENSG00000156218_22 (sequence is synthesized)
ctgtcctccacatttagctgtgggagactggtcgaagtgttctgtcagttgtggtgttggaatccagagaagaaagcaggtgtgtcaaaggctggcagccaaaggtcggcgcatccccct

SEQ ID NO: 453859 - DNA, 120 bp, Artificial Sequence
  ENSG00000156218_23 (sequence is synthesized)
cagtgagatgatgtgcagggatctaccagggctccctcttgtaagatcttgccagatgcctgagtgcagtaaaatcaaatcagagatgaagacaaaacttggtgagcagggtccgcagat

SEQ ID NO: 453860 - DNA, 120 bp, Artificial Sequence
  ENSG00000156218_24 (sequence is synthesized)
cctcagtgtccagagagtctacattcagacaagggaagagaagcgtattaacctgaccattggtagcagagcctatttgctgcccaacacatccgtgattattaagtgccccgtgcgacg

SEQ ID NO: 453861 - DNA, 120 bp, Artificial Sequence
  ENSG00000156218_25 (sequence is synthesized)
attccagaaatctctgatccagtgggagaaggatggccgttgcctgcagaactccaaacggcttggcatcaccaagtcaggctcactaaaaatccatggtcttgctgcccccgacatcgg

SEQ ID NO: 453862 - DNA, 120 bp, Artificial Sequence
  ENSG00000156218_26 (sequence is synthesized)
cgtgtaccggtgcattgcaggctctgcacaggaaacagttgtgctcaagctcattggtactgacaaccggctcatcgcacgcccagccctcagggagcctatgagggaatatcctgggat

SEQ ID NO: 453863 - DNA, 120 bp, Artificial Sequence
  ENSG00000156218_27 (sequence is synthesized)
ggaccacagcgaagccaatagtttgggagtcacatggcacaaaatgaggcaaatgtggaataacaaaaatgacctttatctggatgatgaccacattagtaaccagcctttcttgagagc

SEQ ID NO: 453864 - DNA, 120 bp, Artificial Sequence
  ENSG00000156218_28 (sequence is synthesized)
tctgttaggccactgcagcaattctgcaggaagcaccaactcctgggagttgaagaataagcagtttgaagcagcagttaaacaaggagcatatagcatggatacagcccagtttgatga

SEQ ID NO: 453865 - DNA, 120 bp, Artificial Sequence
  ENSG00000156218_29 (sequence is synthesized)
gctgataagaaacatgagtcagctcatggaaaccggagaggtcagcgatgatcttgcgtcccagctgatatatcagctggtggccgaattagccaaggcacagccaacacacatgcagtg

SEQ ID NO: 453866 - DNA, 120 bp, Artificial Sequence
  ENSG00000156218_30 (sequence is synthesized)
attcaagccgaaaggacctgttctcatgaggcaaagccaacctccctcaatttcatttaataaaacaataaattccaggattggaaatacagtatacattacaaaaaggacagaggtcat

SEQ ID NO: 453867 - DNA, 120 bp, Artificial Sequence
  ENSG00000156218_31 (sequence is synthesized)
caatatactgtgtgaccttattacccccagtgaggccacatatacatggaccaaggatggaaccttgttacagccctcagtaaaaataattttggatggaactgggaagatacagataca

SEQ ID NO: 453868 - DNA, 120 bp, Artificial Sequence
  ENSG00000156218_32 (sequence is synthesized)
gaatcctacaaggaaagaacaaggcatatatgaatgttctgtagctaatcatcttggttcagatgtggaaagttcttctgtgctgtatgcagaggcacctgtcatcttgtctgttgaaag

SEQ ID NO: 453869 - DNA, 120 bp, Artificial Sequence
  ENSG00000156218_33 (sequence is synthesized)
aaatatcaccaaaccagagcacaaccatctgtctgttgtggttggaggcatcgtggaggcagcccttggagcaaacgtgacaatccgatgtcctgtaaaaggtgtccctcagcctaatat

SEQ ID NO: 453870 - DNA, 120 bp, Artificial Sequence
  ENSG00000156218_34 (sequence is synthesized)
aacttggttgaagagaggaggatctctgagtggcaatgtttccttgcttttcaatggatccctgttgttgcagaatgtttcccttgaaaatgaaggaacctacgtctgcatagccaccaa

SEQ ID NO: 453871 - DNA, 120 bp, Artificial Sequence
  ENSG00000156218_35 (sequence is synthesized)
tgctcttggaaaggcagtggcaacatctgtactccacttgctggaacgaagatggccagagagtagaatcgtatttctgcaaggacataaaaagtacattctccaggcaaccaacactag

SEQ ID NO: 453872 - DNA, 120 bp, Artificial Sequence
  ENSG00000156218_36 (sequence is synthesized)
aaccaacagcaatgacccaacaggagaacccccgcctcaagagcctttttgggagcctggtaactggtcacattgttctgccacctgtggtcatttgggagcccgcattcagagacccca

SEQ ID NO: 453873 - DNA, 120 bp, Artificial Sequence
  ENSG00000156218_37 (sequence is synthesized)
gtgtgtgatggccaatgggcaggaagtgagtgaggccctgtgtgatcacctccagaagccactggctgggtttgagccctgtaacatccgggactgcccagcgaggtggttcacaagtgt

SEQ ID NO: 453874 - DNA, 120 bp, Artificial Sequence
  ENSG00000156218_38 (sequence is synthesized)
gtggtcacagtgctctgtgtcttgcggtgaaggataccacagtcggcaggtgacgtgcaagcggacaaaagccaatggaactgtgcaggtggtgtctccaagagcatgtgcccctaaaga

SEQ ID NO: 453875 - DNA, 120 bp, Artificial Sequence
  ENSG00000156218_39 (sequence is synthesized)
ccggcctctgggaagaaaaccatgttttggtcatccatgtgttcagtgggaaccagggaaccggtgtcctggacgttgcatgggccgtgctgtgaggatgcagcagcgtcacacagcttg

SEQ ID NO: 453876 - DNA, 120 bp, Artificial Sequence
  ENSG00000156218_40 (sequence is synthesized)
tcaacacaacagctctgactccaactgtgatgacagaaagagacccaccttaagaaggaactgcacatcaggggcctgtgatgtgtgttggcacacaggcccttggaagccctgtacagc

SEQ ID NO: 453877 - DNA, 120 bp, Artificial Sequence
  ENSG00000156218_41 (sequence is synthesized)
agcctgtggcaggggtttccagtctcggaaagtcgactgtatccacacaaggagttgcaaacctgtggccaagagacactgtgtacagaaaaagaaaccaatttcctggcggcactgtct

SEQ ID NO: 453878 - DNA, 120 bp, Artificial Sequence
  ENSG00000156218_42 (sequence is synthesized)
tgggccctcctgtgatagagactgcacagacacaactcactactgtatgtttgtaaaacatcttaatttgtgttctctagaccgctacaaacaaaggtgctgccagtcatgtcaagaggg

SEQ ID NO: 453879 - DNA, 120 bp, Artificial Sequence
  ENSG00000156218_43 (sequence is synthesized)
ataaacctttggaggggtcatgatgctgctgtgaagataaaagtagaatataaaagctcttttccccatgtcgctgattcaaaaacatgtatttcttaaaagactagattctatggatca

SEQ ID NO: 453880 - DNA, 120 bp, Artificial Sequence
  ENSG00000156218_44 (sequence is synthesized)
aacagaggttgatgcaaaaacaccactgttaaggtgtaaagtgaaattttccaatggtagttttatattccaattttttaaaatgatgtattcaaggatgaacaaaatactatagcatgc

SEQ ID NO: 453881 - DNA, 120 bp, Artificial Sequence
  ENSG00000156218_45 (sequence is synthesized)
atgccactgcacttgggacctcatcatgtcagttgaatcgagaaatcaccaagattatgagtgcatcctcacgtgctgcctctttcctgtgatatgtagactagcacagagtggtacatc

SEQ ID NO: 453882 - DNA, 120 bp, Artificial Sequence
  ENSG00000156218_46 (sequence is synthesized)
ctaaaaacttgggaaacacagcaacccatgacttcctcttctctcaagttgcaggttttcaacagttttataaggtatttgcattttagaagctctggccagtagttgttaagatgttgg

SEQ ID NO: 453883 - DNA, 120 bp, Artificial Sequence
  ENSG00000156218_47 (sequence is synthesized)
cattaatggcattttcatagatccttggtttagtctgtgaaaaagaaaccatctctctggataggctgtcacactgactgacctaagggttcatggaagcatggcatcttgtccttgctt

SEQ ID NO: 453884 - DNA, 120 bp, Artificial Sequence
  ENSG00000156218_48 (sequence is synthesized)
ttagaacacccatggaagaaaacacagagtagatattgctgtcatttatacaactacagaaatttatctatgacctaatgaggcatctcggaagtcaaagaagagggaaagttaaccttt

SEQ ID NO: 453885 - DNA, 120 bp, Artificial Sequence
  ENSG00000156218_49 (sequence is synthesized)
tctactgatttcgtagtatattcagagctttcttttaagagctgtgaatgaaactttttctaagcactattctattgcacacaaacagaaaaccaaagccttattagacctaatttatgc

SEQ ID NO: 453886 - DNA, 120 bp, Artificial Sequence
  ENSG00000156218_50 (sequence is synthesized)
ataaagtagtattcctgagaactttattttggaaaatttataagaaagtaatccaaataagaaacacgatagttgaaaataatttttatagtaaataattgttttgggctgatttttcag

SEQ ID NO: 453887 - DNA, 120 bp, Artificial Sequence
  ENSG00000156218_51 (sequence is synthesized)
taaatccaaagtgacttaggttagaagttacactaaggaccaggggttggaatcagaatttagtttaagatttgaggaaaagggtaagggttagtttcagttttaggattagagctagaa

SEQ ID NO: 453888 - DNA, 120 bp, Artificial Sequence
  ENSG00000156218_52 (sequence is synthesized)
ttgggttaggtgagaaagaaagttaaggttaaggctagagttgtctttaagggttagggttaggaccaggttaggtcagggttggattgggtttagattggggccagtgctggtgttagt

SEQ ID NO: 453889 - DNA, 120 bp, Artificial Sequence
  ENSG00000156218_53 (sequence is synthesized)
gatagtgtcaggatggaggttaggtttggagtaagcgttgttgctgaagtgagttcaggctagcattaaattgtaagttctgaagctgatttggttatggggtctttcccctgtatacta

SEQ ID NO: 453890 - DNA, 120 bp, Artificial Sequence
  ENSG00000156218_54 (sequence is synthesized)
ccagttgtgtctttagatggcacacaagtccaaataagtggtcatacttctttattcagggtctcagctgcctgtacacctgctgcctacatcttcttggcaacaaagttacctgccaca

SEQ ID NO: 453891 - DNA, 120 bp, Artificial Sequence
  ENSG00000156218_55 (sequence is synthesized)
ggctctgctgagcctagttcctggtcagtaataactgaacagtgcattttggctttggatgtgtctgtggacaagcttgctgagtttctctaccatattctgagcacacggtctcttttg

SEQ ID NO: 453892 - DNA, 120 bp, Artificial Sequence
  ENSG00000156218_56 (sequence is synthesized)
ttctaacttcagcttcactgacactgggttgagcactactgtatgtggagggtttggtgattgggaatggatgggggacagtgaggaggacacaccagcccattagttgttaatcatcaa

SEQ ID NO: 453893 - DNA, 120 bp, Artificial Sequence
  ENSG00000156218_57 (sequence is synthesized)
tcacatctgattgttgaaggttattaaattaaaagaaagatcatttgtaacatactctttgtatatatttattatatgaaaggtgcaatattttattttgtacagtatgtaataaagaca

SEQ ID NO: 453894 - DNA, 120 bp, Artificial Sequence
  ENSG00000156218_58 (sequence is synthesized)
tgggacatatatttttcttattaacaaaatttcatattaaattgcttcactttgtatttaaagttaaaagttactatttttcatttgctattgtactttcattgttgtcattcaattgac

SEQ ID NO: 453895 - DNA, 120 bp, Artificial Sequence
  ENSG00000156218_59 (sequence is synthesized)
attcctgtgtactgtattttactactgtttttataacatgagagttaatgtttctgtttcatgatccttatgtaattcagaaataaatttactttgattattcagtggcatccttataaa

SEQ ID NO: 453896 - DNA, 120 bp, Artificial Sequence
  ENSG00000156218_60 (sequence is synthesized)
cttaggaagaagtgtgcaagtggaaaaggaagcgttctcagtggatttcatttcctgttactgaactgcacatttcctgtaagcctggttgaacataattattaatagagacctttcaaa

SEQ ID NO: 453897 - DNA, 120 bp, Artificial Sequence
  ENSG00000156218_61 (sequence is synthesized)
ggacaaattctgtgaaataaagtggttttctgaagagcctactaataggacagtgtgttaatatcactaatatattaagagagtaatgattataaaaaggaataaatttattgaaattgc

SEQ ID NO: 453898 - DNA, 120 bp, Artificial Sequence
  ENSG00000156218_62 (sequence is synthesized)
agtgtggcccaaggactagtcaaattgacatcagcagggaacttataagaaatgaggaatctcaagtcccacccagacctaaggaatcagagtctgcatttcaacaagatccctgggtgt

SEQ ID NO: 453899 - DNA, 120 bp, Artificial Sequence
  ENSG00000156218_63 (sequence is synthesized)
tgagaagtgtttccttacctgcctctcattcttgtttgggagcattcaatgcaagaggacaatggagcaggatctacacaattctaaagaaaagcaagcatgactcaaggatttcctctt

SEQ ID NO: 453900 - DNA, 90 bp, Artificial Sequence
  ENSG00000156218_64 (sequence is synthesized)
tcaactggaagaaagggtgtcccgaaaagagaagtttagagaaaaaaagaataaaaagaaatggacaaagcatccaagaaatatgggact

SEQ ID NO: 453901 - DNA, 120 bp, Artificial Sequence
  ENSG00000156218_65 (sequence is synthesized)
accgggtaaagctaacacatctagtttgtggacagcactatctgtccacacagatagtgtgataataatcaccttgtttccaataaactacttttggggcggggggcaggaatctgactg

SEQ ID NO: 453902 - DNA, 120 bp, Artificial Sequence
  ENSG00000156219_0 (sequence is synthesized)
ctcactgtcaacaacatcccatcctgaagacttgcttaccacaactgagagtggggagtcagtttgaggcctagcatcacttaaacttcctccaaaggcacaaaagccagaagagaaaaa

SEQ ID NO: 453903 - DNA, 120 bp, Artificial Sequence
  ENSG00000156219_1 (sequence is synthesized)
tgaagacgggacattttgaaatagtcaccatgctgctggcaaccatgattctagtggacattttccaggtgaaggctgaagtgttagacatggcagataatgcatttgatgatgaatacc

SEQ ID NO: 453904 - DNA, 120 bp, Artificial Sequence
  ENSG00000156219_2 (sequence is synthesized)
tgaaatgtacggacaggatggaaattaaatacgttccccaactgctaaaggaggaaaaagcaagccaccagcaattagatactgtgtgggaaaatgcaaaagccaaatgggcagcccgaa

SEQ ID NO: 453905 - DNA, 120 bp, Artificial Sequence
  ENSG00000156219_3 (sequence is synthesized)
agactcaaatctttctccctatgaattttaaggataaccatggaatagccctgatggcatatatttccgaagctcaagagcaaactcccttttaccatctgttcagtgaagctgtgaaga

SEQ ID NO: 453906 - DNA, 120 bp, Artificial Sequence
  ENSG00000156219_4 (sequence is synthesized)
tggctggccaatctcgagaagattatatctatggcttccagttcaaagctttccacttttacctcacaagagccctgcagttgctgagaaaaccttgtgaggccagttccaaaactgtgg

SEQ ID NO: 453907 - DNA, 120 bp, Artificial Sequence
  ENSG00000156219_5 (sequence is synthesized)
tatatagaacaagccagggcacttcatttacatttggagggctaaaccaagccaggtttggccattttaccttggcatattcagccaaacctcaggctgctaatgaccagctcactgtgt

SEQ ID NO: 453908 - DNA, 120 bp, Artificial Sequence
  ENSG00000156219_6 (sequence is synthesized)
ttttcaagtgtcacaggagggggctggcaataaccttatccttcaaagcataaacaagacctgcagccattatgagtgtgcatttctaggtggactaaaaaccgaaaactgtattgagaa

SEQ ID NO: 453909 - DNA, 120 bp, Artificial Sequence
  ENSG00000156219_7 (sequence is synthesized)
cctagaatattttcaacccatctatgtctacaaccctggtgagaaaaaccagaagcttgaagaccatagtgagaaaaactggaagcttgaagaccatggtgagaaaaaccagaagcttga

SEQ ID NO: 453910 - DNA, 120 bp, Artificial Sequence
  ENSG00000156219_8 (sequence is synthesized)
agaccatggtgtgaaaatccttgaacccacccaaatacctgaagataaaagtcaaggaaatatcaacaatcctactccaggtccagttcctgttccaggtcccaaaagccatccttctgc

SEQ ID NO: 453911 - DNA, 120 bp, Artificial Sequence
  ENSG00000156219_9 (sequence is synthesized)
atcctcgggcaaactgctgcttccacagtttgggatggtcatcattttaatcagtgtttctgctataaatctctttgttgctctgtagtttgatgcattgtttatctttcttattcttta

SEQ ID NO: 453912 - DNA, 120 bp, Artificial Sequence
  ENSG00000156219_10 (sequence is synthesized)
cttgaaataactatagggatccacaggagatcaaaaggaatgatgtattttttacgtgttggccaaagtcactggataaaatgagaattgtatatttgttattcattttgcaaattcaga

SEQ ID NO: 453913 - DNA, 120 bp, Artificial Sequence
  ENSG00000156219_11 (sequence is synthesized)
aagttggtccagatatatgtcacagaacttttcacttgtatactactcttacaatggaaaaaaatcccgaaaactgtatacttctgattaaattcaataaaagattttgattagatattt

SEQ ID NO: 453914 - DNA, 120 bp, Artificial Sequence
  ENSG00000156219_12 (sequence is synthesized)
agtgaggaggttatacccggaggtctcgacgctcgctcgtgctgctcgtgttgccgctgggtacgtttgctgccagtgctgatccagccggaggcgaagagaagcactttgggggcaaaa

SEQ ID NO: 453915 - DNA, 76 bp, Artificial Sequence
  ENSG00000156219_13 (sequence is synthesized)
tcaacccatctatgtctacaaccctggtgagtatgttctaatttttaaaaataatcaaggccgaggtgagtggatc

SEQ ID NO: 453916 - DNA, 120 bp, Artificial Sequence
  ENSG00000156219_14 (sequence is synthesized)
gcactccagcctgggtgacagggtgaaactctgtctccaaagttaataataataatccttacctggatgtttaatagctctttcttgtttagcaaatgtatttcttagctgaagaaaatt

SEQ ID NO: 453917 - DNA, 120 bp, Artificial Sequence
  ENSG00000156219_15 (sequence is synthesized)
tgtatttcttagctgaagaaaatttgcagatataaagcagtgacttggcctatatgagaggaaaaaaataaagaacctattctagggaaatataccttcctcaaataagagaattggctt

SEQ ID NO: 453918 - DNA, 120 bp, Artificial Sequence
  ENSG00000156219_16 (sequence is synthesized)
cgtggagatctgaacaatatggaaattttccggggaatacgggtggtgagaatgaagagctagagtcattcttgaccagttatgagggcttcttaggtatagctctgtattcagtcattg

SEQ ID NO: 453919 - DNA, 120 bp, Artificial Sequence
  ENSG00000156219_17 (sequence is synthesized)
gttgccgctgggtacgtttgctgccagtgctgatccagccggaggcgaagagaagcactttgggggcaaaagaatcttctgatggcatgctaacaattgtagatggcaactgtgttggaa

SEQ ID NO: 453920 - DNA, 120 bp, Artificial Sequence
  ENSG00000156219_18 (sequence is synthesized)
aaattccagaaccttttccactacctggaataaaaatgatacaactgaatgaaaaacctgaagataaaagtcaaggaaatatcaacaatcctactccaggtccagttcctgttccaggtc

SEQ ID NO: 453921 - DNA, 120 bp, Artificial Sequence
  ENSG00000156219_19 (sequence is synthesized)
aagagaaaaatgaagacgggacattttgaaatagtcaccatgctgctggcaaccatgattctagtggacattttccaggtgagaaaaactggaagcttgaagaccatggtgagaaaaacc

SEQ ID NO: 453922 - DNA, 120 bp, Artificial Sequence
  ENSG00000156219_20 (sequence is synthesized)
cacaaccccatcataagtcgagaagcatctgtatagcatagtaattcagagcaaatttgaaattagatatttctagcaccagttacccccgtgattttatgcatggcattcctcaaaaca

SEQ ID NO: 453923 - DNA, 120 bp, Artificial Sequence
  ENSG00000156219_21 (sequence is synthesized)
tttcataaatgttttaaggaatatctgtgaaatatggataattatacctggctaataagactaagaagtaaaggtgacagtgtacataaagcatttgcacaatgcatggcacatagtgaa

SEQ ID NO: 453924 - DNA, 120 bp, Artificial Sequence
  ENSG00000156219_22 (sequence is synthesized)
cactcaatagtaggtattaatgtacttgggaatctaagttcaatatgtagaaaatactttttgtgaataaaattttaacttttatttttatgtaaacacatattgatgggaaaaaaaatt

SEQ ID NO: 453925 - DNA, 120 bp, Artificial Sequence
  ENSG00000156219_23 (sequence is synthesized)
cgtaaacctattaccctgcccctcagacccactcacagagataaccaagtttgcttaatttttaatcagatctttcttttctggataaacagatatacaatataactaactcaaaatctc

SEQ ID NO: 453926 - DNA, 120 bp, Artificial Sequence
  ENSG00000156219_24 (sequence is synthesized)
aaatgctaatgtaaccccaaagaactttacaaagcggaattcttagttttcacaagtgtggcccagcctccctcttgaatctttttggttgtggaatcgaggtgttctgtttaattatcc

SEQ ID NO: 453927 - DNA, 120 bp, Artificial Sequence
  ENSG00000156222_0 (sequence is synthesized)
ataagctgcactgcatggttgctgctggatgtgttgtgttcctggcttccctctggatgctgacagaaacaaggctggaaggtctgggacatggagaacgacccctcgagacgaagagag

SEQ ID NO: 453928 - DNA, 120 bp, Artificial Sequence
  ENSG00000156222_1 (sequence is synthesized)
tccatctctctcacacctgtggccaagggtctggagaacatgggggctgatttcttggaaagcctggaggaaggccagctccctaggagtgacttgagccccgcagagatcaggagcagc

SEQ ID NO: 453929 - DNA, 120 bp, Artificial Sequence
  ENSG00000156222_2 (sequence is synthesized)
tggagcgaggcggcgccgaagcccttctccagatggaggaacctgcagccagccctgagagccagaagcttctgcagggagcacatgcagctgtttcgatggatcggcacaggcctgctc

SEQ ID NO: 453930 - DNA, 120 bp, Artificial Sequence
  ENSG00000156222_3 (sequence is synthesized)
tgcactgggctctctgccttcctgctggtggcctgcctcctggatttccagagggccctggctctgtttgtcctcacctgtgtggtcctcaccttcctgggccaccgcctgctgaaacgg

SEQ ID NO: 453931 - DNA, 120 bp, Artificial Sequence
  ENSG00000156222_4 (sequence is synthesized)
cttctggggccaaagctgaggaggtttctcaagcctcagggccatccccgcctgctgctctggtttaagaggggtctagctcttgctgctttcctgggcctggtcctgtggctgtctctg

SEQ ID NO: 453932 - DNA, 120 bp, Artificial Sequence
  ENSG00000156222_5 (sequence is synthesized)
gacacctcccagcggcctgagcaactggtgtccttcgcaggaatctgcgtgttcgtcgctctcctctttgcctgctcaaagcatcattgcgcagtgtcctggagggccgtgtcttgggga

SEQ ID NO: 453933 - DNA, 120 bp, Artificial Sequence
  ENSG00000156222_6 (sequence is synthesized)
cttggactgcagtttgtacttggactcctcgtcatcagaacagaaccaggattcattgcgttcgagtggctgggcgagcagatccggatcttcctgagctacacgaaggctggctccagc

SEQ ID NO: 453934 - DNA, 120 bp, Artificial Sequence
  ENSG00000156222_7 (sequence is synthesized)
ttcgtgtttggggaggcgctggtcaaggatgtctttgcctttcaggttctgcccatcattgtctttttcagctgtgtcatatccgttctctaccacgtgggcctcatgcagtgggtgatc

SEQ ID NO: 453935 - DNA, 120 bp, Artificial Sequence
  ENSG00000156222_8 (sequence is synthesized)
ctgaagattgcctggctgatgcaagtcaccatgggcaccacagccactgagaccctgagtgtggctggaaacatctttgtgagccagaccgaggctccattactgatccggccctacttg

SEQ ID NO: 453936 - DNA, 120 bp, Artificial Sequence
  ENSG00000156222_9 (sequence is synthesized)
gcagacatgacactctctgaagtccacgttgtcatgaccggaggttacgccaccattgctggcagcctgctgggtgcctacatctcctttgggatcgatgccacctcgttgattgcagcc

SEQ ID NO: 453937 - DNA, 120 bp, Artificial Sequence
  ENSG00000156222_10 (sequence is synthesized)
cctcatagaagcagccagcactggggccgccatctccgtgaaggtggtcgccaacatcgctgccaacctgattgcgttcctggctgtgctggactttatcaatgctgccctctcctggct

SEQ ID NO: 453938 - DNA, 120 bp, Artificial Sequence
  ENSG00000156222_11 (sequence is synthesized)
gggagacatggtggacatccaagggctcagcttccagctcatctgctcctacatcctgcggcctgtagccttcttgatgggtgtggcgtgggaggactgcccagtggtagctgagctgct

SEQ ID NO: 453939 - DNA, 120 bp, Artificial Sequence
  ENSG00000156222_12 (sequence is synthesized)
ggggatcaagctgtttctgaacgagtttgtggcctatcaagacctctccaagtacaagcaacgccgcctggcaggggccgaggagtgggtcggcgacaggaagcagtggatctccgtcag

SEQ ID NO: 453940 - DNA, 120 bp, Artificial Sequence
  ENSG00000156222_13 (sequence is synthesized)
agctgaagtcctcacgacgtttgccctctgtggatttgccaatttcagctccattgggatcatgctgggaggcttgacctccatggtcccccaacggaagagcgacttctcccagatagt

SEQ ID NO: 453941 - DNA, 120 bp, Artificial Sequence
  ENSG00000156222_14 (sequence is synthesized)
gctccgggcgctcttcacgggagcctgtgtgtccctggtgaacgcctgtatggcagggatcctctacatgcccaggggggctgaagttgactgcatgtccctcttgaacacgaccctcag

SEQ ID NO: 453942 - DNA, 120 bp, Artificial Sequence
  ENSG00000156222_15 (sequence is synthesized)
cagcagtagctttgagatttaccagtgctgccgtgaggccttccagagcgtcaatccagagttcagcccagaggccctggacaactgctgtcggttttacaaccacacgatctgtgcaca

SEQ ID NO: 453943 - DNA, 120 bp, Artificial Sequence
  ENSG00000156222_16 (sequence is synthesized)
gtgaggacagaacatgcttgtgcttctgcgcttctgagggctgttctcccccgggaaccatctgtccccaccttccctttcccagagccctcttcagggaagccacaggacttagaccca

SEQ ID NO: 453944 - DNA, 120 bp, Artificial Sequence
  ENSG00000156222_17 (sequence is synthesized)
gctcaatcccacaattgggaagggttcatggagtgagtgtgcagagagtgagtgaggacataaggaaggacatgtcccactccatcccccttcctgctcccccatttcctaactccccca

SEQ ID NO: 453945 - DNA, 120 bp, Artificial Sequence
  ENSG00000156222_18 (sequence is synthesized)
gtgtgaattctcagggtcacttctgcctcctcccgtttcccctccacatccaaacagcaccctggtcctctctatcccccctctcctggggtccctcacatgccccttcccttctgttgt

SEQ ID NO: 453946 - DNA, 120 bp, Artificial Sequence
  ENSG00000156222_19 (sequence is synthesized)
gggctgcacaccaaagcctcctcccctccccacttcctaggcactaggatctctctgtggcttcccctgctgggtggtgtcacctctttctctgctttcagagaaacccttcccgccttt

SEQ ID NO: 453947 - DNA, 120 bp, Artificial Sequence
  ENSG00000156222_20 (sequence is synthesized)
cctcagagtgcttcccaaactgaggtcccatggcacactgtcctgggaggcgttcagagggttccatgatggactaggtttggaaccactgggttaaataaacttagagagggctgttta

SEQ ID NO: 453948 - DNA, 120 bp, Artificial Sequence
  ENSG00000156222_21 (sequence is synthesized)
caacgatgtgaaggttataagctgcactgcatggttgctgctggatgtgttgtgttcctggcttccctctggatgctgacagaaacaagggaatttctgctgaagtgacaaggcaagcca

SEQ ID NO: 453949 - DNA, 120 bp, Artificial Sequence
  ENSG00000156222_22 (sequence is synthesized)
gagccaaagcaggttggacccagcttgtccccacagagacgtgtgcttccctctctctctgagagcgacctgttaaccgcaaatacctggaaggtctgggacatggagaacgacccctcg

SEQ ID NO: 453950 - DNA, 120 bp, Artificial Sequence
  ENSG00000156222_23 (sequence is synthesized)
caaaaagccgcagggaccatccctggagggggattcagcaggctcgatcggggtccaggtgctggtatttttcattagcctccaggggattctgatgtagccagcagcgtccttggacaa

SEQ ID NO: 453951 - DNA, 120 bp, Artificial Sequence
  ENSG00000156222_24 (sequence is synthesized)
cagtttgagatctgctgcttttcaaactggattccttggagcgctggaaatctcagcgatgtcacagggcaggagagggaggttgtggagggaaaattcagacttcccgcccagcccacc

SEQ ID NO: 453952 - DNA, 120 bp, Artificial Sequence
  ENSG00000156222_25 (sequence is synthesized)
atttcaccaggcagctctaaatttatgtgttttataagccaaggttcacacaaaaaagaaaattcgctgggggaaaaaaacagtttctatggcttaaaaaaaagtctgaagaccaccagt

SEQ ID NO: 453953 - DNA, 120 bp, Artificial Sequence
  ENSG00000156222_26 (sequence is synthesized)
ctatttcaatactctattttgttgatgaagaagctggtgaccaaagatacccaaagactaagtcagggggatgcaggggtacaggggtgcctctcactttcccaaagtgagatccacata

SEQ ID NO: 453954 - DNA, 120 bp, Artificial Sequence
  ENSG00000156222_27 (sequence is synthesized)
ccacagcaaaatgatttgagccagcctgtggatgaacacatttaaaattttatttataaatacatttactgttacatttgacttctctttattaaatacatttgtgatttatttttgcaa

SEQ ID NO: 453955 - DNA, 120 bp, Artificial Sequence
  ENSG00000156232_0 (sequence is synthesized)
ctagcgaaaaatgatttggctcggactgtcccgtgacaggcggtgcgaggaggccaggcccgcgcccgccgagccctagggccgctgctgccgacagccatggaggacgagcagcctgac

SEQ ID NO: 453956 - DNA, 120 bp, Artificial Sequence
  ENSG00000156232_1 (sequence is synthesized)
agcctggagggctgggtgccggtccgggagggcctcttcgccgagcccgagaggcaccggctgcgcttcctggtggcctggaacggcgcggagggcaagttcgctgtgacttgtcacgac

SEQ ID NO: 453957 - DNA, 120 bp, Artificial Sequence
  ENSG00000156232_2 (sequence is synthesized)
acttgtcacgaccgtaccgcgcagcagcggcggctgcgcgagggggcccggttggggcccgagcccgagcccaagcctgaggccgccgtctccccgtccagctgggccggcctgctctcg

SEQ ID NO: 453958 - DNA, 80 bp, Artificial Sequence
  ENSG00000156232_3 (sequence is synthesized)
cgcggcgcgcaccggcagttggcggcgctgtggccgcctctggagcgctgcttcccgcggctgccgccggagctggacgt

SEQ ID NO: 453959 - DNA, 120 bp, Artificial Sequence
  ENSG00000156232_4 (sequence is synthesized)
gtggccgacgcgcgcgggtcccggcgaggcggcgctgcaggagctgtgcgggcagctggaacgctatctgggcgcggcggccgacggctgcggcggcgccacagtgcgcgacgcactctt

SEQ ID NO: 453960 - DNA, 120 bp, Artificial Sequence
  ENSG00000156232_5 (sequence is synthesized)
gcactcttcccggctgagggcggcgcggccgactgcgaaagcccgcgcgagttccgggagcgggccttgcgcgcgcggtgggtcgaggcggacgcgcggctgcgccaggttattcaagga

SEQ ID NO: 453961 - DNA, 120 bp, Artificial Sequence
  ENSG00000156232_6 (sequence is synthesized)
cacggaaaagccaacaccatggtagcattaatgaacgtttaccaagaggaagatgaagcataccaggaattggttaccgtggcaaccatgttcttccagtacttattgcagccatttagg

SEQ ID NO: 453962 - DNA, 120 bp, Artificial Sequence
  ENSG00000156232_7 (sequence is synthesized)
gctatgcgagaagttgcaactttatgtaagcttgatattttgaagtctttggatgaggatgacctaggtcctagaagggtagttgccctggagaaagaagctgaagaatggaccagacgg

SEQ ID NO: 453963 - DNA, 120 bp, Artificial Sequence
  ENSG00000156232_8 (sequence is synthesized)
gctgaagaagctgtcgtctctattcaggatatcacagtgaattattttaaggagacagtaaaagcattagcaggaatgcagaaagaaatggaacaggatgcgaagagatttggtcaggct

SEQ ID NO: 453964 - DNA, 120 bp, Artificial Sequence
  ENSG00000156232_9 (sequence is synthesized)
gcctgggccacagcaattcccaggttggaaaaacttcagctaatgctagctcgagagactctgcaactcatgagagcgaaagagttgtgtttaaatcacaaaagagctgaaattcaggga

SEQ ID NO: 453965 - DNA, 120 bp, Artificial Sequence
  ENSG00000156232_10 (sequence is synthesized)
aagatggaagatcttccagaacaagaaaaaaatacaaatgttgtagatgaattagaaatacaattttatgaaattcaattagaactatatgaagttaaatttgagatattaaaaaacgaa

SEQ ID NO: 453966 - DNA, 120 bp, Artificial Sequence
  ENSG00000156232_11 (sequence is synthesized)
gaaatactgcttactacacagttggactctcttaaaagacttataaaagaaaaacaagatgaagttgtctattacgatccatgtgaaaatccagaggaacttaaagtcattgactgtgtg

SEQ ID NO: 453967 - DNA, 120 bp, Artificial Sequence
  ENSG00000156232_12 (sequence is synthesized)
gtggggctgcaggatgataagaatttggaagtgaaagaactcagaaggcagtgccagcagctggagtctaaacggggcaggatctgtgccaaaagagcctctctccggagtagaaaggat

SEQ ID NO: 453968 - DNA, 120 bp, Artificial Sequence
  ENSG00000156232_13 (sequence is synthesized)
cagtgcaaagaaaatcatcggttcagattgcaacaggctgaagaaagcataagatactctcgtcagcatcacagtattcagatgaaaagagacaagataaaagaagaggagcaaaagaaa

SEQ ID NO: 453969 - DNA, 120 bp, Artificial Sequence
  ENSG00000156232_14 (sequence is synthesized)
aaagaatggatcaaccaagaacgtcaaaaaacactccaacgattgagatcatttaaagataaacgcctagctcaatctgtccgaaacacctctggctcagaacctgtggctccaaacctg

SEQ ID NO: 453970 - DNA, 120 bp, Artificial Sequence
  ENSG00000156232_15 (sequence is synthesized)
ccaagtgatctttcccagcagatgtgcttgccagcttcccacgcggtgtcagtaattcacccgtcctctaggaaaactagaggtgttcccctatcggaagctggtaatgtgaaaagcccc

SEQ ID NO: 453971 - DNA, 120 bp, Artificial Sequence
  ENSG00000156232_16 (sequence is synthesized)
aagtgtcaaaactgtcatggaaatatccctgtccaggtttttgttccagttggtgatcaaacacattccaaatccagtgaggaattgtcactgccaccacctcctcctcctccaccacca

SEQ ID NO: 453972 - DNA, 120 bp, Artificial Sequence
  ENSG00000156232_17 (sequence is synthesized)
ccaccgccgccaccgccgcccccaccccctcctctccgtgctctgtcctcatcctctcaagctgcaactcatcagaacttaggcttccgggctccagtgaaagatgaccagccacgtcct

SEQ ID NO: 453973 - DNA, 120 bp, Artificial Sequence
  ENSG00000156232_18 (sequence is synthesized)
ctagtgtgcgaatcacctgctgagcgaccacgtgactccttggaaagtttttcatgtccaggatctatggatgaagtgttggcctccttaaggcatggcagagctcctctccggaaggtg

SEQ ID NO: 453974 - DNA, 120 bp, Artificial Sequence
  ENSG00000156232_19 (sequence is synthesized)
gaagtgccggcggtgcgccctccccacgcctcaatcaatgagcacattctggctgccataaggcaaggggtcaaactgaagaaagttcaccctgatcttggcccaaaccccagcagcaaa

SEQ ID NO: 453975 - DNA, 120 bp, Artificial Sequence
  ENSG00000156232_20 (sequence is synthesized)
ccaaccagcaacagacgcaccagtgaccttgagaggagcatcaaggctgcgctccagagaatcaagagggtgtctgctgactctgaggaggacagtgatgagcaggaccctggccagtgg

SEQ ID NO: 453976 - DNA, 120 bp, Artificial Sequence
  ENSG00000156232_21 (sequence is synthesized)
gtcttagacctatcgaaaagcatactaacagggtgctgatagatgggccacataacaccccggaagatcagcagggccttgtgtaggctgctgcagcattttttttttttttcttttttg

SEQ ID NO: 453977 - DNA, 61 bp, Artificial Sequence
  ENSG00000156232_22 (sequence is synthesized)
tttttctttcttttgagacagaatctctctgtcatccaggctagagtgcagtggcacgatc

SEQ ID NO: 453978 - DNA, 120 bp, Artificial Sequence
  ENSG00000156232_23 (sequence is synthesized)
tataggcatgagccaccgtgcctggctgatgctggagcttttatgtgacatggtgactcttaaaactggggagggacgtagagatgagagtttcacacaccagcccataggtgggatgtc

SEQ ID NO: 453979 - DNA, 120 bp, Artificial Sequence
  ENSG00000156232_24 (sequence is synthesized)
aagacccatcggaagtgtcgctggcctaagagaagagcacttatttctcaccatggctgatctagaattgttccctgattctgaaagaagtttacactacactggtaagcagtactatta

SEQ ID NO: 453980 - DNA, 120 bp, Artificial Sequence
  ENSG00000156232_25 (sequence is synthesized)
gactactgactgtggccttctgtgcatatggaataatgatttctcagatttgtaggcttgaatgtgaatgttattttatcagtaatcagaataaattgcttatattcaggagttatttta

SEQ ID NO: 453981 - DNA, 120 bp, Artificial Sequence
  ENSG00000156232_26 (sequence is synthesized)
aatatttaaatgaaatttattttaggcaccaagcactacataaactcataataactatttgcaatgcattagcatcactcacggggtaatgaaaacataccttagctgctgtaaaagcaa

SEQ ID NO: 453982 - DNA, 120 bp, Artificial Sequence
  ENSG00000156232_27 (sequence is synthesized)
agtcttccgtgtccgggtgggctgaaagtttttaataaaattttagctaaacatttgtttaagtgaatactaaggatggagcaatagtgttattttcctcaggaactgaagtctcatgct

SEQ ID NO: 453983 - DNA, 120 bp, Artificial Sequence
  ENSG00000156232_28 (sequence is synthesized)
gaagtattttctccttaaaattaaatttttaaaatcagggaaggggaagggactgatgcaaagcagtccgttcatttctcagactgcgagcatccctactaacctcatcaccctcactct

SEQ ID NO: 453984 - DNA, 120 bp, Artificial Sequence
  ENSG00000156232_29 (sequence is synthesized)
ggtgatattactcctgggtctccacagaacaaaaggaacgcacctcgtttacaaagaaagtcctgattgatatagaacagaaatcttcctacttcagtttttttgtttttttttttgaga

SEQ ID NO: 453985 - DNA, 120 bp, Artificial Sequence
  ENSG00000156232_30 (sequence is synthesized)
tacaggcgtgagccaccacacctggccttccagtgtcttaactaactggtacacagcagcctgaggggcctcagttggcacagctgggaggggcgtgagtccctttcagcagctgcagcc

SEQ ID NO: 453986 - DNA, 120 bp, Artificial Sequence
  ENSG00000156232_31 (sequence is synthesized)
ctgcagcctgggtctccctctgtggcatggccactgccaggtttcccagccactgccaggttgcccacgggtctgtcatgtgtgctaccttttcagaatgcaaatccaactcctgtgtat

SEQ ID NO: 453987 - DNA, 120 bp, Artificial Sequence
  ENSG00000156232_32 (sequence is synthesized)
gaatgaatgtgcctcactgtgctggcccaggcctgatgggccaagccctgactctgcactggcccctgtacctgccgctcccacccaggttcccaggggtgttccagtgggggacgcaac

SEQ ID NO: 453988 - DNA, 120 bp, Artificial Sequence
  ENSG00000156232_33 (sequence is synthesized)
ctgcgggctactcgctgggcatcaggtccagatcccagagacaggtccagtggctgtggcccaggcctccttccccaccacagacaggccaggctcagcatcaaacttcctagggaaaga

SEQ ID NO: 453989 - DNA, 120 bp, Artificial Sequence
  ENSG00000156232_34 (sequence is synthesized)
atttggaattgaaaaagtagcaaaatcacaactttgtgggacttttcttatgcatattttgcagtttggcattgtttgtaattacgtatttataatttcagtattttgagataccagcga

SEQ ID NO: 453990 - DNA, 120 bp, Artificial Sequence
  ENSG00000156232_35 (sequence is synthesized)
gcttaatcaggctaaaataattctcagaatttgctttctaagggctgccaaacacaagaggcctttgaaaaaaggatccttttcaaaagaacgttctcacaataaaaattcctggcccaa

SEQ ID NO: 453991 - DNA, 120 bp, Artificial Sequence
  ENSG00000156234_0 (sequence is synthesized)
gagaagatgtttgaaaaaactgactctgctaatgagcctggactcagagctcaagtctgaactctacctccagacagaatgaagttcatctcgacatctctgcttctcatgctgctggtc

SEQ ID NO: 453992 - DNA, 120 bp, Artificial Sequence
  ENSG00000156234_1 (sequence is synthesized)
agcagcctctctccagtccaaggtgttctggaggtctattacacaagcttgaggtgtagatgtgtccaagagagctcagtctttatccctagacgcttcattgatcgaattcaaatcttg

SEQ ID NO: 453993 - DNA, 120 bp, Artificial Sequence
  ENSG00000156234_2 (sequence is synthesized)
ccccgtgggaatggttgtccaagaaaagaaatcatagtctggaagaagaacaagtcaattgtgtgtgtggaccctcaagctgaatggatacaaagaatgatggaagtattgagaaaaaga

SEQ ID NO: 453994 - DNA, 120 bp, Artificial Sequence
  ENSG00000156234_3 (sequence is synthesized)
agttcttcaactctaccagttccagtgtttaagagaaagattccctgatgctgatatttccactaagaacacctgcattcttcccttatccctgctctggattttagttttgtgcttagt

SEQ ID NO: 453995 - DNA, 120 bp, Artificial Sequence
  ENSG00000156234_4 (sequence is synthesized)
taaatcttttccaggaaaaagaacttccccatacaaataagcatgagactatgtaaaaataaccttgcagaagctgatggggcaaactcaagcttcttcactcacagcaccctatataca

SEQ ID NO: 453996 - DNA, 120 bp, Artificial Sequence
  ENSG00000156234_5 (sequence is synthesized)
ggagtttgcattcttattcatcagggaggaaagtttctttgaaaatagttattcagttataagtaatacaggattattttgattatatacttgttgtttaatgtttaaaatttcttagaa

SEQ ID NO: 453997 - DNA, 120 bp, Artificial Sequence
  ENSG00000156234_6 (sequence is synthesized)
aacaatggaatgagaatttaagcctcaaatttgaacatgtggcttgaattaagaagaaaattatggcatatattaaaagcaggcttctatgaaagactcaaaaagctgcctgggaggcag

SEQ ID NO: 453998 - DNA, 120 bp, Artificial Sequence
  ENSG00000156234_7 (sequence is synthesized)
atggaacttgagcctgtcaagaggcaaaggaatccatgtagtagatatcctctgcttaaaaactcactacggaggagaattaagtcctacttttaaagaatttctttataaaatttactg

SEQ ID NO: 453999 - DNA, 120 bp, Artificial Sequence
  ENSG00000156234_8 (sequence is synthesized)
tctaagattaatagcattcgaagatccccagacttcatagaatactcagggaaagcatttaaagggtgatgtacacatgtatcctttcacacatttgccttgacaaacttctttcactca

SEQ ID NO: 454000 - DNA, 120 bp, Artificial Sequence
  ENSG00000156234_9 (sequence is synthesized)
catctttttcactgactttttttgtggggggcggggccggggggactctggtatctaattctttaatgattcctataaatctaatgacattcaataaagttgagcaaacattttacttaa

SEQ ID NO: 454001 - DNA, 120 bp, Artificial Sequence
  ENSG00000156234_10 (sequence is synthesized)
acaaatgtgtgtttttcactgttattgcttatcagatggagtaggggtagctcattccagcagctcagtaaaccaaactagatgccagtatacataagagtccttgcccggtatctccag

SEQ ID NO: 454002 - DNA, 120 bp, Artificial Sequence
  ENSG00000156239_0 (sequence is synthesized)
gcatggaacgcagcgaaggactatggcaggggagaacttcgctacgccgttccacgggcacgtgggccgcggcgccttcagcgacgtgtacgagcccgcggaggacacgtttctgctttt

SEQ ID NO: 454003 - DNA, 120 bp, Artificial Sequence
  ENSG00000156239_1 (sequence is synthesized)
ggacgcgctggaggcagcggctgccgaactggcaggagtggaaatatgcctggaagtagggtcagggtctggtgtagtatctgcattcctagcctctatgataggccctcaggctttgta

SEQ ID NO: 454004 - DNA, 120 bp, Artificial Sequence
  ENSG00000156239_2 (sequence is synthesized)
catgtgcactgatatcaaccctgaggcagcagcttgtaccctagagacagcacgctgtaacaaagttcacattcaaccagttattacagatttggtcaaaggcttgctaccaagattgac

SEQ ID NO: 454005 - DNA, 120 bp, Artificial Sequence
  ENSG00000156239_3 (sequence is synthesized)
cgaaaaagttgatcttctggtgtttaatcccccctatgtagtgactccacctcaagaggtaggaagtcacggaatagaggcagcttgggctggtggcagaaatggtcgggaagtcatgga

SEQ ID NO: 454006 - DNA, 120 bp, Artificial Sequence
  ENSG00000156239_4 (sequence is synthesized)
caggttttttcccctggttccagatctcctttcaccaagaggattattctatttagttaccattaaagaaaacaacccagaagaaattttgaaaataatgaagacaaaaggtctgcaagg

SEQ ID NO: 454007 - DNA, 120 bp, Artificial Sequence
  ENSG00000156239_5 (sequence is synthesized)
aaccactgcactttccagacaagcaggccaagaaactctttcagtcctcaagttcaccaagtcttagcatacagtgtgtgcccagaactactggaaactgaatgcatttagcatattttg

SEQ ID NO: 454008 - DNA, 120 bp, Artificial Sequence
  ENSG00000156239_6 (sequence is synthesized)
aaactgaagtcattcattaggtaacaaggaattttatcagaaatttgtcattaaaaaaaggtagaaaggtggaacattccctttcagtcaggcctatagaattatttgcacaagtacaag

SEQ ID NO: 454009 - DNA, 120 bp, Artificial Sequence
  ENSG00000156239_7 (sequence is synthesized)
taaatatgtgtattatatttatagtttgcattttaaatataaaaattatgtatgaaatatttatttcagcattatgtggtaaggcaatggaattgatctggcaaatgtcttttttttcat

SEQ ID NO: 454010 - DNA, 120 bp, Artificial Sequence
  ENSG00000156239_8 (sequence is synthesized)
accagtccataaaggcagtttgctttcagatggcagggccagcaacacaccttcattgtcgtatctccggtgtgtatcagctctccaactctatgtcataattcagttcatggggatctt

SEQ ID NO: 454011 - DNA, 120 bp, Artificial Sequence
  ENSG00000156239_9 (sequence is synthesized)
gattacctttcccttccacaaaatattacactgattggttatatcgatgacattatgctgatttgacctagtgagcaagaagtaggaactacattagacttagtggaaagacatttgcat

SEQ ID NO: 454012 - DNA, 120 bp, Artificial Sequence
  ENSG00000156239_10 (sequence is synthesized)
cagagggtaggaaataaatatgactacaattcaagggccttctaccttagtgaaattggtagggatccagtgacatggggcatgttaggatatttcttctacggtgaaggataagtactt

SEQ ID NO: 454013 - DNA, 120 bp, Artificial Sequence
  ENSG00000156239_11 (sequence is synthesized)
gcatcttgctgctcttaaaaccaagaaagaggcacaatacttagtgggcctctttgggttttggaggcaacattttccaatttcattatgttataccagcctgtttaccaattgactcaa

SEQ ID NO: 454014 - DNA, 80 bp, Artificial Sequence
  ENSG00000156239_12 (sequence is synthesized)
tttcattatgttataccagcctgtttaccaattgactcaaaaagctgctagttttgagtagggcccagaacaagaaaaga

SEQ ID NO: 454015 - DNA, 120 bp, Artificial Sequence
  ENSG00000156239_13 (sequence is synthesized)
tggcagtggcagatagggatgctgtttgaagcttctggcaggtccctataggtgaatcttggtttaggattttagagcaaagccgtgccattaccaacaaataactagtctctttttgag

SEQ ID NO: 454016 - DNA, 120 bp, Artificial Sequence
  ENSG00000156239_14 (sequence is synthesized)
aaacagctcttggcctgctactgggccttagtagagactgatacttaatgagtcaccaagttaccgtgcaacctgagcttcccatcatgaactggatgttatctgagccaccaacgcaca

SEQ ID NO: 454017 - DNA, 120 bp, Artificial Sequence
  ENSG00000156239_15 (sequence is synthesized)
aagttggatatgcacagcaacactctgtcatcagatggaagtggtatacacatgattgggcctgagaggccctgaaggcacaaggaagttacatgaagaagtaggccaaatttccgtagt

SEQ ID NO: 454018 - DNA, 120 bp, Artificial Sequence
  ENSG00000156239_16 (sequence is synthesized)
ccccacttctgctacctgccttctctcttccagcctgcatcggtggcttcatggggacttccctgtgatcagctgacagagaaagagaagacttaggcctggtttacagagtgttctgta

SEQ ID NO: 454019 - DNA, 120 bp, Artificial Sequence
  ENSG00000156239_17 (sequence is synthesized)
tgatatgcaggtaccaccctaaagtggatagctgcagcactacatctcacctctgggctaccttgaaggacagtggtgaagggaaatcctcctggtggacacaactttgagcagtccccc

SEQ ID NO: 454020 - DNA, 120 bp, Artificial Sequence
  ENSG00000156239_18 (sequence is synthesized)
tgttgactttgcttagaaggaaaaatagccagatattcaattatatgccaattcataggccgtggccagtggtttggctggatggtcagggagttcaatataactggaaaattggtgaca

SEQ ID NO: 454021 - DNA, 120 bp, Artificial Sequence
  ENSG00000156239_19 (sequence is synthesized)
aagaaatttggagatgaagtatgtggatagacactgaatgggcaaaaagggtgaagatatttgtgccccatgtgaatgctcaccaaagggttagcaaaaaaggattttaataaagtggac

SEQ ID NO: 454022 - DNA, 120 bp, Artificial Sequence
  ENSG00000156239_20 (sequence is synthesized)
aattgtttcatgagcaaagtagccatggtgacaagaatagaggttatgcatgggctcagcaacgtggacttctactcaccaaggctgacctggccaaggctatctctgagtgcccagtct

SEQ ID NO: 454023 - DNA, 120 bp, Artificial Sequence
  ENSG00000156239_21 (sequence is synthesized)
gccagcaacagagaccaacactgagcccctgatatgacaccattccccagggtcatcagtcagttgcctagtggcaggttcattacattgatccacctctatcattgaagggatagtgtt

SEQ ID NO: 454024 - DNA, 120 bp, Artificial Sequence
  ENSG00000156239_22 (sequence is synthesized)
ttatccttactgaaatagatcttactctggatacagattcactttcccttcgcgcagggtgtctgctaaaactaccatccgtggacttacagaatgtctcatctatgaccatggtattcc

SEQ ID NO: 454025 - DNA, 120 bp, Artificial Sequence
  ENSG00000156239_23 (sequence is synthesized)
acacagcattacaagaaactcagttcacagcaaaagtgtggcagtgggcccatgatcatggaattttcttaccatgttccctactatcttgaatcaactggctacatagagcagtggaat

SEQ ID NO: 454026 - DNA, 120 bp, Artificial Sequence
  ENSG00000156239_24 (sequence is synthesized)
ggcattttgaagacagtaataacaccagctatatagcagtgccttgtagggctgggacaaggttctctagaagactgtctatgctctgaatcaacatccagtatatggtgcatttctctt

SEQ ID NO: 454027 - DNA, 120 bp, Artificial Sequence
  ENSG00000156239_25 (sequence is synthesized)
tccagtatatggtgcatttctcttatgactgggattcacaggtccaggaatcaaggggtcagaataggaaggacaccattcgctattagccctggtgacccactagcaaaatttttgctt

SEQ ID NO: 454028 - DNA, 120 bp, Artificial Sequence
  ENSG00000156239_26 (sequence is synthesized)
ctggcctagaggtcttacatagggtggaatattttccactgagagacgcaatcatgatttaattgaactggaagtttaagactgctcctcagccatttggggcttcttatgcctctaact

SEQ ID NO: 454029 - DNA, 120 bp, Artificial Sequence
  ENSG00000156239_27 (sequence is synthesized)
caatagacaaatgagttacagtgctggctgggtgattgttcctgactaccaagtagaaactggactaccccgaatggtggtaaggtaaagtatgttgggaatacacaggattccttaggg

SEQ ID NO: 454030 - DNA, 120 bp, Artificial Sequence
  ENSG00000156239_28 (sequence is synthesized)
catctcttagtgttatcatgccctgtgattaaggtcaatggaaaactacagcctaattcagacaggaccactaatgatccagacctttcaggaatgaaggtttgggtcaccaccaggtaa

SEQ ID NO: 454031 - DNA, 120 bp, Artificial Sequence
  ENSG00000156239_29 (sequence is synthesized)
gtaccatgaccagatgaagtgcttgctgaaggcaaagggaatacagaataaatggtggaataaatactagctttgatcatatgaccagttacagaaacacagactgtgattgtcataagt

SEQ ID NO: 454032 - DNA, 120 bp, Artificial Sequence
  ENSG00000156239_30 (sequence is synthesized)
atgtcctccatattttgctataactacattttgtgtgtgtgtagctttgttttcttctcatttccttattctgtaacataagatgcattgattttatagcatagtgtttaaatattgtta

SEQ ID NO: 454033 - DNA, 120 bp, Artificial Sequence
  ENSG00000156239_31 (sequence is synthesized)
atttttttaactggctccagtgttcaaccttgattaattttacatcatagtatttaagttatgggatatcaaggagagagtaaacatcacatgaagactttaccacctcttctgggaaac

SEQ ID NO: 454034 - DNA, 120 bp, Artificial Sequence
  ENSG00000156239_32 (sequence is synthesized)
gggttagagtgtttctggtggaatgctggattgttaatcgtgttagatggaattatgaccttgttgttgtctttatgtggcagttaagtatggtttaaagagatgtttatgggtgccaag

SEQ ID NO: 454035 - DNA, 120 bp, Artificial Sequence
  ENSG00000156239_33 (sequence is synthesized)
ttgacaagggtaaacttgtgatggttaattttatatgtcaacttgaataggccacagggtgccaaatatctgtttaaacattattctgaagtgtcttgagtgtgtttacagacaagattt

SEQ ID NO: 454036 - DNA, 120 bp, Artificial Sequence
  ENSG00000156239_34 (sequence is synthesized)
gcatttgaactgggggactcagtaaaggagatagccatccccaaggtgggtggacatcatccagtttgttgagggcgtaaataaaataaaaggcagaggaaggaagaattcccccccctt

SEQ ID NO: 454037 - DNA, 120 bp, Artificial Sequence
  ENSG00000156239_35 (sequence is synthesized)
ttttttcctgcctcattgtttgagctgtgacatctcatcttctgtcctcagatggatttacatcactggcttccctggttctcaagcctttggattcagactgaattataccacaggcct

SEQ ID NO: 454038 - DNA, 120 bp, Artificial Sequence
  ENSG00000156239_36 (sequence is synthesized)
tcctgggtctccagcttatagatgacagatcatgggacctcttagcctccataatcatgtaagccactttcttgtagtactggtaaaagatatattagaccaatctataaaacagctagc

SEQ ID NO: 454039 - DNA, 120 bp, Artificial Sequence
  ENSG00000156239_37 (sequence is synthesized)
tatgaaagagaaaggtgacaggcacaagcctaggcaaatagagaagggttcctggagagcctctgacttgcctaggtcattgtgcacacgtggcttgcctgaatgaacatgcccactgtg

SEQ ID NO: 454040 - DNA, 120 bp, Artificial Sequence
  ENSG00000156239_38 (sequence is synthesized)
aaagattccatttctcaacacatgtgcagtaagggaaataaatcaatgtggctcagactaagcgcccacacatggggtggagccacgaggagtttgctccttatgcaggggagaagccgt

SEQ ID NO: 454041 - DNA, 120 bp, Artificial Sequence
  ENSG00000156239_39 (sequence is synthesized)
gcctcttcagctcgtgtgtggtggcctggcattcaatttgtgaggtgtaaaacctgcatgaaggacccctctttttgtggagagctttccttttgcctaataaattctgccctcctcgcc

SEQ ID NO: 454042 - DNA, 120 bp, Artificial Sequence
  ENSG00000156253_0 (sequence is synthesized)
cggtaggtcgccagctgaggcggtttgtaagttttgggtcgcagtatgctagaattttgaggctcccttctgatgaaaattgagctgtccatgcagccatggaacccgggttacagcagt

SEQ ID NO: 454043 - DNA, 120 bp, Artificial Sequence
  ENSG00000156253_1 (sequence is synthesized)
gagggggccacggctcaagaaacttacacatgtccaaaaatgattgagatggagcaggcggaggcccagcttgctgagttagacctgctagccagtatgttccctggtgagaatgagctc

SEQ ID NO: 454044 - DNA, 120 bp, Artificial Sequence
  ENSG00000156253_2 (sequence is synthesized)
atagtgaatgaccagctggctgtagcagaactgaaagattgtattgaaaagaagacaatggaggggcgatcttcaaaagtctactttactatcaatatgaacctggatgtatctgacgaa

SEQ ID NO: 454045 - DNA, 120 bp, Artificial Sequence
  ENSG00000156253_3 (sequence is synthesized)
aaaatggcgatgttttctctggcctgtattcttccctttaaatacccggcagttctgcctgaaattactgtcagatcagtattattgagtagatcccagcagactcagctgaacacagat

SEQ ID NO: 454046 - DNA, 120 bp, Artificial Sequence
  ENSG00000156253_4 (sequence is synthesized)
ctgactgcattcctgcaaaaacattgtcatggagatgtttgtatactgaatgccacagagtgggttagagaacacgcctctggctatgtcagcagagatacttcatcttcacccaccaca

SEQ ID NO: 454047 - DNA, 120 bp, Artificial Sequence
  ENSG00000156253_5 (sequence is synthesized)
ggaagcacagtccagtcagttgacctcatcttcacgagactctggatctacagccatcatatctataacaaatgcaaaagaaagaatattctagagtgggcaaaggagctttccctgtct

SEQ ID NO: 454048 - DNA, 120 bp, Artificial Sequence
  ENSG00000156253_6 (sequence is synthesized)
gggtttagcatgcctggaaaacctggtgttgtttgtgtggaaggcccacaaagtgcctgtgaagaattctggtcaagactcagaaaattaaactggaagagaattttaattcgccatcga

SEQ ID NO: 454049 - DNA, 120 bp, Artificial Sequence
  ENSG00000156253_7 (sequence is synthesized)
gaagacattccttttgatggtacaaatgatgaaacggaaagacaaaggaaattttccatttttgaagaaaaagtgttcagtgttaatggagccaggggaaaccacatggactttggtcag

SEQ ID NO: 454050 - DNA, 120 bp, Artificial Sequence
  ENSG00000156253_8 (sequence is synthesized)
ctctatcagttcttaaacaccaaaggatgtggggatgttttccagatgttctttggtgtagaaggacaatgacatcaagagtagttgaaagtatcttgccactgttggccttttgatttt

SEQ ID NO: 454051 - DNA, 120 bp, Artificial Sequence
  ENSG00000156253_9 (sequence is synthesized)
tttttcccactttttcttgaaagattaagtaattttattttagttccattctagaatgttggggagtggggcacaagaaaaaatagtatagctgaaatgcatctgttaaaaatgtcatga

SEQ ID NO: 454052 - DNA, 120 bp, Artificial Sequence
  ENSG00000156253_10 (sequence is synthesized)
ttgaaagcagaactgagtttcaaattacaaccttaaaattgttgttagatatttcttcacatatcagctgcccattttgaaaaagaaattatccataaaggtaatgttggtgctccaatt

SEQ ID NO: 454053 - DNA, 120 bp, Artificial Sequence
  ENSG00000156253_11 (sequence is synthesized)
tgccagccattcccaacccccttctcccttacctgccttcactaaagaacccagaaaagctaattgctcccctttcagcctctgttgcaactaacaactctcagtggcctcaggacacag

SEQ ID NO: 454054 - DNA, 120 bp, Artificial Sequence
  ENSG00000156253_12 (sequence is synthesized)
acctcctcccccccttactgccataaacaccaaagtgatgactggagctggaggagttatttgaaccacgacgaagggccaagagaaccacgaagatgccagttgccacattgttgagct

SEQ ID NO: 454055 - DNA, 120 bp, Artificial Sequence
  ENSG00000156253_13 (sequence is synthesized)
gctgacccaacaccagccattgcctgtctctaaacatcttatgaaataaaaccagttttgtttaatttctaggctttttttttaaatagacggagtcttgctctgtcgcccgggctagag

SEQ ID NO: 454056 - DNA, 60 bp, Artificial Sequence
  ENSG00000156253_14 (sequence is synthesized)
accatgcctggctaatttttgtgttttttagtagagacagggtgttcccaatgtgcttgg

SEQ ID NO: 454057 - DNA, 120 bp, Artificial Sequence
  ENSG00000156253_15 (sequence is synthesized)
tgcctggccaatatctaggctttttactagcagttgaaagctagtttgtcaaatagagtttttcagagctttagttttgcatttaccccagccttttgatacacaaataggtgaagtttt

SEQ ID NO: 454058 - DNA, 120 bp, Artificial Sequence
  ENSG00000156253_16 (sequence is synthesized)
tctgaagtggagtttgcagttccccactttttgtatactcacgctctgcccctgctcctgggcttgcctcagacaaggctgaggcattagtagggcttaaacttttttaacaagcctcaa

SEQ ID NO: 454059 - DNA, 120 bp, Artificial Sequence
  ENSG00000156253_17 (sequence is synthesized)
caattcatcaaattagtaatttagaaaatttgtttggcaaattgtattctgacattttttgttctggaaatggctttctgtacatttatttttgccaaattgacctagcattaaataaac

SEQ ID NO: 454060 - DNA, 120 bp, Artificial Sequence
  ENSG00000156253_18 (sequence is synthesized)
acaccacccagtttttgaggacctccataaaccagttagttccaaaagcatttattatttgctaatttgctagcatgcaggttgatgcaggttgataccaggtgttggatatttcttgac

SEQ ID NO: 454061 - DNA, 120 bp, Artificial Sequence
  ENSG00000156253_19 (sequence is synthesized)
cagtcagacttggttaaggaatggagttggggtgagagacaatgcattaagttagtaaaaggttgtaggcaaactatgcttatcacaaaatgaatcagttagtaaaagacagcatatatt

SEQ ID NO: 454062 - DNA, 120 bp, Artificial Sequence
  ENSG00000156253_20 (sequence is synthesized)
atgtaatacaatgtagaaatctgaaggaataaaatggaagaaggcaatgtggatagatcttaaatataaaggtggttaaacataaatgagaatcagaatggtatttaaagcacagtgctt

SEQ ID NO: 454063 - DNA, 120 bp, Artificial Sequence
  ENSG00000156253_21 (sequence is synthesized)
gtattggacctaaatcttatgtacgtccccagatttcctccctgctgccctgtcctatcgccccgtcagttgccctggaaatcccagttcctctgctgccaccagacagccaggtggacc

SEQ ID NO: 454064 - DNA, 120 bp, Artificial Sequence
  ENSG00000156253_22 (sequence is synthesized)
agttgtgtgtctagtttctgattcctccagcgactaacagatttgtatgaaataccctacagagaatggaatctgacatccctaccaccaaagggggcagatgatgcatatattacttta

SEQ ID NO: 454065 - DNA, 120 bp, Artificial Sequence
  ENSG00000156253_23 (sequence is synthesized)
agcagctaaagtggcagctaaactgctaaaactttttcagtctctctacattatattaaaaaccagattgctatgtataatatgcagatctcaaatgtcacataaacacatagaatgcaa

SEQ ID NO: 454066 - DNA, 120 bp, Artificial Sequence
  ENSG00000156253_24 (sequence is synthesized)
gttacagaagctctggccaactttggaggtcaaaattaatctgagaataaaagcaattctcgaatttgttttctgttccaagacaatatttttcttgtatcttttctattagatcagtat

SEQ ID NO: 454067 - DNA, 120 bp, Artificial Sequence
  ENSG00000156256_0 (sequence is synthesized)
attgctttccaggggtcactctggcttcgactccgtcgctctcaattcgtcaccaggaggaagacggagctggctgcccagcccaaaggcccatgaggggatgcagttatgggctctgtc

SEQ ID NO: 454068 - DNA, 120 bp, Artificial Sequence
  ENSG00000156256_1 (sequence is synthesized)
gccgtggaacttgtttgcttcattcttatgtacctacctttgcaccttgtaatcatcctttatgcctcagattgttattttgtgtcagtaagtaatccataaagtgccaacatgggaaag

SEQ ID NO: 454069 - DNA, 120 bp, Artificial Sequence
  ENSG00000156256_2 (sequence is synthesized)
aaacggacaaagggaaaaactgttccaatcgatgattcctctgaaactttagaacctgtgtgcagacacattagaaaaggattggaacaaggtaatttgaaaaaggctttagtgaatgtg

SEQ ID NO: 454070 - DNA, 120 bp, Artificial Sequence
  ENSG00000156256_3 (sequence is synthesized)
gaatggaatatctgccaagactgtaagactgacaataaagtgaaagataaagctgaagaagaaacagaagaaaagccttcagtttggctgtgtcttaaatgtggccatcagggctgtggc

SEQ ID NO: 454071 - DNA, 120 bp, Artificial Sequence
  ENSG00000156256_4 (sequence is synthesized)
agaaattctcaggagcagcatgccttgaagcactatctgacgccaagatctgaacctcactgtctggttcttagtttggacaactggagtgtatggtgttacgtatgtgataatgaggtc

SEQ ID NO: 454072 - DNA, 120 bp, Artificial Sequence
  ENSG00000156256_5 (sequence is synthesized)
cagtattgtagttcaaaccagttgggtcaagtggttgattatgtcagaaaacaagccagcattacaactccaaagccagcagagaaagataatggaaatattgaacttgaaaataaaaaa

SEQ ID NO: 454073 - DNA, 120 bp, Artificial Sequence
  ENSG00000156256_6 (sequence is synthesized)
ttagaaaaagagagtaagaatgaacaagagagagaaaagaaggaaaacatggctaaagagaatcctcccatgaattctccttgccaaataaccgtgaaaggactcagtaatttgggaaac

SEQ ID NO: 454074 - DNA, 120 bp, Artificial Sequence
  ENSG00000156256_7 (sequence is synthesized)
acatgtttcttcaatgcagttatgcagaacttgtcacaaacaccagtgcttagagaactactaaaagaagtgaaaatgtctggaacaattgtaaaaattgaaccacctgatttggcatta

SEQ ID NO: 454075 - DNA, 120 bp, Artificial Sequence
  ENSG00000156256_8 (sequence is synthesized)
acagaaccattagaaataaaccttgagcctccaggccctcttactttagccatgagccagtttcttaatgagatgcaagagaccaaaaagggggttgtgacaccgaaagaactcttttct

SEQ ID NO: 454076 - DNA, 120 bp, Artificial Sequence
  ENSG00000156256_9 (sequence is synthesized)
caggtctgtaaaaaagcagtgcggtttaaaggctatcagcagcaagacagccaggagctgcttcgctacttattggatgggatgagagcagaagaacaccaaagagtgagtaaaggaata

SEQ ID NO: 454077 - DNA, 120 bp, Artificial Sequence
  ENSG00000156256_10 (sequence is synthesized)
cttaaagcatttggtaattctactgaaaagttggatgaagaactaaaaaataaagttaaagattatgagaagaaaaaatcaatgccaagttttgttgaccgcatctttggtggtgaacta

SEQ ID NO: 454078 - DNA, 120 bp, Artificial Sequence
  ENSG00000156256_11 (sequence is synthesized)
actagtatgatcatgtgtgatcaatgcagaactgtctccttggttcatgaatctttccttgatttgtccctcccagttttagatgatcagagtggtaagaaaagtgtaaatgataaaaat

SEQ ID NO: 454079 - DNA, 120 bp, Artificial Sequence
  ENSG00000156256_12 (sequence is synthesized)
aaaagacagtggaggatgaagatcaagatagtgaggaagaaaaagataacgacagttacataaaagagagaagtgatattccttctggaacaagtaagcacttacagaaaaaagcaaaga

SEQ ID NO: 454080 - DNA, 120 bp, Artificial Sequence
  ENSG00000156256_13 (sequence is synthesized)
aacaagccaaaaagcaagccaagaaccaacgaagacaacaaaaaattcaaggaaaagttcttcatttaaatgatatttgtactattgaccatcctgaagacagtgaatatgaagctgaaa

SEQ ID NO: 454081 - DNA, 120 bp, Artificial Sequence
  ENSG00000156256_14 (sequence is synthesized)
tgtcacttcaaggagaagtaaatattaaatccaaccatatttcacaagagggtgttatgcataaagaatattgtgtcaaccagaaagatttgaatggccaagcaaaaatgatcgaaagtg

SEQ ID NO: 454082 - DNA, 120 bp, Artificial Sequence
  ENSG00000156256_15 (sequence is synthesized)
taactgacaatcaaaaatccacagaggaagtagatatgaaaaatatcaacatggataatgatctggaggttttaacatcttctcccactaggaatttaaatggtgcctacctaacggaag

SEQ ID NO: 454083 - DNA, 120 bp, Artificial Sequence
  ENSG00000156256_16 (sequence is synthesized)
ggagcaatggagaagtggacatttccaatggtttcaaaaacctaaatttgaatgctgctcttcatcctgatgaaataaatatagagattctgaatgatagtcatactcctggaacaaagg

SEQ ID NO: 454084 - DNA, 120 bp, Artificial Sequence
  ENSG00000156256_17 (sequence is synthesized)
tgtatgaggttgtaaatgaagatccagaaactgctttctgtactcttgcaaacagggaagttttcaatactgatgagtgttcaatccaacattgtttatatcagttcacccgtaatgaga

SEQ ID NO: 454085 - DNA, 120 bp, Artificial Sequence
  ENSG00000156256_18 (sequence is synthesized)
aacttcgagatgcgaataaactgctttgtgaagtatgcacacggagacagtgtaatggaccaaaggcaaatataaaaggtgaaaggaagcatgtttacaccaatgccaaaaagcagatgc

SEQ ID NO: 454086 - DNA, 120 bp, Artificial Sequence
  ENSG00000156256_19 (sequence is synthesized)
taatttctcttgctcctcctgttcttactcttcatttaaagagatttcagcaggctggttttaacctacgcaaagttaacaaacacataaagtttccggaaatcttagatttggctcctt

SEQ ID NO: 454087 - DNA, 120 bp, Artificial Sequence
  ENSG00000156256_20 (sequence is synthesized)
tttgcacccttaaatgtaagaatgttgcagaagaaaatacaagggtactctattccttatatggagttgttgaacacagtggtactatgaggtcggggcattacactgcctatgccaagg

SEQ ID NO: 454088 - DNA, 120 bp, Artificial Sequence
  ENSG00000156256_21 (sequence is synthesized)
caagaaccgcaaatagtcatctctctaatcttgttcttcacggtgatattccacaagattttgaaatggaatcaaaagggcagtggtttcacatcagcgacacacatgtgcaagctgtgc

SEQ ID NO: 454089 - DNA, 120 bp, Artificial Sequence
  ENSG00000156256_22 (sequence is synthesized)
ctacaactaaagtactaaactcacaagcgtacctcctattttatgagagaatactgtaataatatcaaaagcactttttctggaaacacatttatggcttttataatggctgaaataacg

SEQ ID NO: 454090 - DNA, 120 bp, Artificial Sequence
  ENSG00000156256_23 (sequence is synthesized)
ataaaaaaagactaattaaaatcatgttcacttaacattaaatacatgccagaagaaatcatgtttatttaaatattgaagggaaaaatacctaaaaatgtacaaaggttttatattgtc

SEQ ID NO: 454091 - DNA, 120 bp, Artificial Sequence
  ENSG00000156256_24 (sequence is synthesized)
atagtggtttttattcctgctttgtttctggaaaggaaatcctgaattacttaagtactttgtgtttaatatatctgggtgatggatcacaacacatcaataaactgacttaccctaaaa

SEQ ID NO: 454092 - DNA, 120 bp, Artificial Sequence
  ENSG00000156256_25 (sequence is synthesized)
ggagatagagtgtcgctttgttgcccaggctagtcttgaacttctggcctcaagccgtcctcccacctcgatctcccaaagtgttgggattacaggcattgttattttgtgtcagtaagt

SEQ ID NO: 454093 - DNA, 120 bp, Artificial Sequence
  ENSG00000156256_26 (sequence is synthesized)
ttgtccctcccagttttagatgatcaggtaagactattgaatttattttattcaagtagattttttttcctgtaagattttgtggggggaagccttgttactctttttaagtttgtatat

SEQ ID NO: 454094 - DNA, 120 bp, Artificial Sequence
  ENSG00000156256_27 (sequence is synthesized)
tactagcccatgcagaaatttttcttaatttgaggtagaatgcattttaggatttgaataaagaacagggtaactactttaaaaacaaggatggaaaaaaagatgatgtattcagaattc

SEQ ID NO: 454095 - DNA, 120 bp, Artificial Sequence
  ENSG00000156256_28 (sequence is synthesized)
tgtacaagtaattagtttgattggtttccatacagtgaagtattttccttatattaaaattaatacttatttttgttatttaagactaatcacgaatcccttgcacacctaagttcataa

SEQ ID NO: 454096 - DNA, 120 bp, Artificial Sequence
  ENSG00000156256_29 (sequence is synthesized)
atgttaaagagtattattttgttttaatttggttccttttaaatagtagtaggaaaaaagaagagatgttatgagtattggataaatcattcttcaacttcatatgaattatgagaccct

SEQ ID NO: 454097 - DNA, 120 bp, Artificial Sequence
  ENSG00000156256_30 (sequence is synthesized)
cataagtcacttagaaaatgtatttggaaatggacgtatttacagtgtgacacagcatgtatctaataaatttcgttatatttctattacacttacatgtgatgttgccttttgctgttt

SEQ ID NO: 454098 - DNA, 120 bp, Artificial Sequence
  ENSG00000156256_31 (sequence is synthesized)
tgttggtttgcttgttttctcattatgtgaagattgctttctagtgtatgagataaacgaattttgtctcatctattttcaaatattgtggaaaaaaaaagctaatacataatagaagta

SEQ ID NO: 454099 - DNA, 120 bp, Artificial Sequence
  ENSG00000156256_32 (sequence is synthesized)
gaaaaatatttacatagtgtggattttttttcaccaaatggtagttgtaaaattttgtttttgacctatgttatctatattttaagagtggtaagaaaagtgtaaatgataaaaatctga

SEQ ID NO: 454100 - DNA, 120 bp, Artificial Sequence
  ENSG00000156256_33 (sequence is synthesized)
tttgattctgtaggtctagtatgggatcaaaaattctgcatgtttaatgtaaactctcaggtgatgctgatgctggctgttcatggaccacattttgaatagcaatggtctagactgcat

SEQ ID NO: 454101 - DNA, 120 bp, Artificial Sequence
  ENSG00000156256_34 (sequence is synthesized)
ttttgaatagcaatggtctagactgcatatgggaattatattatgtcagtttccatgctgctgataaagatatactggacaagatatactgggcaagactgggcaatttacaaaagaaag

SEQ ID NO: 454102 - DNA, 120 bp, Artificial Sequence
  ENSG00000156256_35 (sequence is synthesized)
gcctcacagtcatggcggaaggcaaggaggagcacgtcacatcttacatggatggcagcgggcaaagcaagagcttgtggagggaaactcccccttaagaaaccatcagctctcatgagg

SEQ ID NO: 454103 - DNA, 120 bp, Artificial Sequence
  ENSG00000156256_36 (sequence is synthesized)
cttattcactatcaagaataaggatgggaaagacctgctcccatgattcagttgcgtcccaacgggtaccctcccatgacatgtgggaattgtgggagctacaactcaagatgagatttg

SEQ ID NO: 454104 - DNA, 120 bp, Artificial Sequence
  ENSG00000156256_37 (sequence is synthesized)
ggtagggacacagccaaaccatatcaggaatgaagccaaaagtcttcataggtgaggagaatatgagcattggagatcctgttaggttaaagagtacagaataggtgagatgagagttga

SEQ ID NO: 454105 - DNA, 120 bp, Artificial Sequence
  ENSG00000156256_38 (sequence is synthesized)
ggttaaagagtacagaataggtgagatgagagttgaataaatagaagacttgtggactaagactaaaaataagatttatgtcccttcagctcaggagtttgagaccagcccaggcaacat

SEQ ID NO: 454106 - DNA, 120 bp, Artificial Sequence
  ENSG00000156256_39 (sequence is synthesized)
cggagtgagaccctgtctcaaaaaaaattttatgaagttgaacaattctgagtgatgacaagcccagactctagtcctgggtgtggttgactaaaatggaatggcatttaaagtcctgtg

SEQ ID NO: 454107 - DNA, 120 bp, Artificial Sequence
  ENSG00000156256_40 (sequence is synthesized)
tgtgagaatcatagatggacggagaagtactaagttcttcagtgaatatggaggcacagattgggaagctgagtataggagacagtactactgaagggccgtgatgcctgttacggactt

SEQ ID NO: 454108 - DNA, 120 bp, Artificial Sequence
  ENSG00000156256_41 (sequence is synthesized)
aagcagcgtgcactctctcgtggggaaagtgaacacttgagaggttgaatgtgcttctcaccaactcccttggggacatttaaagatgtaaggggtaatttttggcacaacctaaaatac

SEQ ID NO: 454109 - DNA, 120 bp, Artificial Sequence
  ENSG00000156256_42 (sequence is synthesized)
tgttctcttcctgttcagggcttacctttttttaaacagggtattcagagttgttaatagctagggttgttaagaattatcctcaggctcctaaagaaactggcaagttgaattcagtta

SEQ ID NO: 454110 - DNA, 120 bp, Artificial Sequence
  ENSG00000156256_43 (sequence is synthesized)
tttggtatctgagccaggtaactgcatcaagtggcctgtggcttacagcttttctaccaggggaacaatggtgaatttataataaaaacagaagtgtctcaggctgagaagaggtatgga

SEQ ID NO: 454111 - DNA, 120 bp, Artificial Sequence
  ENSG00000156256_44 (sequence is synthesized)
gaaaagagtagactcatgaatgatttctgcactctcaaagtaatggttaaagaccctttgcatagtgtaaacttgtcttgcccatgacatctgtgtaaatggaactagaactaacttttg

SEQ ID NO: 454112 - DNA, 120 bp, Artificial Sequence
  ENSG00000156261_0 (sequence is synthesized)
cctcgcttcctccgcggtcttccgagcggtcgcgtgaactgcttcctgcaggctggccatggcgcttcacgttcccaaggctccgggctttgcccagatgctcaaggagggagcgaaaca

SEQ ID NO: 454113 - DNA, 120 bp, Artificial Sequence
  ENSG00000156261_1 (sequence is synthesized)
cttttcaggattagaagaggctgtgtatagaaacatacaagcttgcaaggagcttgcccaaaccactcgtacagcatatggaccaaatggaatgaacaaaatggttatcaaccacttgga

SEQ ID NO: 454114 - DNA, 120 bp, Artificial Sequence
  ENSG00000156261_2 (sequence is synthesized)
gaagttgtttgtgacaaacgatgcagcaactattttaagagaactagaagtacagcatcctgctgcaaaaatgattgtaatggcttctcatatgcaagagcaagaagttggagatggcac

SEQ ID NO: 454115 - DNA, 120 bp, Artificial Sequence
  ENSG00000156261_3 (sequence is synthesized)
aaactttgttctggtatttgctggagctctcctggaattagctgaagaacttctgaggattggcctgtcagtttcagaggtcatagaaggttatgaaatagcctgcagaaaagctcatga

SEQ ID NO: 454116 - DNA, 120 bp, Artificial Sequence
  ENSG00000156261_4 (sequence is synthesized)
gattcttcctaatttggtatgttgttctgcaaaaaaccttcgagatattgatgaagtctcatctctacttcgtacctccataatgagtaaacaatatggtaatgaagtatttctggccaa

SEQ ID NO: 454117 - DNA, 120 bp, Artificial Sequence
  ENSG00000156261_5 (sequence is synthesized)
gcttattgctcaggcatgcgtatctatttttcctgattccggccatttcaatgttgataacatcagagtttgtaaaattctgggctctggtatcagttcctcttcagtattgcatggcat

SEQ ID NO: 454118 - DNA, 120 bp, Artificial Sequence
  ENSG00000156261_6 (sequence is synthesized)
ggtttttaagaaggaaaccgaaggtgatgtaacatctgtcaaagatgcaaaaatagcagtgtactcttgtccttttgatggcatgataacagaaactaagggaacagtgttgataaagac

SEQ ID NO: 454119 - DNA, 120 bp, Artificial Sequence
  ENSG00000156261_7 (sequence is synthesized)
agtcaaagctattgctgatactggtgcaaatgtcgtagtaacaggtggcaaagtggcagacatggctcttcattatgcaaataaatataatatcatgttagtgaggctaaactcaaaatg

SEQ ID NO: 454120 - DNA, 120 bp, Artificial Sequence
  ENSG00000156261_8 (sequence is synthesized)
ggatctccgaagactttgtaaaactgttggtgctacagctcttcctagattgacacctcctgtccttgaagaaatgggacactgtgacagtgtttacctctcagaagttggagatactca

SEQ ID NO: 454121 - DNA, 120 bp, Artificial Sequence
  ENSG00000156261_9 (sequence is synthesized)
ggtggtggtttttaagcatgaaaaggaagatggcgccatttctaccatagtacttcgaggctctacagacaatctgatggatgacatagaaagggcagtagacgatggtgttaatacttt

SEQ ID NO: 454122 - DNA, 120 bp, Artificial Sequence
  ENSG00000156261_10 (sequence is synthesized)
caaagttcttacaagggataaacgtcttgtacccggaggtggagcaacagaaattgaattagccaaacagatcacatcatatggagagacatgtcctggacttgaacagtatgctattaa

SEQ ID NO: 454123 - DNA, 120 bp, Artificial Sequence
  ENSG00000156261_11 (sequence is synthesized)
gaagtttgctgaggcatttgaagctattccccgcgcactggcagaaaactctggagttaaggccaatgaagtaatctctaaactttatgcagtacatcaagaaggaaataaaaacgttgg

SEQ ID NO: 454124 - DNA, 120 bp, Artificial Sequence
  ENSG00000156261_12 (sequence is synthesized)
attagatattgaggctgaagtccctgctgtaaaggacatgctggaagctggtattctagatacttacctgggaaaatattgggctatcaaactcgctactaatgctgcagtcactgtact

SEQ ID NO: 454125 - DNA, 120 bp, Artificial Sequence
  ENSG00000156261_13 (sequence is synthesized)
tagagtggatcagatcatcatggcaaaaccagctggtgggcccaagcctccaagtgggaagaaagactgggatgatgaccaaaatgattgaaattggcttaatttttactgtaggtgaag

SEQ ID NO: 454126 - DNA, 120 bp, Artificial Sequence
  ENSG00000156261_14 (sequence is synthesized)
gctgtatttgtagtagtactcaagaatcacctgatgttttcttattctccttaaattaagagttattttgtgtttgtattcttggctggatgttataataaacatattgttactgtcaaa

SEQ ID NO: 454127 - DNA, 120 bp, Artificial Sequence
  ENSG00000156261_15 (sequence is synthesized)
atttgttgaagacactcgacttagcaaagtacaaaaaaaatgcttagaaaatagataaactgacatacaaaattaagtcagttttcataaagcagattctattttgttaaaatcagtaag

SEQ ID NO: 454128 - DNA, 120 bp, Artificial Sequence
  ENSG00000156261_16 (sequence is synthesized)
ctccgcggtcttccgagcggtcgcgtgaactgcttcctgcaggctggccatggcgcttcacgttcccaaggctccgggctttgcccagatgctcaaggagggagcgaaagtaagggctga

SEQ ID NO: 454129 - DNA, 120 bp, Artificial Sequence
  ENSG00000156261_17 (sequence is synthesized)
cctggctcagcggccgggggaagagaagattccagaaagggaggtgattttggaagggctcggccaccggagcctgcgggcacttctcttcttccgcgaccgggagaaggccgagggatc

SEQ ID NO: 454130 - DNA, 120 bp, Artificial Sequence
  ENSG00000156261_18 (sequence is synthesized)
cttattgctcaggcatgcggtaagtaaatatcagtaaatgaaaagatccaaaataaaaatacctttaacatgactagatactttctctgttgtcccaaaataatcttttgatatgtctca

SEQ ID NO: 454131 - DNA, 120 bp, Artificial Sequence
  ENSG00000156261_19 (sequence is synthesized)
ttttcttaacagtatctatttttcctgattccggccatttcaatgttgataacatcagagtttgtaaaattctgggctctggtatcagttcctcttcagtattgcatggcatggttttta

SEQ ID NO: 454132 - DNA, 120 bp, Artificial Sequence
  ENSG00000156261_20 (sequence is synthesized)
gatcggggatcgtcagcttggttctggccacagaggttgctcttctcgcgatgcttcagacctggcggcagggaaagggtgggctaattggagagccaggaagagcgtgaggcggcccca

SEQ ID NO: 454133 - DNA, 120 bp, Artificial Sequence
  ENSG00000156261_21 (sequence is synthesized)
agagtcaggaatcagcttcctggccttagtgttcattgcaatccagacatgttctgagttaaaatccattgtcaaaggaatgtgacatgggggctggtatacaggttcctctttaatttg

SEQ ID NO: 454134 - DNA, 120 bp, Artificial Sequence
  ENSG00000156261_22 (sequence is synthesized)
acttctcttcttccgcgaccgggagaaggccgagggatcggcggcacgatcgacattgtacaccttgaaggtggacggatgtgaagccgcgcgttgtagggctgaagcttaccaaagaaa

SEQ ID NO: 454135 - DNA, 120 bp, Artificial Sequence
  ENSG00000156261_23 (sequence is synthesized)
ctatagtagaggatgacaggaggtaaaaatgtctgtaaaagaaggatcaggaatagacagaacacttagacgtttagggaagaactcttagctcagtgcttagtgagagaagcccctgag

SEQ ID NO: 454136 - DNA, 120 bp, Artificial Sequence
  ENSG00000156261_24 (sequence is synthesized)
cctgggctgtttcccccgacctcttacttagggggaaatgccaggctcagggactaactagtacaaagaccctgaggaaggaatgattttgacctgttttttttttaaaacaacaacaac

SEQ ID NO: 454137 - DNA, 120 bp, Artificial Sequence
  ENSG00000156261_25 (sequence is synthesized)
gggtttctctggtgttttagaactataaaccactgacatcctaaagtgacttccattctcccaattctagaacaatgccatacaacacaggcttaagatgtggtactattggccagctgg

SEQ ID NO: 454138 - DNA, 120 bp, Artificial Sequence
  ENSG00000156261_26 (sequence is synthesized)
acagctcttcctagattggtatgtattttggaaaacactaaaagatagttgaacaagatggaatttttattacaacagtcactttcttacagacacctcctgtccttgaagaaatgggac

SEQ ID NO: 454139 - DNA, 120 bp, Artificial Sequence
  ENSG00000156265_0 (sequence is synthesized)
gtccaagcccagtgctctttcccctgatgagaaacctttccagatttaaaccattaacaaccctctctaaagaggaggcaagaggtttcaatttcttctcagggaaaaaaagaactgaca

SEQ ID NO: 454140 - DNA, 120 bp, Artificial Sequence
  ENSG00000156265_1 (sequence is synthesized)
tcaaaaggtctgtgcggggtcatttgtctcatcatgactttgatttggccttgatctttatttagtatttcagttttatgctctgcaacaagtttggccatgttggaggacaatccaaag

SEQ ID NO: 454141 - DNA, 120 bp, Artificial Sequence
  ENSG00000156265_2 (sequence is synthesized)
gtcagcaagttggctactggcgattggatgctcactctgaagccaaagtctattactgtgcccgtggaaatccccagctcccctctgggttgacattcgtaaccttcctggatcctatca

SEQ ID NO: 454142 - DNA, 120 bp, Artificial Sequence
  ENSG00000156265_3 (sequence is synthesized)
gagaaaccttgttcatcatttcatttccaaattatgaagaccacctgggcctgactgaagatgcttgtttcttcctcttccctaacgccctttccaccagtgcggactgcagattgtcag

SEQ ID NO: 454143 - DNA, 120 bp, Artificial Sequence
  ENSG00000156265_4 (sequence is synthesized)
tggctgctatgcagcaggtgcagcctggtctctcactgagtctctactccacaaaggcaacgactggccaaggcagtggctggctctgggttacacaagtgcagacactcaactaagtga

SEQ ID NO: 454144 - DNA, 120 bp, Artificial Sequence
  ENSG00000156265_5 (sequence is synthesized)
gctggaagacccaggagaaggcggaggctcaggtgcccacatgatcagcacagccagggtacctgctgacaagcctgtacgcatcgcctttagcctcaatgacgcctcagatgatacacc

SEQ ID NO: 454145 - DNA, 120 bp, Artificial Sequence
  ENSG00000156265_6 (sequence is synthesized)
ccctgaagactccattcctttggtctttccagaattagaccagcagctacagcccctgccgccttgtcatgactccgaggaatccatggaggtgttcaaacagcactgccaaatagcaga

SEQ ID NO: 454146 - DNA, 120 bp, Artificial Sequence
  ENSG00000156265_7 (sequence is synthesized)
agaataccatgaggtcaaaaaggaaatcaccctgcttgagcaaaggaagaaggagctcattgccaagttagatcaggcagaaaaggagaaggtggatgctgctgagctggttcgggaatt

SEQ ID NO: 454147 - DNA, 120 bp, Artificial Sequence
  ENSG00000156265_8 (sequence is synthesized)
cgttgaggttggcccagtctcaatgtgtggaacaactggagaaacttcgaatacagtatcagaagaggcagggctcgtcctaactttaaatttttcagtgtgagcatacgaggctgatga

SEQ ID NO: 454148 - DNA, 120 bp, Artificial Sequence
  ENSG00000156265_9 (sequence is synthesized)
ctgccctgtgctggccaaaagatttttattttaaatgaatagtgagtcagatctattgcttctctgtattacccacatgacaactgtctataatgagtttactgcttgccagcttctagc

SEQ ID NO: 454149 - DNA, 120 bp, Artificial Sequence
  ENSG00000156265_10 (sequence is synthesized)
ttgagagaagggatattttaaatgagatcattaacgtgaaactattactagtatatgtttttggagatcagaattcttttccaaagatatatgtttttttcttttttaggaagatatgat

SEQ ID NO: 454150 - DNA, 120 bp, Artificial Sequence
  ENSG00000156265_11 (sequence is synthesized)
catgctgtacaacagggtagaaaatgataaaaatagactattgactgacccagctaagaatcgtgggctgagcagagttaaaccatgggacaaacccataacatgttcaccatagtttca

SEQ ID NO: 454151 - DNA, 120 bp, Artificial Sequence
  ENSG00000156265_12 (sequence is synthesized)
cgtatgtgtatttttaaatttcatgcctttaatatttcaaatatgctcaaatttaaactgtcagaaacttctgtgcatgtatttatatttgccagagtataaacttttatactctgattt

SEQ ID NO: 454152 - DNA, 120 bp, Artificial Sequence
  ENSG00000156265_13 (sequence is synthesized)
ttatccttcaatgattgattatactaagaataaatggtcacatatcctaaaagcttcttcatgaaattattagcagaaaccatgtttgtaaccaaagcacatttgccaatgctaactggc

SEQ ID NO: 454153 - DNA, 120 bp, Artificial Sequence
  ENSG00000156265_14 (sequence is synthesized)
tgttgtaataataaacagataaggctgcatttgcttcatgccatgtgacctcacagtaaacatctctgcctttgcctgtgtgtgttctgggggaggggggacatggaaaaatattgtttg

SEQ ID NO: 454154 - DNA, 120 bp, Artificial Sequence
  ENSG00000156265_15 (sequence is synthesized)
gacattacttgggtgagtgcccatgaaaacatcagtgaacttgtaactattgttttgttttggatttaaggagatgttttagatcagtaacagctaataggaatatgcgagtaaattcag

SEQ ID NO: 454155 - DNA, 120 bp, Artificial Sequence
  ENSG00000156265_16 (sequence is synthesized)
aattgaaacaatttctccttgttctacctatcaccacattttctcaaattgaactctttgttatatgtccatttctattcatgtaacttctttttcattaaacatggatcaaaactgaca

SEQ ID NO: 454156 - DNA, 120 bp, Artificial Sequence
  ENSG00000156265_17 (sequence is synthesized)
cacgctgaagacattcctgtcttgtgaagcaagtctgtttgtattttaagtttgccaggactaatgaattaaaacatttggactccccacaacttgctgtttatcaatgcctctgacagg

SEQ ID NO: 454157 - DNA, 120 bp, Artificial Sequence
  ENSG00000156265_18 (sequence is synthesized)
aggagggttttcttttgctcttgctttttctagaaagatgacaacatcctggctgttagagaggcaaggaaaggagagaggggttgtgaagggaagcggaagggaagggaagggaggtcc

SEQ ID NO: 454158 - DNA, 120 bp, Artificial Sequence
  ENSG00000156265_19 (sequence is synthesized)
gactgccagcacgctgtcacctctcaatagcagcccaaacagattaagacatgggaggtgaaagacaacttgagtggttaaattactgtcatgcaaagcgactagatggttcagctgatt

SEQ ID NO: 454159 - DNA, 120 bp, Artificial Sequence
  ENSG00000156265_20 (sequence is synthesized)
agcgactagatggttcagctgattgcacctttagaagttatgtggaacgaggcagcagatcttaagccccttgctctgtcacgcaggctggaatgcagtggtggaatcatggctcactac

SEQ ID NO: 454160 - DNA, 120 bp, Artificial Sequence
  ENSG00000156265_21 (sequence is synthesized)
agccctgacctcctgggcccagagatggagtctcgctattttgcccaggttggtcttgaacacctggcttcaagcagtcctcctgcttttggcttcttgaagtgcttggattacagtatt

SEQ ID NO: 454161 - DNA, 120 bp, Artificial Sequence
  ENSG00000156265_22 (sequence is synthesized)
ctcttgtacttgatttcttggtgcgggaaagtgttgggggatttagccaaaagaggagtgcaactttccatccttagatgttatgctaaagtgattcggtgattgtacaatgcataacag

SEQ ID NO: 454162 - DNA, 120 bp, Artificial Sequence
  ENSG00000156265_23 (sequence is synthesized)
cagccactgtttaaaagtaaacacaccacacatcaacttggggcagctttgtaagcagcttcgcaagccctgaaacttctggctggtagggatgccagctaaaccagatggcatcaaaca

SEQ ID NO: 454163 - DNA, 120 bp, Artificial Sequence
  ENSG00000156265_24 (sequence is synthesized)
cacctgtttggtttctggaaagtgctccctcatgttaaatttatgtagttaagttgtaaaacaggaaatcttccttgaccctttgcaggatttgtgaaaggggtggcttgtttactgagc

SEQ ID NO: 454164 - DNA, 120 bp, Artificial Sequence
  ENSG00000156265_25 (sequence is synthesized)
atgtacaagggcagccgtggggctggcaacagcttcgtaatcctggcttcctgctttctgggtcaaagccctggtggtgtgttcttgatatcggtccatctagtggcgttgtttgattcc

SEQ ID NO: 454165 - DNA, 120 bp, Artificial Sequence
  ENSG00000156265_26 (sequence is synthesized)
tcccaccttgctgatcattcgtagtgtagcccccaaggtgtggaataacccttaagcccttaccggggtccttctggactgagaattgttgtaaagtaatactgctcaggtgaaagacaa

SEQ ID NO: 454166 - DNA, 120 bp, Artificial Sequence
  ENSG00000156265_27 (sequence is synthesized)
atagggaagggtgggtaagtattaagtgctatgagctccgaggaagaagaaattccatatatacaaccagatagtgcatgtgtgtgtaatgcttattttgtgcccatttaattaatgcca

SEQ ID NO: 454167 - DNA, 120 bp, Artificial Sequence
  ENSG00000156265_28 (sequence is synthesized)
tgatcactattccttctagtaattaatttgattttcattagtaatagaaagatagatcaactccttgaaatcagagagagctttaaaaaatgctcagccaggaggtgttaagtatttcac

SEQ ID NO: 454168 - DNA, 120 bp, Artificial Sequence
  ENSG00000156265_29 (sequence is synthesized)
taagtgtgagacttctggcaaaacccccatctcagcattcggttgttctctttgttaacagttgttggcagagatacaggaatagattttgaccagcaattccataagtactttactcta

SEQ ID NO: 454169 - DNA, 120 bp, Artificial Sequence
  ENSG00000156265_30 (sequence is synthesized)
ctgaaatccattttttgatttataaactgcacatttaatgtaaatagcacattattcccctcgtcacagagttgatatagtaatgatgaatgtctataagtgataattactctgcattta

SEQ ID NO: 454170 - DNA, 120 bp, Artificial Sequence
  ENSG00000156265_31 (sequence is synthesized)
gggttctctgcatgatctcggctcactgcaaccttatacaaaccttatacaaacagttatatctcaagctggccctaggcaaaattgtacaatggtctaataaagtgtcttttacttata

SEQ ID NO: 454171 - DNA, 120 bp, Artificial Sequence
  ENSG00000156269_0 (sequence is synthesized)
agtttggcaccatcttttccatctcctgctccttccgccttcccgccatccgccctccacacgattcagcccggtggtgttagccccctggactcgattcctgaggcaaacagtgcccct

SEQ ID NO: 454172 - DNA, 120 bp, Artificial Sequence
  ENSG00000156269_1 (sequence is synthesized)
taaggtcggcgacagcctcttctgggttcactgcagtccaaccggttccctaccctctgccattatgaacatccgcaacgctcagccagacgacctgatgaatatgcaacactgcaacct

SEQ ID NO: 454173 - DNA, 120 bp, Artificial Sequence
  ENSG00000156269_2 (sequence is synthesized)
cctttgccttcctgagaactaccagatgaaatactatttatatcatggcctttcctggccccagctttcttacatcgctgaggatgaggacgggaagattgtgggctatgttctggccaa

SEQ ID NO: 454174 - DNA, 120 bp, Artificial Sequence
  ENSG00000156269_3 (sequence is synthesized)
aatggaggaggaaccagatgatgtcccgcatggccatatcacctcactggccgtgaagcgttcacaccggcgcctcggcctggcccagaagctgatggaccaggcctccagggccatgat

SEQ ID NO: 454175 - DNA, 120 bp, Artificial Sequence
  ENSG00000156269_4 (sequence is synthesized)
agagaactttaacgccaaatacgtgtctctgcacgtcaggaagagtaaccggccagccttgcacctttattctaacaccctcaactttcagattagtgaggtggaacctaaatactatgc

SEQ ID NO: 454176 - DNA, 120 bp, Artificial Sequence
  ENSG00000156269_5 (sequence is synthesized)
agatggggaagatgcttatgctatgaagcgggatctctcgcagatggcagatgagctgagacgacaaatggacctgaagaagggcgggtatgtggtcctgggctccagggagaaccagga

SEQ ID NO: 454177 - DNA, 120 bp, Artificial Sequence
  ENSG00000156269_6 (sequence is synthesized)
gacccagggcagcacactttctgattctgaagaggcctgtcagcaaaagaacccggctaccgaagaaagtggcagtgacagcaaagaacctaaggagtctgtggagagcaccaacgtcca

SEQ ID NO: 454178 - DNA, 120 bp, Artificial Sequence
  ENSG00000156269_7 (sequence is synthesized)
ggacagctcagaaagctcggattccacctcctagagcatgcttaagcatttcaggtcctcatgtctcaaccacatctactctgtgaaccctggcttagtctgtctgctctgcagcatctg

SEQ ID NO: 454179 - DNA, 120 bp, Artificial Sequence
  ENSG00000156269_8 (sequence is synthesized)
cactgcacaacagccaaggaactttgagacctgccattacagaacctttcttggcctactcacactacgctgccattttattctgtttgtagtagtcctctgttgggtgtggttatcctg

SEQ ID NO: 454180 - DNA, 120 bp, Artificial Sequence
  ENSG00000156269_9 (sequence is synthesized)
caagtttttctccttttagaatgatgaacaggaagcagggcaaactcttgaagatttccagctttcagtttttgtttttgttttttaaccattatttacctgagttttcatccttgagga

SEQ ID NO: 454181 - DNA, 120 bp, Artificial Sequence
  ENSG00000156269_10 (sequence is synthesized)
ggtgaagtagtcaggaccatgaagtcagacctcatgccctcttcctcctctttcctggaagaagtattcagtttccttttcctttctctggtaactcctcctttatactattcccccctc

SEQ ID NO: 454182 - DNA, 120 bp, Artificial Sequence
  ENSG00000156269_11 (sequence is synthesized)
ccttttttttgaggaggagggcatcaccttcccagtgggaaaaggtgttaagttaggagcttctactgtacaatcagaacttggagattttaagaaaaggacaaacggtaattaaattgg

SEQ ID NO: 454183 - DNA, 120 bp, Artificial Sequence
  ENSG00000156269_12 (sequence is synthesized)
aatctctaatgtgcttgtttgtgttagtttttttgtgattatgtcacttggcatttattgagtacctgcagtgttcacacacaatgctggagccttcattagttacatatttaaccctct

SEQ ID NO: 454184 - DNA, 120 bp, Artificial Sequence
  ENSG00000156269_13 (sequence is synthesized)
cagcaaccctgtaaagtaggtagtattatccctgttttacagatgaggaaactgaagctcagagaagtgaattaaatatcctggatctgaacccaattctgtttgaattcaaagccaaag

SEQ ID NO: 454185 - DNA, 120 bp, Artificial Sequence
  ENSG00000156269_14 (sequence is synthesized)
ttccttctacttttctgttcctactctttgcattttatttataaatgtgttaaaattttagcaaaaatggagaatctgctgtttaaaaatgtgtttgcttaatacatggctactgtatgt

SEQ ID NO: 454186 - DNA, 120 bp, Artificial Sequence
  ENSG00000156269_15 (sequence is synthesized)
caattgtaaatatttatataacctacaattataatctatttttattatttttctctagtaaaaataagtgaagacaaagtaccttgacctctgcagtaaaagttaccagataaatccaga

SEQ ID NO: 454187 - DNA, 120 bp, Artificial Sequence
  ENSG00000156269_16 (sequence is synthesized)
tgagtgatttacacttaatggaggccaggaagttcaatatcaaggtggtgacatctggcaagggccttcttgctgcatcatcccatgaaggtgagaagatgaaaagccaatgaagatctg

SEQ ID NO: 454188 - DNA, 120 bp, Artificial Sequence
  ENSG00000156269_17 (sequence is synthesized)
ctgcttacccatcttgaaatatgtggcattcacttagtgttcaagaatttagtggcaaaacacacactcacactcacacacacacactcttacacatgcagattttgaaatttggaaagc

SEQ ID NO: 454189 - DNA, 120 bp, Artificial Sequence
  ENSG00000156269_18 (sequence is synthesized)
tgataactctggtgatgctatggtaaaatattccataaaactgacatgagctaacttgggaaggatataacttttccacagaatctatagtatgggggcaaaccattgaaaagggcagaa

SEQ ID NO: 454190 - DNA, 120 bp, Artificial Sequence
  ENSG00000156269_19 (sequence is synthesized)
tgtgtgtgttgacagttgcttgatatttttataagatgctataagacagagatggattgacaattgaccagtttgccggcagctttttaacgggagatccccctatgcctgcagcctata

SEQ ID NO: 454191 - DNA, 120 bp, Artificial Sequence
  ENSG00000156269_20 (sequence is synthesized)
atctgtattaactagaagcaattaacttattcccctgcagatttggaaaagccaactacttctactcaccaaagagcagaaagtaagactccagacttaaaggaaaagaagacttccctt

SEQ ID NO: 454192 - DNA, 120 bp, Artificial Sequence
  ENSG00000156273_0 (sequence is synthesized)
agtcagtcgggccgcgccgcgcctcagctctggttgatgataattagaagcatgctttccactgaacttcccgacaacatttgttatgcagaatgtctctgagtgagaactcggtttttg

SEQ ID NO: 454193 - DNA, 120 bp, Artificial Sequence
  ENSG00000156273_1 (sequence is synthesized)
cctatgaatcttctgtgcatagcaccaatgttttactcagccttaatgaccagcggaagaaagatgtgctgtgcgatgtcaccatctttgtggagggacagcggttccgcgctcaccggt

SEQ ID NO: 454194 - DNA, 120 bp, Artificial Sequence
  ENSG00000156273_2 (sequence is synthesized)
ccgtgctggcggcatgcagcagttacttccactcaagaatcgtaggccaggctgatggagagctgaacattactcttccagaagaggtgacagttaaaggatttgaacctttaattcagt

SEQ ID NO: 454195 - DNA, 120 bp, Artificial Sequence
  ENSG00000156273_3 (sequence is synthesized)
ttgcctacactgctaaactgattttaagtaaagagaatgtggatgaagtgtgcaaatgtgtggagtttttaagtgtacataatattgaggaatcctgctttcagtttctgaaatttaagt

SEQ ID NO: 454196 - DNA, 120 bp, Artificial Sequence
  ENSG00000156273_4 (sequence is synthesized)
ttttggactccactgcagaccagcaagaatgcccaagaaaaaaatgcttttcatcacactgtcagaaaacagaccttaaactttcacttttggaccagagggatctagaaactgatgaag

SEQ ID NO: 454197 - DNA, 120 bp, Artificial Sequence
  ENSG00000156273_5 (sequence is synthesized)
tggaggaatttctggaaaataaaaatgttcagactcctcagtgtaaactccgcaggtatcaaggaaatgcaaaagcctcacctcctctacaagacagtgccagtcagacatatgagtcca

SEQ ID NO: 454198 - DNA, 120 bp, Artificial Sequence
  ENSG00000156273_6 (sequence is synthesized)
tgtgcttagagaaggatgctgctctggccttgccttctttatgccccaaatacagaaaattccaaaaagcatttggaactgacagagtccgtactggggaatctagtgtcaaagacattc

SEQ ID NO: 454199 - DNA, 120 bp, Artificial Sequence
  ENSG00000156273_7 (sequence is synthesized)
atgcttctgttcagccaaatgaaaggtctgaaaatgaatgcctgggaggagtcccggagtgtagagatttgcaggtgatgttaaaatgtgacgaaagtaaattagcaatggaacctgaag

SEQ ID NO: 454200 - DNA, 120 bp, Artificial Sequence
  ENSG00000156273_8 (sequence is synthesized)
aaacgaagaaagatcctgcttctcagtgcccaactgaaaaatcagaagtgactcctttcccccacaattcttccatagaccctcatggactttattctttgtctcttttacacacatatg

SEQ ID NO: 454201 - DNA, 120 bp, Artificial Sequence
  ENSG00000156273_9 (sequence is synthesized)
accaatatggtgacttgaattttgctggtatgcaaaacacaacagtgttaacagaaaagcctttgtcaggtacagacgtccaagaaaaaacatttggtgaaagtcaggatttacctttga

SEQ ID NO: 454202 - DNA, 120 bp, Artificial Sequence
  ENSG00000156273_10 (sequence is synthesized)
aatccgacttgggcaccagggaagatagtagtgttgcatctagtgataggagtagtgtggagcgagaagtggcagaacacctagcaaaaggcttctggagtgacatttgcagcacggaca

SEQ ID NO: 454203 - DNA, 120 bp, Artificial Sequence
  ENSG00000156273_11 (sequence is synthesized)
ctccttgccaaatgcagttatcacctgctgtggccaaagatggctcagaacagatctcacagaaacggtctgagtgtccgtggttaggtatcaggattagtgagagcccagaaccaggtc

SEQ ID NO: 454204 - DNA, 120 bp, Artificial Sequence
  ENSG00000156273_12 (sequence is synthesized)
aaaggactttcacaacattaagttctgtcaactgcccttttataagtactctgagtactgaaggctgttcaagcaatttggaaattggaaacgatgattatgtttcagaaccccagcaag

SEQ ID NO: 454205 - DNA, 120 bp, Artificial Sequence
  ENSG00000156273_13 (sequence is synthesized)
aaccttgcccatatgcttgtgtcattagcttgggagacgactctgagacggacaccgaaggagacagtgaatcctgttcagccagagaacaagaatgtgaggtaaaactgccattcaatg

SEQ ID NO: 454206 - DNA, 120 bp, Artificial Sequence
  ENSG00000156273_14 (sequence is synthesized)
cacaacggataatttcactgtctcgaaatgattttcagtccttgttgaaaatgcacaagcttactccagaacagctggattgtatccatgatattcgaagaagaagtaaaaacagaattg

SEQ ID NO: 454207 - DNA, 120 bp, Artificial Sequence
  ENSG00000156273_15 (sequence is synthesized)
ctgcacagcgctgtcgcaagagaaaacttgactgtatacagaatcttgaatcagaaattgagaagctgcaaagtgaaaaggagagcttgttgaaggaaagagatcacattttgtcaactc

SEQ ID NO: 454208 - DNA, 120 bp, Artificial Sequence
  ENSG00000156273_16 (sequence is synthesized)
tgggtgagacaaagcagaacctaactggactttgccagaaagtttgtaaagaagcagctctgagtcaagaacaaatacagatactcgccaagtactcagctgcagattgcccactttcat

SEQ ID NO: 454209 - DNA, 120 bp, Artificial Sequence
  ENSG00000156273_17 (sequence is synthesized)
ttttaatttctgaaaaagataaaagtactcctgatggtgaactggcgttaccatcaattttcagtttatctgaccggcctccagcagtgctgcctccctgtgccagaggaaacagtgagc

SEQ ID NO: 454210 - DNA, 120 bp, Artificial Sequence
  ENSG00000156273_18 (sequence is synthesized)
ctggctacgcgcgagggcaggagtcccagcagatgtccacagccacctctgagcaagctgggcctgcggaacagtgtcgtcagagtggtgggatctcagatttctgtcagcagatgactg

SEQ ID NO: 454211 - DNA, 120 bp, Artificial Sequence
  ENSG00000156273_19 (sequence is synthesized)
ataaatgtactactgatgagtaaacttgcattcacttccttcaaaccatctaattttctcctgaagttttggcagcgtcttgaaagcctaatatgaccatctgttgctcaacaatactgt

SEQ ID NO: 454212 - DNA, 120 bp, Artificial Sequence
  ENSG00000156273_20 (sequence is synthesized)
ttttttcctttagtagtttaccataagggaatttcctttaagtcaaccatgatttctccttgatttctacaagagacaaagaaatgattttgcctcctggatatcagaaaaatccatgtg

SEQ ID NO: 454213 - DNA, 120 bp, Artificial Sequence
  ENSG00000156273_21 (sequence is synthesized)
aaaatgtagtaaacctttaaaactcatgttttaaagaataataactctagtaataactcttcctgctattcagaataagtaggagaatgaaaactgcagcatatcagacagcaatttaac

SEQ ID NO: 454214 - DNA, 120 bp, Artificial Sequence
  ENSG00000156273_22 (sequence is synthesized)
agcttgaaacatctacagatagttcctactaaaagaagtggcctgcagaagtttaataatttgacttttttctaatattttagtttgaaagaaaatttcttcccaagcaatgctaataga

SEQ ID NO: 454215 - DNA, 120 bp, Artificial Sequence
  ENSG00000156273_23 (sequence is synthesized)
cttcggctcctaaaatcaggctttaagctacattgggaagatttagtaaataggcaagtggttggcctaagacgggggctgcttctcctcttcagtatggactctagaaagtctggctac

SEQ ID NO: 454216 - DNA, 120 bp, Artificial Sequence
  ENSG00000156273_24 (sequence is synthesized)
atgaatagatttaagtgtcactttccctccctgccccccgcttcagtctctaccatatctggtcccatcatggacttcctatttcctggcatttttgtccctttggaagaagaaatagga

SEQ ID NO: 454217 - DNA, 120 bp, Artificial Sequence
  ENSG00000156273_25 (sequence is synthesized)
ctcagaatacagtggcatgagtgattacactggcagcattatctcaggctccctagaatctggagagcttaccaacatgtaaagctgttcatttttccaccgtgggtcaccaatgccaga

SEQ ID NO: 454218 - DNA, 120 bp, Artificial Sequence
  ENSG00000156273_26 (sequence is synthesized)
aaaccagacatcacggggaaagaatgttgcttactttttaccaggagtgcagttcatttttttcaccctgtttttgaagtcgtattattcacttgtaaaaatgattgtaacagataaaaa

SEQ ID NO: 454219 - DNA, 120 bp, Artificial Sequence
  ENSG00000156273_27 (sequence is synthesized)
atgtatctgcagcaactctgcaggtttgtgaaataggatgaaactcaatctttttctattgtgggtttgcatttgaaaagcaggttgaatccttgctctcttctccaaatttggtgtggt

SEQ ID NO: 454220 - DNA, 120 bp, Artificial Sequence
  ENSG00000156273_28 (sequence is synthesized)
ataaagacacacaaatcattttaacttggacatttaaagatcagtcttagtgtttgttcagtcctgttacaaaatagataactgagcacctatcgcataacattttgcggtggcttttag

SEQ ID NO: 454221 - DNA, 120 bp, Artificial Sequence
  ENSG00000156273_29 (sequence is synthesized)
ccatgctggggttagatgtgtttgagagtcaaatgaaagctatggatcttctcagcaattaaaaaaaatgcatatattcacattcacagaaacattggcagaacccagttttaatggtac

SEQ ID NO: 454222 - DNA, 120 bp, Artificial Sequence
  ENSG00000156273_30 (sequence is synthesized)
agaggagtagtttatagtgttgatttcaccaaaatcagagggctgaaagagacacttctatagactgcatcctgagcctagtgcagggcttgtctagctaatgtgggcagccaccaccca

SEQ ID NO: 454223 - DNA, 120 bp, Artificial Sequence
  ENSG00000156273_31 (sequence is synthesized)
ctgtgtatgaacaagtctgaagcaagttggccttgcccttgagagtatatggggaccagtcttcatgtcttggagtaatttgtcaaatgttaccctttttgatcagggtgtagggggagg

SEQ ID NO: 454224 - DNA, 120 bp, Artificial Sequence
  ENSG00000156273_32 (sequence is synthesized)
atattgctagtatattttcagtggtttgtatgttctctctgtcactgacttatttgtaagagaaaattagttggacttgtttattttctagtagcttttataagtacactcaagaatttg

SEQ ID NO: 454225 - DNA, 79 bp, Artificial Sequence
  ENSG00000156273_33 (sequence is synthesized)
ttattttctagtagcttttataagtacactcaagaatttgtcagggagaataattctgatagtgcatcccatactgcaa

SEQ ID NO: 454226 - DNA, 120 bp, Artificial Sequence
  ENSG00000156273_34 (sequence is synthesized)
tctttgatacttgtaattttaaatttcagcttcacgatataaaataatataagaacttctggtttacaaaatgtaaaatcttaagccaatggaacccttgatttcctacctcagtgtaca

SEQ ID NO: 454227 - DNA, 120 bp, Artificial Sequence
  ENSG00000156273_35 (sequence is synthesized)
cccaactattggttgtatcagtttgtgtatgtgcaaatgtcaaataatcttttgctttaattgctactgtacttgctttgaaagattacctactattttatgataaaatgtagttgtctc

SEQ ID NO: 454228 - DNA, 120 bp, Artificial Sequence
  ENSG00000156273_36 (sequence is synthesized)
cagagcttaaatataatttgtaaagcacttggtttaaatttctctctacctataaacagtttagcattaagggtttctattaatgacacagaattattggccaagtgtaatttcttaaaa

SEQ ID NO: 454229 - DNA, 120 bp, Artificial Sequence
  ENSG00000156273_37 (sequence is synthesized)
tttagcattactttaaatagccagcatgtaatacaagtaactacactacctcatatctacatgattttcaagttgtaatgcagatggacagataaaaaagattttacgtttgtcttttgg

SEQ ID NO: 454230 - DNA, 120 bp, Artificial Sequence
  ENSG00000156273_38 (sequence is synthesized)
ccataagtgggaaagttttctgtatattgcatagcattacacatttatgcctattttaacattaacttctaaagaagttttttctaagaaaatgtttcaaggcaatattttttttgaggc

SEQ ID NO: 454231 - DNA, 120 bp, Artificial Sequence
  ENSG00000156273_39 (sequence is synthesized)
tgccgaagacaaatgacaggattatgagtatacagtgtatgccttttccttcatgcagaattttgaaatgttttcagtttgtatattgcatattcacatgatcattgttcactattttat

SEQ ID NO: 454232 - DNA, 120 bp, Artificial Sequence
  ENSG00000156273_40 (sequence is synthesized)
gaactggccttctcaatgtttgatgattttttaaaagctgttatgttgaattcagtaaaataacattaccttattttttttcttattcaaattctggaactatagcaaataattcgttaa

SEQ ID NO: 454233 - DNA, 120 bp, Artificial Sequence
  ENSG00000156273_41 (sequence is synthesized)
attgtcatattcaaaacaaatgtggatacagtcttggttctccatctgtaattttttttaacagtttgctatagcttactgcttaactaattttaaataaggaaataagtatgttagatg

SEQ ID NO: 454234 - DNA, 120 bp, Artificial Sequence
  ENSG00000156273_42 (sequence is synthesized)
cagtagacgatacaggttgcatgtggacactcagtcacattaacaacttgggaaaaaaatggcaatgttacggtgaattctcaggtgaacttttttcagttataaaacatctattttgaa

SEQ ID NO: 454235 - DNA, 120 bp, Artificial Sequence
  ENSG00000156273_43 (sequence is synthesized)
tctgtaaatattttaaatgttttattaaggcatgtaataaactattctttgaaacttgttgggtagaatgaaaattaaagccataatggtagaagatggcatactgattataaaagaagc

SEQ ID NO: 454236 - DNA, 120 bp, Artificial Sequence
  ENSG00000156273_44 (sequence is synthesized)
agaaaaacattgatttttttatatctttcataatataattttctaacaatgcaataaaaccactaaacttttgtgtccatattttactgagaccatgtttcattaaaagcatagtttcat

SEQ ID NO: 454237 - DNA, 120 bp, Artificial Sequence
  ENSG00000156273_45 (sequence is synthesized)
agtatttaatttacatttctccctaatgttcttacccaaatgtacctgaactaaaaaatgttagatgttggtgataagttgacagttaaataaaattctctaaaattgcttctaattgaa

SEQ ID NO: 454238 - DNA, 120 bp, Artificial Sequence
  ENSG00000156273_46 (sequence is synthesized)
gtctactcagcccggtggctgtcgcgcgtggaatcgcgtaagaaaagccgagtttgtggctggggagagaaggccaccgtgctgagctggatttagcgaagactggttttggggaccgga

SEQ ID NO: 454239 - DNA, 120 bp, Artificial Sequence
  ENSG00000156273_47 (sequence is synthesized)
tctttgacaatgactatctggatgacacaggaaggatgcaattctggccttggagagaaaacttgcaaggaaaggaacatgtttgaatttcagatgtgttcctcaatgaatcaccacgtc

SEQ ID NO: 454240 - DNA, 120 bp, Artificial Sequence
  ENSG00000156273_48 (sequence is synthesized)
gaagaagctattcaaaaatgtccaggactctgttatttattcagcaagcttacaaagccatctttgattgactgattctttgacaatgactatctggatgacacaggaaggatgcaattc

SEQ ID NO: 454241 - DNA, 120 bp, Artificial Sequence
  ENSG00000156273_49 (sequence is synthesized)
aaaaggaaatttctgaaaatggttcatattttgtggtggtgacattacaggaggtgtcctagccttctgaggctgtagcctatctgactagtctcatggatcaaatctattgtgattttt

SEQ ID NO: 454242 - DNA, 120 bp, Artificial Sequence
  ENSG00000156273_50 (sequence is synthesized)
atcccccttaaggaaaatatttagtgatttgagaaggaatataaataggtcagtgtctccttctgttacagttgcctgctttcaatcctaacaaggactgatcctgcctgggagaaacaa

SEQ ID NO: 454243 - DNA, 120 bp, Artificial Sequence
  ENSG00000156273_51 (sequence is synthesized)
aaataatcttgggggaaatatttaatccataattatttaatccactgcaaacctgttttcaattcacaggtgatgttgttgagagagataacatattcaatcactcctctctctttacat

SEQ ID NO: 454244 - DNA, 120 bp, Artificial Sequence
  ENSG00000156273_52 (sequence is synthesized)
ggaacttcccttctaaactgcaattggagagctacaggtctggtaacattggaagggcacaggcctttccaatgacattccccatcccacccccaggtttcctgcagttgttgtcagagt

SEQ ID NO: 454245 - DNA, 120 bp, Artificial Sequence
  ENSG00000156273_53 (sequence is synthesized)
cagaaggaatcatggtgtgtgagtgcttagagtgttacagttcccacccattgtttggaatttgcatcttaattcaatataaagcctgacaataggtacagcaaagagacgaatcaagac

SEQ ID NO: 454246 - DNA, 120 bp, Artificial Sequence
  ENSG00000156273_54 (sequence is synthesized)
ttgggtctcacagaagttacctggtgccaacatcccatgcaccatcgtggagactggctggatgccctgtgctctatcagggcatgtcagaccaacagaggggcaaatcagagtgaagag

SEQ ID NO: 454247 - DNA, 120 bp, Artificial Sequence
  ENSG00000156273_55 (sequence is synthesized)
gaagccagaagatgggagagacatttttgaaggaacaagctgccaataatgtctgcaaaaagtgaattcttccaacaactacgtgagcttggaagaggaccttgaacctagaatgagact

SEQ ID NO: 454248 - DNA, 120 bp, Artificial Sequence
  ENSG00000156273_56 (sequence is synthesized)
gcagcagccccagccaacacccttctcagcttcgtggaccctgagcagagaacacagcaaatttgtccagacttctcatctacagaaactgagataataaatgattgttgttttaacatc

SEQ ID NO: 454249 - DNA, 120 bp, Artificial Sequence
  ENSG00000156273_57 (sequence is synthesized)
gcaaaagactgttgaagtagagagcattttgcccagctcactcggattctttgctggcatgccttcagtttcagttgtcatccagagaagtcaaaggaaatgctgcttggggatgagcat

SEQ ID NO: 454250 - DNA, 120 bp, Artificial Sequence
  ENSG00000156273_58 (sequence is synthesized)
tctttgacaatgactatctggatgacacaggaaggatgcaattctggccttggagagaaaacttgcaaggaaaggaacatgtttgaatttcagatgtgttcctcaatgaatcacacttgt

SEQ ID NO: 454251 - DNA, 120 bp, Artificial Sequence
  ENSG00000156273_59 (sequence is synthesized)
tctttgacaatgactatctggatgacacaggaaggatgcaattctggccttggagagaaaacttgcaaggaaaggaacatgtttgaatttcagatgtgttcctcaatgaatcacgatctt

SEQ ID NO: 454252 - DNA, 120 bp, Artificial Sequence
  ENSG00000156282_0 (sequence is synthesized)
atgcatttacaacaggtacttctagttaggccaagttcagtcacagctactgatttggactaaaacgttatgggcagcagccaaggagaacatcatcaaagacttctctagactcaaaag

SEQ ID NO: 454253 - DNA, 120 bp, Artificial Sequence
  ENSG00000156282_1 (sequence is synthesized)
gcttccacgttctacatcttgagcatcttctaccactccgaattgaaccagtcttcaaagtaaaggcaatggcattttatcccttgcaaattgctgggctggttcttgggttccttggca

SEQ ID NO: 454254 - DNA, 120 bp, Artificial Sequence
  ENSG00000156282_2 (sequence is synthesized)
tggtggggactcttgccacaacccttctgcctcagtggagagtatcagcttttgttggcagcaacattattgtctttgagaggctctgggaagggctctggatgaattgcatccgacaag

SEQ ID NO: 454255 - DNA, 120 bp, Artificial Sequence
  ENSG00000156282_3 (sequence is synthesized)
ccagggtccggttgcaatgcaagttctatagctccttgttggctctcccgcctgccctggaaacagcccgggccctcatgtgtgtggctgttgctctctccttgatcgccctgcttattg

SEQ ID NO: 454256 - DNA, 120 bp, Artificial Sequence
  ENSG00000156282_4 (sequence is synthesized)
gcatctgtggcatgaagcaggtccagtgcacaggctctaacgagagggccaaagcataccttctgggaacttcaggagtcctcttcatcctgacgggcatcttcgttctgattccggtga

SEQ ID NO: 454257 - DNA, 120 bp, Artificial Sequence
  ENSG00000156282_5 (sequence is synthesized)
gccatccacataggtcagaaacgagagctgggagcagcacttttccttggctgggcaagcgctgctgtcctcttcattggagggggtctgctttgtggattttgctgctgcaacagaaag

SEQ ID NO: 454258 - DNA, 120 bp, Artificial Sequence
  ENSG00000156282_6 (sequence is synthesized)
aagcaagggtacagatatccagtgcctggctaccgtgtgccacacacagataagcgaagaaatacgacaatgcttagtaagacctccaccagttatgtctaatgcctccttttggctcca

SEQ ID NO: 454259 - DNA, 120 bp, Artificial Sequence
  ENSG00000156282_7 (sequence is synthesized)
agtatggactatggtcaatgttttttataaagtcctgctagaaactgtaagtatgtgaggcaggagaacttgctttatgtctagatttacattgatacgaaagtttcaatttgttactgg

SEQ ID NO: 454260 - DNA, 120 bp, Artificial Sequence
  ENSG00000156282_8 (sequence is synthesized)
tggtaggaatgaaaatgacttacttggacattctgacttcaggtgtattaaatgcattgactattgttggacccaatcgctgctccaattttcatattctaaattcaagtatacccataa

SEQ ID NO: 454261 - DNA, 120 bp, Artificial Sequence
  ENSG00000156282_9 (sequence is synthesized)
tcattagcaagtgtacaatgatggactacttattactttttgaccatcatgtattatctgataagaatctaaagttgaaattgatattctataacaataaaacatatacctattctaaaa

SEQ ID NO: 454262 - DNA, 120 bp, Artificial Sequence
  ENSG00000156284_0 (sequence is synthesized)
actggatactatctggccagaagtagcaaagcagctcttatttgaaaaaccactgggttccgagttcattactacaggaaaaactgttctcttctgtggcacagagaaccctgcttcaaa

SEQ ID NO: 454263 - DNA, 120 bp, Artificial Sequence
  ENSG00000156284_1 (sequence is synthesized)
gcagaagtagcagttccggagtccagctggctaaaactcatcccagaggataatggcaacccatgccttagaaatcgctgggctgtttcttggtggtgttggaatggtgggcacagtggc

SEQ ID NO: 454264 - DNA, 120 bp, Artificial Sequence
  ENSG00000156284_2 (sequence is synthesized)
tgtcactgtcatgcctcagtggagagtgtcggccttcattgaaaacaacatcgtggtttttgaaaacttctgggaaggactgtggatgaattgcgtgaggcaggctaacatcaggatgca

SEQ ID NO: 454265 - DNA, 120 bp, Artificial Sequence
  ENSG00000156284_3 (sequence is synthesized)
gtgcaaaatctatgattccctgctggctctttctccggacctacaggcagccagaggactgatgtgtgctgcttccgtgatgtccttcttggctttcatgatggccatccttggcatgaa

SEQ ID NO: 454266 - DNA, 120 bp, Artificial Sequence
  ENSG00000156284_4 (sequence is synthesized)
atgcaccaggtgcacgggggacaatgagaaggtgaaggctcacattctgctgacggctggaatcatcttcatcatcacgggcatggtggtgctcatccctgtgagctgggttgccaatgc

SEQ ID NO: 454267 - DNA, 120 bp, Artificial Sequence
  ENSG00000156284_5 (sequence is synthesized)
catcatcagagatttctataactcaatagtgaatgttgcccaaaaacgtgagcttggagaagctctctacttaggatggaccacggcactggtgctgattgttggaggagctctgttctg

SEQ ID NO: 454268 - DNA, 120 bp, Artificial Sequence
  ENSG00000156284_6 (sequence is synthesized)
ctgcgttttttgttgcaacgaaaagagcagtagctacagatactcgataccttcccatcgcacaacccaaaaaagttatcacaccggaaagaagtcaccgagcgtctactccagaagtca

SEQ ID NO: 454269 - DNA, 120 bp, Artificial Sequence
  ENSG00000156284_7 (sequence is synthesized)
gtatgtgtagttgtgtatgtttttttaactttactataaagccatgcaaatgacaaaaatctatattactttctcaaaatggaccccaaagaaactttgatttactgttcttaactgcct

SEQ ID NO: 454270 - DNA, 120 bp, Artificial Sequence
  ENSG00000156284_8 (sequence is synthesized)
tcagcagaatgagatattaaacccaatgctttgattgttctagaaagtatagtaatttgttttctaaggtggttcaagcatctactctttttatcatttacttcaaaatgacattgctaa

SEQ ID NO: 454271 - DNA, 120 bp, Artificial Sequence
  ENSG00000156284_9 (sequence is synthesized)
agactgcattattttactactgtaatttctccacgacatagcattatgtacatagatgagtgtaacatttatatctcacatagagacatgcttatatggttttatttaaaatgaaatgcc

SEQ ID NO: 454272 - DNA, 120 bp, Artificial Sequence
  ENSG00000156284_10 (sequence is synthesized)
agtccattacactgaataaatagaactcaactattgcttttcagggaaatcatggatagggttgaagaaggttactattaattgtttaaaaacagcttagggattaatgtcctccattta

SEQ ID NO: 454273 - DNA, 120 bp, Artificial Sequence
  ENSG00000156284_11 (sequence is synthesized)
taatgaagattaaaatgaaggctttaatcagcattgtaaaggaaattgaatggctttctgatatgctgttttttagcctaggagttagaaatcctaacttctttatcctcttctcccaga

SEQ ID NO: 454274 - DNA, 120 bp, Artificial Sequence
  ENSG00000156284_12 (sequence is synthesized)
ggctttttttttcttgtgtattaaattaacatttttaaaaagcagatattttgtcaaggggctttgcattcaaactgcttttccagggctatactcagaagaaagataaaagtgtgatct

SEQ ID NO: 454275 - DNA, 120 bp, Artificial Sequence
  ENSG00000156284_13 (sequence is synthesized)
aagaaaaagtgatggttttaggaaagtgaaaatatttttgtttttgtatttgaagaagaatgatgcattttgacaagaaatcatatatgtatggatatattttaataagtatttgagtac

SEQ ID NO: 454276 - DNA, 120 bp, Artificial Sequence
  ENSG00000156284_14 (sequence is synthesized)
agactttgaggtttcatcaatataaataaaagagcagaaaaatatgtcttggttttcatttgcttaccaaaaaaacaacaacaaaaaaagttgtcctttgagaacttcacctgctcctat

SEQ ID NO: 454277 - DNA, 120 bp, Artificial Sequence
  ENSG00000156284_15 (sequence is synthesized)
gtgggtacctgagtcaaaattgtcatttttgttctgtgaaaaataaatttccttcttgtaccatttctgtttagttttactaaaatctgtaaatactgtatttttctgtttattccaaat

SEQ ID NO: 454278 - DNA, 120 bp, Artificial Sequence
  ENSG00000156284_16 (sequence is synthesized)
ttgatgaaactgacaatccaatttgaaagtttgtgtcgacgtctgtctagcttaaatgaatgtgttctatttgctttatacatttatattaataaattgtacatttttctaattatttga

SEQ ID NO: 454279 - DNA, 80 bp, Artificial Sequence
  ENSG00000156298_0 (sequence is synthesized)
gtaggagccccgcgcggtgcgcgctcacgcacgcgcacggcctcgcctgcgcgctcacgaggcctctcgcggcacgcgcc

SEQ ID NO: 454280 - DNA, 120 bp, Artificial Sequence
  ENSG00000156298_1 (sequence is synthesized)
tcccgcgcgcccgcccgccgcctgccgccgccgccgccgccgccggagctctgtagtatggcatcgaggagaatggagaccaaacctgtgataacctgtctcaaaaccctcctcatcatc

SEQ ID NO: 454281 - DNA, 120 bp, Artificial Sequence
  ENSG00000156298_2 (sequence is synthesized)
tactccttcgtcttctggatcactggggtgatcctgctggctgttggagtctggggcaaacttactctgggcacctatatctcccttattgccgagaactccacaaatgctccctatgtg

SEQ ID NO: 454282 - DNA, 120 bp, Artificial Sequence
  ENSG00000156298_3 (sequence is synthesized)
ctcatcggaactggcaccactattgttgtctttggcctgtttggatgctttgctacatgtcgtggtagcccatggatgctgaaactgtatgccatgtttctgtccctggtgttcctggct

SEQ ID NO: 454283 - DNA, 120 bp, Artificial Sequence
  ENSG00000156298_4 (sequence is synthesized)
gagctcgtagctggcatttcagggtttgtgtttcgtcatgagatcaaggacaccttcctgaggacttacacggacgctatgcagacttacaatggcaatgatgagaggagccgggcagtg

SEQ ID NO: 454284 - DNA, 120 bp, Artificial Sequence
  ENSG00000156298_5 (sequence is synthesized)
gaccatgtgcagcgcagcctgagctgctgtggtgtgcagaactacaccaactggagcaccagcccctacttcctggagcatggcatcccccccagctgctgcatgaacgaaactgattgt

SEQ ID NO: 454285 - DNA, 120 bp, Artificial Sequence
  ENSG00000156298_6 (sequence is synthesized)
aatccccaggatctacacaatctgactgtggccgccaccaaagttaaccagaagggttgttatgatctggtaactagtttcatggagactaacatgggaatcatcgctggagtggcgttt

SEQ ID NO: 454286 - DNA, 120 bp, Artificial Sequence
  ENSG00000156298_7 (sequence is synthesized)
ggaataagagacctgttttaaaaaggaactgcagcaatctttgaaagacttccaaagaatgttagagcacagtacataatacacttgccctgctccctctcccccttaccccacaacgtg

SEQ ID NO: 454287 - DNA, 120 bp, Artificial Sequence
  ENSG00000156298_8 (sequence is synthesized)
caactgacactcccacccagtctctgctccacctttcagcccacgtcacgtgtagtgtccattttgtgaagccctgttgtgccacagagtgtagccaggtccccctgcagctagtcctag

SEQ ID NO: 454288 - DNA, 120 bp, Artificial Sequence
  ENSG00000156298_9 (sequence is synthesized)
tgaacctcaccccgaggccctgcatgggccagcccctccatctgtacttggtccaactgcaactcatcatcggtgactggttatcacaccatcgctggcccctttgggccctgcatgtag

SEQ ID NO: 454289 - DNA, 120 bp, Artificial Sequence
  ENSG00000156298_10 (sequence is synthesized)
tgtgggaggctcctgttagctcctcactgtggtaaatgccacacacctttaagtagataagcagacgatagttatctgttcttttgacttaatctcatttggtttgattttccctctact

SEQ ID NO: 454290 - DNA, 120 bp, Artificial Sequence
  ENSG00000156298_11 (sequence is synthesized)
aaggctttcctaccttcttcaggctgcctaagacatgtaacgaaacacttcaataattgtccatgaggagaaaaaaagcatgtgtcatgcatgaaggaaactgaacttgaggtggcctcc

SEQ ID NO: 454291 - DNA, 120 bp, Artificial Sequence
  ENSG00000156298_12 (sequence is synthesized)
ttgcttgttacatacctgggtatgtgtaggcagtttagtgcatctttgcctctcggttgaaacctgtataaccctgttacaaagctgtgttgttgcttcttgtgaaggccatgatatttt

SEQ ID NO: 454292 - DNA, 120 bp, Artificial Sequence
  ENSG00000156298_13 (sequence is synthesized)
gtttttccccaattaattgctattgtgttattttactacttctctctgtattttttcttgcattgacattatagacattgaggacctcatccaaacaatttaaaaatgagtgtgaagggg

SEQ ID NO: 454293 - DNA, 120 bp, Artificial Sequence
  ENSG00000156298_14 (sequence is synthesized)
gaacaagtcaaaatatttttaaaagatcttcaaaagtaatgcctctgtctagcatgccaacaagaatgcattgatattgtgaacatttgtgatatatgtattaataaatagagcaattac

SEQ ID NO: 454294 - DNA, 120 bp, Artificial Sequence
  ENSG00000156298_15 (sequence is synthesized)
gtagtatggcatcgaggagaatggagaccaaacctgtgataacctgtctcaaaaccctcctcatcatctactccttcgtcttctggccctatttttgctttgaaactggagcacagtgct

SEQ ID NO: 454295 - DNA, 120 bp, Artificial Sequence
  ENSG00000156298_16 (sequence is synthesized)
gtatgaggtaccgagaatcagctagatggcaaaccggactgtttgcaatggtcaaggaagaagcagagatttattgaggatcaaaaatattcctaatgcacccggacatttccttatcgc

SEQ ID NO: 454296 - DNA, 120 bp, Artificial Sequence
  ENSG00000156298_17 (sequence is synthesized)
agtatggcatcgaggagaatggagaccaaacctgtgataacctgtctcaaaaccctcctcatcatctactccttcgtcttctggaaagaaaaggctgcaggattttgtggcagacaggat

SEQ ID NO: 454297 - DNA, 120 bp, Artificial Sequence
  ENSG00000156298_18 (sequence is synthesized)
agtatggcatcgaggagaatggagaccaaacctgtgataacctgtctcaaaaccctcctcatcatctactccttcgtcttctggattcattcccatccaaaattcacgaggacacagcca

SEQ ID NO: 454298 - DNA, 120 bp, Artificial Sequence
  ENSG00000156298_19 (sequence is synthesized)
ataaaagggagctgaatttgaagaagagctcgtcactaagattcattctgtatttattgagctgattctgtttgatggatattaggacagaatatttgaacagcatgttgtcttggaaaa

SEQ ID NO: 454299 - DNA, 120 bp, Artificial Sequence
  ENSG00000156298_20 (sequence is synthesized)
gaaatgagagtcctttgctggttcaggcagtggagaagaacaggaatctcctcagcccacgccaggaaaagcaaaacagaagaagcctcatccagctcaccccatcattgttttcaggtt

SEQ ID NO: 454300 - DNA, 120 bp, Artificial Sequence
  ENSG00000156298_21 (sequence is synthesized)
taacggcagcaggcatcttgtgatgaaagttctcagtgtgcccctctcttgagtcacattgcaccaatctggactggttgtcttcttttagtacacagctgtcatccggagcttcccttg

SEQ ID NO: 454301 - DNA, 120 bp, Artificial Sequence
  ENSG00000156298_22 (sequence is synthesized)
agtatggcatcgaggagaatggagaccaaacctgtgataacctgtctcaaaaccctcctcatcatctactccttcgtcttctggccttgcctactgaagagaataagaagctgggtttct

SEQ ID NO: 454302 - DNA, 120 bp, Artificial Sequence
  ENSG00000156298_23 (sequence is synthesized)
gtatttttctcctttagttccattacagcagcttccaatctgagttacctcctcattgcaagcagatttttggaatgctgctcttaaatttcttattttggctgttattccccttgccat

SEQ ID NO: 454303 - DNA, 120 bp, Artificial Sequence
  ENSG00000156298_24 (sequence is synthesized)
gacagaatgattttcattcttggctgaacatttttttcatcttactgcagaaccccactattcatcaagaaaaggatgtagaggaaaaaggagagggttttctttgttttgtttttcctt

SEQ ID NO: 454304 - DNA, 120 bp, Artificial Sequence
  ENSG00000156299_0 (sequence is synthesized)
gccccgcatcgtgcccggccccgtcgcggagatcccggacgaccgtcgcgggttgatggtcgcattccagatgtaaacagcttcagaagcctgacggtcatatggtagaatcactgtgga

SEQ ID NO: 454305 - DNA, 120 bp, Artificial Sequence
  ENSG00000156299_1 (sequence is synthesized)
ctgagacccacctttctagacctgaagcccaggaggaggaagaggaggctggttggtaccatgggcataatgctctgaatcctagtctctcacctagtatgtgagcagtccctgcagatg

SEQ ID NO: 454306 - DNA, 120 bp, Artificial Sequence
  ENSG00000156299_2 (sequence is synthesized)
gcccatttggagatcttgacaaagcctcttctgtttccaatggggtttttggcgcattctcacagacttagatgaaactgtgatggccaccgcagggggcaggtgctgacatcgtcccca

SEQ ID NO: 454307 - DNA, 120 bp, Artificial Sequence
  ENSG00000156299_3 (sequence is synthesized)
gccctgtggctgttcatccggacatcatttccaacctcaatatctaaatgccacagtgctcttggagcaagttgggctggggaccactgttgccttttaagaccataaaaccatgggaaa

SEQ ID NO: 454308 - DNA, 120 bp, Artificial Sequence
  ENSG00000156299_4 (sequence is synthesized)
cgcagaaagtcaacatgtagagcacgagttttatggagaaaagcatgccagcctggggcgcaagcacacttcccgctccctgcgcctctcgcacaagacgcggaggaccaggcacgcttc

SEQ ID NO: 454309 - DNA, 120 bp, Artificial Sequence
  ENSG00000156299_5 (sequence is synthesized)
ctcggggaaggtgatccacaggaactccgaagtgagcacccgatccagcagcacccccagcatcccccagtccctggctgaaaatggcctggagcccttctcccaagatggtaccctaga

SEQ ID NO: 454310 - DNA, 120 bp, Artificial Sequence
  ENSG00000156299_6 (sequence is synthesized)
agacttcgggagccccatctgggtggaccgagtggacatgggcttgagacctgtgtcttacactgactcttctgtcactcccagcgtagacagcagcatcgtcctcacagcagcctctgt

SEQ ID NO: 454311 - DNA, 120 bp, Artificial Sequence
  ENSG00000156299_7 (sequence is synthesized)
gcagagcatgccagacactgaggagagcaggctttacggggatgacgctacatatttggctgagggaggcaggaggcagcattcctatacatccaatgggcccactttcatggagacggc

SEQ ID NO: 454312 - DNA, 120 bp, Artificial Sequence
  ENSG00000156299_8 (sequence is synthesized)
gagctttaagaagaaacgctccaaatctgcagacatctggcgggaggacagcctggaattctcactctctgatctgagccaagaacatttaacaagcaacgaagaaatcttgggttccgc

SEQ ID NO: 454313 - DNA, 120 bp, Artificial Sequence
  ENSG00000156299_9 (sequence is synthesized)
cgaagagaaggactgcgaggaggctcgggggatggaaacgcgggcgagtccgcggcagctcagcacctgtcagagagccaattccttgggtgacttgtatgctcagaaaaactctggagt

SEQ ID NO: 454314 - DNA, 120 bp, Artificial Sequence
  ENSG00000156299_10 (sequence is synthesized)
gacagcaaacggggggccggggagcaaatttgcaggctactgtcggaatttggtgtctgatattcccaatcttgcaaaccataagatgccaccagctgctgctgaagagactcctccgta

SEQ ID NO: 454315 - DNA, 120 bp, Artificial Sequence
  ENSG00000156299_11 (sequence is synthesized)
cagtaattataacacacttccctgtaggaaatctcactgtctctctgaaggtgccaccaacccacaaattagccatagcaacagcatgcaaggcagaagagctaaaacaactcaggatgt

SEQ ID NO: 454316 - DNA, 120 bp, Artificial Sequence
  ENSG00000156299_12 (sequence is synthesized)
taatgcaggcgagggcagtgagtttgcagacagtgggattgaaggggccactaccgacacggacctcctgtccaggcgatctaatgccaccaactccagctactcacccaccacaggccg

SEQ ID NO: 454317 - DNA, 120 bp, Artificial Sequence
  ENSG00000156299_13 (sequence is synthesized)
ggcctttgtgggcagcgacagcggcagcagctccaccggggatgcggctcgtcagggggtgtacgagaacttccggcgggagctggagatgagcaccaccaacagcgagagcctggagga

SEQ ID NO: 454318 - DNA, 120 bp, Artificial Sequence
  ENSG00000156299_14 (sequence is synthesized)
ggccggctcggcgcacagcgatgagcagagcagcggcaccctgagctctccgggccagtcggacatcctgctgaccgccgcacagggcacggtgcgcaaggccggcgccctggccgtcaa

SEQ ID NO: 454319 - DNA, 120 bp, Artificial Sequence
  ENSG00000156299_15 (sequence is synthesized)
gaacttcctggtgcacaagaagaacaagaaggtggagtcagccacccggaggaagtggaagcactactgggtgtccctgaaaggatgcacgctatttttctacgagagcgacggcaggtc

SEQ ID NO: 454320 - DNA, 120 bp, Artificial Sequence
  ENSG00000156299_16 (sequence is synthesized)
tgggatagaccacaacagcatccccaaacacgccgtctgggtggagaacagcattgtgcaggcggtgcctgagcaccccaagaaggactttgtcttctgcctcagcaattccctgggtga

SEQ ID NO: 454321 - DNA, 120 bp, Artificial Sequence
  ENSG00000156299_17 (sequence is synthesized)
tgccttcctttttcagaccactagccagacggagcttgaaaactggatcaccgccatccactctgcctgcgccactgcggtcgcgaggcaccaccacaaggaagacacgctccgactcct

SEQ ID NO: 454322 - DNA, 120 bp, Artificial Sequence
  ENSG00000156299_18 (sequence is synthesized)
gaaatcagagatcaaaaaactggaacagaagattgacatggatgaaaagatgaagaaaatgggtgaaatgcagctgtcttcagtcactgactcaaagaaaaagaaaacaatattagatca

SEQ ID NO: 454323 - DNA, 120 bp, Artificial Sequence
  ENSG00000156299_19 (sequence is synthesized)
gatctttgtctgggagcaaaatctcgagcagttccaaatggacctgtttcgtttccgctgttatttagccagccttcagggtggggagctgccaaaccccaaaaggcttctcgcttttgc

SEQ ID NO: 454324 - DNA, 120 bp, Artificial Sequence
  ENSG00000156299_20 (sequence is synthesized)
aagtcgaccaacgaaagtggccatgggccgccttggaatcttttcggtatcatcgtttcatgccctggtggcagcacgcactggtgaaactggagtgagaagacgtactcaggccatgtc

SEQ ID NO: 454325 - DNA, 120 bp, Artificial Sequence
  ENSG00000156299_21 (sequence is synthesized)
cagatccgcgagcaagcgaaggagcaggttttcttctctgtggggtctggatactacctccaaaaagaagcagggacggccaagcatcaatcaggtgtttggagagggaaccgaagctgt

SEQ ID NO: 454326 - DNA, 120 bp, Artificial Sequence
  ENSG00000156299_22 (sequence is synthesized)
aaagaaatctttagagggaatatttgatgacattgttccagatggcaagagggagaaagaagtggtcttacctaacgttcaccagcacaaccctgactgcgacatttgggtccacgagta

SEQ ID NO: 454327 - DNA, 120 bp, Artificial Sequence
  ENSG00000156299_23 (sequence is synthesized)
tttcactccatcctggttctgtctgcccaataatcagcctgccctgacggtcgtccggccaggcgacactgcacgggacaccctggagctgatttgcaagacacatcaactggatcattc

SEQ ID NO: 454328 - DNA, 120 bp, Artificial Sequence
  ENSG00000156299_24 (sequence is synthesized)
tgctcattacctgcgcctgaaatttctaatagaaaacaaaatgcagctctatgttccacagcccgaggaagacatctatgagctgctgtacaaagaaattgaaatctgtccaaaagtcac

SEQ ID NO: 454329 - DNA, 120 bp, Artificial Sequence
  ENSG00000156299_25 (sequence is synthesized)
tcagagcatccacattgagaagtcagatacagctgctgatacttacgggttttcactttcttctgtggaagaagatggtattcgaaggctgtacgtgaatagtgtgaaggaaaccggttt

SEQ ID NO: 454330 - DNA, 120 bp, Artificial Sequence
  ENSG00000156299_26 (sequence is synthesized)
agcttccaagaaaggcctgaaagcaggagatgagattcttgagatcaataatcgtgctgctgacgccctgaactcttctatgctcaaagatttcctctcacagccctcgctgggcctcct

SEQ ID NO: 454331 - DNA, 120 bp, Artificial Sequence
  ENSG00000156299_27 (sequence is synthesized)
ggtgaggacctaccccgagctggaggaaggagtggagctgctggaaagcccgccccaccgagtggacggccctgccgaccttggcgagagccccctcgcctttctcaccagcaacccagg

SEQ ID NO: 454332 - DNA, 120 bp, Artificial Sequence
  ENSG00000156299_28 (sequence is synthesized)
gcacagcctttgcagcgagcagggcagcagtgctgagaccgctccagaggagaccgaggggccagacttggaatcctcagatgagactgatcacagcagcaagagtacagaacaggtggc

SEQ ID NO: 454333 - DNA, 120 bp, Artificial Sequence
  ENSG00000156299_29 (sequence is synthesized)
cgcattttgccgcagtttgcatgagatgaacccctctgaccagagcccatctcctcaggactccacggggcctcagctggcgaccatgagacaactctcggatgcagataagctgcgcaa

SEQ ID NO: 454334 - DNA, 120 bp, Artificial Sequence
  ENSG00000156299_30 (sequence is synthesized)
ggtgatctgcgagctcctggagacggagcgcacctacgtgaaggatttaaactgtcttatggagagatacctaaagcctcttcaaaaagaaacttttctcacccaggatgagcttgacgt

SEQ ID NO: 454335 - DNA, 120 bp, Artificial Sequence
  ENSG00000156299_31 (sequence is synthesized)
gctttttggaaatttaacggaaatggtagagtttcaagtagaattccttaaaactctagaagatggagtgagactggtacctgatttggaaaagcttgagaaggttgatcaatttaagaa

SEQ ID NO: 454336 - DNA, 120 bp, Artificial Sequence
  ENSG00000156299_32 (sequence is synthesized)
agtgctgttctctctggggggatcattcctgtattatgctgaccgcttcaagctctacagtgccttctgcgccagccacacaaaagttcccaaggtcctggtgaaagccaagacagacac

SEQ ID NO: 454337 - DNA, 120 bp, Artificial Sequence
  ENSG00000156299_33 (sequence is synthesized)
ggctttcaaggcattcttggatgcccagaacccgaagcagcagcactcatccacgctggagtcgtacctcatcaagcccatccagaggatcctcaagtacccacttctgctcagggagct

SEQ ID NO: 454338 - DNA, 120 bp, Artificial Sequence
  ENSG00000156299_34 (sequence is synthesized)
gttcgccctgaccgatgcggagagcgaggagcactaccacctggacgtggccatcaagaccatgaacaaggttgccagtcacatcaatgagatgcagaaaatccatgaagagtttggggc

SEQ ID NO: 454339 - DNA, 120 bp, Artificial Sequence
  ENSG00000156299_35 (sequence is synthesized)
tgtgtttgaccagctgattgctgaacagactggtgagaaaaaagaggttgcagatctgagcatgggagacctgcttttgcacactaccgtgatctggctgaacccgccggcctcgctggg

SEQ ID NO: 454340 - DNA, 120 bp, Artificial Sequence
  ENSG00000156299_36 (sequence is synthesized)
caagtggaaaaaggaaccagagttggcagcattcgtcttcaaaactgctgtggtccttgtgtataaagatggttccaaacagaagaagaaacttgtaggatctcacaggctttccattta

SEQ ID NO: 454341 - DNA, 120 bp, Artificial Sequence
  ENSG00000156299_37 (sequence is synthesized)
tgaggactgggaccccttcagatttcgacacatgatccccacggaagcgctgcaggttcgagctttggcgagtgcagatgcagaggcaaatgccgtgtgtgaaattgtccatgtaaaatc

SEQ ID NO: 454342 - DNA, 120 bp, Artificial Sequence
  ENSG00000156299_38 (sequence is synthesized)
cgagtctgaagggaggccggagagggtctttcacttgtgctgcagctccccagagagccgaaaggatttcctaaaggctgtgcattcaatcctgcgtgataagcacagaagacagctcct

SEQ ID NO: 454343 - DNA, 120 bp, Artificial Sequence
  ENSG00000156299_39 (sequence is synthesized)
caaaaccgagagccttccctcatcccagcaatatgtcccttttggaggcaaaagattgtgtgcactgaagggggccaggccggccatgagcagggcagtgtctgccccaagcaagtctct

SEQ ID NO: 454344 - DNA, 120 bp, Artificial Sequence
  ENSG00000156299_40 (sequence is synthesized)
tgggaggaggaggcggcggctggctcgaaacaggtttaccattgattctgatgccgtctccgcaagcagcccggagaaagagtcccagcagccccccggtggtggggacactgaccgatg

SEQ ID NO: 454345 - DNA, 120 bp, Artificial Sequence
  ENSG00000156299_41 (sequence is synthesized)
ggtagaggagcagtttgatcttgctcagtatgaggagcaagatgacatcaaggagacagacatcctcagtgacgatgatgagttctgtgagtccgtgaagggtgcctcagtggacagaga

SEQ ID NO: 454346 - DNA, 120 bp, Artificial Sequence
  ENSG00000156299_42 (sequence is synthesized)
cctgcaggagcggcttcaggccacctccatcagtcagcgggaaagaggccggaaaaccctggatagtcacgcgtcccgcatggcacagctcaagaagcaagctgccctgtcggggatcaa

SEQ ID NO: 454347 - DNA, 120 bp, Artificial Sequence
  ENSG00000156299_43 (sequence is synthesized)
tggaggcctggagagcgcaagcgaggaagtcatttgggttaggcgtgaagactttgccccctccaggaaactgaacactgagatctgactgcgtcacctgccccgtagagaatgtgtgta

SEQ ID NO: 454348 - DNA, 120 bp, Artificial Sequence
  ENSG00000156299_44 (sequence is synthesized)
gatacttcctgccctaactctgcccaccctcctgtaccgtcgacaagaatgtccccttaggtcgcgctcttgcacacacggttttggcagctgacttggttctgaagccatgtagccacc

SEQ ID NO: 454349 - DNA, 120 bp, Artificial Sequence
  ENSG00000156299_45 (sequence is synthesized)
caactttgtcattttcaacaacatcagaaagaattgatcagaatcccaaataagcttgagtcctatcttctgtatattactaagggcttttatttattctcaataaatcagggcctgaac

SEQ ID NO: 454350 - DNA, 120 bp, Artificial Sequence
  ENSG00000156299_46 (sequence is synthesized)
aattaaaagaaaaaagattctatagcactggaaagcaaatcaccccaggagttaacggatgtacaacagattaatttaagggatagtagcacacacacgatccttctatctgaaatcagt

SEQ ID NO: 454351 - DNA, 120 bp, Artificial Sequence
  ENSG00000156299_47 (sequence is synthesized)
ctcctagctggggaaacctctttcacacacaaaatgaaatgtgtacagcttgccgtgttctgactgtacccttccctcttccatgtctgagaatctccgtgtattttaagaatgtgtgag

SEQ ID NO: 454352 - DNA, 120 bp, Artificial Sequence
  ENSG00000156299_48 (sequence is synthesized)
gagagggtggcgattcatgtttcaatgagcctctttttttttttccttcctgttttggtctatggctggtcttactctgtgtccatgttcggaagctctagttttgcatagaattataga

SEQ ID NO: 454353 - DNA, 120 bp, Artificial Sequence
  ENSG00000156299_49 (sequence is synthesized)
gatgccaaactctttgaaaagagatccaaatttatcgcttgagagaaagaaaagaaacactattttttgtattttacctgagatacaggggcacaaatagatgagaattttacagtgtta

SEQ ID NO: 454354 - DNA, 120 bp, Artificial Sequence
  ENSG00000156299_50 (sequence is synthesized)
gtgtatgtatccctgagcctaaaaaatgaggatataaccttttacagagagagtgaggcgtggtggttttatatttatatatgaaaggccagcaagctcatgcgaaggatatacttttct

SEQ ID NO: 454355 - DNA, 120 bp, Artificial Sequence
  ENSG00000156299_51 (sequence is synthesized)
tccaaaaagcggattttttttttttaatgtttgaatctatatttgagatgggagtttggttggattaaacatgacaccccggtgggcggtgtgtgtgtctgttgcacatggcagggaggg

SEQ ID NO: 454356 - DNA, 120 bp, Artificial Sequence
  ENSG00000156299_52 (sequence is synthesized)
gagcctccttctcatggggttgccatggtgatcattggtttttccatcaaaattgcatcttcatccatagattaccttccccttccctgacagtccataaccaaacctttaaacagaaca

SEQ ID NO: 454357 - DNA, 120 bp, Artificial Sequence
  ENSG00000156299_53 (sequence is synthesized)
acctctttaaaaacttctcttgtgtttaacactttcttcatgccaacgaaacagggtaaacatgctcaaaacattaacagtctaaacagatatccaaatactaagaagaaaaacaagtta

SEQ ID NO: 454358 - DNA, 120 bp, Artificial Sequence
  ENSG00000156299_54 (sequence is synthesized)
tagcactttcaattttttttttttttttaaaaaaaggtttatagctttttcttttcccatgtcacaatgtccacttcctaagaagggtttaaaatactatgaaaactttctttttgggga

SEQ ID NO: 454359 - DNA, 120 bp, Artificial Sequence
  ENSG00000156299_55 (sequence is synthesized)
aaatatctatttggtgtttgacacatcagtaggtactttaaagacctgaattttatagtagctttaggagttatattttataaaaatcagttatgactttatatttccagacaatagaga

SEQ ID NO: 454360 - DNA, 120 bp, Artificial Sequence
  ENSG00000156299_56 (sequence is synthesized)
gttcagtacatcatgctcttgtgcctctgcctgcttttcctgcgttcccaccctgtattccccccgcctttcgggtttccagggcttcgagcttgatcttttgaaagttttattctatta

SEQ ID NO: 454361 - DNA, 120 bp, Artificial Sequence
  ENSG00000156299_57 (sequence is synthesized)
aatttttgctatatcttctggttttctgaaaaagctttagaatggtttctataccctttgtatcactgcatttttccatatcatctccggttcgatcgcgtccagatggaaaacggaagc

SEQ ID NO: 454362 - DNA, 120 bp, Artificial Sequence
  ENSG00000156299_58 (sequence is synthesized)
agaggcttctaatcgtcgcatttactggctccagtgcaacacatccatctgaaaacactcggaagtctggtgcttggagagggtgccattgtctcttgtacataaggtcatgacgtgtct

SEQ ID NO: 454363 - DNA, 120 bp, Artificial Sequence
  ENSG00000156299_59 (sequence is synthesized)
atgtcaaaagttcttatatatttcttttataagctgaaagaaggtctatttttatgtttttaggtctatgaatggaacgttgtaaatgcttgtcaaacaataaaaataacgaaaagtgtc

SEQ ID NO: 454364 - DNA, 120 bp, Artificial Sequence
  ENSG00000156299_60 (sequence is synthesized)
atcatagcacgaaacttcacaagttacacccactgcctccgccagcagccggggaaggctgctgcttcctcatttctgttactggaagtttgggacatgtgaagccagacggggagaaac

SEQ ID NO: 454365 - DNA, 120 bp, Artificial Sequence
  ENSG00000156299_61 (sequence is synthesized)
caacatatacatggtgcagtgttgtcttgagctactaaaattaagtaaactcaatattaaaaactgaaatcagtttttaaaagttatgtaataagtcaacaagagatggaaaatcatttt

SEQ ID NO: 454366 - DNA, 120 bp, Artificial Sequence
  ENSG00000156299_62 (sequence is synthesized)
atatttaaaactgagtggtagagggaacattctcctgctgacataacatttcccatacttaccatttgatgtgtgagtttctaactagaatgtaagaggaaatttgggttctgaatagct

SEQ ID NO: 454367 - DNA, 120 bp, Artificial Sequence
  ENSG00000156299_63 (sequence is synthesized)
gaatattttatgccattgccaatttctttccatgtacaacttctcttcccaagaggtgtgttcttactaccctccctctctgcccacacatgctgttttgctcccattagtttcaaagaa

SEQ ID NO: 454368 - DNA, 120 bp, Artificial Sequence
  ENSG00000156299_64 (sequence is synthesized)
agtttcaaagaactgttctgatagcgtgttctttaaaaaaagaaaaacaacaaaaacgcatttgcctcccaagtcaagtattcaattaaagattcggccgggtgtggtggctcacgcctg

SEQ ID NO: 454369 - DNA, 62 bp, Artificial Sequence
  ENSG00000156299_65 (sequence is synthesized)
aatacaaaaaaaaaaaaaattagaggatgcggagcttgcagtgagcagagatggagccactg

SEQ ID NO: 454370 - DNA, 120 bp, Artificial Sequence
  ENSG00000156299_66 (sequence is synthesized)
gagacgcttacatcccggggaggcattttgtgctttgttttcttgccagtttcagctctccctttctggaacttttgttgtttagccaggtgaaatcaaagcctgagttctggtccacag

SEQ ID NO: 454371 - DNA, 120 bp, Artificial Sequence
  ENSG00000156299_67 (sequence is synthesized)
tttagcctttgacagcttcccagagggcactggtgggaagcgagtgcagctccggggtctcaccgtcgctgtccttgctgcgttgagacgtggccgtagattttcatgggaaaaccagca

SEQ ID NO: 454372 - DNA, 120 bp, Artificial Sequence
  ENSG00000156299_68 (sequence is synthesized)
tgggacgtccatatgagaggatgctctcttcagagctaggaggcgtttggtgctctgggaatattttaagaaacttctgtctccgtgctgaacacgtcaggtggtagaattaattaccat

SEQ ID NO: 454373 - DNA, 120 bp, Artificial Sequence
  ENSG00000156299_69 (sequence is synthesized)
gagaatacattcctgatgatgtctgcactgtggaaaataaagcgcaagcccaggattgaaaacaatgacaagtccggtgactctatgtatcgaacacttcatctgagtacagaacaggtg

SEQ ID NO: 454374 - DNA, 120 bp, Artificial Sequence
  ENSG00000156299_70 (sequence is synthesized)
gtgggggctgatgtaggaggacggtttttccctggtgtgaggttccttgcccttgcctccttcccagtggctcctggggatccgccctgtatctacattcctcttgtcctccctcaagcc

SEQ ID NO: 454375 - DNA, 120 bp, Artificial Sequence
  ENSG00000156299_71 (sequence is synthesized)
ttccctttgcctcccttctccttttggctggtgagctcctccctcatttgccaagtcgggttgcagacacatcctctttctggagaggctgtctcagcctgcttgcagaatgagagtcgc

SEQ ID NO: 454376 - DNA, 120 bp, Artificial Sequence
  ENSG00000156299_72 (sequence is synthesized)
tgctttgcatgacagccagctttgtctagcagaaagccgtgtgtcacatttcagcaaggtcacagccctctgttctgagaacatggtggcttcacggcctggcagcacagcaatgcctgc

SEQ ID NO: 454377 - DNA, 120 bp, Artificial Sequence
  ENSG00000156299_73 (sequence is synthesized)
tctcagtagtaaggattctaggtttggtagcccacatggcacttccagtttttatcctgaccttgtgcctgcaactttatttttagtctccatgttaatttggggaagcctcgagctatt

SEQ ID NO: 454378 - DNA, 120 bp, Artificial Sequence
  ENSG00000156304_0 (sequence is synthesized)
gcggcgtggactcgggccgctgccgccatcccgctggagagagggagagagaggcccgcccgctcgccggccgggccagtgtgagccagtgcgtgagggcgcggggggccgtgtcagcga

SEQ ID NO: 454379 - DNA, 120 bp, Artificial Sequence
  ENSG00000156304_1 (sequence is synthesized)
ccgtgtcagcgagacgcagagcgcagccgccaccaccaaacggacatgttgaagaccagcgctgccgccgcctccttttcctcatcctgcgaacgggactgagagggggcccgccacctc

SEQ ID NO: 454380 - DNA, 120 bp, Artificial Sequence
  ENSG00000156304_2 (sequence is synthesized)
ccgcttcgggcgcagcctcttcctgcccgggcctcggactccgccgctcgtcgcctccccccggccaccaggcccggctggtttcccagccccgctccgccgcggcgcgaggtctatgtg

SEQ ID NO: 454381 - DNA, 120 bp, Artificial Sequence
  ENSG00000156304_3 (sequence is synthesized)
cgctccgccgcggcgcgaggtctatgtgaccggcgggcccggagcagccgccgccgcagcgcgaacatggacgccgtcaacgccttcaaccaggagctcttttcgcttatggatatgaaa

SEQ ID NO: 454382 - DNA, 120 bp, Artificial Sequence
  ENSG00000156304_4 (sequence is synthesized)
cctcccatctctagagccaagatgattctcatcactaaagctgctattaaagctattaagctttataagcatgtagttcaaatagtagaaaagttcatcaaaaagtgtaaaccagaatac

SEQ ID NO: 454383 - DNA, 120 bp, Artificial Sequence
  ENSG00000156304_5 (sequence is synthesized)
aaggttccgggattatatgtaattgactcaattgtgcgacagtctcgtcatcagtttggaactgataaagatgtttttgggccaagattctctaaaaacataactgccacattccaatat

SEQ ID NO: 454384 - DNA, 120 bp, Artificial Sequence
  ENSG00000156304_6 (sequence is synthesized)
ttatatctttgtccatctgaagataagagtaaaatagttcgtgtgctgaacctttggcaaaaaaatggagtgttcaaaattgaaattattcaacctcttttggacatggcagcgggaacc

SEQ ID NO: 454385 - DNA, 120 bp, Artificial Sequence
  ENSG00000156304_7 (sequence is synthesized)
agtaatgcagccccagtagcagaaaatgttaccaataatgaaggctcacctccacctccagtaaaagtttcttctgaacctcccacacaagccactccaaactccgtcccagctgtacca

SEQ ID NO: 454386 - DNA, 120 bp, Artificial Sequence
  ENSG00000156304_8 (sequence is synthesized)
cagttgcccagctctgatgcttttgctgctgtggctcagctgtttcagacaactcaaggccaacagcttcagcagatccttcagacttttcaacagcctccaaaaccacagtctcctgcc

SEQ ID NO: 454387 - DNA, 120 bp, Artificial Sequence
  ENSG00000156304_9 (sequence is synthesized)
cttgacaatgctgtgatggctcaggttcaggctatcacagctcagttaaagacaactcctacacaaccatctgaacaaaaagctgctttccccccacctgaacagaaaactgcatttgac

SEQ ID NO: 454388 - DNA, 120 bp, Artificial Sequence
  ENSG00000156304_10 (sequence is synthesized)
aagaagttgcttgatagatttgactatgatgatgagccagaagctgtggaagaatcaaagaaagaggataccactgccgtcaccacgacagcacctgctgccgcagtaccccctgcaccc

SEQ ID NO: 454389 - DNA, 120 bp, Artificial Sequence
  ENSG00000156304_11 (sequence is synthesized)
accgccaccgtgcctgctgctgctgcacccgctgctgcctctcctcctcctccacaggcaccatttggctttcctggagatggcatgcagcagccagcatacacacagcatcaaaatatg

SEQ ID NO: 454390 - DNA, 120 bp, Artificial Sequence
  ENSG00000156304_12 (sequence is synthesized)
gatcagtttcagccacgaatgatgggaatacaacaggatccaatgcaccatcaggttccacttcctcctaatggacaaatgccaggatttggacttcttcctacacctccatttcctccc

SEQ ID NO: 454391 - DNA, 120 bp, Artificial Sequence
  ENSG00000156304_13 (sequence is synthesized)
atggctcagcctgtgattcctccaactccaccagtgcagcagcctttccaagcttcttttcaggcacaaaatgaaccacttacacagaagccgcatcagcaggaaatggaagtagaacaa

SEQ ID NO: 454392 - DNA, 120 bp, Artificial Sequence
  ENSG00000156304_14 (sequence is synthesized)
ccttgtattcaagaggttaagcgacatatgtctgataacagaaagtcaagatctaggtcagcatccaggtcaccaaaaaggaggcgatctagatctggttctagatctcgaaggtctcgg

SEQ ID NO: 454393 - DNA, 120 bp, Artificial Sequence
  ENSG00000156304_15 (sequence is synthesized)
catcgacgttctcgatctcggtccagggatagacgccgacattctccccgatctcgatctcaagaaagacgggatcgagaaaaagagagagaacgtcgacaaaaaggcctccctcaagtg

SEQ ID NO: 454394 - DNA, 120 bp, Artificial Sequence
  ENSG00000156304_16 (sequence is synthesized)
aaaccggaaactgcaagtgtttgcagtactaccctctgggtggggcagctggacaaaagaactactcagcaggatgttgccagtctcttggaagagtttggtccaattgaatcaattaat

SEQ ID NO: 454395 - DNA, 120 bp, Artificial Sequence
  ENSG00000156304_17 (sequence is synthesized)
aaactgagccgaggaaactataaagtgaaccagaaatccataaagattgcctgggccttaaacaaaggaataaaggcagattataagcagtattgggatgtagaacttggtgttacttat

SEQ ID NO: 454396 - DNA, 120 bp, Artificial Sequence
  ENSG00000156304_18 (sequence is synthesized)
attccatgggacaaagtcaagcctgaggaactggagagtttttgtgaaggaggaatgttggacagtgacacacttaacccagattggaaaggaattcctaagaagcctgaaaatgaagtt

SEQ ID NO: 454397 - DNA, 120 bp, Artificial Sequence
  ENSG00000156304_19 (sequence is synthesized)
gctcaaaatggaggtgctgaaacctcacacacagaaccagtatcacccatacctaaaccattacctgtgcctgtccctcctattcctgttcctgcacctataacagtgccacctccacag

SEQ ID NO: 454398 - DNA, 120 bp, Artificial Sequence
  ENSG00000156304_20 (sequence is synthesized)
gtcccaccacatcaaccgggtccacctgtagttggtgctctccagccgcctgctttcacgcctcctctgggaataccgcctccaggctttggtcctggtgttcctcctccccctcctcct

SEQ ID NO: 454399 - DNA, 120 bp, Artificial Sequence
  ENSG00000156304_21 (sequence is synthesized)
ccaccatttttgcgcccaggattcaacccaatgcatttaccaccaggttttctgcctcctggacccccacctcctataactccaccagtatccattcctcctcctcacactccaccaata

SEQ ID NO: 454400 - DNA, 120 bp, Artificial Sequence
  ENSG00000156304_22 (sequence is synthesized)
agcatcccaaactctactatcgctggtataaatgaagacactacaaaagacttatctattggaaatcccattccaacagtggtgtctggggctagaggaaacgccgagtctggtgacagc

SEQ ID NO: 454401 - DNA, 120 bp, Artificial Sequence
  ENSG00000156304_23 (sequence is synthesized)
gtgaaaatgtatggctctgccgtgccacctgctgcacccacgaatctgcccacccctcctgtaacccagcctgtttcacttcttggcactcaaggagttgcccctggtcctgtaattgga

SEQ ID NO: 454402 - DNA, 120 bp, Artificial Sequence
  ENSG00000156304_24 (sequence is synthesized)
cttcaggcaccatctactggtcttcttggcgcccggcccggtctcatcccactccagcgccctccaggaatgcccccacctcacttacagcggttccctttgatgccgccccgtcccatg

SEQ ID NO: 454403 - DNA, 120 bp, Artificial Sequence
  ENSG00000156304_25 (sequence is synthesized)
ccaccgcacatgatgcacagaggcccaccgccaggaccagggggctttgcgatgcctccacctcatggaatgaaaggtcccttcccaccgcatggcccctttgttaggcctggtggaatg

SEQ ID NO: 454404 - DNA, 120 bp, Artificial Sequence
  ENSG00000156304_26 (sequence is synthesized)
ccagggctcgggggcccagggccaggcccagggggtcctgaagacagagacggaaggcaacagccgccgcagcagccacagcagcagccacagccgcaggcgccccagcaaccacagcag

SEQ ID NO: 454405 - DNA, 120 bp, Artificial Sequence
  ENSG00000156304_27 (sequence is synthesized)
cagcagcagcagcagccaccaccatcacaacagcctccaccaacacagcagcagccacagcagtttagaaatgataacaggcagcagttcaattcaggtagagaccaagaaaggtttgga

SEQ ID NO: 454406 - DNA, 120 bp, Artificial Sequence
  ENSG00000156304_28 (sequence is synthesized)
agaagatcttttggaaatagggtggaaaatgaccgggaacggtatgggaaccgtaatgatgatagagataatagtaaccgtgacaggagagagtggggaaggaggagccctgaccgggac

SEQ ID NO: 454407 - DNA, 120 bp, Artificial Sequence
  ENSG00000156304_29 (sequence is synthesized)
aggcacagagacttggaagagagaaatagacgctctagtgggcatcgagacagagagagagattctagagatagagagtctcgtagagagaaggaagaagcccgaggaaaggaaaagcct

SEQ ID NO: 454408 - DNA, 120 bp, Artificial Sequence
  ENSG00000156304_30 (sequence is synthesized)
gaggtgacagacagggcaggtggtaacaaaaccgttgaacctcccattagccaagtgggaaatgtagacactgcttcagaacttgagaagggggtgtctgaggctgcagtcctaaagcct

SEQ ID NO: 454409 - DNA, 120 bp, Artificial Sequence
  ENSG00000156304_31 (sequence is synthesized)
tctgaagagttacctgctgaggctacctcatccgttgaacccgaaaaggattctggctcagcagcagaggctcctcgttagagactggaatttgtgaaaatgtgacagtgacacttcctg

SEQ ID NO: 454410 - DNA, 120 bp, Artificial Sequence
  ENSG00000156304_32 (sequence is synthesized)
gagtgtagagcttgaggtgtacagatgctgtattatatccgctcccgctgtactgcagccccgcgccagctggtggggaactgtaagcaatttgattgcttcccttctatttaaaaatag

SEQ ID NO: 454411 - DNA, 120 bp, Artificial Sequence
  ENSG00000156304_33 (sequence is synthesized)
ccacaaaataacaaaaaatactgaaaatatgaataaatattaccctttttgctgtaactttttaaaagttttgactttaaaaagtttacaaatcgtaattagaagtgctctctatttttt

SEQ ID NO: 454412 - DNA, 120 bp, Artificial Sequence
  ENSG00000156304_34 (sequence is synthesized)
tttttttttttaatttaagacaaggtaacggtgaaagctcctcaaaacaatagggatgtttttaataaactctattttcgtaacaaactttaatgtgtgctattcttcctacactgcatt

SEQ ID NO: 454413 - DNA, 120 bp, Artificial Sequence
  ENSG00000156304_35 (sequence is synthesized)
aaaggcctccctcaagtgaaaccggaaactgcaagtgtactaccctctgggtggggcagctggacaaaagaactactcagcaggatgttgccagtctcttggaagagtttggtccaattg

SEQ ID NO: 454414 - DNA, 120 bp, Artificial Sequence
  ENSG00000156304_36 (sequence is synthesized)
aatcaattaatgtgagtgtttattcagttttttaagtacgatggacaggtgtgattaatgtcattttatgaaatggaggacctgagaccaaagttacaatttgcccaggtttatagatgt

SEQ ID NO: 454415 - DNA, 120 bp, Artificial Sequence
  ENSG00000156304_37 (sequence is synthesized)
gactagaatttaggtgttcagagtccacgtttagaattatctgtatttaacatttcttagaattctttgtatttaacatttcttggataaccaagtttaatttcaaacatttctaggtaa

SEQ ID NO: 454416 - DNA, 120 bp, Artificial Sequence
  ENSG00000156304_38 (sequence is synthesized)
acattatatagcatggggtgagggatgggattgttggaactgcttacttggtgttgtatcttgttgcttttcaattttgttatcttttataatattaaaatgttttggagcagatgattc

SEQ ID NO: 454417 - DNA, 120 bp, Artificial Sequence
  ENSG00000156304_39 (sequence is synthesized)
agattttccccctcaacaagaaaacatcgattattttccctggttttaaatgtgatatgtgctcagtgcaaaaatttccagggtttgaagctgaatttactagtgtaaaattaaaaaagt

SEQ ID NO: 454418 - DNA, 120 bp, Artificial Sequence
  ENSG00000156304_40 (sequence is synthesized)
cctgctgcacccacgaatctgcccacccctcctgtaacccagcctgtttcacttcttggtaagttatttttttttatcattagttttccttgccccaccccccccccacccccccaccca

SEQ ID NO: 454419 - DNA, 120 bp, Artificial Sequence
  ENSG00000156304_41 (sequence is synthesized)
ttaattttggtaaaattatttccaagactggcttttttggttgttttgtttgtttgtttgtttttgaggaagatcttcctcttaaagtcaaatatgtgtacttgatctttaccaagagag

SEQ ID NO: 454420 - DNA, 120 bp, Artificial Sequence
  ENSG00000156304_42 (sequence is synthesized)
aatctcaaagacaaaatcatgtttgtctgtcttgaataaaagtttggatcttcacatccttatttggtatagaaaaatgattaaaagtaatctctgtgcaaaggaattggtacagagttc

SEQ ID NO: 454421 - DNA, 120 bp, Artificial Sequence
  ENSG00000156304_43 (sequence is synthesized)
gtaattcacttaaccttagtctcttcccagcttttaggagatacttctttaacggcataggtttttctctgtctggaccaattattatctatctgaaacccctggacttgggtagcgttc

SEQ ID NO: 454422 - DNA, 120 bp, Artificial Sequence
  ENSG00000156304_44 (sequence is synthesized)
tttgtgggctagcaaagaaatcatctttgatacattccaataaaatggctttgttttctaagtaacagttgcgcagcctgaggtaccactttcccactcactctcagtttacttggctgg

SEQ ID NO: 454423 - DNA, 120 bp, Artificial Sequence
  ENSG00000156304_45 (sequence is synthesized)
agtttatctgttgtactttttacccacaacttcaatactgtgatcaagggcgatgtgacttagatcttttacatctttaagcaggcttactcttgcctgcttaagttatgaataaataca

SEQ ID NO: 454424 - DNA, 120 bp, Artificial Sequence
  ENSG00000156304_46 (sequence is synthesized)
tcacatgcttgttacagtagaccatcttttaaattaacaaattgttgtatttgaagtggtattgccaaatataattaacacttgaatcccctaactggaagttaatatcttgagagtatt

SEQ ID NO: 454425 - DNA, 120 bp, Artificial Sequence
  ENSG00000156304_47 (sequence is synthesized)
acagtgttctagtcctgtgagcccatagtatttttcaaaggtatatgcatatgcctgtttgctttcataatctgagttgttttaggaaagaacctattgattacctctgagatgtaggac

SEQ ID NO: 454426 - DNA, 120 bp, Artificial Sequence
  ENSG00000156304_48 (sequence is synthesized)
tgtgagacattggtttgtaatggaggacttttacttttcacctatgctattcagtactgttggaattttttattttttgcatgtactatatttataataaaaaaacaatttgtttttaaa

SEQ ID NO: 454427 - DNA, 120 bp, Artificial Sequence
  ENSG00000156313_0 (sequence is synthesized)
gtagttgatctccggagtttcgccatgcggaacttgggggctttcgcggcccgcgtcggtgcggagtagctgctttagccccgaccaaaccgtcctctacagcctcctggccccggcgca

SEQ ID NO: 454428 - DNA, 120 bp, Artificial Sequence
  ENSG00000156313_1 (sequence is synthesized)
ggctgcccgtactgcccgtggcatgagggagccggaagagctgatgcccgattcgggtgctgtgtttacatttgggaaaagtaaatttgctgaaaataatcccggtaaattctggtttaa

SEQ ID NO: 454429 - DNA, 120 bp, Artificial Sequence
  ENSG00000156313_2 (sequence is synthesized)
aaatgatgtccctgtacatctttcatgtggagatgaacattctgctgttgttaccggaaataataaactttacatgtttggcagtaacaactggggtcagttaggattaggatcaaagtc

SEQ ID NO: 454430 - DNA, 120 bp, Artificial Sequence
  ENSG00000156313_3 (sequence is synthesized)
agccatcagcaagccaacatgtgtcaaagctctaaaacctgaaaaagtgaaattagctgcctgtggaaggaaccacaccctggtgtcaacagaaggaggcaatgtatatgcaactggtgg

SEQ ID NO: 454431 - DNA, 120 bp, Artificial Sequence
  ENSG00000156313_4 (sequence is synthesized)
aaataatgaaggacagttggggcttggtgacaccgaagaaagaaacacttttcatgtaattagcttttttacatccgagcataagattaagcagctgtctgctggatctaatacttcagc

SEQ ID NO: 454432 - DNA, 120 bp, Artificial Sequence
  ENSG00000156313_5 (sequence is synthesized)
tgccctaactgaggatggaagactttttatgtggggtgacaattccgaagggcaaattggtttaaaaaatgtaagtaatgtctgtgtccctcagcaagtgaccattgggaaacctgtctc

SEQ ID NO: 454433 - DNA, 120 bp, Artificial Sequence
  ENSG00000156313_6 (sequence is synthesized)
ctggatctcttgtggatattaccattcagcttttgtaacaacagatggtgagctatatgtgtttggagaacctgagaatgggaagttaggtcttcccaatcagctcctgggcaatcacag

SEQ ID NO: 454434 - DNA, 120 bp, Artificial Sequence
  ENSG00000156313_7 (sequence is synthesized)
aacaccccagctggtgtctgaaattccggagaaggtgatccaagtagcctgtggtggagagcatactgtggttctcacggagaatgctgtgtatacctttgggctgggacaatttggtca

SEQ ID NO: 454435 - DNA, 120 bp, Artificial Sequence
  ENSG00000156313_8 (sequence is synthesized)
gctgggtcttggcacttttctttttgaaacttcagaacccaaagtcattgagaatattagggatcaaacaataagttatatttcttgtggagaaaatcacacagctttgataacagatat

SEQ ID NO: 454436 - DNA, 120 bp, Artificial Sequence
  ENSG00000156313_9 (sequence is synthesized)
cggccttatgtatacttttggagatggtcgccacggaaaattaggacttggactggagaattttaccaatcacttcattcctactttgtgctctaattttttgaggtttatagttaaatt

SEQ ID NO: 454437 - DNA, 120 bp, Artificial Sequence
  ENSG00000156313_10 (sequence is synthesized)
ggttgcttgtggtggatgtcacatggtagtttttgctgctcctcatcgtggtgtggcaaaagaaattgaattcgatgaaataaatgatacttgcttatctgtggcgacttttctgccgta

SEQ ID NO: 454438 - DNA, 120 bp, Artificial Sequence
  ENSG00000156313_11 (sequence is synthesized)
tagcagtttaacctcaggaaatgtactgcagaggactctatcagcacgtatgcggcgaagagagagggagaggtctccagattctttttcaatgaggagaacactacctccaatagaagg

SEQ ID NO: 454439 - DNA, 120 bp, Artificial Sequence
  ENSG00000156313_12 (sequence is synthesized)
cgatgttctgagagaaacctccaagagagtgtcttatctgaacaggacctcatgcagccagaggaaccagattatttgctagatgaaatgaccaaagaagcagagatagataattcttca

SEQ ID NO: 454440 - DNA, 120 bp, Artificial Sequence
  ENSG00000156313_13 (sequence is synthesized)
actgtagaaagccttggagaaactactgatatcttaaacatgacacacatcatgagcctgaattccaatgaaaagtcattaaaattatcaccagttcagaaacaaaagaaacaacaaaca

SEQ ID NO: 454441 - DNA, 120 bp, Artificial Sequence
  ENSG00000156313_14 (sequence is synthesized)
attggggaactgacgcaggatacagctcttactgaaaacgatgatagtgatgaatatgaagaaatgtcagaaatgaaagaagggaaagcatgtaaacaacatgtgtcacaagggattttc

SEQ ID NO: 454442 - DNA, 120 bp, Artificial Sequence
  ENSG00000156313_15 (sequence is synthesized)
atgacgcagccagctacgactatcgaagcattttcagatgaggaagtagagatcccagaggagaaggaaggagcagaggattcaaaaggaaatggaatagaggagcaagaggtagaagca

SEQ ID NO: 454443 - DNA, 120 bp, Artificial Sequence
  ENSG00000156313_16 (sequence is synthesized)
aatgaggaaaatgtgaaggtgcatggaggaagaaaggagaaaacagagatcctatcagatgaccttacagacaaagcagaggatcatgaattttctaaaactgaggaactaaaactagaa

SEQ ID NO: 454444 - DNA, 120 bp, Artificial Sequence
  ENSG00000156313_17 (sequence is synthesized)
gatgtggatgaggaaattaatgctgaaaatgtggaaagcaagaagaaaactgtgggagatgatgaaagtgttcctacaggttatcacagtaaaacagaaggagcagaaagaaccaatgat

SEQ ID NO: 454445 - DNA, 120 bp, Artificial Sequence
  ENSG00000156313_18 (sequence is synthesized)
gatagctcagctgaaactattgaaaagaaagaaaaagccaacctagaggaacgggccatttgtgagtacaatgaaaacccaaaaggatacatgcttgatgatgcagatagcagttcatta

SEQ ID NO: 454446 - DNA, 120 bp, Artificial Sequence
  ENSG00000156313_19 (sequence is synthesized)
gaaatcctagaaaacagtgaaacaacaccaagcaaagacatgaaaaaaacaaagaagatttttctgttcaaaagagtcccctcaataaatcaaaagattgtcaagaataacaatgagccg

SEQ ID NO: 454447 - DNA, 120 bp, Artificial Sequence
  ENSG00000156313_20 (sequence is synthesized)
ctcccagagataaaatccataggagaccagatcattttaaaaagtgataataaagatgccgaccagaaccacatgagtcagaatcatcagaatatcccaccaacaaatacagagagaaga

SEQ ID NO: 454448 - DNA, 120 bp, Artificial Sequence
  ENSG00000156313_21 (sequence is synthesized)
tcaaaatcctgtacaatactataaatatatatttatgttttcacagtcaccaagtgtattgtaatgtatacttgaaaaatgttataacttatgaagtaaagtttctgatagtagtcttta

SEQ ID NO: 454449 - DNA, 120 bp, Artificial Sequence
  ENSG00000156313_22 (sequence is synthesized)
aaagatataagacttaatatgttttattcagcttctataagtgtgaccagttttgatatttatttatgctaatatttttaacaagtcatttcaaaatatgtgtatctcaaattctcccta

SEQ ID NO: 454450 - DNA, 120 bp, Artificial Sequence
  ENSG00000156313_23 (sequence is synthesized)
aagtgttgtggccttaactgttcagtattgcaataaaaaatatatttttatatgtggaaaattgaaataagatatttcctagtttttactaaacaattttacttctttataattttataa

SEQ ID NO: 454451 - DNA, 120 bp, Artificial Sequence
  ENSG00000156313_24 (sequence is synthesized)
ggcaatatttgcaatcttacgacactgtaacagtttttgatgtatttacaatttttacaaaactgaggtaaaattgtttataatgaacatattttaataaactatatctggtcagttcca

SEQ ID NO: 454452 - DNA, 120 bp, Artificial Sequence
  ENSG00000156313_25 (sequence is synthesized)
tacgactatcgaagcattttcagatgaggaagtaggtaatgacacaggccaggtgggacctcaggctgacactgatggagagggtttacaaaaagaggtatatagacatgaaaataataa

SEQ ID NO: 454453 - DNA, 120 bp, Artificial Sequence
  ENSG00000156313_26 (sequence is synthesized)
tggtgttgatcaacttgatgctaaggaaatagaaaaggaaagtgatggaggacacagtcagaaggaatcagaagcagaagaaatagacagtgagaaggaaactaaactggcagaaatagc

SEQ ID NO: 454454 - DNA, 120 bp, Artificial Sequence
  ENSG00000156313_27 (sequence is synthesized)
aggtatgaaggatttaagagaaagggaaaagagtacaaaaaagatgagtcctttctttggcaacttaccagatagaggtatgaatactgagagtgaagaaaataaagattttgttaagaa

SEQ ID NO: 454455 - DNA, 120 bp, Artificial Sequence
  ENSG00000156313_28 (sequence is synthesized)
aagggaaagttgcaagcaagatgtgatctttgacagtgaaagagaatcagtagaaaagccagacagttacatggaaggtgcaagtgagagtcaacagggtatagctgatggattccagca

SEQ ID NO: 454456 - DNA, 120 bp, Artificial Sequence
  ENSG00000156313_29 (sequence is synthesized)
gcctgaggcaatagaatttagtagtggagagaaagaggatgatgaagtggaaactgaccaaaacatacggtatggcaggaaattgattgaacaaggaaatgaaaaagagactaaacccat

SEQ ID NO: 454457 - DNA, 120 bp, Artificial Sequence
  ENSG00000156313_30 (sequence is synthesized)
agcagaggtgagtgaaggcaaggcaaaatcagtgggagaagcagaggatgggcctgaaggtagaggggatggaacctgtgaggaaggtagttcaggagcagaacactggcaagatgagga

SEQ ID NO: 454458 - DNA, 120 bp, Artificial Sequence
  ENSG00000156313_31 (sequence is synthesized)
gagggagaagggggagaaagacaagggtagaggagaaatggagaggccaggagagggagagaaggaactagcagagaaggaagaatggaagaagagggatggggaagagcaggagcaaaa

SEQ ID NO: 454459 - DNA, 120 bp, Artificial Sequence
  ENSG00000156313_32 (sequence is synthesized)
gggaggaggagcatggagaaggagaagaagaggagggagacagagaagaggaagaagagaaggagggagaagggaaagaggaaggagaaggggaagaagtggagggagaacgtgaaaagg

SEQ ID NO: 454460 - DNA, 120 bp, Artificial Sequence
  ENSG00000156313_33 (sequence is synthesized)
aggaaggagagaggaaaaaggaggaaagagcggggaaggaggagaaaggagaggaagaaggagaccaaggagagggggaagaggaggaaacagaggggagaggggaggaaaaagaggagg

SEQ ID NO: 454461 - DNA, 120 bp, Artificial Sequence
  ENSG00000156313_34 (sequence is synthesized)
gaggggaagtagagggaggggaagtagaggaggggaaaggagagagggaagaggaagaggaggagggtgagggggaagaggaggaaggggagggggaagaggaggaaggggagggggaag

SEQ ID NO: 454462 - DNA, 120 bp, Artificial Sequence
  ENSG00000156313_35 (sequence is synthesized)
aggaggaaggagaagggaaaggggaggaagaaggggaagaaggagaaggggaggaagaaggggaggaaggagaaggggagggggaagaggaggaaggagaaggggagggagaagaggaag

SEQ ID NO: 454463 - DNA, 120 bp, Artificial Sequence
  ENSG00000156313_36 (sequence is synthesized)
gagaaggggagggagaagaggaggaaggagaaggggagggagaagaggaaggagaaggggagggagaagaggaggaaggagaagggaaaggggaggaggaaggagaggaaggagaagggg

SEQ ID NO: 454464 - DNA, 120 bp, Artificial Sequence
  ENSG00000156313_37 (sequence is synthesized)
agggggaagaggaggaaggagaaggggaaggggaggatggagaaggggagggggaagaggaggaaggagaatgggagggggaagaggaggaaggagaaggggagggggaagaggaaggag

SEQ ID NO: 454465 - DNA, 120 bp, Artificial Sequence
  ENSG00000156313_38 (sequence is synthesized)
aaggggaaggggaggaaggagaaggggagggggaagaggaggaaggagaaggggagggggaagaggaggaaggggaagaagaaggggaggaagaaggagagggagaggaagaaggggagg

SEQ ID NO: 454466 - DNA, 120 bp, Artificial Sequence
  ENSG00000156313_39 (sequence is synthesized)
gagaaggggaggaagaagaggaaggggaagtggaaggggaggtggaaggggaggaaggagagggggaaggagaggaagaggaaggagaggaggaaggagaagaaagggaaaaggaggggg

SEQ ID NO: 454467 - DNA, 120 bp, Artificial Sequence
  ENSG00000156313_40 (sequence is synthesized)
aaggagaagaaaacaggaggaacagagaagaggaggaggaagaagaggggaagtatcaggagacaggcgaagaagagaatgaaaggcaggatggagaggagtacaaaaaagtgagcaaaa

SEQ ID NO: 454468 - DNA, 120 bp, Artificial Sequence
  ENSG00000156313_41 (sequence is synthesized)
taaaaggatctgtgaaatatggcaaacataaaacatatcaaaaaaagtcagttactaacacacagggaaatgggaaagagcagaggtccaaaatgccagtccagtcaaaacgacttttaa

SEQ ID NO: 454469 - DNA, 120 bp, Artificial Sequence
  ENSG00000156313_42 (sequence is synthesized)
aaaacgggccatcaggttccaaaaagttctggaataatgtattaccacattacttggaattgaagtaacaaaccttaaatgtgacccgattatggccagtcagacaatttaaatgccttg

SEQ ID NO: 454470 - DNA, 120 bp, Artificial Sequence
  ENSG00000156313_43 (sequence is synthesized)
catataacgggcactcattacgtgttattaaattgattttatgtcaattattttatgtgtagtaaaaaaaaaagcaactgatgcagctgtgttaaggagccaaagacaataggaggcact

SEQ ID NO: 454471 - DNA, 120 bp, Artificial Sequence
  ENSG00000156313_44 (sequence is synthesized)
ggtaaattttggcctctctcaaactaaaattttcgtgtatttcccccccaaattataaaaacataactagaaaatattaaaaggtcatatcagattattaacattatatattcattaaag

SEQ ID NO: 454472 - DNA, 120 bp, Artificial Sequence
  ENSG00000156313_45 (sequence is synthesized)
gcagctttaggaaacaggaatatactacaagagtgttttgtttgtgtatacaaatcattccatttttaaatggcacagatgcttaagggctataaaaacttctaatttcttataaatatg

SEQ ID NO: 454473 - DNA, 120 bp, Artificial Sequence
  ENSG00000156313_46 (sequence is synthesized)
ttagcactttttttaagttagtgattacagtttacctactgtatagaataattttctaataatggatggtattctaaaactcaattgaggcattcacattttaaagaaagtattgtcttt

SEQ ID NO: 454474 - DNA, 120 bp, Artificial Sequence
  ENSG00000156313_47 (sequence is synthesized)
caccttttatgtgttctttttgcaaaaatctacaaagtgacagctgtgttcagagcttagatcccaaaaacgtgatctcttttagttactatctgggcagatggtagtatatctaatgaa

SEQ ID NO: 454475 - DNA, 120 bp, Artificial Sequence
  ENSG00000156313_48 (sequence is synthesized)
atggtgattaatttaaatgtataatctggaaatatgtaaaacttgaagtattttttgtccaggcaaaggtactcattgggcctcagtttcttcatctctaaaatggagtggatgagatga

SEQ ID NO: 454476 - DNA, 120 bp, Artificial Sequence
  ENSG00000156313_49 (sequence is synthesized)
tgtgataactgcagtcccttctaactcttaaattcttttcattctcacagattcactctatcattattgttattcatgtaagaaacgttttagggagaaaaattacactttaaaattaat

SEQ ID NO: 454477 - DNA, 120 bp, Artificial Sequence
  ENSG00000156313_50 (sequence is synthesized)
ttagttttctatacagttgttttctttactcttgaaaagttatgacagctttaacgtctcttgtcttctgtaattttttatttctaaactcctatcatttccaagctttaactgtacttt

SEQ ID NO: 454478 - DNA, 120 bp, Artificial Sequence
  ENSG00000156313_51 (sequence is synthesized)
atcagagccttcatttctggtatgtgttatatgccctcaatgtattcactgactgttctgtaatttcagtttgtctgttccttgtcagaatgtttcaagtaaaataaaaaattaaatgta

SEQ ID NO: 454479 - DNA, 120 bp, Artificial Sequence
  ENSG00000156313_52 (sequence is synthesized)
aggttaagcctcatgagcagtgggagcttatatactataaacaatgaaatgggaaaacaaaggaataaggacttcaattagagagaggaaatattctctcaattaaatttagagattttc

SEQ ID NO: 454480 - DNA, 120 bp, Artificial Sequence
  ENSG00000156313_53 (sequence is synthesized)
attaaatataagcttaaaagtagttgataatataaaattaaaacaatgcatatgcttcacaagtatactttgaagataattattcagatatagaacatgtggattaatttgaaacaccaa

SEQ ID NO: 454481 - DNA, 120 bp, Artificial Sequence
  ENSG00000156313_54 (sequence is synthesized)
aaaatagcatgtccatttgagtacaaagaatgtaattataactaggttaatttttaaagtaatttgtattttacagaagtcttctctaacattgactattacctttgtagctatatttgg

SEQ ID NO: 454482 - DNA, 120 bp, Artificial Sequence
  ENSG00000156313_55 (sequence is synthesized)
atactggtcatctaaacatttacaactttggtgaggtcattctgggcttttcactttaactcaacttttcaggaaatatgcagtgtagatgttgtccactactccaggggtgagctcttt

SEQ ID NO: 454483 - DNA, 120 bp, Artificial Sequence
  ENSG00000156313_56 (sequence is synthesized)
tcgtattaccccacaactcagggttcatagagtttcactgagagcatcaggtcttgtctttttcctattagttaaaactagtatttctgaatgatccaattgtaggatacatgcttgatg

SEQ ID NO: 454484 - DNA, 120 bp, Artificial Sequence
  ENSG00000156313_57 (sequence is synthesized)
tcttcttccccaaagaagctttcagagaagatgacctgcccatgatcaagtatcagtgttcttgagaatgtatcatgaaatagcattatatagaatatgaaaagtattattcattcatca

SEQ ID NO: 454485 - DNA, 73 bp, Artificial Sequence
  ENSG00000156313_58 (sequence is synthesized)
acgatgttctgagagaaacctccaagagagtgtcttatctgaacaggacctcatgcagccagaggaaccagac

SEQ ID NO: 454486 - DNA, 120 bp, Artificial Sequence
  ENSG00000156313_59 (sequence is synthesized)
aggcatgagccaccacgcccggccaatggcaaataatttttgaaggagacatttcttttctgaaaattactattatttgctagatgaaatgaccaaagaagcagagatagataattcttc

SEQ ID NO: 454487 - DNA, 120 bp, Artificial Sequence
  ENSG00000156313_60 (sequence is synthesized)
gggattacagtcgtgagccaccgcgcccggccagggagggacactttctgtaaactccccaaagtgcggactccagacttgtgcactttggaggtcctgagctcccggttatgtattgaa

SEQ ID NO: 454488 - DNA, 120 bp, Artificial Sequence
  ENSG00000156313_61 (sequence is synthesized)
ctgagctcccggttatgtattgaatgcagtaaagatttatgtgtgatcacccaccttgggatttccccaaaagctggacctggcctactatttggtgtatgtgtgtgtttaaatggttat

SEQ ID NO: 454489 - DNA, 120 bp, Artificial Sequence
  ENSG00000156313_62 (sequence is synthesized)
tgggaaatggtaggggtttttagtctttcttcaaaatgacgctgtgccacaacagtttgtgaatactactcagatcagattcgggtgctgtgtttacatttgggaaaagtaaatttgctg

SEQ ID NO: 454490 - DNA, 120 bp, Artificial Sequence
  ENSG00000156345_0 (sequence is synthesized)
ctgtcatcgttccgtgggccctgctgcgggcacgctctcggcgcatgcgttttttatgcgggattaagcttgctgctgcgtgacagcggagggctaggaaaaggcgcagtggggcccgga

SEQ ID NO: 454491 - DNA, 120 bp, Artificial Sequence
  ENSG00000156345_1 (sequence is synthesized)
gctgtcacccctgactcgacgcagcttccgttctcctggtgacgtcgcctacaggaaccgccccagtggtcagctgccgcgctgttgctaggcaacagcgtgcgagctcagatcagcgtg

SEQ ID NO: 454492 - DNA, 120 bp, Artificial Sequence
  ENSG00000156345_2 (sequence is synthesized)
gggtggaggagaagtggagtttggaagttcaggggcacaggggcacaggcccacgactgcagcgggatggaccagtactgcatcctgggccgcatcggggagggcgcccacggcatcgtc

SEQ ID NO: 454493 - DNA, 120 bp, Artificial Sequence
  ENSG00000156345_3 (sequence is synthesized)
ttcaaggccaagcacgtggagactggcgagatagttgccctcaagaaggtggccctaaggcggttggaggacggcttccctaaccaggccctgcgggagattaaggctctgcaggagatg

SEQ ID NO: 454494 - DNA, 120 bp, Artificial Sequence
  ENSG00000156345_4 (sequence is synthesized)
gaggacaatcagtatgtggtacaactgaaggctgtgttcccacacggtggaggctttgtgctggcctttgagttcatgctgtcggatctggccgaggtggtgcgccatgcccagaggcca

SEQ ID NO: 454495 - DNA, 120 bp, Artificial Sequence
  ENSG00000156345_5 (sequence is synthesized)
ctagcccaggcacaggtcaagagctacctgcagatgctgctcaagggtgtcgccttctgccatgccaacaacattgtacatcgggacctgaaacctgccaacctgctcatcagcgcctca

SEQ ID NO: 454496 - DNA, 120 bp, Artificial Sequence
  ENSG00000156345_6 (sequence is synthesized)
ggccagctcaagatagcggactttggcctggctcgagtcttttccccagacggcagccgcctctacacacaccaggtggccaccaggtggtaccgagcccccgagctcctgtatggtgcc

SEQ ID NO: 454497 - DNA, 120 bp, Artificial Sequence
  ENSG00000156345_7 (sequence is synthesized)
cgccagtatgaccagggcgtcgatctgtggtctgtgggctgcatcatgggggagctgttgaatgggtccccccttttcccgggcaagaacgatattgaacagctttgctatgtgcttcgc

SEQ ID NO: 454498 - DNA, 120 bp, Artificial Sequence
  ENSG00000156345_8 (sequence is synthesized)
atcttgggcaccccaaaccctcaagtctggccggagctcactgagctgccggactacaacaagatctcctttaaggagcaggtgcccatgcccctggaggaggtgctgcctgacgtctct

SEQ ID NO: 454499 - DNA, 120 bp, Artificial Sequence
  ENSG00000156345_9 (sequence is synthesized)
ctgctgggtcaattccttctctaccctcctcaccagcgcatcgcagcttccaaggctctcctccatcagtacttcttcacagctcccctgcctgcccatccatctgagctgccgattcct

SEQ ID NO: 454500 - DNA, 120 bp, Artificial Sequence
  ENSG00000156345_10 (sequence is synthesized)
cagcgtctagggggacctgcccccaaggcccatccagggcccccccacatccatgacttccacgtggaccggcctcttgaggagtcgctgttgaacccagagctgattcggcccttcatc

SEQ ID NO: 454501 - DNA, 120 bp, Artificial Sequence
  ENSG00000156345_11 (sequence is synthesized)
ctggaggggtgagaagttggccctggtcccgtctgcctgctcctcaggaccactcagtccacctgttcctctgccacctgcctggcttcaccctccaaggcctccccatggccacagtgg

SEQ ID NO: 454502 - DNA, 120 bp, Artificial Sequence
  ENSG00000156345_12 (sequence is synthesized)
gcccacaccacaccctgccccttagcccttgcgagggttggtctcgaggcagaggtcatgttcccagccaagagtatgagaacatccagtcgagcagaggagattcatggcctgtgctcg

SEQ ID NO: 454503 - DNA, 120 bp, Artificial Sequence
  ENSG00000156345_13 (sequence is synthesized)
gtgagccttaccttctgtgtgctactgacgtacccatcaggacagtgagctctgctgccagtcaaggcctgcatatgcagaatgacgatgcctgccttggtgctgcttccccgagtgctg

SEQ ID NO: 454504 - DNA, 120 bp, Artificial Sequence
  ENSG00000156345_14 (sequence is synthesized)
cctcctggtcaaggagaagtgcagagagtaaggtgtccttatgttggaaactcaagtggaaggaagatttggtttggttttattctcagagccattaaacactagttcagtatgtgagat

SEQ ID NO: 454505 - DNA, 120 bp, Artificial Sequence
  ENSG00000156345_15 (sequence is synthesized)
atagattctaaaaacctcaggtggctctgccttatgtctgttcctccttcatttctctcaagggaaatggctaaggtggcattgtctcatggctctcgtttttggggtcatggggagggt

SEQ ID NO: 454506 - DNA, 120 bp, Artificial Sequence
  ENSG00000156345_16 (sequence is synthesized)
agcaccaggcatagccacttttgccctgagggactcctgtgtacttcacatcactgagcactcatttagaagtgagggagacagaagtctaggcccagggatggctccagttggggatcc

SEQ ID NO: 454507 - DNA, 120 bp, Artificial Sequence
  ENSG00000156345_17 (sequence is synthesized)
agcaggagaccctctgcacatgaggctggtttaccaacatctactccctcaggatgagcgtgagccagaagcagctgtgtatttaaggaaacaagcgttcctggaattaatttataaatt

SEQ ID NO: 454508 - DNA, 120 bp, Artificial Sequence
  ENSG00000156345_18 (sequence is synthesized)
aaaagatacatggaaggaagtggaaccagatgcagaagaggaaatgatggaaggacttacggtatcagataccaatatttaaaagtttgtataataataaagagtatgattgtggttcaa

SEQ ID NO: 454509 - DNA, 120 bp, Artificial Sequence
  ENSG00000156345_19 (sequence is synthesized)
tgtacatcgggtcagtctcagcataggccgggcatggggtctggggagctgacttggcttggggatggggctagcccttgtaaaaggtgtgataagaagttgggacagagctggtcaagg

SEQ ID NO: 454510 - DNA, 120 bp, Artificial Sequence
  ENSG00000156345_20 (sequence is synthesized)
cacaccaggtggccaccaggtagggagggccagatcccttccagtcttctccatggggaagagatgcttctgggccttttctccagacattgcttgtggggctggggtcacctccccagg

SEQ ID NO: 454511 - DNA, 120 bp, Artificial Sequence
  ENSG00000156345_21 (sequence is synthesized)
gggtggtcaaagggtaacatggctcatggatttctgctaggctctgaggtctctgagctgtttggtggtcttttccctggtgggagtttaggcttccttaagggtgtcttccctggttgg

SEQ ID NO: 454512 - DNA, 120 bp, Artificial Sequence
  ENSG00000156345_22 (sequence is synthesized)
ggtattctgagcactttggggttggggttcctcactatgatgttttcgagctgggtaggggccaggtgggatgagaatggtggtcccaggtgggaagctttctgggctagatggggaggt

SEQ ID NO: 454513 - DNA, 120 bp, Artificial Sequence
  ENSG00000156345_23 (sequence is synthesized)
ggtctgagccgatatgtgctggagttagatcctaggatatggcatctctgagctggtcagaggcctgtgtccttggacatgaaagctctgagcttgttttgcagcaagaagatagttggc

SEQ ID NO: 454514 - DNA, 120 bp, Artificial Sequence
  ENSG00000156345_24 (sequence is synthesized)
agtgcccatgggtctgagatttggggcaggtttgcaggtctgccccagaagtgtcctagagcaggagtctccgagaagtcttggaacagctggggctttgctctgggttctagggttgag

SEQ ID NO: 454515 - DNA, 120 bp, Artificial Sequence
  ENSG00000156345_25 (sequence is synthesized)
ggctttgagggttcagggactgggcctctggacgtgaggctccagggctggcttgtggggccttgccctggagtgcagtgttagagctgctctgtgggtgggtctgtggtccatggtggg

SEQ ID NO: 454516 - DNA, 120 bp, Artificial Sequence
  ENSG00000156345_26 (sequence is synthesized)
ggtgggtgtggggcaggtttactccactcccaacagcaagtaaccactccctcccctgaaccttctctctcctggccccaaccccccttgatggacagggaccactgtcctggcccaact

SEQ ID NO: 454517 - DNA, 120 bp, Artificial Sequence
  ENSG00000156345_27 (sequence is synthesized)
cagggcttcctccttcctgctgtcatttgggttggggtagatcctgtcctttgtcccttttcaccccagtacacacatgtgcagtgtctcagcaagctgtgcacagagtcgtcatctgag

SEQ ID NO: 454518 - DNA, 120 bp, Artificial Sequence
  ENSG00000156345_28 (sequence is synthesized)
agggcaaggggatggatgaaggaatacaggggtgggtgagtgaatgaatgatgggtcagggagacacatggatgggagagcaccccccatgtgagtgtgtgttaggggctgagagttgac

SEQ ID NO: 454519 - DNA, 120 bp, Artificial Sequence
  ENSG00000156345_29 (sequence is synthesized)
gttccctttttacatccagtacagtttttaaaacctactcatattctaaacctactttgggccgttgcgcttccctccgcacagctggcttggtcccctaccccagcggctgggtcccag

SEQ ID NO: 454520 - DNA, 120 bp, Artificial Sequence
  ENSG00000156345_30 (sequence is synthesized)
gctagtcctagacccccgaggagggcctctggccgagccgggggcgcgtgtctctctctcaaccaccttcccctcacccaccttcatctctctttcccagccgagggtgggctggcagtg

SEQ ID NO: 454521 - DNA, 120 bp, Artificial Sequence
  ENSG00000156345_31 (sequence is synthesized)
ggctgacctgagtggttagactgccaagcccgcttgtcccaaggtcctatgggggatttggagggactgatgcttcttttggtactcccaggacctgaaacctgccaacctgctcatcag

SEQ ID NO: 454522 - DNA, 120 bp, Artificial Sequence
  ENSG00000156345_32 (sequence is synthesized)
gcagcttccaaggtagggggagaggctgtagtctctgctccttcagctcccctccccatcaccctggtactctgtacttggtagccatgtgaccccatcacatcagcgaccctcagaacc

SEQ ID NO: 454523 - DNA, 120 bp, Artificial Sequence
  ENSG00000156345_33 (sequence is synthesized)
tgtgattggcatggaccagcaccagacatctggaacccaggggacaggggccttggagcaggtgtgcctctcatgagtagaccccactggacatccccagacttcccctgagggtggccc

SEQ ID NO: 454524 - DNA, 120 bp, Artificial Sequence
  ENSG00000156345_34 (sequence is synthesized)
atacgaggggcatgcccaactctcaggagagcgcgtgtccgggagtgcaggtttctgggctgcccctgaccctgtggcagatacagtaagagagtcactggggactcattcctttattcc

SEQ ID NO: 454525 - DNA, 120 bp, Artificial Sequence
  ENSG00000156345_35 (sequence is synthesized)
attagcaagtattttctgcacatctggcacatgcagggattgtcctgggccctgcacagatggtaaacaatcagtcctacctccgcggggcactcctggtggtgaggtagctccaggtcc

SEQ ID NO: 454526 - DNA, 120 bp, Artificial Sequence
  ENSG00000156345_36 (sequence is synthesized)
aaaaggtcacaagaggtcatgttctccagctgtgggagccccaggagagaggcaaggccgactttggggtcaagcaaagcttcctggtggagggcaggtttaagcatgagatgtttgagg

SEQ ID NO: 454527 - DNA, 120 bp, Artificial Sequence
  ENSG00000156345_37 (sequence is synthesized)
aggtgttcgctgaagagagaaatggtgggcagaggcctggaagagaggacccaggaaggctggttatggctggtaggcctgggaggacgatgaccacaggagcatgggctgacaggtgtc

SEQ ID NO: 454528 - DNA, 120 bp, Artificial Sequence
  ENSG00000156345_38 (sequence is synthesized)
agggtgtctctcaggggtccctgtcccctccctgcactcagcaccagccgcgtgtgtttacatacgccctcttggtctccactgtcagcagctcctgtgggctctgtgtccacagtgtac

SEQ ID NO: 454529 - DNA, 120 bp, Artificial Sequence
  ENSG00000156345_39 (sequence is synthesized)
ccaagccgtgtgacccttatctcttgggttgcctcccagaatctgggtctcccctcatcccatttaatctcttctccacctggcagacagagtaactttatccaagtagaacaggacaca

SEQ ID NO: 454530 - DNA, 120 bp, Artificial Sequence
  ENSG00000156345_40 (sequence is synthesized)
ttccttctctgccagggccctcctgtggctccatctcagaggaaaagccagggtcctttttgtgacccacagatgtcgtatgcttgggtgccatcacctcatgacgctgcctgctgttgt

SEQ ID NO: 454531 - DNA, 120 bp, Artificial Sequence
  ENSG00000156345_41 (sequence is synthesized)
gccctgtgctcactcctctccagccccaggggtcagtacacttttgtccctggcctggagcctcatgtcccacttgcttatgtctcaagtcttggcttaaatgtcacttctcagatggcc

SEQ ID NO: 454532 - DNA, 120 bp, Artificial Sequence
  ENSG00000156345_42 (sequence is synthesized)
ttccctcatgactcttcagatctgcaacctctctccaggattcctcattcctctgtcttgctttctctcttccactgcactaatcattatctgacatactgtgtattttacttcatcttg

SEQ ID NO: 454533 - DNA, 120 bp, Artificial Sequence
  ENSG00000156345_43 (sequence is synthesized)
tttattaccccccaccctcacttatgtcagaaaaacagagcttttgtctgttttattaacggctatgttcccagcttctggaatagtgcttcagacatagtagacactcagaaaacaccc

SEQ ID NO: 454534 - DNA, 120 bp, Artificial Sequence
  ENSG00000156345_44 (sequence is synthesized)
agacacactgagtcagctgaatgcatagatgaaggaacatctgcttgaggctggggacagggaggtgactagtttccttctgctgttccttacttgccaccctcaggctctcctccatca

SEQ ID NO: 454535 - DNA, 120 bp, Artificial Sequence
  ENSG00000156374_0 (sequence is synthesized)
agtggtggcgtccgaggccggccgaactcccgcgctctcccgccgcctcgcctcgcctggtgtctctcccgaccatggagggggtcgcggtggtgacggcgggcagcgtaggcgctgcca

SEQ ID NO: 454536 - DNA, 120 bp, Artificial Sequence
  ENSG00000156374_1 (sequence is synthesized)
aaaccgagggagctgcagccttgccgcctccgcctcctgtctccccgcccgccctcacccctgcacccgcagcgggtgaggagggaccggcgcctctgtctgagacgggggctcccggct

SEQ ID NO: 454537 - DNA, 120 bp, Artificial Sequence
  ENSG00000156374_2 (sequence is synthesized)
gctccggctcccggccccctgagctggagccggagcgcagcctgggccgcttcagaggccgcttcgaggacgaggacgaggagttggaagaagaagaggagctggaggaggaagaagagg

SEQ ID NO: 454538 - DNA, 120 bp, Artificial Sequence
  ENSG00000156374_3 (sequence is synthesized)
aggaggaggaggacatgagtcacttctcgttgaggctggagggaggccggcaggactcggaggacgaggaggagcgcctgattaatctctctgagctgaccccatacatcttgtgttcca

SEQ ID NO: 454539 - DNA, 120 bp, Artificial Sequence
  ENSG00000156374_4 (sequence is synthesized)
tttgcaaaggttacttaatagatgcaactaccatcacagaatgtcttcataccttttgtaaaagctgcatcgtaagacatttttactacagcaacagatgtccaaaatgcaatatagtag

SEQ ID NO: 454540 - DNA, 120 bp, Artificial Sequence
  ENSG00000156374_5 (sequence is synthesized)
tacatcagacacaacctctttataacataaggttggaccgacagttacaagacatagtgtacaaattagtgatcaatctagaggaaagagaaaaaaagcaaatgcatgatttctataaag

SEQ ID NO: 454541 - DNA, 120 bp, Artificial Sequence
  ENSG00000156374_6 (sequence is synthesized)
aaagaggtctagaagtacctaaacctgctgttccacagccagtcccttcaagcaaaggaagatctaaaaaagtcctagaatcagtgtttcgtattccacctgaacttgatatgtctttat

SEQ ID NO: 454542 - DNA, 120 bp, Artificial Sequence
  ENSG00000156374_7 (sequence is synthesized)
tactggagttcattggtgctaatgaaggcacgggacattttaagccattggaaaagaagtttgttcgagtttcaggagaagcaactattggacatgtagaaaaattcctcagaagaaaaa

SEQ ID NO: 454543 - DNA, 120 bp, Artificial Sequence
  ENSG00000156374_8 (sequence is synthesized)
tgggtcttgatccagcttgtcaggtagatataatctgtggtgatcacctgttggagcagtatcaaactctaagggaaatccgacgtgcaataggtgatgcagcaatgcaggatggtctgc

SEQ ID NO: 454544 - DNA, 120 bp, Artificial Sequence
  ENSG00000156374_9 (sequence is synthesized)
caaaggaggcttctgcaggactgcatctcaccaaagatttccatgaaatgtaattgctaccactttgctgttcaagacataacttacctatttttagcaccaagaattatagcgtttata

SEQ ID NO: 454545 - DNA, 120 bp, Artificial Sequence
  ENSG00000156374_10 (sequence is synthesized)
agtacaacttggaacgatggaatgcatctgttactagagactgtatataaaaagcagccaaagctcaggggaaatttttcaaaaattgaattttaaaatttcttatgattttaaatacct

SEQ ID NO: 454546 - DNA, 120 bp, Artificial Sequence
  ENSG00000156374_11 (sequence is synthesized)
tgacattgattttgcttcccatctttgaagtaattggttagttttctttgttcagccatttcaagttggtggttgggatatctgctctctgggatggcatcagttgggcagtcatctttt

SEQ ID NO: 454547 - DNA, 120 bp, Artificial Sequence
  ENSG00000156374_12 (sequence is synthesized)
tggaagagaagtgtgcttttgagtggaagattcaaagccagtctttgttaaactgcagggtgtactctcaaagaccaaaactattggccacttttgtatgttgccagcatattttgaact

SEQ ID NO: 454548 - DNA, 120 bp, Artificial Sequence
  ENSG00000156374_13 (sequence is synthesized)
tgtacctttttttatactagcaacactacaaaggagaagttactcatttcaaaatggatgaattgttattatgtgtgaagagactctgagtttatgatctgtgccataaaatttcagtgt

SEQ ID NO: 454549 - DNA, 120 bp, Artificial Sequence
  ENSG00000156374_14 (sequence is synthesized)
aataagacttcttcaatacatcttccaataaggggtgcttctttgtgacagtatttttatttctgacattcattttatttgggtacatagtgtggttgttgataccttgcaatagtattg

SEQ ID NO: 454550 - DNA, 120 bp, Artificial Sequence
  ENSG00000156374_15 (sequence is synthesized)
cttctgaaagtaataaaaaattttaggagaatttgagaagtttacagaattacttattcattgttttcttagtaagtcagtttaatgtttatttttctcattatttcatcactgcaataa

SEQ ID NO: 454551 - DNA, 120 bp, Artificial Sequence
  ENSG00000156374_16 (sequence is synthesized)
agaataagggtgtttgagctcacctccatgcaaagacttcagttttaaaacattatttgcctaaaattagcattgtgatgctttctgaaagaaatattttataaatcctgtttaacagca

SEQ ID NO: 454552 - DNA, 120 bp, Artificial Sequence
  ENSG00000156374_17 (sequence is synthesized)
gaatttctgaatgtgtagagactactacaaaattggaaaaagattggcaattctttgtaaagaatttgtgaattgtgtataaatttattctaacatttaataaaaatgtattttaaccta

SEQ ID NO: 454553 - DNA, 120 bp, Artificial Sequence
  ENSG00000156374_18 (sequence is synthesized)
cctctttataacataaggtaagaagaatatataaattacaattgtattttaaatatactttttctgaaagcttgaagttatatagttggaataaattattgacctctcaggatgggttca

SEQ ID NO: 454554 - DNA, 65 bp, Artificial Sequence
  ENSG00000156374_19 (sequence is synthesized)
ttgggaggccgaggtgagtggatcacttttagccaggagtggcggcacatgcctgtaatcccagc

SEQ ID NO: 454555 - DNA, 120 bp, Artificial Sequence
  ENSG00000156374_20 (sequence is synthesized)
cttggcttactgcaacctcagtcctcagtcttccggtttcaagcaattctgccacctcagcctccagagtagcggggattacaagtgccctcctccacacccagctaatttttgtatttt

SEQ ID NO: 454556 - DNA, 80 bp, Artificial Sequence
  ENSG00000156381_0 (sequence is synthesized)
gggcggcggtggctccctcccgtgcgtccgtcgtgggacctttgcccgctcgcccgcgggggacagcgcgcgctccggtc

SEQ ID NO: 454557 - DNA, 120 bp, Artificial Sequence
  ENSG00000156381_1 (sequence is synthesized)
cccccatggcctggctctgccgtggcttgctgaccttggagaattggagaagcttgtgccctgctggaaagtgggatggcagtacccgcttcatctagtagtcggggagatcaagagagg

SEQ ID NO: 454558 - DNA, 120 bp, Artificial Sequence
  ENSG00000156381_2 (sequence is synthesized)
tatgggacctgaagaggatggcagactgtgcagtgcggtgcacaccggtctccaggttgttttcaccctcctatctcctcccaggagctaacgtataaagctgaggctcggccagggact

SEQ ID NO: 454559 - DNA, 120 bp, Artificial Sequence
  ENSG00000156381_3 (sequence is synthesized)
gtgatatacccacatccccggaactaggtgatcgcggtgcaggaaccaggtgtgccttcgcgggatccatgccttgaggcccaggaacgccccgccgccagcatgccgtgggacgcgcgg

SEQ ID NO: 454560 - DNA, 120 bp, Artificial Sequence
  ENSG00000156381_4 (sequence is synthesized)
cggcctgggggtggcgcggacggcgggcccgaggcctcgggcgcggcgcgctcgcgagcgcagaagcagtgccgcaagtcgtcgttcgccttctaccaggcggtgcgcgacctgctaccc

SEQ ID NO: 454561 - DNA, 120 bp, Artificial Sequence
  ENSG00000156381_5 (sequence is synthesized)
gtgtggctgctggaggatatgcgcgccagcgaggccttccactgggacgagcgcgggcgcgccgccgcctactcgccctctgaggcgctgctctacgcgctcgtgcacgaccaccaagcg

SEQ ID NO: 454562 - DNA, 120 bp, Artificial Sequence
  ENSG00000156381_6 (sequence is synthesized)
tacgcgcattacctgctggccacgttcccgcggcgcgcgctcgcaccgcccagtgccggcttccgctgctgcgcggctcccgggccgcacgtggcgctggcagtgcgctacaaccgcgtg

SEQ ID NO: 454563 - DNA, 120 bp, Artificial Sequence
  ENSG00000156381_7 (sequence is synthesized)
ggcattctgcgccgcatcctgcgcaccttgcgcgacttcccggccgaggagcgggcgcgcgtgctggaccggcgtggctgcagccgcgtggagggcggtggcacgtcgctgcacgtggcc

SEQ ID NO: 454564 - DNA, 120 bp, Artificial Sequence
  ENSG00000156381_8 (sequence is synthesized)
tgtgagctggcgcgccccgagtgcctcttcctgctgctgggccacggcgcctcgcccggtctgcgggacggcggcggcctcacgcctctcgagctgctgctgcgccagctgggccgcgac

SEQ ID NO: 454565 - DNA, 80 bp, Artificial Sequence
  ENSG00000156381_9 (sequence is synthesized)
ctcccggggagccgcgccagcgccgcctgctgctgctggacctcctggcgctgtacacccccgtgggtgccgccggctcg

SEQ ID NO: 454566 - DNA, 120 bp, Artificial Sequence
  ENSG00000156381_10 (sequence is synthesized)
gcccgccaggagctgctgggcgaccggccgcgctggcagcggctgctgggtgaggacaagttccagtggctggcgggcctggcgccgccctcgctcttcgcgcgcgccatgcaggtgctg

SEQ ID NO: 454567 - DNA, 120 bp, Artificial Sequence
  ENSG00000156381_11 (sequence is synthesized)
gtcaccgccatctctccaggccgcttccccgaggccctggacgagctgccgctgcccccattcctgcagccgttggacctcactggcaaaggctaggcccggagcaccctaggcgctgga

SEQ ID NO: 454568 - DNA, 120 bp, Artificial Sequence
  ENSG00000156381_12 (sequence is synthesized)
ttttgggacaaaactatttttcagagcgttgtaccggcactttatatatattgatctctgtacggcacaatctctgcctcatctgtcgcatgcactgggggctgggcttggatggtcagg

SEQ ID NO: 454569 - DNA, 120 bp, Artificial Sequence
  ENSG00000156381_13 (sequence is synthesized)
tgagttccaagtggcaggttttctgggtgcagctgggctcgggccttcagctcgctgtccagcccctgaagggagtgaggactaacctcccaccttgatctagagcctcggacaggtgtg

SEQ ID NO: 454570 - DNA, 120 bp, Artificial Sequence
  ENSG00000156381_14 (sequence is synthesized)
cgtcccagatgggtgacagctgagtgccgcaggagctcggtaggtgcaggggtggggactggcatgtccaagcagcaggacagcgtataaaaaggcctggaagccaagagaacgagctct

SEQ ID NO: 454571 - DNA, 120 bp, Artificial Sequence
  ENSG00000156381_15 (sequence is synthesized)
gcagcgtagggttctcacgggaggtcctgtgcggtcagccttttgcaccctgtggactccgggccagggagggcacacagggctggcaggcccgcggtggctggtgttgaggcatgaaca

SEQ ID NO: 454572 - DNA, 120 bp, Artificial Sequence
  ENSG00000156381_16 (sequence is synthesized)
aattgtaccgggtatcccccaccccactctgaccaccagttcctccttggatatcactccccctgacaggcagcccacccaggcctggatttgtccctgtctcccccttttgcttttccc

SEQ ID NO: 454573 - DNA, 120 bp, Artificial Sequence
  ENSG00000156381_17 (sequence is synthesized)
ccatgactaatgggcaccaggtcttgctgctcctgcttctcacctctgcagtggcagcaggcccctggccccaggtgcatgccggtcagtggggttggatgtgccttcctccaggcctgc

SEQ ID NO: 454574 - DNA, 120 bp, Artificial Sequence
  ENSG00000156381_18 (sequence is synthesized)
cctctgtccaagcccggagtgggcttggtgggctccctggtggcccccagtgggtgccaggtggtgcccggggttattgaggggtggttgtatcactgtagggacaggcttcttgcccca

SEQ ID NO: 454575 - DNA, 120 bp, Artificial Sequence
  ENSG00000156381_19 (sequence is synthesized)
gcctggagagctgttttcttcaggaaggttctggagatggagacttgtttgcgaattcaccacaactccaggctgggaggctgggtctccgctctcagagccgagacaccagggaggata

SEQ ID NO: 454576 - DNA, 120 bp, Artificial Sequence
  ENSG00000156381_20 (sequence is synthesized)
gccaggctgccctgcctgggaattctgctgggccgtcaaattcaacccgcaccaacgtgggcaggagggccacagtgtcctgccaggagcagagggctgaaggtctgcaggaggaagaac

SEQ ID NO: 454577 - DNA, 120 bp, Artificial Sequence
  ENSG00000156381_21 (sequence is synthesized)
cactatcctggtggggggcacctgctgcccaccctgcccccagcgtgcctggggggagcacacctgggcatggaggagtccagggtgctgggccacacaagagaggtgggggagaggcct

SEQ ID NO: 454578 - DNA, 120 bp, Artificial Sequence
  ENSG00000156381_22 (sequence is synthesized)
ggacagtaggaagatcttgcccagggtcctggatccgccactctgggggtgaccttggacaaacctctgccttggccctcagtctccccatcaaggtttttccattcaggaggttttggg

SEQ ID NO: 454579 - DNA, 120 bp, Artificial Sequence
  ENSG00000156381_23 (sequence is synthesized)
ccatcttcagccaccctaccagccctgaaaaggatgtgactcctgtttctgggaagtgtgtggtgtgttaggtgggcctacagccctggttgtggggagggaaggatggagagacagcac

SEQ ID NO: 454580 - DNA, 120 bp, Artificial Sequence
  ENSG00000156381_24 (sequence is synthesized)
agtgacagagcccagactgcaggctggagtgagggttccacttccccgctgctgtgtgtcctggaccagtgcctctgaaccttggcacttggggcagtggatattaacatctttccaagc

SEQ ID NO: 454581 - DNA, 120 bp, Artificial Sequence
  ENSG00000156381_25 (sequence is synthesized)
ccaattcttggggcatcagggcctccggtcctctgggaggtggcaggtcctcagattggagatgccatgggggggggaggtgcctctcctttggagggtatggaagtggagacaggagtg

SEQ ID NO: 454582 - DNA, 120 bp, Artificial Sequence
  ENSG00000156381_26 (sequence is synthesized)
atgtctccccagctccagctctgttctctataggtcagcctccacaatgccagaggcccagggctagccccctccacgtccctcctagatctacagctgcccctttgatgacagcgccat

SEQ ID NO: 454583 - DNA, 120 bp, Artificial Sequence
  ENSG00000156381_27 (sequence is synthesized)
tgagtcccctgggctgggggggtcatgcaggggtgaggcagctgcctgccgccggtactcattgcctggccaggcaggacacaggctggcgggcactgagagtgggccccacgaaatcca

SEQ ID NO: 454584 - DNA, 120 bp, Artificial Sequence
  ENSG00000156381_28 (sequence is synthesized)
ttgtcaggttaccaggatgaagaacccaggctggtcgtggagtgcagggcggggcctgccggaagaattatgggcactgcagcaggagggcagcctgggccattagctcctgatgtcatc

SEQ ID NO: 454585 - DNA, 120 bp, Artificial Sequence
  ENSG00000156381_29 (sequence is synthesized)
gatttgggtgaggggacagggaagtcagaggaagctggccagtggctctcacgaagacttacagcagcggagtggtgcctgattcctagtacagctgctcccactgagtctccagggatc

SEQ ID NO: 454586 - DNA, 120 bp, Artificial Sequence
  ENSG00000156381_30 (sequence is synthesized)
tgtggttcaggaccccctgcaaccccctcccagacccctgtactggtgggaggagaggacctagaggaaaggtgctgggcagataagcagccgagggaggccctgggtttagcttatcag

SEQ ID NO: 454587 - DNA, 120 bp, Artificial Sequence
  ENSG00000156381_31 (sequence is synthesized)
tcttctgggccctcctgccccaggaagggcagcgaggaccatggtgttgcccctgtcatcgttatcgtcctggccatgagcttgcaggactgggagggccggagtcagccaggcagacgg

SEQ ID NO: 454588 - DNA, 120 bp, Artificial Sequence
  ENSG00000156381_32 (sequence is synthesized)
cagcacagcatttgcctgttggcaggtggccttggtggcttcccaaaggcaatcgctccacgcagaacaaaactcacttttttggggggtgaagcaccttggttcatttgtttagttcgt

SEQ ID NO: 454589 - DNA, 120 bp, Artificial Sequence
  ENSG00000156381_33 (sequence is synthesized)
taattccagcagtctgtttctaagggaaacatggctgcagccggtcctgcccctccacccacccaccaggtgcccagtgttcccaagggccccgaatcccaaccttattcaggcgtcagc

SEQ ID NO: 454590 - DNA, 120 bp, Artificial Sequence
  ENSG00000156381_34 (sequence is synthesized)
atctctgcaccccaaatgcctgttagggaggatagtgaaggctgagccctcctgggctcatcaaaagccagcagtgagagaacacccccatctctctgaggtgaccttgtagggcagtcc

SEQ ID NO: 454591 - DNA, 120 bp, Artificial Sequence
  ENSG00000156381_35 (sequence is synthesized)
gtgctgtctggctggcctgggtgaggtgggcagggaccaaggcctggcgcctgggcctcgctggccttgctctgcgtgctgacttcatcctgatagtaccttgattttcctactgtgact

SEQ ID NO: 454592 - DNA, 120 bp, Artificial Sequence
  ENSG00000156381_36 (sequence is synthesized)
tccccttctgtcgacttcctcaccaactttaaaattccgtattgagagcagtttcctaagttacctcaaatcctattcagaagaaggttcttcctggaagttgggagggcggaaaacaag

SEQ ID NO: 454593 - DNA, 120 bp, Artificial Sequence
  ENSG00000156381_37 (sequence is synthesized)
tttagtcacagaagactactccatgtttgagcttctgtttcaagggaagtgagtaactgccggaggagccctgcccctctgcagtgtgtggtgttgccctgatacttttcagattgaggt

SEQ ID NO: 454594 - DNA, 120 bp, Artificial Sequence
  ENSG00000156381_38 (sequence is synthesized)
gttacttacatgtaataaaatgcacagacttaagtgtatactttgatgagttctgatgaatgtctacatgtgtgtaatcaccactgcaatcaagatggaaggaaaggctgggcgcggtgg

SEQ ID NO: 454595 - DNA, 120 bp, Artificial Sequence
  ENSG00000156381_39 (sequence is synthesized)
atctcaaaaaaaaaaaaaaaaaagatggaaagacagatttctattggtgattcttaaaagtaatttatttatttatgtatttatttatttatttgagatgtagtcttgctctgtcatcca

SEQ ID NO: 454596 - DNA, 88 bp, Artificial Sequence
  ENSG00000156381_40 (sequence is synthesized)
taatttatttatttatgtatttatttatttatttgagatgtagtcttgctctgtcatccagataacttccgcctcctgggttcaagcg

SEQ ID NO: 454597 - DNA, 120 bp, Artificial Sequence
  ENSG00000156381_41 (sequence is synthesized)
ctggggttacaagtgtgagccactgcgcctggctcttaaaagtaatttctttctgcttataaaattcatgttcactgtagaacactggggattgagtagagaggtccggccacgatgcag

SEQ ID NO: 454598 - DNA, 120 bp, Artificial Sequence
  ENSG00000156381_42 (sequence is synthesized)
ggaaacactgtctcaagcgccccaccgccccacatggtccccagagacagggcccctaagcgctcacgtacaagtaaaggcgctgactgagtgcgtcatctgcacgcatacaagcactgc

SEQ ID NO: 454599 - DNA, 120 bp, Artificial Sequence
  ENSG00000156381_43 (sequence is synthesized)
tagcattctggcatatgtttctttcagcttttttctgtgcagatatatattacatttttttctgtgtatatttatatatatatgaaaccagatcagttacacaatttagtatttttttaa

SEQ ID NO: 454600 - DNA, 120 bp, Artificial Sequence
  ENSG00000156381_44 (sequence is synthesized)
ccttaatgtagtataagcatttcccccattgtactttgtaaatatgatttttaagaagtcattggtgtctactttgtgatatttgactcaaccagccttgataacaaagagtagttagag

SEQ ID NO: 454601 - DNA, 120 bp, Artificial Sequence
  ENSG00000156381_45 (sequence is synthesized)
acaactgaatttttaaaatgtaaatctgctttatttttggaataaataatacatttacatggctggaaattcaaaggatacaaaaaggcatatactccaggcaaccactatgaccagctg

SEQ ID NO: 454602 - DNA, 120 bp, Artificial Sequence
  ENSG00000156381_46 (sequence is synthesized)
ctgatcacaagtagagaacttgtttcttttcacccctcttgctcctccccggagttatgaaaaatttcaaacctgccaaaagtttgaagtttacaacaaataccctccaacgtttgggtt

SEQ ID NO: 454603 - DNA, 120 bp, Artificial Sequence
  ENSG00000156381_47 (sequence is synthesized)
gtctccctcccccttctctccctttctccctctgatttcttacagaaccacgctttcatgaccatgcccgggaacttcacgctggcgcggtgaggtcctgcgcctccgcttcctgcacac

SEQ ID NO: 454604 - DNA, 120 bp, Artificial Sequence
  ENSG00000156381_48 (sequence is synthesized)
acgtgcttcttaatagctgcaggctatttcatgagaggaatttgctcacgttaacatggctgttcccaaatgccaggctgttttaagtgtttcctaattataaacaggctgtgctgtttc

SEQ ID NO: 454605 - DNA, 120 bp, Artificial Sequence
  ENSG00000156381_49 (sequence is synthesized)
ccttgacctaggacttgttcttgaggacagaagtggaggtggcgagatgcaaggcctacgtacggaccggcttccccagtagggcggcgccaatggggggctcccaagctgctcccatct

SEQ ID NO: 454606 - DNA, 120 bp, Artificial Sequence
  ENSG00000156381_50 (sequence is synthesized)
cacctctgcttccggggtgctgggggtttgggccagtgttccttctgcttttgtgaagggcccttacactcgactcgaagtgctcctcctattggtttttaataaatatatttatggaaa

SEQ ID NO: 454607 - DNA, 120 bp, Artificial Sequence
  ENSG00000156381_51 (sequence is synthesized)
ggcgccccacgcgtgccggcacagggcatatctggggcccggaggcccaggcttggggaaggggctccagtcacggtgttgcccacgggccacagcctacccgcaccgcgccgctctctt

SEQ ID NO: 454608 - DNA, 120 bp, Artificial Sequence
  ENSG00000156381_52 (sequence is synthesized)
taactcagttactgccagtgatagtgacccagtcagtgtgtgtggacgcggcctgccttctgtcccaggccccttgtgaccaagggcttacccttgaaagaaggcagtagggaggttggg

SEQ ID NO: 454609 - DNA, 120 bp, Artificial Sequence
  ENSG00000156381_53 (sequence is synthesized)
acggagccagaggtcagacgcctaggctcaggtcggggctggggactcagagggcagggtcagggcctaagctcgattgcctgtgggttgggggtccccaccaattctggaatgagccca

SEQ ID NO: 454610 - DNA, 120 bp, Artificial Sequence
  ENSG00000156384_0 (sequence is synthesized)
ttttttgctctcgctgggaatggcggagggagagaaaaaccaagatttcactttcaagatggaaagtccgtcagactcagctgtggttttacctagcactcctcaggcctctgcgaatcc

SEQ ID NO: 454611 - DNA, 120 bp, Artificial Sequence
  ENSG00000156384_1 (sequence is synthesized)
atcatctccctatacaaatagttcccgaaaacaacctatgagtgcaacacttagagaaagattaaggaaaacaagattttcatttaattcctcttacaatgtggtgaaacgtcttaaagt

SEQ ID NO: 454612 - DNA, 120 bp, Artificial Sequence
  ENSG00000156384_2 (sequence is synthesized)
agagagtgaagaaaatgatcagaccttttcagagaaaccagcatcttccacagaggaaaactgtttggaatttcaagaaagttttaaacatatagacagtgaatttgaagaaaatacaaa

SEQ ID NO: 454613 - DNA, 120 bp, Artificial Sequence
  ENSG00000156384_3 (sequence is synthesized)
tttgaaaaatactttgaagaatctcaatgtctgtgaatctcagtcacttgattctggatcatgcagtgctctccaaaatgagtttgtgagtgagaagcttcctaaacaaagattaaacgc

SEQ ID NO: 454614 - DNA, 120 bp, Artificial Sequence
  ENSG00000156384_4 (sequence is synthesized)
tgaaaaagccaaattggtgaagcaggttcaggagaaagaagaccttcttcggaggctaaaactagtcaaaatgtatagatcaaagaatgatctgtctcagttacagttgttaataaagaa

SEQ ID NO: 454615 - DNA, 120 bp, Artificial Sequence
  ENSG00000156384_5 (sequence is synthesized)
cactataacagaagtgaagaagaatttatagatgtttaattcctgatttttgctccagaatatctttgagaatgacaacttaattaaaagatacttaggcactttttttttttttttgag

SEQ ID NO: 454616 - DNA, 120 bp, Artificial Sequence
  ENSG00000156384_6 (sequence is synthesized)
aaaccattagggctcagaggaaggtatcccaatgaatatcaattaagggcactttaatatataaattataaactaagttctaaaaggaaaattagtattttggatagatttgtcaaaacg

SEQ ID NO: 454617 - DNA, 120 bp, Artificial Sequence
  ENSG00000156384_7 (sequence is synthesized)
acatttaagtcatgtttaaaaagtcatttgggcagttctggaaactagttttaatacatttgttttttatgacaaaaagttttattttaaatgttaaaaattgtccaatctggtgaatgt

SEQ ID NO: 454618 - DNA, 120 bp, Artificial Sequence
  ENSG00000156384_8 (sequence is synthesized)
ctaaccctaaagtttaaaaatttctgcctcctaagtttatgtaccttgtttccatccatttaccacatatttccatctgatagtctagcaggtaattaaacttatatgtccaaaaccata

SEQ ID NO: 454619 - DNA, 120 bp, Artificial Sequence
  ENSG00000156384_9 (sequence is synthesized)
agcggcgcctcgcgcgtcaggcaatctggccaattgcgcatcttttccgcctaccgcacggccccgcccctgccacaggatcgatttacggccgcagagaaaaaccaagatttcactttc

SEQ ID NO: 454620 - DNA, 120 bp, Artificial Sequence
  ENSG00000156384_10 (sequence is synthesized)
tgtttctaagtattgtggcagtggtggtttaaattctacggaaggttgttaattaacataatgtgtagcataaataagtagacattttattaaataattttgtttttcttctaaggtgac

SEQ ID NO: 454621 - DNA, 120 bp, Artificial Sequence
  ENSG00000156384_11 (sequence is synthesized)
atatatgacacccaccagcccccttccatattttcctcttgaatgaattcatttcagttagtttcagattaggttattacaatactccagatggagaaagtttgcatctgtgcaatatta

SEQ ID NO: 454622 - DNA, 120 bp, Artificial Sequence
  ENSG00000156395_0 (sequence is synthesized)
atggaggcggcgcgcacggagcgccccgcaggcaggccgggggcgccgcttgtccggacggggctcctactcttgtcgacgtgggtcctggccggcgccgagatcacttgggacgcgaca

SEQ ID NO: 454623 - DNA, 120 bp, Artificial Sequence
  ENSG00000156395_1 (sequence is synthesized)
cacttgggacgcgacaggcggtcccggacgcccggcggccccggcttcgcggccaccggcgttgtctccactctcgccgcgggcagtggccagccagtggccggaggagctggcgtcggc

SEQ ID NO: 454624 - DNA, 120 bp, Artificial Sequence
  ENSG00000156395_2 (sequence is synthesized)
ctggggcgccgggccggaccagagctgctgccccagcagggcggcggcagaggcggtgagatgcaggtggaagccggagggacatcaccggcaggcgagcggcggggccggggcatccca

SEQ ID NO: 454625 - DNA, 120 bp, Artificial Sequence
  ENSG00000156395_3 (sequence is synthesized)
gctcctgccaagcttggcggcgcgaggaggagtcgccgggcgcagcccccaatcacccaggaacgcggggacgcctgggccactgctccggccgatggttccagaggaagccgtcccctt

SEQ ID NO: 454626 - DNA, 120 bp, Artificial Sequence
  ENSG00000156395_4 (sequence is synthesized)
gctaagggttcccgggaggaggtgaaggcgccgcgggctggggggtcggcggctgaagacctccggctgcccagcacctccttcgcgctgaccggggactcggcccacaaccaagccatg

SEQ ID NO: 454627 - DNA, 120 bp, Artificial Sequence
  ENSG00000156395_5 (sequence is synthesized)
gtgcactggtcgggacacaactcctctgtcatacttatcctgacgaagctgtatgacttcaacctgggcagcgtgactgagagttcactatggaggtcgacagattatggcaccacctat

SEQ ID NO: 454628 - DNA, 120 bp, Artificial Sequence
  ENSG00000156395_6 (sequence is synthesized)
gaaaagctgaatgacaaagtgggtttgaagactgtcctcagttacctctatgtcaatccaaccaacaaaaggaagattatgcttctcagtgatcctgagatggagagcagcatattgatc

SEQ ID NO: 454629 - DNA, 120 bp, Artificial Sequence
  ENSG00000156395_7 (sequence is synthesized)
agctcagacgaaggggcgacctatcagaagtatcggctcaccttctatatccagagcctgctctttcatcccaagcaagaggactgggtgctggcctacagtttggatcaaaagctctac

SEQ ID NO: 454630 - DNA, 120 bp, Artificial Sequence
  ENSG00000156395_8 (sequence is synthesized)
agctccatggactttggaagacggtggcaactcatgcatgaacgcatcacacccaacaggttttattggtcggtggccggattggataaggaggcggacctggtgcacatggaggtgcgg

SEQ ID NO: 454631 - DNA, 120 bp, Artificial Sequence
  ENSG00000156395_9 (sequence is synthesized)
accacggatggatatgctcactacctcacctgcaggatccaggaatgtgccgagacaactagaagtgggccttttgcccgctccattgacatcagttccctggttgtccaggatgaatat

SEQ ID NO: 454632 - DNA, 120 bp, Artificial Sequence
  ENSG00000156395_10 (sequence is synthesized)
atcttcattcaggtaacaactagtggaagagccagctactacgtgtcttatcgaagagaggcctttgctcagataaagctgcctaagtactcgttgccaaaggacatgcacatcatcagt

SEQ ID NO: 454633 - DNA, 120 bp, Artificial Sequence
  ENSG00000156395_11 (sequence is synthesized)
acagacgagaaccaagtatttgctgcggtccaagaatggaaccagaacgacacgtacaacctctacatctcagacacgcgtgggatttacttcactctggccatggagaacatcaagagc

SEQ ID NO: 454634 - DNA, 120 bp, Artificial Sequence
  ENSG00000156395_12 (sequence is synthesized)
agcagaggtctaatggggaacatcattattgaattgtatgaggtagcaggtatcaaagggatatttctggcaaacaagaaggtggacgaccaggtgaagacatacatcacttacaacaaa

SEQ ID NO: 454635 - DNA, 120 bp, Artificial Sequence
  ENSG00000156395_13 (sequence is synthesized)
ggcagggattggcgcctgctgcaagctccggatgtggacctgagaggaagcccagtgcactgcctgctgcccttctgttccttacatctgcacctgcaactctctgaaaatccatattcc

SEQ ID NO: 454636 - DNA, 120 bp, Artificial Sequence
  ENSG00000156395_14 (sequence is synthesized)
tcaggaagaatctctagcaaggagacagccccaggacttgtggtggctacaggcaacattggcccggagctctcatatactgatattggtgtgttcatctcctccgatgggggcaacaca

SEQ ID NO: 454637 - DNA, 120 bp, Artificial Sequence
  ENSG00000156395_15 (sequence is synthesized)
tggagacagatctttgatgaagagtacaatgtctggttcctagactggggtggtgccctcgtggccatgaaacacacacctctgccagtcaggcatttgtgggtgagttttgatgagggc

SEQ ID NO: 454638 - DNA, 120 bp, Artificial Sequence
  ENSG00000156395_16 (sequence is synthesized)
cactcttgggacaagtatggtttcacttcggttcctctctttgttgacggggctctggtggaggcaggaatggagacccacatcatgacagtttttggccacttcagcctccgctccgaa

SEQ ID NO: 454639 - DNA, 120 bp, Artificial Sequence
  ENSG00000156395_17 (sequence is synthesized)
tggcaattggtgaaagtggactacaaatctatcttcagccggcattgcaccaaggaggactatcagacctggcacctgctcaatcagggagagccttgtgtcatgggagaaaggaaaata

SEQ ID NO: 454640 - DNA, 120 bp, Artificial Sequence
  ENSG00000156395_18 (sequence is synthesized)
ttcaagaaacgtaagccaggagctcagtgtgccctgggccgagaccactcaggatcagtggtctcagaaccctgtgtctgtgccaattgggacttcgagtgtgactatgggtatgagaga

SEQ ID NO: 454641 - DNA, 120 bp, Artificial Sequence
  ENSG00000156395_19 (sequence is synthesized)
catggggagagccagtgtgtcccagctttctggtacaatccagcatccccatcaaaggactgcagccttggtcaaagctaccttaacagcactgggtatcggcggattgtgtccaacaac

SEQ ID NO: 454642 - DNA, 120 bp, Artificial Sequence
  ENSG00000156395_20 (sequence is synthesized)
tgcacagatgggctaagggagaagtacaccgccaaggcccagatgtgccctggaaaagcccctcggggcctccatgtggtgacgaccgatgggcggctggtggcagagcaggggcacaat

SEQ ID NO: 454643 - DNA, 120 bp, Artificial Sequence
  ENSG00000156395_21 (sequence is synthesized)
gcaactttcatcatcctcatggaggagggtgatctacaaaggacaaacatccagcttgactttggggatgggattgctgtgtcctacgcaaacttcagccccatcgaggacggcatcaag

SEQ ID NO: 454644 - DNA, 120 bp, Artificial Sequence
  ENSG00000156395_22 (sequence is synthesized)
cacgtgtataagagtgcggggatcttccaggtgacagcctatgcagagaacaaccttggctcagacacagctgtcctcttcctgcatgtggtttgtcctgtggagcatgttcatctccga

SEQ ID NO: 454645 - DNA, 120 bp, Artificial Sequence
  ENSG00000156395_23 (sequence is synthesized)
ttgccataagaaataaggaggtcaacatcagtgcagtcgtgtggcccagtcaactggggacccttacctatttctggtggttcggcaatagcacaaagcctctcatcactttggacagca

SEQ ID NO: 454646 - DNA, 120 bp, Artificial Sequence
  ENSG00000156395_24 (sequence is synthesized)
gcatttccttcacattccttgcagaaggaaccgacaccatcacagtccaggtggctgctgggaatgccctcatccaggacacaaaagagattgcagttcatgaatatttccagtcccagc

SEQ ID NO: 454647 - DNA, 120 bp, Artificial Sequence
  ENSG00000156395_25 (sequence is synthesized)
ttttatcattctctcctaatctggattaccacaatcctgacattcctgagtggagaaaagatattggcaatgtcatcaagcgagctctggttaaagtaaccagtgtcccagaggaccaga

SEQ ID NO: 454648 - DNA, 120 bp, Artificial Sequence
  ENSG00000156395_26 (sequence is synthesized)
tcctcattgccgtgtttcctggtctccccacttcagcagagcttttcattcttccacccaagaacctgacagagaggaggaaaggcaatgaaggggacctggaacaaattgtagaaacac

SEQ ID NO: 454649 - DNA, 120 bp, Artificial Sequence
  ENSG00000156395_27 (sequence is synthesized)
tgtttaatgctctcaaccaaaatttggtccagtttgagctgaagccgggggtacaagtcattgtgtatgtcacacagctgacgttagctccattggtggactccagtgctgggcacagca

SEQ ID NO: 454650 - DNA, 120 bp, Artificial Sequence
  ENSG00000156395_28 (sequence is synthesized)
gctcagccatgcttatgctattatcagtggtatttgttggcctggctgtgtttttgatctacaagtttaaaaggaaaatcccttggattaacatctatgctcaagtccaacacgacaagg

SEQ ID NO: 454651 - DNA, 120 bp, Artificial Sequence
  ENSG00000156395_29 (sequence is synthesized)
agcaggagatgattgggtcagtgagccaaagtgaaaacgcccccaaaatcacactcagtgactttacggagcctgaggagctgctggacaaagagctggacacgcgggtcataggaggca

SEQ ID NO: 454652 - DNA, 120 bp, Artificial Sequence
  ENSG00000156395_30 (sequence is synthesized)
ttgccactattgcaaacagcgaaagcacaaaggagatccccaactgcactagtgtttaataccagcaagccacgtggtcaaccacctttctgactttttatttttgatgattactattac

SEQ ID NO: 454653 - DNA, 120 bp, Artificial Sequence
  ENSG00000156395_31 (sequence is synthesized)
tattattatggaaaaattaaaatgtcttttttaccttttgtttaccaagggccccttcataaatagcaggcaaatgcctagctttgggagaaaagggcattcttagctgattgaaatgag

SEQ ID NO: 454654 - DNA, 120 bp, Artificial Sequence
  ENSG00000156395_32 (sequence is synthesized)
acaaagggaataaatggctgtatttgtgctaagagcaaaggatgcatcttcccacagcctcctcgctttactctgccattggtagcttaaagactttctttttccttgtggtctcccttt

SEQ ID NO: 454655 - DNA, 120 bp, Artificial Sequence
  ENSG00000156395_33 (sequence is synthesized)
tttcaaaattgaagttgggttggctctttgtgaacctctcatccccacagcagaatcaccaacactctccgcttcccccagcacacacacatacaacacagatcatttcccagttagatc

SEQ ID NO: 454656 - DNA, 120 bp, Artificial Sequence
  ENSG00000156395_34 (sequence is synthesized)
cgcaggaagtaggttggtgggggtggatgtagctgcagaaagcatgcacaactttgtgaaagaggccctgccttgtgcatgtccatagtgaggctacagatggcttattgtatataatta

SEQ ID NO: 454657 - DNA, 120 bp, Artificial Sequence
  ENSG00000156395_35 (sequence is synthesized)
caatgtaaatagctttttatttcctaagaaataatttaatgtttagtaaaaaagaaaacagaaaaaagaaagatgcgtgtgttggcttacgcactggccctcagagctgaccaacccgcc

SEQ ID NO: 454658 - DNA, 120 bp, Artificial Sequence
  ENSG00000156395_36 (sequence is synthesized)
aggcctgctcaatgcattgggtttggatgctctcctgttgtctgtcacacttaactcttgcatctccttgtccatgccatagctggtttctacttatgtatataaaggggggtgggggga

SEQ ID NO: 454659 - DNA, 120 bp, Artificial Sequence
  ENSG00000156395_37 (sequence is synthesized)
ggggcttctctggggcaattgataaaggaaggactctagtgacatcatagaacatggcagtcgtttttgttccaagaatgatatgaaaggtgaagaagaggcccactagaggcttcatac

SEQ ID NO: 454660 - DNA, 120 bp, Artificial Sequence
  ENSG00000156395_38 (sequence is synthesized)
tgagacccagatgggggaaaacagcttcctctctaaaaggaaaaacttgatatttatcagtctgagaaaatatttttttctaaagaaggcagtcagtggatcttaaaatgacaatctgtt

SEQ ID NO: 454661 - DNA, 120 bp, Artificial Sequence
  ENSG00000156395_39 (sequence is synthesized)
tttaaattggattctatgaaaatgcataatgcttatggtgaattctcaggctattctgagctcagaaaagtcccctgggcactaggtaaagcccagtgaatgtctcttggcatgggagga

SEQ ID NO: 454662 - DNA, 120 bp, Artificial Sequence
  ENSG00000156395_40 (sequence is synthesized)
gttaaagaggttggaagggaagaggcatttgtggaattatgagttcatgcaaaactctccaggccaagtaggggtctagcctttaatgatattagtcaaaggcaattttagcaaagctgt

SEQ ID NO: 454663 - DNA, 120 bp, Artificial Sequence
  ENSG00000156395_41 (sequence is synthesized)
gctatttgcttgtcagatgtacacaacttccttaaagtcaaatgtctgccttcagttcccttaaggtagttcttgcctctggggtgagtggctttcaaagccttttagcttttccagcac

SEQ ID NO: 454664 - DNA, 120 bp, Artificial Sequence
  ENSG00000156395_42 (sequence is synthesized)
ctcagccccttcacacatttacacataccaatttttttcaatagggtcacgttaagccatgctgtaagcattgtttttattttcaggcttagcctgagcacacttatttttgaaaatgat

SEQ ID NO: 454665 - DNA, 120 bp, Artificial Sequence
  ENSG00000156395_43 (sequence is synthesized)
ataatgtatatatatgggaggaaaggccacattttgtacctgttaatttttgtgggatgttgttcccattcttctttgtgagacagagagaatgtgatatagagaaatctggctggctac

SEQ ID NO: 454666 - DNA, 120 bp, Artificial Sequence
  ENSG00000156395_44 (sequence is synthesized)
agtgtagatcagtattaggaatatttctaaagatcctgcttttttgtttcaagggttaaatggggcagacaattgcaatacttgtactaaacactggaatacaaatgcatgactcatatc

SEQ ID NO: 454667 - DNA, 120 bp, Artificial Sequence
  ENSG00000156395_45 (sequence is synthesized)
tatatatacagtatatgtacatatactgttcttggttttattgttccacttgaatatttctactgtaaaaaaaagacagtggttttgaaattgttgaaaataaatgtatttttgtacatc

SEQ ID NO: 454668 - DNA, 120 bp, Artificial Sequence
  ENSG00000156395_46 (sequence is synthesized)
catgactgactatgggtatgagagacatggggagagccagtgtgtcccagctttctggtacaatccagcatccccatcaaaggactgcagccttggtcaaagctaccttaacagcactgg

SEQ ID NO: 454669 - DNA, 120 bp, Artificial Sequence
  ENSG00000156398_0 (sequence is synthesized)
agttttcaaggcgggctgtaactggtggcatttgtcccgggaccaggtccacagttttatgtgtgagcaagatggaggctgacctgtctggctttaacatcgatgccccccgttgggacc

SEQ ID NO: 454670 - DNA, 120 bp, Artificial Sequence
  ENSG00000156398_1 (sequence is synthesized)
agcgcaccttcctggggagagtgaagcacttcctaaacatcacggacccccgcactgtctttgtatctgagcgggagctggactgggccaaggtgatggtggagaagagcaggatggggg

SEQ ID NO: 454671 - DNA, 120 bp, Artificial Sequence
  ENSG00000156398_2 (sequence is synthesized)
ttgtgcccccaggcacccaagtggagcagctgctgtatgccaagaagctgtatgactcggccttccaccccgacactggggagaagatgaatgtcatcgggcgcatgtctttccagcttc

SEQ ID NO: 454672 - DNA, 120 bp, Artificial Sequence
  ENSG00000156398_3 (sequence is synthesized)
ctggcggcatgatcatcacgggcttcatgctccagttctacaggacgatgccggcggtgatcttctggcagtgggtgaaccagtccttcaatgccttagtcaactacaccaacaggaatg

SEQ ID NO: 454673 - DNA, 120 bp, Artificial Sequence
  ENSG00000156398_4 (sequence is synthesized)
cggcttcccccacatcagtcaggcagatggccctttcctacttcacagccacaaccactgctgtggccacggctgtgggcatgaacatgttgacaaagaaagcgccgcccttggtgggcc

SEQ ID NO: 454674 - DNA, 120 bp, Artificial Sequence
  ENSG00000156398_5 (sequence is synthesized)
gctgggtgccctttgccgctgtggctgcggctaactgtgtcaatatccccatgatgcgacagcaggagctcataaagggaatctgcgtgaaggacaggaatgaaaatgagattggtcatt

SEQ ID NO: 454675 - DNA, 120 bp, Artificial Sequence
  ENSG00000156398_6 (sequence is synthesized)
cccggagagctgcggccataggcatcacccaagtagttatttctcggatcaccatgtcagctcctgggatgatcttgctgccagtcatcatggaaaggcttgagaaattgcacttcatgc

SEQ ID NO: 454676 - DNA, 120 bp, Artificial Sequence
  ENSG00000156398_7 (sequence is synthesized)
agaaagtcaaggtcctgcacgccccattgcaggtcatgctgagcgggtgcttcctcatcttcatggtgccagtggcgtgtgggcttttcccacagaaatgtgaattgccagtttcctatc

SEQ ID NO: 454677 - DNA, 120 bp, Artificial Sequence
  ENSG00000156398_8 (sequence is synthesized)
tggaaccgaagctccaagacactatcaaggccaagtatggagaacttgagccttatgtctacttcaataagggtctctaaatgccccacttcagcaaggaccagtctattcccatattca

SEQ ID NO: 454678 - DNA, 120 bp, Artificial Sequence
  ENSG00000156398_9 (sequence is synthesized)
ccagctcctccttagctacgtgcacacttgtgtcctccttcccctttgccaacaaggcctgaaggccagggtagattggggggtgggacaatgaatgcctcatacttacaccctggtact

SEQ ID NO: 454679 - DNA, 120 bp, Artificial Sequence
  ENSG00000156398_10 (sequence is synthesized)
ggttgattggacctcaggggaaaaaagtgaaaaagggtagcaaaggccaatgtcttctagctgcttcctcaacccctgtcccctggagaccagaagctgaggccctctcagggaggagac

SEQ ID NO: 454680 - DNA, 120 bp, Artificial Sequence
  ENSG00000156398_11 (sequence is synthesized)
atccaagcaaatcatttggaaaagttaggaaacctttaggattctggttccagccagggttgaggaaaagaccttggatcaaaaggaagcttctatacctctttcttcttcgcttcctcc

SEQ ID NO: 454681 - DNA, 120 bp, Artificial Sequence
  ENSG00000156398_12 (sequence is synthesized)
tctcccaagcaatggaaacttttacccatgtaattctagctgaactcaggaaaaagaagggggaaaggactctgtccccttggggctcatcacccttccacatcctcctcctcgttgccc

SEQ ID NO: 454682 - DNA, 62 bp, Artificial Sequence
  ENSG00000156398_13 (sequence is synthesized)
tggggctcatcacccttccacatcctcctcctcgttgccccctggtcaggcagcttcttttt

SEQ ID NO: 454683 - DNA, 85 bp, Artificial Sequence
  ENSG00000156398_14 (sequence is synthesized)
ggacagcttctttgggagtgctgctaaccttgaaattatcagacacttaggagttattagtgctaaaaaggggaccgtgcaaggc

SEQ ID NO: 454684 - DNA, 120 bp, Artificial Sequence
  ENSG00000156398_15 (sequence is synthesized)
cttaggagttattagtgctaaaaaggggaccgtgcaaggcagcagagttacatggttcttcaaatcatgtctgaacctattcttggaatcttctctataataagggaagttctcttaccc

SEQ ID NO: 454685 - DNA, 120 bp, Artificial Sequence
  ENSG00000156398_16 (sequence is synthesized)
cactgccacatacctctgttttaaaagataagtccactaactgtgagtaaaaatgatatatataggcattaaccacacactttaatgggtataatttcctggctgcctcccttcctcagc

SEQ ID NO: 454686 - DNA, 120 bp, Artificial Sequence
  ENSG00000156398_17 (sequence is synthesized)
ccattaggttaaacaccaaagaaagactggtgtgtactgaataggaaagggaagttttatttggaaccttctaagaggaaatcaaccaggaccaaagagccttaaaggacacacagcaat

SEQ ID NO: 454687 - DNA, 120 bp, Artificial Sequence
  ENSG00000156398_18 (sequence is synthesized)
gcacagccacttcccttccccagcttggctgccctaggtgatttctcaagctccttgggggactgttgtttctcatctggaatcaatgtgtgtatgagttttgtctggtaggattgctga

SEQ ID NO: 454688 - DNA, 120 bp, Artificial Sequence
  ENSG00000156398_19 (sequence is synthesized)
ctctgtccaacagatatcactgtgaattgaataaatttgttgaaagagcacacaggcacacatacacacaaactgtaaactaagttaatgaagcctgaatggaaagcaggatctggcctt

SEQ ID NO: 454689 - DNA, 120 bp, Artificial Sequence
  ENSG00000156398_20 (sequence is synthesized)
actttggccttggcatgtcagaaggtatcacaactactatataaggggaacttgtctgatgcctggaggctgttgtttatttccctcattaaaggggaaatccacctgtctccacaggaa

SEQ ID NO: 454690 - DNA, 120 bp, Artificial Sequence
  ENSG00000156398_21 (sequence is synthesized)
gctccagatctcccagaatgggagctgtgttgccctagagcaagagttggcaagctatggctcaaggggccaaatccacctgccacctgtttttgtgcaattggaagctaagaatgtttt

SEQ ID NO: 454691 - DNA, 120 bp, Artificial Sequence
  ENSG00000156398_22 (sequence is synthesized)
tacatttttaaagagttgtaaaagggaacaacaggaatgacagagaccctacctatgtggcatacaaagcctaaaatatttactgtctgatccttgacacaaaaagtttcccctgccctg

SEQ ID NO: 454692 - DNA, 69 bp, Artificial Sequence
  ENSG00000156398_23 (sequence is synthesized)
tactgtctgatccttgacacaaaaagtttcccctgccctggagcagtggttcttaagcacatgcatcaa

SEQ ID NO: 454693 - DNA, 120 bp, Artificial Sequence
  ENSG00000156398_24 (sequence is synthesized)
tgcgccactgcactccaacctgggcgactccgtctcaaaaaaaaaaaagaaaacacatcagaattagctggcaggcttgttaaagcacagattgcaggatccattgccagattctgtcac

SEQ ID NO: 454694 - DNA, 120 bp, Artificial Sequence
  ENSG00000156398_25 (sequence is synthesized)
ggatccattgccagattctgtcactctgggctggagcctgagaacgtgcatttctagtcattgcccggtgatgctgattctgttggtcttggcaccatacgtggaggagcactgctctaa

SEQ ID NO: 454695 - DNA, 120 bp, Artificial Sequence
  ENSG00000156398_26 (sequence is synthesized)
ttctccccgtttaaaaaagttaaaatataactcacataccataaacttagtccttttaaagtgtacaattcagtggtttttaatgtagtcacaaagttgtacaagcatcaccactaattc

SEQ ID NO: 454696 - DNA, 120 bp, Artificial Sequence
  ENSG00000156398_27 (sequence is synthesized)
cagaattattttgagacaggatctcactctgttaccctggttggagtgcagtagtgcaatcactgctcattgcagcctcaacctcctgagctcaagtaatcctcctgcctcagcctctgg

SEQ ID NO: 454697 - DNA, 120 bp, Artificial Sequence
  ENSG00000156398_28 (sequence is synthesized)
ggtagctgggaccacaggctaatttgatttttttgatgaggtctcactatgttgccccaggctggtctcgaactcatggcctcaagtgatcctcctccctcagccttccaaagtgttgga

SEQ ID NO: 454698 - DNA, 120 bp, Artificial Sequence
  ENSG00000156398_29 (sequence is synthesized)
attacacacatgagccactgcatctggtctcagaacatttttcttagccccaaaagaaaccccatacccattggcagtcactccacattctccctacctgccagcgcctcacaattcact

SEQ ID NO: 454699 - DNA, 120 bp, Artificial Sequence
  ENSG00000156398_30 (sequence is synthesized)
tcctgtctttagagatttgcgtattctgaacatttcatgtaagtggagtaatgcagtatgtggccctctgtgtctggtttctttccttaggataatgttttcaaggttcatccatgttgt

SEQ ID NO: 454700 - DNA, 120 bp, Artificial Sequence
  ENSG00000156398_31 (sequence is synthesized)
agcatatgcaatttgattttagctggtgtctgaacagaaaagtctgtctttgagctagcttctttaggacaggagacctggctttatttccaaaagcaaataggaaaagggaaacattac

SEQ ID NO: 454701 - DNA, 120 bp, Artificial Sequence
  ENSG00000156398_32 (sequence is synthesized)
cagagccagtagagcttggaaacaactcctgactgatgttctttcagaacatacaatgtttccccttccttctcagctcctcaagcctcttggatttcctgttctcttatagacaactgc

SEQ ID NO: 454702 - DNA, 120 bp, Artificial Sequence
  ENSG00000156398_33 (sequence is synthesized)
tcttttggaaatgtctggaaggtatgtggtggctataatgttcagggacattctaaaaagtggtcactcaaactgcatctcagtctcattttgtaacatctctcttctttgagttggctg

SEQ ID NO: 454703 - DNA, 120 bp, Artificial Sequence
  ENSG00000156398_34 (sequence is synthesized)
ctgtgggatgttgaataagaggcagttaaggttactaaaaggccttggtgtgggaagtgctaatccagactgtcctatccaatagctcagcttgagctttcaggtaaaaggagaaaggga

SEQ ID NO: 454704 - DNA, 120 bp, Artificial Sequence
  ENSG00000156398_35 (sequence is synthesized)
taaaaggagaaagggaagttggggcaaaatcccctgtgtttgccaaactgaattggggtttcttatttattgagagaaagagggtatcactttcttgcccaggctggagtgcaatggtat

SEQ ID NO: 454705 - DNA, 120 bp, Artificial Sequence
  ENSG00000156398_36 (sequence is synthesized)
ttcctcagcctcctggactcaagtgatcctcctgccttagcctcccgagtagcttctttttcctgagttcggctagaatagcatgggtaaaaggttccattgctcgggagaggaggagga

SEQ ID NO: 454706 - DNA, 120 bp, Artificial Sequence
  ENSG00000156398_37 (sequence is synthesized)
agggaagaagaagaggtatagaagcttccttttgatccaaggtcttttcctcaatcctggctagaaccagaatcctaaaggtttcctgactacaggtacatgccaccatgcccagctaat

SEQ ID NO: 454707 - DNA, 86 bp, Artificial Sequence
  ENSG00000156398_38 (sequence is synthesized)
cagctaatttttaaattttttgtagacagagggcctcactatgtttcccaggttggtcttgaacccctgacctcaagcaatcctca

SEQ ID NO: 454708 - DNA, 120 bp, Artificial Sequence
  ENSG00000156398_39 (sequence is synthesized)
ctacatcccacctggggtttcttagtgatgatgaaacctagcctttatgtggaagacttacaactttttgaggccaggaattagagaccttgtgccatgaaaataatttggtccttccct

SEQ ID NO: 454709 - DNA, 120 bp, Artificial Sequence
  ENSG00000156398_40 (sequence is synthesized)
agtactcaatttttacttctcctctaaggagcttgacttgtggaatggataaatttctaagaaacgagagattggcaaaaatacgtgtcactttttatagtacttggaaaagcaggatca

SEQ ID NO: 454710 - DNA, 120 bp, Artificial Sequence
  ENSG00000156398_41 (sequence is synthesized)
agataaaggcagaactatggactttcttaagctgagggaagactgacttaactcttacctgtttcccatttttccaacacttaagccaagaacaacttcctctgggctcagatgtgggct

SEQ ID NO: 454711 - DNA, 120 bp, Artificial Sequence
  ENSG00000156398_42 (sequence is synthesized)
agactgggccaggctgtaaaacactttgacaggtttttgagaggaaattgactgctaaagtcaactgtgttatttgccatgggtcttcctttgtccatttattttaccaacttttttttt

SEQ ID NO: 454712 - DNA, 78 bp, Artificial Sequence
  ENSG00000156398_43 (sequence is synthesized)
ttggctaatttggctaatttagtttttttatttttgtagagacagggttctctccatgttgcccaggctggtttcaaa

SEQ ID NO: 454713 - DNA, 120 bp, Artificial Sequence
  ENSG00000156398_44 (sequence is synthesized)
gctggtttcaaactcctgagctcaagggatctacctgcctcagcctcccaaagggctaggattataagcatgagccaccacacctggctattttaccaacattgatcaagctctggttga

SEQ ID NO: 454714 - DNA, 120 bp, Artificial Sequence
  ENSG00000156398_45 (sequence is synthesized)
ttaccaacattgatcaagctctggttgagccttgtacaggatattataggctttaaaagaagaagaagaaagacctggtatgctgtacaaaaaactgcaaaccaggcacgcagatataag

SEQ ID NO: 454715 - DNA, 120 bp, Artificial Sequence
  ENSG00000156398_46 (sequence is synthesized)
tgttacaagaatccagaagaagcagcaaggagatggggctaggagtttgtaagcagggaactgtatctgtaatatgtaaatgaagttactgggcatctcttcaatggtcagtgtgagtgg

SEQ ID NO: 454716 - DNA, 120 bp, Artificial Sequence
  ENSG00000156398_47 (sequence is synthesized)
aatgtgtgggaaaatgtagtggtgagaggtgagataaagagaagtagacagggacgaagtcacagagaggaccgtgttgggaagtttggactctctattctgtaggtagatgaagtattt

SEQ ID NO: 454717 - DNA, 120 bp, Artificial Sequence
  ENSG00000156398_48 (sequence is synthesized)
aaaagaagaggccatgatatagtaatatttggtttaatgtggtatggttgtagtgtgtggcggaaatttgagaggaagaattgtcaacttgcagggcagcagggaagccatttgtattta

SEQ ID NO: 454718 - DNA, 120 bp, Artificial Sequence
  ENSG00000156398_49 (sequence is synthesized)
gctagaagaacatggattgaagcaatggatgatggatttcagagcaatttgtgaagtagaaccagaattttgtccgtcgaacttggggtgacgaagcactatgcctcagataaaggtact

SEQ ID NO: 454719 - DNA, 120 bp, Artificial Sequence
  ENSG00000156398_50 (sequence is synthesized)
atcttctagggaattcaaacggacctaagctgctatttgggcagttgagaccaagagaggcatcctggtaatagtgctgtgcttcaagacaaaagacattaaaatatttttacattgcaa

SEQ ID NO: 454720 - DNA, 120 bp, Artificial Sequence
  ENSG00000156398_51 (sequence is synthesized)
cagttttcaaggcgggctgtaactggtggcatttgtcccgggaccaggtaaggggccttgggacaatggcgctcgccctgtctacctccaatccccacatctcgggtgggtgctgagatt

SEQ ID NO: 454721 - DNA, 120 bp, Artificial Sequence
  ENSG00000156398_52 (sequence is synthesized)
gctgtcctgactgcccaggcggggctgcagcgcgggctggacttccacctgcagaagccacgtggcgcgaagtgcgccctggggctgcagatgggcccctctgctctgacccccattgcc

SEQ ID NO: 454722 - DNA, 88 bp, Artificial Sequence
  ENSG00000156398_53 (sequence is synthesized)
ggggaggccgtctgtcggagggcaagaagcagcctgggggctggccctgagccctgtcacaacctccacctctcgggttcaaacgatt

SEQ ID NO: 454723 - DNA, 120 bp, Artificial Sequence
  ENSG00000156398_54 (sequence is synthesized)
tggcggcatgatcatcacgggcttcatgctccagttctacagctattgagctgggctttgggccgggtgttgggaatgtgaaggcttcagtaacctcccgtcaaggagctcccagttttg

SEQ ID NO: 454724 - DNA, 120 bp, Artificial Sequence
  ENSG00000156398_55 (sequence is synthesized)
ttgaggagaccaagaagtaaacagttacagtacagcttggacgatgccggcggtgatcttctggcagtgggtgaaccagtccttcaatgccttagtcaactacaccaacaggaatgcggc

SEQ ID NO: 454725 - DNA, 120 bp, Artificial Sequence
  ENSG00000156398_56 (sequence is synthesized)
agttttcaaggcgggctgtaactggtggcatttgtcccgggaccagcttgctctaggcagccttgaccttaatccttgcctgtctcagtggtctttgtgtctgaccttctggggtctttg

SEQ ID NO: 454726 - DNA, 120 bp, Artificial Sequence
  ENSG00000156398_57 (sequence is synthesized)
agttttcaaggcgggctgtaactggtggcatttgtcccgggaccagtatgccttgtaatttttcactgaaagctggacatgatgtaccctgtgagaggaactgaggggtccacagtttta

SEQ ID NO: 454727 - DNA, 120 bp, Artificial Sequence
  ENSG00000156398_58 (sequence is synthesized)
acgatgcccagtagctggtgagagcaggcagtctgcaacagtgggacgtgctcaggtcctctgtggtgggctttgatttaggggacagtcatcttcttcctttgtcccttaggtccacag

SEQ ID NO: 454728 - DNA, 120 bp, Artificial Sequence
  ENSG00000156398_59 (sequence is synthesized)
agttttcaaggcgggctgtaactggtggcatttgtcccgggaccagagacggagtttcgccatgttgcccaggctgggctcgaactcctggggtcaagccatccgcccgcctaggcctcc

SEQ ID NO: 454729 - DNA, 120 bp, Artificial Sequence
  ENSG00000156398_60 (sequence is synthesized)
tgacaaaggtatggtctggggccgctgcagcatggtggccacgcgggggcagcagagtcctagggaaaacgtccttcccccagggacagttccccaggctgggtgagttgggaatggcca

SEQ ID NO: 454730 - DNA, 62 bp, Artificial Sequence
  ENSG00000156398_61 (sequence is synthesized)
acccgggccagttttcaaggcgggctgtaactggtggcatttgtcccgggactcacaacctc

SEQ ID NO: 454731 - DNA, 120 bp, Artificial Sequence
  ENSG00000156398_62 (sequence is synthesized)
ctggcgggagcctcccggcctgggattggtcgaaaaggaggggcgtggggcgggcgtgggggcagttccccagcccaggtcctcctctcacccgggccagttttcaaggcgggctgtaac

SEQ ID NO: 454732 - DNA, 120 bp, Artificial Sequence
  ENSG00000156411_0 (sequence is synthesized)
atcccctgcgcgcgcctgcgcgctcggtgacctttccgagttggctgcagatttgtggtgcgttctgagccgtctgtcctgcgccaagatgcttcaaagtattattaaaaacatatggat

SEQ ID NO: 454733 - DNA, 120 bp, Artificial Sequence
  ENSG00000156411_1 (sequence is synthesized)
ccccatgaagccctactacaccaaagtttaccaggagatttggataggaatggggctgatgggcttcatcgtttataaaatccgggctgctgataaaagaagtaaggctttgaaagcttc

SEQ ID NO: 454734 - DNA, 120 bp, Artificial Sequence
  ENSG00000156411_2 (sequence is synthesized)
catgtgaaagaaaacgtcagtctgcctgtaaatttcagcaagccgtgttagatggggagcgtggaacgtcactgtacacttgtataagtaccgtttacttcatggcatgaataaatggat

SEQ ID NO: 454735 - DNA, 120 bp, Artificial Sequence
  ENSG00000156411_3 (sequence is synthesized)
ctgtgagatgcactgctacctggtactgctttcagtgtgttccccctcagcccctccggcgtgtcaggcatactctgagtagataatttgtcatgcagcgcatgcaatcagaatctcact

SEQ ID NO: 454736 - DNA, 120 bp, Artificial Sequence
  ENSG00000156411_4 (sequence is synthesized)
gagccacccatcattgtgaaataattacctcagttgtacaggacttggtgatcaggatccaggcactcacttgtattctactgctcaataaacgtttattaaacttgatcctgctactta

SEQ ID NO: 454737 - DNA, 120 bp, Artificial Sequence
  ENSG00000156411_5 (sequence is synthesized)
agggtgagcctttctaggacctcaggggaagcttgagcgccgcggctggcccgggagtctgtttcacgggagttccgtggcaacccctgtgtgtacaagaaaatgccctccggtcactcc

SEQ ID NO: 454738 - DNA, 120 bp, Artificial Sequence
  ENSG00000156411_6 (sequence is synthesized)
tctgagccgtctgtcctgcgccaagggctgttcgtttcttggaacctcacactgtcagagcattcgagtagcttgaggacaggaaatttgagggcggactatctgcaaggtgttccagga

SEQ ID NO: 454739 - DNA, 120 bp, Artificial Sequence
  ENSG00000156411_7 (sequence is synthesized)
gtaggaattttaccatttcttggctataagacattttctgaaagcttcctgaattgctttacctaagctacaatgccttcagctaaatgttaattttgacaaaggcatttttgtaaagca

SEQ ID NO: 454740 - DNA, 120 bp, Artificial Sequence
  ENSG00000156411_8 (sequence is synthesized)
caatcttggcttcccaaagtgctggaattaacaagcgtgagccacaacacctggcccaattggggaactttgaacaagactttaatatcagaattgtgagttttcttaggtgtgaaagtg

SEQ ID NO: 454741 - DNA, 120 bp, Artificial Sequence
  ENSG00000156411_9 (sequence is synthesized)
aagagatgaaggctaaaatatttaaggtatgggttcatggtatgtggtatttcattgcaccttttcaactgttctgaatatttgaaatttgtttgtaaaaaaatttggaggggaggaata

SEQ ID NO: 454742 - DNA, 120 bp, Artificial Sequence
  ENSG00000156411_10 (sequence is synthesized)
accacttggttctcagtagagcagagcagtgtggcccaatcacatgttactaagccattgattacaaagagaaaagagaaaactttatgctgcaagactaaagtttaggacattgtagaa

SEQ ID NO: 454743 - DNA, 120 bp, Artificial Sequence
  ENSG00000156411_11 (sequence is synthesized)
tggaaaacagcatcatgtcttttcaggacaaggtatatcgttgttctcaattgaaatcgaaacacagttcagtatatatgtaaggtgcagttgaaatgcttcacagcttgaagtttgcta

SEQ ID NO: 454744 - DNA, 120 bp, Artificial Sequence
  ENSG00000156411_12 (sequence is synthesized)
tgcctgctgggaaagagaattctgaatttctgctttttatagtcaagtggatcaagtaaaacttccaggagtaatagaggaatggattaattagaggtagtcgatatcatcaccaatagg

SEQ ID NO: 454745 - DNA, 120 bp, Artificial Sequence
  ENSG00000156411_13 (sequence is synthesized)
tcgatatcatcaccaatagggaagcacaagtgagctgtgcaagcatgctgtcctagaagttccctaatgatgtcgttttattttgtttattgttttttgagacggagcctcgctctgtcg

SEQ ID NO: 454746 - DNA, 120 bp, Artificial Sequence
  ENSG00000156411_14 (sequence is synthesized)
caggcgtgagccactgcgcctggcctttaatgtattttgaaagaaagcgccttataaatttatgccagagtgacaatgaaactgtagccatttgaatgttacacaaacccaggactggct

SEQ ID NO: 454747 - DNA, 120 bp, Artificial Sequence
  ENSG00000156411_15 (sequence is synthesized)
tagccatttgaatgttacacaaacccaggactggctacatgagtttgaggaggaggtgtttccctgcctctctctttgcgctgtgggtgaccactgcctgtctgctgtcattacatgaac

SEQ ID NO: 454748 - DNA, 120 bp, Artificial Sequence
  ENSG00000156411_16 (sequence is synthesized)
ccttaagcactctgggtgtttcatatagaaataatcctacttttcaatagtattgaaaggtgtcatttatctttttggactgttgatcaacttcttttgatacttgtttaataaattaca

SEQ ID NO: 454749 - DNA, 120 bp, Artificial Sequence
  ENSG00000156411_17 (sequence is synthesized)
ttcacattgtaaaggaactatgggttctaactaggtatgaacattagagctacctacagtccttcgtaaaaaatacagggagcacatgtcagctataaaagacatttggggacagtgggg

SEQ ID NO: 454750 - DNA, 66 bp, Artificial Sequence
  ENSG00000156411_18 (sequence is synthesized)
ctcactctgacgcccaggctggagtgcaatggcacgatcatggttcactgcagcctccacctccta

SEQ ID NO: 454751 - DNA, 120 bp, Artificial Sequence
  ENSG00000156411_19 (sequence is synthesized)
gcgctcggtgacctttccgagttggctgcagatttgtggtgcgttctgagccgtctgtcctgcgccaagataaaagaagtaaggctttgaaagcttcagcgcctgctcctggtcatcact

SEQ ID NO: 454752 - DNA, 68 bp, Artificial Sequence
  ENSG00000156411_20 (sequence is synthesized)
tgtatttttagtagagatagggtttcacacccgtaatgatgtgtttttaatggtttggttttgttttt

SEQ ID NO: 454753 - DNA, 71 bp, Artificial Sequence
  ENSG00000156411_21 (sequence is synthesized)
tgaccttgtgatccacccgcctcagcctacccgtaatgatgtgtttttaatggtttggttttgttttttgg

SEQ ID NO: 454754 - DNA, 120 bp, Artificial Sequence
  ENSG00000156411_22 (sequence is synthesized)
ggtgcgttctgagccgtctgtcctgcgccaagggagcgtaccttggccttgagaggttcagctgcctaacccagaggctacgcagagttagagaagccagagtccaagccaagaactctg

SEQ ID NO: 454755 - DNA, 120 bp, Artificial Sequence
  ENSG00000156411_23 (sequence is synthesized)
actccacatccagtcccttctctcctttataactcaagtttccttgcgccacactgccctccacgttatgctgtacatgacaacttgggtgaggcaacagggaagctgaaaagagatcat

SEQ ID NO: 454756 - DNA, 120 bp, Artificial Sequence
  ENSG00000156413_0 (sequence is synthesized)
agatcatttctctccattccaggaagtttgcatagctccctggacttctgctttgcactgccctgcaggagtgggtggggaaaggaagtggctttgaggcacacagaggggcttgttgag

SEQ ID NO: 454757 - DNA, 120 bp, Artificial Sequence
  ENSG00000156413_1 (sequence is synthesized)
gccaccggaggaagcttctgccaccaatatgggacctgtgcccagcctaccagaagagagcatctgaaaacatgtatcgacatggtaacccctctgcttgaagcctcacatggctcccta

SEQ ID NO: 454758 - DNA, 120 bp, Artificial Sequence
  ENSG00000156413_2 (sequence is synthesized)
ttgccttggtgctgaacaccctatggctgaccgtggcccagcctctgcaacagctctgcctcctctccagtggtgaagacccagcctgctgagactcctcctgcagttcctcaacatgcc

SEQ ID NO: 454759 - DNA, 120 bp, Artificial Sequence
  ENSG00000156413_3 (sequence is synthesized)
tgcatttctgctgcctcagggcctttgcgaaggttgttccttgtaactggaatgcccttccatcccttttttattcaaaaggctgcaattttaattgaagaaagttcccttccaaggttc

SEQ ID NO: 454760 - DNA, 120 bp, Artificial Sequence
  ENSG00000156413_4 (sequence is synthesized)
atgagttgcctgacttgcccaccggtttcctgcaagatcccttggcctggcacttagtgctcaggaaatatttggtgatgggccaactgagtgagaaggtgggatctggtgggaaggaaa

SEQ ID NO: 454761 - DNA, 120 bp, Artificial Sequence
  ENSG00000156413_5 (sequence is synthesized)
gcggaaaggtagaaattctgctcacttcctcattcccacctcccaaggaacccctggtgtccctgtggaacccgctttgggaaccggtggttcaggtcagccttttcactttgtactcaa

SEQ ID NO: 454762 - DNA, 120 bp, Artificial Sequence
  ENSG00000156413_6 (sequence is synthesized)
agccacatcgcattgaagccacaggtggggcaaggtcatgcatgacctgagtctccaaatcccttcaccctgtttggttctgcaacggggattaggggagccccacgatttgttttcaaa

SEQ ID NO: 454763 - DNA, 120 bp, Artificial Sequence
  ENSG00000156413_7 (sequence is synthesized)
ggatgtccgggctccaggacaggatgccctgggtcacctgatgacaggtgtggtggttggaaagggcctggtttcagctccgggtacacttcctccttccttctgctgcgtggtgtggcc

SEQ ID NO: 454764 - DNA, 120 bp, Artificial Sequence
  ENSG00000156413_8 (sequence is synthesized)
tcttccacgtcctcagaatccagctgttactccgtccgcggcctctcagctctagggccctctgcacactggcccccccagatactctgacccatggatcccctgggcccggccaagcca

SEQ ID NO: 454765 - DNA, 120 bp, Artificial Sequence
  ENSG00000156413_9 (sequence is synthesized)
cagtggtcgtggcgctgctgtctgaccacgctgctgtttcagctgctgatggctgtgtgtttcttctcctatctgcgtgtgtctcaagacgatcccactgtgtaccctaatgggtcccgc

SEQ ID NO: 454766 - DNA, 120 bp, Artificial Sequence
  ENSG00000156413_10 (sequence is synthesized)
ttcccagacagcacagggacccccgcccactccatccccctgatcctgctgtggacgtggccttttaacaaacccatagctctgccccgctgctcagagatggtgcctggcacggctgac

SEQ ID NO: 454767 - DNA, 120 bp, Artificial Sequence
  ENSG00000156413_11 (sequence is synthesized)
cagctcccacgctccccgaggcggcaggggcagcgatggatctggttcagcatggagtccccaagccactgctggcagctgaaagccatggacggatacttcaatctcaccatgtcctac

SEQ ID NO: 454768 - DNA, 120 bp, Artificial Sequence
  ENSG00000156413_12 (sequence is synthesized)
cgcagcgactccgacatcttcacgccctacggctggctggagccgtggtccggccagcctgcccacccaccgctcaacctctcggccaagaccgagctggtggcctgggcagtgtccaac

SEQ ID NO: 454769 - DNA, 120 bp, Artificial Sequence
  ENSG00000156413_13 (sequence is synthesized)
tgggggccaaactccgccagggtgcgctactaccagagcctgcaggcccatctcaaggtggacgtgtacggacgctcccacaagcccctgccccagggaaccatgatggagacgctgtcc

SEQ ID NO: 454770 - DNA, 120 bp, Artificial Sequence
  ENSG00000156413_14 (sequence is synthesized)
cggtacaagttctatctggccttcgagaactccttgcaccccgactacatcaccgagaagctgtggaggaacgccctggaggcctgggccgtgcccgtggtgctgggccccagcagaagc

SEQ ID NO: 454771 - DNA, 120 bp, Artificial Sequence
  ENSG00000156413_15 (sequence is synthesized)
aactacgagaggttcctgccacccgacgccttcatccacgtggacgacttccagagccccaaggacctggcccggtacctgcaggagctggacaaggaccacgcccgctacctgagctac

SEQ ID NO: 454772 - DNA, 120 bp, Artificial Sequence
  ENSG00000156413_16 (sequence is synthesized)
tttcgctggcgggagacgctgcggcctcgctccttcagctgggcactcgctttctgcaaggcctgctggaaactgcaggaggaatccaggtaccagacacgcggcatagcggcttggttc

SEQ ID NO: 454773 - DNA, 120 bp, Artificial Sequence
  ENSG00000156413_17 (sequence is synthesized)
acctgagaggctggtgtggggcctgggctgccaggaacctcattttcctggggcctcacctgagtgggggcctcatctacctaaggactcgtttgcctgaagcttcacctgcctgaggac

SEQ ID NO: 454774 - DNA, 120 bp, Artificial Sequence
  ENSG00000156413_18 (sequence is synthesized)
tcacctgcctgggacggtcacctgttgcagcttcacctgcctggggattcacctacctgggtcctcactttcctggggcctcacctgctggagtcttcggtggccaggtatgtcccttac

SEQ ID NO: 454775 - DNA, 120 bp, Artificial Sequence
  ENSG00000156413_19 (sequence is synthesized)
ctgggatttcacatgctggcttccaggagcgtcccctgcggaagcctggcctgctggggatgtctcctggggactttgcctactggggacctcggctgttggggactttacctgctggga

SEQ ID NO: 454776 - DNA, 120 bp, Artificial Sequence
  ENSG00000156413_20 (sequence is synthesized)
cctgctcccagagaccttccacactgaatctcacctgctaggagcctcacctgctggggacctcaccctggagggcactgggccctgggaactggcacccatggggccccacccatgagt

SEQ ID NO: 454777 - DNA, 120 bp, Artificial Sequence
  ENSG00000156413_21 (sequence is synthesized)
gatggttctggctgatttgtttgtgatgttgttagccgcctgtgaggggtgcagagagataatcaccgcaccgtttccagatgtaatactgcaaagaaaaccgatgatgaggccgggtgc

SEQ ID NO: 454778 - DNA, 120 bp, Artificial Sequence
  ENSG00000156413_22 (sequence is synthesized)
agtgcatcctcttttagaagaaaggcctgtctccagatccccgagtccctctagcatctcccagaaggtgtcagacgcagcagtgtccagggagcggcagcagatactctgacccatgga

SEQ ID NO: 454779 - DNA, 120 bp, Artificial Sequence
  ENSG00000156413_23 (sequence is synthesized)
cctcctcccctcagcctcagtcctgtctgctgtaattcagagtgcgggtgggctggcacaagatccctgggggagggtctgcaggctgtgcagtggcctggcatttggccagcagcccct

SEQ ID NO: 454780 - DNA, 120 bp, Artificial Sequence
  ENSG00000156413_24 (sequence is synthesized)
agtcgcaggcaggggtctttctggatgcaccgaggtgggctgaggatatgggaggtctggctgatttgccaaaccaggaggaagtgggtgtctgtctgtctctcttgcagagctctgcgg

SEQ ID NO: 454781 - DNA, 120 bp, Artificial Sequence
  ENSG00000156413_25 (sequence is synthesized)
tagaatcccgtgccccccgaccccatcagcagcctacaccccttcatccttcctggccccggattttctctgcctctgccactcccggtggtaaaagagggcttagaatgcggtttgctt

SEQ ID NO: 454782 - DNA, 120 bp, Artificial Sequence
  ENSG00000156413_26 (sequence is synthesized)
tctggctttgtttttttgcatcctgatctttgtggcgtggatcgatcattttccagggaaagtaccttgggtgagatctctctcctggactcccgttccccgtttcccccaatctcccct

SEQ ID NO: 454783 - DNA, 120 bp, Artificial Sequence
  ENSG00000156413_27 (sequence is synthesized)
cctgaaggtcaccggcaaagacttcactgtctcctaggaagaggtcgccataaacccaggggccacatgataatatattaatattaaatgtatctctaaacattaacctttcactggcag

SEQ ID NO: 454784 - DNA, 120 bp, Artificial Sequence
  ENSG00000156413_28 (sequence is synthesized)
cccaagagcccgacagcacaaaggaatacttggttaaaattcaacctccctcccagtccgggctctgagtgtccctcgagggctgtctcttgagtctttttccagaactttggtatgcgc

SEQ ID NO: 454785 - DNA, 120 bp, Artificial Sequence
  ENSG00000156413_29 (sequence is synthesized)
aaaggtggccccggtttcccgccacctcctccacagcaccatctctttgaaggtttcctcctgtttttgttttttttgttgttgctgttgagacagcgtctcactctgctgcccaggctg

SEQ ID NO: 454786 - DNA, 120 bp, Artificial Sequence
  ENSG00000156413_30 (sequence is synthesized)
aggacgggccaggctcagcaagttccaccaaagcctgcttctctcctgggggttccccatgtctctgggtggccccactgccctcctggtcagcatattgaggaagagtctggggacaca

SEQ ID NO: 454787 - DNA, 120 bp, Artificial Sequence
  ENSG00000156414_0 (sequence is synthesized)
gttcccgccgcggagacccggcagttgggggatgccgacgcctgggccttgaggatgctgcggaagctcaccatcgagcagatcaacgactggttcaccatcggcaagacggtgaccaat

SEQ ID NO: 454788 - DNA, 120 bp, Artificial Sequence
  ENSG00000156414_1 (sequence is synthesized)
gttcaccatcggcaagacggtgaccaatgtggagctgctgggcgcgccgcccgccttcccggcaggggcggccagggaggaggtgcagcgccaggacgtggcccccggcgctggtcccgc

SEQ ID NO: 454789 - DNA, 120 bp, Artificial Sequence
  ENSG00000156414_2 (sequence is synthesized)
ccggcccggccggccgctgcgttcgaaaggtcactcagccaaaggagctcagaagtagagtatattaacaaatacagacagctcgaagcacaagagcttgatgtgtgtcgcagtgtccaa

SEQ ID NO: 454790 - DNA, 120 bp, Artificial Sequence
  ENSG00000156414_3 (sequence is synthesized)
ccaaccagtgggccaggtccaaggccatctttggctaaattaagcagtgtgacatgcatcccagggacaacttataaatatcctgatttgcctataagtcgatacaaggaagaggttgtg

SEQ ID NO: 454791 - DNA, 120 bp, Artificial Sequence
  ENSG00000156414_4 (sequence is synthesized)
tctttgatagaaagtaattccgtggtgattatccatggggccacgggaagcggtaaaagcactcagctcccgcagtatatcttggaccactacgttcagcgctccgcctactgcagcatt

SEQ ID NO: 454792 - DNA, 120 bp, Artificial Sequence
  ENSG00000156414_5 (sequence is synthesized)
gtggtcacccagccccggaagataggggcaagcagcatcgccaggtggatcagtaaagagcgtgcctggaccctgggaggtgtggtgggctaccaggtagggctagagaaaatagcaaca

SEQ ID NO: 454793 - DNA, 120 bp, Artificial Sequence
  ENSG00000156414_6 (sequence is synthesized)
gaggacaccaggctaatttatatgacaactggagtcctgcttcagaaaatagttagtgccaagagtttgatggaattcacacatatcatcattgatgaagtacacgaacgaacagaagaa

SEQ ID NO: 454794 - DNA, 120 bp, Artificial Sequence
  ENSG00000156414_7 (sequence is synthesized)
atggatttcctgctattggtagtccgcaaactcttaagaacaaattcacgttttgtgaaggtggtcctgatgtcggctaccatcagctgtaaagagtttgcagactactttgctgttcct

SEQ ID NO: 454795 - DNA, 120 bp, Artificial Sequence
  ENSG00000156414_8 (sequence is synthesized)
gttcaaaacaagatgaatcctgcatatatttttgaagtggaaggcaagccccattcagttgaagagtattatcttaatgatttggagcacattcatcatagcaagctctctcctcatctc

SEQ ID NO: 454796 - DNA, 120 bp, Artificial Sequence
  ENSG00000156414_9 (sequence is synthesized)
ctggaggaaccggtgataactaaggatatatatgaagttgctgtctctctcattcagatgtttgatgacttggatatgaaggagagtgggaacaaggcttggtcgggggcccagtttgtg

SEQ ID NO: 454797 - DNA, 120 bp, Artificial Sequence
  ENSG00000156414_10 (sequence is synthesized)
ttggagcgaagcagtgtgttggtgtttttgccaggtctgggtgaaataaattatatgcatgaacttctcacaagcctggttcataaaaggttgcaggtctatccactccattcaagtgtg

SEQ ID NO: 454798 - DNA, 120 bp, Artificial Sequence
  ENSG00000156414_11 (sequence is synthesized)
gctttagaagaacagaataatgtctttttaagtccagtccctgggtacagaaagattattctgtccaccaatattgcagagagttctgtcacagttccagatgtcaaatatgttatagat

SEQ ID NO: 454799 - DNA, 120 bp, Artificial Sequence
  ENSG00000156414_12 (sequence is synthesized)
ttttgtttgactagaactttggtctgtgatgaagatacaaattatcagagtctgcgattgagttgggcttctaaaaccagctgtaatcagagaaaaggccgtgctggacgagtgtctaga

SEQ ID NO: 454800 - DNA, 120 bp, Artificial Sequence
  ENSG00000156414_13 (sequence is synthesized)
gggtactgttaccggctggtacacaaggatttctgggacaactccatccctgatcatgttgttcctgagatgttgcgttgtccattaggaagcacgatcttgaaagtgaaattacttgac

SEQ ID NO: 454801 - DNA, 120 bp, Artificial Sequence
  ENSG00000156414_14 (sequence is synthesized)
atgggtgagccgagagctctgctggccactgccctttccccgcctggtctgagtgacattgagcgcaccatccttctactaaaggaggttggagcacttgcagtgagtgggcagagagaa

SEQ ID NO: 454802 - DNA, 120 bp, Artificial Sequence
  ENSG00000156414_15 (sequence is synthesized)
gatgaaaacccccatgatggtgaattgaccttcttaggaagagttttagcccaacttcctgtaaatcagcaacttggtaaactcatagtccttggacatgtatttggatgtctagatgaa

SEQ ID NO: 454803 - DNA, 120 bp, Artificial Sequence
  ENSG00000156414_16 (sequence is synthesized)
tgtcttattatagcggcagctctttctttgaagaatttttttgcaatgcctttccggcagcatctcgatggatataggaacaaagtgaatttctctggcagtagcaagagtgactgtatt

SEQ ID NO: 454804 - DNA, 120 bp, Artificial Sequence
  ENSG00000156414_17 (sequence is synthesized)
gcacttgttgaggcatttaaaacatggaaggcttgcagacagacaggggagctgcggtacccgaaggatgaacttaattggggacggttaaattacattcaaatcaagagaattagagag

SEQ ID NO: 454805 - DNA, 120 bp, Artificial Sequence
  ENSG00000156414_18 (sequence is synthesized)
gtggctgaattatatgaagaattgaagactagaatctcacagttcaacatgcatgttgattctcggcgacctgtcatggaccaagagtatatatataagcagcgattcatcctacaggtt

SEQ ID NO: 454806 - DNA, 120 bp, Artificial Sequence
  ENSG00000156414_19 (sequence is synthesized)
aaacacattcctccctatggatttctttactataaacaactacagtctctctttagacagtgtggtcaagtcaaatccattgtatttgatggtgcaaaagcctttgtggaattctcacga

SEQ ID NO: 454807 - DNA, 120 bp, Artificial Sequence
  ENSG00000156414_20 (sequence is synthesized)
aatccaacagagagatttaaaacccttcctgcagtatatatggcaattaagatgtctcaactaaaagtttcacttgaactcagcgttcattctgcagaggaaattgaagggaaggtgcaa

SEQ ID NO: 454808 - DNA, 120 bp, Artificial Sequence
  ENSG00000156414_21 (sequence is synthesized)
ggcatgaacgtctcaaagctcaggaacacaagggtgaatgtggacttccagaagcagacggtagatcctatgcaagtctcctttaacacatcagacaggtcccagacagttacagatctc

SEQ ID NO: 454809 - DNA, 120 bp, Artificial Sequence
  ENSG00000156414_22 (sequence is synthesized)
cttctaactattgatgtcacagaggtggttgaagtgggacacttttggggatacaggattgatgaaaacaactcagagattctgaaaaagcttactgctgaaatcaaccaactgacgctg

SEQ ID NO: 454810 - DNA, 120 bp, Artificial Sequence
  ENSG00000156414_23 (sequence is synthesized)
gtgcccttgcccactcacccacatccagacttggtctgtctggcaccttttgctgattttgataaacaacgctactttagagctcaagtcctttatgtttctggaaattctgctgaggta

SEQ ID NO: 454811 - DNA, 120 bp, Artificial Sequence
  ENSG00000156414_24 (sequence is synthesized)
ttctttgtagattatggcaataagtctcatgtagatctacatcttttgatggagattccctgtcaatttcttgaacttcctttccaggctttggaatttaagatttgcaaaatgagacca

SEQ ID NO: 454812 - DNA, 120 bp, Artificial Sequence
  ENSG00000156414_25 (sequence is synthesized)
tcagcaaagtctcttgtttgtggcaagcactggagtgacggggccagccagtggttcgcctctctggtgagcggctgcaccctccttgtgaaggtcttctctgtggtgcacagcgtcctg

SEQ ID NO: 454813 - DNA, 120 bp, Artificial Sequence
  ENSG00000156414_26 (sequence is synthesized)
cacgtggatgtgtaccagtactcaggggtccaggatgccatcaacataagagacgtcctcatccagcagggctatgccgagctcacggaggagtcctacgagtccaagcaaagccatgaa

SEQ ID NO: 454814 - DNA, 120 bp, Artificial Sequence
  ENSG00000156414_27 (sequence is synthesized)
gttctcaagggcctcttttccaagtcagtagaaaacatgacagatggctctgtgccctttcccatgaaagacgacgagaaatatctcatccggattttgttagagagcttttctaccaat

SEQ ID NO: 454815 - DNA, 120 bp, Artificial Sequence
  ENSG00000156414_28 (sequence is synthesized)
aaactgggtactccaaactgtaaggcagaacttcacgggccttttaacccttatgaactaaagtgccatagtttgaccagaatatccaaattcaggtgtgtttggattgagaaggagagc

SEQ ID NO: 454816 - DNA, 120 bp, Artificial Sequence
  ENSG00000156414_29 (sequence is synthesized)
atcaactctgtcattatcagtgacgcccctgaagaccttcaccagagaatgctggttgcagcttccctttccatcaatgcgactggatctacgatgctgctgagagaaacctctctgatg

SEQ ID NO: 454817 - DNA, 120 bp, Artificial Sequence
  ENSG00000156414_30 (sequence is synthesized)
cctcatatccctggcctcccggctctcctcagcatgttattcgcaccggtgatagagttaaggattgatcagaatggcaagtactatactggagtcctttgtggtttggggtggaatcca

SEQ ID NO: 454818 - DNA, 120 bp, Artificial Sequence
  ENSG00000156414_31 (sequence is synthesized)
gctacaggggcttccatactgcccgagcacgacatggagcttgcgtttgacgttcaattcagcgtggaggatgtcgtcgaggttaatattctcagggctgctattaacaagctagtctgt

SEQ ID NO: 454819 - DNA, 120 bp, Artificial Sequence
  ENSG00000156414_32 (sequence is synthesized)
gatggaccaaatggatgcaagtgtcttgggccagagagagttgcgcagcttcaagacattgcccgtcagaagcttttaggtttgttctgtcagtcaaaaccaagggagaagattgttccc

SEQ ID NO: 454820 - DNA, 120 bp, Artificial Sequence
  ENSG00000156414_33 (sequence is synthesized)
aagtggcatgaaaagccctacgagtggaatcaggttgatccaaagctggtcatggagcaggccgaccgtgagagcagcagagggaagaacacctttctctaccagctccacaaactggtt

SEQ ID NO: 454821 - DNA, 120 bp, Artificial Sequence
  ENSG00000156414_34 (sequence is synthesized)
gtgctcggcacctgagcatgtccacaggtggcctccagcacacccctcaggaagctgtggaggctggattccaggctccctccgcagactgactttcctctgtgtctgggtgttacagtc

SEQ ID NO: 454822 - DNA, 120 bp, Artificial Sequence
  ENSG00000156414_35 (sequence is synthesized)
tgtgcccactgcatcctaaaggccttttctttcttcttttctctttgggtgatagtcagagagtggtgtttttgttcaggtgggaaggattggaaactctagtcttttctagaaacagaa

SEQ ID NO: 454823 - DNA, 120 bp, Artificial Sequence
  ENSG00000156414_36 (sequence is synthesized)
aatcactgtattaaatattttggaaagattgttctgaaagaagtctgtttggataaagagctgtattttgctttaaatttattaaggtaaatataagtagttaatcttagatgtaaggtt

SEQ ID NO: 454824 - DNA, 120 bp, Artificial Sequence
  ENSG00000156414_37 (sequence is synthesized)
ccagaatgtgcttacatattctgttctgttacagtgatttaaaccagtagtataggaaaaaacttaaaaaaacaaaaaaaccatgtagtattttctgatttttttttccatgagggaaaa

SEQ ID NO: 454825 - DNA, 120 bp, Artificial Sequence
  ENSG00000156414_38 (sequence is synthesized)
tatctaatttttataagactaagttgagttatacttcttggttcacattttggaaatcagagattacagattacatggccatagcttatctgtgttaaaacaataaaagcattaaatgaa

SEQ ID NO: 454826 - DNA, 120 bp, Artificial Sequence
  ENSG00000156414_39 (sequence is synthesized)
tttctgcttttgaatatgccatagattaaaatattttctgatcataactgcataaatgttgacctttaaacagtttattctagttccaattctgtgggaagcatataggatttaaatctt

SEQ ID NO: 454827 - DNA, 120 bp, Artificial Sequence
  ENSG00000156414_40 (sequence is synthesized)
ttctttcttctctcctctccttctctcctcctctttccctctgaagcactggttatgtgaatcggctaactgatttagttatgttattatttctaatctcaggcttgtttcttttcagcg

SEQ ID NO: 454828 - DNA, 120 bp, Artificial Sequence
  ENSG00000156414_41 (sequence is synthesized)
gtgccctctcgcggggctccagggacccctgaccgtccagggcgagtggtcactacacaacccgacgcgcggcccagagcggtgcctgtaaggaagctgagctagagattttattttgtc

SEQ ID NO: 454829 - DNA, 120 bp, Artificial Sequence
  ENSG00000156414_42 (sequence is synthesized)
ctgtctcctgagattatcagattgaagtagagacccaaataattctctgattacagtatttcttctactgctgtgtagatagagaacataaatatttgtaagcaaaggtcactcagccaa

SEQ ID NO: 454830 - DNA, 120 bp, Artificial Sequence
  ENSG00000156427_0 (sequence is synthesized)
gggaggcggcgatgcgcacggccggagagacgcggaggaggagacatgagccggcgggcgcccagacggagcggccgtgacgctttcgcgctgcagccgcgcgccccgaccccggagcgc

SEQ ID NO: 454831 - DNA, 120 bp, Artificial Sequence
  ENSG00000156427_1 (sequence is synthesized)
tgacccctggccccacgcagctccgcgcccgggccggagagcgcaactcggcttccagacccgccgcgcatgctgtccccggactgagccgggcagccagcctcccacggacgcccggac

SEQ ID NO: 454832 - DNA, 80 bp, Artificial Sequence
  ENSG00000156427_2 (sequence is synthesized)
ggacggccggccggccagcagtgagcgagcttccccgcaccggccaggcgcctcctgcacagcggctgccgccccgcagc

SEQ ID NO: 454833 - DNA, 80 bp, Artificial Sequence
  ENSG00000156427_3 (sequence is synthesized)
ggggcgctgatgccgcagggcgcgccgcggagcgccccggagcagcagagtctgcagcagcagcagccggcgaggaggga

SEQ ID NO: 454834 - DNA, 120 bp, Artificial Sequence
  ENSG00000156427_4 (sequence is synthesized)
cgcccggtcccggccgcgcggagcggacatgtgcaggctgggctaggagccgccgcctccctcccgcccagcgatgtattcagcgccctccgcctgcacttgcctgtgtttacacttcct

SEQ ID NO: 454835 - DNA, 120 bp, Artificial Sequence
  ENSG00000156427_5 (sequence is synthesized)
gctgctgtgcttccaggtacaggtgctggttgccgaggagaacgtggacttccgcatccacgtggagaaccagacgcgggctcgggacgatgtgagccgtaagcagctgcggctgtacca

SEQ ID NO: 454836 - DNA, 120 bp, Artificial Sequence
  ENSG00000156427_6 (sequence is synthesized)
gctctacagccggaccagtgggaaacacatccaggtcctgggccgcaggatcagtgcccgcggcgaggatggggacaagtatgcccagctcctagtggagacagacaccttcggtagtca

SEQ ID NO: 454837 - DNA, 120 bp, Artificial Sequence
  ENSG00000156427_7 (sequence is synthesized)
agtccggatcaagggcaaggagacggaattctacctgtgcatgaaccgcaaaggcaagctcgtggggaagcccgatggcaccagcaaggagtgtgtgttcatcgagaaggttctggagaa

SEQ ID NO: 454838 - DNA, 120 bp, Artificial Sequence
  ENSG00000156427_8 (sequence is synthesized)
ccccaagacccgggagaaccagcaggacgtgcatttcatgaagcgctaccccaaggggcagccggagcttcagaagcccttcaagtacacgacggtgaccaagaggtcccgtcggatccg

SEQ ID NO: 454839 - DNA, 120 bp, Artificial Sequence
  ENSG00000156427_9 (sequence is synthesized)
gcccacacaccctgcctaggccaccccgccgcggcccctcaggtcgccctggccacactcacactcccagaaaactgcatcagaggaatatttttacatgaaaaataaggaagaagctct

SEQ ID NO: 454840 - DNA, 120 bp, Artificial Sequence
  ENSG00000156427_10 (sequence is synthesized)
atttttgtacattgtgtttaaaagaagacaaaaactgaaccaaaactcttggggggaggggtgataaggattttattgttgacttgaaacccccgatgacaaaagactcacgcaaaggga

SEQ ID NO: 454841 - DNA, 120 bp, Artificial Sequence
  ENSG00000156427_11 (sequence is synthesized)
ctgtagtcaacccacaggtgcttgtctctctctaggaacagacaactctaaactcgtccccagaggaggacttgaatgaggaaaccaacactttgagaaaccaaagtcctttttcccaaa

SEQ ID NO: 454842 - DNA, 120 bp, Artificial Sequence
  ENSG00000156427_12 (sequence is synthesized)
aacaaaaaaaaagaaaaacaaagagaaagtagtactccgcccaccaacaaactccccctaactttcccaatcctctgttcctgccccaaactccaacaaaaatcgctctctggtttgcag

SEQ ID NO: 454843 - DNA, 120 bp, Artificial Sequence
  ENSG00000156427_13 (sequence is synthesized)
caaaaatcgctctctggtttgcagtcatttatttattgtccgctgcaagctgccccgagacaccgcgcagggaaggcgtgcccctgggaattctccgcgcctcgacctcccgacgacaga

SEQ ID NO: 454844 - DNA, 120 bp, Artificial Sequence
  ENSG00000156427_14 (sequence is synthesized)
cgcctcgtccaatcatggtgaccctgccttgctcgcagttctggaggatgctgctatcgaccttccgtgactcacgtgacctagtacaccaatgataagggaatattttaaaaccagcta

SEQ ID NO: 454845 - DNA, 120 bp, Artificial Sequence
  ENSG00000156427_15 (sequence is synthesized)
tattatatatattatatatatataagctatttatttcacctctctgtatattgcagtttcatgaaccaagtattactgcctcaacaattaaaaacaacagacaaattatttaaaaaacca

SEQ ID NO: 454846 - DNA, 80 bp, Artificial Sequence
  ENSG00000156453_0 (sequence is synthesized)
acacactcggggagcgggagcgcggcgcggacgcaaagccgccgggctgctgcgcccagagccagccggagccggagccg

SEQ ID NO: 454847 - DNA, 120 bp, Artificial Sequence
  ENSG00000156453_1 (sequence is synthesized)
ggcggctcatggacagcggggcgggcggccggcgctgcccggaggcggccctcctgattctggggcctcccaggatggagcacctgaggcacagcccaggccctggggggcaacggctac

SEQ ID NO: 454848 - DNA, 120 bp, Artificial Sequence
  ENSG00000156453_2 (sequence is synthesized)
ccctggggggcaacggctactgctgccctccatgctgctagcactgctgctcctgctggctccatccccaggccacgccactcgggtagtgtacaaggtgccggaggaacagccacccaa

SEQ ID NO: 454849 - DNA, 120 bp, Artificial Sequence
  ENSG00000156453_3 (sequence is synthesized)
caccctcattgggagcctcgcagccgactatggttttccagatgtggggcacctgtacaagctagaggtgggtgccccgtaccttcgcgtggatggcaagacaggtgacattttcaccac

SEQ ID NO: 454850 - DNA, 120 bp, Artificial Sequence
  ENSG00000156453_4 (sequence is synthesized)
cgagacctccatcgaccgtgaggggctccgtgaatgccagaaccagctccctggtgatccctgcatcctggagtttgaggtatctatcacagacctcgtgcagaatggcagcccccggct

SEQ ID NO: 454851 - DNA, 120 bp, Artificial Sequence
  ENSG00000156453_5 (sequence is synthesized)
gctagagggccagatagaagtacaagacatcaatgacaacacacccaacttcgcctcaccagtcatcactctggccatccctgagaacaccaacatcggctcactcttccccatcccgct

SEQ ID NO: 454852 - DNA, 120 bp, Artificial Sequence
  ENSG00000156453_6 (sequence is synthesized)
ggcttcagaccgtgatgctggtcccaacggtgtggcatcctatgagctgcaggctgggcctgaggcccaggagctatttgggctgcaggtggcagaggaccaggaggagaagcaaccaca

SEQ ID NO: 454853 - DNA, 120 bp, Artificial Sequence
  ENSG00000156453_7 (sequence is synthesized)
gctcattgtgatgggcaacctggaccgtgagcgctgggactcctatgacctcaccatcaaggtgcaggatggcggcagccccccacgcgccagcagtgccctgctgcgtgtcaccgtgct

SEQ ID NO: 454854 - DNA, 120 bp, Artificial Sequence
  ENSG00000156453_8 (sequence is synthesized)
tgacaccaatgacaacgcccccaagtttgagcggccctcctatgaggccgaactatctgagaatagccccataggccactcggtcatccaggtgaaggccaatgactcagaccaaggtgc

SEQ ID NO: 454855 - DNA, 120 bp, Artificial Sequence
  ENSG00000156453_9 (sequence is synthesized)
caatgcagaaatcgaatacacattccaccaggcgcccgaagttgtgaggcgtcttcttcgactggacaggaacactggacttatcactgttcagggcccggtggaccgtgaggacctaag

SEQ ID NO: 454856 - DNA, 120 bp, Artificial Sequence
  ENSG00000156453_10 (sequence is synthesized)
caccctgcgcttctcagtgcttgctaaggaccgaggcaccaaccccaagagtgcccgtgcccaggtggttgtgaccgtgaaggacatgaatgacaatgcccccaccattgagatccgggg

SEQ ID NO: 454857 - DNA, 120 bp, Artificial Sequence
  ENSG00000156453_11 (sequence is synthesized)
catagggctagtgactcatcaagatgggatggctaacatctcagaggatgtggcagaggagacagctgtggccctggtgcaggtgtctgaccgagatgagggagagaatgcagctgtcac

SEQ ID NO: 454858 - DNA, 120 bp, Artificial Sequence
  ENSG00000156453_12 (sequence is synthesized)
ctgtgtggtggcaggtgatgtgcccttccagctgcgccaggccagtgagacaggcagtgacagcaagaagaagtatttcctgcagactaccaccccgctagactacgagaaggtcaaaga

SEQ ID NO: 454859 - DNA, 120 bp, Artificial Sequence
  ENSG00000156453_13 (sequence is synthesized)
ctacaccattgagattgtggctgtggactctggcaaccccccactctccagcactaactccctcaaggtgcaggtggtggacgtcaatgacaacgcacctgtcttcactcagagtgtcac

SEQ ID NO: 454860 - DNA, 120 bp, Artificial Sequence
  ENSG00000156453_14 (sequence is synthesized)
tgaggtcgccttcccggaaaacaacaagcctggtgaagtgattgctgagatcactgccagtgatgctgactctggctctaatgctgagctggtttactctctggagcctgagccggctgc

SEQ ID NO: 454861 - DNA, 120 bp, Artificial Sequence
  ENSG00000156453_15 (sequence is synthesized)
taagggcctcttcaccatctcacccgagactggagagatccaggtgaagacatctctggatcgggaacagcgggagagctatgagttgaaggtggtggcagctgaccggggcagtcctag

SEQ ID NO: 454862 - DNA, 120 bp, Artificial Sequence
  ENSG00000156453_16 (sequence is synthesized)
cctccagggcacagccactgtccttgtcaatgtgctggactgcaatgacaatgaccccaaatttatgctgagtggctacaacttctcagtgatggagaacatgccagcactgagtccagt

SEQ ID NO: 454863 - DNA, 120 bp, Artificial Sequence
  ENSG00000156453_17 (sequence is synthesized)
gggcatggtgactgtcattgatggagacaagggggagaatgcccaggtgcagctctcagtggagcaggacaacggtgactttgttatccagaatggcacaggcaccatcctatccagcct

SEQ ID NO: 454864 - DNA, 120 bp, Artificial Sequence
  ENSG00000156453_18 (sequence is synthesized)
gagctttgatcgagagcaacaaagcacctacaccttccagctgaaggcagtggatggtggcgtcccacctcgctcagcttacgttggtgtcaccatcaatgtgctggacgagaatgacaa

SEQ ID NO: 454865 - DNA, 120 bp, Artificial Sequence
  ENSG00000156453_19 (sequence is synthesized)
atgctgagctgatctacagcattgcaggtggcaacccttatggactcttccagattgggtcacattcaggtgccatcaccctggagaaggagattgagcggcgccaccatgggctacacc

SEQ ID NO: 454866 - DNA, 120 bp, Artificial Sequence
  ENSG00000156453_20 (sequence is synthesized)
gcctggtggtgaaggtcagtgaccgcggcaagcccccacgctatggcacagccttggtccatctttatgtcaatgagactctggccaaccgcacgctgctggagaccctcctgggccaca

SEQ ID NO: 454867 - DNA, 120 bp, Artificial Sequence
  ENSG00000156453_21 (sequence is synthesized)
gcctggacacgccgctggatattgacattgctggggatccagaatatgagcgctccaagcagcgtggcaacattctctttggtgtggtggctggtgtggtggccgtggccttgctcatcg

SEQ ID NO: 454868 - DNA, 120 bp, Artificial Sequence
  ENSG00000156453_22 (sequence is synthesized)
ccctggcggttcttgtgcgctactgcagacagcgggaggccaaaagtggttaccaggctggtaagaaggagaccaaggacctgtatgcccccaagcccagtggcaaggcctccaagggaa

SEQ ID NO: 454869 - DNA, 120 bp, Artificial Sequence
  ENSG00000156453_23 (sequence is synthesized)
acaaaagcaaaggcaagaagagcaagtccccaaagcccgtgaagccagtggaggacgaggatgaggccgggctgcagaagtccctcaagttcaacctgatgagcgatgcccctggggaca

SEQ ID NO: 454870 - DNA, 120 bp, Artificial Sequence
  ENSG00000156453_24 (sequence is synthesized)
gtccccgcatccacctgcccctcaactacccaccaggcagccctgacctgggccgccactatcgctctaactccccactgccttccatccagctgcagccccagtcaccctcagcctcca

SEQ ID NO: 454871 - DNA, 120 bp, Artificial Sequence
  ENSG00000156453_25 (sequence is synthesized)
agaagcaccaggtggtacaggacctgccacctgcaaacacattcgtgggcaccggggacaccacgtccacgggctctgagcagtactccgactacagctaccgcaccaacccccccaaat

SEQ ID NO: 454872 - DNA, 120 bp, Artificial Sequence
  ENSG00000156453_26 (sequence is synthesized)
accccagcaagcagttacctcaccgccgcgtcaccttctcggccaccagccaggcccaggagctgcaggacccatcccagcacagttactatgacagtggcctggaggagtctgagacgc

SEQ ID NO: 454873 - DNA, 120 bp, Artificial Sequence
  ENSG00000156453_27 (sequence is synthesized)
cgtccagcaagtcatcctcagggcctcgactcggtcccctggccctgcctgaggatcactatgagcgcaccacccctgatggcagcataggagagatggagcaccccgagaatgaccttc

SEQ ID NO: 454874 - DNA, 120 bp, Artificial Sequence
  ENSG00000156453_28 (sequence is synthesized)
gccctttgcctgatgtcgccatgacaggcacatgtacccgggagtgcagtgagtttggccactctgacacatgctggatgcctggccagtcatctcccagccgccggaccaagagcagcg

SEQ ID NO: 454875 - DNA, 120 bp, Artificial Sequence
  ENSG00000156453_29 (sequence is synthesized)
ccctcaaactctccaccttcgtgccttaccaggaccgaggagggcaggagcctgcgggcgccggcagccccagccccccggaagaccggaacaccaaaacggcccccgtgcgcctcctgc

SEQ ID NO: 454876 - DNA, 120 bp, Artificial Sequence
  ENSG00000156453_30 (sequence is synthesized)
cctcctacagtgccttctcccacagtagccatgattcctgcaaggactcggccaccttggaggaaatccccctgacccagacctcggacttcccacccgcagccacaccggcatctgccc

SEQ ID NO: 454877 - DNA, 120 bp, Artificial Sequence
  ENSG00000156453_31 (sequence is synthesized)
agacggccaagcgcgagatctacctgtgagccccctactggccggccggcccccctcccccagccgccggccagctcccaaatggcccattccagggcctcactctccaccccttcagcg

SEQ ID NO: 454878 - DNA, 120 bp, Artificial Sequence
  ENSG00000156453_32 (sequence is synthesized)
tggacttcctggccagggccccaagtgggggtatcactgacctcatgaccacgctggcccttctcccatgcagggtccaggtcctctcccctcatttccatctcccagcccccaggggcc

SEQ ID NO: 454879 - DNA, 120 bp, Artificial Sequence
  ENSG00000156453_33 (sequence is synthesized)
ccttcccctttatggggcttcccccatctgatgcccaagagggctcctctgcaatgactgggctccttcccttgacttccagggagcaccccctcgatttgggcagatggtggagtcaag

SEQ ID NO: 454880 - DNA, 120 bp, Artificial Sequence
  ENSG00000156453_34 (sequence is synthesized)
ggtgggcagcgtacttctaactcattgtttccctcatggccgaccagggcggggatagcatgcccaattttagccctgaagcagggctgaactggggagcccctttccctgggagctccc

SEQ ID NO: 454881 - DNA, 120 bp, Artificial Sequence
  ENSG00000156453_35 (sequence is synthesized)
agaggaaactcttgaccaccagtggctccctgaagggcttttgttaccaaaggtggggtagggacgggggtgggagtggagcggaggccttgttttcccgtgctgctcctggactggccc

SEQ ID NO: 454882 - DNA, 120 bp, Artificial Sequence
  ENSG00000156453_36 (sequence is synthesized)
acctgcctgccacatgcccacgcctagtcccatctgggcccccattccctgctggtcatgcagtgtctgtatataaggaccttggaatgacgtccccatttctgcctgatttgcaacttt

SEQ ID NO: 454883 - DNA, 120 bp, Artificial Sequence
  ENSG00000156453_37 (sequence is synthesized)
tcttgttgatgtcgtgttgtcttgggggacccctctggggggggacctgccctgtgccccctcctccctgccgcagtgccccccaacccaggcctctattgttccatgttgtaaataccc

SEQ ID NO: 454884 - DNA, 120 bp, Artificial Sequence
  ENSG00000156453_38 (sequence is synthesized)
ctggggccatggtgggatgggggtgcaggccagggaaacaacgggtgggtgggggtggggacgggggtaacatttgcctatcagcagagctgggcttttatttaatttttcttaaaaata

SEQ ID NO: 454885 - DNA, 120 bp, Artificial Sequence
  ENSG00000156453_39 (sequence is synthesized)
tgcctgcccgtgttgggggccagcctgagccagcagtgggaggtggggccttagtgcctcaccgggcacacggattaggctgagtgaagattaagggagggtgtgctctgtggtctcctc

SEQ ID NO: 454886 - DNA, 120 bp, Artificial Sequence
  ENSG00000156453_40 (sequence is synthesized)
cctgccctctccccactggggagagacctgtgatttgccaagtccctggaccctggaccagctactgggccttatgggttgggggtggtaggcaggtgagcgtaagtggggagggaaatg

SEQ ID NO: 454887 - DNA, 120 bp, Artificial Sequence
  ENSG00000156453_41 (sequence is synthesized)
ggtaagaagtctactccaaacctaggtctctatgtcagaccagacctaggtgcttctctaggagggaaacagggagacctggggtcctgtggataactgagtggggagtctgccagggga

SEQ ID NO: 454888 - DNA, 120 bp, Artificial Sequence
  ENSG00000156453_42 (sequence is synthesized)
gggcaccttcccattgtgccttctgtgtgtattgtgcattaacctcttcctcaccactaggcttctggggctgggtcccacatgcccttgaccctgacaataaagttctctatttttgga

SEQ ID NO: 454889 - DNA, 120 bp, Artificial Sequence
  ENSG00000156453_43 (sequence is synthesized)
gctgctgaaacaggtttccccggtttgacagagcggtggctggggcccggcctggagggcttctctgacccacaaccctacctgacttctttcaaaagaaatcccccaacctggggcctt

SEQ ID NO: 454890 - DNA, 120 bp, Artificial Sequence
  ENSG00000156453_44 (sequence is synthesized)
ggcactgcgagggcgtgtgacacaggccgtgacactgcgcggcctcgcggggcagggacccggtgactgtataatccctcctgattctggggcctcccaggatggagcacctgaggcaca

SEQ ID NO: 454891 - DNA, 120 bp, Artificial Sequence
  ENSG00000156453_45 (sequence is synthesized)
ctgagtttctggaatcggggttctgtgctgggactgactgctcttgtggagaatcgtgtgtcagtgggagaggccctcctgattctggggcctcccaggatggagcacctgaggcacagc

SEQ ID NO: 454892 - DNA, 120 bp, Artificial Sequence
  ENSG00000156463_0 (sequence is synthesized)
caaagcggttggcagcagcggcgcttggaggaaaggaagccggttggagggcgcagcgcacccctgctgcgcggaggagggggctgagctgaactcagcagaagttacatgcacaaggca

SEQ ID NO: 454893 - DNA, 120 bp, Artificial Sequence
  ENSG00000156463_1 (sequence is synthesized)
aaaattctgacgttctcaagagaccagctctgcccccgtggctcaactgaccctaccatgtggacgctgctcctccaggtgggaactggagttttgaaataaaatggatgatttgacgtt

SEQ ID NO: 454894 - DNA, 120 bp, Artificial Sequence
  ENSG00000156463_2 (sequence is synthesized)
acttgatcttctggagtgccctgtgtgctttgagaagctcgatgtcacagccaaagtcctcccttgccagcacaccttctgcaaaccatgtctacagagggttttcaaggcccacaaaga

SEQ ID NO: 454895 - DNA, 120 bp, Artificial Sequence
  ENSG00000156463_3 (sequence is synthesized)
gctgcggtgccccgaatgcaggacgcctgtgttttccaacattgaggcgctgccggccaacctgctgctcgtgcgccttctggatggagtgcgctcagggcagagctccgggagaggggg

SEQ ID NO: 454896 - DNA, 120 bp, Artificial Sequence
  ENSG00000156463_4 (sequence is synthesized)
ctccttccgcaggcctggcacgatgaccttgcaggatggcaggaaaagcaggaccaaccccagacgtctgcaggccagtcctttccggctagtgcctaatgtcagaatccacatggatgg

SEQ ID NO: 454897 - DNA, 120 bp, Artificial Sequence
  ENSG00000156463_5 (sequence is synthesized)
ggtgcctcgagcaaaggccttatgcaactacagagggcagaatcccggtgacctaaggtttaataagggagatatcatccttctccggagacagcttgatgagaattggtaccaggggga

SEQ ID NO: 454898 - DNA, 120 bp, Artificial Sequence
  ENSG00000156463_6 (sequence is synthesized)
aatcaatggcatcagcgggaacttcccagccagctccgtggaagtcatcaagcagctgccccagccgcccccgctctgcagggccctctacaacttcgacctacgaggcaaggacaagag

SEQ ID NO: 454899 - DNA, 120 bp, Artificial Sequence
  ENSG00000156463_7 (sequence is synthesized)
tgagaaccaggattgcctgaccttcctcaaggacgatatcatcactgtgatcagccgagtggatgagaactgggcagaaggcaagttaggagataaagtaggcatcttccctatcttgtt

SEQ ID NO: 454900 - DNA, 120 bp, Artificial Sequence
  ENSG00000156463_8 (sequence is synthesized)
tgtagagccaaacctcaccgcaagacaccttttagagaagaacaaaggtcgccagtcatcccgcacaaaaaacctgtccctggtgtcctcgtcctccagaggcaacacgtctaccctccg

SEQ ID NO: 454901 - DNA, 120 bp, Artificial Sequence
  ENSG00000156463_9 (sequence is synthesized)
taggggcccagggtccaggaggaaggtgcctgggcagttttccatcacaacagccttgaacactctcaaccggatggtccattctccttcagggcgccatatggtagagatcagcacccc

SEQ ID NO: 454902 - DNA, 120 bp, Artificial Sequence
  ENSG00000156463_10 (sequence is synthesized)
agtgctcatcagctccagcaacccctctgtgatcacccagcccatggagaaagcagacgttccttccagctgtgtgggacaggtcagcacttatcaccccgcacctgtctctccaggaca

SEQ ID NO: 454903 - DNA, 120 bp, Artificial Sequence
  ENSG00000156463_11 (sequence is synthesized)
ttccacagccgtggtcagtctgcctggctcccagcaacacctctcagcgaacatgtttgtagccctgcactcctactcagcccatggacccgatgagctggacctgcaaaagggagaagg

SEQ ID NO: 454904 - DNA, 120 bp, Artificial Sequence
  ENSG00000156463_12 (sequence is synthesized)
agggtcctggggaagtgccaggacggctggctcaggggcgtctccttggtcaccgggcgagtcggcatcttcccaaacaattacgtcatccccattttcagaaagacctctagttttcca

SEQ ID NO: 454905 - DNA, 120 bp, Artificial Sequence
  ENSG00000156463_13 (sequence is synthesized)
gactcccggagccctggtctctacaccacatggacgttatccacctcctctgtgtcctcccaaggcagcatttcagaaggtgatccacggcaaagccgtcccttcaaatccgtctttgtg

SEQ ID NO: 454906 - DNA, 120 bp, Artificial Sequence
  ENSG00000156463_14 (sequence is synthesized)
cccactgccatagtcaaccccgtgagaagcacagccggccctgggactttaggacaagggtctcttcggaaagggcggagcagcatgagaaagaatggatccctgcagagacccctccag

SEQ ID NO: 454907 - DNA, 120 bp, Artificial Sequence
  ENSG00000156463_15 (sequence is synthesized)
tccgggatccccactctcgtggtaggctccctcagacgcagccccaccatggtccttcggcctcagcagttccaattctaccagccacaggggatcccctcctccccctcagccgtggtg

SEQ ID NO: 454908 - DNA, 120 bp, Artificial Sequence
  ENSG00000156463_16 (sequence is synthesized)
gtggagatggggtccaagcctgccctcacgggggagcccgccctcacgtgcatcagcaggggcagtgaggcctggatccactccgcggccagctccctcattatggaagacaaagaaatc

SEQ ID NO: 454909 - DNA, 120 bp, Artificial Sequence
  ENSG00000156463_17 (sequence is synthesized)
cccatcaagagtgagcctctgccaaaaccgcccgcatctgccccaccatccatcctggtgaaaccagaaaactcaagaaatggcatcgaaaagcaagtcaaaaccgtgagatttcagaat

SEQ ID NO: 454910 - DNA, 120 bp, Artificial Sequence
  ENSG00000156463_18 (sequence is synthesized)
tacagccctcctcccaccaaacattacacctcccatcccacctccggaaagcctgaacagccagccaccctcaaggcgtcccagcctgaagcagcgtccttgggcccagagatgaccgtc

SEQ ID NO: 454911 - DNA, 120 bp, Artificial Sequence
  ENSG00000156463_19 (sequence is synthesized)
ctatttgcccaccgaagtggctgccactccggacagcagacagacctccggagaaagtcagctcttggcaaggccacaaccctggtgtccactgcctcaggcacgcagaccgtgtttccc

SEQ ID NO: 454912 - DNA, 120 bp, Artificial Sequence
  ENSG00000156463_20 (sequence is synthesized)
agcaaatgaacctacgggtggcttttcctagaccccaaagaggtgaattgcatttaaatacagtctgcctccactgagggcatcctgccattctttggggacttgagcatgggtccttgt

SEQ ID NO: 454913 - DNA, 120 bp, Artificial Sequence
  ENSG00000156463_21 (sequence is synthesized)
tcttcctatttcacctccaggaaagcaaaagtgggagcagaaattcctgccctgggtgggaggatagatggcgtggccttccaaacatacaaacataatgatttgatgccacaaagctcg

SEQ ID NO: 454914 - DNA, 120 bp, Artificial Sequence
  ENSG00000156463_22 (sequence is synthesized)
cttactcagaccaaggagtgaaaaattgtcgtgcccactttatgccccagcatggagtatgtggcctcttgtcatccccgtgttactgtgtagaatttctatggtgtcctaaagggggct

SEQ ID NO: 454915 - DNA, 120 bp, Artificial Sequence
  ENSG00000156463_23 (sequence is synthesized)
gcagcaggggtgtgacaacggtgggattgttggcgttgcttctttgaccttacaatatcctcaacaagcattagaacaacttctgccatcttctggggcctgtacactggccactagtag

SEQ ID NO: 454916 - DNA, 120 bp, Artificial Sequence
  ENSG00000156463_24 (sequence is synthesized)
ctgccatatctttttccctctgtaaagtcataatcctggctgcaaagggaggatttctgcgcggggtgtgaggtggatactttgaacattctgagaacccaataaaactagaaggagcca

SEQ ID NO: 454917 - DNA, 120 bp, Artificial Sequence
  ENSG00000156463_25 (sequence is synthesized)
gccttggtcatcttcccaggaggaattcatgacaactgggatgcagaagagagcaaatgatctgctgggatggaaactgctcaatggagagtttgtggactgcatgatattccttgaaca

SEQ ID NO: 454918 - DNA, 120 bp, Artificial Sequence
  ENSG00000156463_26 (sequence is synthesized)
tcagggatggtacagggataccaatagtctggcctccaagacaggagagtaataggaggaagagcaaatctgtcttcacctgcagtattaatgggtggtgggccagaatggaggaaagca

SEQ ID NO: 454919 - DNA, 120 bp, Artificial Sequence
  ENSG00000156463_27 (sequence is synthesized)
agtgagtcatgtgctgctacaggttacaccaaactcccatccctctgttactcactgctgttgtcaaagccaaactttatcttgctaatttctcacagcttggcacctaacaaatgacaa

SEQ ID NO: 454920 - DNA, 120 bp, Artificial Sequence
  ENSG00000156463_28 (sequence is synthesized)
ggcaggacatccaatgccttcgagctctgtggtctggcctgtctctccagatcagatttagagtgaggtagcagatgacataatattctctttggtgttcaatccgaagaggccaatgct

SEQ ID NO: 454921 - DNA, 120 bp, Artificial Sequence
  ENSG00000156463_29 (sequence is synthesized)
ttctgtcttttccccgataccttctgaccccagggatttctaatagagcataatgatcaagaaaataaagacctggtacataaagagtctcagaaaaaaaatccatgatgttatatgaaa

SEQ ID NO: 454922 - DNA, 120 bp, Artificial Sequence
  ENSG00000156463_30 (sequence is synthesized)
gataccaaactgcaatgcttacaaagaggctatttcaagtagaaagatataaatatcacttataaccatgcatcctttatgttcataaataagtcatcataaagaacaagccattagaag

SEQ ID NO: 454923 - DNA, 120 bp, Artificial Sequence
  ENSG00000156463_31 (sequence is synthesized)
acattctaatccttgtttttaaaaaaaagactataatctaagatacaattctaaaattactgtgctaacctgcaagagacattgctcacataaatgaaattcatatataccgtgatgtta

SEQ ID NO: 454924 - DNA, 120 bp, Artificial Sequence
  ENSG00000156463_32 (sequence is synthesized)
tttgaaccatatattttcatcttctcctcctctcttaagacatcaataagaatttgatttttaaaggcacatgctgctctgattatcaaagacaataacacaaatgcagcatcactggga

SEQ ID NO: 454925 - DNA, 120 bp, Artificial Sequence
  ENSG00000156463_33 (sequence is synthesized)
tatgtcggttgttttaaagttcagatcctaattttactgaggaagcatcctcagtttttcatccagccctgcttgtaaacaggatccagcatcagccagaccatgagcagagtaaggatt

SEQ ID NO: 454926 - DNA, 120 bp, Artificial Sequence
  ENSG00000156463_34 (sequence is synthesized)
gcatctggaggttacagaaatgttttcttctatgtgaagctatcacatgcaggggttaaacaggcagccatcttttaatgcgatgaataatttggacttcttagccacacccttgtctcg

SEQ ID NO: 454927 - DNA, 120 bp, Artificial Sequence
  ENSG00000156463_35 (sequence is synthesized)
gttaaccacaggaggaggtgacaatacaccacaagaagccccagagttctggctttatctgccaagtggtaggtgagaagggaagaggtgggattgagcacactggctatttataccttg

SEQ ID NO: 454928 - DNA, 120 bp, Artificial Sequence
  ENSG00000156463_36 (sequence is synthesized)
tcttcaaagccctcttagtcacatttccatcttcatgcattggcttctgccttacaattgagcaataggaaaccaccactcctaatttttgcacgtgctgctttttaagtctctgggaac

SEQ ID NO: 454929 - DNA, 120 bp, Artificial Sequence
  ENSG00000156463_37 (sequence is synthesized)
tttccatgaggtatagtggagggtttcataaggatttagctcttccttcgaacctgcttggccgataaaccagatatttttttaaaacacagcatacagattccaaatgatcaaggatca

SEQ ID NO: 454930 - DNA, 120 bp, Artificial Sequence
  ENSG00000156463_38 (sequence is synthesized)
aaaagtgttggggatgtcaggaaggatgcaaggatgggcttgaatgatcacaatgagtcaacccagaaatgtgcagtagaatagtttgctaatggtgacatctgagttgcatctcccgga

SEQ ID NO: 454931 - DNA, 120 bp, Artificial Sequence
  ENSG00000156463_39 (sequence is synthesized)
aatattgtttcttattattacactttgggtcgggggaaggggtgttaagggtaaaaagaggaaggagcaaatagataaagagaaaaattcatgcctccaggaaacataagcagaaaaact

SEQ ID NO: 454932 - DNA, 120 bp, Artificial Sequence
  ENSG00000156463_40 (sequence is synthesized)
atagacttgtgtctctgcttatttttttaagtacagtgtttttaatagaccaaagagaatctctatgagttaatatgtatgtgaataatgtttataaaaggggtataatgtgttagtcat

SEQ ID NO: 454933 - DNA, 120 bp, Artificial Sequence
  ENSG00000156463_41 (sequence is synthesized)
tatggaatattgtataaataaaccttccatatataaaacatataaaaaatgattgcttagggcagtggacacttaaggacttccaaacctttcatatcttcatcccaaaaaatagagcgt

SEQ ID NO: 454934 - DNA, 120 bp, Artificial Sequence
  ENSG00000156463_42 (sequence is synthesized)
tccagggctggcaacttatttccttagtatattccactgtaaagccaagaggtgtgggggcttgttttctggttttgtaatttgtaataatccgtatggattactgtaaaatgtctgttg

SEQ ID NO: 454935 - DNA, 120 bp, Artificial Sequence
  ENSG00000156463_43 (sequence is synthesized)
catgtgtgttggtgttggtgttggtgttgtttacccacatggagtcatcagagatttgttccacactttgtatcctggaaaaccaaaaggaattttcttttcttcgagacagagtctcgc

SEQ ID NO: 454936 - DNA, 120 bp, Artificial Sequence
  ENSG00000156463_44 (sequence is synthesized)
acagacgtgagccaccatgcccggcctggaattttctagtaagaagaaaaacatacagaatatgtcttcactgttgggtaactctcaaatttgtagcaatccagattttttgtaaaactg

SEQ ID NO: 454937 - DNA, 120 bp, Artificial Sequence
  ENSG00000156463_45 (sequence is synthesized)
tgctaatgggatatttaatgtcagagttattgtctctcacttcaatatctagtactggataatgtttctcctgggagcacgtatttttttttcaagtcctcttttcctggacttaacatg

SEQ ID NO: 454938 - DNA, 120 bp, Artificial Sequence
  ENSG00000156463_46 (sequence is synthesized)
ttcttctagaagacaccagaagtcatgaccctaagccccctcccttcaggaccactttctaccatcggttttcaaaaaactatccacatgttaattctgttttatgttctgtgattctgt

SEQ ID NO: 454939 - DNA, 120 bp, Artificial Sequence
  ENSG00000156463_47 (sequence is synthesized)
ggtagactcagtgctttcagagtccagagcttgacttgggttagtggccttaatgaagtgctaaatttgctctttaccgcgagactgatcagaagaagcaaaaggggaaagggggctaga

SEQ ID NO: 454940 - DNA, 120 bp, Artificial Sequence
  ENSG00000156463_48 (sequence is synthesized)
ggtccactcgcaccttttacatcagacaagaggaggactgtgccagaaatctgtgcatgaaacaccatctgctcttcatgcagggaggggtcaaccgtgtgaacgtgcagagattactcg

SEQ ID NO: 454941 - DNA, 120 bp, Artificial Sequence
  ENSG00000156463_49 (sequence is synthesized)
agccttctttgccaaaaatatgcattcttcccagctgtaagcgtgtgaagccaaatatgtcttttagcatgaaacaataaaaacatgtttattttcacttaataggttattccccaggcc

SEQ ID NO: 454942 - DNA, 120 bp, Artificial Sequence
  ENSG00000156463_50 (sequence is synthesized)
cccacacgcctccccagcccgctgccgcgctgacatctttggagaggaggcttaggaaggcgaggcgccatcgctcattctcggtcgtgtctgtcctgcttactagtcgctagtggggcc

SEQ ID NO: 454943 - DNA, 120 bp, Artificial Sequence
  ENSG00000156463_51 (sequence is synthesized)
actggccttctcgccaaacctctgggctcggtgcttaccgaagccctggcacttgtgagggacagctgacttcttccagacttttctaaactggaggcttcttttcatacatccaaaagg

SEQ ID NO: 454944 - DNA, 120 bp, Artificial Sequence
  ENSG00000156463_52 (sequence is synthesized)
acggtttttacaggtcgtgaccacaatccagaattcctatctgcttcatttgaaattgagaacaatgtcaaagtaactaaacaggctgcactactttaccttgtgggaggaacattgtct

SEQ ID NO: 454945 - DNA, 120 bp, Artificial Sequence
  ENSG00000156463_53 (sequence is synthesized)
ctgagcctaaggcaaaaattctgacgttctcaagagaccagctctgcccccgtggctcaactgaccctaccatgtggacgctgctcctccaggtgggaactggagttttgaaataaaatg

SEQ ID NO: 454946 - DNA, 120 bp, Artificial Sequence
  ENSG00000156463_54 (sequence is synthesized)
gcctgtagttcacaaaatgggtgtgtatgggtgggaagaaggtgagaagtagccacatttggtatgtggttgggagctgataggtttttaaataggactcttgactgaacattttctttc

SEQ ID NO: 454947 - DNA, 120 bp, Artificial Sequence
  ENSG00000156463_55 (sequence is synthesized)
attcagaaaggctgggcctccttcttcgatcccagtgacaggagcagacttgcctcctcagaagctggccatctgtctggttatcttcacttactggggtgatgttaagattcatcccgc

SEQ ID NO: 454948 - DNA, 120 bp, Artificial Sequence
  ENSG00000156466_0 (sequence is synthesized)
tccgagtccgcccgaggagccgggccccggccgctgtccagccgctccgtgccccgcgcgtcctgcgccgccgccaccgcctcctggggagacgcagccacttgcccgccatggatactc

SEQ ID NO: 454949 - DNA, 120 bp, Artificial Sequence
  ENSG00000156466_1 (sequence is synthesized)
actcccagggtcctgctctcggccgtcttcctcatcagttttctgtgggatttgcccggtttccagcaggcttccatctcatcctcctcgtcgtccgccgagctgggttccaccaagggc

SEQ ID NO: 454950 - DNA, 120 bp, Artificial Sequence
  ENSG00000156466_2 (sequence is synthesized)
atgcgaagccgcaaggaaggcaagatgcagcgggcgccgcgcgacagtgacgcgggccgggagggccaggaaccacagccgcggcctcaggacgaaccccgggctcagcagccccgggcg

SEQ ID NO: 454951 - DNA, 120 bp, Artificial Sequence
  ENSG00000156466_3 (sequence is synthesized)
caggagccgccaggcaggggtccgcgcgtggtgccccacgagtacatgctgtcaatctacaggacttactccatcgctgagaagctgggcatcaatgccagctttttccagtcttccaag

SEQ ID NO: 454952 - DNA, 120 bp, Artificial Sequence
  ENSG00000156466_4 (sequence is synthesized)
tcggctaatacgatcaccagctttgtagacaggggactagacgatctctcgcacactcctctccggagacagaagtatttgtttgatgtgtccatgctctcagacaaagaagagctggtg

SEQ ID NO: 454953 - DNA, 120 bp, Artificial Sequence
  ENSG00000156466_5 (sequence is synthesized)
ggcgcggagctgcggctctttcgccaggcgccctcagcgccctgggggccaccagccgggccgctccacgtgcagctcttcccttgcctttcgcccctactgctggacgcgcggaccctg

SEQ ID NO: 454954 - DNA, 120 bp, Artificial Sequence
  ENSG00000156466_6 (sequence is synthesized)
gacccgcagggggcgccgccggccggctgggaagtcttcgacgtgtggcagggcctgcgccaccagccctggaagcagctgtgcttggagctgcgggccgcatggggcgagctggacgcc

SEQ ID NO: 454955 - DNA, 120 bp, Artificial Sequence
  ENSG00000156466_7 (sequence is synthesized)
aggccgaggcgcgcgcgcggggaccccagcaaccgccgcccccggacctgcggagtctgggcttcggccggagggtgcggcctccccaggagcgggccctgctggtggtattcaccagat

SEQ ID NO: 454956 - DNA, 120 bp, Artificial Sequence
  ENSG00000156466_8 (sequence is synthesized)
caccagatcccagcgcaagaacctgttcgcagagatgcgcgagcagctgggctcggccgaggctgcgggcccgggcgcgggcgccgaggggtcgtggccgccgccgtcgggcgccccgga

SEQ ID NO: 454957 - DNA, 120 bp, Artificial Sequence
  ENSG00000156466_9 (sequence is synthesized)
aggccttggctgccctcgcccggccgccggcggcggcgcacggccttcgccagtcgccatggcaagcggcacggcaagaagtccaggctacgctgcagcaagaagcccctgcacgtgaac

SEQ ID NO: 454958 - DNA, 120 bp, Artificial Sequence
  ENSG00000156466_10 (sequence is synthesized)
ttcaaggagctgggctgggacgactggattatcgcgcccctggagtacgaggcctatcactgcgagggtgtatgcgacttcccgctgcgctcgcacctggagcccaccaaccacgccatc

SEQ ID NO: 454959 - DNA, 120 bp, Artificial Sequence
  ENSG00000156466_11 (sequence is synthesized)
atccagacgctgatgaactccatggaccccggctccaccccgcccagctgctgcgtgcccaccaaattgactcccatcagcattctatacatcgacgcgggcaataatgtggtctacaag

SEQ ID NO: 454960 - DNA, 120 bp, Artificial Sequence
  ENSG00000156466_12 (sequence is synthesized)
cagtacgaggacatggtggtggagtcgtgcggctgcaggtagcggtgcctttcccgccgccttggcccggaaccaaggtgggccaaggtccgccttgcaggggaggcctggctgcagaga

SEQ ID NO: 454961 - DNA, 120 bp, Artificial Sequence
  ENSG00000156466_13 (sequence is synthesized)
ggcggaggaggaagctggcgctgggggaggctgagggtgagggaacagcctggatgtgagagccggtgggagagaagggagcgcagccttcccagtaacttctacctgccagcccagagg

SEQ ID NO: 454962 - DNA, 120 bp, Artificial Sequence
  ENSG00000156466_14 (sequence is synthesized)
aacttctacctgccagcccagagggaaatatggattttcacaccttgcctggccaccctggaaaaacaagccaaggaggatttcttttgttctgttttctctctctctctctctctctct

SEQ ID NO: 454963 - DNA, 120 bp, Artificial Sequence
  ENSG00000156466_15 (sequence is synthesized)
ttaaaaagggaaacaatgtgggaggaagaatcaccgttgacgcatcttgatttggttggtttttacatgtgtaaagaaggtggggtctctggccatgtcatagcccatgtcttgtgccct

SEQ ID NO: 454964 - DNA, 120 bp, Artificial Sequence
  ENSG00000156466_16 (sequence is synthesized)
cccacacagaaagtgttagatagggaaattggcaaaaagaatagttaagtcaggaatggtcctgcctatagaagagctttgagagaggtgggcccacgggtgcccctctcacccatttgt

SEQ ID NO: 454965 - DNA, 120 bp, Artificial Sequence
  ENSG00000156466_17 (sequence is synthesized)
gtactctgtgagtttaccagctctgccctggcctctttcggtaccaggaactggcaaccttcatctcactcctgagggcccaggtctctgccttcattgttgctttttctggtgggggca

SEQ ID NO: 454966 - DNA, 120 bp, Artificial Sequence
  ENSG00000156466_18 (sequence is synthesized)
aggggagctggtatggatggaatgacaagaattagtccaaatggaaccccttgaaggataatgagaaaccacaaggcctgcctctgactggggctgacacggaggtgcattagcccaggc

SEQ ID NO: 454967 - DNA, 120 bp, Artificial Sequence
  ENSG00000156466_19 (sequence is synthesized)
tggaggtagcccacccaaatgccctttctgattctaattgatttctttcaacagaatttgccaaaattcagacatgcacttctaaggggaaggtgattttccagttcaaaaaaatgggca

SEQ ID NO: 454968 - DNA, 120 bp, Artificial Sequence
  ENSG00000156466_20 (sequence is synthesized)
ggagtggggaacaaaacaattaacgtaagagctacaaaggagggaaaaggaaccaagaagtagaaggagtcccatcaggagggaagatggtgggcctcagggaggatggggatcaaggga

SEQ ID NO: 454969 - DNA, 120 bp, Artificial Sequence
  ENSG00000156466_21 (sequence is synthesized)
caggccaggagccaggagtggggaagggagggatgaaaggggacacaagtccctgtctctgaagtttctttaaaatctgagttccctcccctctctttgacattcctgaaagattaccag

SEQ ID NO: 454970 - DNA, 120 bp, Artificial Sequence
  ENSG00000156466_22 (sequence is synthesized)
ccagcaatagcccagggctcccccaaaagaattggttcagattgtaattatcagttaggcaatgtttttaaaacttagtaatgagaaactgtgaaaagagccaagtgttacattgagctt

SEQ ID NO: 454971 - DNA, 120 bp, Artificial Sequence
  ENSG00000156466_23 (sequence is synthesized)
ggggtgggagatggggaacaggcagtgaggaaggagacaggggtggaattcgtcttctgggaggaagctggagagagcacagtgaaattgaaatacccattcccagatagtcaaaaacat

SEQ ID NO: 454972 - DNA, 120 bp, Artificial Sequence
  ENSG00000156466_24 (sequence is synthesized)
gaactttcccccagcctgcaccagtattgttttcaaacattgcccatgagtaggccctttgaagagttagcttcctcctcatctttgactataaaattgtttaatcaatggaatttgtac

SEQ ID NO: 454973 - DNA, 120 bp, Artificial Sequence
  ENSG00000156466_25 (sequence is synthesized)
cagccttttaaaaagttttagtttttcctaagtgattttgctctcttccaatctaaacctgttgcttgtttggttcagagaactacaaactgtcaaagaaagggtggggatgataagaaa

SEQ ID NO: 454974 - DNA, 120 bp, Artificial Sequence
  ENSG00000156466_26 (sequence is synthesized)
tgctaatataaaaatgctaagtgaaaaaaagacttggccaggagaaataatttaaaatgcacatttgctttggatgcactgttgttctgttaaggctgtatatatttgtttatttaaggt

SEQ ID NO: 454975 - DNA, 120 bp, Artificial Sequence
  ENSG00000156466_27 (sequence is synthesized)
gactgaaagtgcaaagaggaaatggacagcatgcaattcatcctaatgtacaaaacgttatatgcactcaaatgttataatttctaatatttttaaagtttatattcgagttgtacaaag

SEQ ID NO: 454976 - DNA, 120 bp, Artificial Sequence
  ENSG00000156466_28 (sequence is synthesized)
ttaagcattaatcagatatttcattttttcataatgttaccattttcttaaatattattacaaaattttaagtctgtctaatggagagttttttttaaactgtctacctcatataataca

SEQ ID NO: 454977 - DNA, 120 bp, Artificial Sequence
  ENSG00000156466_29 (sequence is synthesized)
agtatttacaacgctaaagttaccagaggtcaatgaataatcaaaacattttttacagtacacctttcctggatgatatgcaatcgaatgctatattattaaacgcatttttctccttaa

SEQ ID NO: 454978 - DNA, 120 bp, Artificial Sequence
  ENSG00000156466_30 (sequence is synthesized)
cccccggacctgcggagtctgggcttcggccggagggtgcggcctccccaggagcgggccctgctggtggtattcaccagatcccagctgctgcgtgcccaccaaattgactcccatcag

SEQ ID NO: 454979 - DNA, 120 bp, Artificial Sequence
  ENSG00000156467_0 (sequence is synthesized)
agcggcctttctctgttcgcgatgtgacgtaacgcgcctgcggactgggcccagcttgtcctctatgacttacccagaaggcaacgcttctctttctggtcaaaatggctggtaagcagg

SEQ ID NO: 454980 - DNA, 120 bp, Artificial Sequence
  ENSG00000156467_1 (sequence is synthesized)
ccgtttcagcatcaggcaagtggctggatggtattcgaaaatggtattacaatgctgcaggattcaataaactggggttaatgcgagatgatacaatatacgaggatgaagatgtaaaag

SEQ ID NO: 454981 - DNA, 120 bp, Artificial Sequence
  ENSG00000156467_2 (sequence is synthesized)
aagccataagaagacttcctgagaacctttataatgacaggatgtttcgcattaagagggcactggacctgaacttgaagcatcagatcttgcctaaagagcagtggaccaaatatgaag

SEQ ID NO: 454982 - DNA, 120 bp, Artificial Sequence
  ENSG00000156467_3 (sequence is synthesized)
aggaaaatttctaccttgaaccgtatctgaaagaggttattcgggaaagaaaagaaagagaagaatgggcaaagaagtaatcatgtagttgaagtctgtggatgcagctgttatgaagat

SEQ ID NO: 454983 - DNA, 120 bp, Artificial Sequence
  ENSG00000156467_4 (sequence is synthesized)
ggttaaacttgaaacaaacaattttaagaattatttggtctgaagatgttttactttaaataaatgtctattgtaatggctggagtttttgaattccaaaccttatactgaataactact

SEQ ID NO: 454984 - DNA, 120 bp, Artificial Sequence
  ENSG00000156467_5 (sequence is synthesized)
gaatccctttactgttaaatttttttccaaactttcaagatatatttagttgtgtttaactgctacttggagctcagaagccactttatcagttttcctcactggttggatagcctatca

SEQ ID NO: 454985 - DNA, 120 bp, Artificial Sequence
  ENSG00000156467_6 (sequence is synthesized)
gtttatggaaggatataacttccgtaagttacatccttatggaagctactgaataaaagaagggggtatgcaccccctagtttgccaagattgagaaatagcctcttcactggtatgcaa

SEQ ID NO: 454986 - DNA, 120 bp, Artificial Sequence
  ENSG00000156467_7 (sequence is synthesized)
acagatttgattttgcatcctatcatttaaaaagaaattatgtctgcaccccaacataggcatacttaagtaatatacatactcctgtgctaacatgtatactagaaaacaaaaagatgt

SEQ ID NO: 454987 - DNA, 120 bp, Artificial Sequence
  ENSG00000156467_8 (sequence is synthesized)
tagaaaaataaaagtataaagacaaatcatactgtccccatatcccagtgacttttccactttggaaatgattgttatgaagtttaagggttggatactagtcagttaaaagttttaaga

SEQ ID NO: 454988 - DNA, 120 bp, Artificial Sequence
  ENSG00000156467_9 (sequence is synthesized)
gcagtgagcctagatcacaccactgcacttcagcctgagcgacattgactgtctcaaaaaaaaaattaggattattcaatgttgtcatcatttccactcctaaattctgaaatgctttct

SEQ ID NO: 454989 - DNA, 120 bp, Artificial Sequence
  ENSG00000156467_10 (sequence is synthesized)
taaattctgaaatgctttctttggtagaggtgagagtgtggagccacagctagtagagaaggaacagtaggacctgcagcctccctggttttccaggacaagtcattgctgtgtgtggca

SEQ ID NO: 454990 - DNA, 120 bp, Artificial Sequence
  ENSG00000156467_11 (sequence is synthesized)
ggaatgccttacctcaaataacaaaacagtgtgaaaaacgaatttgtgttacatttaaagtttgtaaagcaatgagaaatgtgtgtatcataaagagcatctttaaatttttgctaaaat

SEQ ID NO: 454991 - DNA, 120 bp, Artificial Sequence
  ENSG00000156467_12 (sequence is synthesized)
attagcctcttaaattctctaggaaccccctcccccgcttttttttttcctttcgctggtcgttatttttctaaacctatcctgaaatcatgtcaattttcttttgtatggttgaagaca

SEQ ID NO: 454992 - DNA, 120 bp, Artificial Sequence
  ENSG00000156467_13 (sequence is synthesized)
actagatcacttgataatggttttgctcaggtcacattgtgacaaggttttaatgtagtcctactttgcagaaggaggccaagaagatgggctgtctagaaccccctttaaaagcatttg

SEQ ID NO: 454993 - DNA, 120 bp, Artificial Sequence
  ENSG00000156467_14 (sequence is synthesized)
tctattcagaaaattttcctgagtagatctctgcaaaggctcttttaatagtgatttcaagatcacgtttgcaggactctggtctattcgttcagacgtctactgtgcacaattacaagg

SEQ ID NO: 454994 - DNA, 120 bp, Artificial Sequence
  ENSG00000156467_15 (sequence is synthesized)
agactacaactgaggcatctcaaagagcactgtcaaggtgtgtagggagccgggtgggtggagggaggctgggctctgaccctagaaaccatgcttatgaatgctgttaatgtttaaagc

SEQ ID NO: 454995 - DNA, 120 bp, Artificial Sequence
  ENSG00000156467_16 (sequence is synthesized)
aagcctaagggcactgctgaaggacaggggaacaaatagaactgaccaagactgaggtataacaggaacccccaggctatccacctgctcaaggtaaagtgtggtattacataaggcaac

SEQ ID NO: 454996 - DNA, 120 bp, Artificial Sequence
  ENSG00000156467_17 (sequence is synthesized)
ctctgattttgtaagagttcttcctaaagccaaagtgtatgcctattctatgtttccagattacttcattcttctaaatgagaacaagtgtgcaaaagttctttgaacactagatcaatg

SEQ ID NO: 454997 - DNA, 120 bp, Artificial Sequence
  ENSG00000156467_18 (sequence is synthesized)
ttttgtgttcattataaattatggttatcgtcctgcttgttatgaagactaagaaagtagatctagtatttggctcacacaggtgaatgggtgagaatttgttaatccatcagtgaagtc

SEQ ID NO: 454998 - DNA, 120 bp, Artificial Sequence
  ENSG00000156467_19 (sequence is synthesized)
ctttcatttgaaagagagggcctttctattatcaaaagccgtcctgtgtggaaaatcaccatgagagtgcctgaaacacaggcactctgcattgtcctgtagaccaaatctacattgtcc

SEQ ID NO: 454999 - DNA, 120 bp, Artificial Sequence
  ENSG00000156467_20 (sequence is synthesized)
tgtagtctggtctacattgtcctgtagaccgaatggtagagtgattcagagctaattctgggttagactgcacaggtctgaatctatttgctcactgtgtagtgctttaggaatacaatt

SEQ ID NO: 455000 - DNA, 120 bp, Artificial Sequence
  ENSG00000156467_21 (sequence is synthesized)
ctacttcacccagttgtgaaaattaactgactgcatgtcaagcactaacagtttctggcatatagtatgcataatgtaaattatgtgctgagaagcgagaaagaataacttgggaaaacg

SEQ ID NO: 455001 - DNA, 120 bp, Artificial Sequence
  ENSG00000156467_22 (sequence is synthesized)
ctgaatatcatcaatgtcgaatagctaaccagtagctaaggtccaaggtctcctctcttccttctatgtggcactcttgtttctggttcatctactccccttgggtgtcacctccttgag

SEQ ID NO: 455002 - DNA, 120 bp, Artificial Sequence
  ENSG00000156467_23 (sequence is synthesized)
tgaagtacctgctggagatgagaagagtggaactggatctgcatgacagctttgattaggatggagctaagacttggctatctccctgttttgtgttttggatgggtgacattttaaaac

SEQ ID NO: 455003 - DNA, 120 bp, Artificial Sequence
  ENSG00000156467_24 (sequence is synthesized)
tgccaatattcaaatcctgctaatttgctttgtacagtttaaaatgtttgatatcttttgttgtttaaagtttgagattggttttgaatatacagttttcctacatcttgaagaaagtta

SEQ ID NO: 455004 - DNA, 120 bp, Artificial Sequence
  ENSG00000156467_25 (sequence is synthesized)
tgtttgtttactctgaagtggtctatgttctgtttgtttgttttactatactttgcaaaaaaacagatggctggcttatgttcactgttgtagtgcactacctagtatcacttggccttc

SEQ ID NO: 455005 - DNA, 120 bp, Artificial Sequence
  ENSG00000156467_26 (sequence is synthesized)
ctgttgtcaagatgtaggaagcagcgtaagggatgtcgggccttcagacccccaattgccagctgtggtcctagttccagattgcatggaaatatttgataacattcctgcactgagtta

SEQ ID NO: 455006 - DNA, 120 bp, Artificial Sequence
  ENSG00000156467_27 (sequence is synthesized)
tcatggtctgaatatttatgtgacgctctacgagtggtaccaaaatgttagtgatggagtttttactaatggcaccttttcctgtttttaaattctagaatcttaataaatccaaagtgt

SEQ ID NO: 455007 - DNA, 120 bp, Artificial Sequence
  ENSG00000156467_28 (sequence is synthesized)
acattttggtagtgatttcatttagttatttactttaaggactcccttttcaagcattaactctgcactaattttgacttatgaaaagattcagcagtaagaataaaaactgggccaaag

SEQ ID NO: 455008 - DNA, 120 bp, Artificial Sequence
  ENSG00000156467_29 (sequence is synthesized)
cccaaagtaataatccttcacaaataggatggagttttaaaaatatgggcatcctgtgtgtagctttgaaaataaccaaactacttggaattaaaaagttaggtgaacatgaagattgtc

SEQ ID NO: 455009 - DNA, 120 bp, Artificial Sequence
  ENSG00000156467_30 (sequence is synthesized)
ataaccaaatccttgacagcttgatggatgaagagcagatgggtttatggtgtatgggaggaagcatggattttaggagggacagtatcagagagggatggttagaaagtgagtaagaca

SEQ ID NO: 455010 - DNA, 120 bp, Artificial Sequence
  ENSG00000156467_31 (sequence is synthesized)
ggttgctctttggaaaacaaggaaaatccctttattagaacaaggcatgaaattctgccactaggtggcgatgccctataactttacaacttagtgtacatcacacgagcactatggaag

SEQ ID NO: 455011 - DNA, 120 bp, Artificial Sequence
  ENSG00000156467_32 (sequence is synthesized)
atttctccattctgcgccccaccaactccctcccctccttcatttttcaggatgacaacaccttagaggtttatggccatcaggagaatttactactaagctatatactgatgtaatgaa

SEQ ID NO: 455012 - DNA, 120 bp, Artificial Sequence
  ENSG00000156467_33 (sequence is synthesized)
atctaatatatgttgtgcaatgaattatgagatgttatttagtttcaggattttattacttcaatcagttatgaccatatttccttttatatgattgctcactctttaaacataccagat

SEQ ID NO: 455013 - DNA, 120 bp, Artificial Sequence
  ENSG00000156467_34 (sequence is synthesized)
gactgtataaggaacacctaataaagtctatagatgttaaaatattttaaatgttttaatttatatgccataatttgtttacattctggttatactggcgttcatattaaaagccataac

SEQ ID NO: 455014 - DNA, 120 bp, Artificial Sequence
  ENSG00000156467_35 (sequence is synthesized)
atgttagaatctgagatctcaggtcggatagtgcctctaagttatattttgctaagaaattttattgtattagcaattgagcaagaaagaagaactgaatcattatacggtggttaattt

SEQ ID NO: 455015 - DNA, 120 bp, Artificial Sequence
  ENSG00000156467_36 (sequence is synthesized)
ttagcatagatgtcagaaagcctgttaatattccagaggcttatgataaactatttaaattgtcattctggattctgattatatctcctacaaagaaagagtgtattatttattgaactt

SEQ ID NO: 455016 - DNA, 120 bp, Artificial Sequence
  ENSG00000156467_37 (sequence is synthesized)
tttgtttgaatacatgtgcctatttttgcataaatgtaaaaatgtaattttaaaataaacccctgaaaacttctggtaacattatccagttgaataattgttctgttagtattctaaata

SEQ ID NO: 455017 - DNA, 120 bp, Artificial Sequence
  ENSG00000156467_38 (sequence is synthesized)
ttttaagaaaattgtatacatatctgtgacaattgtattcacaagccaaaccaaaaaaagataattatttgttttacaaaggagtcagcttacaatttttctcttatgcatgcatttaaa

SEQ ID NO: 455018 - DNA, 120 bp, Artificial Sequence
  ENSG00000156467_39 (sequence is synthesized)
atgtggtttgccattaaactggaaacactgatctgaggccaatgatttaggcaagtcattagtctaaagattggcttcctcagctagaaaatgaagggctttgactaaaaagtctttttc

SEQ ID NO: 455019 - DNA, 120 bp, Artificial Sequence
  ENSG00000156467_40 (sequence is synthesized)
atttcagtaccaaaacattctgggtctgtgatttaacttacgctctttattgttgggatgaactaatactgatggaatactagctttgtactaggcactgttcgtatgttgtctctttta

SEQ ID NO: 455020 - DNA, 120 bp, Artificial Sequence
  ENSG00000156467_41 (sequence is synthesized)
atcctccctgcaaccttctggcatggctattataatgcccattgtatggaagaagaaattaggcttcgaaagtccattttatgcttgttcattacataattttctggattttttaaattg

SEQ ID NO: 455021 - DNA, 120 bp, Artificial Sequence
  ENSG00000156467_42 (sequence is synthesized)
atgtatgtgtttatgttccaggctaggcagaagctaggaagaatatagcagcctcgtcactgttgaaatctggggctagataattctttgttgtgggggcctcctctgtgtgttacagga

SEQ ID NO: 455022 - DNA, 120 bp, Artificial Sequence
  ENSG00000156467_43 (sequence is synthesized)
tatttagcagcatcctggcttctacacgataggtaccagtagcgcctcctgcctccaactgtaacaaccaaaaatgttttgagacattgtctggaaatgttcccctgggggagcagaatt

SEQ ID NO: 455023 - DNA, 120 bp, Artificial Sequence
  ENSG00000156467_44 (sequence is synthesized)
tgaggttaataaagcaaatgttatttccgttttagaagaaaaccacattgagtcttacgtgtgaaatgattcttctgaaattactaagcaagtctctaatatagagagccaggactaaaa

SEQ ID NO: 455024 - DNA, 120 bp, Artificial Sequence
  ENSG00000156467_45 (sequence is synthesized)
tccaggtctgttgcctcccaggtctttgctgttccagctctgcactctgcttcctacttagatgaaaagatcagcccattgagtgtccctccagatcccaagaagagcttctgtgaagca

SEQ ID NO: 455025 - DNA, 120 bp, Artificial Sequence
  ENSG00000156467_46 (sequence is synthesized)
aactctcaccccttgaactgcattgaaactaggcaaaggcctgtggacattcatttctttttcttcccgaaaagacttccccctcataacctatcaaagcaacttatcacaccatcacca

SEQ ID NO: 455026 - DNA, 120 bp, Artificial Sequence
  ENSG00000156467_47 (sequence is synthesized)
tcccttggggggaacttagttgcttaggaggaggtaaatggacttcttttacgaatccatattaatgtttaaatgactaatggtatcaaaatcctccccaaaatacatacatttttaaag

SEQ ID NO: 455027 - DNA, 120 bp, Artificial Sequence
  ENSG00000156467_48 (sequence is synthesized)
aatgtggccaaatgaaataactgtaatatcgagtaaaaattttagaggatgagggtcatttagacctgccagtctatgctgaaatctcactgtcttttccctacaactccagctctcttg

SEQ ID NO: 455028 - DNA, 120 bp, Artificial Sequence
  ENSG00000156467_49 (sequence is synthesized)
aaatgaaaagtttacaattatttcctgtgatctatttatgaaactacaaatgatggaaatttccaagtccttttcctatctcccaccccttcatttctgaaggtaacagggcaggcataa

SEQ ID NO: 455029 - DNA, 120 bp, Artificial Sequence
  ENSG00000156467_50 (sequence is synthesized)
gggcacacgatgtacctatggatcttttgtacattcagtgtttgagtttacccttttctttcatgacttgccaccattttcctgcaaccacttttgctcataaataaaataagcactttt

SEQ ID NO: 455030 - DNA, 120 bp, Artificial Sequence
  ENSG00000156467_51 (sequence is synthesized)
aatctaattcttttgattaaattcttgctgtatatactatatacttttaaaaggaaatttatttctatgtttgcattcatcagcaagataactgagtactggttgcttgcctatcaatgt

SEQ ID NO: 455031 - DNA, 120 bp, Artificial Sequence
  ENSG00000156467_52 (sequence is synthesized)
ctttctggtcaaaatggctggtaagcaggccgatattgaaggagtcttactaaattcaagacactgcttctgtgcgtgtttgggaactacatagaccagatctcaactcccattagctaa

SEQ ID NO: 455032 - DNA, 120 bp, Artificial Sequence
  ENSG00000156467_53 (sequence is synthesized)
tttcttgttattgaagacctgttgagtgtttgggatatatcagtacgtgatggtaacatataatatttcattcattctttaggaaaatttctaccttgaaccgtatctgaaagaggttat

SEQ ID NO: 455033 - DNA, 120 bp, Artificial Sequence
  ENSG00000156467_54 (sequence is synthesized)
tctttctggtcaaaatggctggtaagcaggccggtaagtaactgggggtcttcttggccggcatcgtcgcgcttcaccgtttatttttgctgcagcttgctccgttttctctcttctttg

SEQ ID NO: 455034 - DNA, 120 bp, Artificial Sequence
  ENSG00000156467_55 (sequence is synthesized)
taagtggccaagtttgtcgcggaagggaaattggctgcttcagtccagtgaaaaggatgtgcttccccactcgtttgctgtccccagggcgggcttgcctgtatagggttgggatgttaa

SEQ ID NO: 455035 - DNA, 120 bp, Artificial Sequence
  ENSG00000156467_56 (sequence is synthesized)
cccgctgtttgtgaaggtgcccgcggtggctctgacagccctggagttccagctgcccgtgcttggaagtccttccccttggccttagaaaagttaaagggcacaagaggataactagtg

SEQ ID NO: 455036 - DNA, 120 bp, Artificial Sequence
  ENSG00000156467_57 (sequence is synthesized)
gatgactttcaacccgaatgagctcagtgctttctatgacccaagtgctctatcgtgtgcattggccctataaattttcttgccattgcgacgagggagatattaatttcccttttacgc

SEQ ID NO: 455037 - DNA, 120 bp, Artificial Sequence
  ENSG00000156467_58 (sequence is synthesized)
tgataagataactgaggcaaagtgacccaaggaagtagaattggaaatatcattgcacccctcgcgcttctcaaactgcgaatcagagacagttgagcaagggatacgagcgacgcttca

SEQ ID NO: 455038 - DNA, 120 bp, Artificial Sequence
  ENSG00000156467_59 (sequence is synthesized)
gcaagggatacgagcgacgcttcaggttgaccttggattatctagagcgtcagcttgatcagtaggtttggagaaatttgaatttattgtaggttctttttttcttttttctttcttttt

SEQ ID NO: 455039 - DNA, 85 bp, Artificial Sequence
  ENSG00000156467_60 (sequence is synthesized)
ttctttctttttttttttttttgctaatctctgccctctggcggtacaagttggagtagccgttttgtttgtttgtttgttttgt

SEQ ID NO: 455040 - DNA, 120 bp, Artificial Sequence
  ENSG00000156467_61 (sequence is synthesized)
accaagttggagtagcttaaaaaatgttgatccttttctccccgcccccagcaattgtgaagctgttaggaaacatcaggttgccagaaacatccgttaacctaattgacattgagcttt

SEQ ID NO: 455041 - DNA, 120 bp, Artificial Sequence
  ENSG00000156467_62 (sequence is synthesized)
ttgggggtgggggagactttttaaataattattttattaatttggcagatattgaaggagtcttactaaattcaagacactgcttctgtgcgtgtttgggaactacatagaccagatctc

SEQ ID NO: 455042 - DNA, 120 bp, Artificial Sequence
  ENSG00000156467_63 (sequence is synthesized)
aactcccattagctaactctgaccttgggtgggatcacttctgtaagccagcttccccttctgtagtaacagacatgtaaataaatcagctaatgttggtaaagcaaataggaaagtgtt

SEQ ID NO: 455043 - DNA, 120 bp, Artificial Sequence
  ENSG00000156467_64 (sequence is synthesized)
tggtgcacaataagtgcttagtgaatattattatagtcactgataggtggttgaatataatctgtcttccacaagtatgtttgtagattgttgactgatacttgtttttctagcagcagt

SEQ ID NO: 455044 - DNA, 120 bp, Artificial Sequence
  ENSG00000156467_65 (sequence is synthesized)
tttatacatgactcttaatttccaaggagatttgctaaagccacgtaatctgtagtgcactgagtttgcaagcaaggagagttgagtgaaaggagagtttgctttccttccttggtaagg

SEQ ID NO: 455045 - DNA, 120 bp, Artificial Sequence
  ENSG00000156467_66 (sequence is synthesized)
gctaaccctagacaaaattttaaaagagaatacaaacctgttctacctctccttttgtaaaatgtctctcctaaaatgtcagatacggtcctgctgtacttggaccctgctgggttactt

SEQ ID NO: 455046 - DNA, 120 bp, Artificial Sequence
  ENSG00000156467_67 (sequence is synthesized)
ttctttgtttttttttttgtttttctgagagtattgcttttgcaagtgttactgtggttccaaaaaccatttcagttcttgtatacatcagaagattttaaaattaaatcacattatgtt

SEQ ID NO: 455047 - DNA, 120 bp, Artificial Sequence
  ENSG00000156467_68 (sequence is synthesized)
tttaaaattaaatcacattatgttaaatccagttcctttttaaagtttttttgagagaagagggatgaaagcctctaaaatgttcgacttggtaatgatttaagtagtaagacattttcc

SEQ ID NO: 455048 - DNA, 72 bp, Artificial Sequence
  ENSG00000156467_69 (sequence is synthesized)
tgttcgacttggtaatgatttaagtagtaagacattttccttctacaccccctttcccaactcttccactta

SEQ ID NO: 455049 - DNA, 76 bp, Artificial Sequence
  ENSG00000156467_70 (sequence is synthesized)
cactactgcgcccggccttccacttaaaattttaatttaaattatataaacattgaaagtagagagtttttgaata

SEQ ID NO: 455050 - DNA, 120 bp, Artificial Sequence
  ENSG00000156467_71 (sequence is synthesized)
ttaaattatataaacattgaaagtagagagtttttgaatattaaaattttatcacgtccatgcaatcatatgattcctaagcttttttagaactttgtaatttaccatgaacttcatctt

SEQ ID NO: 455051 - DNA, 120 bp, Artificial Sequence
  ENSG00000156467_72 (sequence is synthesized)
ttactattgaagcttgaagaaagtgtaagcaaaagtcactgttccttagtatactatcattttaagattctttaataccttgatctcagatttaaactatgagaaaaaagagatgtggtt

SEQ ID NO: 455052 - DNA, 120 bp, Artificial Sequence
  ENSG00000156467_73 (sequence is synthesized)
tattaatgtgtgtttaaaaacaaagtaaacatttaaaatattttgtaaatggtttagataaaatatgaattttgtggcattggattttaagaggctcatatattgtttccatagtctagt

SEQ ID NO: 455053 - DNA, 120 bp, Artificial Sequence
  ENSG00000156467_74 (sequence is synthesized)
tcaagaagtaacccattatatcaagtaataactcattacttttaatggcaaaactgcaattacttttgcaccaacctataatgtatgaaatgcattgaatttccattgaacctagtgatt

SEQ ID NO: 455054 - DNA, 120 bp, Artificial Sequence
  ENSG00000156467_75 (sequence is synthesized)
tgaattcgatagttcaccaaaagttgtaagttataagtcataaaggtattttactaatttaaaaaaaccgcgatttttgagatgcatgtgcaatctaactttgtcatctatcatagggtt

SEQ ID NO: 455055 - DNA, 120 bp, Artificial Sequence
  ENSG00000156469_0 (sequence is synthesized)
gtgtagggcgggctgaggagccggcgtgcggcgcggcgggacgggacgtgcggcccagcgagttggtcggtcccggggtcacccgctacgggaagcaggcctcgccacagactaagaaaa

SEQ ID NO: 455056 - DNA, 120 bp, Artificial Sequence
  ENSG00000156469_1 (sequence is synthesized)
atggctttgtcagcccaacagatacccagatggtttaactcagttaagttgaggagcctcattaatgctgcacaactcacaaaacgttttactagaccagcaagaacactgttacatggc

SEQ ID NO: 455057 - DNA, 120 bp, Artificial Sequence
  ENSG00000156469_2 (sequence is synthesized)
ttttctgctcagcctcagatatcctctgacaattgctttctccagtggggatttaagacttacaggacttcctccttatggaatagttcccagtctactagctcaagtagtcaggagaat

SEQ ID NO: 455058 - DNA, 120 bp, Artificial Sequence
  ENSG00000156469_3 (sequence is synthesized)
aattctgcccaaagcagtctgcttccttccatgaatgaacagtcacagaagacacaaaatatatccagctttgattctgagctgtttctagaagaactggatgaattgcctccattgtct

SEQ ID NO: 455059 - DNA, 120 bp, Artificial Sequence
  ENSG00000156469_4 (sequence is synthesized)
ccaatgcagccaatttcagaggaagaggctattcagattattgcagaccctccattgccaccagcttcattcacacttcgagactatgtggatcattctgagactctgcagaagttggtt

SEQ ID NO: 455060 - DNA, 120 bp, Artificial Sequence
  ENSG00000156469_5 (sequence is synthesized)
cttctaggcgtggatttgtccaagatagaaaaacatccagaagcagcaaacctccttctgagactggattttgaaaaagacattaagcaaatgcttctgtttcttaaagatgtgggtata

SEQ ID NO: 455061 - DNA, 120 bp, Artificial Sequence
  ENSG00000156469_6 (sequence is synthesized)
cctgacaaaaaatcatgcaattttctctgaagaccttgaaaatctgaagaccagggtggcttatctgcattcaaaaaatttcagtaaagcagatgttgcacagatggtcagaaaagcacc

SEQ ID NO: 455062 - DNA, 120 bp, Artificial Sequence
  ENSG00000156469_7 (sequence is synthesized)
atttttgctgaacttttcagtggaaagactggataacagattgggattttttcagaaagaacttgaacttagtgtgaagaagactagagatctggtagttcgtctcccaaggctgctaac

SEQ ID NO: 455063 - DNA, 120 bp, Artificial Sequence
  ENSG00000156469_8 (sequence is synthesized)
tggaagtctggaacccgtgaaagaaaatatgaaggtttatcgtcttgaacttggttttaaacataacgaaattcaacatatgatcaccagaatcccaaagatgttaactgcaaataaaat

SEQ ID NO: 455064 - DNA, 120 bp, Artificial Sequence
  ENSG00000156469_9 (sequence is synthesized)
gaaacttaccgagacgtttgattttgtgcacaatgtgatgagcattccccaccacatcattgtcaagttcccacaggtatttaatacaaggctgtttaaggtcaaagaaagacacttgtt

SEQ ID NO: 455065 - DNA, 120 bp, Artificial Sequence
  ENSG00000156469_10 (sequence is synthesized)
tcttacctatttaggaagagcacagtatgatccagcaaaacctaactacatctctttggacaaactagtatctattcctgatgaaatattttgtgaagagattgccaaagcatcagtaca

SEQ ID NO: 455066 - DNA, 120 bp, Artificial Sequence
  ENSG00000156469_11 (sequence is synthesized)
ggactttgaaaaattcttaaaaacgctttagatttttatgtatgttaaaatgcagtattgtaaagtgaatatatatatgaataaatgaatatatttttaaatgcctcgggtctcaactga

SEQ ID NO: 455067 - DNA, 120 bp, Artificial Sequence
  ENSG00000156469_12 (sequence is synthesized)
cttacctcttaaaaggtgaaaaattagggacttggatgtttaattctaaaatgatcccaagatttaaccactgaaagaagcaaacaagggaagagctggtctttgcagaaatagttttaa

SEQ ID NO: 455068 - DNA, 120 bp, Artificial Sequence
  ENSG00000156469_13 (sequence is synthesized)
ggcgtgcggcgcggcgggacgggacgtgcggcccagcgagttggtcggtcccggggtcacccgctacgggaagcaggcctcgccacagcagggtattgtgaatacttacttcttttctaa

SEQ ID NO: 455069 - DNA, 120 bp, Artificial Sequence
  ENSG00000156471_0 (sequence is synthesized)
ccctctgctcccagcctttgctgggcgccagacccggctttgccgtccggctattagcctactgtggctagtcacccccggggtcccggccttctcgggctggggccgccgccaccgcgg

SEQ ID NO: 455070 - DNA, 120 bp, Artificial Sequence
  ENSG00000156471_1 (sequence is synthesized)
caggacggggaggcgggccatggcgtcctgcgtggggagccggaccctaagcaaggatgatgtgaactacaaaatgcatttccggatgatcaacgagcagcaagtggaggacatcaccat

SEQ ID NO: 455071 - DNA, 120 bp, Artificial Sequence
  ENSG00000156471_2 (sequence is synthesized)
tgacttcttctaccggccgcataccatcaccctgctcagcttcaccatcgtcagcctcatgtacttcgcctttaccagggatgactctgttccagaagacaacatctggagaggcatcct

SEQ ID NO: 455072 - DNA, 120 bp, Artificial Sequence
  ENSG00000156471_3 (sequence is synthesized)
ctctgttattttcttctttcttatcatcagtgtgttagctttccccaatggtccgttcactcgacctcatccagccttatggcgaatggtttttggactcagtgtgctctacttcctgtt

SEQ ID NO: 455073 - DNA, 120 bp, Artificial Sequence
  ENSG00000156471_4 (sequence is synthesized)
cctggtattcctactcttcctgaatttcgagcaggttaaatctctaatgtattggctagatccaaatcttcgatacgccacaagggaagcagatgtcatggagtatgctgtgaactgcca

SEQ ID NO: 455074 - DNA, 120 bp, Artificial Sequence
  ENSG00000156471_5 (sequence is synthesized)
tgtgatcacctgggagaggattatcagccactttgatatttttgcatttggacatttctggggctgggccatgaaggccttgctgatccgtagttacggtctctgctggacaatcagtat

SEQ ID NO: 455075 - DNA, 120 bp, Artificial Sequence
  ENSG00000156471_6 (sequence is synthesized)
tacctgggagctgactgagctcttcttcatgcatctcctccccaattttgccgagtgctggtgggatcaagtcattctggacatcctgttgtgcaatggcggtggcatttggctgggcat

SEQ ID NO: 455076 - DNA, 120 bp, Artificial Sequence
  ENSG00000156471_7 (sequence is synthesized)
ggtcgtttgccggtttttagagatgaggacttaccactgggcaagcttcaaggacattcataccaccaccgggaagatcaagagagctgttctgcagttcactcctgctagctggaccta

SEQ ID NO: 455077 - DNA, 120 bp, Artificial Sequence
  ENSG00000156471_8 (sequence is synthesized)
tgttcgatggtttgaccccaaatcttcttttcagagagtagctggagtgtaccttttcatgatcatctggcagctgactgagttgaataccttcttcttgaagcatatctttgtgttcca

SEQ ID NO: 455078 - DNA, 120 bp, Artificial Sequence
  ENSG00000156471_9 (sequence is synthesized)
agccagtcatccattaagttggggtagaattctctttattggtggcatcacagctcccacagtgagacagtactacgcttacctcaccgacacacagtgcaagcgcgtaggaacacaatg

SEQ ID NO: 455079 - DNA, 120 bp, Artificial Sequence
  ENSG00000156471_10 (sequence is synthesized)
ctgggtgtttggggtcattggtttcctggaggccattgtttgcataaaatttggacaagatctcttctctaagacccaaatactctatgttgtgctttggcttctttgcgtggctttcac

SEQ ID NO: 455080 - DNA, 120 bp, Artificial Sequence
  ENSG00000156471_11 (sequence is synthesized)
cactttcctctgtctgtacggcatgatttggtatgcagaacactatggtcaccgagaaaagacctactcggagtgtgaagatggcacctacagtccagagatctcctggcatcacaggaa

SEQ ID NO: 455081 - DNA, 120 bp, Artificial Sequence
  ENSG00000156471_12 (sequence is synthesized)
agggacaaaaggttctgaagacagcccacccaagcatgcaggcaacaacgaaagccattcttccaggagaaggaatcggcattccaagtcaaaagtcaccaatggcgttggaaagaaatg

SEQ ID NO: 455082 - DNA, 120 bp, Artificial Sequence
  ENSG00000156471_13 (sequence is synthesized)
aaaaaccctggttaatcaaagatgttccagagtgcctagaactgagagggaaatggaactcatttggaactccccgtgaggaggtcgaggcgcacagggcaagcaggaagaggcgagggc

SEQ ID NO: 455083 - DNA, 120 bp, Artificial Sequence
  ENSG00000156471_14 (sequence is synthesized)
acttgggggtcattatttgagatcgtaagtcttgtttcccacagacctggccgcgtcaggcagatcatcgcctggggggcctttgccaacgtggggtctcttctaacttcagcacttgac

SEQ ID NO: 455084 - DNA, 120 bp, Artificial Sequence
  ENSG00000156471_15 (sequence is synthesized)
atgcggtcaccggtggcagcgcggtgtgttgaagggaaacggtagctattcattcacagttgccaagagcagctccgcgcctgctggatcgtggatgcagcgtaaacatcttccttcaga

SEQ ID NO: 455085 - DNA, 120 bp, Artificial Sequence
  ENSG00000156471_16 (sequence is synthesized)
cgaggcattaaccccatggttaatggactggtcaccagtttttattttatttttatgaatctacctttccattgattgatttaagttcaggccacttttctgtcttttatttggttactg

SEQ ID NO: 455086 - DNA, 120 bp, Artificial Sequence
  ENSG00000156471_17 (sequence is synthesized)
ttgttatttgtttttaagttaggatgctttttaacagcctttagaagccgctgctgaaattgatactgggggaagggttccccttccttctagagcagaaaagggagagaggtgttgtat

SEQ ID NO: 455087 - DNA, 120 bp, Artificial Sequence
  ENSG00000156471_18 (sequence is synthesized)
tcctgtttggtaacctcagtctcctgtaagacctcctaccacatggcgagtatacaccaatcaggagagggtagctgcctgcataggagcctcgcttccgattattcccttcccaatatt

SEQ ID NO: 455088 - DNA, 120 bp, Artificial Sequence
  ENSG00000156471_19 (sequence is synthesized)
attcatccagacttagccacagtgcacaaaagcaaacctgctagagaggcagtgaacaccacagcttctccccagctaggtgccttttacatcgggtttgttctccttccatggtgtgtt

SEQ ID NO: 455089 - DNA, 120 bp, Artificial Sequence
  ENSG00000156471_20 (sequence is synthesized)
accttgaccttgatagttcaccacctctgatggatccctgttttaaataaaaacgattcactttaaagcctatcaaaggtctgtctgtaaaatgctcattttcttgcatcttactggtat

SEQ ID NO: 455090 - DNA, 120 bp, Artificial Sequence
  ENSG00000156471_21 (sequence is synthesized)
cttctattgattgtaagcagtctgtgtttttcaagtgactttaggataatatatatgtgttttacatagtgagaagaaaaaagaaaagatgtgtattttaaagggcttacagacatatat

SEQ ID NO: 455091 - DNA, 120 bp, Artificial Sequence
  ENSG00000156471_22 (sequence is synthesized)
gtcctacttcttagactacccaagtgaccaacaggaatgaacaacatagtcattgttttttcctgtggtaatggtttccaagttggacttttttttcctctaacaagaggccagtaccca

SEQ ID NO: 455092 - DNA, 120 bp, Artificial Sequence
  ENSG00000156471_23 (sequence is synthesized)
gttgattagcttacagatatcaactcactgaaagtaatcttttgttccctcatttcacacagcacaaaggttcgttctgatgtttcttcttctttaaggaaatctttagccatagaagtg

SEQ ID NO: 455093 - DNA, 120 bp, Artificial Sequence
  ENSG00000156471_24 (sequence is synthesized)
tcactttttttttttctgcaaaagaattccaagatgaacgggttgaatgaatcatgccagccagggtcacatcctgtcctcagggggcccagtgctcaatagtagattctgcgggagtgg

SEQ ID NO: 455094 - DNA, 120 bp, Artificial Sequence
  ENSG00000156471_25 (sequence is synthesized)
agaagcgtcagtggcagctccgctcacttggtgagtgagggatttggctgtgatgagcctcagctccgagctctcaaatgtcctccagccagcatctgcctgcttcccacaaaaggatag

SEQ ID NO: 455095 - DNA, 120 bp, Artificial Sequence
  ENSG00000156471_26 (sequence is synthesized)
aagagaggcaaagtgcgtgtttcataaaacctgcctgcacttttataacccatcaaagaggccatttttaaacacaggtacaatttaaacatgatctttctttgcaaataaatatgtttt

SEQ ID NO: 455096 - DNA, 120 bp, Artificial Sequence
  ENSG00000156471_27 (sequence is synthesized)
gtttcatcctgtgttctgcttttctaagcatgacatacttgtgcccattggagaagacacctgtctcttctttctcacaccggtggtgcctcactgagtgtttccgggttcattttccgg

SEQ ID NO: 455097 - DNA, 120 bp, Artificial Sequence
  ENSG00000156471_28 (sequence is synthesized)
gagcactgggcctgacactttcacactcttctgactttcgccttgttgcaactgatggagcatgtgtgcttcctctgaggccagcctacaggaggcagctgtttcgcaggtggtgaattc

SEQ ID NO: 455098 - DNA, 120 bp, Artificial Sequence
  ENSG00000156471_29 (sequence is synthesized)
gactttactgtggcattgtgaagagcagggtgcacaggagatgattttttctccatggctttgtaagaaacagccaggaaagttctcagatactttccatgccctttctttgagttgaaa

SEQ ID NO: 455099 - DNA, 120 bp, Artificial Sequence
  ENSG00000156471_30 (sequence is synthesized)
ctttctatttcccttcagtcagagctctttactatagtagttacaaaaccagtgctttccatggctggccagaaccacagctgctattccttttagaagccatactgctgggtttggcct

SEQ ID NO: 455100 - DNA, 120 bp, Artificial Sequence
  ENSG00000156471_31 (sequence is synthesized)
acttttttcaccgtttctatggaaataaacctcacattgatggaaatagaatgcgtgtttcagaatcatcattcaatatctgaaatgatttgattgtaaattatctcatggtccctgttt

SEQ ID NO: 455101 - DNA, 120 bp, Artificial Sequence
  ENSG00000156471_32 (sequence is synthesized)
gcaaaccaccctcttaagagagaacattgttttggacctaaagcttgaagaacggtttatgtatttttctccttaagtagcattgcattgagtgttaggttcttttccctttttttcatt

SEQ ID NO: 455102 - DNA, 120 bp, Artificial Sequence
  ENSG00000156471_33 (sequence is synthesized)
cttggtcttcccaaagcttcttcccacatttcgtttgtgtctgtttccaccattcatagaaaccttggaaccactctcacagcaatgctaggatgtttcatggacctgttaagcattttg

SEQ ID NO: 455103 - DNA, 120 bp, Artificial Sequence
  ENSG00000156471_34 (sequence is synthesized)
atgatacaagacatcctatcaatgccagtcttattttcgctaggactctgcttccacagtaagctcctaaggtgctcacccaacccaggagaaaacaaaattcattaccaaatacaacag

SEQ ID NO: 455104 - DNA, 120 bp, Artificial Sequence
  ENSG00000156471_35 (sequence is synthesized)
gttcagccttcttggtcttccctcagaagccaccgtgtagcaccctggaatgatgcctctttatgccaaggcccaccctttggaattgggagggttttgggtagaatcctgcacttacag

SEQ ID NO: 455105 - DNA, 120 bp, Artificial Sequence
  ENSG00000156471_36 (sequence is synthesized)
aggcccttggggtcattgagaagtggaggaggttggacacagaaggggaggctaaacacaaggtggggaagaaaaaatgtaaccattggcagccagactgaagctagccctttaaaatac

SEQ ID NO: 455106 - DNA, 120 bp, Artificial Sequence
  ENSG00000156471_37 (sequence is synthesized)
ggggttggggggttaacatccgctctttggaatgtgctcagtgactgctgcagagttcctgggccaccctaatgtttaccaggtgggcgttgtttatatggttcttattgttatgacaac

SEQ ID NO: 455107 - DNA, 120 bp, Artificial Sequence
  ENSG00000156471_38 (sequence is synthesized)
caactagaaatcccacagtagactagacagtgctccctaccatttcccatttataggattgaaatcaagatgtaaggagagctggccgggcgcagggctcacgcctgtaatcccagcact

SEQ ID NO: 455108 - DNA, 80 bp, Artificial Sequence
  ENSG00000156471_39 (sequence is synthesized)
gtcccagctactcgggagacagagacagagagatcacgccaccgcactctctaacctgggcgacagagcgagactatctc

SEQ ID NO: 455109 - DNA, 120 bp, Artificial Sequence
  ENSG00000156471_40 (sequence is synthesized)
tctctctcacacacacacacacacacccacacatgtgcacacacgtacacacacgcatgcacccacatgcaaacgcacacacatgatgatgactgtgctgtccagagcctctttccctgg

SEQ ID NO: 455110 - DNA, 120 bp, Artificial Sequence
  ENSG00000156471_41 (sequence is synthesized)
atgtacttgtcagtggcctcttggagaaactcgtagactctttcttgggtgtaagaggtaatagacttgacattttaaattgttccttctctgtatttcctgtgtagttacctaaaaacc

SEQ ID NO: 455111 - DNA, 120 bp, Artificial Sequence
  ENSG00000156471_42 (sequence is synthesized)
aggtctctgggagggttgttgagttgcatggttgtccacaggtgatagagttcagggaaagaaaatcctctcattacgcaaaggggtctgtgaggaagaatgcacactttatcgtcagac

SEQ ID NO: 455112 - DNA, 120 bp, Artificial Sequence
  ENSG00000156471_43 (sequence is synthesized)
aataatcaccccgggctcggcaaattcgctcagagcacgtgcctgtaaggatatggcgaggtaaacactgaggttggggcctccagtcctgccactgcagaaaccgcatgtcacaactca

SEQ ID NO: 455113 - DNA, 120 bp, Artificial Sequence
  ENSG00000156471_44 (sequence is synthesized)
ttccctagccattgctggccctgcttgtgacggctctgttcagtagaccaatatttttgtctaacttttgttagataaaaaaagttatgtttgtttggagaaaaaaagaaaagtgatggg

SEQ ID NO: 455114 - DNA, 120 bp, Artificial Sequence
  ENSG00000156471_45 (sequence is synthesized)
aaagctgtggactggcttttggaagctgggttttctccccagctcttgaactgtgtggaggcctcttcctgtgttccggcctgtggctcttctgggcaaacgcttgccctgaccttcatt

SEQ ID NO: 455115 - DNA, 120 bp, Artificial Sequence
  ENSG00000156471_46 (sequence is synthesized)
tagtagatatgaggataccatagaaaatagacatgaatggctttaagacacgatggccgtctggtagacggtaatatttttttcggtaaaaataacactttcatcctttatttacacctt

SEQ ID NO: 455116 - DNA, 120 bp, Artificial Sequence
  ENSG00000156471_47 (sequence is synthesized)
cagtctaaagaacttaaggcatgttgtggaagattgattctgcatcacctgtgagaggaaagaaccttgtttttatagcagagaaatataagcacagggaggttctgtcacttgccagtg

SEQ ID NO: 455117 - DNA, 120 bp, Artificial Sequence
  ENSG00000156471_48 (sequence is synthesized)
gagaggcagggatgcagcatgctcgcctttttgccctgccacttctcccagggagttcctaaaattcctgcactaagcctgtctctctccctagacctactcggagtgtgaagatggcac

SEQ ID NO: 455118 - DNA, 120 bp, Artificial Sequence
  ENSG00000156475_0 (sequence is synthesized)
cttgggggcttctgagtttgagctgcatgcagaaatgtaaggcagtgcttcctggcgctgatggcaaaatgggacccatctccagttattcctcgggcaccccagctttgcaaatctggg

SEQ ID NO: 455119 - DNA, 120 bp, Artificial Sequence
  ENSG00000156475_1 (sequence is synthesized)
aaagaacctacataaacatattggtgatgtagccagcttaaaaggccgagagaatccttatggattcaggagactgtttttttatttagatttttattttttatttggaagatgaaatgc

SEQ ID NO: 455120 - DNA, 120 bp, Artificial Sequence
  ENSG00000156475_2 (sequence is synthesized)
ttctctcgttacctgccttacatcttcagacctccgaacaccatcctttcttccagctgccacacagaagctgacattatctctacggtagaattcaaccacacgggagaattactagcg

SEQ ID NO: 455121 - DNA, 120 bp, Artificial Sequence
  ENSG00000156475_3 (sequence is synthesized)
acaggggacaaggggggtcgggttgtaatatttcaacgagagcaggagagtaaaaatcaggttcatcgtaggggtgaatacaatgtttacagcacattccagagccatgaacccgagttc

SEQ ID NO: 455122 - DNA, 120 bp, Artificial Sequence
  ENSG00000156475_4 (sequence is synthesized)
gattacctgaagagtttagaaatagaagaaaaaatcaataaaataagatggctcccccagcagaatgcagcttactttcttctgtctactaatgataaaactgtgaagctgtggaaagtc

SEQ ID NO: 455123 - DNA, 120 bp, Artificial Sequence
  ENSG00000156475_5 (sequence is synthesized)
agcgagcgtgataagaggccagaaggctacaatctgaaagatgaggagggccggctccgggatcctgccaccatcacaaccctgcgggtgcctgtcctgagacccatggacctgatggtg

SEQ ID NO: 455124 - DNA, 120 bp, Artificial Sequence
  ENSG00000156475_6 (sequence is synthesized)
gaggccaccccacgaagagtatttgccaacgcacacacatatcacatcaactccatatctgtcaacagcgactatgaaacctacatgtccgctgatgacctgaggattaacctatggaac

SEQ ID NO: 455125 - DNA, 120 bp, Artificial Sequence
  ENSG00000156475_7 (sequence is synthesized)
tttgaaataaccaatcaaagttttaatattgtggacattaagccagccaacatggaggagctcacggaggtgatcacagcagccgagttccacccccatcattgcaacaccttcgtgtac

SEQ ID NO: 455126 - DNA, 120 bp, Artificial Sequence
  ENSG00000156475_8 (sequence is synthesized)
atccaagcaacagatcatttttctctgaaattatctcttcgatttcggatgtgaagttcagccacagtgggaggtatatcatgaccagggactacttgaccgtcaaagtctgggatctca

SEQ ID NO: 455127 - DNA, 120 bp, Artificial Sequence
  ENSG00000156475_9 (sequence is synthesized)
acatggaaaaccgccccatcgagacttaccaggttcatgactacctccgcagcaagctgtgttccctctatgaaaatgactgcatttttgataaatttgagtgtgtgtggaatgggtcag

SEQ ID NO: 455128 - DNA, 120 bp, Artificial Sequence
  ENSG00000156475_10 (sequence is synthesized)
acagtgtcatcatgacaggctcctacaacaacttcttcaggatgttcgacagaaacaccaagcgtgatgtgacccttgaggcttcgagggaaaacagcaagccccgggctatcctcaaac

SEQ ID NO: 455129 - DNA, 120 bp, Artificial Sequence
  ENSG00000156475_11 (sequence is synthesized)
cccgaaaagtgtgtgtggggggcaagcggagaaaagacgagatcagtgtcgacagtctggactttagcaaaaagatcttgcatacagcttggcatccttcagaaaatattatagcagtgg

SEQ ID NO: 455130 - DNA, 120 bp, Artificial Sequence
  ENSG00000156475_12 (sequence is synthesized)
cggctacaaataacctatatatattccaggacaaggttaactaggtggacaagttattacttaataatctcacatactgaatactagtcaaacaagtttttaaatgtttctttgggtctt

SEQ ID NO: 455131 - DNA, 120 bp, Artificial Sequence
  ENSG00000156475_13 (sequence is synthesized)
catttgatgcattgactttaatttccctatacaggaaatgattggaatagaattaaaaggagtccaacattcccagctccccagttctaagaaacttttgtcaaacccaataggtttggg

SEQ ID NO: 455132 - DNA, 120 bp, Artificial Sequence
  ENSG00000156475_14 (sequence is synthesized)
acacttctgtttagaattgaaagctgccagctaacagtaattcttccatagttgacttgaacttctgatgcttttattgcccagttttctctggtgggtccagtgttttgttcctaggtg

SEQ ID NO: 455133 - DNA, 120 bp, Artificial Sequence
  ENSG00000156475_15 (sequence is synthesized)
tctgctgcgataaaatgaggttgtctgtagtatttaaggagaaaagagataagttttttttaattaagcaattccatttgattgaaaaaaatcaacaaaaaataaacaccgtttactctt

SEQ ID NO: 455134 - DNA, 120 bp, Artificial Sequence
  ENSG00000156475_16 (sequence is synthesized)
cccgcctgccggagccgccctcccgtgggaccagcaccctcattccggccaggcaagcctgaatcctgtccctgccatctcgccactgcagctcgggtccagaaaggcaccattttgtcg

SEQ ID NO: 455135 - DNA, 120 bp, Artificial Sequence
  ENSG00000156475_17 (sequence is synthesized)
cggctgcccgctctcccagggggaggagggatcttttttgcattttggagcggctgccaaggaggggaacctgttgggcatctccccagacccgcttgtgagcgcctccggggcgggcgg

SEQ ID NO: 455136 - DNA, 120 bp, Artificial Sequence
  ENSG00000156475_18 (sequence is synthesized)
gcgggaccagacccctcggggcacggcgtatcttggcacccggaggcagcggaggcaggcgcagcatcctcgctgggaactggagctggagtgagcgcaccgcgcgggaggagccgccgc

SEQ ID NO: 455137 - DNA, 120 bp, Artificial Sequence
  ENSG00000156475_19 (sequence is synthesized)
agcctcgcagaacccgagtggaggaggtgacagctccattgccgggtttttattttttttctctccgcctccccgtctcctcctcaggctcggaccatggtgcagtcccactggctcccc

SEQ ID NO: 455138 - DNA, 120 bp, Artificial Sequence
  ENSG00000156475_20 (sequence is synthesized)
tgcccccctctcctgtgagactggctgcggggagggatcatggatacttgtctgccggcttctggttcccacgcaagtaagcctgctgtcaatggaggaggacattgatacccgcaaaat

SEQ ID NO: 455139 - DNA, 120 bp, Artificial Sequence
  ENSG00000156475_21 (sequence is synthesized)
atttttttttccattttccattttcctttgaacaatttcatttaagccagagatttattgcatgaagctgagaagaggatgcagaatgacaaggaaagggcacatcaaccctgctatgct

SEQ ID NO: 455140 - DNA, 120 bp, Artificial Sequence
  ENSG00000156475_22 (sequence is synthesized)
ctttttttgtaagctccatagaaacagcctgagaatttggctagggaacttgaatgcttcaggggacagaaagagagcactttcgacacagtgcttcccagagtgagcttggcagggcca

SEQ ID NO: 455141 - DNA, 120 bp, Artificial Sequence
  ENSG00000156475_23 (sequence is synthesized)
ggcggggccaaattccatctgctgccttgttactcttgctttttgtgctcttaaatggctccatataatcttctacttacatgttccttggcttttttctcttcaaccttttccagctta

SEQ ID NO: 455142 - DNA, 120 bp, Artificial Sequence
  ENSG00000156475_24 (sequence is synthesized)
tttattccattgacttctaaaggccgagtcctgggtgcttattatctggtgttctaaatgaagcagtaagttggaagcagtgccaccacccctgagtccctgagaaaggctggtctgttc

SEQ ID NO: 455143 - DNA, 120 bp, Artificial Sequence
  ENSG00000156475_25 (sequence is synthesized)
tttttgggtgtttctcctaagcagcaccctcccctcctcctggttttggtaaccaaaagtaacaatccatcaacctccattgtacctagaacaaaaatagccaataaaaacgctgagttg

SEQ ID NO: 455144 - DNA, 120 bp, Artificial Sequence
  ENSG00000156475_26 (sequence is synthesized)
tgaagtccaatcaggcacttctaactcaccccaagctcgccatctggaaaaacagaccagaaggctctcttctacagaaatgaactgtggggaaatcaagcagctgtgacatgaagtgaa

SEQ ID NO: 455145 - DNA, 120 bp, Artificial Sequence
  ENSG00000156475_27 (sequence is synthesized)
tgaagtccacttgaagctgtggaagatggttcatccttttccccagttgaggatccagatttataacttctagaaagccatttccagaaggttctatgtggcacacccctaggaaaggca

SEQ ID NO: 455146 - DNA, 120 bp, Artificial Sequence
  ENSG00000156475_28 (sequence is synthesized)
ctaaatgcatgcaaaggatttataaacttaggaaagtagatgggtggagtccagaaaactggttctgggttaatatctctacatctgtcttgatgactcatttctcctaactcccattta

SEQ ID NO: 455147 - DNA, 120 bp, Artificial Sequence
  ENSG00000156475_29 (sequence is synthesized)
gtgcagggtaaatggtttgagatgagagtttttcaatgaaagggaaattttctttcagtttacagatgtattagaagtcctgactttcaagtgtaatttgctttggaggaggaaaaaata

SEQ ID NO: 455148 - DNA, 120 bp, Artificial Sequence
  ENSG00000156475_30 (sequence is synthesized)
gtgaaagaatcattttatctcaattctaagctactatccatttactaatagctttttggcaaggaaataactgtcaccttaggtaaaaacagtcttgttagatgcagcccaatttcagga

SEQ ID NO: 455149 - DNA, 120 bp, Artificial Sequence
  ENSG00000156475_31 (sequence is synthesized)
acattaaaatgtaaaaaagtacgtctcagaattgagggagcatgggaacaaagacgagactttctcagtatttctcatttttcctgcaaggaaagcctcgccttaggcatctcaagtaaa

SEQ ID NO: 455150 - DNA, 120 bp, Artificial Sequence
  ENSG00000156475_32 (sequence is synthesized)
gtggctaaggtgtaaactctctgggcaagatttctgtcctgactgggacagtgttcttggaggagacatgagagagtcagaaacttctgccagtcatagagagtgatgattttgcagaag

SEQ ID NO: 455151 - DNA, 120 bp, Artificial Sequence
  ENSG00000156475_33 (sequence is synthesized)
gccactgggttattggcctacatttaccaccgacttcctttatggccttttctccacttctccggactcagctcctctgtctgtaccacgtcgggggttgggaccaatcattgtatctca

SEQ ID NO: 455152 - DNA, 120 bp, Artificial Sequence
  ENSG00000156475_34 (sequence is synthesized)
aacttaagaatcaactcacatttgtactattactcatgtaacatttttttaagtcaccttttcttaaaagcaagacttagcctcctccaaagaaataatatgcatgaaatttcaactctg

SEQ ID NO: 455153 - DNA, 120 bp, Artificial Sequence
  ENSG00000156475_35 (sequence is synthesized)
atatgctaggtttttccctaacattaatcacataattatcaatgtaacaaacatgcacccacataccacctgaaatcattttgtgaaccaccaggagcatgtgtatcaaactttgggacc

SEQ ID NO: 455154 - DNA, 120 bp, Artificial Sequence
  ENSG00000156475_36 (sequence is synthesized)
ctgagtaactgatatgacagaagatttatgcccttaggggcatcaaagatggtggttcttcacatattagagtcagcagggctgcccataacacacacaggaataatttttgtcatggtt

SEQ ID NO: 455155 - DNA, 120 bp, Artificial Sequence
  ENSG00000156475_37 (sequence is synthesized)
taaggagttcataggcccctttgcagtttatctgcgaactccaaataaaagcccctacactagtccaacacccttagcatatagatgtacaaactgggatccagagtaggatgagtttgc

SEQ ID NO: 455156 - DNA, 120 bp, Artificial Sequence
  ENSG00000156475_38 (sequence is synthesized)
cagagaagaaagagcagagggcagccatcctctcctccatcccctgcaaaggatgcattagagcaaacacccaagactcctggacgggaacaggaggggaaagccctagagattaggcct

SEQ ID NO: 455157 - DNA, 120 bp, Artificial Sequence
  ENSG00000156475_39 (sequence is synthesized)
cagggagcaataaccaccacgatgtttcacaaattaactgttctttaccaggtactgaactaggtattttacatgtgtgatctttcagccccagtactggcaatatttcttagttagtgg

SEQ ID NO: 455158 - DNA, 120 bp, Artificial Sequence
  ENSG00000156475_40 (sequence is synthesized)
cacatagaagtcagtctgttttcctgctgacactaaaaactacttgaaggctgatttgctaccttgcaacagttggttcgattctaagggccctatactactttaccccacaaggcctgc

SEQ ID NO: 455159 - DNA, 120 bp, Artificial Sequence
  ENSG00000156475_41 (sequence is synthesized)
tgcttggtaagagccatcagattacaactggagggtgtcagttgaatgaaggaaaatggaagccacgccatccctggcttttacaaaaaccatccttgcgcaacattcagttcctgacgt

SEQ ID NO: 455160 - DNA, 120 bp, Artificial Sequence
  ENSG00000156475_42 (sequence is synthesized)
taaaaacaagtaatgcaaaaagctgaactttggtagacattcgtactcttctgtcaggaggaggaagattagttagaaaaaacaaaaaaggaagatactagccagcatcaagaagtggga

SEQ ID NO: 455161 - DNA, 120 bp, Artificial Sequence
  ENSG00000156475_43 (sequence is synthesized)
tatataaaggcagatgggcagtgggaatcaagttgcttcttaactccttcaagtttggctcctgcctttactcttccattgaaaaaaaagcacctttaaacctctcattgatcttgtaat

SEQ ID NO: 455162 - DNA, 120 bp, Artificial Sequence
  ENSG00000156475_44 (sequence is synthesized)
taattcaaccaaatcaacttctattaggcaaccagcatatataagatggaacaattgcaaggtggaataaagatgaagctaaaattctgctagctcagtggcccaatgaaataagtcagc

SEQ ID NO: 455163 - DNA, 120 bp, Artificial Sequence
  ENSG00000156475_45 (sequence is synthesized)
tattctagggtccattataataaaaggtacacactcaaatgcccaatttctaaggacttgaaaagccataatttccctcccttcaagcctacagagcaactgcctaaagcttccctcccc

SEQ ID NO: 455164 - DNA, 120 bp, Artificial Sequence
  ENSG00000156475_46 (sequence is synthesized)
agacaaccccaggcctcatttctttttcagtccctttgctagctgcctgcagggctcaagaaagccctggtaggcctcataatgaggatttagggatgacactatagtccacagcctgaa

SEQ ID NO: 455165 - DNA, 120 bp, Artificial Sequence
  ENSG00000156475_47 (sequence is synthesized)
tggtggaacccttactaattttccctcttccgtgatgaatgtgtggatgaagccggtgtgtttttaataatgccaccccacttccaaaacaaatcccctgacacagtctttggacatacc

SEQ ID NO: 455166 - DNA, 120 bp, Artificial Sequence
  ENSG00000156475_48 (sequence is synthesized)
accctgaatgcacccgatctcatctgatcttggaagtgaaatggagtcaggcctggttagtctttggatgggggaagtctagacacaccactgagaaacattcacactgcaacctgattc

SEQ ID NO: 455167 - DNA, 120 bp, Artificial Sequence
  ENSG00000156475_49 (sequence is synthesized)
actgtgcatccaacatgccttcatccacctcttccccctgaacttctaagtcaactctcagggactgctttccaagggagcaaccaacctggtcagtggaaaaaggatgagactgggaga

SEQ ID NO: 455168 - DNA, 120 bp, Artificial Sequence
  ENSG00000156475_50 (sequence is synthesized)
caggaaacgtgggtcctgctcctggtaaccatggaacttaagctacccactcagtccctatgtcagtgtcatcacctgtaaaatggccagaaagacatctatcctagctcagagaattgt

SEQ ID NO: 455169 - DNA, 120 bp, Artificial Sequence
  ENSG00000156475_51 (sequence is synthesized)
tattgggagaacaagaaatccatttacttacaactattttgataggtttaaagcaccataaactaataatagcaacaacagtgatgggtaatatactattgctttccatgcctcatctca

SEQ ID NO: 455170 - DNA, 120 bp, Artificial Sequence
  ENSG00000156475_52 (sequence is synthesized)
ttatctcctctcccagaccccatggtggcattagtatttccattttgcaaatgagaaaatagactcaagttgtcaacctagccaagggcacaaagcccgagagagatggaaccaggactc

SEQ ID NO: 455171 - DNA, 120 bp, Artificial Sequence
  ENSG00000156475_53 (sequence is synthesized)
caactcaaggtatctgactctaaagccagagctgttaaaatacagctctaacatacaatagttgctaacatttattgagcacttattataagccaggctttgttctacaaatttcacatg

SEQ ID NO: 455172 - DNA, 120 bp, Artificial Sequence
  ENSG00000156475_54 (sequence is synthesized)
tattgacttatttacccctaaaactccagatgcagatactattgttgttctcattttatagatacagaaacagatgaatgacaaccaaatttacacagttcacaagtgacaaagccaggc

SEQ ID NO: 455173 - DNA, 77 bp, Artificial Sequence
  ENSG00000156475_55 (sequence is synthesized)
acaaccaaatttacacagttcacaagtgacaaagccaggcagttttagttaaagttcttatccactatccccatcat

SEQ ID NO: 455174 - DNA, 120 bp, Artificial Sequence
  ENSG00000156475_56 (sequence is synthesized)
agccccagtaatgacccataagctcaatgaattaaagattcattggttgcctgggatgtgtcaggcagccaggttctagacaaggggctggagttactaagatatttaaaccactggccc

SEQ ID NO: 455175 - DNA, 120 bp, Artificial Sequence
  ENSG00000156475_57 (sequence is synthesized)
ctgccctccaagagatgacactcacataggagaaagtgcatatttgcatactgtaaacatttttacaatgagatatctatgaagggcagaagtcatacagaggaagaaatagttaatcaa

SEQ ID NO: 455176 - DNA, 120 bp, Artificial Sequence
  ENSG00000156475_58 (sequence is synthesized)
tgagtgataagaaaaggttctcagaatgtgtcatctaagcagaattttaactaaatttgctcaacaaagcatgatacagcgtttccaataggtagaccaacatataccagaatatgaagc

SEQ ID NO: 455177 - DNA, 120 bp, Artificial Sequence
  ENSG00000156475_59 (sequence is synthesized)
aaaatccatatggcatggaaacagaaagccaatgtttctctccttccattagaaacacattttcgacatactagaactagcctacccctttttccttttgttcatccaataacaaatatt

SEQ ID NO: 455178 - DNA, 120 bp, Artificial Sequence
  ENSG00000156475_60 (sequence is synthesized)
tattaaaccttattttaagcactgtatttaagtgtaaagtagacggaaagaataaaaggaaaccaatatttcctgagtagttattgcaatgacaggcattgggagaggcactgttttaaa

SEQ ID NO: 455179 - DNA, 120 bp, Artificial Sequence
  ENSG00000156475_61 (sequence is synthesized)
tcattgttaatcacctgataggtagatgtattattccatttttatagcgagaaacagactcaaaagggttagatgacgtagcaggaagttttatctagatctatcctgttccagatccta

SEQ ID NO: 455180 - DNA, 120 bp, Artificial Sequence
  ENSG00000156475_62 (sequence is synthesized)
tacttcttccatcacagttattggtaatgcagagttaccttggcttgattattttccctagcgtggatactcacaaacacgccatttctctgtgactaaatattgcctgacagctgacca

SEQ ID NO: 455181 - DNA, 120 bp, Artificial Sequence
  ENSG00000156475_63 (sequence is synthesized)
agaatacaaatttggtctgtcatcaaagcagagagtgaagtcaagtggctcacaggtctccaacttctgactttgaccttattatgactgattaactgtcccccaatttagatattccat

SEQ ID NO: 455182 - DNA, 120 bp, Artificial Sequence
  ENSG00000156475_64 (sequence is synthesized)
gccccattggttaaactgctggtggcagaaccatcatgatctgccatctccgctgatccctgcctcagctgcaatcaaagcaatgatcactgtcaggccagaagaaggggcttagccact

SEQ ID NO: 455183 - DNA, 120 bp, Artificial Sequence
  ENSG00000156475_65 (sequence is synthesized)
gccaagacagatcccagtccactcccagccttcccgcccctgctgctcattccccaaaaagtcaacctgggttttcctgggtgaacagtgcccactgaacagctcctgcttgcccatctc

SEQ ID NO: 455184 - DNA, 120 bp, Artificial Sequence
  ENSG00000156475_66 (sequence is synthesized)
aagccctctcagttgccactccaatcattttggctgctgtatttggtttgagaaagagtggagaggacacttcttcataactcatatttgacagaaacccagaaattgtaggaacaagcc

SEQ ID NO: 455185 - DNA, 120 bp, Artificial Sequence
  ENSG00000156475_67 (sequence is synthesized)
atgattgctgtgattcttgctctggttggctagggatgccctcccttccagccagagtaatacatacttgtgggagtcatggaagactgaggaagctggagtagaagggaacaggggctt

SEQ ID NO: 455186 - DNA, 120 bp, Artificial Sequence
  ENSG00000156475_68 (sequence is synthesized)
tcctcagtggtaaaaggaaaagcaacattttggaactctaaacagttgctcagttgggcgaatttcatgcattcattcattcatttactaaatggttaatgattgttcatgtactgcctg

SEQ ID NO: 455187 - DNA, 120 bp, Artificial Sequence
  ENSG00000156475_69 (sequence is synthesized)
ccaagcccatgccagggtggtctgtggaagcagcagtgacagctccatcttcacacagctcacagatagcgggaggtgcagacaaactcacaggcaatggtggcagtggaatgtcaagag

SEQ ID NO: 455188 - DNA, 120 bp, Artificial Sequence
  ENSG00000156475_70 (sequence is synthesized)
cccaggataccgagcctgccagcctgcctgcctgggttaaaatctgagctccaccatgtaaaagctgagcaacctagaaaaatgacaacctctctgtgcctcgattttctcattatgaga

SEQ ID NO: 455189 - DNA, 120 bp, Artificial Sequence
  ENSG00000156475_71 (sequence is synthesized)
taaggataaaaacgacatctatctcataaaattgctgtgaagattgcatgatttaatatgcacaaagctcttagaaggatgcctggcccacaaatatgcattcagtgcacatttcttgct

SEQ ID NO: 455190 - DNA, 120 bp, Artificial Sequence
  ENSG00000156475_72 (sequence is synthesized)
acagttctgctaatcctataaaacatatgcactatgatggatgtgtctgggtgccaggaggacacaaaggagcactaactcatccagaccagaagcttcccagaggaggtgattcccaag

SEQ ID NO: 455191 - DNA, 120 bp, Artificial Sequence
  ENSG00000156475_73 (sequence is synthesized)
gtgaaatccgaaagataaagggagtgagttatccaggagaagagaaaggaaaagcatattccagacatcaggataggacagtggaggcaaaacagcatatgctatatatatatggaattc

SEQ ID NO: 455192 - DNA, 120 bp, Artificial Sequence
  ENSG00000156475_74 (sequence is synthesized)
acaacactctggtatgactgattagtaaaaagtaggaaggcagaccaagagaaataaggagacatggtaaggtgagtgggcaataatgcatgatctgaaaaataataatgcatggactta

SEQ ID NO: 455193 - DNA, 120 bp, Artificial Sequence
  ENSG00000156475_75 (sequence is synthesized)
gtgtggttcacatatcaggagcttctccaatagccaggctatgaggcactaaaatgaggaaatatggtttccaaacttcgcaaatacttatagtccagccacaggggatatactgataaa

SEQ ID NO: 455194 - DNA, 120 bp, Artificial Sequence
  ENSG00000156475_76 (sequence is synthesized)
ctcagctcaaatgtcacctcctcagagatgctttctcaaccacccttagttccatgaggactgcatcattgtttaggccactcctgtatccccagagcacagaacattgtctggctcata

SEQ ID NO: 455195 - DNA, 120 bp, Artificial Sequence
  ENSG00000156475_77 (sequence is synthesized)
gtaggtgctcaaaagttttgttgaatgaatgaacaaataaacgtgtaaggaagtcaggcacagcacttgcccacaggaagcttataagatgagcggcatgccattgggagtttgaatgat

SEQ ID NO: 455196 - DNA, 120 bp, Artificial Sequence
  ENSG00000156475_78 (sequence is synthesized)
atatggagatccaaacagggcatcagaggactgctcagaggagtcagggaattaagaaaaaattgggagccagtgagccaagatgtgttaaaagcaagtgatcaagcttagattgcagtg

SEQ ID NO: 455197 - DNA, 120 bp, Artificial Sequence
  ENSG00000156475_79 (sequence is synthesized)
ttagttaatagagcatatgtgtccctgcctgatgcattaccttccctgcagtagttagccttctgggaccctgaaaagcatgcagaaaggttgacagcttacaatcaataccatgttcac

SEQ ID NO: 455198 - DNA, 120 bp, Artificial Sequence
  ENSG00000156475_80 (sequence is synthesized)
tgatgcaggaagcaacattatcacatccaagatattgcccccacacccaggctgcagcactaaatattccccataacaaggcaaagggaagtgacaagagctattattctcaaccctccc

SEQ ID NO: 455199 - DNA, 120 bp, Artificial Sequence
  ENSG00000156475_81 (sequence is synthesized)
acttggaaacaagaggtgagacaaaccttcccctagatgttcttagggaaaggcaagacccccaaagaaatctttcagagctgagcacatgcctaatacagcaagacagggatgggagaa

SEQ ID NO: 455200 - DNA, 120 bp, Artificial Sequence
  ENSG00000156475_82 (sequence is synthesized)
gattggcattttcatttgcctgggtgtccacaatattgcaggggaagctctgtgggcagctgggaaatacaacaataaattggagggggatgaacaatagggtcagtggggctgtgtgct

SEQ ID NO: 455201 - DNA, 120 bp, Artificial Sequence
  ENSG00000156475_83 (sequence is synthesized)
gagtgaatgctggattttattctacatgcccaattcactccaataagataaacttgacttcctccagtgtggctttcttatttcagcttctctgactgtggcataattgaaagtcatatt

SEQ ID NO: 455202 - DNA, 120 bp, Artificial Sequence
  ENSG00000156475_84 (sequence is synthesized)
tcatctagaccattggttttcaactccaaatgcaggtggcttatgaagactcagcctgaatatataaagagaacagcaaacaatcatagttgcatattaaagacaatctatttctccgta

SEQ ID NO: 455203 - DNA, 120 bp, Artificial Sequence
  ENSG00000156475_85 (sequence is synthesized)
aaggaaagtaaagtgagtcatattacatacaagccacaatacagaactgatctgaaatacactgcggaatggcctttcagtctatgctggactctaacaggaaaaaggcagaaggtggtc

SEQ ID NO: 455204 - DNA, 120 bp, Artificial Sequence
  ENSG00000156475_86 (sequence is synthesized)
aatggtgcatttatttaaacccctcatttcctccctgacgagaagaaggacaacagttcttatttttcatattatttttgaaaaggcagaaaggttaattatatattgacatgatttgga

SEQ ID NO: 455205 - DNA, 120 bp, Artificial Sequence
  ENSG00000156475_87 (sequence is synthesized)
tcatgtcaaattgtaatccccagtgtttgaggtggggccaggtgggaggtgattggatcgtggaggtggatttctcatgcatggtttagcaccatcttcttggtgctattctcgtgatag

SEQ ID NO: 455206 - DNA, 120 bp, Artificial Sequence
  ENSG00000156475_88 (sequence is synthesized)
tggtgctattctcgtgatagtgagtaagttctcacgagatctggttgtttaaaggtgtgaagaacctcccctctgtctctcttgctcctgttcctgccatgtaagatatgctggctcccc

SEQ ID NO: 455207 - DNA, 87 bp, Artificial Sequence
  ENSG00000156475_89 (sequence is synthesized)
cctgccatgtaagatatgctgatccagaggcctctccagaagctgagcagatgtcagcaccatgcttcctgtacagcctgtggaacc

SEQ ID NO: 455208 - DNA, 120 bp, Artificial Sequence
  ENSG00000156475_90 (sequence is synthesized)
gcagcagcagcagcagcagcagcagctgcgagtgcgcgcgtgtgggtgtgagggtgagtgcgctggcgccggctgcagcgccctgcccagctccccgccagcttccctacccccgcctgc

SEQ ID NO: 455209 - DNA, 120 bp, Artificial Sequence
  ENSG00000156475_91 (sequence is synthesized)
agtattcccgtgaaaagggccagtcacacaggggatgactgcaagtccttcgtaaccactccaggacgctgccagggcctgagaagggacaaactccaattgctccagttcaaactggtc

SEQ ID NO: 455210 - DNA, 120 bp, Artificial Sequence
  ENSG00000156475_92 (sequence is synthesized)
ctggcctggtcaaacggaggagacagagcagtgattcacagcaggacgtggtacttgcagactgaccgtcctctcaggactcactagggtctcttctctgacgagatgatacctggaatt

SEQ ID NO: 455211 - DNA, 120 bp, Artificial Sequence
  ENSG00000156475_93 (sequence is synthesized)
gggacactcacccaggacacactatggtgcttcagccaagtgaaaggcactatcgagattggaaccacagaagctgacattatctctacggtagaattcaaccacacgggagaattacta

SEQ ID NO: 455212 - DNA, 120 bp, Artificial Sequence
  ENSG00000156475_94 (sequence is synthesized)
gcatgcgccccactgcagcaaagagcagccgcagcctctgcctcggccaccactgctgctgggaaagagtcgtggggctgctgacgcggttgggaggagcctcgcctttaatgcaccagc

SEQ ID NO: 455213 - DNA, 120 bp, Artificial Sequence
  ENSG00000156475_95 (sequence is synthesized)
gagtctaggatgttgaagagagctgggaggagatgccaagaacactaggctgcttcctaccatctagcttacagtccaacatgtgagtaacaccaatacaaatgaaaagccatcaaatgt

SEQ ID NO: 455214 - DNA, 120 bp, Artificial Sequence
  ENSG00000156475_96 (sequence is synthesized)
gtccaatagtgaatatcatcccggcagtctctgagctaggagggagagtcctggagaggtgtttattttctgatataaaaaagtcacaaaattgaaactactgagcttttcacctgtaaa

SEQ ID NO: 455215 - DNA, 120 bp, Artificial Sequence
  ENSG00000156475_97 (sequence is synthesized)
gatataaaaaaggagccaagggagaacccaagacagagaatagtggcccaataatgaagcatgaattatccagatgaaaacacctatggaaataaagctgacattatctctacggtagaa

SEQ ID NO: 455216 - DNA, 120 bp, Artificial Sequence
  ENSG00000156475_98 (sequence is synthesized)
gacagagcagtgattcacagcaggacgtggaattgggacactcacccaggacacactatggtgcttcagccaagtgaaaggcactatcgagattggaaccacagaaggaaactcatcttt

SEQ ID NO: 455217 - DNA, 81 bp, Artificial Sequence
  ENSG00000156475_99 (sequence is synthesized)
cattatctctacggtagaattcaaccacacgggagaattactagcgacaggggacaaggggggtcgggttgtaatatttca

SEQ ID NO: 455218 - DNA, 120 bp, Artificial Sequence
  ENSG00000156475_100 (sequence is synthesized)
ctaaagaggcaggcaggggccagaccacataggtccttgtgagtaattagaaggggctctgattttcttccaagagcatcagaaaactgttcacctctggaaagctttagctttgcaatt

SEQ ID NO: 455219 - DNA, 120 bp, Artificial Sequence
  ENSG00000156475_101 (sequence is synthesized)
cccaacaggtgacataacacttggagaaacactgaactctatgacctcttccccgctatgttctgtgatgcccggaagtagagctctgcactgttatttaatcctatcaatgtttgctct

SEQ ID NO: 455220 - DNA, 120 bp, Artificial Sequence
  ENSG00000156475_102 (sequence is synthesized)
actcactagggtctcttctctgacgagatgatacctggtgtgcaagtctccttttagaaatgcatagattctgctatatatttcttttcttgttggtctcttaagaacaactgggagctc

SEQ ID NO: 455221 - DNA, 120 bp, Artificial Sequence
  ENSG00000156475_103 (sequence is synthesized)
ttacctaacctgaagtgtctccttgtgttgttttcaggaattgggacactcacccaggacacactatggtgcttcagccaagtgaaaggcactatcgagattggaaccacagaagatgtg

SEQ ID NO: 455222 - DNA, 120 bp, Artificial Sequence
  ENSG00000156475_104 (sequence is synthesized)
ttggaccaagtgatctccaagggctgaccagattcagaagttgtctattccatgagcctagagataagatacatgcatgccatctgcgggctgtgcttccaaccattcagtaggtgagac

SEQ ID NO: 455223 - DNA, 120 bp, Artificial Sequence
  ENSG00000156475_105 (sequence is synthesized)
tcagggcccttttgagctgtggaggagaaaagcatgagcaccttccaagatgtttcgccactggatctgcatcagcctcctggaattgggacactcacccaggacacactatggtgcttc

SEQ ID NO: 455224 - DNA, 120 bp, Artificial Sequence
  ENSG00000156482_0 (sequence is synthesized)
cctttctcgttccccggccatcttagcggctgctgttggttgggggccgtcccgctcctaaggcaggaagatggtggccgcaaagaagacgaaaaagtcgctggagtcgatcaactctag

SEQ ID NO: 455225 - DNA, 120 bp, Artificial Sequence
  ENSG00000156482_1 (sequence is synthesized)
gctccaactcgttatgaaaagtgggaagtacgtcctggggtacaagcagactctgaagatgatcagacaaggcaaagcgaaattggtcattctcgctaacaactgcccagctttgaggaa

SEQ ID NO: 455226 - DNA, 120 bp, Artificial Sequence
  ENSG00000156482_2 (sequence is synthesized)
tgctatgttggctaaaactggtgtccatcactacagtggcaataatattgaactgggcacagcatgcggaaaatactacagagtgtgcacactggctatcattgatccaggtgactctga

SEQ ID NO: 455227 - DNA, 120 bp, Artificial Sequence
  ENSG00000156482_3 (sequence is synthesized)
catcattagaagcatgccagaacagactggtgaaaagtaaaccttttcacctacaaaatttcacctgcaaaccttaaacctgcaaaattttcctttaataaaatttgcttgttttaaaaa

SEQ ID NO: 455228 - DNA, 120 bp, Artificial Sequence
  ENSG00000156482_4 (sequence is synthesized)
gctgttggtgagtgggctcctaccgaccgaggtttaggcagcgcggggagctttgcgggttgccatttgtaactccggatcctaaaattcctgtcctgttctctgtctcttctaggttgg

SEQ ID NO: 455229 - DNA, 120 bp, Artificial Sequence
  ENSG00000156482_5 (sequence is synthesized)
tctttcctttctcgttccccggccatcttagcggctgctgttggttgggggccgtcccgctcctaaggcaggaagatggtggccgcaaagaagacggtgagtgaggcgggccaggcccgg

SEQ ID NO: 455230 - DNA, 120 bp, Artificial Sequence
  ENSG00000156482_6 (sequence is synthesized)
aagacgattcacgtggagagatgtcttggccagggcgggcagatgtgagcccacgggggtgacagcatgcctgctggcatttggagggccccagaaggaatcccagtggccctctcaatg

SEQ ID NO: 455231 - DNA, 120 bp, Artificial Sequence
  ENSG00000156482_7 (sequence is synthesized)
gtccttactaatgctagataatgctttgctttcttttatttgcatcttaccctcttccgtgagtattgatactgtcttaaacatagtaggggttgattagatatttgctggttgcccctt

SEQ ID NO: 455232 - DNA, 120 bp, Artificial Sequence
  ENSG00000156482_8 (sequence is synthesized)
cacttgcaagggatacatacaaatgttggtttgtattggataatgaatatgatgtttttaagagtaatatgtgattttgttactttttgaaggccttaacaacattaacactagtaaaag

SEQ ID NO: 455233 - DNA, 120 bp, Artificial Sequence
  ENSG00000156482_9 (sequence is synthesized)
ctgtcttctatagtagtgcttctgaaacatgactgtgcaaaggagtcacatgggtgatgttaaaatgcaagttctgatttcattggatctgggatggggcccgaggtgccatttattatt

SEQ ID NO: 455234 - DNA, 120 bp, Artificial Sequence
  ENSG00000156482_10 (sequence is synthesized)
ctgggatggggcccgaggtgccatttattattttattttttttaagacagagttttgctcttgtcaccccggctggagtgcaatggcacaatctaagctcactgcaacctctgcctccca

SEQ ID NO: 455235 - DNA, 86 bp, Artificial Sequence
  ENSG00000156482_11 (sequence is synthesized)
acgctcctgacttcaagtgatcgccagaaattttaactctaaaacggtatcacttcccatctggaattctgggcactgaggggatg

SEQ ID NO: 455236 - DNA, 120 bp, Artificial Sequence
  ENSG00000156482_12 (sequence is synthesized)
gtatcacttcccatctggaattctgggcactgaggggatggtgatagaaatggcttatcttttaaaggtttagattctggatcctccacttactattctgtggctcagtttcattagatt

SEQ ID NO: 455237 - DNA, 120 bp, Artificial Sequence
  ENSG00000156482_13 (sequence is synthesized)
atcgaagagactgaacgggcttcgcctaccgcgaattcatcgtgaacgaatatacaggagtgtaaacttgtaatctgagtaccatgaactcgaacacttgcaggataattacggtagcga

SEQ ID NO: 455238 - DNA, 120 bp, Artificial Sequence
  ENSG00000156482_14 (sequence is synthesized)
ctccccgacccacccccaaatcgtgtgctccccttctgtgagcttatttttggaggagaaatgtgtgtgtgtggcaggagtgaaaacagaacatcgaggtttaatggaaacacagacaca

SEQ ID NO: 455239 - DNA, 120 bp, Artificial Sequence
  ENSG00000156482_15 (sequence is synthesized)
ttactgttttttccatgtattttgtgtcctgcttttttggttcttttagctttgaggtgctttaatgatgcttcattgtgtgaacttgttttagtgtcaaaaaactaggtaagaaaagtt

SEQ ID NO: 455240 - DNA, 120 bp, Artificial Sequence
  ENSG00000156482_16 (sequence is synthesized)
gaggctgggctatggagttgcaggctatcatagaatcacctagtttagcccgctaaatcagttctgagtcaagatttatgcttgactcactgttttgaaattgaacttagggggtgttgt

SEQ ID NO: 455241 - DNA, 120 bp, Artificial Sequence
  ENSG00000156482_17 (sequence is synthesized)
aacaatccacaatctgtgataaacattctgttttatatatcaagcagctgtctaatctttaaaagtgaggcacaacaatataagcatgtagagacacacacatgcaaaaccatttctatg

SEQ ID NO: 455242 - DNA, 120 bp, Artificial Sequence
  ENSG00000156482_18 (sequence is synthesized)
cctggccagtataaaatgcttaacgtcatagtgtgtgtggtgtgtgtgtgtgtgtgtgcgtgagtgcgcacatgttgggggattgggttcttctgtttctccattaagtgcttttcctca

SEQ ID NO: 455243 - DNA, 120 bp, Artificial Sequence
  ENSG00000156482_19 (sequence is synthesized)
tcactcaacctatcgatcttttattagtgaaagaggaaaaggccaactcaaagcttcatttacattcatagtctgttcctgagtgaaccaaaaaaagactcaggcagcatgcatgtggct

SEQ ID NO: 455244 - DNA, 120 bp, Artificial Sequence
  ENSG00000156482_20 (sequence is synthesized)
cttcagcagatttcaaaaatactgaaataattttccagcagtgagtctgttttctcctcctttctgtacacatttttcttacagaacaaaactagcacttgcaacccccacacatagaat

SEQ ID NO: 455245 - DNA, 120 bp, Artificial Sequence
  ENSG00000156482_21 (sequence is synthesized)
ggcatccagaaggcttctccaggaaacacaaaacaaagtagagtggaaaagcatcagggagagcagggcccaggtatttgctttcagacacaggaaggacagccccacttattagactat

SEQ ID NO: 455246 - DNA, 87 bp, Artificial Sequence
  ENSG00000156482_22 (sequence is synthesized)
tgtcaccccggctgatccgcctgagcgacagaatgagattccatctcaaaaaaaaaagtacataatacctactttagagattgtcat

SEQ ID NO: 455247 - DNA, 120 bp, Artificial Sequence
  ENSG00000156482_23 (sequence is synthesized)
ttttaaaaaattagacctgtttatcgcgctctcagtgcaaactcggctcacaagttcacgctaacacagtcacaaaaggcgagttttgggaaactcgagcagggcgccaccgttctccag

SEQ ID NO: 455248 - DNA, 120 bp, Artificial Sequence
  ENSG00000156482_24 (sequence is synthesized)
gggacaggtaacttgggtgaccgcaggggtgaggacacagctgcttctaccaagcggagagtaaatgcgggtgctgcggcgcatcggagtcacccacaaggctctccaagagccgcgcct

SEQ ID NO: 455249 - DNA, 120 bp, Artificial Sequence
  ENSG00000156482_25 (sequence is synthesized)
caggacaaagatgaattcagcggcattgagaccgtggtcgcagccgccgcagcctcttctcatctaccctcccacctcaccttcagtcggcttttcgaactccctccgggttctaagcgc

SEQ ID NO: 455250 - DNA, 120 bp, Artificial Sequence
  ENSG00000156482_26 (sequence is synthesized)
ctcgattagttagaccgcagctcgcagcagaacagcaacacaacgccgcgaagcttaaaggcccgcagagggggaaaagaacacccccgccgtcattcttttttttccttctttgagaca

SEQ ID NO: 455251 - DNA, 120 bp, Artificial Sequence
  ENSG00000156482_27 (sequence is synthesized)
actgcagcctcgacctaccgagctcaagcgacctctccgcctcagcctccggcgtagctgggagtagctaggactactggagcgcgccaccacgcccggctaatttcttttttatttctt

SEQ ID NO: 455252 - DNA, 120 bp, Artificial Sequence
  ENSG00000156482_28 (sequence is synthesized)
ttttatttttttgtagagacaggggtggtctatgttgtccaggctggccttgagctggacgcaacagatcttcccgcctcaacctccgaaagtgctgggattaaaggttgggggccgtcc

SEQ ID NO: 455253 - DNA, 120 bp, Artificial Sequence
  ENSG00000156486_0 (sequence is synthesized)
gcgggcgccccgtcacacccgctctgctcccgccccggctcacggggcgaatgcggcgcgggttcctgcctctctgggtgggtgaggggcgcgcggatccggagagggggctccgggagc

SEQ ID NO: 455254 - DNA, 120 bp, Artificial Sequence
  ENSG00000156486_1 (sequence is synthesized)
gcgcgcggatccggagagggggctccgggagcggcgggaccacgcagccacctgtgagccttcggcagctgcgggcggcggcggcgtacccggcccgagacgggaggagacgctcggcgg

SEQ ID NO: 455255 - DNA, 120 bp, Artificial Sequence
  ENSG00000156486_2 (sequence is synthesized)
gcacacactcgcacccgcgcacgcaccgccagcaggcagcggccaccgccgcgatgctcgcccgcgggttggggaagtttcccgccggcctcggccgcgggcacccgtgctcccaggtgt

SEQ ID NO: 455256 - DNA, 120 bp, Artificial Sequence
  ENSG00000156486_3 (sequence is synthesized)
ccgtgctcccaggtgtagcgcccccgcgcggcgcgggcggccggcgcctccagcatgaccggccagagcctgtgggacgtgtcggaggctaacgtcgaggacggggagatccgcatcaat

SEQ ID NO: 455257 - DNA, 120 bp, Artificial Sequence
  ENSG00000156486_4 (sequence is synthesized)
gtgggcggcttcaagaggaggctgcgctcgcacacgctgctgcgcttccccgagacgcgcctgggccgcttgctgctctgccactcgcgcgaggccattctggagctctgcgatgactac

SEQ ID NO: 455258 - DNA, 120 bp, Artificial Sequence
  ENSG00000156486_5 (sequence is synthesized)
gacgacgtccagcgggagttctacttcgaccgcaaccctgagctcttcccctacgtgctgcatttctatcacaccggcaagcttcacgtcatggctgagctatgtgtcttctccttcagc

SEQ ID NO: 455259 - DNA, 120 bp, Artificial Sequence
  ENSG00000156486_6 (sequence is synthesized)
caggagatcgagtactggggcatcaacgagttcttcattgactcctgctgcagctacagctaccatggccgcaaagtagagcccgagcaggagaagtgggacgagcagagtgaccaggag

SEQ ID NO: 455260 - DNA, 120 bp, Artificial Sequence
  ENSG00000156486_7 (sequence is synthesized)
agcaccacgtcttccttcgatgagatccttgccttctacaacgacgcctccaagttcgatgggcagcccctcggcaacttccgcaggcagctgtggctggcgctggacaaccccggctac

SEQ ID NO: 455261 - DNA, 120 bp, Artificial Sequence
  ENSG00000156486_8 (sequence is synthesized)
tcagtgctgagcagggtcttcagcatcctgtccatcctggtggtgatggggtccatcatcaccatgtgcctcaatagcctgcccgatttccaaatccctgacagccagggcaaccctggc

SEQ ID NO: 455262 - DNA, 120 bp, Artificial Sequence
  ENSG00000156486_9 (sequence is synthesized)
gaggaccctaggttcgaaatcgtggagcactttggcattgcctggttcacatttgagctggtggccaggtttgctgtggcccctgacttcctcaagttcttcaagaatgccctaaacctt

SEQ ID NO: 455263 - DNA, 120 bp, Artificial Sequence
  ENSG00000156486_10 (sequence is synthesized)
attgacctcatgtccatcgtccccttttacatcactctggtggtgaacctggtggtggagagcacacctactttagccaacttgggcagggtggcccaggtcctgaggctgatgcggatc

SEQ ID NO: 455264 - DNA, 120 bp, Artificial Sequence
  ENSG00000156486_11 (sequence is synthesized)
ttccgcatcttaaagctggccaggcactccactggcctccgctccctgggggccactttgaaatacagctacaaagaagtagggctgctcttgctctacctctccgtggggatttccatc

SEQ ID NO: 455265 - DNA, 120 bp, Artificial Sequence
  ENSG00000156486_12 (sequence is synthesized)
ttctccgtggtggcctacaccattgaaaaggaggagaacgagggcctggccaccatccctgcctgctggtggtgggctaccgtcagtatgaccacagtggggtacggggatgtggtccca

SEQ ID NO: 455266 - DNA, 120 bp, Artificial Sequence
  ENSG00000156486_13 (sequence is synthesized)
gggaccacggcaggaaagctgactgcctctgcctgcatcttggcaggcatcctcgtggtggtcctgcccatcaccttgatcttcaataagttctcccacttttaccggcgccaaaagcaa

SEQ ID NO: 455267 - DNA, 120 bp, Artificial Sequence
  ENSG00000156486_14 (sequence is synthesized)
cttgagagtgccatgcgcagctgtgactttggagatggaatgaaggaggtcccttcggtcaatttaagggactattatgcccataaagttaaatcccttatggcaagcctgacgaacatg

SEQ ID NO: 455268 - DNA, 120 bp, Artificial Sequence
  ENSG00000156486_15 (sequence is synthesized)
agcaggagctcaccaagtgaactcagtttaaatgattccctacgttagccgggaggacttgtcaccctccaccccacattgctgagctgcctcttgtgcctctggcacagcccaggcacc

SEQ ID NO: 455269 - DNA, 120 bp, Artificial Sequence
  ENSG00000156486_16 (sequence is synthesized)
ttatggttatggtgtaaggagtatgcccagcccctgaggggagagatgcatgggatatgcacccaggtttcttttacagtttttagaatcgtttttagagggtggtgtgtctgacaccat

SEQ ID NO: 455270 - DNA, 120 bp, Artificial Sequence
  ENSG00000156486_17 (sequence is synthesized)
gcctttgcacctttccatgaaatgacactcactggtctttgcatcgtgggcataaaatgttcacctttttgccagatgagtacacccagaatgctaatttttctgtccatcgtgtacgct

SEQ ID NO: 455271 - DNA, 120 bp, Artificial Sequence
  ENSG00000156486_18 (sequence is synthesized)
attctagtgcttgtggcccagtactgtctatgagttgtcgtgctcctgtttctgaggttgtcgtgtgagttctgtacaaaaagcccccacaagtcgtccagtagaaatgcatctatgagg

SEQ ID NO: 455272 - DNA, 120 bp, Artificial Sequence
  ENSG00000156486_19 (sequence is synthesized)
tcagcaaggatatgatgagattttgctcacagtcatgtgaaaacaaaatctcagctctttatccattgctttcacttagttttagtaccaaaacaaagagaatgcaaagttaagcagact

SEQ ID NO: 455273 - DNA, 120 bp, Artificial Sequence
  ENSG00000156486_20 (sequence is synthesized)
tgaccaatgcaagtctctaagttgtttttataaatgatctgtagttccgtggcttgcatgggtgcaccaatcatctttagaacgatgtacactgatgttcatctcataaatgtcactctt

SEQ ID NO: 455274 - DNA, 120 bp, Artificial Sequence
  ENSG00000156486_21 (sequence is synthesized)
tagagaatgttacttagttaaacatgcagtgaagatcgaatttttttcccaagaacagatgtgttagggagaggggcttcagctaaatagtccaaaccctagggtgcttaaagccaagtt

SEQ ID NO: 455275 - DNA, 120 bp, Artificial Sequence
  ENSG00000156486_22 (sequence is synthesized)
ctgagccccttggttcacagtcaagcctccttgtttcctagggtgactgtagagaaatgtatttccggatgaggtttctgatctaggccatttgaccaaactttgctgtgtctaagatat

SEQ ID NO: 455276 - DNA, 120 bp, Artificial Sequence
  ENSG00000156486_23 (sequence is synthesized)
tagcatgtttttgaaatatttattttttaagatgtttaggagtaaggtcgtgttgtcttcctcaactaaaaagaagtttactgttgtatcgtctccctgaggtgaacgttgttgggttgc

SEQ ID NO: 455277 - DNA, 120 bp, Artificial Sequence
  ENSG00000156486_24 (sequence is synthesized)
tagcaagggcagtagcttaaatacttttgttgcctactctgaaagctcatcaaatgagagcccttttatttccaagcagaatttagtcagataattttgcttctaggatatagtatgttg

SEQ ID NO: 455278 - DNA, 120 bp, Artificial Sequence
  ENSG00000156486_25 (sequence is synthesized)
tatatgatgctgtgattgccctggagttcctgccatgacatggaaacctggtggtatggaagcatgtactcaaaatatagacgtgcacgatggtggtgtggcttacccaggatggaaaca

SEQ ID NO: 455279 - DNA, 120 bp, Artificial Sequence
  ENSG00000156486_26 (sequence is synthesized)
ctgcagttcttacttgcattcccactgcctttcatggggggtgactgggtagaggccaggagaaaggaaagagttgtaaaataaaaaactgctagttcataaaatgtcataaaaaattgt

SEQ ID NO: 455280 - DNA, 120 bp, Artificial Sequence
  ENSG00000156486_27 (sequence is synthesized)
aaacttgaaaagcttaatgctattcaaaagaccttcaagcttccaaacttgtattgaagggagacgactgtttcctcctccaaaatgctcctgctcctcttgttcggttaaccagcacat

SEQ ID NO: 455281 - DNA, 120 bp, Artificial Sequence
  ENSG00000156486_28 (sequence is synthesized)
aacattgtgatggggaacctgggttcctctataagataattcttctccatcatctttaaggtaatctgatggttttccaggtggctttcattattgttccatctttgaaaaggcaataga

SEQ ID NO: 455282 - DNA, 120 bp, Artificial Sequence
  ENSG00000156486_29 (sequence is synthesized)
acccaggggtctgagcatggagctatccagggttttcatccaaaggttgggcctcttcttaagaggtccttttgtgtttcagttgattgaagatgatacttacctcattggaggtgtggc

SEQ ID NO: 455283 - DNA, 120 bp, Artificial Sequence
  ENSG00000156486_30 (sequence is synthesized)
aaggatcttatcagaaggctttgtgttcttgtagttgtcatggctactacagtgtgggtgatttattgaatgaattcactagccacttgtgtcctggagcccccagttcaaatctttcca

SEQ ID NO: 455284 - DNA, 120 bp, Artificial Sequence
  ENSG00000156486_31 (sequence is synthesized)
ttggactggaggcttgtgggaggctgggaggtggctgtctcctagtgtctacatccgtgtctctgaagcatcaggaaaagtgagatgacttagaggcaactgggcactgaatcagaggag

SEQ ID NO: 455285 - DNA, 120 bp, Artificial Sequence
  ENSG00000156486_32 (sequence is synthesized)
cagagttatttttcagaatttgcacatggaacacttagatttggctggtgcttccagccctggaaggcataacatttacggactcatccccagctgcactgaaggcaggtggtggtacag

SEQ ID NO: 455286 - DNA, 120 bp, Artificial Sequence
  ENSG00000156486_33 (sequence is synthesized)
acttatgaggacggatcagtttgccaaggctgatggtattgggtcactgagcctggtatccatggccgctgaccaggaagcttatgcaaagtggaagcaaggaacaaggcagaataactc

SEQ ID NO: 455287 - DNA, 120 bp, Artificial Sequence
  ENSG00000156486_34 (sequence is synthesized)
agtcactttcatgaagatttttctaaacaagaaggcttaccaccaaaaaagaggtaccctagtggttaccctttgcagatgtgaaagctggaaaacttgacttttctttttggtaatgac

SEQ ID NO: 455288 - DNA, 120 bp, Artificial Sequence
  ENSG00000156486_35 (sequence is synthesized)
ttgcatttatctggtgcctttcgttggaggaatcccaacgtgctttagagactatctttttaacatctcttgtacatacatatatacttatataaaatattatcttgcccaactggacct

SEQ ID NO: 455289 - DNA, 120 bp, Artificial Sequence
  ENSG00000156486_36 (sequence is synthesized)
ttactcacttctgagcatgagaatgtcccaatagcattgagtttttcaagtggtggtttcagataagtgggagaaagaacaacccggctggcttaaaccctggagctaattcccacaagg

SEQ ID NO: 455290 - DNA, 120 bp, Artificial Sequence
  ENSG00000156486_37 (sequence is synthesized)
aatgtagactgaatggtgacccagggagaaataatcttcctctcccctaaagtctcactaaggtttgaagtttacaggtgctctccactgggtctttgatcgaccttgctagataacatc

SEQ ID NO: 455291 - DNA, 120 bp, Artificial Sequence
  ENSG00000156486_38 (sequence is synthesized)
taaccagcagtttcttttagtccctgaagctaaccagggagagtcaggttaattttctgtaaaaatatgaggtgacatctttggcaaccaggctgtcagactgacctgtaaacctccttt

SEQ ID NO: 455292 - DNA, 120 bp, Artificial Sequence
  ENSG00000156486_39 (sequence is synthesized)
agggggacagagtagaaactggagatgacttgtttccagctgtgagcttgagagaagtgtcactcccagcatttgaaggttattgttttcaatgccagtgggccaaatatatgggccagg

SEQ ID NO: 455293 - DNA, 120 bp, Artificial Sequence
  ENSG00000156486_40 (sequence is synthesized)
ctttgatatctgtgatgtgcattttggaagtgctgggttgggaagtgacacgtctgttgcacaaatgcatattggttataggtttgtgttttctgccaaacccccacatttctcgggttt

SEQ ID NO: 455294 - DNA, 120 bp, Artificial Sequence
  ENSG00000156486_41 (sequence is synthesized)
gtgagtgaggaagggcatgttgtaatgccaagctgatttgtagctcgtaaggtagtaattggtatttaacatttgcatttgttatttctacttatcttagcactcaaataattgaactac

SEQ ID NO: 455295 - DNA, 120 bp, Artificial Sequence
  ENSG00000156486_42 (sequence is synthesized)
ctgctaattcttgccgcatttcaaagaaaataagttgttatgcactttgggatagtggtgatctgtacaggctgtgtgttagctacttgaaggcgtaactggtatttcttgtgtgtttta

SEQ ID NO: 455296 - DNA, 120 bp, Artificial Sequence
  ENSG00000156486_43 (sequence is synthesized)
acagcatgacttcttacagagctgtaatttttaaaattgaggatgccatatttgagatgtcagttttaacactcattaacacactactgtgcaagcattgacacaggctgcactgaacca

SEQ ID NO: 455297 - DNA, 120 bp, Artificial Sequence
  ENSG00000156486_44 (sequence is synthesized)
ccccaccccaccaaagctacgcgccccccgtgtcggcccggccctgcccgtgcgtatctcagctccggtcccgcctgtctgcggcgagcgggcgggggcgtctcccgggcctgcccatgg

SEQ ID NO: 455298 - DNA, 120 bp, Artificial Sequence
  ENSG00000156500_0 (sequence is synthesized)
gcgggacccaactgattgtcaaaggcggcagattgtagtttttgttttggccggaaaggcttaccatgagttgccagggctgagagagatggagaaggattcgcggcggtgacagattaa

SEQ ID NO: 455299 - DNA, 120 bp, Artificial Sequence
  ENSG00000156500_1 (sequence is synthesized)
attccccagttacattatagacttggaggtgggggatcttctcatcgttagaggccccgatcatgggagataggcggttcggagccagttctgcctaactttgtgttcactgatgttagg

SEQ ID NO: 455300 - DNA, 120 bp, Artificial Sequence
  ENSG00000156500_2 (sequence is synthesized)
gctgctagggctgcaaaggtgggcacccctactcgcctaagagctttctcctctcttctctttttcccctttgcctctctccttacatcacctgcccactaagtagacttgtccttgtgt

SEQ ID NO: 455301 - DNA, 120 bp, Artificial Sequence
  ENSG00000156500_3 (sequence is synthesized)
ggacgggagccggaaagccttgagaacttattcctcgacccggacatggcacaggagaaaatgaaactaggtttcaagtcgctgccgagttccactaccgcagacggcaacattctgaga

SEQ ID NO: 455302 - DNA, 120 bp, Artificial Sequence
  ENSG00000156500_4 (sequence is synthesized)
agagtcaacagtgcccctttgatcaatggacttggttttaattcacaggtgttgcaagctgacatgttaagaattaggacaaacagaacaacatttaggaatcgacgctctctgttgttg

SEQ ID NO: 455303 - DNA, 120 bp, Artificial Sequence
  ENSG00000156500_5 (sequence is synthesized)
atcagccgccttcatcaaatcaaacaggaagaagccatggatttaataaatagagaaacaatgtctgaatggaagctacaaagtgagatacagataagtcactcttgggaagaaggcttg

SEQ ID NO: 455304 - DNA, 120 bp, Artificial Sequence
  ENSG00000156500_6 (sequence is synthesized)
aaactgaatgacaatggcttacagaaatcatcctctctaaagtgcattgatttaactccagtatcctcaatggcttcttccatcaagaagactgggaagtctacttccagctacttttga

SEQ ID NO: 455305 - DNA, 120 bp, Artificial Sequence
  ENSG00000156500_7 (sequence is synthesized)
tggaaacgacagcaatgctggatcttctggtaattcgtcagctgaaatcggcactgtcacaaactctcctgtgtcaccttctgatactggttctcatttgttctagtagacaaactttca

SEQ ID NO: 455306 - DNA, 120 bp, Artificial Sequence
  ENSG00000156500_8 (sequence is synthesized)
actaaatgattcacccatcccaagactttctcaccagtggagaaacacacacatcaagcaaaccaagtcagagcaatgagaattgtactgtataatttaaactatctcctatttatcttt

SEQ ID NO: 455307 - DNA, 120 bp, Artificial Sequence
  ENSG00000156500_9 (sequence is synthesized)
tttcctcaatttcctaaaattctatttatctacagaacttgcgtgtataattcttgtgtacatccttaaatttaatgtaataacatgttaaagatgttttccaaatcagaaccatgttga

SEQ ID NO: 455308 - DNA, 120 bp, Artificial Sequence
  ENSG00000156500_10 (sequence is synthesized)
agatacaagcgtaaattgttaggctgctattttctagaaaatgctgtaccttgactttttaaaataatcttatgaaacataattctgataaaatataattgttcaattaacaaagtaaaa

SEQ ID NO: 455309 - DNA, 120 bp, Artificial Sequence
  ENSG00000156500_11 (sequence is synthesized)
gaggaccacaagcggggccgggctacagatgctgcggctgcccgggcagcgctagcaccgaggacctgacagtcgggtgagggcctgggacagacgcagcagactgggatatgcaaagag

SEQ ID NO: 455310 - DNA, 120 bp, Artificial Sequence
  ENSG00000156500_12 (sequence is synthesized)
cacccacttctgttgaacagaagcccaaagacctcttctgaccttgagactatgccttctcccaaatcgcccctttgctttatctcctaagaactctgaagttgccatgcctgttccttt

SEQ ID NO: 455311 - DNA, 120 bp, Artificial Sequence
  ENSG00000156500_13 (sequence is synthesized)
ctctcccaccaggaattctggcacttctgctcaagccggatgtcactgcgtcacttctccatccccaccccctcctcttccaaaggaagcaggggaaatgtctcatcttcctaagagaaa

SEQ ID NO: 455312 - DNA, 120 bp, Artificial Sequence
  ENSG00000156500_14 (sequence is synthesized)
aggttgtgcttttcttgagcaattcatctgttctaattttaggcctactgacatctgtctcattaggttttgcttttcctattggcaaccacaaaccccaaatctagtgtatggcccaca

SEQ ID NO: 455313 - DNA, 120 bp, Artificial Sequence
  ENSG00000156500_15 (sequence is synthesized)
aagttgcaagcatgtaatacattcctgatcctgctttatgccctgcacatctagcccatgttcagttcatgttaagtagcattataaaccatcttaaatcatttctgaaactaggcagag

SEQ ID NO: 455314 - DNA, 120 bp, Artificial Sequence
  ENSG00000156500_16 (sequence is synthesized)
cttaaaaacagcaaacctaggaaaatgaaaaataatttttaaaaatcttaatgtctttacaatatgaattttctgtgatctctcttaaatggaactaagcttggtttttcctcctatctt

SEQ ID NO: 455315 - DNA, 120 bp, Artificial Sequence
  ENSG00000156500_17 (sequence is synthesized)
aatcctttcactggagataattcttagtaattagcttcacccagcaccctccctaacctcccgctacttctactcccagccaccttcacaccatgacatcattccttggtgctgatactc

SEQ ID NO: 455316 - DNA, 120 bp, Artificial Sequence
  ENSG00000156500_18 (sequence is synthesized)
ttggttccttccaaggacttttctttcttcctggagtgtgagaaaaaggcacagtgggaaatttacacaaaagataccagtgatgtttattacatctcagtgaagtcattatttctattt

SEQ ID NO: 455317 - DNA, 120 bp, Artificial Sequence
  ENSG00000156500_19 (sequence is synthesized)
taatactttgtttcatgtggaaaaattatctaaggtaattcctttgcaaacgccacttgtagtacttaatttggggagaattctcttccagaagccttgttttctgcaattaatttctca

SEQ ID NO: 455318 - DNA, 120 bp, Artificial Sequence
  ENSG00000156500_20 (sequence is synthesized)
cattattactaaaagaatcagccaatacaagatttgatccacattttgtccaattaaaaaattcttgtagcttatgattctgtagctcaagttcaaatcctacctacctcagacatttca

SEQ ID NO: 455319 - DNA, 120 bp, Artificial Sequence
  ENSG00000156500_21 (sequence is synthesized)
cactatctccctgctggtgtcatcaatttcagtctatcttctcatgatttcctggatgaagtttttcagtgggaaatcctaagcctttgcctgaacctaaattggttccttcccatccct

SEQ ID NO: 455320 - DNA, 120 bp, Artificial Sequence
  ENSG00000156500_22 (sequence is synthesized)
taggtataaattaaaaataatctcttctagggaagtctttcatcattattttatgaaggaaatttgccataccatgttttctcacttataagtcggagctaaatgataagaacttatgaa

SEQ ID NO: 455321 - DNA, 120 bp, Artificial Sequence
  ENSG00000156500_23 (sequence is synthesized)
cacaaggaaacaacagacactagggtctacttgagcggggaggatgtgaggagggaagcagaaaagataactattaggtactgggcttactacctgggtgatgaaatagtatgtacaaca

SEQ ID NO: 455322 - DNA, 120 bp, Artificial Sequence
  ENSG00000156500_24 (sequence is synthesized)
aggcgtgagccactgcgcctggcctaaatcttacttcttaaactagacttttaaaatgagatgttggatttcacatttcagtattataaggttttctagataccgtaaaaatgtctgaaa

SEQ ID NO: 455323 - DNA, 120 bp, Artificial Sequence
  ENSG00000156500_25 (sequence is synthesized)
taccgtaaaaatgtctgaaaaatgcattcactacatatgttactaactttgctcttcaccttttgttgcatcatactaattgatagttgtaattcacagtaccatagactatcaggaagg

SEQ ID NO: 455324 - DNA, 120 bp, Artificial Sequence
  ENSG00000156500_26 (sequence is synthesized)
gattcagagaccagctttaccctccttgtttaacatatgaggaaactgaggcccataaatctccaaaatgacgtttagtggcagagccagtactaggaagctctgtttcctgactcctaa

SEQ ID NO: 455325 - DNA, 120 bp, Artificial Sequence
  ENSG00000156500_27 (sequence is synthesized)
actactgttctggccactactaaccaatacctaagctgattaactctaaatgaatgcagcttttgggtcatttgaggtaggagagaatatattgttcacaaaatgaaaagcaaactaaga

SEQ ID NO: 455326 - DNA, 120 bp, Artificial Sequence
  ENSG00000156500_28 (sequence is synthesized)
caagaacattttattcactcaggattttgctctaattctgttgtgggaaaaaggaattatgggacccactctactagtagaagagagcagtagggagaatgttggatttattgaagacaa

SEQ ID NO: 455327 - DNA, 120 bp, Artificial Sequence
  ENSG00000156500_29 (sequence is synthesized)
tataaaaagaagaaataggttgcaaatagacgatggaagatgtgtactggaaggaacctgtggatcctctttaatgtattaaatacaccagagaaggagtggacccttccctaatcctta

SEQ ID NO: 455328 - DNA, 120 bp, Artificial Sequence
  ENSG00000156500_30 (sequence is synthesized)
aagccctggaaacagagagatctcagttatcccttcataccttgctttgttctgcaaaggatttttttgttttgtttgtttgttttttgcttatattagagcatagctacagtgttacat

SEQ ID NO: 455329 - DNA, 120 bp, Artificial Sequence
  ENSG00000156500_31 (sequence is synthesized)
tccatagcttaagatcctgatgcatgaagtaaaatttgtacagaaagataagggtcactagcatatttctgtagtaggagtttaaagatacagaaaccacaaagtggacggagtccaggg

SEQ ID NO: 455330 - DNA, 120 bp, Artificial Sequence
  ENSG00000156500_32 (sequence is synthesized)
actctagtctgtcagaaagaagtaacataggaatgatgtgtgacatccctgagattaggggacttgcccagatgatctgagggcatattttgtgctgttgtagaaaatgtagggcatagt

SEQ ID NO: 455331 - DNA, 120 bp, Artificial Sequence
  ENSG00000156500_33 (sequence is synthesized)
cagagaagttattctgaagcaagaaaaatttagagtaggattacactgagccttagttgaattcattttcacctcagttctcatttgcatatgtatactgctcacttttctccctttttt

SEQ ID NO: 455332 - DNA, 120 bp, Artificial Sequence
  ENSG00000156500_34 (sequence is synthesized)
tttccttccttggccctctaatacttgagtacttcctctttctaaactatacctggccagtaaagcattcttttcagaaaggtgaaagtcactagcatatttctttagtaggaattaaag

SEQ ID NO: 455333 - DNA, 120 bp, Artificial Sequence
  ENSG00000156500_35 (sequence is synthesized)
atatagaaaccacaaagtggacagagttcagagactccagtccctcagaaagaagtaacataggaatgatgtgtgacatgcctgaggtcagggaacttgcccaaatgatctgaggggatg

SEQ ID NO: 455334 - DNA, 120 bp, Artificial Sequence
  ENSG00000156500_36 (sequence is synthesized)
ttttgtgctgttgtagaaaatatttagcttgctaaacattgttgcacctctttcaagtaattttcgaactttgcttgatgtttcttctatataaagaccctcttgcaccagcatttgcag

SEQ ID NO: 455335 - DNA, 120 bp, Artificial Sequence
  ENSG00000156500_37 (sequence is synthesized)
aattaaattccttaggtttgtttctttcatatcaactctttaatacagtattactgttttaaagaagtatctgcactgttttatgtatatcttgaactaataaaaattccaacgtcaaaa

SEQ ID NO: 455336 - DNA, 120 bp, Artificial Sequence
  ENSG00000156500_38 (sequence is synthesized)
gactgggaagcagtgtttctctccatcattacaaacttgtgtgagttgcactggttcgccttcaagtcctattcccagtcctatgcaacaatacatcattctacttccagctacttttga

SEQ ID NO: 455337 - DNA, 120 bp, Artificial Sequence
  ENSG00000156500_39 (sequence is synthesized)
gatgatgatgaggaagggaggatgatggtgaggcaggagaggaggacgaagaggtgagggcctgggacagacgcagcagactgggatatgcaaagagaggagtagcctaattgtcaagtc

SEQ ID NO: 455338 - DNA, 120 bp, Artificial Sequence
  ENSG00000156500_40 (sequence is synthesized)
aggtgaaatggcatttcaatatcaaccaaaaaagattttccaaggcacaaccaacatgctttcttctgatacttcccaactgtcagaaaataatgtgtatctacttccagctacttttga

SEQ ID NO: 455339 - DNA, 120 bp, Artificial Sequence
  ENSG00000156500_41 (sequence is synthesized)
gtttgacaattatgtacttaatgatccatgctagtctttaatgctattttcagtaactactagcttccacttggtaaagaaaagtcacatatcaaaggcaatttttatgactaagttata

SEQ ID NO: 455340 - DNA, 120 bp, Artificial Sequence
  ENSG00000156500_42 (sequence is synthesized)
ccatactgatccaaggattgcttattttgcacatgaatccttagatattcaatttgttgggaagcagtaggtaggagaagagcaagacaaattaaagttaattgaatagaaagaaaataa

SEQ ID NO: 455341 - DNA, 80 bp, Artificial Sequence
  ENSG00000156500_43 (sequence is synthesized)
tcagccgccttcatcaaatcaaacaggtgccatggggtacatgagatactttgatatagatccttgaggaatcgccacac

SEQ ID NO: 455342 - DNA, 78 bp, Artificial Sequence
  ENSG00000156500_44 (sequence is synthesized)
agccttgccagcatctattgtttcttgagtttttagtcatcgccattctgactggcatgagatgacaggttcttgctg

SEQ ID NO: 455343 - DNA, 80 bp, Artificial Sequence
  ENSG00000156500_45 (sequence is synthesized)
atgatcatagctcactgcagcctcaaccttctgggctaaagtgatcctcttgcctcagcctcccaactagctaggactac

SEQ ID NO: 455344 - DNA, 60 bp, Artificial Sequence
  ENSG00000156500_46 (sequence is synthesized)
aagaagccatggatttaataaatagagaaacaatgtctgaatggaagctacaaagtgaga

SEQ ID NO: 455345 - DNA, 77 bp, Artificial Sequence
  ENSG00000156500_47 (sequence is synthesized)
ctcggctcactgcaacgtctgcctccctggttcaagcgattctgtaccacccagctaaatttttttttttttaagta

SEQ ID NO: 455346 - DNA, 120 bp, Artificial Sequence
  ENSG00000156500_48 (sequence is synthesized)
ggcgcccaccaccccacccagctaaatttttttttttttaagtagagagggggtttcatcatgttggccatggtagagagggggtttcaccatgttggtctcaaactcctgacctcaggt

SEQ ID NO: 455347 - DNA, 120 bp, Artificial Sequence
  ENSG00000156500_49 (sequence is synthesized)
acaggcatgagctaccgcgcctggcctcctgtaaaatagtatgatgaaatttgcttttaattttaaatgaacacacagctccaagtcaatgttaggttctgggccaatatttggtttatg

SEQ ID NO: 455348 - DNA, 120 bp, Artificial Sequence
  ENSG00000156500_50 (sequence is synthesized)
ttctgggccaatatttggtttatgttacacctttcctattaagcaggtaatggacaatttcttctcaactgttgttgttagctgttttctaagtattaaagagactgagacatcaagcta

SEQ ID NO: 455349 - DNA, 120 bp, Artificial Sequence
  ENSG00000156500_51 (sequence is synthesized)
gaagttaattttctaaacacagttattattcctacataggaattattttgtgtaattttcctttctaataaaaattttattttatttatttatttttcagacaggttcttgctgtgttgc

SEQ ID NO: 455350 - DNA, 120 bp, Artificial Sequence
  ENSG00000156500_52 (sequence is synthesized)
gtgactttttgtatcctcgggttccagaaggcccactgtggacttgaggatgtgtggattttggtattgcagtgggggggtgctggaaccaattccccacatataccaagggatgactac

SEQ ID NO: 455351 - DNA, 120 bp, Artificial Sequence
  ENSG00000156502_0 (sequence is synthesized)
gtcactgtccgccgccgtgtccgcggctgcgccagacagtgtagaacctgcggcctcgatgtccttctcccgtgccctattgtgggctcggctcccggcggggcgccaggctggccaccg

SEQ ID NO: 455352 - DNA, 120 bp, Artificial Sequence
  ENSG00000156502_1 (sequence is synthesized)
ggcagccatctgctctgcccttcgtccccactttgggccctttcccggggttctggggcaagtttctgtccttgccaccgcctcctcctctgcctccggtggctccaaaataccaaacac

SEQ ID NO: 455353 - DNA, 120 bp, Artificial Sequence
  ENSG00000156502_2 (sequence is synthesized)
gtccttgttcgtgcccctgactgtgaaacctcagggccccagcgccgacggcgacgtcggggccgagctaacccggcctctggacaagaatgaagtaaagaaggtcttagacaaatttta

SEQ ID NO: 455354 - DNA, 120 bp, Artificial Sequence
  ENSG00000156502_3 (sequence is synthesized)
caagaggaaagaaattcagaaactgggtgctgattatggacttgatgctcgtctcttccaccaagctttcataagctttagaaattatattatgcagtctcattccctggatgtggacat

SEQ ID NO: 455355 - DNA, 120 bp, Artificial Sequence
  ENSG00000156502_4 (sequence is synthesized)
tcacattgttttgaatgatatttgcttcggtgcagctcatgcggatgatttattcccatttttcttgagacatgccaaacaaatatttcctgtgttggactgtaaggatgatctacgtaa

SEQ ID NO: 455356 - DNA, 120 bp, Artificial Sequence
  ENSG00000156502_5 (sequence is synthesized)
aatcagtgacttaagaataccacctaactggtacccagatgctagagccatgcagcggaagataatatttcattcaggccccacaaacagtggaaagacttatcacgcaatccagaaata

SEQ ID NO: 455357 - DNA, 120 bp, Artificial Sequence
  ENSG00000156502_6 (sequence is synthesized)
cttctcagcaaagtctggagtgtattgtggccctctaaaattactggcacatgagatcttcgaaaagagtaatgctgctggtgtgccatgtgacttggtgacaggtgaagagcgtgtgac

SEQ ID NO: 455358 - DNA, 120 bp, Artificial Sequence
  ENSG00000156502_7 (sequence is synthesized)
agttcagccaaatgggaaacaggcttcacatgtttcttgtacagttgagatgtgcagtgttacaactccttatgaagtggctgtaattgatgaaattcaaatgattagagatccagccag

SEQ ID NO: 455359 - DNA, 120 bp, Artificial Sequence
  ENSG00000156502_8 (sequence is synthesized)
aggatgggcctggaccagagcacttctaggactgtgtgctgaagaggttcatttgtgtggagaacctgctgctattgacctggtgatggagcttatgtacacaacgggggaggaagtgga

SEQ ID NO: 455360 - DNA, 120 bp, Artificial Sequence
  ENSG00000156502_9 (sequence is synthesized)
ggttcgagactataagaggcttacccccatttctgtgctggaccatgcactagaatctttagataaccttcggcctggggactgcattgtctgttttagcaagaatgatatttattctgt

SEQ ID NO: 455361 - DNA, 120 bp, Artificial Sequence
  ENSG00000156502_10 (sequence is synthesized)
aagcaaaaaagtttaatgatcccaatgacccatgcaaaatcttggttgctacagatgcaattggcatgggacttaatttgagcataaggagaattattttttactcccttataaagccca

SEQ ID NO: 455362 - DNA, 120 bp, Artificial Sequence
  ENSG00000156502_11 (sequence is synthesized)
gtatcaatgaaaagggagagagagaactagaaccaatcacaacctctcaagccctgcagattgctggcagagctggcagattcagctcacggtttaaagaaggagaggttacaacaatga

SEQ ID NO: 455363 - DNA, 120 bp, Artificial Sequence
  ENSG00000156502_12 (sequence is synthesized)
atcatgaagatctcagtttattaaaggaaattttgaagaggcctgtggatcctataagggcagctggtcttcatccaactgctgagcagattgaaatgtttgcctaccatctccctgatg

SEQ ID NO: 455364 - DNA, 120 bp, Artificial Sequence
  ENSG00000156502_13 (sequence is synthesized)
caacactgtccaatctcattgatatttttgtagacttttcacaagttgatgggcagtattttgtctgcaatatggatgattttaaattttctgcagagttgatccagcatattccactaa

SEQ ID NO: 455365 - DNA, 120 bp, Artificial Sequence
  ENSG00000156502_14 (sequence is synthesized)
gtctgcgagtgaggtatgttttctgcacagctcctatcaacaagaagcagccttttgtgtgttcttcactgttacagtttgccaggcagtatagcaggaatgagcccctgacctttgcat

SEQ ID NO: 455366 - DNA, 120 bp, Artificial Sequence
  ENSG00000156502_15 (sequence is synthesized)
ggttacgccgatacatcaaatggcctttacttccacctaagaatattaaagacctcatggatcttgaagctgtccacgatgtcttggatctttacttgtggctaagctaccgatttatgg

SEQ ID NO: 455367 - DNA, 120 bp, Artificial Sequence
  ENSG00000156502_16 (sequence is synthesized)
atatgtttccagatgccagccttattcgagatctccagaaagaactagatggtattatccaagatggtgtgcacaatatcactaaattgattaaaatgtctgagacgcataagctgttga

SEQ ID NO: 455368 - DNA, 120 bp, Artificial Sequence
  ENSG00000156502_17 (sequence is synthesized)
atttggagggctttccatcagggagccagtcacgattgtcaggaaccttaaagagccaagctagaaggacacgcggcaccaaagctctagggagtaaagctactgagccacccagccccg

SEQ ID NO: 455369 - DNA, 120 bp, Artificial Sequence
  ENSG00000156502_18 (sequence is synthesized)
atgcaggagagctgtcccttgcttccagattggtgcagcaaggactcctcactccagacatgctgaaacagctagaaaaagagtggatgacacaacaaactgaacacaacaaagaaaaaa

SEQ ID NO: 455370 - DNA, 120 bp, Artificial Sequence
  ENSG00000156502_19 (sequence is synthesized)
cagagtctgggactcatccaaaagggacgagaagaaagaagaaggaacctgattcggactagttttctgttcctgtttttttttttttatttaattttgcaaataaaaatttattttgaa

SEQ ID NO: 455371 - DNA, 75 bp, Artificial Sequence
  ENSG00000156502_20 (sequence is synthesized)
atggtttggtatttttaatttatgcaatggtactatctcggctcactgcgacctctgcctccccagttcaagcga

SEQ ID NO: 455372 - DNA, 120 bp, Artificial Sequence
  ENSG00000156502_21 (sequence is synthesized)
tacaggcgtgagccactgcgcctgaccatggtatttttaattttaaaatacacttgaacatgtgaaatacgatttttttgtgtgaagaaaaaattttaaaatctagaaaaagaagagaat

SEQ ID NO: 455373 - DNA, 120 bp, Artificial Sequence
  ENSG00000156502_22 (sequence is synthesized)
agaaaaagaagagaataagtatgacaaacgtgcgatcctgccaccactgacaaatgcctgcacctgaagttctttccctttttctcttaaaagagctgaaatgttaataagcataattga

SEQ ID NO: 455374 - DNA, 120 bp, Artificial Sequence
  ENSG00000156502_23 (sequence is synthesized)
aatttcctttgtaccactctccagtttaattcctctctcctcttttgttctaactggtaacagatatttggtgtgtatagttttcctgtctcttttcaggatatatattatatcactgat

SEQ ID NO: 455375 - DNA, 120 bp, Artificial Sequence
  ENSG00000156502_24 (sequence is synthesized)
acgtattaccagtattctagattgttgtgttttaaaacatttatgtgattattgtattattattgttctaccacttgcttgtttactccacaaatgtgtttagatctatctagtcttatt

SEQ ID NO: 455376 - DNA, 120 bp, Artificial Sequence
  ENSG00000156502_25 (sequence is synthesized)
gaagtatctatagctacatatttgtagttatttcatttaaactgttttatagtattccatcttagaactgaaattatttgttccccatttgttaaaggatatttaggttgtttaaagttt

SEQ ID NO: 455377 - DNA, 120 bp, Artificial Sequence
  ENSG00000156502_26 (sequence is synthesized)
tttcctgttatgtacactgccacaatgagcttctatttaaagttgttttgttttgtttttgagtcaggggctcactgtgtcacccaggctgaagtgcaatggcgcagtcatggcttactg

SEQ ID NO: 455378 - DNA, 86 bp, Artificial Sequence
  ENSG00000156502_27 (sequence is synthesized)
gcctcctgagtagctacaactattaataaattttttgtggagatgggttcttgctgtgttgcccggactggtctctaattcctggc

SEQ ID NO: 455379 - DNA, 120 bp, Artificial Sequence
  ENSG00000156502_28 (sequence is synthesized)
gttcttgctgtgttgcccggactggtctctaattcctggccttgtgtggtcctcccacctaggtctcccaaagcagtgggattacaggtataacccaccgcacctggccttaacatttaa

SEQ ID NO: 455380 - DNA, 120 bp, Artificial Sequence
  ENSG00000156502_29 (sequence is synthesized)
gtgaaaattaactttttccttattatgtaagcaatcatatcttcattattgaaaatataaaaatgtaagcaagcaaacagaagaaaacaaatgtacataatttcccagtcccacctatcc

SEQ ID NO: 455381 - DNA, 120 bp, Artificial Sequence
  ENSG00000156502_30 (sequence is synthesized)
ggaatcaataggtgttaattaaccctatatattttccagactttgttaatatttgtgttcatgttgtgtatgcatatagttatatgtgcatggtgggtgtgtatattaaacaaataggaa

SEQ ID NO: 455382 - DNA, 120 bp, Artificial Sequence
  ENSG00000156502_31 (sequence is synthesized)
tctaggttggtggtcgtaatgctataaaacccgtgctttatgacatctgcgctgagatgcatttttatctgcttgccattgccaaccaaatagagtcacctagaacctttctttttgaca

SEQ ID NO: 455383 - DNA, 120 bp, Artificial Sequence
  ENSG00000156504_0 (sequence is synthesized)
agtcttgggagtccatagctaagcaccaggagctgagcactgcccgctgtgcctgcctgcaagtctgacatggctcaggagaaaatggagctggaccttgagcctgacacatcttatggg

SEQ ID NO: 455384 - DNA, 120 bp, Artificial Sequence
  ENSG00000156504_1 (sequence is synthesized)
ggaaccctgaggagatccagcagcgctcccctaatccatgggctcagtgacctttcacaggttttccaaccttacacacttagaactcggaggaatagtacaacaattatgagccgtcac

SEQ ID NO: 455385 - DNA, 120 bp, Artificial Sequence
  ENSG00000156504_2 (sequence is synthesized)
agcctggaagaaggcctggatatggtgaacagagaaactgcacatgaaagggaaatgcaaacggcaatgcagataagccaatcatgggatgagagcttgagcctgagtgacagtgatttt

SEQ ID NO: 455386 - DNA, 120 bp, Artificial Sequence
  ENSG00000156504_3 (sequence is synthesized)
gacaagccggagaaattatattctcctaagagaattgacttcactccagtttctccagcaccttcacccaccaggggattcggaaagatgttcgtgagcagcagtggattgccaccaagt

SEQ ID NO: 455387 - DNA, 120 bp, Artificial Sequence
  ENSG00000156504_4 (sequence is synthesized)
ccagttcccagtccaagacgattttcaagcaggagaagtcagagtccagtcaagtgcattagacccagtgttcttggtcctcttaaaagaaaaggtgaaatggagacagaaagtcagccc

SEQ ID NO: 455388 - DNA, 120 bp, Artificial Sequence
  ENSG00000156504_5 (sequence is synthesized)
tcagttcatgttcagatattttggatggcagtagtagcagcagtggcttatcctcagacccgctggctaaaggcagcgctaccgcagagtctccagtagcatgctccaattcatgctctt

SEQ ID NO: 455389 - DNA, 120 bp, Artificial Sequence
  ENSG00000156504_6 (sequence is synthesized)
cgttcatcttgatggatgatctctcacccaagtgacttaaccatttctgattcaacgttttaactgctgtttcctacataaaatgtttagtggggaacgcagagaactttgatccataat

SEQ ID NO: 455390 - DNA, 120 bp, Artificial Sequence
  ENSG00000156504_7 (sequence is synthesized)
gaggattaaagttttacagatttcacacattctgatgctattattactctttggcatctctcttctccaaagttcaattttgtgagcctagtgaccttactagtatctggttttgctgat

SEQ ID NO: 455391 - DNA, 120 bp, Artificial Sequence
  ENSG00000156504_8 (sequence is synthesized)
ctcattttggatttagtgattaaatctcaaatgctgatttttgattgcttagaggaatcttttttcttagtgcctcaaaaaacacctattttgagtctatacatttaagaaaggcactga

SEQ ID NO: 455392 - DNA, 120 bp, Artificial Sequence
  ENSG00000156504_9 (sequence is synthesized)
tgtgtattgcctttaatggtccttttccgcagcagtgatatgacagatttgatcagaaattctcttgcttgagagatttttttttgtcctctgttgactacatagtttcaaatctctctt

SEQ ID NO: 455393 - DNA, 120 bp, Artificial Sequence
  ENSG00000156504_10 (sequence is synthesized)
tatttcatgatgatatataaattgcttttaattatattaaatttttatttttctgcatcagcttcaagtacattattttgtttccctttcctgtttgagccgcttatgccatttctcaca

SEQ ID NO: 455394 - DNA, 120 bp, Artificial Sequence
  ENSG00000156504_11 (sequence is synthesized)
attggagtggccgctggacgcgtgcgcaggacccgatgggtgcccggacgcggaagaactggcccagcggaggttcccgcttctgaagcgtgggaggcggaagagactgcagcccccgcc

SEQ ID NO: 455395 - DNA, 120 bp, Artificial Sequence
  ENSG00000156504_12 (sequence is synthesized)
tgtggagcatctacaaatgaatgaatagttatttacacacaaaccactgtgtacaaaagcgtccatggagctgtcagtgtctcgagtggtattatgaggcctcaggtgccttggggtaca

SEQ ID NO: 455396 - DNA, 120 bp, Artificial Sequence
  ENSG00000156504_13 (sequence is synthesized)
ttgtcatgctataagggatgtatatcataaggtatggtggaagaggggccttatgtgaatgattgccacatactgtttctgttgctgctttttttccgattcctttttgtcattggattt

SEQ ID NO: 455397 - DNA, 120 bp, Artificial Sequence
  ENSG00000156504_14 (sequence is synthesized)
gtttgttttgtcatgtggtgaatggtgttttagttattgtgttgctgccagaatcagaatccagttcttgttcttactgccttatagttattgtgttgccaccagaatcagaatccagtt

SEQ ID NO: 455398 - DNA, 120 bp, Artificial Sequence
  ENSG00000156504_15 (sequence is synthesized)
agtcaatgtgattgtgcattctgcttttaagaagctgtttcagctatgaactgtgtatgtgctataagtgtgaggtaccataagttatttaatttttaaaagaggaaactcctgagtgag

SEQ ID NO: 455399 - DNA, 120 bp, Artificial Sequence
  ENSG00000156504_16 (sequence is synthesized)
ctgtttaagaaatctgagtgtgatctattgttacgttatttataactaggtaaaatgtctgtcgtgatagatttcttttaacgttcagatactgtggttgggttgtctatatttaatatg

SEQ ID NO: 455400 - DNA, 120 bp, Artificial Sequence
  ENSG00000156504_17 (sequence is synthesized)
cagatttgcctgctggaatcataatccatttttaagtgaatgtaagaaatgaaaactactgcatttgtgtcttttgaaggcaaggatccttggattttaaaggaagagtatgtgctttga

SEQ ID NO: 455401 - DNA, 120 bp, Artificial Sequence
  ENSG00000156504_18 (sequence is synthesized)
aggcactcagagactagtaatagcatatggtttgaagggaaacccattctctttcaattacaagagagcatcacttagcgtgcagtacttctgttacagcatccgatgtgtcctttattt

SEQ ID NO: 455402 - DNA, 120 bp, Artificial Sequence
  ENSG00000156504_19 (sequence is synthesized)
taaattgtaaccataacagccattaatggctttatttcttgtattgctctcatctgggaaaagtctctacttcttcaaacgtaacataaatctattatgaagcttgtcccctagtatgcc

SEQ ID NO: 455403 - DNA, 120 bp, Artificial Sequence
  ENSG00000156504_20 (sequence is synthesized)
attataaagaaaaaattcttcgatggtatgcagtgtatctattctgtttgtaaaagatcatgtcaaaatgttctgcctctataatgataatagatggttttgtctttcaggatatttatc

SEQ ID NO: 455404 - DNA, 120 bp, Artificial Sequence
  ENSG00000156504_21 (sequence is synthesized)
cacctactgtcttctttgccttaaagggacacttggccatcatttttaggctcgaacttaacactgttaagaaataactgaaatatgatggtatttacattaatttttgaaattcaatgg

SEQ ID NO: 455405 - DNA, 120 bp, Artificial Sequence
  ENSG00000156504_22 (sequence is synthesized)
tgggatagaattaggtcaggaaatggaagttgttccaatggtgtgagaactaggagacaagatgattcactttattatttaaaccaagcttcatttttagtttttgttgtttaaatggac

SEQ ID NO: 455406 - DNA, 120 bp, Artificial Sequence
  ENSG00000156504_23 (sequence is synthesized)
tggaaagttaagtttttgcagggattgttttgaaataaagagatatgctaactcacagatgaactttgttaagacccctttatttttatataaagtctaatatttgaaaagcgattgtta

SEQ ID NO: 455407 - DNA, 120 bp, Artificial Sequence
  ENSG00000156504_24 (sequence is synthesized)
taaagtaaaattctctcttcctattctaatatatatcatatatttcaggcttctatttgaaaacaggtataagagatgatatgatacaaccctatagataatgttttttgcttgattgac

SEQ ID NO: 455408 - DNA, 120 bp, Artificial Sequence
  ENSG00000156504_25 (sequence is synthesized)
ttatataatcactgtttcatgattactgcttttggaataataggaagttttgtgaaatgctggccttgtgtatatcttagaatgcaaatttaataaagtgtgtatacatgcataaaattt

SEQ ID NO: 455409 - DNA, 120 bp, Artificial Sequence
  ENSG00000156504_26 (sequence is synthesized)
cgcttctgaagcgtgggaggcggaagagactgcaggttgtagattttggtcttggccccaacgggttcccccagaccattagaacccgagagaggaagaggaggcaccgcggcggcggct

SEQ ID NO: 455410 - DNA, 120 bp, Artificial Sequence
  ENSG00000156504_27 (sequence is synthesized)
gagaggccgaacccccaacctgtcctcgaggcgggaggggggcagggaggggagaagcaccgatcccagggctgaggagcctccgggaccgggtccgggagcatggggggctggaccggg

SEQ ID NO: 455411 - DNA, 120 bp, Artificial Sequence
  ENSG00000156504_28 (sequence is synthesized)
tccccgagcatggggagctggagccgccaaggccgcccggccgggtcctacccgactgtcaggtcctcggtgctagcgctgcccgggcagccgcagcatctgtagcccggccccgcttgt

SEQ ID NO: 455412 - DNA, 120 bp, Artificial Sequence
  ENSG00000156504_29 (sequence is synthesized)
ggtcctcagccggaaagatagcagcatgagttccgccgctgcctagtttcctccccctcctcttctccctcctctctcctcttcccagaccacctccttctttcccgcccctgcgcttct

SEQ ID NO: 455413 - DNA, 120 bp, Artificial Sequence
  ENSG00000156504_30 (sequence is synthesized)
tttcccttaccctctgtcctcctccctcccctctgccctctcccttcccctccctcctccgcccccttcctctccctttcccccctctgccctcctcttatcctctctgtcctcctgctt

SEQ ID NO: 455414 - DNA, 120 bp, Artificial Sequence
  ENSG00000156504_31 (sequence is synthesized)
ttccacctatccttttccctccctcttccctcctccctccatccttgttttccctccatccttctttccttcatccttttccttcattctgtcaccttccaccactacctcttcgtcctc

SEQ ID NO: 455415 - DNA, 120 bp, Artificial Sequence
  ENSG00000156504_32 (sequence is synthesized)
ctctcctgcctcaccatcatcctcccttcctcatcatcatcctccttccctcctcctctcctacttttctccgcccccagcccccgcccccgtccccaagcctccgccccttagcccccg

SEQ ID NO: 455416 - DNA, 120 bp, Artificial Sequence
  ENSG00000156504_33 (sequence is synthesized)
agaatgtaaacggacttacaggatgcttggattagtcatcacaggttcttatgactttgctaccacagttgatatatttctcctcaaacctgttgccctaaggaatatataaaatattgt

SEQ ID NO: 455417 - DNA, 120 bp, Artificial Sequence
  ENSG00000156508_0 (sequence is synthesized)
ctttttcgcaacgggtttgccgccagaacacaggtgtcgtgaaaactacccctaaaagccaaaatgggaaaggaaaagactcatatcaacattgtcgtcattggacacgtagattcgggc

SEQ ID NO: 455418 - DNA, 120 bp, Artificial Sequence
  ENSG00000156508_1 (sequence is synthesized)
aagtccaccactactggccatctgatctataaatgcggtggcatcgacaaaagaaccattgaaaaatttgagaaggaggctgctgagatgggaaagggctccttcaagtatgcctgggtc

SEQ ID NO: 455419 - DNA, 120 bp, Artificial Sequence
  ENSG00000156508_2 (sequence is synthesized)
ttggataaactgaaagctgagcgtgaacgtggtatcaccattgatatctccttgtggaaatttgagaccagcaagtactatgtgactatcattgatgccccaggacacagagactttatc

SEQ ID NO: 455420 - DNA, 120 bp, Artificial Sequence
  ENSG00000156508_3 (sequence is synthesized)
aaaaacatgattacagggacatctcaggctgactgtgctgtcctgattgttgctgctggtgttggtgaatttgaagctggtatctccaagaatgggcagacccgagagcatgcccttctg

SEQ ID NO: 455421 - DNA, 120 bp, Artificial Sequence
  ENSG00000156508_4 (sequence is synthesized)
gcttacacactgggtgtgaaacaactaattgtcggtgttaacaaaatggattccactgagccaccctacagccagaagagatatgaggaaattgttaaggaagtcagcacttacattaag

SEQ ID NO: 455422 - DNA, 120 bp, Artificial Sequence
  ENSG00000156508_5 (sequence is synthesized)
aaattgttaaggaagtcagcacttacattaagaaaattggctacaaccccgacacagtagcatttgtgccaatttctggttggaatggtgacaacatgctggagccaagtgctaacatgc

SEQ ID NO: 455423 - DNA, 120 bp, Artificial Sequence
  ENSG00000156508_6 (sequence is synthesized)
gatggcaatgccagtggaaccacgctgcttgaggctctggactgcatcctaccaccaactcgtccaactgacaagcccttgcgcctgcctctccaggatgtctacaaaattggtggtatt

SEQ ID NO: 455424 - DNA, 120 bp, Artificial Sequence
  ENSG00000156508_7 (sequence is synthesized)
ggtactgttcctgttggccgagtggagactggtgttctcaaacccggtatggtggtcacctttgctccagtcaacgttacaacggaagtaaaatctgtcgaaatgcaccatgaagctttg

SEQ ID NO: 455425 - DNA, 120 bp, Artificial Sequence
  ENSG00000156508_8 (sequence is synthesized)
tcttcctggggacaatgtgggcttcaatgtcaagaatgtgtctgtcaaggatgttcgtcgtggcaacgttgctggtgacagcaaaaatgacccaccaatggaagcagctggcttcactgc

SEQ ID NO: 455426 - DNA, 120 bp, Artificial Sequence
  ENSG00000156508_9 (sequence is synthesized)
ttcactgctcaggtgattatcctgaaccatccaggccaaataagcgccggctatgcccctgtattggattgccacacggctcacattgcatgcaagtttgctgagctgaaggaaaagatt

SEQ ID NO: 455427 - DNA, 120 bp, Artificial Sequence
  ENSG00000156508_10 (sequence is synthesized)
ccctaaattcttgaagtctggtgatgctgccattgttgatatggttcctggcaagcccatgtgtgttgagagcttctcagactatccacctttgggtcgctttgctgttcgtgatatgag

SEQ ID NO: 455428 - DNA, 84 bp, Artificial Sequence
  ENSG00000156508_11 (sequence is synthesized)
tggcaagcccatgtgtgttgagagcttctcagactatccacctttgggtcgctttgctgttcgtgatatgagacagacagttgc

SEQ ID NO: 455429 - DNA, 79 bp, Artificial Sequence
  ENSG00000156508_12 (sequence is synthesized)
tcttaatcagtggtggaagaactagtaaaagactggttaatgataacaatgcatcgtaaaaccttcagaaggaaaggag

SEQ ID NO: 455430 - DNA, 63 bp, Artificial Sequence
  ENSG00000156508_13 (sequence is synthesized)
ttcaattggccatttaagtttagtagtaaaagactggttaatgataacaatgcatcgcgtgtg

SEQ ID NO: 455431 - DNA, 120 bp, Artificial Sequence
  ENSG00000156508_14 (sequence is synthesized)
aattttgagacccattaaaaaagttaaatgagaaacctgtgtgttcctttggtcaacaccgagacatttaggtgaaagacatctaattctggttttacgaatctggaaacttcttgaaaa

SEQ ID NO: 455432 - DNA, 120 bp, Artificial Sequence
  ENSG00000156508_15 (sequence is synthesized)
tgtaattcttgagttaacacttctgggtggagaatagggttgttttccccccacataattggaaggggaaggaatatcatttaaagctatgggagggttgctttgattacaacactggag

SEQ ID NO: 455433 - DNA, 120 bp, Artificial Sequence
  ENSG00000156508_16 (sequence is synthesized)
agaaatgcagcatgttgctgattgcctgtcactaaaacaggccaaaaactgagtccttgtgttgcatagaaagcttcatgttgctaaaccaatgttaagtgaatctttggaaacaaaatg

SEQ ID NO: 455434 - DNA, 120 bp, Artificial Sequence
  ENSG00000156508_17 (sequence is synthesized)
tttccaaattactgggatgtgcatgttgaaacgtgggttaaaatgactgggcagtgaaagttgactatttgccatgacataagaaataagtgtagtggctagtgtacaccctatgagtgg

SEQ ID NO: 455435 - DNA, 120 bp, Artificial Sequence
  ENSG00000156508_18 (sequence is synthesized)
aagggtccattttgaagtcagtggagtaagctttatgccagtttgatggtttcacaagttctattgagtgctattcagaataggaacaaggttctaatagaaaaagatggcaatttgaag

SEQ ID NO: 455436 - DNA, 120 bp, Artificial Sequence
  ENSG00000156508_19 (sequence is synthesized)
tagctataaaattagactaatctacattgcttttctcctgcagagtctaataccttttatgctttgataattagcagtttgtctacttggtcactaggaatgaaactacatggtaatagg

SEQ ID NO: 455437 - DNA, 120 bp, Artificial Sequence
  ENSG00000156508_20 (sequence is synthesized)
actacatggtaataggcttaacaggtgtaatagcccacttactcctgaatctttaagcatttgtgcatttgaaaaatgcttttcgcgatcttcctgctgggattacaggcatgagccact

SEQ ID NO: 455438 - DNA, 120 bp, Artificial Sequence
  ENSG00000156508_21 (sequence is synthesized)
atgtaaaagtgtctaaaggtttttttttggttataaaaggaaaatttttgcttaagtttgaaggataggtaaaattaaaggacatgctttctgtttgtgtgatggtttttaaaaattttt

SEQ ID NO: 455439 - DNA, 120 bp, Artificial Sequence
  ENSG00000156508_22 (sequence is synthesized)
tgctttctgtttgtgtgatggtttttaaaaattttttttaagatggagttcttgttgcccaggctagaatgcaatggcaaaatctcactgcaatctcctcctcctgggttcaagcaattc

SEQ ID NO: 455440 - DNA, 68 bp, Artificial Sequence
  ENSG00000156508_23 (sequence is synthesized)
caagtagctgggattacaggcatgtgctaatttggtgtttttaatagagatggcctcggcctcctaaa

SEQ ID NO: 455441 - DNA, 120 bp, Artificial Sequence
  ENSG00000156508_24 (sequence is synthesized)
agccaccatgcctggccaggacatgtgttcttaaggacatgctaagcaggagttaaagcagcccaagagataaggcctcttaaagtgactggcaatgtgtattgctcaagattcaaaggt

SEQ ID NO: 455442 - DNA, 120 bp, Artificial Sequence
  ENSG00000156508_25 (sequence is synthesized)
acttgaattggccatagacaagtctgtaatgaagtgttatcgttttccctcatctgagtctgaattagataaaatgccttcccatcagccagtgctctgaggtatcaagtctaaattgaa

SEQ ID NO: 455443 - DNA, 120 bp, Artificial Sequence
  ENSG00000156508_26 (sequence is synthesized)
ctagagatttttgtccttagtttctttgctatctaatgtttacacaagtaaatagtctaagatttgctggatgacagaaaaaacaggtaaggcctttaatagatggccaatagatgccct

SEQ ID NO: 455444 - DNA, 120 bp, Artificial Sequence
  ENSG00000156508_27 (sequence is synthesized)
gataatgaaagttgacacctgtaagatttaccagtagagaattcttgacatgcaaggaagcaagatttaactgaaaaattgttcccactggaagcaggaatgagtcagtttacttgcata

SEQ ID NO: 455445 - DNA, 120 bp, Artificial Sequence
  ENSG00000156508_28 (sequence is synthesized)
tactgagattgagattaacttcctgtgaaacccagtgtcttagacaactgtggcttgagcaccacctgctggtattcattacaaacttgctcactacaataaatgaattttaagctttaa

SEQ ID NO: 455446 - DNA, 120 bp, Artificial Sequence
  ENSG00000156508_29 (sequence is synthesized)
gtttgccgccagaacacaggtaagtgccgtgtgtggttcccgcgggcctggcctctttacgggttatggcccttgcgtgccttgaattacttccacgcccctggctgcagtacgtgattc

SEQ ID NO: 455447 - DNA, 120 bp, Artificial Sequence
  ENSG00000156508_30 (sequence is synthesized)
ttgatcccgagcttcgggttggaagtgggtgggagagttcgaggccttgcgcttaaggagccccttcgcctcgtgcttgagttgaggcctggcttgggcgctggggccgccgcgtgcgaa

SEQ ID NO: 455448 - DNA, 120 bp, Artificial Sequence
  ENSG00000156508_31 (sequence is synthesized)
tctggtggcaccttcgcgcctgtctcgctgctttcgataagtctctagccatttaaaatttttgatgacctgctgcgacgctttttttctggcaagatagtcttgtaaatgcgggccaag

SEQ ID NO: 455449 - DNA, 120 bp, Artificial Sequence
  ENSG00000156508_32 (sequence is synthesized)
atctgcacactggtatttcggtttttggggccgcgggcggcgacggggcccgtgcgtcccagcgcacatgttcggcgaggcggggcctgcgagcgcggccaccgagaatcggacgggggt

SEQ ID NO: 455450 - DNA, 120 bp, Artificial Sequence
  ENSG00000156508_33 (sequence is synthesized)
agtctcaagctggccggcctgctctggtgcctggcctcgcgccgccgtgtatcgccccgccctgggcggcaaggctggcccggtcggcaccagttgcgtgagcggaaagatggccgcttc

SEQ ID NO: 455451 - DNA, 120 bp, Artificial Sequence
  ENSG00000156508_34 (sequence is synthesized)
ccggccctgctgcagggagctcaaaatggaggacgcggcgctcgggagagcgggcgggtgagtcacccacacaaaggaaaagggcctttccgtcctcagccgtcgcttcatgtgactcca

SEQ ID NO: 455452 - DNA, 120 bp, Artificial Sequence
  ENSG00000156508_35 (sequence is synthesized)
cggagtaccgggcgccgtccaggcacctcgattagttctcgagcttttggagtacgtcgtctttaggttggggggaggggttttatgcgatggagtttccccacactgagtgggtggaga

SEQ ID NO: 455453 - DNA, 120 bp, Artificial Sequence
  ENSG00000156508_36 (sequence is synthesized)
ctgaagttaggccagcttggcacttgatgtaattctccttggaatttgccctttttgagtttggatcttggttcattctcaagcctcagacagtggttcaaagtttttttcttccatttc

SEQ ID NO: 455454 - DNA, 120 bp, Artificial Sequence
  ENSG00000156508_37 (sequence is synthesized)
cgttaaggaggcccccagtcccgacccttcgccccaagcccctcggggtccccgggcctggtactccttgccacacgggaggggcgcggaagccggggcggaggaggagccaaccccggg

SEQ ID NO: 455455 - DNA, 120 bp, Artificial Sequence
  ENSG00000156508_38 (sequence is synthesized)
ctgggctgagacccgcagaggaagacgctctagggatttgtcccggactagcgagatggcaaggctgaggacgggaggctgattgagaggcgaaggtgtcgtgaaaactacccctaaaag

SEQ ID NO: 455456 - DNA, 120 bp, Artificial Sequence
  ENSG00000156508_39 (sequence is synthesized)
aagtgctaacgtaagtggctttcaagaccattgttaaaaagctctgggaatggcgatttcatgcttacacaaattggcatgcttgtgtttcagatgccttggttcaagggatggaaagtc

SEQ ID NO: 455457 - DNA, 120 bp, Artificial Sequence
  ENSG00000156508_40 (sequence is synthesized)
gtaggactgagtctattctaaactgaaagcctggacatctggagtaccagggggagatgacgtgttacgggcttccataaaagcagctggctttgaatggaaggagccaagaggccagca

SEQ ID NO: 455458 - DNA, 120 bp, Artificial Sequence
  ENSG00000156508_41 (sequence is synthesized)
ctgacgctgcggaggctcgagcggcgtatccataccacccagctgttcgccgcgggaacccgccggcccgcaggtgacccagcgctggaaaaacgccagcgacgtggcctggcgagctgg

SEQ ID NO: 455459 - DNA, 120 bp, Artificial Sequence
  ENSG00000156508_42 (sequence is synthesized)
cgcggggcaaggaccacccgcgcccgccttgccgccccagcctccctccctaggaagcagggtgcgccccggtgcgcgcggggcttccccggaccggcgttccagtccctctccggcttc

SEQ ID NO: 455460 - DNA, 120 bp, Artificial Sequence
  ENSG00000156509_0 (sequence is synthesized)
aaacctaaggaggtaaaggcagcggccccacgcgaagctggcgtgggggttgccatagcccgcatcccagggggcgaggccgaggcttctccccggcccatccagcggctgctgcccggc

SEQ ID NO: 455461 - DNA, 80 bp, Artificial Sequence
  ENSG00000156509_1 (sequence is synthesized)
tcctctcccacctgtccgcttcggcgcctcgcccggccccgcggcctccaggcaggcggcgggaccccaggcgagtgccc

SEQ ID NO: 455462 - DNA, 120 bp, Artificial Sequence
  ENSG00000156509_2 (sequence is synthesized)
tgtcttccaggtgctgggcctagggaggcgcgcggcagccctcactcctccgctcctggtgacgccagcccatcccctgctgcccttggctttctgggcctagcggatctttgacgccct

SEQ ID NO: 455463 - DNA, 120 bp, Artificial Sequence
  ENSG00000156509_3 (sequence is synthesized)
ggtgagaccgttacccacccgcccgccatagctcctcgggggagtcagtgccaggctgcagcacacgctgccttttcaggaacccgaatttgggaagtttactcatgtctaagtccagct

SEQ ID NO: 455464 - DNA, 120 bp, Artificial Sequence
  ENSG00000156509_4 (sequence is synthesized)
ggagaaaacaaggatattaagataactattttctggagggctgaaggaaattcaaaatgatttagaccttctcaagtgttaggaataatccctgcggcatgcaccctgtgtacccttcga

SEQ ID NO: 455465 - DNA, 120 bp, Artificial Sequence
  ENSG00000156509_5 (sequence is synthesized)
ctttgagcaatcatgatgctgctgcacctttcaattaattgtgcaaactaaagttttcctctttaagtggcattattttggcatgagttttaaagacaaagatgagagaatttcttgttt

SEQ ID NO: 455466 - DNA, 120 bp, Artificial Sequence
  ENSG00000156509_6 (sequence is synthesized)
ggaagcctacgtaactttgacatctaagagctcaagatttactgatgaaacagagattttgaagatgtcgcaaaggcactcaggtcaagctggcactgaagcaggaaatggggcggactc

SEQ ID NO: 455467 - DNA, 120 bp, Artificial Sequence
  ENSG00000156509_7 (sequence is synthesized)
tcctccaattgtcaactccaagtactccaccttcagagatttttgttccacatcttcatttcaagatagtggctacaatgagttaaaatcttgtagctttgataatatagataaagaata

SEQ ID NO: 455468 - DNA, 120 bp, Artificial Sequence
  ENSG00000156509_8 (sequence is synthesized)
tcttggaaagaaagaaaaaggcccaacattactctatgagcaccctgaaacttcaggcctgggcttaacacatcctttagaatctcccactcaaaaaaagaaatgtatcttgcctagaaa

SEQ ID NO: 455469 - DNA, 120 bp, Artificial Sequence
  ENSG00000156509_9 (sequence is synthesized)
ggaaaaggataaaaccccagaactttgtgaaacacctaaaatcagtgggaaaaaatgtttacctcgcagaaggttgaatgtatctttcgctcttctaaaaggggactttgaatcacaaaa

SEQ ID NO: 455470 - DNA, 120 bp, Artificial Sequence
  ENSG00000156509_10 (sequence is synthesized)
tagttctttagaaagtagtataagccaagttatcaacttagaaaaaaatattccaagcagtgcttcaggtttttccagggcaaataattttagccctttagttactagcactttaaaaac

SEQ ID NO: 455471 - DNA, 120 bp, Artificial Sequence
  ENSG00000156509_11 (sequence is synthesized)
agaagaagtgacttcatgcagtcaaaaattgaggcttaatttttctcagcaaaagacttccacaattgatgattccaaagatgattgtagcctatttgaagttgaatgtatatctccaat

SEQ ID NO: 455472 - DNA, 120 bp, Artificial Sequence
  ENSG00000156509_12 (sequence is synthesized)
tcagggcaataattttaaagactctatcacacatgactttagtgatagcagtttatgcattaatgatgagaatgcatgtccagagctcctgggctcctctgttagtggaacaacttgtgg

SEQ ID NO: 455473 - DNA, 120 bp, Artificial Sequence
  ENSG00000156509_13 (sequence is synthesized)
tgactccgataagtaatcttgtggcaaacattagatttaacgcaagtcaaatactttctccttcacctgaagtgagaggcagtatttcaacgcctgaagacagtggttttaactcactta

SEQ ID NO: 455474 - DNA, 120 bp, Artificial Sequence
  ENSG00000156509_14 (sequence is synthesized)
gcttggagaaatcagaagattccctgtctgaccaggagggttcttttcaagaactactgcagaaacataaggggactcccaaagttggggacaccataagaaagacaagacatcttggaa

SEQ ID NO: 455475 - DNA, 120 bp, Artificial Sequence
  ENSG00000156509_15 (sequence is synthesized)
ggtcgagaagactgtccacccttcgggaacaaagctcgcagtcagagacagaagaggaaaagcagattgtccaccctgactctgaaaaaagagcagcagctgcttctgccatctcagagg

SEQ ID NO: 455476 - DNA, 120 bp, Artificial Sequence
  ENSG00000156509_16 (sequence is synthesized)
gtcagctgagtagtgatgagagtggggatttgacctttagcttaaagaatttatcaaagaccccagccttgcaattggtacatgagctgttcatgaaaagcaagaggaaaagattacagg

SEQ ID NO: 455477 - DNA, 120 bp, Artificial Sequence
  ENSG00000156509_17 (sequence is synthesized)
aaaatagtggacatgaattcttagagcaaggggatggggagaaaatagctgtactgcagtgtatacttgcaggactgatcggcaagaaaatgggtatagaaaaactggacatcttaacag

SEQ ID NO: 455478 - DNA, 120 bp, Artificial Sequence
  ENSG00000156509_18 (sequence is synthesized)
aattaaaatatagaaatttaaagcatattcttgctatggttttagagtccttgaccgcagagagcctatgcagtgtttggaaagtaagcagaaattggcgtgaaattgttgttcaagata

SEQ ID NO: 455479 - DNA, 120 bp, Artificial Sequence
  ENSG00000156509_19 (sequence is synthesized)
aaaatgcaaatcggaggaggaaattttatatcacacaactgaaaacagattctgagggggctgtattaaatgtcgaggatgctgccactcggctccagcttttaaatcgctcagctttaa

SEQ ID NO: 455480 - DNA, 120 bp, Artificial Sequence
  ENSG00000156509_20 (sequence is synthesized)
gatctgtgcaggcacaggctaggatacctggttctcagagagagcaagggtcaacattatctccctggggagaagttttgacacctctagcaagctcttctgttactcacttaagtagta

SEQ ID NO: 455481 - DNA, 120 bp, Artificial Sequence
  ENSG00000156509_21 (sequence is synthesized)
aacaggaagaatatgttaaggttgccaaaacactttttactgatgaagcattaaaaccttgcccaaggtgccagtcccctgctaagtaccagccatataagaaaaggggactgtgtagcc

SEQ ID NO: 455482 - DNA, 120 bp, Artificial Sequence
  ENSG00000156509_22 (sequence is synthesized)
gaacagcctgtggttttgacttttgtgtgttatgtctgtgtgcttatcatgggtctgaagaatgtagtagaggagcagcaaagccaagaaatagaaaagatgctctcccaggaagtgccc

SEQ ID NO: 455483 - DNA, 120 bp, Artificial Sequence
  ENSG00000156509_23 (sequence is synthesized)
agagtaagcggaatttaaaacgcctctgaagagactaaatatagaactcccccatgcagtgttctatttatctgacttaaaattatgaatattttgaatacatgcaaatcttcccattaa

SEQ ID NO: 455484 - DNA, 120 bp, Artificial Sequence
  ENSG00000156509_24 (sequence is synthesized)
tgacaggtgatgattaatttcctattttgtatatattataatcgatgtcattgtatgttttctttaaagttgttttgaaaaaattttattttactatgtcattttacccattttaataac

SEQ ID NO: 455485 - DNA, 120 bp, Artificial Sequence
  ENSG00000156509_25 (sequence is synthesized)
ttggtattttaaataaagaattttcattgttgttatatgtatgtactttattgttttatgtaacattttaaatttgtgcatttcatcactcttgacatgttcttcaatcattttttaaaa

SEQ ID NO: 455486 - DNA, 120 bp, Artificial Sequence
  ENSG00000156509_26 (sequence is synthesized)
aatagtttttcagataatattaaagattttgaactctagacagatggccttatagatttggaaaatgagtacttgactgaaatgaaatataaataaaatattttcagaagttctattgaa

SEQ ID NO: 455487 - DNA, 120 bp, Artificial Sequence
  ENSG00000156509_27 (sequence is synthesized)
aatcggaggaggaaattttatatcacacaactgaaaacagattctgaggtaatgtatgtaatacttctctaaaatggatttgtataaatacataataatctcatgttgctagacaaccta

SEQ ID NO: 455488 - DNA, 120 bp, Artificial Sequence
  ENSG00000156509_28 (sequence is synthesized)
atttggttttcctgctatctttaaccttttccatttaacaaacattcactcataaattccttagttttcccaaactcaattttcacccagtctgtaaatggaataaacaacatagcatca

SEQ ID NO: 455489 - DNA, 120 bp, Artificial Sequence
  ENSG00000156509_29 (sequence is synthesized)
cgacagagcgagactctctctcaaaacaaaacaaaaaaaaaagaacatcttgttgggctttgttgctgcttacgtgggtgtgctcttaacagcatttgaataccaatgatatgctggatc

SEQ ID NO: 455490 - DNA, 120 bp, Artificial Sequence
  ENSG00000156509_30 (sequence is synthesized)
cttaacagcatttgaataccaatgatatgctggatcctaattataatgagatacccttatagcatttctaaccgagtcttttgagtggacattacatgttagttaactgtgccagtgctc

SEQ ID NO: 455491 - DNA, 120 bp, Artificial Sequence
  ENSG00000156509_31 (sequence is synthesized)
tgacatctaagagctcaagatttactgatggtaagagtttccactttaacaaatgaagaacatttgggtttaataaacagagattttgaagatgtcgcaaaggcactcaggtcaagctgg

SEQ ID NO: 455492 - DNA, 120 bp, Artificial Sequence
  ENSG00000156510_0 (sequence is synthesized)
aggtctgccagcctggactggaagcgtgcaacactccagagtcgtaggagtgaacactgcacaggaatctctgcccatctcaggagaaaccaaacttggggaaaatgtttgcggtccact

SEQ ID NO: 455493 - DNA, 120 bp, Artificial Sequence
  ENSG00000156510_1 (sequence is synthesized)
tgatggcattttacttcagcaagctgaaggaggaccagatcaagaaggtggacaggttcctgtatcacatgcggctctccgatgacacccttttggacatcatgaggcggttccgggctg

SEQ ID NO: 455494 - DNA, 120 bp, Artificial Sequence
  ENSG00000156510_2 (sequence is synthesized)
agatggagaagggcctggcaaaggacaccaaccccacggctgcagtgaagatgttgcccaccttcgtcagggccattcccgatggttccgaaaatggggagttcctttccctggatctcg

SEQ ID NO: 455495 - DNA, 120 bp, Artificial Sequence
  ENSG00000156510_3 (sequence is synthesized)
gagggtccaagttccgagtgctgaaggtgcaagtcgctgaagaggggaagcgacacgtgcagatggagagtcagttctacccaacgcccaatgaaatcatccgcgggaacggcacagagc

SEQ ID NO: 455496 - DNA, 120 bp, Artificial Sequence
  ENSG00000156510_4 (sequence is synthesized)
tgtttgaatatgtagctgactgtctggcagatttcatgaagaccaaagatttaaagcataagaaattgccccttggcctaactttttctttcccctgtcgacagactaaactggaagagg

SEQ ID NO: 455497 - DNA, 120 bp, Artificial Sequence
  ENSG00000156510_5 (sequence is synthesized)
gtgtcctactttcgtggacaaaaaagtttaaggcacgaggagttcaggacacggatgtggtgagccgtctgaccaaagccatgagaagacacaaggacatggacgtggacatcctggccc

SEQ ID NO: 455498 - DNA, 120 bp, Artificial Sequence
  ENSG00000156510_6 (sequence is synthesized)
tggtcaatgacaccgtggggaccatgatgacctgtgcctatgacgacccctactgcgaagttggtgtcatcatcggaactggcaccaatgcgtgttacatggaggacatgagcaacattg

SEQ ID NO: 455499 - DNA, 120 bp, Artificial Sequence
  ENSG00000156510_7 (sequence is synthesized)
acctggtggagggcgacgagggcaggatgtgcatcaacacagagtggggggccttcggggacgacggggccctggaggacattcgcactgagttcgacagggagctggacctcggctctc

SEQ ID NO: 455500 - DNA, 120 bp, Artificial Sequence
  ENSG00000156510_8 (sequence is synthesized)
tcaacccaggaaagcaactgttcgagaagatgatcagtggcctgtacctgggggagcttgtcaggcttatcttgctgaagatggccaaggctggcctcctgtttggtggtgagaaatctt

SEQ ID NO: 455501 - DNA, 120 bp, Artificial Sequence
  ENSG00000156510_9 (sequence is synthesized)
ctgctctccacactaagggcaagatcgaaacacggcacgtggctgccatggagaagtataaagaaggccttgctaatacaagagagatcctggtggacctgggtctggaaccgtctgagg

SEQ ID NO: 455502 - DNA, 120 bp, Artificial Sequence
  ENSG00000156510_10 (sequence is synthesized)
ctgactgcattgccgtccagcatgtctgtaccatcgtctccttccgctcggccaatctctgtgcagcagctctggcggccatcctgacacgcctccgggagaacaagaaggtggaacggc

SEQ ID NO: 455503 - DNA, 120 bp, Artificial Sequence
  ENSG00000156510_11 (sequence is synthesized)
tccggaccacagtgggcatggacggcaccctctacaagatacaccctcagtacccaaaacgcctgcacaaggtggtgaggaaactggtcccaagctgtgatgtccgcttcctcctgtcag

SEQ ID NO: 455504 - DNA, 120 bp, Artificial Sequence
  ENSG00000156510_12 (sequence is synthesized)
agagtggcagcaccaagggggccgccatggtgaccgcggtggcctcccgcgtgcaggcccagcggaagcagatcgacagggtgctggctttgttccagctgacccgagagcagctcgtgg

SEQ ID NO: 455505 - DNA, 120 bp, Artificial Sequence
  ENSG00000156510_13 (sequence is synthesized)
acgtgcaggccaagatgcgggctgagctggagtatgggctgaagaagaagagccacgggctggccacggtcaggatgctgcccacctacgtctgcgggctgccggacggcacagagaaag

SEQ ID NO: 455506 - DNA, 120 bp, Artificial Sequence
  ENSG00000156510_14 (sequence is synthesized)
gaaagtttctcgccctggatcttgggggaaccaacttccgggtcctcctggtgaagatcagaagtggacggaggtcagtgcgaatgtacaacaagatcttcgccatccccctggagatca

SEQ ID NO: 455507 - DNA, 120 bp, Artificial Sequence
  ENSG00000156510_15 (sequence is synthesized)
ttcctggactacatgggcctcaagggagcctccctacctttgggcttcacattctcatttccctgcaggcagatgagcattgacaagggaacactcatagggtggaccaaaggtttcaag

SEQ ID NO: 455508 - DNA, 120 bp, Artificial Sequence
  ENSG00000156510_16 (sequence is synthesized)
gccactgactgtgaaggggaggacgtggtggacatgctcagggaagccatcaagaggagaaacgagtttgacctggacattgttgcagtcgtgaatgatacagtggggaccatgatgacc

SEQ ID NO: 455509 - DNA, 120 bp, Artificial Sequence
  ENSG00000156510_17 (sequence is synthesized)
tgtggctatgaagatcctaattgtgagattggcctgattgcaggaacaggcagcaacatgtgctacatggaggacatgaggaacatcgagatggtggaggggggtgaagggaagatgtgc

SEQ ID NO: 455510 - DNA, 120 bp, Artificial Sequence
  ENSG00000156510_18 (sequence is synthesized)
atcaatacagagtggggaggatttggagacaatggctgcatagatgacatctggacccgatacgacacggaggtggatgaggggtccttgaatcctggcaagcagagatacgagaaaatg

SEQ ID NO: 455511 - DNA, 120 bp, Artificial Sequence
  ENSG00000156510_19 (sequence is synthesized)
accagtgggatgtacttgggggagattgtgcggcagatcctgatcgacctgaccaagcagggtctcctcttccgagggcagatttcagagcgtctccggaccaggggcatcttcgaaacc

SEQ ID NO: 455512 - DNA, 120 bp, Artificial Sequence
  ENSG00000156510_20 (sequence is synthesized)
aagttcctgtcccagatcgaaagcgatcggctggcccttctccaggtcaggaggattctgcagcagctgggcctggacagcacgtgtgaggacagcatcgtggtgaaggaggtgtgcgga

SEQ ID NO: 455513 - DNA, 120 bp, Artificial Sequence
  ENSG00000156510_21 (sequence is synthesized)
gccgtgtcccggcgggcggcccagctctgcggtgctggcctggccgctatagtggaaaaaaggagagaagaccaggggctagagcacctgaggatcactgtgggtgtggacggcaccctg

SEQ ID NO: 455514 - DNA, 120 bp, Artificial Sequence
  ENSG00000156510_22 (sequence is synthesized)
tacaagctgcaccctcacttttctagaatattgcaggaaactgtgaaggaactagcccctcgatgtgatgtgacattcatgctgtcagaagatggcagtggaaaaggggcagcactgatc

SEQ ID NO: 455515 - DNA, 120 bp, Artificial Sequence
  ENSG00000156510_23 (sequence is synthesized)
actgctgtggccaagaggttacagcaggcacagaaggagaactaggaacccctgggattggacctgatgcatcttggatactgaacagcttttcctctggcagatcagttggtcagagac

SEQ ID NO: 455516 - DNA, 120 bp, Artificial Sequence
  ENSG00000156510_24 (sequence is synthesized)
caatgggcaccctcctggctgacctcaccttctggatggccgaaagagaaccccaggttctcgggtactcttagtatcttgtactggatttgcagtgacattacatgacatctctatttg

SEQ ID NO: 455517 - DNA, 120 bp, Artificial Sequence
  ENSG00000156510_25 (sequence is synthesized)
gtatatttgggccaaaatgggccaacttatgaaatcaaagtgtctgtcctgagagatcccctttcaacacattgttcaggtgaggcttgagctgtcaattctctatggctttcagtcttg

SEQ ID NO: 455518 - DNA, 120 bp, Artificial Sequence
  ENSG00000156510_26 (sequence is synthesized)
tggctgcgggacttggaaatatatagaatctgcccatgtggctggcaggctgtttccccattgggatgcttaagccatctcttataggggattggaccctgtacttgtggatgaacattg

SEQ ID NO: 455519 - DNA, 120 bp, Artificial Sequence
  ENSG00000156510_27 (sequence is synthesized)
gagagcaagaggaactcacgttatgaactagggggatctcatctaacttgtccttaacttgccatgttgacttcaaacctattaagagaacaaagactttgaagtatccagccccagggt

SEQ ID NO: 455520 - DNA, 120 bp, Artificial Sequence
  ENSG00000156510_28 (sequence is synthesized)
gcagagaggttgattgccagggagcactgcaggaatcattgcatgcttaaagcgagttatgtcagcaccctgtaggattttgttccttattaagtgtgtgccatgtggtggggtgctgtc

SEQ ID NO: 455521 - DNA, 120 bp, Artificial Sequence
  ENSG00000156510_29 (sequence is synthesized)
tggggcatctgtttttcattttgcctgtggtttgtgttgcaggtgttgatagttgttttaaggattgttaggtataggaaatccagtaaattaataaaaaaattttgattttccaataaa

SEQ ID NO: 455522 - DNA, 120 bp, Artificial Sequence
  ENSG00000156510_30 (sequence is synthesized)
ggctgggtaagggattgcctcctggggctgctcttctctttccaactgattcaggatcgctttcaacaataataaactcatggccaaactgggctcatctataaagtcctgctgtcccca

SEQ ID NO: 455523 - DNA, 120 bp, Artificial Sequence
  ENSG00000156510_31 (sequence is synthesized)
tcctcaggctgggctaatttgaaacaaaccccacatcttacatcagttcatctataaatatttcataatgtatttctgaaatataaggattcttaataaaacataactacagtaccatta

SEQ ID NO: 455524 - DNA, 120 bp, Artificial Sequence
  ENSG00000156510_32 (sequence is synthesized)
atggagggcaagagtaagaagaaggctagtattctttctaaatctgttggcctttgttaacccaaggcatttgcagtaaaaacaaaacaaataaacaaacaaaaacacaaaaagcctaca

SEQ ID NO: 455525 - DNA, 120 bp, Artificial Sequence
  ENSG00000156515_0 (sequence is synthesized)
gaggaggaggagccgccgagcagccgccggaggaccacggctcgccagggctgcggaggaccgaccgtccccacgcctgccgccccgcgaccccgaccgccagcatgatcgccgcgcagc

SEQ ID NO: 455526 - DNA, 120 bp, Artificial Sequence
  ENSG00000156515_1 (sequence is synthesized)
tcctggcctattacttcacggagctgaaggatgaccaggtcaaaaagattgacaagtatctctatgccatgcggctctccgatgaaactctcatagatatcatgactcgcttcaggaagg

SEQ ID NO: 455527 - DNA, 120 bp, Artificial Sequence
  ENSG00000156515_2 (sequence is synthesized)
agatgaagaatggcctctcccgggattttaatccaacagccacagtcaagatgttgccaacattcgtaaggtccattcctgatggctctgaaaagggagatttcattgccctggatcttg

SEQ ID NO: 455528 - DNA, 120 bp, Artificial Sequence
  ENSG00000156515_3 (sequence is synthesized)
gtgggtcttcctttcgaattctgcgggtgcaagtgaatcatgagaaaaaccagaatgttcacatggagtccgaggtttatgacaccccagagaacatcgtgcacggcagtggaagccagc

SEQ ID NO: 455529 - DNA, 120 bp, Artificial Sequence
  ENSG00000156515_4 (sequence is synthesized)
tttttgatcatgttgctgagtgcctgggagatttcatggagaaaaggaagatcaaggacaagaagttacctgtgggattcacgttttcttttccttgccaacaatccaaaatagatgagg

SEQ ID NO: 455530 - DNA, 120 bp, Artificial Sequence
  ENSG00000156515_5 (sequence is synthesized)
ccatcctgatcacctggacaaagcgatttaaagcgagcggagtggaaggagcagatgtggtcaaactgcttaacaaagccatcaaaaagcgaggggactatgatgccaacatcgtagctg

SEQ ID NO: 455531 - DNA, 120 bp, Artificial Sequence
  ENSG00000156515_6 (sequence is synthesized)
tggtgaatgacacagtgggcaccatgatgacctgtggctatgacgaccagcactgtgaagtcggcctgatcatcggcactggcaccaatgcttgctacatggaggaactgaggcacattg

SEQ ID NO: 455532 - DNA, 120 bp, Artificial Sequence
  ENSG00000156515_7 (sequence is synthesized)
atctggtggaaggagacgaggggaggatgtgtatcaatacagaatggggagcctttggagacgatggatcattagaagacatccggacagagtttgacagggagatagaccggggatccc

SEQ ID NO: 455533 - DNA, 120 bp, Artificial Sequence
  ENSG00000156515_8 (sequence is synthesized)
tcaaccctggaaaacagctgtttgagaagatggtcagtggcatgtacttgggagagctggttcgactgatcctagtcaagatggccaaggagggcctcttatttgaagggcggatcaccc

SEQ ID NO: 455534 - DNA, 120 bp, Artificial Sequence
  ENSG00000156515_9 (sequence is synthesized)
cggagctgctcacccgagggaagtttaacaccagtgatgtgtcagccatcgaaaagaataaggaaggcctccacaatgccaaagaaatcctgacccgcctgggagtggagccgtccgatg

SEQ ID NO: 455535 - DNA, 120 bp, Artificial Sequence
  ENSG00000156515_10 (sequence is synthesized)
atgactgtgtctcagtccagcacgtttgcaccattgtctcatttcgctcagccaacttggtggctgccacactgggcgccatcttgaaccgcctgcgtgataacaagggcacacccaggc

SEQ ID NO: 455536 - DNA, 120 bp, Artificial Sequence
  ENSG00000156515_11 (sequence is synthesized)
tgcggaccacggttggtgtcgacggatctctttacaagacgcacccacagtattcccggcgtttccacaagactctaaggcgcttggtgccagactccgatgtgcgcttcctcctctcgg

SEQ ID NO: 455537 - DNA, 120 bp, Artificial Sequence
  ENSG00000156515_12 (sequence is synthesized)
agagtggcagcggcaagggggctgccatggtgacggcggtggcctaccgcttggccgagcagcaccggcagatagaggagaccctggctcatttccacctcaccaaggacatgctgctgg

SEQ ID NO: 455538 - DNA, 120 bp, Artificial Sequence
  ENSG00000156515_13 (sequence is synthesized)
aggtgaagaagaggatgcgggccgagatggagctggggctgaggaagcagacgcacaacaatgccgtggttaagatgctgccctccttcgtccggagaactcccgacgggaccgagaatg

SEQ ID NO: 455539 - DNA, 120 bp, Artificial Sequence
  ENSG00000156515_14 (sequence is synthesized)
gtgacttcttggccctggatcttggaggaaccaatttccgtgtgctgctggtgaaaatccgtagtgggaaaaagagaacggtggaaatgcacaacaagatctacgccattcctattgaaa

SEQ ID NO: 455540 - DNA, 120 bp, Artificial Sequence
  ENSG00000156515_15 (sequence is synthesized)
cagggcactggggaagagctgtttgatcacattgtctcctgcatctctgacttcttggactacatggggatcaaaggccccaggatgcctctgggcttcacgttctcatttccctgccag

SEQ ID NO: 455541 - DNA, 120 bp, Artificial Sequence
  ENSG00000156515_16 (sequence is synthesized)
cagacgagtctggacgcgggaatcttgatcacgtggacaaagggttttaaggcaacagactgcgtgggccacgatgtagtcaccttactaagggatgcgataaaaaggagagaggaattt

SEQ ID NO: 455542 - DNA, 120 bp, Artificial Sequence
  ENSG00000156515_17 (sequence is synthesized)
gacctggacgtggtggctgtggtcaacgacacagtgggcaccatgatgacctgtgcttatgaggagcccacctgtgaggttggactcattgttgggaccggcagcaatgcctgctacatg

SEQ ID NO: 455543 - DNA, 120 bp, Artificial Sequence
  ENSG00000156515_18 (sequence is synthesized)
gaggagatgaagaacgtggagatggtggagggggaccaggggcagatgtgcatcaacatggagtggggggcctttggggacaacgggtgtctggatgatatcaggacacactacgacaga

SEQ ID NO: 455544 - DNA, 120 bp, Artificial Sequence
  ENSG00000156515_19 (sequence is synthesized)
ctggtggacgaatattccctaaatgctgggaaacaaaggtatgagaagatgatcagtggtatgtacctgggtgaaatcgtccgcaacatcttaatcgacttcaccaagaagggattcctc

SEQ ID NO: 455545 - DNA, 120 bp, Artificial Sequence
  ENSG00000156515_20 (sequence is synthesized)
ttccgagggcagatctctgagacgctgaagacccggggcatctttgagaccaagtttctctctcagatcgagagtgaccgattagcactgctccaggtccgggctatcctccagcagcta

SEQ ID NO: 455546 - DNA, 120 bp, Artificial Sequence
  ENSG00000156515_21 (sequence is synthesized)
ggtctgaatagcacctgcgatgacagtatcctcgtcaagacagtgtgcggggtggtgtccaggagggccgcacagctgtgtggcgcaggcatggctgcggttgtggataagatccgcgag

SEQ ID NO: 455547 - DNA, 120 bp, Artificial Sequence
  ENSG00000156515_22 (sequence is synthesized)
aacagaggactggaccgtctgaatgtgactgtgggagtggacgggacactctacaagcttcatccacacttctccagaatcatgcaccagacggtgaaggaactgtcaccaaaatgtaac

SEQ ID NO: 455548 - DNA, 120 bp, Artificial Sequence
  ENSG00000156515_23 (sequence is synthesized)
gtgtccttcctcctgtctgaggatggcagcggcaagggggccgccctcatcacggccgtgggcgtgcggttacgcacagaggcaagcagctaagagtccgggatccccagcctactgcct

SEQ ID NO: 455549 - DNA, 120 bp, Artificial Sequence
  ENSG00000156515_24 (sequence is synthesized)
ctccagcacttctctcttcaagcggcgaccccctaccctcccagcgagttgcgctgggagacgctggcgccagggcctgccggcgcggggaggaaagcaaaatccaactaatggtatata

SEQ ID NO: 455550 - DNA, 120 bp, Artificial Sequence
  ENSG00000156515_25 (sequence is synthesized)
ttgtagggtacagaatagagcgtgtgctgttgataatatctctcacccggatccctcctcacttgccctgccactttgcatggtttgattttgacctggtcccccacgtgtgaagtgtag

SEQ ID NO: 455551 - DNA, 120 bp, Artificial Sequence
  ENSG00000156515_26 (sequence is synthesized)
tggcatccatttctaatgtatgcattcatccaacagagttatttattggctggagatggaaaatcacaccacctgacaggccttctgggcctccaaagcccatccttggggttccccctc

SEQ ID NO: 455552 - DNA, 120 bp, Artificial Sequence
  ENSG00000156515_27 (sequence is synthesized)
cctgtgtgaaatgtattatcaccagcagacactgccgggcctccctcccgggggcactgcctgaaggcgagtgtgggcatagcattagctgcttcctcccctcctggcacccactgtggc

SEQ ID NO: 455553 - DNA, 120 bp, Artificial Sequence
  ENSG00000156515_28 (sequence is synthesized)
ctggcatcgcatcgtggtgtgtcaatgccacaaaatcgtgtgtccgtggaaccagtcctagccgcgtgtgacagtcttgcattctgtttgtctcgtggggggaggtggacagtcctgcgg

SEQ ID NO: 455554 - DNA, 120 bp, Artificial Sequence
  ENSG00000156515_29 (sequence is synthesized)
aaatgtgtcttgtctccatttggataaaaggaaccaaccaacaaacaatgccatcactggaatttcccaccgctttgtgagccgtgtcgtatgacctagtaaactttgtaccaattcaaa

SEQ ID NO: 455555 - DNA, 120 bp, Artificial Sequence
  ENSG00000156515_30 (sequence is synthesized)
atctatcttgctgtgtttggacaggccagcccctgaaacatcttgggcaatggagggttaacttctcaaagtttaataggcaagaccagcaaccatgcaacaaggacttcaactaaccaa

SEQ ID NO: 455556 - DNA, 120 bp, Artificial Sequence
  ENSG00000156515_31 (sequence is synthesized)
ctaaagaactgttccccagagcattgttcctgagaaggaaaagagtccaaacacctacccacacctgctttgtgccaagaatccacagttggattgcaaggacagtgcgttcaagaccca

SEQ ID NO: 455557 - DNA, 120 bp, Artificial Sequence
  ENSG00000156515_32 (sequence is synthesized)
gctgttgagagtagaaaagcagaagaaaggacccgaggtcagcaagtgccctccccacaatggggcagatctgccagcgagaatcggctacagcagctgaaaaaccaaaacttcatctac

SEQ ID NO: 455558 - DNA, 120 bp, Artificial Sequence
  ENSG00000156515_33 (sequence is synthesized)
gagagcatcagccaggacattaatgtgcaccactgtggtggcgtggaaagatggcaaaaagagccctgcatgattttattgacaagtatctctatgccatgcggctctccgatgaaactc

SEQ ID NO: 455559 - DNA, 120 bp, Artificial Sequence
  ENSG00000156515_34 (sequence is synthesized)
atctatcttgctgtgtttggacaggccagcccctgaaacatcttgggcaatggagggttaacttctcaaagtttaataggcaagaccagcaaccatgcaacaagaagatactctataaat

SEQ ID NO: 455560 - DNA, 71 bp, Artificial Sequence
  ENSG00000156515_35 (sequence is synthesized)
tcttaaatccctggctacagcagctgaaaaaccaaaacttcatctacttgctgaaagtgagattgacaagt

SEQ ID NO: 455561 - DNA, 120 bp, Artificial Sequence
  ENSG00000156515_36 (sequence is synthesized)
cgaactgttggacggcgtctggagttttgcacaaaagagaattgaattgtagatcagctgggaagttactgtggtagtcctggtgccctgcggcctccagcgactggaaccctgtgggag

SEQ ID NO: 455562 - DNA, 120 bp, Artificial Sequence
  ENSG00000156515_37 (sequence is synthesized)
cacagcttactatctctttaaagtggcaacagagtggatctgagatgggttgcttcatgcgaaggtggtgaggtgtacactttatgaatcagcttgggagaaaagcacagaaactctcga

SEQ ID NO: 455563 - DNA, 120 bp, Artificial Sequence
  ENSG00000156515_38 (sequence is synthesized)
gagtgtggggagggattcttcgggcactgatgtttggctggagcagtaaagcagcggtgatgtggaggcagcacctaagagaaggggacaggattatggagatattgacaagtatctcta

SEQ ID NO: 455564 - DNA, 120 bp, Artificial Sequence
  ENSG00000156515_39 (sequence is synthesized)
attgagttctttccttggttggagggctctgagccagggaagcttggcgaggctgtgtgttctctgctgatgacatgtcctcctgctctgcgggggtccaactttgggagccgctgagag

SEQ ID NO: 455565 - DNA, 120 bp, Artificial Sequence
  ENSG00000156515_40 (sequence is synthesized)
cttcaaggcccccttggtccacaagaaggagaatccaggacaagtgtctggaaagtgtttgagcaagagcgcccgccctgtgcagccggtctggctaccctcataggaagggctcttcac

SEQ ID NO: 455566 - DNA, 120 bp, Artificial Sequence
  ENSG00000156515_41 (sequence is synthesized)
tgatgaccaaaatccgccacggggtgcccacatggatttgtgtccttgtggcccagaagcaccagatgctttttgccatgcctggcttgtgacactctggtggctgagaagattctggaa

SEQ ID NO: 455567 - DNA, 120 bp, Artificial Sequence
  ENSG00000156515_42 (sequence is synthesized)
aaggaggctcactctgcatgtgtgtggggtgtgttttcctacgtgtgtgtgtgtatacacactttggtccatgtgcactgataaaattaaaaccacagagagcacgggcgatcctttctt

SEQ ID NO: 455568 - DNA, 120 bp, Artificial Sequence
  ENSG00000156515_43 (sequence is synthesized)
ataaaaaggagagaggtaactattaaaagaatgttttttaaaatctttactgttttaggggcttctaaaaagtgtatttgcctgttgtaaagaattcaggccaggcgtggtggctcacgc

SEQ ID NO: 455569 - DNA, 120 bp, Artificial Sequence
  ENSG00000156515_44 (sequence is synthesized)
atctatcttgctgtgtttggacaggccagcccctgaaacatcttgggcaatggagggttaacttctcaaagtttaataggcaagaccagcaaccatgcaacaaggtcagggaatgcactg

SEQ ID NO: 455570 - DNA, 120 bp, Artificial Sequence
  ENSG00000156515_45 (sequence is synthesized)
attacttcacggagctgaaggatgaccaggtcaaaaaggtgagcccccgcccgcgccgccgctggtcctggccgcagccttgcgttccggcatccgctcgccgcctccgctgcctccatc

SEQ ID NO: 455571 - DNA, 120 bp, Artificial Sequence
  ENSG00000156515_46 (sequence is synthesized)
ctccggcgcccggccttctccgggccagcatcgagttggactgcagggcgcaaggaaagccttcgccttcgattctaccggcattattgacaagtatctctatgccatgcggctctccga

SEQ ID NO: 455572 - DNA, 120 bp, Artificial Sequence
  ENSG00000156515_47 (sequence is synthesized)
ccaggttgcatgaggggttgggggtgggatggacagagcactggctgggcatcaggactaggctggagtcctggctcaaaactctaccacaacctgacactgggcaagatggcccacctg

SEQ ID NO: 455573 - DNA, 120 bp, Artificial Sequence
  ENSG00000156515_48 (sequence is synthesized)
tggcatcccaggttcctgccctgtaaagaggagtctgggtgtatatccagatggactgtgagcacagcctgagtttgccctgtcgaggtgctgaggcctgggagattgggattgacaagt

SEQ ID NO: 455574 - DNA, 120 bp, Artificial Sequence
  ENSG00000156521_0 (sequence is synthesized)
ctctcgcttccagctgtgggtggcgctaggcagcttcagccggaccgggtaggggtcctcgctcgctagcttgctgtttctcggagaagctcccgagtgtccggcctagaggccatgaga

SEQ ID NO: 455575 - DNA, 120 bp, Artificial Sequence
  ENSG00000156521_1 (sequence is synthesized)
aggcagtgggggtctgccatgagggcggccgagcaggcgggctgcatggtgagcgcctcccgggccggacagcccgaggcgggcccgtggagctgcagcggggtaatcctgagccgtagc

SEQ ID NO: 455576 - DNA, 120 bp, Artificial Sequence
  ENSG00000156521_2 (sequence is synthesized)
ccgggcctggtgctttgccacgggggcatcttcgtccccttcctgcgagctggcagcgaagtcctgaccgcggccggcgccgtcttcctgcctggcgacagttgcagggacgacctgcgc

SEQ ID NO: 455577 - DNA, 80 bp, Artificial Sequence
  ENSG00000156521_3 (sequence is synthesized)
ccgcccagggctgtgcacgccccagtgcgcgagcctcgagcccggcccacctgccccgtcccgcgggcgtcccctgcagc

SEQ ID NO: 455578 - DNA, 120 bp, Artificial Sequence
  ENSG00000156521_4 (sequence is synthesized)
gggcgtcccctgcagccccggcttcctgctgagctgctgctgctgctgagctgcccggccttctgggcccacttcgcgcgcctcttcggggacgaggcagcggaacagtggcgcttctcg

SEQ ID NO: 455579 - DNA, 120 bp, Artificial Sequence
  ENSG00000156521_5 (sequence is synthesized)
agcgcggcgcgggatgacgaagtgtcggaggacgaggaggcggatcaactgagagcgctgggctggtttgcgctgctgggcgtgcggctaggccaggaggaggtggaggaggagcgcggg

SEQ ID NO: 455580 - DNA, 120 bp, Artificial Sequence
  ENSG00000156521_6 (sequence is synthesized)
ccagccatggcggtgtcgcctctcggggccgtgcccaagggtgcgccattgctggtctgcggctcccctttcggcgccttctgccccgacatctttctcaacacgctgagctgcggggtg

SEQ ID NO: 455581 - DNA, 120 bp, Artificial Sequence
  ENSG00000156521_7 (sequence is synthesized)
acacgctgagctgcggggtgctcagcaacgtggccggcccactgctgcttaccgacgcacgctgcctgcccggcaccgagggcggcggcgtgttcaccgcgcggcccgcgggggcgctgg

SEQ ID NO: 455582 - DNA, 120 bp, Artificial Sequence
  ENSG00000156521_8 (sequence is synthesized)
ctctgttggaaggccggcgaatgggtgggcttcacgctgctctgcgccgccgccccccttttccgcgccgcccgcgacgcgcttcaccgcctgccgcacagcaccgctgccctggccgcc

SEQ ID NO: 455583 - DNA, 120 bp, Artificial Sequence
  ENSG00000156521_9 (sequence is synthesized)
cttctgccgccagaggtgggcgtcccgtggggtctgcccctccgagactccgggcccctgtgggcagccgcggcagtgttggtggagtgcggcaccgtatggggctccggagtggctgtg

SEQ ID NO: 455584 - DNA, 120 bp, Artificial Sequence
  ENSG00000156521_10 (sequence is synthesized)
gcaccccgccttgtagtgacctgtcggcacgtgtcccctcgggaagcagccagggtcctggtgcgctccaccacccccaagagtgtggccatctggggccgtgtggtatttgccactcag

SEQ ID NO: 455585 - DNA, 120 bp, Artificial Sequence
  ENSG00000156521_11 (sequence is synthesized)
gagacatgtccctatgacatagcagtggtgagcctggaggaggacctggatgatgtccccatccctgtgcccgctgagcacttccatgaaggcgaggctgtgagtgtggtgggctttggc

SEQ ID NO: 455586 - DNA, 120 bp, Artificial Sequence
  ENSG00000156521_12 (sequence is synthesized)
gtctttggccagtcttgcgggccctcggtgacctcaggcatcctttcggctgtggtgcaggtgaatggcacgcccgtaatgctgcagaccacgtgtgctgtgcacagcggctccagtggg

SEQ ID NO: 455587 - DNA, 120 bp, Artificial Sequence
  ENSG00000156521_13 (sequence is synthesized)
ggacccctcttctccaaccactcaggaaacctccttggcataatcaccagcaacacccgggacaataatacgggggccacctacccccacctgaacttcagcattcccatcacggtgctc

SEQ ID NO: 455588 - DNA, 120 bp, Artificial Sequence
  ENSG00000156521_14 (sequence is synthesized)
cagccggccctgcagcagtacagccagacccaagacctaggtggcctccgtgagctggaccgcgctgctgagccagtcagggtggtgtggcggttgcagcggcccctggcagaggccccg

SEQ ID NO: 455589 - DNA, 120 bp, Artificial Sequence
  ENSG00000156521_15 (sequence is synthesized)
gaagagtgacctttttctgctgtaggaagtgatgttgaggtgacggtggcctcaggattcagggcccagcccctgcaggggcccaggctgcctctcatctccacccactgactgcagact

SEQ ID NO: 455590 - DNA, 120 bp, Artificial Sequence
  ENSG00000156521_16 (sequence is synthesized)
gggctttgggctctggggcaaacttctcttcagccccatggatccttaacctggcagcccgttttggggtgctttcttgagcccccagttctctgtcccctagcactagactcagctgta

SEQ ID NO: 455591 - DNA, 120 bp, Artificial Sequence
  ENSG00000156521_17 (sequence is synthesized)
ttgtttttccttctggggagcccactccaactgcacagaagttctgggcctgacaggtagattccagctggaaggcaggcccgtgcctggttttgcgtctgttcccctgagggccatcgt

SEQ ID NO: 455592 - DNA, 120 bp, Artificial Sequence
  ENSG00000156521_18 (sequence is synthesized)
catcctggagcttcaatggggccttggctcctgtctgcctctcagtcagagtcagggctgacaaaggactcagcttccttagcatctcagcagaaaccttgctctgaagaccagagacag

SEQ ID NO: 455593 - DNA, 120 bp, Artificial Sequence
  ENSG00000156521_19 (sequence is synthesized)
aagggacagaaacaggagtgcctcctgctgtgccaggcccatgggcagtgcaggcagatccctgaaggtcagcactcctgggtcttcatatgccaacaggggcgctcttgacactgtgcc

SEQ ID NO: 455594 - DNA, 120 bp, Artificial Sequence
  ENSG00000156521_20 (sequence is synthesized)
ttcattttccagcccacagcctgggtctcagggatcttgaggggtagaacatgtctggttggggcttgggaataaacatgatctattgaaaaacctctgtatttatatatcaaattgttt

SEQ ID NO: 455595 - DNA, 120 bp, Artificial Sequence
  ENSG00000156521_21 (sequence is synthesized)
ctttttttcaggagttgaactgggaataggcaagtaccaggcaaagaaacacaccctttccttttttttttttttttttctttagagctgtggtcttgctctctcacccaggctggagtg

SEQ ID NO: 455596 - DNA, 83 bp, Artificial Sequence
  ENSG00000156521_22 (sequence is synthesized)
ggctccaggagatcgcgcaccaccacgcctggctaattttttatttttgtagaaatggggtattgctttgttgcccgtgctgg

SEQ ID NO: 455597 - DNA, 120 bp, Artificial Sequence
  ENSG00000156521_23 (sequence is synthesized)
tacagtcgcgcaccaccacgcctggctaattttttatttttgtagaaatggggtattgctttgttgcccgtgctggcttcagccttctggtttcaagcagtcctcctgcctcagcttccc

SEQ ID NO: 455598 - DNA, 120 bp, Artificial Sequence
  ENSG00000156521_24 (sequence is synthesized)
aacccagaaatacaccctttctgtgctgttttctcagcagggtgtgagctcacgggatacggtcctgccagactggccctcatagctggtcatgtgccagtcagagctgggtggggcttg

SEQ ID NO: 455599 - DNA, 120 bp, Artificial Sequence
  ENSG00000156521_25 (sequence is synthesized)
caggtcccggaaggtggtggtcttgacctggcagcagatgcttaaagaatgcctaaggtgggtggcagttggggagttcaagggtgaatgaggccagggcagcccccaggagctgaggcc

SEQ ID NO: 455600 - DNA, 120 bp, Artificial Sequence
  ENSG00000156521_26 (sequence is synthesized)
aactctttgagtcaggactgtgccgtgtgcccagggccttgcatgtgtgggccctcgagtgatttctactggcaggctgaaagccctgtgaggggcggctgtgggcggaggccacgcagg

SEQ ID NO: 455601 - DNA, 120 bp, Artificial Sequence
  ENSG00000156521_27 (sequence is synthesized)
aagagtgcttaggagtaacttgtttctaacacctgtgtgctgagtgccaatgctgggtgtggtgttatgatatatattggttttcatccagcattcctgactcgtaactctcatagtcct

SEQ ID NO: 455602 - DNA, 120 bp, Artificial Sequence
  ENSG00000156521_28 (sequence is synthesized)
tgttccagtctttgttagaatactgggtatgttagggcttgggacaggcctctgacctctgggtatcctttcactaatgttcgcccacctttttcacagtgggtcctaaagaccttccca

SEQ ID NO: 455603 - DNA, 120 bp, Artificial Sequence
  ENSG00000156521_29 (sequence is synthesized)
tgagagggtctcaatcctaggggaaggaatgttgatgtcatgaaccttccataaaaacccaagaggacagggttcagagagcttctggatagctgaacacctggcacttcctggagtgtg

SEQ ID NO: 455604 - DNA, 120 bp, Artificial Sequence
  ENSG00000156521_30 (sequence is synthesized)
gcgtgcccagggagggcacggaagctctgcactccttccccttccctcattccttgctctatgtgcatctcttcatctgtatcctttgcgatatcctttataataaaccggtaaacataa

SEQ ID NO: 455605 - DNA, 120 bp, Artificial Sequence
  ENSG00000156521_31 (sequence is synthesized)
ctcttcctgaatccccaagcttagccaggtgtgggtaacactgcccagttttgccataggtgtccccactgtggcctataggacagccatgactttatagggaagactgatgatgaaggt

SEQ ID NO: 455606 - DNA, 120 bp, Artificial Sequence
  ENSG00000156521_32 (sequence is synthesized)
ttgcctatggtgtgtggcccccaccagattccttccactccccccacatgccccttgctcctaaggagactgccaggtctgttggaagctacccctgcagagtgtgtagtaggacgcccc

SEQ ID NO: 455607 - DNA, 120 bp, Artificial Sequence
  ENSG00000156521_33 (sequence is synthesized)
tgtctgatcccgggcaagtcacttaacctgtctaagctgcctccccgggagttgacgctgaatgtcgtggaacggagcctgtcacgtcgtgtgctacagaagtgttagcgtgtacgtaaa

SEQ ID NO: 455608 - DNA, 120 bp, Artificial Sequence
  ENSG00000156521_34 (sequence is synthesized)
tagggacccagaggagtgaaaccatgtcatatctgacccaccaactgacgggattgttgtgggtatcaacgaggcagtgaaggaaagtgttgtgtttgccttggctcctcccactttgtt

SEQ ID NO: 455609 - DNA, 120 bp, Artificial Sequence
  ENSG00000156521_35 (sequence is synthesized)
tggtgttgggaatgttactgagcgtctctgggcctcagttataccacctaaaatggagataatgccagtgcctagtttatagggtcgtgaagactaaataaagtgatgtccacaaaacac

SEQ ID NO: 455610 - DNA, 120 bp, Artificial Sequence
  ENSG00000156521_36 (sequence is synthesized)
taacaccaaacctggcccacagtgctcactaagtgtcaggttgattattcaggtacaggaagctttagagaagtagcacagtttgtcaaccacctttggagataccacagaatggttaca

SEQ ID NO: 455611 - DNA, 120 bp, Artificial Sequence
  ENSG00000156521_37 (sequence is synthesized)
tgacttgcccagagttgcctgctggtcgattcagggctgatacccagatcttctgacttttactgtcactctcagctccttgatttctcccaagtactgaggagtcagaaagctagcctg

SEQ ID NO: 455612 - DNA, 120 bp, Artificial Sequence
  ENSG00000156531_0 (sequence is synthesized)
aagggcgctccgcgagcccgtctctcctcgaatgaaaggaaacaacctccggcgacagagccccgctctcaggcactgctggagaaccgagaccgacttctttctctttaccctcattgg

SEQ ID NO: 455613 - DNA, 120 bp, Artificial Sequence
  ENSG00000156531_1 (sequence is synthesized)
cgcttctctcctgcagtccgcctctgggccctgccgcatttcttgagacttaaagtggcattctaaaggcaatttaaaaatcatgtcaagctcagttgaacagaaaaaagggcctacaag

SEQ ID NO: 455614 - DNA, 120 bp, Artificial Sequence
  ENSG00000156531_2 (sequence is synthesized)
acagcgcaaatgtggcttttgtaagtcaaatagagacaaggaatgtggacagttactaatatctgaaaaccagaaggtggcagcgcaccataagtgcatgctcttttcatctgctttggt

SEQ ID NO: 455615 - DNA, 120 bp, Artificial Sequence
  ENSG00000156531_3 (sequence is synthesized)
atcatcacactctgataatgaaagtcttggtggattttctattgaagatgtccaaaaggaaattaaaagaggcacgaagctgatgtgttctttgtgccattgtcctggagcaacaattgg

SEQ ID NO: 455616 - DNA, 120 bp, Artificial Sequence
  ENSG00000156531_4 (sequence is synthesized)
ttgtgatgtgaaaacatgtcacaggacataccactaccactgtgcattgcatgataaagctcaaatacgagagaaaccttcacaaggaatttacatggtctattgccgaaaacacaagaa

SEQ ID NO: 455617 - DNA, 120 bp, Artificial Sequence
  ENSG00000156531_5 (sequence is synthesized)
aactgcacataactccgaagctgatttagaagaaagttttaatgaacatgaactggagccctcatcacctaaaagtaaaaagaaaagtcgcaaaggaaggccaagaaaaactaattttaa

SEQ ID NO: 455618 - DNA, 120 bp, Artificial Sequence
  ENSG00000156531_6 (sequence is synthesized)
agggctgtcagaagataccaggtccacatcctcccatggaacagatgaaatggaaagtagttcctatagagataggtctccacacagaagcagccctagtgacaccaggcctaaatgtgg

SEQ ID NO: 455619 - DNA, 120 bp, Artificial Sequence
  ENSG00000156531_7 (sequence is synthesized)
attttgccatgtaggggaggaagaaaatgaagcacgaggaaaactgcatatatttaatgccaagaaggcagctgcccattataagtgcatgttgttttcttctggcacagtccagctcac

SEQ ID NO: 455620 - DNA, 120 bp, Artificial Sequence
  ENSG00000156531_8 (sequence is synthesized)
aacaacatcaagagcagaatttggagactttgatattaaaactgtacttcaggagattaaacgaggaaaaagaatgaaatgtacactttgcagtcagcctggtgctactattggatgtga

SEQ ID NO: 455621 - DNA, 120 bp, Artificial Sequence
  ENSG00000156531_9 (sequence is synthesized)
aataaaagcctgtgttaagacttaccattaccactgtggagtacaagacaaagctaaatacattgaaaatatgtcacgaggaatttacaaactatactgtaaaaatcatagtggaaatga

SEQ ID NO: 455622 - DNA, 120 bp, Artificial Sequence
  ENSG00000156531_10 (sequence is synthesized)
tgagagagatgaagaagatgaggaacgagagagtaaaagccgaggaaaagtagaaattgatcagcaacaactaactcagcagcaacttaatggaaactaggtatgaaagttaattatatg

SEQ ID NO: 455623 - DNA, 120 bp, Artificial Sequence
  ENSG00000156531_11 (sequence is synthesized)
ggatctgttgtcaggatacaatacacactgatatatacatgttgaagtaatggtatgcagtaagattttttttaatcctattatgtttagttaagagcatgttactaaaatgctgaggat

SEQ ID NO: 455624 - DNA, 120 bp, Artificial Sequence
  ENSG00000156531_12 (sequence is synthesized)
tttgtaggcttgcatagtagttgttttttaactagctgattttgtaaccataaaaacaagctatctgctttatcaataagtgtagttgtaatgtcaaatcaataagatattcacactcct

SEQ ID NO: 455625 - DNA, 120 bp, Artificial Sequence
  ENSG00000156531_13 (sequence is synthesized)
caataacattatattgattgtgttcccctcaagcatcatattttacatttttttatcatcttttaaacaggttcatgggacagagttagaaaactgggaatgaataagacatccataact

SEQ ID NO: 455626 - DNA, 120 bp, Artificial Sequence
  ENSG00000156531_14 (sequence is synthesized)
actattcttttttcactgttttctaaaatcaaaaagggtttgtaactttttactgcccaactcttagatccttcattgaactgcctaaaaatgtcttgtttgttttatgagccctcacta

SEQ ID NO: 455627 - DNA, 120 bp, Artificial Sequence
  ENSG00000156531_15 (sequence is synthesized)
gaaggctgagtttgacatgttgatattacgtagctatagtttgcagtttctgggaagcaattgaaacactattaaccctgtgtatagtgtcaacagttaaagcagacgaaacgaagtaag

SEQ ID NO: 455628 - DNA, 120 bp, Artificial Sequence
  ENSG00000156531_16 (sequence is synthesized)
ctatatttctggactgaacaaagctctgctgtttagagcatttaagtttgtttagtggatccatactcaaaggaaagcataagcaaattttcctttacaatgcaaacatgccactggtgg

SEQ ID NO: 455629 - DNA, 120 bp, Artificial Sequence
  ENSG00000156531_17 (sequence is synthesized)
cagcacatggtaatttgtggatttttttttcatactcaagtaatggaggctagaaatgaagagaaccttctttttctcttgactttgacagcacatgctaaaaatctcttccaagaagta

SEQ ID NO: 455630 - DNA, 120 bp, Artificial Sequence
  ENSG00000156531_18 (sequence is synthesized)
tgctaaagcttttcatttggttcctgttaaagttgttctcactgaccagcatggactcaggcaactggtaatgataagctatgagctccagtgcttttgccaaaattctcttgacagcac

SEQ ID NO: 455631 - DNA, 120 bp, Artificial Sequence
  ENSG00000156531_19 (sequence is synthesized)
cagcaaattaaacgtttttaagatgtaaagaaagggttaccgcttgctaaggacttcagacaccatgtccgaaacctgttcctctcaagtgccctgttgtgtggaacacttcacatattg

SEQ ID NO: 455632 - DNA, 120 bp, Artificial Sequence
  ENSG00000156531_20 (sequence is synthesized)
gcgcacagtacgtaaggaggtctcatgtgctgtaggagtaaaaaagtctttgcataaaacagtatttatttttacttttgtgaccactattttagaaactttatttaatattttaatgtt

SEQ ID NO: 455633 - DNA, 120 bp, Artificial Sequence
  ENSG00000156531_21 (sequence is synthesized)
ttcagtcattgctttggttatctataaaataggcttttgtgccctacttttcttcttgtagggcttggtggtgttttatcgattgtcagaattgtttttgaaagcctaagaacccagctt

SEQ ID NO: 455634 - DNA, 120 bp, Artificial Sequence
  ENSG00000156531_22 (sequence is synthesized)
tttagaaaggattttcacactggcatttctaggtagtgatattttcttccacttacctgctgaagcacatttatgcatttctttatggcaaaaccaaataactttagttgtggtctgcct

SEQ ID NO: 455635 - DNA, 120 bp, Artificial Sequence
  ENSG00000156531_23 (sequence is synthesized)
gatactaccatagcacctcagtaccaaggggagggattttgactagttgaattattaagccaccacaataaagcagatttttaaataagaaataataatgttaacttgactgtacattga

SEQ ID NO: 455636 - DNA, 120 bp, Artificial Sequence
  ENSG00000156531_24 (sequence is synthesized)
gatattctgcagctgatagagcagcattttaaaaatgtaacaggtggaaaattacactgtgcttaatgactgatttttttttaaactgcgagtcccttaagatcacgtttgtcaagtgtg

SEQ ID NO: 455637 - DNA, 120 bp, Artificial Sequence
  ENSG00000156531_25 (sequence is synthesized)
tattcacacatttacttaaatcaagggactcaatgcttgcttttattttaaccatcttttactatttttagaaggaaactagctttagtagtgggttgccctgtatgttttctctttttg

SEQ ID NO: 455638 - DNA, 120 bp, Artificial Sequence
  ENSG00000156531_26 (sequence is synthesized)
ctcttaatatgccattgggtttttgtgtgtatgtgattttcaaaattcatgacttgaagtgcaaggacagatctagatgtttgtttaccaagctatgtgacttctcccaaaggatctgta

SEQ ID NO: 455639 - DNA, 120 bp, Artificial Sequence
  ENSG00000156531_27 (sequence is synthesized)
ctttctttccttacaacagcttgaaaatcattattttaaaatccttaaatcactgtgtctagatcattttttacattgtgtgccatagacttacccatgggacaacagagctccttcatt

SEQ ID NO: 455640 - DNA, 120 bp, Artificial Sequence
  ENSG00000156531_28 (sequence is synthesized)
tttggacaactactgtaatcattttttttttaggaaaaatggaaggtgccgggggtaatcatggccagtcaataattatataaaggagttcaaatactatagctgtcagttgatgaattt

SEQ ID NO: 455641 - DNA, 120 bp, Artificial Sequence
  ENSG00000156531_29 (sequence is synthesized)
gttatgtagtaaaatgtatgactttgtatgggtttcttcagccctttttctgccactagcaaccagaatagcactttaccttttggttggctagataagtggctgactacctgtttttct

SEQ ID NO: 455642 - DNA, 120 bp, Artificial Sequence
  ENSG00000156531_30 (sequence is synthesized)
cactgtggtgtgattggctaaacaatctcgcattaaaaattcaaatgtaaattgaattcacatgaaaaatcatgtttggttgtaaacctccaatgttttgattctctaatcatgttttcg

SEQ ID NO: 455643 - DNA, 120 bp, Artificial Sequence
  ENSG00000156531_31 (sequence is synthesized)
tcacatgctgagtaaaagtgccttacaatgtaaaaattgtacagtacttatgttcccaagtagcatcatcatcttctgggtagtaattacattgtggtattaatatttagaaaaatggac

SEQ ID NO: 455644 - DNA, 120 bp, Artificial Sequence
  ENSG00000156531_32 (sequence is synthesized)
ctcagcagtgtatttactgtacatctcttaagtccttaactgtagttttaataagcatgacattatttgataagtatataacatttacatcatttcaaaaaatactgccgttactgtctt

SEQ ID NO: 455645 - DNA, 83 bp, Artificial Sequence
  ENSG00000156531_33 (sequence is synthesized)
gatattaaacagtgtaatctttgcaagcgtatattgaagattattctggagcatttattgccttaccagaaatgttagtagga

SEQ ID NO: 455646 - DNA, 120 bp, Artificial Sequence
  ENSG00000156531_34 (sequence is synthesized)
ttctggagcatttattgccttaccagaaatgttagtaggaaatgttctttagagtagaaagatagacttgagtttctatacttttaagaagagctctttgttcctgggggaggggggcag

SEQ ID NO: 455647 - DNA, 120 bp, Artificial Sequence
  ENSG00000156531_35 (sequence is synthesized)
ggggtgaattttactttcatctcaagttattaaaaacccacaactgaagtaaattttatttcaagaatcagcagttttagaatttcagatagtacttgctcagaagtacatgctactcaa

SEQ ID NO: 455648 - DNA, 120 bp, Artificial Sequence
  ENSG00000156531_36 (sequence is synthesized)
gatattaagagataacaagatctgtagatctgctattgaatcagaatctgtgtacttgaacaaatgtgtgaatctcaaatatctcaaagcaaaagaaaaagtgttctagagtgttgttgc

SEQ ID NO: 455649 - DNA, 120 bp, Artificial Sequence
  ENSG00000156531_37 (sequence is synthesized)
ttttttaaaaaaagcgctgaagttagaccaaggtatacagttttgttctaacagacatttaggttaattgtaaagataaggaatgcattatgggtcaaaaatcaaacattcctctcatgt

SEQ ID NO: 455650 - DNA, 120 bp, Artificial Sequence
  ENSG00000156531_38 (sequence is synthesized)
tatgtatattttgttcctgttatattggctttattttcaaaattgtagtttgtagtattagtttccttttattggtattcttgcatatactattcattcaataaatgacttatgactttc

SEQ ID NO: 455651 - DNA, 120 bp, Artificial Sequence
  ENSG00000156531_39 (sequence is synthesized)
gttagtaaccgtccttaaatagatgacattagtttactcagtctctgttcttaaatggtgtttagttaagtatagaatactgagcacattatgtaaggaatgagtactacaattggcatt

SEQ ID NO: 455652 - DNA, 120 bp, Artificial Sequence
  ENSG00000156531_40 (sequence is synthesized)
ttcctctgactacatatccctggattagcattcatccatccaatattagttaggcttcctatgtgccagccattgtgcttgaagctgggcatatgccagtgatcaaaactacatacactg

SEQ ID NO: 455653 - DNA, 120 bp, Artificial Sequence
  ENSG00000156531_41 (sequence is synthesized)
gcactccagcctgagcaacaagagtgaaattccatctcaaacaaacaaaaaaaaaacactacatatactctcctcatgaagcttacagtctattgggagagacctattatttaagtggcc

SEQ ID NO: 455654 - DNA, 120 bp, Artificial Sequence
  ENSG00000156531_42 (sequence is synthesized)
ggccaaatatgcaattacaacatagcagcgtaagtgttctaaagaagttacaaagtgttatgagagcgtataagaaggaagagctaacctagtctgtagtggggagtatttaaaatgttc

SEQ ID NO: 455655 - DNA, 120 bp, Artificial Sequence
  ENSG00000156531_43 (sequence is synthesized)
tgaaggaaatagtgctcagctttaagctgagatattaaggacaaaggtgagccttggttgggggaggtattctgggcagagagaagagcatatgcaagagccccgggtgagacagaagca

SEQ ID NO: 455656 - DNA, 120 bp, Artificial Sequence
  ENSG00000156531_44 (sequence is synthesized)
tgagaagatggtgaaaaagtaaagtatgaagatttgggattgggggtcaccctcttttttatgggtcttccacttacctgtgctgccttgtgctaggtggtgttaatgtatatctgtaat

SEQ ID NO: 455657 - DNA, 120 bp, Artificial Sequence
  ENSG00000156531_45 (sequence is synthesized)
ggttccatttgtttaatcgactggagtataagttggtagggactcttgaagttttgatttgccatccagagttgtaaagcacttccttactctcacatgcctagaatgcaataaaccaat

SEQ ID NO: 455658 - DNA, 120 bp, Artificial Sequence
  ENSG00000156531_46 (sequence is synthesized)
gacttccgggtctagtattctgtgtaaaagacaatgtacacaagcagtcaccaagtcatttgggtgcctacataaggcgctatgctgtataataaaatttgccaaattctgtttaataat

SEQ ID NO: 455659 - DNA, 120 bp, Artificial Sequence
  ENSG00000156531_47 (sequence is synthesized)
aaaggcacaaatgttttcaagtgagttctataaagcctttaaggaacaaataatcccaatgttatttaagaggtccagcacatagcaagagatggaaaacttattgattcattctgtaaa

SEQ ID NO: 455660 - DNA, 120 bp, Artificial Sequence
  ENSG00000156531_48 (sequence is synthesized)
gcttacataactgtggtaccaaacctaacaaagatacgttaaaagaaaaacaaacaaactgtagaccaatctccccttttttttttttttttactttgagacaggatctgactctgttgt

SEQ ID NO: 455661 - DNA, 120 bp, Artificial Sequence
  ENSG00000156531_49 (sequence is synthesized)
acaggatctgactctgttgtccaggctggagtgcagtagtgtgatcatgactcactgcagccttgaccttctgccctcacgtgatcctcccaactcagcctcccgagtagctgggactat

SEQ ID NO: 455662 - DNA, 85 bp, Artificial Sequence
  ENSG00000156531_50 (sequence is synthesized)
gagtagctgggactataggcgcatgccatcatgcccagctaattttttttgttttgttttttgaggaggaggaagggttttgttt

SEQ ID NO: 455663 - DNA, 120 bp, Artificial Sequence
  ENSG00000156531_51 (sequence is synthesized)
ttacaggcatgagccatgcccagccacaatctcacttttataaatatacaaaaattctaaataaaatattagtaaatcaaatccagctctgtattctaagaattgaaagactgttcaggc

SEQ ID NO: 455664 - DNA, 88 bp, Artificial Sequence
  ENSG00000156531_52 (sequence is synthesized)
atccagctctgtattctaagaattgaaagactgttcaggctgggcacagtggctcacacttataatctcaacactttgggaggctcag

SEQ ID NO: 455665 - DNA, 120 bp, Artificial Sequence
  ENSG00000156531_53 (sequence is synthesized)
gaaaaaagactgttcaaaattaggaaatatattaatataatttattagaattagtagagtaaataatcttatcaccttccttatagatggtgaaaagacatttgataacattcaacatca

SEQ ID NO: 455666 - DNA, 120 bp, Artificial Sequence
  ENSG00000156531_54 (sequence is synthesized)
ataacattcaacatcaatttctgaattttaaagtaacgagtgctcttggtaagctaggaatcttaataggtgtttatgagaaaaacaacagcaaataacttatttattattaaagtgaag

SEQ ID NO: 455667 - DNA, 120 bp, Artificial Sequence
  ENSG00000156531_55 (sequence is synthesized)
gagcaatggttcttaaccaggagtgagcctcagaatcactgtggggtggataaggccctcttttaaaatgttcatgtctaagccctacctgtagagatttaaatttagtaggtctgggtt

SEQ ID NO: 455668 - DNA, 120 bp, Artificial Sequence
  ENSG00000156531_56 (sequence is synthesized)
ggtgcccaaaccatgcacttttctgactccccaggtgattcttatgttcccctctaattgagaaccattagactatactttaattcagattaggaagaagacaaggatgccaactactag

SEQ ID NO: 455669 - DNA, 120 bp, Artificial Sequence
  ENSG00000156531_57 (sequence is synthesized)
catgacttttaacattcttctagagggttaagctgatgcaagacaaaaagaaagaggcccagtgcattgactcacgtctataatcccacacttgggaggccaaagcgagaggattgcttg

SEQ ID NO: 455670 - DNA, 120 bp, Artificial Sequence
  ENSG00000156531_58 (sequence is synthesized)
gggcaacatagtgagaccccatctctacacaacatttaaaaattagccaggcaaagtggcacacgcctgtagccccagctatacaggaggcccagactggaggattgcctgagccctgga

SEQ ID NO: 455671 - DNA, 80 bp, Artificial Sequence
  ENSG00000156531_59 (sequence is synthesized)
tggcacacgcctgtagccccagctatacaggaggcccagactggaggattgcctgagccctggaggtttaaaaaataaaa

SEQ ID NO: 455672 - DNA, 120 bp, Artificial Sequence
  ENSG00000156531_60 (sequence is synthesized)
aatttagagtacatcccaaatttatccagtcatcagaaaatttaaagtagttcgtatgttaaagcaaagtatatatttgacttatttgtaatataataaaggatgctgatgttactgaaa

SEQ ID NO: 455673 - DNA, 120 bp, Artificial Sequence
  ENSG00000156535_0 (sequence is synthesized)
agacgccgtcgagatgcagggcccaccgctcctgaccgccgcccacctcctctgcgtgtgcaccgccgcgctggccgtggctcccgggcctcggtttctggtgacagccccagggatcat

SEQ ID NO: 455674 - DNA, 120 bp, Artificial Sequence
  ENSG00000156535_1 (sequence is synthesized)
caggcccggaggaaatgtgactattggggtggagcttctggaacactgcccttcacaggtgactgtgaaggcggagctgctcaagacagcatcaaacctcactgtctctgtcctggaagc

SEQ ID NO: 455675 - DNA, 120 bp, Artificial Sequence
  ENSG00000156535_2 (sequence is synthesized)
agaaggagtctttgaaaaaggctcttttaagacacttactcttccatcactacctctgaacagtgcagatgagatttatgagctacgtgtaaccggacgtacccaggatgagattttatt

SEQ ID NO: 455676 - DNA, 120 bp, Artificial Sequence
  ENSG00000156535_3 (sequence is synthesized)
ctctaatagtacccgcttatcatttgagaccaagagaatatctgtcttcattcaaacagacaaggccttatacaagccaaagcaagaagtgaagtttcgcattgttacactcttctcaga

SEQ ID NO: 455677 - DNA, 120 bp, Artificial Sequence
  ENSG00000156535_4 (sequence is synthesized)
ttttaagccttacaaaacctctttaaacattctcattaaggaccccaaatcaaatttgatccaacagtggttgtcacaacaaagtgatcttggagtcatttccaaaacttttcagctatc

SEQ ID NO: 455678 - DNA, 120 bp, Artificial Sequence
  ENSG00000156535_5 (sequence is synthesized)
ttcccatccaatacttggtgactggtctattcaagttcaagtgaatgaccagacatactatcaatcatttcaggtttcagaatatgtattaccaaaatttgaagtgactttgcagacacc

SEQ ID NO: 455679 - DNA, 120 bp, Artificial Sequence
  ENSG00000156535_6 (sequence is synthesized)
attatattgttctatgaattctaagcatttaaatggtaccatcacggcaaagtatacatatgggaagccagtgaaaggagacgtaacgcttacatttttacctttatccttttggggaaa

SEQ ID NO: 455680 - DNA, 120 bp, Artificial Sequence
  ENSG00000156535_7 (sequence is synthesized)
gaagaaaaatattacaaaaacatttaagataaatggatctgcaaacttctcttttaatgatgaagagatgaaaaatgtaatggattcttcaaatggactttctgaatacctggatctatc

SEQ ID NO: 455681 - DNA, 120 bp, Artificial Sequence
  ENSG00000156535_8 (sequence is synthesized)
ttcccctggaccagtagaaattttaaccacagtgacagaatcagttacaggtatttcaagaaatgtaagcactaatgtgttcttcaagcaacatgattacatcattgagttttttgatta

SEQ ID NO: 455682 - DNA, 120 bp, Artificial Sequence
  ENSG00000156535_9 (sequence is synthesized)
tactactgtcttgaagccatctctcaacttcacagccactgtgaaggtaactcgtgctgatggcaaccaactgactcttgaagaaagaagaaataatgtagtcataacagtgacacagag

SEQ ID NO: 455683 - DNA, 120 bp, Artificial Sequence
  ENSG00000156535_10 (sequence is synthesized)
aaactatactgagtactggagcggatctaacagtggaaatcagaaaatggaagctgttcagaaaataaattatactgtcccccaaagtggaacttttaagattgaattcccaatcctgga

SEQ ID NO: 455684 - DNA, 120 bp, Artificial Sequence
  ENSG00000156535_11 (sequence is synthesized)
ggattccagtgagctacagttgaaggcctatttccttggtagtaaaagtagcatggcagttcatagtctgtttaagtctcctagtaagacatacatccaactaaaaacaagagatgaaaa

SEQ ID NO: 455685 - DNA, 120 bp, Artificial Sequence
  ENSG00000156535_12 (sequence is synthesized)
tataaaggtgggatcgccttttgagttggtggttagtggcaacaaacgattgaaggagttaagctatatggtagtatccaggggacagttggtggctgtaggaaaacaaaattcaacaat

SEQ ID NO: 455686 - DNA, 120 bp, Artificial Sequence
  ENSG00000156535_13 (sequence is synthesized)
gttctctttaacaccagaaaattcttggactccaaaagcctgtgtaattgtgtattatattgaagatgatggggaaattataagtgatgttctaaaaattcctgttcagcttgtttttaa

SEQ ID NO: 455687 - DNA, 120 bp, Artificial Sequence
  ENSG00000156535_14 (sequence is synthesized)
aaataagataaagctatattggagtaaagtgaaagctgaaccatctgagaaagtctctcttaggatctctgtgacacagcctgactccatagttgggattgtagctgttgacaaaagtgt

SEQ ID NO: 455688 - DNA, 120 bp, Artificial Sequence
  ENSG00000156535_15 (sequence is synthesized)
gaatctgatgaatgcctctaatgatattacaatggaaaatgtggtccatgagttggaactttataacacaggatattatttaggcatgttcatgaattcttttgcagtctttcaggaatg

SEQ ID NO: 455689 - DNA, 120 bp, Artificial Sequence
  ENSG00000156535_16 (sequence is synthesized)
tggactctgggtattgacagatgcaaacctcacgaaggattatattgatggtgtttatgacaatgcagaatatgctgagaggtttatggaggaaaatgaaggacatattgtagatattca

SEQ ID NO: 455690 - DNA, 120 bp, Artificial Sequence
  ENSG00000156535_17 (sequence is synthesized)
tgacttttctttgggtagcagtccacatgtccgaaagcattttccagagacttggatttggctagacaccaacatgggttacaggatttaccaagaatttgaagtaactgtacctgattc

SEQ ID NO: 455691 - DNA, 120 bp, Artificial Sequence
  ENSG00000156535_18 (sequence is synthesized)
tatcacttcttgggtggctactggttttgtgatctctgaggacctgggtcttggactaacaactactccagtggagctccaagccttccaaccatttttcatttttttgaatcttcccta

SEQ ID NO: 455692 - DNA, 120 bp, Artificial Sequence
  ENSG00000156535_19 (sequence is synthesized)
ctctgttatcagaggtgaagaatttgctttggaaataactatattcaattatttgaaagatgccactgaggttaaggtaatcattgagaaaagtgacaaatttgatattctaatgacttc

SEQ ID NO: 455693 - DNA, 120 bp, Artificial Sequence
  ENSG00000156535_20 (sequence is synthesized)
aaatgaaataaatgccacaggccaccagcagacccttctggttcccagtgaggatggggcaactgttctttttcccatcaggccaacacatctgggagaaattcctatcacagtcacagc

SEQ ID NO: 455694 - DNA, 120 bp, Artificial Sequence
  ENSG00000156535_21 (sequence is synthesized)
tctttcacccactgcttctgatgctgtcacccagatgattttagtaaaggctgaaggaatagaaaaatcatattcacaatccatcttattagacttgactgacaataggctacagagtac

SEQ ID NO: 455695 - DNA, 120 bp, Artificial Sequence
  ENSG00000156535_22 (sequence is synthesized)
cctgaaaactttgagtttctcatttcctcctaatacagtgactggcagtgaaagagttcagatcactgcaattggagatgttcttggtccttccatcaatggcttagcctcattgattcg

SEQ ID NO: 455696 - DNA, 120 bp, Artificial Sequence
  ENSG00000156535_23 (sequence is synthesized)
gatgccttatggctgtggtgaacagaacatgataaattttgctccaaatatttacattttggattatctgactaaaaagaaacaactgacagataatttgaaagaaaaagctctttcatt

SEQ ID NO: 455697 - DNA, 120 bp, Artificial Sequence
  ENSG00000156535_24 (sequence is synthesized)
tatgaggcaaggttaccagagagaacttctctatcagagggaagatggctctttcagtgcttttgggaattatgacccttctgggagcacttggttgtcagcttttgttttaagatgttt

SEQ ID NO: 455698 - DNA, 120 bp, Artificial Sequence
  ENSG00000156535_25 (sequence is synthesized)
ccttgaagccgatccttacatagatattgatcagaatgtgttacacagaacatacacttggcttaaaggacatcagaaatccaacggtgaattttgggatccaggaagagtgattcatag

SEQ ID NO: 455699 - DNA, 120 bp, Artificial Sequence
  ENSG00000156535_26 (sequence is synthesized)
tgagcttcaaggtggcaataaaagtccagtaacacttacagcctatattgtaacttctctcctgggatatagaaagtatcagcctaacattgatgtgcaagagtctatccattttttgga

SEQ ID NO: 455700 - DNA, 120 bp, Artificial Sequence
  ENSG00000156535_27 (sequence is synthesized)
gtctgaattcagtagaggaatttcagacaattatactctagcccttataacttatgcattgtcatcagtggggagtcctaaagcgaaggaagctttgaatatgctgacttggagagcaga

SEQ ID NO: 455701 - DNA, 120 bp, Artificial Sequence
  ENSG00000156535_28 (sequence is synthesized)
acaagaaggtggcatgcaattctgggtgtcatcagagtccaaactttctgactcctggcagccacgctccctggatattgaagttgcagcctatgcactgctctcacacttcttacaatt

SEQ ID NO: 455702 - DNA, 120 bp, Artificial Sequence
  ENSG00000156535_29 (sequence is synthesized)
tcagacttctgagggaatcccaattatgaggtggctaagcaggcaaagaaatagcttgggtggttttgcatctactcaggataccactgtggctttaaaggctctgtctgaatttgcagc

SEQ ID NO: 455703 - DNA, 120 bp, Artificial Sequence
  ENSG00000156535_30 (sequence is synthesized)
cctaatgaatacagaaaggacaaatatccaagtgaccgtgacggggcctagctcaccaagtcctgtaaagtttctgattgacacacacaaccgcttactccttcagacagcagagcttgc

SEQ ID NO: 455704 - DNA, 120 bp, Artificial Sequence
  ENSG00000156535_31 (sequence is synthesized)
tgtggtacagccaacggcagttaatatttccgcaaatggttttggatttgctatttgtcagctcaatgttgtatataatgtgaaggcttctgggtcttctagaagacgaagatctatcca

SEQ ID NO: 455705 - DNA, 120 bp, Artificial Sequence
  ENSG00000156535_32 (sequence is synthesized)
aaatcaagaagcctttgatttagatgttgctgtaaaagaaaataaagatgatctcaatcatgtggatttgaatgtgtgtacaagcttttcgggcccgggtaggagtggcatggctcttat

SEQ ID NO: 455706 - DNA, 120 bp, Artificial Sequence
  ENSG00000156535_33 (sequence is synthesized)
ggaagttaacctattaagtggctttatggtgccttcagaagcaatttctctgagcgagacagtgaagaaagtggaatatgatcatggaaaactcaacctctatttagattctgtaaatga

SEQ ID NO: 455707 - DNA, 120 bp, Artificial Sequence
  ENSG00000156535_34 (sequence is synthesized)
aacccagttttgtgttaatattcctgctgtgagaaactttaaagtttcaaatacccaagatgcttcagtgtccatagtggattactatgagccaaggagacaggcggtgagaagttacaa

SEQ ID NO: 455708 - DNA, 120 bp, Artificial Sequence
  ENSG00000156535_35 (sequence is synthesized)
ctctgaagtgaagctgtcctcctgtgacctttgcagtgatgtccagggctgccgtccttgtgaggatggagcttcaggctcccatcatcactcttcagtcatttttattttctgtttcaa

SEQ ID NO: 455709 - DNA, 120 bp, Artificial Sequence
  ENSG00000156535_36 (sequence is synthesized)
gcttctgtactttatggaactttggctgtgatttatttttaaaggactctgtgtaacactaacatttccagtagtcacatgtgattgttttgttttcgtagaagaatactgcttctattt

SEQ ID NO: 455710 - DNA, 120 bp, Artificial Sequence
  ENSG00000156535_37 (sequence is synthesized)
ttgcagggatggtgtacaacaggtcctagcatgtatagctgcatagatttcttcacctgatctttgtgtggaagatcagaatgaatgcagttgtgtgtctatattttcccctctcaaaat

SEQ ID NO: 455711 - DNA, 120 bp, Artificial Sequence
  ENSG00000156535_38 (sequence is synthesized)
cttttagaatttttttggaggtgtttgttttctccagaataaaggtattactttagaataggtattctcctcattttgtgaaagaaatgaacctagattcttaagcattattacacatcc

SEQ ID NO: 455712 - DNA, 120 bp, Artificial Sequence
  ENSG00000156535_39 (sequence is synthesized)
atgtttgcttaaagatggatttccctgggaatgggagaaaacagccagcaggaggagcttcatctgttcccttcccacctccaacctagccctactgcccaccccaccccaacccacccc

SEQ ID NO: 455713 - DNA, 120 bp, Artificial Sequence
  ENSG00000156535_40 (sequence is synthesized)
atgcccagtggtctcagtagatacttcttaactggaaattctttcttttcagaatctaggtggtgaattttttttaagtggcacggtctttttctgcttgaaatctgatcacacccccca

SEQ ID NO: 455714 - DNA, 120 bp, Artificial Sequence
  ENSG00000156535_41 (sequence is synthesized)
gccattgccctccctctctttttcctctgtagagaaatgtgaggggcagtacatttactgtgcttttcacaccatctcagaggttgaggagcatactgaaaattgccctggggggtgctg

SEQ ID NO: 455715 - DNA, 120 bp, Artificial Sequence
  ENSG00000156535_42 (sequence is synthesized)
ggtgtgctgtctccttcccacatcctcagccccacaccagctctatttcaggggtgagagtcagagagcactgcaatatgtgcttcatgggatttcgattcgaagatcctagaccaggga

SEQ ID NO: 455716 - DNA, 120 bp, Artificial Sequence
  ENSG00000156535_43 (sequence is synthesized)
gacactgtgagccagggatacaacaaaatactaggtaagtcactgcagaccgacctccctgcagtttgggaaagaagctgggtttgtggagaatcagagcatcttgacatgactgctgac

SEQ ID NO: 455717 - DNA, 120 bp, Artificial Sequence
  ENSG00000156535_44 (sequence is synthesized)
ctaaagatccctggcattggccagggatcctgtggaacctcttctagttcaggggtgtgagcattagactgccagttgtctagtgacatctgatgcttgctgtgaacttttaagatcccc

SEQ ID NO: 455718 - DNA, 120 bp, Artificial Sequence
  ENSG00000156535_45 (sequence is synthesized)
gaatcctgagcacctcaatctttaattgccctgtattccgaagggtaatataatttatctggatggaaattttaaagatgaatcccccttttttcttttcttctctcttttctttccttc

SEQ ID NO: 455719 - DNA, 120 bp, Artificial Sequence
  ENSG00000156535_46 (sequence is synthesized)
tccctttcttctttgccttctaaatatactgaaatgatttagatatgtgtcaacaattaatgatcttttattcaatctaagaaatggtttagtttttctctttagctctatggcatttca

SEQ ID NO: 455720 - DNA, 120 bp, Artificial Sequence
  ENSG00000156535_47 (sequence is synthesized)
ctcaagtggacaggggaaaaagtaattgccatgggctccaaagaatttgctttatgtttttagctatttaaaaataaatccatcaaaaataaagtatgcaaatgtatcttttaaagttaa

SEQ ID NO: 455721 - DNA, 120 bp, Artificial Sequence
  ENSG00000156535_48 (sequence is synthesized)
tttttaaaaatgctcttattttagtgaattttcagaaattatagtggaatggatgctcatatattgcttatggatattttggataccaaagtaggaataactgacattcagtattttaaa

SEQ ID NO: 455722 - DNA, 120 bp, Artificial Sequence
  ENSG00000156535_49 (sequence is synthesized)
gctggcaaacctgtacatagaaaatagatccccagacagtggtctatgaagagggcagttaagtatcaaatacttaattttcttgcctttttttcttaagtggggaaaagtttctagatc

SEQ ID NO: 455723 - DNA, 120 bp, Artificial Sequence
  ENSG00000156535_50 (sequence is synthesized)
tcttacacctctgacacaatctgttctaaaacaggcacttgtaatgttggggcctccttgtaaacgtgtttttgccctttactctctgggagttctttaaaggtgaaatcatcttacaaa

SEQ ID NO: 455724 - DNA, 120 bp, Artificial Sequence
  ENSG00000156535_51 (sequence is synthesized)
gaaattgggggagggtcttggcaaaggactttcccctcctctttcctggcctgggaaccttatactgacaatcaatactttatattttaaagtatataatttatagttaacttctagtgt

SEQ ID NO: 455725 - DNA, 120 bp, Artificial Sequence
  ENSG00000156535_52 (sequence is synthesized)
aatatattaggaaacactagaatggaaaggccattggaagacaggttgtatcttttttagaccatatttccttgtttaaaaactatcatttgaatacttttttggtgaagaactccatgt

SEQ ID NO: 455726 - DNA, 60 bp, Artificial Sequence
  ENSG00000156535_53 (sequence is synthesized)
aactatcatttgaatacttttttggtgaagaactccatgttttcaagttaaaggtcacct

SEQ ID NO: 455727 - DNA, 120 bp, Artificial Sequence
  ENSG00000156535_54 (sequence is synthesized)
cactccagcctgggggacagagtgagattctgtctcaaaaaacaaaaaacaaaaaagtcaccttgtaactcatctctttttattgtaagtttattaaaaatgaagaggacaacaatgaga

SEQ ID NO: 455728 - DNA, 120 bp, Artificial Sequence
  ENSG00000156535_55 (sequence is synthesized)
attaaaaatgaagaggacaacaatgagaaggaacataaagggttagctagcactgtctcctggtgcatggggctgtgcagatgtcccggccacttcttccttcatacttcccttagagaa

SEQ ID NO: 455729 - DNA, 120 bp, Artificial Sequence
  ENSG00000156535_56 (sequence is synthesized)
cttgctctgctacaagcagtgggcttggactaaaagtgattaaaataccacaggcataaggagaaaaggagtatatgtagtagtaataattactagtataaattattttcttcacatgct

SEQ ID NO: 455730 - DNA, 120 bp, Artificial Sequence
  ENSG00000156535_57 (sequence is synthesized)
atgagtaataatattaaaaaactcattttaccattaagattccttatgctgaagctcttccatttagaatactgtcaatgtcatttactggtatgaactaaagtcccccttcttttccac

SEQ ID NO: 455731 - DNA, 120 bp, Artificial Sequence
  ENSG00000156535_58 (sequence is synthesized)
tcactgggaaccttagtaaaacaccagcatatcttacctctctttctgactggccgatgcttccagagactgaatgttgggaaaacctagtagccaaacaattctaggacagaataacat

SEQ ID NO: 455732 - DNA, 120 bp, Artificial Sequence
  ENSG00000156535_59 (sequence is synthesized)
ttttatatttggttccaccatcttattacatttagttatagttttaaaaaagaaattcaagcccattaaaatatgtctggtcaatgaaatgcttccttttattgtgttgtgctattgtac

SEQ ID NO: 455733 - DNA, 120 bp, Artificial Sequence
  ENSG00000156535_60 (sequence is synthesized)
tttgtttttcaaaacattgtaaaaatagtatctttggtttagtattttggattatatattataatctgaggagtgttttgcttatgtagaatccagatatatttctgttacctaggagat

SEQ ID NO: 455734 - DNA, 120 bp, Artificial Sequence
  ENSG00000156535_61 (sequence is synthesized)
gttacttacatatgtaatactgtatcctgcacgtggaaatattcagaattgtagatagcataactctccctgctcctattcttttgagcctaggtataattttttttttttttttagaaa

SEQ ID NO: 455735 - DNA, 120 bp, Artificial Sequence
  ENSG00000156535_62 (sequence is synthesized)
aagacatatttagctttaatttctatttatgctaaacatatttataagtagtctgtcaatataataccaactatttttatttttacataattcaattatttcatttgacatgtctggcag

SEQ ID NO: 455736 - DNA, 120 bp, Artificial Sequence
  ENSG00000156535_63 (sequence is synthesized)
actcaagacattaagtaaaaaattggaactatgatttttctttgtcattttttaaaaaagaattattttattaacctgctggcatataatctggagttcttttcacaaccttactttttc

SEQ ID NO: 455737 - DNA, 120 bp, Artificial Sequence
  ENSG00000156535_64 (sequence is synthesized)
tgatttgctttattgaatgattgaatactcatttctttctaaaaatatgttgtaaattctcccttggcaagatttctccctatgagggtagttattatttgagtctgccaagtggttacc

SEQ ID NO: 455738 - DNA, 120 bp, Artificial Sequence
  ENSG00000156535_65 (sequence is synthesized)
atggggcaaggtgccatgatgtattcttgggtgcattggttttttgcgcattgtaaatttaagacacttatagtaagtggactcattcatagatgagtttcagaaccttttacgttctcg

SEQ ID NO: 455739 - DNA, 120 bp, Artificial Sequence
  ENSG00000156535_66 (sequence is synthesized)
gtagaggcttctgtcggacaggcagaagagtgtattcctcacttttttttttgtcttcaaattccagtaaggcatagcacttttaagaaattagaatttttctatcatctatgcaaatga

SEQ ID NO: 455740 - DNA, 120 bp, Artificial Sequence
  ENSG00000156535_67 (sequence is synthesized)
tatttatgttaatattaaatatcttatgttacactgggagtaatttgaggtgcaattatttttattactactttgaatagaggaccattatccttctttcttcagaaaactaagaagtaa

SEQ ID NO: 455741 - DNA, 120 bp, Artificial Sequence
  ENSG00000156535_68 (sequence is synthesized)
gtgtaacttttaaagtaagtatatatcagtgagagtaggcttgttttacaactatttctagccagtgagttgtgttttcatgtctcatcaaaagacaataccacattgcatcattttaca

SEQ ID NO: 455742 - DNA, 120 bp, Artificial Sequence
  ENSG00000156535_69 (sequence is synthesized)
aaatatgttgtcattttcatttcagttgtaacataggaaaatagatatttcctagatgatttctgagtttcttactgcaaagaacagttataaattggtatacatgtgtctctgtaatag

SEQ ID NO: 455743 - DNA, 120 bp, Artificial Sequence
  ENSG00000156535_70 (sequence is synthesized)
ggataatattgatatatctgttgctacatatttaagaatcattctatcttatgttgtcttgaggccaagatttaccacgtttgcccagtgtattgaattggtggtagaaggtagttccat

SEQ ID NO: 455744 - DNA, 120 bp, Artificial Sequence
  ENSG00000156535_71 (sequence is synthesized)
gttccatttgtagatctttaagattttatctttgataactttaatagaatgtggctcagttctggtccttcaagcctgtatggtttggattttcagtaggggacagttgatgtggagtca

SEQ ID NO: 455745 - DNA, 120 bp, Artificial Sequence
  ENSG00000156535_72 (sequence is synthesized)
atctctttggtacacaggaagctttataaaatttcattcacgaatctcttattttgggaagctgttttgcatatgagaagaacactgttgaaataaggaactaaagctttatatattgat

SEQ ID NO: 455746 - DNA, 120 bp, Artificial Sequence
  ENSG00000156535_73 (sequence is synthesized)
aacactgttgaaataaggaactaaagctttatatattgatcaaggtgattctgaaagttttaatttttaatgttgtaatgttatgttattgttaattgtactttattatgtattcaatag

SEQ ID NO: 455747 - DNA, 120 bp, Artificial Sequence
  ENSG00000156535_74 (sequence is synthesized)
atagttgctatgaatttctcctcacaaggatgggcctgtttactcaccctgggcatcgttggtagagcgctagtgtaaacagcctgaggaacccggtgggccggggaagtgggcgcgctc

SEQ ID NO: 455748 - DNA, 120 bp, Artificial Sequence
  ENSG00000156535_75 (sequence is synthesized)
tgttctccgcggccagctgggacgccgggccaggtggggccgcctgcgtttagcaactgctttctcaccccctggatttgcgatgtttgccacagcagcgagaagcgccattgtaatggg

SEQ ID NO: 455749 - DNA, 120 bp, Artificial Sequence
  ENSG00000156535_76 (sequence is synthesized)
gatgggaggggtggagcctccaagtcctgtctcaatttagatctctcactctgctgttaggcgcgcccatttcagattactaaactcgaattaagagggaaaaaaaatcagggaggaggt

SEQ ID NO: 455750 - DNA, 120 bp, Artificial Sequence
  ENSG00000156535_77 (sequence is synthesized)
gagcacttgcagggggctctgcagctgccaacgtgtccacgtctccaaaaggaggctccaggtttgccacagcccggaaagaggaggctggagtctatagcactggcaattagagacttc

SEQ ID NO: 455751 - DNA, 120 bp, Artificial Sequence
  ENSG00000156535_78 (sequence is synthesized)
accttaaaatagcaacaagggcagcagcaacaacgacaacaaaaatgataatggcaaagagaagcagaacctaatgttttttgggtttgcccactgatacccttttaatcctgattttta

SEQ ID NO: 455752 - DNA, 120 bp, Artificial Sequence
  ENSG00000156564_0 (sequence is synthesized)
acacatacactcacacatacacaacccggcaggctcgtctgaacttgaagacaccccacattccaagatgcccgaggttcctgggaatgcctggggttcttcgatccggaaaatcctacc

SEQ ID NO: 455753 - DNA, 120 bp, Artificial Sequence
  ENSG00000156564_1 (sequence is synthesized)
ggcatcctcctagggagggattattattattatttttctttaatctggaagagaagagaacaagttgtgcttttccccccttcttcttgctaaatgccatggatataactgaataagcgg

SEQ ID NO: 455754 - DNA, 120 bp, Artificial Sequence
  ENSG00000156564_2 (sequence is synthesized)
ctcagggctttccccgcgtggacgtccgaggccaccatctgcctgcattcgccggagccgccggagggtttagctcgagtctgtctcgggcggggaaggatgcgtggccgagccggggag

SEQ ID NO: 455755 - DNA, 120 bp, Artificial Sequence
  ENSG00000156564_3 (sequence is synthesized)
cccgggcgccccgcggagccggcctcggtgccacccagccgggggtagatgctgcctcgcccaggcgctgagtgaccagaccatggagaccctgcttggtggcctgctagcgtttggcat

SEQ ID NO: 455756 - DNA, 120 bp, Artificial Sequence
  ENSG00000156564_4 (sequence is synthesized)
ggcgtttgccgtggtcgacgcctgccccaagtactgtgtctgccagaatctgtctgagtcactggggaccctgtgcccctccaaggggctgctctttgtaccccctgatattgaccggcg

SEQ ID NO: 455757 - DNA, 120 bp, Artificial Sequence
  ENSG00000156564_5 (sequence is synthesized)
gacagtggagctgcgcctgggcggcaacttcatcatccacatcagccgccaggactttgccaacatgacggggctggtggacctgaccctgtccaggaacaccatcagccacatccagcc

SEQ ID NO: 455758 - DNA, 120 bp, Artificial Sequence
  ENSG00000156564_6 (sequence is synthesized)
cttttcctttctggacctcgagagcctccgctccctgcatcttgacagcaatcggctgccaagccttggggaggacaccctccggggcctggtcaacctgcagcaccttatcgtgaacaa

SEQ ID NO: 455759 - DNA, 120 bp, Artificial Sequence
  ENSG00000156564_7 (sequence is synthesized)
caaccagctgggcggcatcgcagatgaggcttttgaggacttcctgctgacattggaggatctggacctctcctacaacaacctccatggcctgccgtgggactccgtgcgacgcatggt

SEQ ID NO: 455760 - DNA, 120 bp, Artificial Sequence
  ENSG00000156564_8 (sequence is synthesized)
caacctccaccagctgagcctggaccacaacctgctggatcacatcgccgagggcacctttgcagacctgcagaaactggcccgcctggatctcacctccaatcggctgcagaagctgcc

SEQ ID NO: 455761 - DNA, 120 bp, Artificial Sequence
  ENSG00000156564_9 (sequence is synthesized)
ccctgatcccatctttgcccgctcccaggcttcggctttgacagccacaccctttgccccacccttgtcctttagttttgggggtaacccacttcactgcaattgtgagcttctctggct

SEQ ID NO: 455762 - DNA, 120 bp, Artificial Sequence
  ENSG00000156564_10 (sequence is synthesized)
gcggaggctcgagcgggacgatgacctggaaacctgtggctccccagggggcctcaagggtcgctacttctggcatgtgcgtgaggaggagtttgtgtgcgagccgcctctcatcaccca

SEQ ID NO: 455763 - DNA, 120 bp, Artificial Sequence
  ENSG00000156564_11 (sequence is synthesized)
gcacacacacaagttgctggttctggagggccaggcggccacactcaagtgcaaagccattggggaccccagcccccttatccactgggtagcccccgatgaccgcctggtagggaactc

SEQ ID NO: 455764 - DNA, 120 bp, Artificial Sequence
  ENSG00000156564_12 (sequence is synthesized)
ctcaaggaccgctgtctatgacaatggcaccctggacatcttcatcaccacatctcaggacagtggtgccttcacctgcattgctgccaatgctgccggagaggccacggccatggtgga

SEQ ID NO: 455765 - DNA, 120 bp, Artificial Sequence
  ENSG00000156564_13 (sequence is synthesized)
gcactgcaccccccaagtcccgcctctcagacatcactggctccagcaagaccagccggggaggtggaggcagtgggggcggagagcctcccaaaagccccccggaacgggctgtgcttg

SEQ ID NO: 455766 - DNA, 120 bp, Artificial Sequence
  ENSG00000156564_14 (sequence is synthesized)
tgtctgaagtgaccaccacctcggccctggtcaagtggtctgtcagcaagtcagcaccccgggtgaagatgtaccagctgcagtacaactgctctgacgatgaggtactgatttacagga

SEQ ID NO: 455767 - DNA, 120 bp, Artificial Sequence
  ENSG00000156564_15 (sequence is synthesized)
tgatcccagcctccaacaaggccttcgtggtcaacaacctggtgtcagggactggctacgacttgtgtgtgctggccatgtgggatgacacagccacgacactcacggccaccaacatcg

SEQ ID NO: 455768 - DNA, 120 bp, Artificial Sequence
  ENSG00000156564_16 (sequence is synthesized)
tgggctgcgcccagttcttcaccaaggctgactacccgcagtgccagtccatgcacagccagattctgggcggcaccatgatcctggtcatcgggggcatcatcgtggccacgctgctgg

SEQ ID NO: 455769 - DNA, 120 bp, Artificial Sequence
  ENSG00000156564_17 (sequence is synthesized)
tcttcatcgtcatcctcatggtgcgctacaaggtctgcaaccacgaggcccccagcaagatggcagcggccgtgagcaatgtgtactcgcagaccaacggcgcccagccaccgcctccaa

SEQ ID NO: 455770 - DNA, 120 bp, Artificial Sequence
  ENSG00000156564_18 (sequence is synthesized)
gcagcgcaccagccggggccccgccgcagggcccgccgaaggtggtggtgcgcaacgagctcctggacttcaccgccagcctggcccgcgccagtgactcctcttcctccagctccctgg

SEQ ID NO: 455771 - DNA, 120 bp, Artificial Sequence
  ENSG00000156564_19 (sequence is synthesized)
gcagtggggaggctgcggggctgggacgggccccctggaggatcccaccctccgccccgcgccccaagcccagccttgaccgcctgatgggggccttcgcctccctggacctcaagagtc

SEQ ID NO: 455772 - DNA, 120 bp, Artificial Sequence
  ENSG00000156564_20 (sequence is synthesized)
agagaaaggaggagctgctggactccaggactccagccgggagaggggctgggacgtcggcccggggccaccactcggaccgagagccactgctggggccccctgcggcccgggccagga

SEQ ID NO: 455773 - DNA, 120 bp, Artificial Sequence
  ENSG00000156564_21 (sequence is synthesized)
gcctgctccccttgccgttggagggcaaggccaaacgcagccactccttcgacatgggggactttgctgctgcggcggcgggaggggtcgtgccgggcggctacagtcctcctcggaagg

SEQ ID NO: 455774 - DNA, 120 bp, Artificial Sequence
  ENSG00000156564_22 (sequence is synthesized)
tctcgaacatctggacgaagcgcagcctctctgtcaacggcatgctcttgccctttgaggagagtgacctggtgggggcccgggggacttttggcagctccgaatgggtgatggagagca

SEQ ID NO: 455775 - DNA, 120 bp, Artificial Sequence
  ENSG00000156564_23 (sequence is synthesized)
cggtctaggtgggggtgggcatgctccctttcctgtgcgcagggtgggagaaggggaaagaatctcactggcaagtgtttgtggagtttccatggtgatgtttacatccagggacagttt

SEQ ID NO: 455776 - DNA, 120 bp, Artificial Sequence
  ENSG00000156564_24 (sequence is synthesized)
cgtctccctgtcaatggcctcgtgtccccccctaccccgcaacacccacatcacctccccaccacccggccggggtgtgctcagggaatgtggactcgctcaaatgccggactgagccct

SEQ ID NO: 455777 - DNA, 120 bp, Artificial Sequence
  ENSG00000156564_25 (sequence is synthesized)
gagtgtttggaaaggcgagactccgcctttctaatcacaaatgtagcctacaagcaagcggctttggattgcttatgggtctagtgttgtttttatttcttaatttattttttttccatt

SEQ ID NO: 455778 - DNA, 120 bp, Artificial Sequence
  ENSG00000156574_0 (sequence is synthesized)
ctggccagcccaccatgcacgcccactgcctgcccttccttctgcacgcctggtgggccctactccaggcgggtgctgcgacggtggccactgcgctcctgcgtacgcgggggcagccct

SEQ ID NO: 455779 - DNA, 120 bp, Artificial Sequence
  ENSG00000156574_1 (sequence is synthesized)
cgtcgccatcccctctggcgtacatgctgagcctctaccgcgacccgctgccgagggcagacatcatccgcagcctacaggcagaagatgtggcagtggatgggcagaactggacgtttg

SEQ ID NO: 455780 - DNA, 120 bp, Artificial Sequence
  ENSG00000156574_2 (sequence is synthesized)
cttttgacttctccttcctgagccaacaagaggatctggcatgggctgagctccggctgcagctgtccagccctgtggacctccccactgagggctcacttgccattgagattttccacc

SEQ ID NO: 455781 - DNA, 120 bp, Artificial Sequence
  ENSG00000156574_3 (sequence is synthesized)
agccaaagcccgacacagagcaggcttcagacagctgcttagagcggtttcagatggacctattcactgtcactttgtcccaggtcaccttttccttgggcagcatggttttggaggtga

SEQ ID NO: 455782 - DNA, 120 bp, Artificial Sequence
  ENSG00000156574_4 (sequence is synthesized)
ccaggcctctctccaagtggctgaagcaccctggggccctggagaagcagatgtccagggtagctggagagtgctggccgcggccccccacaccgcctgccaccaatgtgctccttatgc

SEQ ID NO: 455783 - DNA, 120 bp, Artificial Sequence
  ENSG00000156574_5 (sequence is synthesized)
tctactccaacctctcgcaggagcagaggcagctgggtgggtccaccttgctgtgggaagccgagagctcctggcgggcccaggagggacagctgtcctgggagtggggcaagaggcacc

SEQ ID NO: 455784 - DNA, 120 bp, Artificial Sequence
  ENSG00000156574_6 (sequence is synthesized)
gtcgacatcacttgccagacagaagtcaactgtgtcggaaggtcaagttccaggtggacttcaacctgatcggatggggctcctggatcatctaccccaagcagtacaacgcctatcgct

SEQ ID NO: 455785 - DNA, 120 bp, Artificial Sequence
  ENSG00000156574_7 (sequence is synthesized)
gtgagggcgagtgtcctaatcctgttggggaggagtttcatccgaccaaccatgcatacatccagagtctgctgaaacgttaccagccccaccgagtcccttccacttgttgtgccccag

SEQ ID NO: 455786 - DNA, 120 bp, Artificial Sequence
  ENSG00000156574_8 (sequence is synthesized)
gcatgctgtatgtggataatggcagagtgctcctagatcaccataaagacatgatcgtggaagaatgtgggtgcctctgatgacatcctggagggagactggatttgcctgcactctgga

SEQ ID NO: 455787 - DNA, 120 bp, Artificial Sequence
  ENSG00000156574_9 (sequence is synthesized)
aggctgggaaactcctggaagacatgataaccatctaatccagtaaggagaaacagagaggggcaaagttgctctgcccaccagaactgaagaggaggggctgcccactctgtaaatgaa

SEQ ID NO: 455788 - DNA, 120 bp, Artificial Sequence
  ENSG00000156574_10 (sequence is synthesized)
gggctcagtggagtctggccaagcacagaggctgctgtcaggaagagggaggaagaagcctgtgcagggggctggctggatgttctctttactgaaaagacagtggcaaggaaaagcaca

SEQ ID NO: 455789 - DNA, 120 bp, Artificial Sequence
  ENSG00000156574_11 (sequence is synthesized)
agtgcatgagttctttactggattttttaaaaacctgtgaaccccccgaaactgtatgtgaaagttgagacatatgtgcatgtattttggaggtgggatgaagtcacctatagctttcat

SEQ ID NO: 455790 - DNA, 120 bp, Artificial Sequence
  ENSG00000156574_12 (sequence is synthesized)
gtattctccaaagtagtctgtgtgtgacctgtccccctccccaaagattaaggatcactgtatagattaaaaagagtccgtcaatctcattgcctcaggctgggttgggggagccccaca

SEQ ID NO: 455791 - DNA, 120 bp, Artificial Sequence
  ENSG00000156574_13 (sequence is synthesized)
gctttctggctggccagtggcaatctactggccttgtccagaggctcactggagtggttctctgctaatgagctgtacaacaataaagccattgtctagttctcctgggccagctggtgc

SEQ ID NO: 455792 - DNA, 120 bp, Artificial Sequence
  ENSG00000156574_14 (sequence is synthesized)
ctgtgaaggcagaggcaggaactcatccaagaggaccggccatgttgggttacagaagacatccctgcgtcagtctgcttcggcagacacagcctgagtttgttaaagttggtgacaatc

SEQ ID NO: 455793 - DNA, 120 bp, Artificial Sequence
  ENSG00000156574_15 (sequence is synthesized)
cacctcagtctctcaatgtgtgctattaatgaggcctctgagcttcctatccagcagtggtgaaggccttgccctgggtggcaagatacttgctctatggtcacagctcagccactggaa

SEQ ID NO: 455794 - DNA, 120 bp, Artificial Sequence
  ENSG00000156574_16 (sequence is synthesized)
gctgtgcgacctcaggtgagcaattcactgtccagtctccacttgtaaaaggaacgctggtgaatcctaatgcattcatattaaatgtctgttgtcaggctcagaagagccatgagcttt

SEQ ID NO: 455795 - DNA, 120 bp, Artificial Sequence
  ENSG00000156575_0 (sequence is synthesized)
agaggcactgagagtggaggtctcagactcttggaaggggctatactagacacacaaagacagccccaagaaggacggtggagtagtgtcctcgctaaaagacagtagatatgcaatgcc

SEQ ID NO: 455796 - DNA, 120 bp, Artificial Sequence
  ENSG00000156575_1 (sequence is synthesized)
tcttgctcctgccctttctcctgctgggaacagtttctgctcttcatctggagaatgatgccccccatctggagagcctagagacacaggcagacctaggccaggatctggatagttcaa

SEQ ID NO: 455797 - DNA, 120 bp, Artificial Sequence
  ENSG00000156575_2 (sequence is synthesized)
aggagcaggagagagacttggctctgacggaggaggtgattcaggcagagggagaggaggtcaaggcttctgcctgtcaagacaactttgaggatgaggaagccatggagtcggacccag

SEQ ID NO: 455798 - DNA, 120 bp, Artificial Sequence
  ENSG00000156575_3 (sequence is synthesized)
agggaagaagacattgttgaagtgcagggaagtccaaggtgcaagatctgccgctacctattggtgcggactcctaaaacttttgcagaagctcagaatgtctgcagcagatgctacgga

SEQ ID NO: 455799 - DNA, 120 bp, Artificial Sequence
  ENSG00000156575_4 (sequence is synthesized)
ggcaaccttgtctctatccatgacttcaacttcaactatcgcattcagtgctgcactagcacagtcaaccaagcccaggtctggattggaggcaacctcaggggctggttcctgtggaag

SEQ ID NO: 455800 - DNA, 120 bp, Artificial Sequence
  ENSG00000156575_5 (sequence is synthesized)
cggttttgctggactgatgggagccactggaattttgcttactggtccccagggcaacctgggaatgggcaaggctcctgtgtggccctatgcaccaaaggaggttattggcgacgagct

SEQ ID NO: 455801 - DNA, 120 bp, Artificial Sequence
  ENSG00000156575_6 (sequence is synthesized)
caatgcgacaagcaactgcccttcgtctgctccttctaagccagcggcacggagaccctgccagcagctccctcccgtcccccaacctctcctgctcataaatccagacttcccacagca

SEQ ID NO: 455802 - DNA, 120 bp, Artificial Sequence
  ENSG00000156587_0 (sequence is synthesized)
gtgtcgcgggtcggagctcggtcctgctggaggccacgggtgccacacactcggtcccgacatgatggcgagcatgcgagtggtgaaggagctggaggatcttcagaagaagcctccccc

SEQ ID NO: 455803 - DNA, 120 bp, Artificial Sequence
  ENSG00000156587_1 (sequence is synthesized)
atacctgcggaacctgtccagcgatgatgccaatgtcctggtgtggcacgctctcctcctacccgaccaacctccctaccacctgaaagccttcaacctgcgcatcagcttcccgccgga

SEQ ID NO: 455804 - DNA, 120 bp, Artificial Sequence
  ENSG00000156587_2 (sequence is synthesized)
gtatccgttcaagcctcccatgatcaaattcacaaccaagatctaccaccccaacgtggacgagaacggacagatttgcctgcccatcatcagcagtgagaactggaagccttgcaccaa

SEQ ID NO: 455805 - DNA, 120 bp, Artificial Sequence
  ENSG00000156587_3 (sequence is synthesized)
gacttgccaagtcctggaggccctcaatgtgctggtgaatagaccgaatatcagggagcccctgcggatggacctcgctgacctgctgacacagaatccggagctgttcagaaagaatgc

SEQ ID NO: 455806 - DNA, 120 bp, Artificial Sequence
  ENSG00000156587_4 (sequence is synthesized)
cgaagagttcaccctccgattcggagtggaccggccctcctaactcatgttctgaccctctgtgcactggatcctcggcatagcggacggacacacctcatggactgaggccagagcccc

SEQ ID NO: 455807 - DNA, 120 bp, Artificial Sequence
  ENSG00000156587_5 (sequence is synthesized)
catttttcccttcttaggttgttagtcattagtttgtgtgtgtgtgtggtggagggaagggagctatgagtgtgtgtgttgtgtatggactcactcccaggttcacctggccacaggtgc

SEQ ID NO: 455808 - DNA, 120 bp, Artificial Sequence
  ENSG00000156587_6 (sequence is synthesized)
acccttcccacaccctttacattccccagagccaagggagtttaagtttgcagttacaggccagttctccagctctccatcttagagagacaggtcaccttgcaggcctgcttgcaggaa

SEQ ID NO: 455809 - DNA, 120 bp, Artificial Sequence
  ENSG00000156587_7 (sequence is synthesized)
atgaatccagcagccaactcgaatccccctagggctcaggcactgagggcctggggacagtggagcatatgggtgggagacagatggagggtaccctatttacaactgagtcagccaagc

SEQ ID NO: 455810 - DNA, 120 bp, Artificial Sequence
  ENSG00000156587_8 (sequence is synthesized)
cactgatgggaatatacagatttaggtgctaaaccatttattttccacggatgagtcacaatctgaagaatcaaacttccatcctgaaaatctatatgtttcaaaaccacttgccatcct

SEQ ID NO: 455811 - DNA, 120 bp, Artificial Sequence
  ENSG00000156587_9 (sequence is synthesized)
gttagattgccagttcctgggaccaggcctcagactgtgaagtatatatcctccagcattcagtccagggggagccacggaaaccatgttcttgcttaagccattaaagtcagagatgaa

SEQ ID NO: 455812 - DNA, 120 bp, Artificial Sequence
  ENSG00000156587_10 (sequence is synthesized)
ctgaaacttgtgataacaactgggtgcatctccagtgcaggaaaagtccttggcatcttggtgccaggcattctgctactgctggtggtgggttatgaacacagatgaccaggatgaagt

SEQ ID NO: 455813 - DNA, 120 bp, Artificial Sequence
  ENSG00000156587_11 (sequence is synthesized)
ccttgccttggaataagcccatagcccatcccataatttgatgcctgtattactagagtcctgagaaacacggaatgctgattagaatttgggacaaagttccctgagtattctctggag

SEQ ID NO: 455814 - DNA, 120 bp, Artificial Sequence
  ENSG00000156587_12 (sequence is synthesized)
acaaaggatccccgactgccggggagcggtgctcggagggcacaggtctacgccatcccccacgcagtttcggagatggagcgctgggcccatggagggaaggcggcaggctcggcggct

SEQ ID NO: 455815 - DNA, 120 bp, Artificial Sequence
  ENSG00000156587_13 (sequence is synthesized)
ccggcagcttgctggggcaggggctcaaggcggcagtccgatagtggaggccgctgagaactgtcacggagctgcgtctgtacagcgagcatcccttatttattcagggcgagtgtgtat

SEQ ID NO: 455816 - DNA, 120 bp, Artificial Sequence
  ENSG00000156587_14 (sequence is synthesized)
ttggggcggcgtgcagggggctgacaaagaccggagagctcccggtgcggccgccggcggagcgaagactggaacccgtatgagcgccccccagcgcccctgagcgctcgccgccggtgc

SEQ ID NO: 455817 - DNA, 120 bp, Artificial Sequence
  ENSG00000156599_0 (sequence is synthesized)
ctctgaggcaggacggcactgccgggaggcggcggtgacaacgacggcggtggtgacgggcaccgggctcgcgggtgagacacagtaacctggttgaactctgcatctggaaagctgaag

SEQ ID NO: 455818 - DNA, 120 bp, Artificial Sequence
  ENSG00000156599_1 (sequence is synthesized)
actgaagaaagataagagacattgactagtctggaaacagggacatctttggaacttcgttttcatccacagtaaacttttgaagtgtcatcaattggaattgatttcttcatcttattc

SEQ ID NO: 455819 - DNA, 120 bp, Artificial Sequence
  ENSG00000156599_2 (sequence is synthesized)
tgcctattgggaagaacatggcttcaaggattttaagtttccctttagttttacatgaactttgtaggaaacagagcccttaaagggcttgggaataacaagaagagattgaagacagag

SEQ ID NO: 455820 - DNA, 120 bp, Artificial Sequence
  ENSG00000156599_3 (sequence is synthesized)
aagcttgccctgttttccttgccccttcaaagaaaaggatttacagctcaaacttagaacagctgttgtccagctttagccatcaagagagaaataaattaaaccaccattgccagacta

SEQ ID NO: 455821 - DNA, 120 bp, Artificial Sequence
  ENSG00000156599_4 (sequence is synthesized)
caagccctggtgaagtcagggtgtgggagtggtggcattgagaagactacctaaaagagacaaagactgcagtaaacaaagctcctctttaaagttggaaggggcctcaggttccttctt

SEQ ID NO: 455822 - DNA, 120 bp, Artificial Sequence
  ENSG00000156599_5 (sequence is synthesized)
ggattgaaatagaaatagaaacacagggcacacctcttttaggtgcagctcacattttatggaactgtagtcgtggaggtactatagtatctcagaagaatttttctttgcccaaagttt

SEQ ID NO: 455823 - DNA, 120 bp, Artificial Sequence
  ENSG00000156599_6 (sequence is synthesized)
ttttgccataccctgatattctctccttcttttgaagacctgcctccatccatgagctgtatcttgatctgtctgactgtccatgttttccacctgcaaccatttgcatgtgtacagcct

SEQ ID NO: 455824 - DNA, 120 bp, Artificial Sequence
  ENSG00000156599_7 (sequence is synthesized)
actgtttgtctccagtttttaaactgtacaagttgtgtttcttaatcttcccttctgccttgttctggggaggtggttattcatcatttggaatcacctttccccctcccatgtgctttc

SEQ ID NO: 455825 - DNA, 120 bp, Artificial Sequence
  ENSG00000156599_8 (sequence is synthesized)
cttcatttgagatcttttgacctttggctttatttgggagggggaagggtgataaagttttctgtttccctggttttcttttgtactcctctctgttgcttccctcctcccattttcttg

SEQ ID NO: 455826 - DNA, 120 bp, Artificial Sequence
  ENSG00000156599_9 (sequence is synthesized)
tctgttctgccgctgtgtgggcctgggctatgcggcagggcagatttcccatcagagctccaacatgcccgcagagtctggaaagagattcaaacccagcaagtatgtcccggtctctgc

SEQ ID NO: 455827 - DNA, 120 bp, Artificial Sequence
  ENSG00000156599_10 (sequence is synthesized)
agccgccatcttcctagtgggagctacgacactcttctttgcctttacgtgtccaggactaagcctgtatgtgtcacctgcagtgcccatctacaatgcaattatgtttctctttgtgtt

SEQ ID NO: 455828 - DNA, 120 bp, Artificial Sequence
  ENSG00000156599_11 (sequence is synthesized)
ggccaacttcagcatggccaccttcatggacccagggattttccctcgagctgaggaggatgaggacaaggaagatgatttccgagctcccctttacaaaacagtggagataaagggcat

SEQ ID NO: 455829 - DNA, 120 bp, Artificial Sequence
  ENSG00000156599_12 (sequence is synthesized)
ccaggtgcgcatgaaatggtgtgccacctgccgcttttaccgtccccctcgatgttcccactgcagtgtctgtgacaactgtgtggaggaatttgatcatcactgcccctgggtgaataa

SEQ ID NO: 455830 - DNA, 120 bp, Artificial Sequence
  ENSG00000156599_13 (sequence is synthesized)
ctgtattggtcgccggaactaccgttattttttccttttcctcctttccctgacagcccacattatgggtgtgtttggctttggcctcctttatgtcctctaccacatagaggaactctc

SEQ ID NO: 455831 - DNA, 120 bp, Artificial Sequence
  ENSG00000156599_14 (sequence is synthesized)
aggggtccgcacggctgtcacaatggcagtaatgtgtgtggctggcttattcttcatccctgtagctggcctcacgggatttcacgtggttctggtggccaggggacgcacaaccaatga

SEQ ID NO: 455832 - DNA, 120 bp, Artificial Sequence
  ENSG00000156599_15 (sequence is synthesized)
acaggttacgggtaaattccggggaggtgtgaaccccttcaccaatggctgctgtaacaatgtcagccgtgttctctgcagttctccagcacccaggtatttggggagaccaaagaaaga

SEQ ID NO: 455833 - DNA, 120 bp, Artificial Sequence
  ENSG00000156599_16 (sequence is synthesized)
gaagacaattgtaatcagacctcccttccttcgaccagaagtttcagatgggcagataactgtgaagatcatggataatggcatccagggagagctgaggagaacaaagtctaagggaag

SEQ ID NO: 455834 - DNA, 120 bp, Artificial Sequence
  ENSG00000156599_17 (sequence is synthesized)
cctggagataacagagagccagtctgcagatgctgaacctccacctcctcctaagccagacctgagccgttacacagggttgcgaacacacctcggcttggctactaatgaggatagtag

SEQ ID NO: 455835 - DNA, 120 bp, Artificial Sequence
  ENSG00000156599_18 (sequence is synthesized)
attggccaaggacagccccccgacacctaccatgtacaagtatcggccgggttacagtagcagcagtacgtcagctgccatgccgcattcctccagcgccaagttgagtcgtggggacag

SEQ ID NO: 455836 - DNA, 120 bp, Artificial Sequence
  ENSG00000156599_19 (sequence is synthesized)
cttgaaggagccaacctcaattgcagagagcagccgtcaccccagctaccgctcagagcccagcttggaaccagagagcttccgttctcctacctttggcaaaagttttcacttcgatcc

SEQ ID NO: 455837 - DNA, 120 bp, Artificial Sequence
  ENSG00000156599_20 (sequence is synthesized)
actatccagtggctcacgctcctccagcctcaagtcagcccagggcacaggctttgagctgggccagttgcaatccattcgttcagagggcaccacctccacctcctataagagcctggc

SEQ ID NO: 455838 - DNA, 120 bp, Artificial Sequence
  ENSG00000156599_21 (sequence is synthesized)
caaccagacacgcaatggaagcctatcttatgacagcttgctcacaccttcagacagccctgattttgagtcagtgcaggcagggcctgagccagacccacctttaggctatacctctcc

SEQ ID NO: 455839 - DNA, 120 bp, Artificial Sequence
  ENSG00000156599_22 (sequence is synthesized)
cttcctgtcagccaggctggcccagcaacgggaagctgagaggcacccacgtttggtgccaactggcccaacacaccgagagccctcaccagtccgttacgacaatctgtcgcgccacat

SEQ ID NO: 455840 - DNA, 120 bp, Artificial Sequence
  ENSG00000156599_23 (sequence is synthesized)
tgtggcctctctccaggaacgagagaagttgctgcgccagtcacccccactcccgggccgtgaggaagaaccaggcttgggggactcaggcattcagtcaacaccaggctcgggccatgc

SEQ ID NO: 455841 - DNA, 120 bp, Artificial Sequence
  ENSG00000156599_24 (sequence is synthesized)
ccctcgtactagttcctcctcagatgattcaaagagatcacctttgggcaagactccactgggacgcccagctgtcccccgttttggcaagccagatgggctaaggggccggggagtagg

SEQ ID NO: 455842 - DNA, 120 bp, Artificial Sequence
  ENSG00000156599_25 (sequence is synthesized)
gtcccctgaaccaggcccaacagccccatacctgggccgatcgatgtcttacagcagccaaaaagcccaacctggtgtctctgagacagaagaagtggccttgcagccattactgacacc

SEQ ID NO: 455843 - DNA, 120 bp, Artificial Sequence
  ENSG00000156599_26 (sequence is synthesized)
caaagatgaagtacagctgaagaccacctacagcaaatccaacgggcagcccaagagcttaggctcagcctcccctggcccaggccagccacctctcagtagccccacgaggggaggagt

SEQ ID NO: 455844 - DNA, 120 bp, Artificial Sequence
  ENSG00000156599_27 (sequence is synthesized)
caagaaggtgtcaggggttggtggtaccacctatgagatttcggtgtgagccttcggcacctcccctccccaacgcctctgcgcctacaccaaagggccccaggtggccaccttccttcc

SEQ ID NO: 455845 - DNA, 120 bp, Artificial Sequence
  ENSG00000156599_28 (sequence is synthesized)
ctcaaggggctcccctcccgtgcatggacattttttaaaccaccgattccaagaggatgaggagtgttttctaaaatgcagtaggcttggggagtcggagagttggggccctgagactgg

SEQ ID NO: 455846 - DNA, 120 bp, Artificial Sequence
  ENSG00000156599_29 (sequence is synthesized)
ggtagcaacccccccttttatcttttaagaccttcccttccttgatccctggaccagactcagtggacatttgtgcaattgctcgccctggagggaaccagatcatttttaaaccagaaa

SEQ ID NO: 455847 - DNA, 120 bp, Artificial Sequence
  ENSG00000156599_30 (sequence is synthesized)
tttattattgttacggattctatttttttcctcttctgcgttaccaggtgtgtgtgtacatataatatatatatatatatattataaatatcaaagaaattatatatctatcctgggatg

SEQ ID NO: 455848 - DNA, 120 bp, Artificial Sequence
  ENSG00000156599_31 (sequence is synthesized)
ctgggatgggaaaatgagggagggatacatatacggagggggatcttactcttcccattcctcagaccagcaggaaaagaggggagacgtcagtctttttcctgtggttccctctcattt

SEQ ID NO: 455849 - DNA, 120 bp, Artificial Sequence
  ENSG00000156599_32 (sequence is synthesized)
gtcccagttactaactacggaaatagcatcctctgctggtgctaagtgtgattaggaagaagcctggggagaggtgagtctggaattttggtcacaagagggaaggacttggagaggaga

SEQ ID NO: 455850 - DNA, 120 bp, Artificial Sequence
  ENSG00000156599_33 (sequence is synthesized)
attagttttctaggctcattggcatttagtttccctaggaaaggggtcaaaacttcaagacactggtggtggtgggagatcaggaaaataacttggcctagctcaaacaatattggataa

SEQ ID NO: 455851 - DNA, 120 bp, Artificial Sequence
  ENSG00000156599_34 (sequence is synthesized)
tcccctccttgggggagagggattagagtgtgctcctactggccccttggagcctcccctagcttacacagttaacttgattttaaaatccaaggccaggagagaagaatccaaaaagca

SEQ ID NO: 455852 - DNA, 120 bp, Artificial Sequence
  ENSG00000156599_35 (sequence is synthesized)
atatttttcatcacatgccaaaaacgggggatagagagaaggagtggcaggcctaggcccctccgattgtcccttgggggttacccctcagcccacctcactatggtgctgggtagaggg

SEQ ID NO: 455853 - DNA, 120 bp, Artificial Sequence
  ENSG00000156599_36 (sequence is synthesized)
gatacctgggttctaacctctaaataggggagatcccagcctccacaaagaggcccttttattttttattctgattagccattttaaaccaacgaggaataaaaagaaatcctgatctaa

SEQ ID NO: 455854 - DNA, 120 bp, Artificial Sequence
  ENSG00000156599_37 (sequence is synthesized)
attaaggccctatttctcctccgggccgggtcttccaaccgcggcgggacccatgggccttggaaacggacgacgagtagaggccggggatccacgaccgccagggctcggaacgggtga

SEQ ID NO: 455855 - DNA, 120 bp, Artificial Sequence
  ENSG00000156599_38 (sequence is synthesized)
gagagtgtttgatactactgacaaaaaagtagcacatcaggttcttccaaaacttccagctcccaggaaatcagcagagaaaggaagagctcttgaagcattcctacgtagattcaaatc

SEQ ID NO: 455856 - DNA, 120 bp, Artificial Sequence
  ENSG00000156599_39 (sequence is synthesized)
ctgaaagaaactgagtttaattctggactagagaattgtttttttgatcaagaaaagttaccttaaagcatatcttgagttgactgctgtggaatactgggtgtccaggactaagcctgt

SEQ ID NO: 455857 - DNA, 120 bp, Artificial Sequence
  ENSG00000156599_40 (sequence is synthesized)
gcgctgcttctctgaggcaggacggcactgccgggaggcggcggtgacaacgacggcggtggtgacgggcaccgggctcgcggctgaggaggatgaggacaaggaagatgatttccgagc

SEQ ID NO: 455858 - DNA, 120 bp, Artificial Sequence
  ENSG00000156599_41 (sequence is synthesized)
ctggcgcccagccgccgccccttccgcccccggccctgcgccctcgggctctgcggtccccgcagcccgctctctcaacctcggtgggcctggccgccgtggattccttcttttcggttt

SEQ ID NO: 455859 - DNA, 120 bp, Artificial Sequence
  ENSG00000156599_42 (sequence is synthesized)
cttacgtgcgcgctctcgtcttctcgcgtgcgtacgtcgttgtgttgctgcagccaatcaggccgcgaggtcgccgcggtcgccagggttcgcgcgcacgccccagatcggagtcggggt

SEQ ID NO: 455860 - DNA, 120 bp, Artificial Sequence
  ENSG00000156599_43 (sequence is synthesized)
gggggctatgggtgaatgggagagtgagcggggttgggcgcggcagcgcgagccgcatgaatgagacaaacgtgcgccgcgcgagacgtcgcgcgagcccggactagggagccaatggga

SEQ ID NO: 455861 - DNA, 120 bp, Artificial Sequence
  ENSG00000156599_44 (sequence is synthesized)
caatgggaacgctggaagggttcgagacccggcactgagggcaacggccgcgcgccggctccgagacgagcgacgcctggcgggagcgcgcggcagcggggcgggcgtggagcgtgcggg

SEQ ID NO: 455862 - DNA, 120 bp, Artificial Sequence
  ENSG00000156599_45 (sequence is synthesized)
gctgcttctctgaggcaggacggcactgccgggaggcggcggtgacaacgacggcggtggtgacgggcaccgggctcgcgggtgtccaggactaagcctgtatgtgtcacctgcagtgcc

SEQ ID NO: 455863 - DNA, 120 bp, Artificial Sequence
  ENSG00000156603_0 (sequence is synthesized)
atgaaaattaccaacggcagacacggagacagcgccggggcggagggtacgatggagaatttcacggcactgtttggggctcaggctgacccaccaccgcccccaaccgcactcggcttc

SEQ ID NO: 455864 - DNA, 120 bp, Artificial Sequence
  ENSG00000156603_1 (sequence is synthesized)
ggaccaggaaagcctccacccccgccaccgcctcctgcgggcgggggacccggcacggccccgcctcccaccgcggccacggctcctcctggcgcggacaagtcaggagctggctgtggc

SEQ ID NO: 455865 - DNA, 120 bp, Artificial Sequence
  ENSG00000156603_2 (sequence is synthesized)
cctttttacctcatgagggaactgccaggtagcacagagctgacaggcagcacgaatctgatcacacactacaacttggaacaagcctataataaattctgtgggaagaaggtgaaggag

SEQ ID NO: 455866 - DNA, 120 bp, Artificial Sequence
  ENSG00000156603_3 (sequence is synthesized)
agcctccgctctctcattgagaagccccctattctcagtagctctttcaatcctatcacagggaccatgctggccggcttccgcctccacactggcccgttgccggagcagtgtcgtctg

SEQ ID NO: 455867 - DNA, 120 bp, Artificial Sequence
  ENSG00000156603_4 (sequence is synthesized)
atgcatattcagcctcccaagaagaagaataagcacaagcacaaacagagccgtacccaggatcctgtccccccagaaacaccatctgattcagatcacaagaagaagaaaaagaaaaaa

SEQ ID NO: 455868 - DNA, 120 bp, Artificial Sequence
  ENSG00000156603_5 (sequence is synthesized)
gaagaggatcctgaacggaaaaggaagaagaaagagaagaagaaaaagaagaatcgacatagtccagaccacccaggtatgggcagctcccaggccagcagcagcagcagcctacgctaa

SEQ ID NO: 455869 - DNA, 120 bp, Artificial Sequence
  ENSG00000156603_6 (sequence is synthesized)
ctgccttgggagcatcctgcagctgggacagaggccagctcctgttgggctcagttgagactaagtaaattaggagagagagggacatgcttttgtaggctcatcccagttggttttctc

SEQ ID NO: 455870 - DNA, 120 bp, Artificial Sequence
  ENSG00000156603_7 (sequence is synthesized)
atggacatctcttcctctcccaggaagcttacaattttcttctctctcttttgtgcaatttgtctgatttaggacttgttctgtgttttctttaaaaaaaaaaaaattacatttatcaaa

SEQ ID NO: 455871 - DNA, 120 bp, Artificial Sequence
  ENSG00000156603_8 (sequence is synthesized)
aaaaaaaaaaaaaaaaaaaacctgaccttctgaatctggtttgaacttccataggtaaacccagttaagttccgtatggagctctggactcctaaattcccctgaagaagaaaccaatgt

SEQ ID NO: 455872 - DNA, 120 bp, Artificial Sequence
  ENSG00000156603_9 (sequence is synthesized)
cctgaagaagaaaccaatgtactgtggtctcttgggacttgggacagggactctagcagcacctctgtatcctttctggccatttggacaaaagcagttgccccgacttgggattttcct

SEQ ID NO: 455873 - DNA, 120 bp, Artificial Sequence
  ENSG00000156603_10 (sequence is synthesized)
gaggatcctgaacggaaaaggaagaagaaagagaagaagaaaaagaaggtagagtagaggcctattgccacaacccagtgagtttccccagatctcacccctgtcctaaataccctagag

SEQ ID NO: 455874 - DNA, 120 bp, Artificial Sequence
  ENSG00000156603_11 (sequence is synthesized)
aaggcaggttgcaggtttctcctgtacagcctgatcaaagccaaggctagttcctagttgttcttaccctgcttctttctcccccagaatcgacatagtccagaccacccaggtatgggc

SEQ ID NO: 455875 - DNA, 120 bp, Artificial Sequence
  ENSG00000156603_12 (sequence is synthesized)
cctccacactggcccggtgagtcctgttggaggaagaaggcaaatggggaggcctaaacatggagatggtttttctctccaagtctgttccttcataatggagcagaatggatgataaga

SEQ ID NO: 455876 - DNA, 120 bp, Artificial Sequence
  ENSG00000156603_13 (sequence is synthesized)
gcaggagagatttcctccctctactcacctggaccttcctttggttccttcagttgccggagcagtgtcgtctgatgcatattcagcctcccaagaagaagaataagcacaagcacaaac

SEQ ID NO: 455877 - DNA, 80 bp, Artificial Sequence
  ENSG00000156639_0 (sequence is synthesized)
ctccccgtctccgcaggccgagtggtgcggcccgcctccagctgaccggcctggaatcccggctccgagccccggactcg

SEQ ID NO: 455878 - DNA, 80 bp, Artificial Sequence
  ENSG00000156639_1 (sequence is synthesized)
cccagccgccgccaccgctgccgccgccgagctccgccgccgccgagcaccatgggagacgctgggagcgagcgcagcaa

SEQ ID NO: 455879 - DNA, 120 bp, Artificial Sequence
  ENSG00000156639_2 (sequence is synthesized)
cgcagcaaagcgcccagcctgccgcctcgctgtccctgcggcttctgggggtccagcaagactatgaatctctgttccaaatgctttgctgattttcaaaagaaacagccagacgatgat

SEQ ID NO: 455880 - DNA, 120 bp, Artificial Sequence
  ENSG00000156639_3 (sequence is synthesized)
tccgctccaagtacaagtaacagccaatcagatttgttttccgaagagaccaccagtgacaacaacaatacctcgataaccacgccaactcttagtcccagccagcagccgcttccgaca

SEQ ID NO: 455881 - DNA, 120 bp, Artificial Sequence
  ENSG00000156639_4 (sequence is synthesized)
gaactgaatgtaacttcaccgagtaaagaggagtgtgggccatgcacagacacagctcatgtctcattaatcacaccaacaaaaagatcctgtggtacagattcacagtctgagaatgag

SEQ ID NO: 455882 - DNA, 120 bp, Artificial Sequence
  ENSG00000156639_5 (sequence is synthesized)
gcttcaccagtaaaacggccacgactacttgagaatacggaacggtccgaggaaaccagtcgatctaaacagaagagtcgacgtcggtgcttccagtgccaaaccaaactggagctggtg

SEQ ID NO: 455883 - DNA, 120 bp, Artificial Sequence
  ENSG00000156639_6 (sequence is synthesized)
cagcaggaattgggatcgtgtcgctgcggttatgtgttctgtatgttacatcgcctccccgagcagcacgactgcacattcgaccacatgggccgtggccgggaggaagccatcatgaaa

SEQ ID NO: 455884 - DNA, 120 bp, Artificial Sequence
  ENSG00000156639_7 (sequence is synthesized)
atggtgaagctggaccggaaagtggggcgctcctgccagcgcatcggggaggggtgctcctgaaggccaggcatggccaccacgtgacgctgttcttagttcactaatgttagccttatt

SEQ ID NO: 455885 - DNA, 120 bp, Artificial Sequence
  ENSG00000156639_8 (sequence is synthesized)
taggacaaagtcagccagacaccttgtactgggcacgcgtcagactgcagccagtccgtttcctttctttagccagccatcctggtactgtagtttaggggttgatggtggttgaaattg

SEQ ID NO: 455886 - DNA, 120 bp, Artificial Sequence
  ENSG00000156639_9 (sequence is synthesized)
atttctggctggttactaaggtgcctgctagccattgtataaaattaaaacatgaagaatattttttttttgagcatggctagtggatttaaaacaacacatacctgtcactgctggagt

SEQ ID NO: 455887 - DNA, 120 bp, Artificial Sequence
  ENSG00000156639_10 (sequence is synthesized)
caaacttataaaaagccttaagtggaaagtgttccagacggagactctgagttaatagaggagtagaagctggtgttaaagttcccacgacgcacatggctttgccagaaactctgttta

SEQ ID NO: 455888 - DNA, 120 bp, Artificial Sequence
  ENSG00000156639_11 (sequence is synthesized)
atgatcggcctttcacctcttcacttatccttagtcccagtagccaggatacctgatggccacgtgtgccttggccacgggaggctgctgagattggccacgtggctgggctgggtggtg

SEQ ID NO: 455889 - DNA, 120 bp, Artificial Sequence
  ENSG00000156639_12 (sequence is synthesized)
gcctcactctcccacagagctggaaatggggggtgggggacagattcttacggaaatttttttacctgacttgctatgaaaaaactcatcacacaagaagagaaacagtaacctcacttt

SEQ ID NO: 455890 - DNA, 120 bp, Artificial Sequence
  ENSG00000156639_13 (sequence is synthesized)
agactagtccacgaacgagacccgccttttctacacaggatccaaggtcacgagaagcagccagagtgccccgcctccgccggctctggtctgccattcgccagtgcagggatctggcac

SEQ ID NO: 455891 - DNA, 120 bp, Artificial Sequence
  ENSG00000156639_14 (sequence is synthesized)
ggaccagatgtggcgaatggcagcacagcgcggtggctgggtctgcacactggcctctgcagccagatttctatattgggagttttttaaaaagacatttcatagccaacaagaatcagt

SEQ ID NO: 455892 - DNA, 120 bp, Artificial Sequence
  ENSG00000156639_15 (sequence is synthesized)
agaagtgctgggagcagcagctggggaagctgccgcccacgggctctgccccttccagctggagccgcccgtgcctccaggggccaagaggatgatgtcgtggcctccattctcgtttct

SEQ ID NO: 455893 - DNA, 120 bp, Artificial Sequence
  ENSG00000156639_16 (sequence is synthesized)
atgcagccccatagtccaaggacacccagtccacatctaccatatagcaagtttagtaagggaaggcagcatacgtcccagggacagtgggtttggatctgtctagaacagcggtttgtg

SEQ ID NO: 455894 - DNA, 120 bp, Artificial Sequence
  ENSG00000156639_17 (sequence is synthesized)
gctgtggcccagctccgagagtgatatttgctctggtaggtgagggcctgagggtacatttctccacctgtgccccctcatgttcacagaggatttcagcagctgcaactgcgcacgcca

SEQ ID NO: 455895 - DNA, 120 bp, Artificial Sequence
  ENSG00000156639_18 (sequence is synthesized)
ggtggggaagggtgggggtgggcctggttgccccatgttaggaaatcactaccagtcaggtggggctggggctgggtggacaggatcaggattcccttgaaagcccaggcagggtgagca

SEQ ID NO: 455896 - DNA, 120 bp, Artificial Sequence
  ENSG00000156639_19 (sequence is synthesized)
gtcccagtggtcctagtgccgcatcagatccaggtgggtgagggcaggaggcccctgcggaggcagcgtggatctgcccacacataggctactggaatagtttaacccagcaactttcct

SEQ ID NO: 455897 - DNA, 120 bp, Artificial Sequence
  ENSG00000156639_20 (sequence is synthesized)
ttttataaaacaacaaatggttcaactctgtctgcaaattaacagctgaacacctgcaactgcaaatgttttttgatccgacgtactgaaataggaagtcatgctcttcccaccctccac

SEQ ID NO: 455898 - DNA, 120 bp, Artificial Sequence
  ENSG00000156639_21 (sequence is synthesized)
ccaccagagtggaacccgctgcaaaatccccagccttaattcttgcttcaggacccagaccggtgtcttgctctagggcaacccagggcagaggggccaggtctgcccagcgtttaccac

SEQ ID NO: 455899 - DNA, 120 bp, Artificial Sequence
  ENSG00000156639_22 (sequence is synthesized)
tgctgtcaagccacagcccttggccaccatacgggccatcctcagtgaggcagccccccataggcttccgccaagctctggtcccgaagaggctgtgcgagcccttcccggccctcccca

SEQ ID NO: 455900 - DNA, 120 bp, Artificial Sequence
  ENSG00000156639_23 (sequence is synthesized)
gggccccccgccccctcctctgcctgctgcgtggaggcagccatgggaaggagcccaggggagctggcctgggggagcgaagcccatgttcgcttcctgacttagagctggggggggtgg

SEQ ID NO: 455901 - DNA, 120 bp, Artificial Sequence
  ENSG00000156639_24 (sequence is synthesized)
ggggtggggcttgttcccctgcagtatctgttctgtgaagtttgttaaatgtaaggaaagcttaaattcttgtatctttaaaagagaaaatcttatttaacccttttgtgttctagattt

SEQ ID NO: 455902 - DNA, 120 bp, Artificial Sequence
  ENSG00000156639_25 (sequence is synthesized)
acttacacacatagcctagagctcagttttagttttaacattgtgaaaatattaaaagaatcttgtaactttattcttttttctcctgctgaaaaaaaaaattaaaccaatcgtatgaaa

SEQ ID NO: 455903 - DNA, 120 bp, Artificial Sequence
  ENSG00000156639_26 (sequence is synthesized)
agtcacaatatctttcatggtgtgggcctcctaaccttaccctacccgctgggttgcaaaaataggttttcctatatggaggcaaaagagtaagcgatggaaggtttgttctctggctgt

SEQ ID NO: 455904 - DNA, 68 bp, Artificial Sequence
  ENSG00000156639_27 (sequence is synthesized)
ggtgcctgccaccatgcctggctaattagtagaaacaggaccaccttggtctcccaaagtactgggat

SEQ ID NO: 455905 - DNA, 120 bp, Artificial Sequence
  ENSG00000156639_28 (sequence is synthesized)
caccatgggagacgctgggagcgagcgcagcaaagcgcccagcctgccgcctcgctgtccctgcggcttctgggggtccagcaagactatgaatctctgttccaaatgctttgctgagac

SEQ ID NO: 455906 - DNA, 120 bp, Artificial Sequence
  ENSG00000156642_0 (sequence is synthesized)
gaggcctgggcgctgcggcggcaggaggaggacggggaaggacggagccgagccgcggctgcctccctcgctcactccctcgcgcactcgcccgccccctccctccctcccctcccttcc

SEQ ID NO: 455907 - DNA, 120 bp, Artificial Sequence
  ENSG00000156642_1 (sequence is synthesized)
ccggccccggctctggccccggcccattcgctgttgggtcttctgctagggaggatgtcgggttcgtcgctgcccagcgccctggccctctcgctgttgctggtctctggctccctcctc

SEQ ID NO: 455908 - DNA, 120 bp, Artificial Sequence
  ENSG00000156642_2 (sequence is synthesized)
ccagggccaggcgccgctcagaacgctgggtttgtcaagtcgcccatgtcagaaactaagctcacgggggacgcctttgagctgtactgtgacgtggtcgggagccccacgccagagatc

SEQ ID NO: 455909 - DNA, 120 bp, Artificial Sequence
  ENSG00000156642_3 (sequence is synthesized)
cagtggtggtacgcagaagtcaaccgggcagagtctttcagacagctgtgggacggtgctcggaagcgccgtgtcaccgtaaacaccgcctacgggtcaaacggcgtgagtgtgctgaga

SEQ ID NO: 455910 - DNA, 120 bp, Artificial Sequence
  ENSG00000156642_4 (sequence is synthesized)
ataacccggctcaccttggaggactctgggacttacgagtgcagggccagcaacgaccccaagaggaatgacttgaggcaaaacccctccataacatggattcgagcccaggccaccata

SEQ ID NO: 455911 - DNA, 120 bp, Artificial Sequence
  ENSG00000156642_5 (sequence is synthesized)
agcgtccttcagaagccaaggattgtcaccagtgaagaggtcattattcgagacagccctgttctccctgtcaccctgcagtgtaacctcacctccagctctcacacccttacatacagc

SEQ ID NO: 455912 - DNA, 120 bp, Artificial Sequence
  ENSG00000156642_6 (sequence is synthesized)
tactggacaaagaatggggtggaactgagtgccactcgtaagaatgccagcaacatggagtacaggatcaataagccgagagctgaggattcaggcgaataccactgcgtatatcacttt

SEQ ID NO: 455913 - DNA, 120 bp, Artificial Sequence
  ENSG00000156642_7 (sequence is synthesized)
gtcagcgctcctaaagcaaacgccaccattgaagtgaaagccgctcctgacatcactggccataaacggagtgagaacaagaatgaagggcaggatgccactatgtattgcaagtcagtt

SEQ ID NO: 455914 - DNA, 120 bp, Artificial Sequence
  ENSG00000156642_8 (sequence is synthesized)
ggctacccccacccagactggatatggcgcaagaaggagaacgggatgcccatggacattgtcaatacctctggccgcttcttcatcatcaacaaggaaaattacactgagttgaacatt

SEQ ID NO: 455915 - DNA, 120 bp, Artificial Sequence
  ENSG00000156642_9 (sequence is synthesized)
gtgaacctgcagatcacggaagaccctggcgagtatgaatgtaatgccaccaacgccattggctccgcctctgttgtcactgtcctcagggtgcggagccacctggccccactctggcct

SEQ ID NO: 455916 - DNA, 120 bp, Artificial Sequence
  ENSG00000156642_10 (sequence is synthesized)
aattatcatccttgtggtgatcattgttgtgtatgagaagaggaagaggccagatgaggttcctgacgatgatgaaccagctggaccaatgaaaaccaactctaccaacaatcacaaaga

SEQ ID NO: 455917 - DNA, 120 bp, Artificial Sequence
  ENSG00000156642_11 (sequence is synthesized)
taaaaacttgcgccagagaaacacaaattaagtactgcttacaatatctttaggttcctgaaactggtggcaacatgacctgctaaaattttctgcttggacctctttggttctctcccc

SEQ ID NO: 455918 - DNA, 120 bp, Artificial Sequence
  ENSG00000156642_12 (sequence is synthesized)
tttcaagtgagcaacaccacaatgactgtctaaagcatgccttatttagcctctcctgtaagggtgatctagccaggtacattttaaacaatgcttcagtgtagaaggtgtaaactattt

SEQ ID NO: 455919 - DNA, 120 bp, Artificial Sequence
  ENSG00000156642_13 (sequence is synthesized)
tgggcttgatgtgctgtgaatgttgcttttttttttcctttgttaaaatatttaaatagaagtgaaaaggtcctctgaggatcagatcatgcatgcgccattttttacttaatgcagctg

SEQ ID NO: 455920 - DNA, 120 bp, Artificial Sequence
  ENSG00000156642_14 (sequence is synthesized)
ttaaattggcaaagctctaaaatgcactgctgccatctagtgatacacttttgtaaagtacagcaaaacctacagatatatacagtatataaatatatatatatatatatttatattttt

SEQ ID NO: 455921 - DNA, 120 bp, Artificial Sequence
  ENSG00000156642_15 (sequence is synthesized)
gggggtgggagaaatccaaaataaagtaaatgcttgtttcatttttaagctgctgatattcattccttattgtatgttgtcagatgaggaaattgtgcagttctggtacataaagatgag

SEQ ID NO: 455922 - DNA, 120 bp, Artificial Sequence
  ENSG00000156642_16 (sequence is synthesized)
taatataaactgaaatctataattttaagggcttaacctgtgactttaataagctggaacagtccactgaatgggtataatgaattgcagtatatacgtatgattgctttttaagtgatt

SEQ ID NO: 455923 - DNA, 120 bp, Artificial Sequence
  ENSG00000156642_17 (sequence is synthesized)
atcttttcttctgttaagtcatgtaaattcataaatccttttgcactgatgtgttgaaccttattcttgtacattcattcaatcaaggcaaacttttataatttttcttttgtttccaat

SEQ ID NO: 455924 - DNA, 120 bp, Artificial Sequence
  ENSG00000156642_18 (sequence is synthesized)
gaccttgaaatgttatagcatggtaatattctatgcaactatagttatactttttggtttgacactgtattttttcacattgatttactggttgatgatagattttataacctaacggtt

SEQ ID NO: 455925 - DNA, 120 bp, Artificial Sequence
  ENSG00000156642_19 (sequence is synthesized)
ctcatgcggtgcgtaattgtagatgcatgtacttgtgtgttttgtgtaattattgaagtgcaatgatgtataaaaaagtggattcacctgtttttaaaaataaaacattgataaaaggtg

SEQ ID NO: 455926 - DNA, 120 bp, Artificial Sequence
  ENSG00000156642_20 (sequence is synthesized)
ctgctagggaggatgtcgggttcgtcgctgcccagcgccctggccctctcgctgttgctggtctctggctccctcctcccagggccaggcgccgctcagaacgtgtaacctcacctccag

SEQ ID NO: 455927 - DNA, 120 bp, Artificial Sequence
  ENSG00000156642_21 (sequence is synthesized)
gggggcggatgaggagggggcgcagctcttagggagggtggcacaagaccggcgtttgtgttccgggcgacggggatggtggtgtccgtcaggccccccgggagctggggtcgtccagga

SEQ ID NO: 455928 - DNA, 120 bp, Artificial Sequence
  ENSG00000156642_22 (sequence is synthesized)
aggattctactgaggccccgtaggactggtgacatccttaaaaataagggggaaattggggggaagagagtcctgaggaacactaatgggcagagtacagtggcacgatcttggctcact

SEQ ID NO: 455929 - DNA, 120 bp, Artificial Sequence
  ENSG00000156642_23 (sequence is synthesized)
aaatgttttccgcattaagacgcttcttaggagtcttcatgtaagttcatacacgacttccttgtagaattgtgtcaatgaacatgcaattaggctagctgaacttcaggccctgagagt

SEQ ID NO: 455930 - DNA, 120 bp, Artificial Sequence
  ENSG00000156642_24 (sequence is synthesized)
ctatgaagctaaaataaggcccagatgtggggtgggagggggagtaggcagaggcggcaaaggaggacatttcaggcaaagggagcagatgtccaggcaggaaagcacaaggtaacgggg

SEQ ID NO: 455931 - DNA, 120 bp, Artificial Sequence
  ENSG00000156642_25 (sequence is synthesized)
gcacagggggcgcaccacttttcctggaaggaaaaaacagcagatgagagaaggaggttggagccagttaccagtagaggtctatgttcaaagtccagaaggaagaaacagcaggacggg

SEQ ID NO: 455932 - DNA, 120 bp, Artificial Sequence
  ENSG00000156642_26 (sequence is synthesized)
gacaaagagaggaaggaggaaaggaggcacggtgtatgaaactctgtagccaagagcgctaacaaatgaaaggcaggatgggtggaggaaatgtactgtgttccaaagcttcctcttatt

SEQ ID NO: 455933 - DNA, 120 bp, Artificial Sequence
  ENSG00000156642_27 (sequence is synthesized)
tatgggtgctcccgggccacagaggagtaaactgaaggacttcccagctccccactgcccagagagctagcggagtcccgcctcgccccgtcacatggccagaggcgccctcggcacgtg

SEQ ID NO: 455934 - DNA, 120 bp, Artificial Sequence
  ENSG00000156642_28 (sequence is synthesized)
acctacctcgcgctaggccaatcagcctctgcaggggcggggccaccgagtccgcggggcgggagtctccgtcggagccgcctcttctcgcgatccttgcggcggtcgctcctcagccgc

SEQ ID NO: 455935 - DNA, 120 bp, Artificial Sequence
  ENSG00000156642_29 (sequence is synthesized)
ggacatgagatatatttggttctccctttgagagtccaatccagtatctcaggtaaggcccagtagtctagaaaagattcccaaaggattctaatgagcagccagattggagaatcatag

SEQ ID NO: 455936 - DNA, 120 bp, Artificial Sequence
  ENSG00000156642_30 (sequence is synthesized)
atgatcccctcactataatcatagagaaactgaggctgtgaagtagtgatttgttcagggtaacaatgttagtcaataggagagtcacacttagaatgtagtctcttgacctaatccagt

SEQ ID NO: 455937 - DNA, 120 bp, Artificial Sequence
  ENSG00000156642_31 (sequence is synthesized)
aaagtgttaactaaaaccattgaaacaacatacctgccatttaaacttgaatctagaaataataactccatgagtgttttgcacctccagatggaatggcctttaataaatgctgtgagt

SEQ ID NO: 455938 - DNA, 120 bp, Artificial Sequence
  ENSG00000156650_0 (sequence is synthesized)
agtgtcatgtcggattcatgtcaacgacaacaacagggggacacaaaatggcggcggcttagctcctacccctggcggcggcggcagcggtggcggaggcgacggcacctcctccaggcg

SEQ ID NO: 455939 - DNA, 120 bp, Artificial Sequence
  ENSG00000156650_1 (sequence is synthesized)
gcagccgcagtttctcaggcagcggcagcgcccccggcaggcgcggtggcggtggcgcgcagccagatttgcctgaagacctggataatctccatttttgtcatggactgttaaaacgtt

SEQ ID NO: 455940 - DNA, 120 bp, Artificial Sequence
  ENSG00000156650_2 (sequence is synthesized)
tgaagttccaattctggtcttgatttcccagttaaagatgttcttcacccgaatgcagtctttcctgttggtaaaataagacaaccatcaacattgcctgtttgtctgcttttgaatctc

SEQ ID NO: 455941 - DNA, 120 bp, Artificial Sequence
  ENSG00000156650_3 (sequence is synthesized)
ttaaggatggatgtttgtaagatgttgcttaatacagtctggaatactctgtccatttgttgaattgtaaatgactttcaaatgtgcaagttctgttaaatacaaagagaacctctatgg

SEQ ID NO: 455942 - DNA, 120 bp, Artificial Sequence
  ENSG00000156650_4 (sequence is synthesized)
gtaacttttgtgttgaagaagtcatttgtcaaccatggtaaaacttgcaaacccactttatacagagtggattcttgaagctatacagaaaataaaaaagcaaaagcaaaggccctctga

SEQ ID NO: 455943 - DNA, 120 bp, Artificial Sequence
  ENSG00000156650_5 (sequence is synthesized)
agagagaatctgccatgcggtcagtacttcccatgggttggataagaagacagtctctgaacagctggaactcagtgttcaggatggctcagttctcaaagtcaccaacaaaggccttgc

SEQ ID NO: 455944 - DNA, 120 bp, Artificial Sequence
  ENSG00000156650_6 (sequence is synthesized)
ctcctataaggacccagacaaccctgggcgcttttcatcagttaaaccaggcacttttcctaagtcagccaaggggtctagaggatcatgtaatgatctccgcaatgtggattggaataa

SEQ ID NO: 455945 - DNA, 120 bp, Artificial Sequence
  ENSG00000156650_7 (sequence is synthesized)
acttttaaggagagcaattgaaggacttgaggagccgaatggctcctccctgaagaacatagagaagtatctcagaagtcaaagtgatctcacaagcaccaccaacaacccagcctttca

SEQ ID NO: 455946 - DNA, 120 bp, Artificial Sequence
  ENSG00000156650_8 (sequence is synthesized)
gcagcggctgcgactgggggccaaacgcgctgtgaataatgggaggttactgaaagacggaccgcagtacagggtcaattatgggagcttagatggcaaaggggcacctcagtatcccag

SEQ ID NO: 455947 - DNA, 120 bp, Artificial Sequence
  ENSG00000156650_9 (sequence is synthesized)
tgcattcccatcctcgctcccacctgtcagccttctaccccatgagaaagaccagccccgtgctgatcccattccaatatgtagcttctgtttggggactaaagaatcaaatcgtgaaaa

SEQ ID NO: 455948 - DNA, 120 bp, Artificial Sequence
  ENSG00000156650_10 (sequence is synthesized)
gaaaccagaagaactcctctcttgtgcagattgtggcagtagtggacacccatcctgtttgaaattttgtcctgaattaacaacaaatgtaaaggccttaaggtggcagtgcatcgaatg

SEQ ID NO: 455949 - DNA, 120 bp, Artificial Sequence
  ENSG00000156650_11 (sequence is synthesized)
caagacatgcagtgcctgtagagtccaaggcagaaatgctgataatatgcttttttgtgattcctgtgatagaggatttcatatggaatgctgtgacccaccactttccagaatgccaaa

SEQ ID NO: 455950 - DNA, 120 bp, Artificial Sequence
  ENSG00000156650_12 (sequence is synthesized)
agggatgtggatttgccaagtctgcagaccaaagaaaaagggaagaaaactacttcatgagaaagctgcacaaataaaacgacgatatgcaaaacccattggacgaccgaaaaataaatt

SEQ ID NO: 455951 - DNA, 120 bp, Artificial Sequence
  ENSG00000156650_13 (sequence is synthesized)
aaagcaacgattgttgtctgtaaccagtgatgaaggatccatgaatgcattcacaggaagggggtcacctggtaggggtcaaaagactaaagtctgtaccacaccttcatctggtcatgc

SEQ ID NO: 455952 - DNA, 120 bp, Artificial Sequence
  ENSG00000156650_14 (sequence is synthesized)
tgcatctgggaaggactcaagcagcagattggctgttacagaccccactcggcctggtgccaccaccaaaatcaccaccacctccacctacatttctgcctctacacttaaagttaacaa

SEQ ID NO: 455953 - DNA, 120 bp, Artificial Sequence
  ENSG00000156650_15 (sequence is synthesized)
gaaaaccaaagggctcattgatggccttactaagttttttacaccatcacctgatggtcgcagatcacgaggtgaaattatagacttttcaaagcactatcgtccaaggaaaaaggtctc

SEQ ID NO: 455954 - DNA, 120 bp, Artificial Sequence
  ENSG00000156650_16 (sequence is synthesized)
tcagaaacagtcatgcacttctcatgtgttggctacaggtaccacacaaaagctaaaacctccaccttcttcacttccacccccaacccccatctccggtcagagccccagttcacaaaa

SEQ ID NO: 455955 - DNA, 120 bp, Artificial Sequence
  ENSG00000156650_17 (sequence is synthesized)
gtccagcacggccacttcttctccctctccccagagttcttccagccagtgcagtgtgccctccctgagcagccttaccactaacagccagctgaaggcactctttgatgggctttctca

SEQ ID NO: 455956 - DNA, 120 bp, Artificial Sequence
  ENSG00000156650_18 (sequence is synthesized)
tatctataccactcagggacagtctcgcaaaaagggacacccgagttatgcaccacccaaacgtatgcgtcgtaaaactgaattatcttccacggcaaaatctaaagcccacttctttgg

SEQ ID NO: 455957 - DNA, 120 bp, Artificial Sequence
  ENSG00000156650_19 (sequence is synthesized)
caaaagagatattagaagtcggtttatttctcactcctcctcctctagctgggggatggctagaggaagtatttttaaagcaattgctcacttcaagcgaacaactttccttaaaaagca

SEQ ID NO: 455958 - DNA, 120 bp, Artificial Sequence
  ENSG00000156650_20 (sequence is synthesized)
caggatgctaggcagattaaaatataaagtgacccctcagatggggaccccctcaccagggaaggggagcttgacagacggaaggattaaacctgatcaggatgatgatactgaaataaa

SEQ ID NO: 455959 - DNA, 120 bp, Artificial Sequence
  ENSG00000156650_21 (sequence is synthesized)
aataaacatcaaacaagaaagtgcagatgtaaatgtgattggaaacaaggatgtcgttactgaagaggatttggatgtttttaagcaggcccaggaactttcttgggagaaaatagagtg

SEQ ID NO: 455960 - DNA, 120 bp, Artificial Sequence
  ENSG00000156650_22 (sequence is synthesized)
tgagagtggggtggaagactgtggccggtacccttctgtgattgaatttggtaaatatgaaatccaaacctggtactcctcgccttacccacaggaatatgcaagattaccaaagcttta

SEQ ID NO: 455961 - DNA, 120 bp, Artificial Sequence
  ENSG00000156650_23 (sequence is synthesized)
cctgtgtgaattctgtcttaaatatatgaaaagtaaaaatattttgctaagacactccaagaagtgtggatggtttcatcctccagcaaatgaaatttaccgaaggaaagacctttcagt

SEQ ID NO: 455962 - DNA, 120 bp, Artificial Sequence
  ENSG00000156650_24 (sequence is synthesized)
atttgaggttgatgggaatatgagcaaaatttattgccaaaacctttgcttgttagccaagctcttcctggaccacaaaacgttgtattatgatgtcgagccattccttttttatgtcct

SEQ ID NO: 455963 - DNA, 120 bp, Artificial Sequence
  ENSG00000156650_25 (sequence is synthesized)
tacaaaaaatgatgaaaagggctgtcatctggttggatacttctctaaggaaaagctttgccagcagaagtataatgtctcctgcataatgatcatgccccagcaccaaaggcaaggatt

SEQ ID NO: 455964 - DNA, 120 bp, Artificial Sequence
  ENSG00000156650_26 (sequence is synthesized)
tggacggtttctcattgatttcagctatttgctttctagaagagaaggccaagcagggtctcctgaaaagcctctctccgatctgggccgtctctcctacctggcatattggaagagcgt

SEQ ID NO: 455965 - DNA, 120 bp, Artificial Sequence
  ENSG00000156650_27 (sequence is synthesized)
catcttggagtatctctaccaccaccatgagaggcacatcagcatcaaggcaattagcagagcgacgggcatgtgcccacatgacattgccaccactctgcagcacctccacatgatcga

SEQ ID NO: 455966 - DNA, 120 bp, Artificial Sequence
  ENSG00000156650_28 (sequence is synthesized)
caagagagatggcagatttgtcatcattagacgggaaaagttgatattgagccacatggaaaagctgaaaacctgttccagagccaatgaacttgatccagacagtctgaggtggacccc

SEQ ID NO: 455967 - DNA, 120 bp, Artificial Sequence
  ENSG00000156650_29 (sequence is synthesized)
aattttaatttctaatgctgcagtgtctgaagaagagcgagaagctgagaaagaggctgagcggctaatggaacaagctagctgctgggagaaggaggaacaagaaatcctgtcaactag

SEQ ID NO: 455968 - DNA, 120 bp, Artificial Sequence
  ENSG00000156650_30 (sequence is synthesized)
agctaacagtaggcaatcacctgcaaaagtacaatcgaaaaataaatatttgcattccccggagagccggccagtcacaggggagcgagggcagctgctggagctgtctaaagagagcag

SEQ ID NO: 455969 - DNA, 120 bp, Artificial Sequence
  ENSG00000156650_31 (sequence is synthesized)
tgtctaaagagagcagtgaagaagaagaggaggaggaggacgaggaggaggaagaagaggaggaagaagaggaagaggatgaagaggaggaagaagaggaagaagaagaagaagaagaag

SEQ ID NO: 455970 - DNA, 120 bp, Artificial Sequence
  ENSG00000156650_32 (sequence is synthesized)
tcccccaagattgacgaaaccacagtcagttgccataaagagaaagaggccttttgtactaaagaagaaaaggggtcgtaaacgcaggaggatcaacagcagtgtaacaacagagaccat

SEQ ID NO: 455971 - DNA, 120 bp, Artificial Sequence
  ENSG00000156650_33 (sequence is synthesized)
ttcagagacgacagaagtactgaatgagccctttgacaactcagatgaagagaggccaatgccacagctggagcctacctgtgagattgaagtggaggaagatggcaggaagccagtcct

SEQ ID NO: 455972 - DNA, 120 bp, Artificial Sequence
  ENSG00000156650_34 (sequence is synthesized)
agacaaacagaggaagaggaaggaaaagacaatcattgcttcaagaatgctgacccttgtagaaacaatatgaatgatgattcaagtaacttgaaagaaggcagtaaagacaatcccgaa

SEQ ID NO: 455973 - DNA, 120 bp, Artificial Sequence
  ENSG00000156650_35 (sequence is synthesized)
cctctaaagtgcaaacaagtgtggccaaaaggaacaaagcgcggtctatctaagtggaggcaaaacaaagagaggaagaccggatttaaactgaatttgtacaccccgccagaaacaccc

SEQ ID NO: 455974 - DNA, 120 bp, Artificial Sequence
  ENSG00000156650_36 (sequence is synthesized)
atggagcctgacgagcaggtaacagtggaagaacagaaggagacttcagaaggaaaaaccagccccagtcccatcaggattgaggaggaggtcaaggaaactggggaagccctgttgcct

SEQ ID NO: 455975 - DNA, 120 bp, Artificial Sequence
  ENSG00000156650_37 (sequence is synthesized)
caagaggaaaacagaagggaagaaacatgtgcccctgtaagtccaaacacatcaccaggtgaaaaaccagaagatgatctcatcaaacctgaggaagaggaagaggaggaggaggaggaa

SEQ ID NO: 455976 - DNA, 120 bp, Artificial Sequence
  ENSG00000156650_38 (sequence is synthesized)
gaggaagaagaggaagaagaggaaggggaagaagaagaaggaggaggaaatgtagaaaaagatccagatggtgctaaaagccaagaaaaagaggaaccagaaatctccacggaaaaagaa

SEQ ID NO: 455977 - DNA, 120 bp, Artificial Sequence
  ENSG00000156650_39 (sequence is synthesized)
gactctgcacgtttggatgatcacgaagaggaggaggaagaggatgaagagccatcccacaacgaggaccatgatgccgatgacgaggatgacagccacatggagtctgccgaagtggag

SEQ ID NO: 455978 - DNA, 120 bp, Artificial Sequence
  ENSG00000156650_40 (sequence is synthesized)
aaggaagagctgcccagagaaagcttcaaagaagtactggaaaaccaggagacttttttagaccttaatgtgcagcctggtcactcgaacccagaggtcttaatggactgtggcgtcgac

SEQ ID NO: 455979 - DNA, 120 bp, Artificial Sequence
  ENSG00000156650_41 (sequence is synthesized)
ctgacagcttcttgtaacagtgagcccaaggagcttgctggggaccctgaagctgtacccgaatctgacgaggagccacccccaggagaacaggcacagaagcaggaccaaaagaacagc

SEQ ID NO: 455980 - DNA, 120 bp, Artificial Sequence
  ENSG00000156650_42 (sequence is synthesized)
aaggaagtcgatacagagttcaaagagggaaacccagcaaccatggaaatcgactctgagactgtccaggccgttcagtctttgacccaggagagcagcgaacaggacgacacctttcag

SEQ ID NO: 455981 - DNA, 120 bp, Artificial Sequence
  ENSG00000156650_43 (sequence is synthesized)
gattgtgccgagactcaagaggcctgtagaagcctacagaactacacccgtgcagaccaaagtccacagattgccaccacgctcgacgattgccaacagtcggaccacagtagcccagtt

SEQ ID NO: 455982 - DNA, 120 bp, Artificial Sequence
  ENSG00000156650_44 (sequence is synthesized)
tcatccgtccactcccatcctggccagtccgtacgttctgtcaacagcccaagtgtccctgctctggaaaacagctacgcccaaatcagcccagatcaaagtgccatctcagtgccatct

SEQ ID NO: 455983 - DNA, 120 bp, Artificial Sequence
  ENSG00000156650_45 (sequence is synthesized)
ctgcagaacatggaaaccagtcccatgatggatgtcccatcagtttcagatcattcacagcaagtcgtagacagtggatttagtgacctgggcagtatcgagagcacaactgagaactac

SEQ ID NO: 455984 - DNA, 120 bp, Artificial Sequence
  ENSG00000156650_46 (sequence is synthesized)
gaaaacccaagcagctacgattctactatgggaggcagcatctgtggaaacggctcttcacagaacagctgctcctatagcaacctcacctccagcagtctgacacagagcagctgtgct

SEQ ID NO: 455985 - DNA, 120 bp, Artificial Sequence
  ENSG00000156650_47 (sequence is synthesized)
gtcacccagcagatgtccaacatcagcgggagctgcagcatgctgcagcaaaccagcatcagctcccctccgacctgcagcgtcaagtctcctcaaggctgtgtggtggagaggcctccg

SEQ ID NO: 455986 - DNA, 120 bp, Artificial Sequence
  ENSG00000156650_48 (sequence is synthesized)
agcagcagccagcagctggctcagtgcagcatggctgctaacttcaccccacccatgcagctggctgaaatccccgagacgagcaacgccaacattggcttatacgagcgaatgggtcag

SEQ ID NO: 455987 - DNA, 120 bp, Artificial Sequence
  ENSG00000156650_49 (sequence is synthesized)
agtgattttggggctgggcattacccgcagccgtcagccaccttcagccttgccaaactgcagcagttaactaatacacttattgatcattcattgccttacagccattccgctgctgtg

SEQ ID NO: 455988 - DNA, 120 bp, Artificial Sequence
  ENSG00000156650_50 (sequence is synthesized)
acttcctatgcaaacagtgcctctttgtccacaccattaagtaacacagggcttgttcaactttctcagtctccacactccgtccctgggggaccccaagcacaagctaccatgacccca

SEQ ID NO: 455989 - DNA, 120 bp, Artificial Sequence
  ENSG00000156650_51 (sequence is synthesized)
ccccccaacctgactcctcctccaatgaatctgccgccgcctcttttgcaacggaacatggctgcatcaaatattggcatctctcacagccaaagactgcaaacccagattgccagcaag

SEQ ID NO: 455990 - DNA, 120 bp, Artificial Sequence
  ENSG00000156650_52 (sequence is synthesized)
ggccacatctccatgagaaccaagtcagcgtctctgtcaccagccgctgccacccatcagtcacaaatctatgggcgctcccagactgtagccatgcagggtcctgcacggactttaacg

SEQ ID NO: 455991 - DNA, 120 bp, Artificial Sequence
  ENSG00000156650_53 (sequence is synthesized)
atgcaaagaggcatgaacatgagtgtgaacctgatgccagcgccagcctacaatgtcaactctgtgaacatgaacatgaacactctcaacgccatgaatgggtacagcatgtcccagcca

SEQ ID NO: 455992 - DNA, 120 bp, Artificial Sequence
  ENSG00000156650_54 (sequence is synthesized)
atgatgaacagtggctaccacagcaatcatggctatatgaatcaaacgccccaataccctatgcagatgcagatgggcatgatgggcacccagccatatgcccagcagccaatgcagacc

SEQ ID NO: 455993 - DNA, 120 bp, Artificial Sequence
  ENSG00000156650_55 (sequence is synthesized)
ccaccccacggtaacatgatgtacacggcccccggacatcacggctacatgaacacaggcatgtccaaacagtctctcaatggctcctacatgagaaggtagacaacgtgggcagtccac

SEQ ID NO: 455994 - DNA, 120 bp, Artificial Sequence
  ENSG00000156650_56 (sequence is synthesized)
aaaacctacggggcatcactattggattgatctgcacaaatacctttgaagagtacgatttcaaaaccagcaattggtgtgaatgcaaaaacatttgttggcaccatttatttaaaaaaa

SEQ ID NO: 455995 - DNA, 120 bp, Artificial Sequence
  ENSG00000156650_57 (sequence is synthesized)
tttctttttttcctttttcttttttttggtaccttcatttctgttacttttatataaaattctctgcaaaggaaggcctctctttggactacaatttggaggcagccacttgttgtgcct

SEQ ID NO: 455996 - DNA, 120 bp, Artificial Sequence
  ENSG00000156650_58 (sequence is synthesized)
tctttggactacaatttggaggcagccacttgttgtgcctgcttctgttaaacaatgtggatatcaagcccccccaaattatctgttttaatattgaacctagagctttttttttccctt

SEQ ID NO: 455997 - DNA, 120 bp, Artificial Sequence
  ENSG00000156650_59 (sequence is synthesized)
ccctgtccactccatgtaaatgcctttagcatttcagttattgtatattttgtttaaggtgacacttcagcatgccgctaatgtctttgttagtgacagtgcattttgtagtactgtaca

SEQ ID NO: 455998 - DNA, 120 bp, Artificial Sequence
  ENSG00000156650_60 (sequence is synthesized)
agtgttgtgctaacagtaagccatttcttaagttttttgccttgattagggtgccctaatttgagggttttaaaaaaaactatatttttgttaattataaaactgtaaagagctataaaa

SEQ ID NO: 455999 - DNA, 120 bp, Artificial Sequence
  ENSG00000156650_61 (sequence is synthesized)
gctattcccatttggttagtcaaaagggttttattgctaaatgtttggtgtaaagttgagacccttttccattttggtgacagatttctttggggaaaaaaggcagctttctgttttata

SEQ ID NO: 456000 - DNA, 120 bp, Artificial Sequence
  ENSG00000156650_62 (sequence is synthesized)
aatgcagacttctgtttattgaatgaagcatatctcagtgtttatctgtcaggttttgaaacatttcatatatgtccaaatacttggcaggatttaaaaaaaaatagtgaatttggtgta

SEQ ID NO: 456001 - DNA, 120 bp, Artificial Sequence
  ENSG00000156650_63 (sequence is synthesized)
aagttgctattttatggaaatgcctctaactttacattttcattccatctgtagatttttctatctttataaaatattggagttattttttaaggaaaaatagaaaagtagcttgtgaat

SEQ ID NO: 456002 - DNA, 120 bp, Artificial Sequence
  ENSG00000156650_64 (sequence is synthesized)
agctcaaactaagcttacaaatcgcatgtaaaaaagcaaaaaagttatttgtgtctgtttatattgcttccttttttgtagcctttgtacctgtacagggtgacagtaagggccaagcag

SEQ ID NO: 456003 - DNA, 120 bp, Artificial Sequence
  ENSG00000156650_65 (sequence is synthesized)
gagaggcgtaatccttgtataaaataggatccagcgacactcttgtatttatctgttctctttttagtcagtcacttcaaaaaaacaaaaaacaaacaaaaaaaagctgtacattttaac

SEQ ID NO: 456004 - DNA, 120 bp, Artificial Sequence
  ENSG00000156650_66 (sequence is synthesized)
ataaaataaattatgatgagccatttttagcctcttgtgtcctgtcatattatgattgatagagaatgaccaatggaactgtatcatgtgtcacgcctcagaacacatacacattttggg

SEQ ID NO: 456005 - DNA, 120 bp, Artificial Sequence
  ENSG00000156650_67 (sequence is synthesized)
aaaataaattatttagtgtaaattggagttatgggattttctgatttgttttgactttgggggaggggttggcaataaataagagtaatatctaataaaaccatcacatataccaaatac

SEQ ID NO: 456006 - DNA, 120 bp, Artificial Sequence
  ENSG00000156650_68 (sequence is synthesized)
ctatttaataaattaatttataatggattttaatgcttttcatgaaagtttattttatgcgagtgcataccttctgtatgccaatcattgtctttaaaataaagtgaaattgtttttttc

SEQ ID NO: 456007 - DNA, 120 bp, Artificial Sequence
  ENSG00000156650_69 (sequence is synthesized)
agaacgcggctgagctcgccagctcctcgcaggcagggagagagcatcctggggggcagcttccccctccagcccgcgtctgacatccccactcccacacaaggatgccgccgccgtgcc

SEQ ID NO: 456008 - DNA, 120 bp, Artificial Sequence
  ENSG00000156650_70 (sequence is synthesized)
ctgtccgcagtcgctgaatgtcactgctccctcttcctcccgatcagggtagacacagctcccgaggcgtcccccaccccaaaactgccgcgatcgcccgaaggcgcaaagcctgggcga

SEQ ID NO: 456009 - DNA, 120 bp, Artificial Sequence
  ENSG00000156650_71 (sequence is synthesized)
aggacgaagtttggggcccacagcgacgggagtggggacgcgttggcgaggaccgcacctcagtcccagccctggcgggcacactccccgccccaaacggcccaggcgtccccatcctcc

SEQ ID NO: 456010 - DNA, 120 bp, Artificial Sequence
  ENSG00000156650_72 (sequence is synthesized)
gagccgaggaggaggaggcggaggaggagaaggaggcggcggcggtgggtcccgggcggggggagcgcggcgctgcggacccgggcggctggcaaaggacgaggcggaggctgaggaagg

SEQ ID NO: 456011 - DNA, 120 bp, Artificial Sequence
  ENSG00000156650_73 (sequence is synthesized)
gccccaatgggctgcagagtggttagtgagtgggtgacagacagacccgtaggccaacgggtggccttaagtgtctttggtctcctccaatggagcagcggcggggcgggaccgcgactc

SEQ ID NO: 456012 - DNA, 120 bp, Artificial Sequence
  ENSG00000156650_74 (sequence is synthesized)
gccttctaccccatgagaaagaccaggtaagcgaaggagtaatgttcgtgcattctcactactgtccttttgtcttttacggtttcacttaagttttatgtggacaaaagttctgaataa

SEQ ID NO: 456013 - DNA, 120 bp, Artificial Sequence
  ENSG00000156650_75 (sequence is synthesized)
agtttgataaaattgaatgttttgccttagagcaggcttttgtattttaaaatgtatatattgtactgcattgtgtggaggacttcctcactggttggccaagaatttaatggaagagtc

SEQ ID NO: 456014 - DNA, 120 bp, Artificial Sequence
  ENSG00000156650_76 (sequence is synthesized)
gtcatatatatttcagaaatctacgaaaaggccatcgtatatttttctctttattactattttcaaagaagaatctacagacttcttattttactattattatttttttgagacagaatc

SEQ ID NO: 456015 - DNA, 66 bp, Artificial Sequence
  ENSG00000156650_77 (sequence is synthesized)
tgatgagctagacttcttattttaatggtgataatctatgcttttttttttgagatggagttttgc

SEQ ID NO: 456016 - DNA, 71 bp, Artificial Sequence
  ENSG00000156650_78 (sequence is synthesized)
tcctgacttcaggtgatccacccgcttgataatctatgcatgtaagaagttattttaatacgtcacctaaa

SEQ ID NO: 456017 - DNA, 120 bp, Artificial Sequence
  ENSG00000156650_79 (sequence is synthesized)
atctatgcatgtaagaagttattttaatacgtcacctaaatccctcatttcaataaaaagtcattttttattgtccacttctctgtgttgtaggtgaatgtttattttgtctcatacagt

SEQ ID NO: 456018 - DNA, 120 bp, Artificial Sequence
  ENSG00000156650_80 (sequence is synthesized)
atctttttaaaatactctgatttcttgggccttatgttatttctatagtatttataaatatatggcagaattctccttacattactgctaccactttaagtttttggttgagtaagattt

SEQ ID NO: 456019 - DNA, 120 bp, Artificial Sequence
  ENSG00000156650_81 (sequence is synthesized)
gtctttgtttcaaagctacagtatttacttcccaaactaaacacaaagtagagcagcagaaagttatttatagttcatgtctagttttggggtttattctctgtcttttgggtgagcaga

SEQ ID NO: 456020 - DNA, 120 bp, Artificial Sequence
  ENSG00000156650_82 (sequence is synthesized)
tatattgatatcagttaattttattaatacatgttataaaacattaatcattgttgatagaaaggtggttttggctgggcagggtggctcctgcctgtagtcccagcaccttgggaggcc

SEQ ID NO: 456021 - DNA, 120 bp, Artificial Sequence
  ENSG00000156650_83 (sequence is synthesized)
taattagagcaaggtagacatcattagcttatagcatttcttttctaccccataagtggctcttaattactgagacagccgccagctttcattcattaccttcaagtggatttaaagggc

SEQ ID NO: 456022 - DNA, 120 bp, Artificial Sequence
  ENSG00000156650_84 (sequence is synthesized)
ttctttttttttttttttttccatttttaaagttcctttgccaaggaaccttcacagtaatgctgtaaaatgcgttcaaaagcttaagatgctgggggattttctgagcatacatgcaat

SEQ ID NO: 456023 - DNA, 120 bp, Artificial Sequence
  ENSG00000156650_85 (sequence is synthesized)
caataggttgttttaaggagtttgttttgttttgtcttaatttgtaggagcaatattctgggattggattgtaaattaatttctatgaaagaggtgaaaatggagctagtggagctgatg

SEQ ID NO: 456024 - DNA, 120 bp, Artificial Sequence
  ENSG00000156650_86 (sequence is synthesized)
ggagttgcagcagttgacttgaaagacattcttttattagtcctaaaacaaagcttcagatcaacctgctagttaaatgtaacaagcaatatagactctgagtcaacagaggtccttctc

SEQ ID NO: 456025 - DNA, 120 bp, Artificial Sequence
  ENSG00000156650_87 (sequence is synthesized)
tttttattaagacccagctgtcaaagggtcattaggtccttcctgtggaaaacaacttgcccattaatgttgggggtggtccctcgacaggatttctgagtaagtgcctgacatttcgtt

SEQ ID NO: 456026 - DNA, 120 bp, Artificial Sequence
  ENSG00000156650_88 (sequence is synthesized)
tttgaaagaatctaaagctgtgggagacttagatgttgagacttagcaggagtaatgtcttcaaccatagcttttagtctttgttaaatatgtcacaatatgtgtttggaatgctgctgc

SEQ ID NO: 456027 - DNA, 120 bp, Artificial Sequence
  ENSG00000156650_89 (sequence is synthesized)
tagctgcgtgaattgacttagagtgccactgtcaaagattcaggagcgtaaacttcacggagatcaaatcactataactgggaagaggctacattcctaaagcgaatgcacttctctgtt

SEQ ID NO: 456028 - DNA, 120 bp, Artificial Sequence
  ENSG00000156650_90 (sequence is synthesized)
gtgatgtttttaccttgtcactactcatattatttctagtggctcctgttctaagctctgggaatgccacagtgaggaatgcccatttattttttctgccctaggctatttgctttctag

SEQ ID NO: 456029 - DNA, 120 bp, Artificial Sequence
  ENSG00000156650_91 (sequence is synthesized)
agtttatgtgtacccagtcccgctgatcatatatcataatcgtttatctcacagtcatgattatgtttacttttcaggtttgttagtgcggtgacaggaaaccagggacaggccagcctc

SEQ ID NO: 456030 - DNA, 120 bp, Artificial Sequence
  ENSG00000156650_92 (sequence is synthesized)
ctagtctagtagtcactgccacctgctggtctgcaggagtagagtaactgaggtttatgggaacaaaaaggggccccagaaagcacttaaaccaccctccaagacctagaggccaggaga

SEQ ID NO: 456031 - DNA, 120 bp, Artificial Sequence
  ENSG00000156650_93 (sequence is synthesized)
ctccaagacctagaggccaggagacttctctaaggtcatatgactcattagagatggaagcagaaccaaatgcgtgctcaagactctaagcctgggttgggcgcagtggctcacgcctgt

SEQ ID NO: 456032 - DNA, 120 bp, Artificial Sequence
  ENSG00000156650_94 (sequence is synthesized)
agactccaagcccagtgctcttcatgctgtttctttctcttgttcttggcacagaattgttagaaagcattttaggcccttaattttgatggtgatattttgcatttgtggccaactgcg

SEQ ID NO: 456033 - DNA, 120 bp, Artificial Sequence
  ENSG00000156650_95 (sequence is synthesized)
cattactgaatctcctcagatcttagtagcccagtgatgtctctagatagaccatatcatctccaatggtacagaaagtaaagaattgactttgtttttaggtaactgctcacccagatc

SEQ ID NO: 456034 - DNA, 120 bp, Artificial Sequence
  ENSG00000156650_96 (sequence is synthesized)
tgatatctttgtcttcagtatctatctgggacatagaggagagccaagactgatagagatatcacaatacaagctaaggctccgccccaaggccatctgatgtggcatctgttagggaac

SEQ ID NO: 456035 - DNA, 120 bp, Artificial Sequence
  ENSG00000156650_97 (sequence is synthesized)
ttgctgttctaactcccagctcagcgctcttctaggcctggcagtcttctggaagggtctccatggggaggtggtagaaaggagcatcccacaaagtagacttcaggcttaagaataatg

SEQ ID NO: 456036 - DNA, 120 bp, Artificial Sequence
  ENSG00000156650_98 (sequence is synthesized)
tttccatttcttaggaggagtgtgtattcatgtgttgtatatataataaaagaaatttgttctaaaactatcaaaaaccagaatcatccaaggcatgatctgaactggactcaacctgaa

SEQ ID NO: 456037 - DNA, 120 bp, Artificial Sequence
  ENSG00000156650_99 (sequence is synthesized)
gaaaaccagttctctaccttggcttccctcatattagggaaaattctcatggattaaagagggcaggcagactggggggaataataaccgtaaatgtttaattacagaatatgattaact

SEQ ID NO: 456038 - DNA, 120 bp, Artificial Sequence
  ENSG00000156650_100 (sequence is synthesized)
ggctacgtgtgtgcttcagtgagcattcagagcgttaacaaaagtaagacacaagaattcttggaggccggacacagtggctcacgcctataatccccacactttgggaagctgaggcag

SEQ ID NO: 456039 - DNA, 120 bp, Artificial Sequence
  ENSG00000156650_101 (sequence is synthesized)
gcctgggcaacaaagcaagactctgtctctataaaaaataaataagtatttttaaaataataataataataattgaatacagtttacctgaaggttagcttttaaccaagcatattgaac

SEQ ID NO: 456040 - DNA, 120 bp, Artificial Sequence
  ENSG00000156650_102 (sequence is synthesized)
tgaaggttagcttttaaccaagcatattgaacccttctttgcagtgtattttcaataatttggggggcaacaattacatcttagcagcaaatctacctgctattcctctatttgaatttt

SEQ ID NO: 456041 - DNA, 120 bp, Artificial Sequence
  ENSG00000156650_103 (sequence is synthesized)
gtgtcattaaaaacttttttgctgggcgaaaaacattttataattacaattatggacagtcatttgtgccaacctttagtgcaaacagaaaaaatatttttaggccaggtgcggtggctc

SEQ ID NO: 456042 - DNA, 120 bp, Artificial Sequence
  ENSG00000156650_104 (sequence is synthesized)
ctttgtcctgaggtctgacagctcagaggtatacaggttctttaagcatttttttcatccctcccaccttccctatacttctgagtttagcacaggttgtgaatagaggagtataaaagc

SEQ ID NO: 456043 - DNA, 120 bp, Artificial Sequence
  ENSG00000156650_105 (sequence is synthesized)
atagaaaaaaatacatatatatatgtgtatatatatacatatatataaaataaaggctctaattcagacccagggatgaaaagaccatctctctctccaaaccattcccctattagaata

SEQ ID NO: 456044 - DNA, 120 bp, Artificial Sequence
  ENSG00000156650_106 (sequence is synthesized)
agattagattattaaggtcaaaagtttagaacactttccatattattcagcacagtgttaagagcttaacaaattttatatttttgaggatgatagtgactccaaagtcctacaacagga

SEQ ID NO: 456045 - DNA, 120 bp, Artificial Sequence
  ENSG00000156650_107 (sequence is synthesized)
agccatcaccattttcttggccattagttgatattttgaacacgagcatctgaatgatcttatagctgattgtgtctgatggaatgtggattttcttctgtttattgtgtaaatcagcta

SEQ ID NO: 456046 - DNA, 120 bp, Artificial Sequence
  ENSG00000156650_108 (sequence is synthesized)
agctcagccttttcccctcattttgcaatatattaaacatttaaaaataactttgcctttttattataaaatccataatttacattgtggaagatttaaaaagtacagatagacaaaaaa

SEQ ID NO: 456047 - DNA, 120 bp, Artificial Sequence
  ENSG00000156650_109 (sequence is synthesized)
taatccgcctccaggtaactcgctaatttccagtgttaaggtgttttcatttttatagagtatggctactttctttctaaagctttaaatacacatgatgtcaaactgcaaccaggatct

SEQ ID NO: 456048 - DNA, 120 bp, Artificial Sequence
  ENSG00000156650_110 (sequence is synthesized)
tggtgcactttccttatattgtattaatgttaatccagtaacaaaagaatttttggccttttacagttggtttcagtctcaattagtctctaatatgttatattacaggataatatgctt

SEQ ID NO: 456049 - DNA, 120 bp, Artificial Sequence
  ENSG00000156650_111 (sequence is synthesized)
agataaagaagaaaaatgctgaagatttgggtggtttatggagccgtatgattttgtcattgctgccacctactgtatgtggttgatgtttgtttaaacttaggaagttcatgaaggtga

SEQ ID NO: 456050 - DNA, 120 bp, Artificial Sequence
  ENSG00000156650_112 (sequence is synthesized)
gtctgaagaagagcgagaagctgagaaagaggtaatgattgtctttatcatcctaagttgtgtaacttcaatcttgtagcattcttaagctaagaaagtcattaagatcgttgtcaaaag

SEQ ID NO: 456051 - DNA, 120 bp, Artificial Sequence
  ENSG00000156650_113 (sequence is synthesized)
cttggttatgtagagatagcatgtgaaatgatatggcactaatttatcctaactgaggttgcatggtaagacatgataattttattgaattgagtatgaaaaatgaaacatttatcattg

SEQ ID NO: 456052 - DNA, 120 bp, Artificial Sequence
  ENSG00000156650_114 (sequence is synthesized)
attacaaagcagcatttttcactactgagagcatgtaatcagatcaaattcggtgctgagctccaaggctgcagtgtcaattgattctttgtgtttatgaacttgcttaaagtgctcctt

SEQ ID NO: 456053 - DNA, 120 bp, Artificial Sequence
  ENSG00000156650_115 (sequence is synthesized)
gccagtgagcatgtaatgtagtgataaaggactcaaatcaattcgctgcatcattaatactgttaaatatcccatgaaacccaatcttctttgatttgttatcctaactgatgcaaaagg

SEQ ID NO: 456054 - DNA, 120 bp, Artificial Sequence
  ENSG00000156650_116 (sequence is synthesized)
ttcctgagatgatgcagctggaatgtgcttggctggctggctgtcctgatcagaaccgacttagagacactttgccattgatcctcagaggctctggctgtgtaactgccctctcactgg

SEQ ID NO: 456055 - DNA, 120 bp, Artificial Sequence
  ENSG00000156650_117 (sequence is synthesized)
agattgacgaaaccacagtcagttgccataaagagaaaggtaggtgtctgtttagattttctgtgagtcgcgttcaatcaaatcttatttgtcattgcagacattctgtctattagtatt

SEQ ID NO: 456056 - DNA, 120 bp, Artificial Sequence
  ENSG00000156650_118 (sequence is synthesized)
gtttttccaactaatactctcccaccttttattatttatttccattcgtagtgacactaggacccccagatgccttcatagcattgcttatggctttgtagtcccgcatgagtagccact

SEQ ID NO: 456057 - DNA, 120 bp, Artificial Sequence
  ENSG00000156650_119 (sequence is synthesized)
gccatgcttctgccatgctctcccccatgtcacctctgcagccacagcgctgttcagttgtgtgctgtcagtgcttccaacagggggtgtttcagctcttccctctgctccattgctttc

SEQ ID NO: 456058 - DNA, 120 bp, Artificial Sequence
  ENSG00000156650_120 (sequence is synthesized)
tcatgacaaagttcatcctgcttccgtctcagcaaagcctgatctgtgactctgtgatgtgtgcttttggatgtgagtgtgtctgtgtgtgtatccaccttagggagaaaacggatttca

SEQ ID NO: 456059 - DNA, 120 bp, Artificial Sequence
  ENSG00000156650_121 (sequence is synthesized)
taatttcattgaacaaattggcccattacatttgctaccctttatcaaacaaaaaccgaaactgtgtcatttggacaaagtggtagaatttattatctcaaaagtgataatgggaatgct

SEQ ID NO: 456060 - DNA, 120 bp, Artificial Sequence
  ENSG00000156650_122 (sequence is synthesized)
ataactagacatcgataaaacttctaatcttggttgaaaaatatgatttcactttgtattgctcttactttccctcatatatttattaaagctgtaaaaagatgacagtgataaattcaa

SEQ ID NO: 456061 - DNA, 120 bp, Artificial Sequence
  ENSG00000156650_123 (sequence is synthesized)
ataaaaatttgagtatagcagggaaaggatactgctggatctatgagcagtgcttagatgtaaaagcttatttataaagctttaaaaaaaatccctatttgcccagtatgctaatttggt

SEQ ID NO: 456062 - DNA, 120 bp, Artificial Sequence
  ENSG00000156650_124 (sequence is synthesized)
cagctttttgaaatctagtactcctaattgttgactatgtgctgatttgtgtttagaaggtacaaagtatacttaattttggcactgaaattcagactgccctttaaaacatctccatgt

SEQ ID NO: 456063 - DNA, 120 bp, Artificial Sequence
  ENSG00000156650_125 (sequence is synthesized)
tttggaatgtttatctaaccatattaagcaaccatttagactgatgaagaatccctacttcatcacattaacatttttgtcttccccaaaatccctgtctacactagatatattcaccat

SEQ ID NO: 456064 - DNA, 120 bp, Artificial Sequence
  ENSG00000156650_126 (sequence is synthesized)
gaatttatgatctcctcagctctttgtaaattctactttctttggcaggagaaatgagctttgttcagcagctccagccaatgtctggcaggtgctcactcttccagggaattgagcagc

SEQ ID NO: 456065 - DNA, 120 bp, Artificial Sequence
  ENSG00000156650_127 (sequence is synthesized)
tgtacatatctcctcaatacacaaccacctgtgtttccatccacttcttggcagtgtggataatccttttggtgagaccctagcagatgttgggactccctcccatctgggtagatggcc

SEQ ID NO: 456066 - DNA, 120 bp, Artificial Sequence
  ENSG00000156650_128 (sequence is synthesized)
acccctgaagaactctgctgttcacaggaaccccttgtggccatatgtctgtcattgtgggtttcttgaagacattttgtatttccagaattgatttcgtagcaggcctttgcctctata

SEQ ID NO: 456067 - DNA, 120 bp, Artificial Sequence
  ENSG00000156650_129 (sequence is synthesized)
tagttgcattgtttaattatgtatctgttgtcagtttcagggattccgttaagctgagtcagtttcaccttgaggagaccatgcctttctcacaggttactgtctgtctgcagggctttt

SEQ ID NO: 456068 - DNA, 120 bp, Artificial Sequence
  ENSG00000156650_130 (sequence is synthesized)
cacgtttctcctttatgctcttccctccacttgcacacttctgttgtctgctgcattttctcctctgtgacccattgtggtgtgcattggtgctcattcctaggtgcttgaaacaagcct

SEQ ID NO: 456069 - DNA, 120 bp, Artificial Sequence
  ENSG00000156650_131 (sequence is synthesized)
accttgtacagcaaacgtgatgtcctctttctctggaatatagtttcacttctggattttctttttctgaattgttcaggctgaaacttattattctgccttacagttctctttatttct

SEQ ID NO: 456070 - DNA, 120 bp, Artificial Sequence
  ENSG00000156650_132 (sequence is synthesized)
ggcctgcagtgtcttgccatcctattaaataaagggaaggttgtaggtttctcacatggaccaggctccttctcagacaggtctgggcccactagtttttccccaagactgatcagagaa

SEQ ID NO: 456071 - DNA, 120 bp, Artificial Sequence
  ENSG00000156650_133 (sequence is synthesized)
catgggaaactccagttgtgtcttatgatttttttaaagctttctctttttctatcagctctttcggtaagcttggaggaagaagggtattgttgctgggaagattaggtgatatattag

SEQ ID NO: 456072 - DNA, 120 bp, Artificial Sequence
  ENSG00000156650_134 (sequence is synthesized)
ttcttactaaaagctaggcacttttgacatttcaagctggttagttctttgttgtaggggctatgctatacagcgtaggatgtttagcagcatctctggcctctgctaattggatgccag

SEQ ID NO: 456073 - DNA, 120 bp, Artificial Sequence
  ENSG00000156650_135 (sequence is synthesized)
tagcaccaccaccccttccagttgtgccaaccaaaaatgtctccagacgtagccaaacatcccctgggggcgcagaatcacccccagtaagaaccagtgggctagaaggaaggctgaatg

SEQ ID NO: 456074 - DNA, 120 bp, Artificial Sequence
  ENSG00000156650_136 (sequence is synthesized)
cacgttgcctgaccttcctgttggtatgctatcctgccagccccagccagctgaggtgacagagctgctcacagttgaagcttagctaatgtcacaagttcagctttcctattggctcct

SEQ ID NO: 456075 - DNA, 120 bp, Artificial Sequence
  ENSG00000156650_137 (sequence is synthesized)
tccttgatgccttagatcttttcttccaaccaaaacattgtttctcaaagctcaaaacacattgttggccttaagtaattatttcataaatcagcatgagtcagcactgggattgaagct

SEQ ID NO: 456076 - DNA, 120 bp, Artificial Sequence
  ENSG00000156650_138 (sequence is synthesized)
ctcataaatccatggaacgtcttctcatgggcaagggaatcagtcttgttaggatggtaagaatgggctgttctttcagggcaggtgcttttggaccatccagagatgagaggggagaca

SEQ ID NO: 456077 - DNA, 120 bp, Artificial Sequence
  ENSG00000156650_139 (sequence is synthesized)
tcagaagcatgtatgtaaaattcacttatacgaataaggagttggatttgataagtaccgaggtccctattctagaatctgagttaatagagtataacatttgggcaacttttctcctag

SEQ ID NO: 456078 - DNA, 120 bp, Artificial Sequence
  ENSG00000156650_140 (sequence is synthesized)
cagtttcttacaaaacttataaaataaaggaggaataatcacacattacgattttctggccttccctttctttattcctcttacacttttcacaaccaatcagaattttcttcagcactg

SEQ ID NO: 456079 - DNA, 120 bp, Artificial Sequence
  ENSG00000156650_141 (sequence is synthesized)
ttgtaatatactaccatttccaaaagggccatactctcaaatacatgtaaacttcctttaattaaagggagaattgtatcctctgtgcccattgcccatatttgattgtgttgctatgta

SEQ ID NO: 456080 - DNA, 120 bp, Artificial Sequence
  ENSG00000156650_142 (sequence is synthesized)
tgggacctaggttccatccgagggaaatagttatatgaaatctaaaaataatttgtgcaagatgagaacccgtatggtccacaggagacctgagaatggtcaagttcattgtttcagagc

SEQ ID NO: 456081 - DNA, 120 bp, Artificial Sequence
  ENSG00000156650_143 (sequence is synthesized)
tctggttagcaaatatccatttcccttaagaaaagtgctagggaaattcttcttgaatctgctgtgttttctattttcaaagagtaactacatttgatcaaagaaattggcatctgtgcc

SEQ ID NO: 456082 - DNA, 120 bp, Artificial Sequence
  ENSG00000156650_144 (sequence is synthesized)
tagcctcctgtctatagccatcagtatcacagcttgattcttttattttgaagagaagtagactgtaatcatagtgcttattgtaggttgaaattcatatcactttctctgtaagtattc

SEQ ID NO: 456083 - DNA, 120 bp, Artificial Sequence
  ENSG00000156650_145 (sequence is synthesized)
ccaacatagatattttatcttttccaattatatttaagatgatgcttgggataaaaccaaaatggaaacctctttgctaatccacacttctgaggaatcagaataatacagttcatttat

SEQ ID NO: 456084 - DNA, 120 bp, Artificial Sequence
  ENSG00000156650_146 (sequence is synthesized)
tttagttttatgtgaaacccttttgaaacaacataaagtttaacttacttgagaagtattttgatctgtttatatttccttaatacagatttattcggttcagatagagaggacatgcct

SEQ ID NO: 456085 - DNA, 120 bp, Artificial Sequence
  ENSG00000156650_147 (sequence is synthesized)
gatcatttttagctcagaataaattacaagtaaaaattactcctttactagtggtttggcccttctttggtagcttaaagagaaattttaactaccttaaatgtaccctaatttaagaga

SEQ ID NO: 456086 - DNA, 120 bp, Artificial Sequence
  ENSG00000156650_148 (sequence is synthesized)
aaatgtggaattctgatttgccagtgacagctgttttctggttaaagctgtacttgcttaatagagtgttttaatctctcagtttaggatttggaaataaaatgatgtactttctgaaat

SEQ ID NO: 456087 - DNA, 120 bp, Artificial Sequence
  ENSG00000156650_149 (sequence is synthesized)
aaggaaaagacaatcattgcttcaagaatgctgacccttgtagaagtaagtagaggaatgataaaaaccttacccttgagaatgtctgtatctgactgggtgccaaagagcaggcctctg

SEQ ID NO: 456088 - DNA, 120 bp, Artificial Sequence
  ENSG00000156650_150 (sequence is synthesized)
gcgtgatgcccagaggcacctgcgaagtggtgctgatgcacctggagcaagtgcccatctgccctttcccatccttacaagcttctctcccttcttcctggaattggattttatgttaaa

SEQ ID NO: 456089 - DNA, 120 bp, Artificial Sequence
  ENSG00000156650_151 (sequence is synthesized)
caacttctaaggccagaacattcctctaggtgggttcatcttacttaccagaaattggcttatccccaaaaactttgaagtctgttgacaagaaacacattacatttctttgattctaat

SEQ ID NO: 456090 - DNA, 120 bp, Artificial Sequence
  ENSG00000156650_152 (sequence is synthesized)
atgtacttttttttttcacatttagttatttctgaaatcaaggtatatattattatcagtgtgagcattgaatggaatcgtttcttttttcctggaaaacaaatattagtaaatcaatag

SEQ ID NO: 456091 - DNA, 120 bp, Artificial Sequence
  ENSG00000156650_153 (sequence is synthesized)
aaacaaatattagtaaatcaatagtacattttataatcagtagtgtcgtagtatatactactataaagattcatctaaactaagctgggcatgatggcttacacctgtaatcccagcact

SEQ ID NO: 456092 - DNA, 120 bp, Artificial Sequence
  ENSG00000156650_154 (sequence is synthesized)
acttgagcccaggagtttgagaccaacctaggcaacatggcaaagcccctactctaaaaaaaatacaaaaattaatcagatgtagtggtgtgcacctgtagtctcagcacttttggagac

SEQ ID NO: 456093 - DNA, 80 bp, Artificial Sequence
  ENSG00000156650_155 (sequence is synthesized)
gcaggacatggcaaaaccccatctctacaaaagatacaaaaattagtcagcagtggtggtgtgtgcctatagtcccagct

SEQ ID NO: 456094 - DNA, 120 bp, Artificial Sequence
  ENSG00000156650_156 (sequence is synthesized)
tcactacagagagttgtctgctctcactacaaacagaaccagccaaacccaccacgatttgcttagacataatgggcaagaactttcagaacatttggaacttttcagaacattgggtgg

SEQ ID NO: 456095 - DNA, 120 bp, Artificial Sequence
  ENSG00000156650_157 (sequence is synthesized)
tcttagagactagccagtacagaaatctcttgagagggtgttactgtgttccttctggacacctccagtttctgatttggctgtcctgtttgtcagcagtacatccttcatattgagccc

SEQ ID NO: 456096 - DNA, 120 bp, Artificial Sequence
  ENSG00000156650_158 (sequence is synthesized)
gcccaaaacctccattcattctggtgttcttcagtgcagtcacactgcttcgtgatggcttttcttcagtgcagtcatttgcttcatgtgacttttcttttttctttttctttttctttt

SEQ ID NO: 456097 - DNA, 120 bp, Artificial Sequence
  ENSG00000156650_159 (sequence is synthesized)
aaaaaaatcaaccaatcaattcctatttgtcacataggtcttagctatttctcttgttctcacttcactttcatacagaagcagtgaaactttgacctttttctaatgctgactaaacct

SEQ ID NO: 456098 - DNA, 120 bp, Artificial Sequence
  ENSG00000156650_160 (sequence is synthesized)
gctatttgtctctctattaaaactgtattgttatttaaggcagttatatggtaatagcataggctttaaattttaaaagaaaaagtaaggaatagagaaaaaagcgtgagtatgttagta

SEQ ID NO: 456099 - DNA, 120 bp, Artificial Sequence
  ENSG00000156650_161 (sequence is synthesized)
ctgacatatggatattatatatgcttatataatactatacatatttatgattaagcttttattttataccagcattggtaattcagtgtggagatgtctgcattataggtaaattccatg

SEQ ID NO: 456100 - DNA, 120 bp, Artificial Sequence
  ENSG00000156650_162 (sequence is synthesized)
tagagaattctaagctttcaagctgagtacaaccccatctttaaaaattaatagcaaaaaataagtaaaaattaagctttttctgttaatcttcaaattttttccccagactacccaaac

SEQ ID NO: 456101 - DNA, 120 bp, Artificial Sequence
  ENSG00000156650_163 (sequence is synthesized)
ttttttctccaaagtcttgttttaaaattcatgactatttctctagttatagtaatctctaaaaaaaaaaaacaaaaacaaaaatcgacagaacaccatagctaattcttgtttgggaag

SEQ ID NO: 456102 - DNA, 120 bp, Artificial Sequence
  ENSG00000156650_164 (sequence is synthesized)
ttcctctgccttgagttagttacttgatcattctgagcccctgtttcctcattagaaaattagagataatggcagcaccatcctcttgggttttatgggaatgaaatgtgagggcacaag

SEQ ID NO: 456103 - DNA, 120 bp, Artificial Sequence
  ENSG00000156650_165 (sequence is synthesized)
taaacaccctggcacaaggtctgcagaactatggtaagtgtactacaaatgtcagcagtgttatggtttagcatgtttgatattgttatccttgattgctgcacgtaatttaaaatctta

SEQ ID NO: 456104 - DNA, 120 bp, Artificial Sequence
  ENSG00000156650_166 (sequence is synthesized)
tcatcacttatgacagctgcttgatggttgggtagaagaaatgtttcatgctgaggaatgacagtgttgtgtaatgattcttattccttatatgaaggtttaacgtgataggccctttgt

SEQ ID NO: 456105 - DNA, 120 bp, Artificial Sequence
  ENSG00000156650_167 (sequence is synthesized)
ggttcagcagctttcaggtgctgactagaagggagagccttggaaataagacatttcaaaccctgcttgaaaaatgcattctgacagtctttttgatgggctttacagattcattaaaat

SEQ ID NO: 456106 - DNA, 120 bp, Artificial Sequence
  ENSG00000156650_168 (sequence is synthesized)
tcttttacctggccatggcatcatggatagtgacaaaagggcatggaaacattatctgtacgttcagtttaatacatttcagccccacgatatccctgttttatgctggtgaggtagtgc

SEQ ID NO: 456107 - DNA, 120 bp, Artificial Sequence
  ENSG00000156650_169 (sequence is synthesized)
ctcactcatcagttctgactctgtcgttatcttttgggttttctcacgaggctcattctgaatgaattattcttttgtgtaactgcctgatcaatttagtggtgttcacttgtctagggt

SEQ ID NO: 456108 - DNA, 120 bp, Artificial Sequence
  ENSG00000156650_170 (sequence is synthesized)
ttaccctttgtggcttttaaggtggtactttaaaaacacccttccctgtttttatttctttaggatctatttgtctgggtgcctagacagattaaagatgtacttaaatgtgggaagaaa

SEQ ID NO: 456109 - DNA, 120 bp, Artificial Sequence
  ENSG00000156650_171 (sequence is synthesized)
agttcccttcatatatttccttacctctggtgatacacttacttgagttgataagaagttcgagatcattatcttctagatcataacttcaaggcctccttcacagggtataaaggtgta

SEQ ID NO: 456110 - DNA, 120 bp, Artificial Sequence
  ENSG00000156650_172 (sequence is synthesized)
attctaaacaggtagatcttagattttctgatgtaatcaatctccctttgtctttcccggattgaagacctgccagaggggaggttgatctcctttatgtttgaggtcactgaaaatttc

SEQ ID NO: 456111 - DNA, 120 bp, Artificial Sequence
  ENSG00000156650_173 (sequence is synthesized)
tttcccctggtgtttcttacttttcgctcagactttttcagggtaaagccaggggtgtttaggtacagtgttatgttttctctgttcaaaaatatcctcttgttttctcttttaacaaat

SEQ ID NO: 456112 - DNA, 120 bp, Artificial Sequence
  ENSG00000156650_174 (sequence is synthesized)
ggagaataatgacttgaggatactgtccagagggtttatgtggctggtgtggttttgtgagccagtcttcaagtggagagagccagaggctttggggccaaggtatgggtcatggcagaa

SEQ ID NO: 456113 - DNA, 120 bp, Artificial Sequence
  ENSG00000156650_175 (sequence is synthesized)
attcaagccctggggtcaccatgtctctttgttggggataaaggatgcctcagagtgcttctctggactctgcgatgggatccggctctagtgttgaagttcacttaatcttcccttgag

SEQ ID NO: 456114 - DNA, 120 bp, Artificial Sequence
  ENSG00000156650_176 (sequence is synthesized)
tgtgctgtgccagcctggatttggctgctttagtcaaaaaaactattgttcctaacgcagggaaatgctttgtacatatttattcatctgataaatcagaagaatagactttgttgtttt

SEQ ID NO: 456115 - DNA, 120 bp, Artificial Sequence
  ENSG00000156650_177 (sequence is synthesized)
ttcctctttaaattgaagggtcaaaataaaatatagttcattttagggagtttgggggttcttgtggttctaaggctctgttttgacaccttggtaattctaaggaaaaaagaaaacaat

SEQ ID NO: 456116 - DNA, 120 bp, Artificial Sequence
  ENSG00000156650_178 (sequence is synthesized)
aggccagcatacctcaacagtgtcctcaaataatggcgggagccctgttgtcacagttcagcatttcaagtgggaattacagattagttgggactcctagttgaccttatggaaatggct

SEQ ID NO: 456117 - DNA, 120 bp, Artificial Sequence
  ENSG00000156650_179 (sequence is synthesized)
gccttctcactctcagaagagtctattggttctgggattgaattgagaccgttcataatgttcaaagggatcccaaaatgtaagttgtttatgtgaaaaaatacccatagcagcataaaa

SEQ ID NO: 456118 - DNA, 120 bp, Artificial Sequence
  ENSG00000156650_180 (sequence is synthesized)
aaaggacgaggcggaggctgaggaaggcagcggggagacccaggctgcagcaacaaagggcagcgagcgattggccgggctgcaggcgaggttagccggggacccgggtggccggaggca

SEQ ID NO: 456119 - DNA, 120 bp, Artificial Sequence
  ENSG00000156650_181 (sequence is synthesized)
tgaagtactttatttactttcatgatccaggaagctgatggccgttacaggaaacagtaaaatataaaactttatttaacctgcattgttgtttttatcaatagataatgggctttctat

SEQ ID NO: 456120 - DNA, 120 bp, Artificial Sequence
  ENSG00000156650_182 (sequence is synthesized)
ttatatttacataggttagaacatcttcctcaagtgaaaaatgtactgctgctcagtgattgtactctaggaaattgagactagatctctcggcagcaggcctcatgcacaaagccatta

SEQ ID NO: 456121 - DNA, 120 bp, Artificial Sequence
  ENSG00000156650_183 (sequence is synthesized)
ccctgaatgaaccgacagaattacattccattttgtggtgctcatgctcattagcaccaaaagaggcaattatttgtgattaaagctaaaggaagtattatttgaaaggattttcagctc

SEQ ID NO: 456122 - DNA, 120 bp, Artificial Sequence
  ENSG00000156650_184 (sequence is synthesized)
tctgaaattttgcctataatcttgtacagtacaaagcagaaaaggtatatttccatttagaaaaataattttctaggcagcttatcctgggccttgctagtagaaataactcttacctta

SEQ ID NO: 456123 - DNA, 120 bp, Artificial Sequence
  ENSG00000156650_185 (sequence is synthesized)
ttttgttaatttcccttttctattatggaaattaatacagtgtttgtatctagaggtttcccaagaaatatttatcttatatgcactcatatcttctgaaccttctcagttaaaaccggc

SEQ ID NO: 456124 - DNA, 120 bp, Artificial Sequence
  ENSG00000156650_186 (sequence is synthesized)
ataatatataaaagtatgcacatggataatgtttttaaaaatggtagttttttttttcctccttgtttatattatactggatgtgtaaatgttgtgttaggggtacatttggagaatcaa

SEQ ID NO: 456125 - DNA, 120 bp, Artificial Sequence
  ENSG00000156650_187 (sequence is synthesized)
acatttggagaatcaattcaaaatatctagataacatgatgaccagataacccatgataatagtcatttctcgtcatgtaaaaatctgtcactggccgggcgtggtggcttatgcctgta

SEQ ID NO: 456126 - DNA, 120 bp, Artificial Sequence
  ENSG00000156650_188 (sequence is synthesized)
gagggtgtgaggaagactagtgagggttgggtgggaggagaagctgaaggtgtagaagcaggtgcagagggagagttagggagggatgcaatttgagagaagtggaaggcggaccgaggg

SEQ ID NO: 456127 - DNA, 120 bp, Artificial Sequence
  ENSG00000156650_189 (sequence is synthesized)
tataatttgaataagtgacatgtgtttttgaaaagctcaggttcttgttcagagctcattttaaaagatgaaaacaaaaaacatggtgcctagtaagtgtgtaaaggacctcagcactgt

SEQ ID NO: 456128 - DNA, 120 bp, Artificial Sequence
  ENSG00000156650_190 (sequence is synthesized)
gtgccgccttgatgacactctaattgctgccttgtggaccacttagcgtctttgattttctcagtgtttagcttatttccgttttccctttaagtggtgtcaacatgaaggtttcagttt

SEQ ID NO: 456129 - DNA, 120 bp, Artificial Sequence
  ENSG00000156650_191 (sequence is synthesized)
agtgtagcatttaagagagaattctcctttctccttgttgccttccctctgtggtcaacagtatctcagtgagttaggacgctggcatttggacagtcaagctgataaaatgactggttt

SEQ ID NO: 456130 - DNA, 120 bp, Artificial Sequence
  ENSG00000156650_192 (sequence is synthesized)
tacacttttgtctcttattctctgtgctatggttttaagttctaaagcaatctcacctttagaaagcctaagtatcagccgggctcagtggcttacgcgtgtaatcccaggactttggga

SEQ ID NO: 456131 - DNA, 66 bp, Artificial Sequence
  ENSG00000156650_193 (sequence is synthesized)
gggctcagtggcttacgcgtgtaatcccaggactttgggaggccggggtgggcggatcatgaggtc

SEQ ID NO: 456132 - DNA, 120 bp, Artificial Sequence
  ENSG00000156650_194 (sequence is synthesized)
acaaaacaaaacaaaacaaaacaagaacaaagaaagcctaagtatctctggctgttagagtggggaaaacaatcgacatattgaggggacggatatagcttgtcctttttactggttcag

SEQ ID NO: 456133 - DNA, 120 bp, Artificial Sequence
  ENSG00000156650_195 (sequence is synthesized)
agcagttcactcacattcttctgctcaaaggcttctaagaaacaataactcctttgcaataaaggaaaactgagtttggagatgtttaccaggtaatgaccttaacttttctgaggtacc

SEQ ID NO: 456134 - DNA, 120 bp, Artificial Sequence
  ENSG00000156650_196 (sequence is synthesized)
taggaaatagttaaatgtaccaggatggtacataaatagagacaataattatgagacttttagatagaaggtccaaactctcttatttatgatatttttttatattaggtgatacatgaa

SEQ ID NO: 456135 - DNA, 120 bp, Artificial Sequence
  ENSG00000156650_197 (sequence is synthesized)
ttttaatgaatctgctcttgcacaatgtaaatgggatgctttatagaagtgccattttaatgaagtttcaaaagatagaatatatgtgaaggtacttgcaaactatagctatcctaaatt

SEQ ID NO: 456136 - DNA, 120 bp, Artificial Sequence
  ENSG00000156650_198 (sequence is synthesized)
taagaatcaacccaaagatcataaacaaaaataagtaacagcattcatggaaaactgtctcagtgttttaatccacatatttggtaaagctttaaaatgaaaaagaagaaagttaatttg

SEQ ID NO: 456137 - DNA, 120 bp, Artificial Sequence
  ENSG00000156650_199 (sequence is synthesized)
cacattacaaattcaaaagatgatagagaattaacactgaataaaacaataaataggaaatctatatgattaataaataaaacaccttaccttttatgtaggtttgtcaagatcattctt

SEQ ID NO: 456138 - DNA, 120 bp, Artificial Sequence
  ENSG00000156650_200 (sequence is synthesized)
ctccagaaacttaaaaagaatagtggttgcgtccttgctgttagaaaatggtgtttctttcattgtctgtggatttaaacataggcttaacggtgcccaccttcctcgtgctgcactgac

SEQ ID NO: 456139 - DNA, 120 bp, Artificial Sequence
  ENSG00000156650_201 (sequence is synthesized)
catcccactcctgggtcttgtgttggctgctgagtagcagccatgtgtagagttggtggtgattcttgaagtttgaatttctgcctctcttcctgccagggtacccaaaattttactcag

SEQ ID NO: 456140 - DNA, 120 bp, Artificial Sequence
  ENSG00000156650_202 (sequence is synthesized)
aactagctcaacttttctcatagtttcttctatagcatggcagcagctgctgttatttcctactattctggaatactaatatgccttggcagtatagtgaaacaaaaattaatctaaaaa

SEQ ID NO: 456141 - DNA, 120 bp, Artificial Sequence
  ENSG00000156650_203 (sequence is synthesized)
gactccatctcaaaaaaaaaaagactagatgaaactaaaccatattctcatgtgtcagctggaatctagaggactctggccctttggggctattcttgaaccacattctagaggttatta

SEQ ID NO: 456142 - DNA, 120 bp, Artificial Sequence
  ENSG00000156650_204 (sequence is synthesized)
gaactacagttcaaggatagccagagaagggctggaatgacctggaaaggttcagtgcaaattgttacatgcatatgactttccaagcacataatagatggctgtaaacagaaaggaaag

SEQ ID NO: 456143 - DNA, 120 bp, Artificial Sequence
  ENSG00000156650_205 (sequence is synthesized)
aaggattagttattttattcatagcttagaatttagctgtagtaacatgttaagctgcacggaggggaagaaggatcactactatgttggatctcaaaaaactccgaaaggtggaaatgg

SEQ ID NO: 456144 - DNA, 120 bp, Artificial Sequence
  ENSG00000156650_206 (sequence is synthesized)
ttctggacaaagcaaggaatggtatcaaggatgaattctcttaacccagagtacatttctttttagagagagtgacccatttgtctaactttgcaaaacagacgaattacttgaaccttt

SEQ ID NO: 456145 - DNA, 120 bp, Artificial Sequence
  ENSG00000156650_207 (sequence is synthesized)
gccattgatgtgcacatccagtgagggacaattcatcttcttagaaaaactgacacacattgcttcatcctcattttttagaggctccatagacaactacaaatgtgcaaaagttgggag

SEQ ID NO: 456146 - DNA, 120 bp, Artificial Sequence
  ENSG00000156650_208 (sequence is synthesized)
tacatctttttcacaaagaaatcttcaattctgccctgtagggttttttccacaaccatctcctgtgatctttcaaattggttcattaaagatctgggtgttctgaagtaattctttggt

SEQ ID NO: 456147 - DNA, 120 bp, Artificial Sequence
  ENSG00000156650_209 (sequence is synthesized)
gtggtctgtaccatttgtggtcagtcttatttgtggtttatatttggccagagcatccacgacctcaaaagccttttccagatctctgtgtaggttttggcaacttctttgtactctgaa

SEQ ID NO: 456148 - DNA, 120 bp, Artificial Sequence
  ENSG00000156650_210 (sequence is synthesized)
taaaaaaatactgccctgatgccacatcccatgaaagttgcaaattcttctttaactgtaagagctgtttcttaccatgttctacccagtcttcctcctggtttcaaactgttcgtaata

SEQ ID NO: 456149 - DNA, 120 bp, Artificial Sequence
  ENSG00000156650_211 (sequence is synthesized)
ttttggtctaacctttgtttggaggctttagggtttcttgttgttgtctttttgtttcattttattttgttttcctggtttgaaatgcagattatttctctagctttttacattgacttt

SEQ ID NO: 456150 - DNA, 120 bp, Artificial Sequence
  ENSG00000156650_212 (sequence is synthesized)
ttattcataggagaaatatatgtgtgcacatctacccacacagatactgttttagtttcactgggacatttgcccaaaggcagaagacagattgctgttgcagagttgtagattattatt

SEQ ID NO: 456151 - DNA, 120 bp, Artificial Sequence
  ENSG00000156650_213 (sequence is synthesized)
atatttagcaagatagccagctaaatcctaacttactccactgggtgactccctgggatgttattttctctatctctgaagttatttgagcaaggaaagcatttcttttatgctgtctat

SEQ ID NO: 456152 - DNA, 120 bp, Artificial Sequence
  ENSG00000156650_214 (sequence is synthesized)
attctgttttatttggttcatatatttccttggattctttatgcatattttatggcactgactttcaagaataaagatgtagttgagaggcatgtcagagtcgatggtttgttgttaatt

SEQ ID NO: 456153 - DNA, 120 bp, Artificial Sequence
  ENSG00000156650_215 (sequence is synthesized)
gatagtttgattgattaatatagtaggatttttctgcttgatcctgacctaacccattggctttctttagtggacagttttacaaggacagtggcaggtgcagggaattgcccacttcag

SEQ ID NO: 456154 - DNA, 82 bp, Artificial Sequence
  ENSG00000156650_216 (sequence is synthesized)
gttcaagactagcctgggcaacatagtaagacccctgtctctacaaaaaaatcaaagaattagccaggcttggtgaagcaca

SEQ ID NO: 456155 - DNA, 120 bp, Artificial Sequence
  ENSG00000156650_217 (sequence is synthesized)
atcacttgagcatgggaggtagaggctgcagtgagccttgattgtactccagcctgggtgatagagtgagatcctgtcccaaagataaagaaaggaagaaagaaaaggtggttttggcca

SEQ ID NO: 456156 - DNA, 73 bp, Artificial Sequence
  ENSG00000156650_218 (sequence is synthesized)
tacaaaaaaattaggcaggcgtggtggccttaaacccgggaggcagacgttgcagtgagctgagattgtgcca

SEQ ID NO: 456157 - DNA, 88 bp, Artificial Sequence
  ENSG00000156650_219 (sequence is synthesized)
tggtggttttattcatggtttactgcagccttgaccttttgggatcaagtgttcctcccaagtaactgggaatacaggtgtatgccac

SEQ ID NO: 456158 - DNA, 120 bp, Artificial Sequence
  ENSG00000156650_220 (sequence is synthesized)
ggtttactgcagccttgaccttttgggatcaagtgttcctcccaagtaactgggaatacaggtgtatgccaccatgcccagctaagtttttaaattttttgtagagatggggttttgcca

SEQ ID NO: 456159 - DNA, 120 bp, Artificial Sequence
  ENSG00000156650_221 (sequence is synthesized)
ttgaaacatgcatgttaggaaaagttatgctcctcttgtttggataccatgaacccttgaaatggaacctgttttcctcaatgctttagatcagatcagcccatggaaaggcaaaccacc

SEQ ID NO: 456160 - DNA, 120 bp, Artificial Sequence
  ENSG00000156650_222 (sequence is synthesized)
aggcaaaccacctggtcctacaaattggataggaccaggtggtttgcctttccatgggctgatctaaaaggctggagtgcagtggtgtcacctcggctcactgcaacctccacctcccgg

SEQ ID NO: 456161 - DNA, 90 bp, Artificial Sequence
  ENSG00000156650_223 (sequence is synthesized)
acatgtaaagatgaggtttctcgatgttgcccaggctggtctcgatctcctgggctcaagacatccttccgcctcggcctcccaaggtgc

SEQ ID NO: 456162 - DNA, 85 bp, Artificial Sequence
  ENSG00000156650_224 (sequence is synthesized)
catttatttgttaactatatttttattttgttagtcttctgccacatttatttgatccttaggtggttgttgtgtttgtgtaacc

SEQ ID NO: 456163 - DNA, 120 bp, Artificial Sequence
  ENSG00000156650_225 (sequence is synthesized)
atttatttgatccttaggtggttgttgtgtttgtgtaaccaacctctagttctctgtggcagaatgtgggcataaagaaagaagtaaagttatgaaattttcttcttaataacatttgtt

SEQ ID NO: 456164 - DNA, 120 bp, Artificial Sequence
  ENSG00000156650_226 (sequence is synthesized)
taaaagaaaatacaaaaagccacttaaatcctaattcatatgtctgacacagccaaatcagggacctctgtttttaattaaatacatatgtatatatatatttttgttttgtttttttgt

SEQ ID NO: 456165 - DNA, 120 bp, Artificial Sequence
  ENSG00000156650_227 (sequence is synthesized)
gcgtgagccactgtgcccagccttaattaaatattttttataaaagcttatactgtgaagaaattccttaagggactatagagccatttcttgatggatttggatatctttgtttttaaa

SEQ ID NO: 456166 - DNA, 120 bp, Artificial Sequence
  ENSG00000156650_228 (sequence is synthesized)
gatttggatatctttgtttttaaaaatatgtacactaccctaaggtatgttaaggttttataatgaacaggtacgtggactaattcaggtagctttaggcaatttaatagtatgtttcaa

SEQ ID NO: 456167 - DNA, 120 bp, Artificial Sequence
  ENSG00000156650_229 (sequence is synthesized)
taattttgtgatccaggggatactttttacttgtgatggaagagtcagtacaaattttccacagtatcttctgatccttcgctttaaccttgcccgtcatttcttgccaaccttatcata

SEQ ID NO: 456168 - DNA, 120 bp, Artificial Sequence
  ENSG00000156650_230 (sequence is synthesized)
tttttttcaggcagcatctgtacagaagtatttttagtctaaaggaaaattcatgtctgaaagtgtctaggattgagagcagagtaatttattgcttagcaggcaattgttactgctctt

SEQ ID NO: 456169 - DNA, 120 bp, Artificial Sequence
  ENSG00000156650_231 (sequence is synthesized)
tttatgatgctgatctttaaattgtttagttagcatcatgctataatgaggaaagctgagaaatgttttctagaatttttacttgatgaaatttggagactaattctattaagtaatcat

SEQ ID NO: 456170 - DNA, 89 bp, Artificial Sequence
  ENSG00000156650_232 (sequence is synthesized)
gtaatcccagctactcaggaagctgaggaaggagaatcgcttgagcctgggaagcggaggttgcatcgagcccatgagcaagtctctgt

SEQ ID NO: 456171 - DNA, 120 bp, Artificial Sequence
  ENSG00000156650_233 (sequence is synthesized)
cagagcaagtctctgtctcaaaaaaaaaaagtacaaagaaacaaaaggtggcaagaaattcgttttttaaaacatcgcatgttatgagggtcagagtagtgaagtgccaccagctgcagc

SEQ ID NO: 456172 - DNA, 120 bp, Artificial Sequence
  ENSG00000156650_234 (sequence is synthesized)
cttctgagaggaagtgctgctgctggttcaaatggaattctgtcctacatccaccaagcacgccagtggagtggacatgacacacacttttcttctaagctgtacagtttaacatattac

SEQ ID NO: 456173 - DNA, 120 bp, Artificial Sequence
  ENSG00000156650_235 (sequence is synthesized)
aagtgagttcatttaactagtaaggaatcagaaatgtatctttgttcattttgatcgttttgatggattctgttttctcttacgtgagtagactttgtggacttccaaatggctcctggc

SEQ ID NO: 456174 - DNA, 120 bp, Artificial Sequence
  ENSG00000156650_236 (sequence is synthesized)
ataagtgccagttcctgctattagttccttgagggtctcatgagtcagagaggagagggaaaaacccactgcaagccatgcaggggtcccttcggatagtggccttgtgcagtctgcagt

SEQ ID NO: 456175 - DNA, 120 bp, Artificial Sequence
  ENSG00000156650_237 (sequence is synthesized)
gtcggtgcacgtcatccctgcacacccgcctgctgtgctctggctggagcttgggtttgcagttgtcttctttacagcacccagggaagcatggcctcctggcaggtgttggccactccc

SEQ ID NO: 456176 - DNA, 120 bp, Artificial Sequence
  ENSG00000156650_238 (sequence is synthesized)
tgctttctcctggcctttgcaagcacagtgcaagggtgtttgctgaaaaagaccactgggctttcagtgtacccacacccatcagggctgatcaccctgctgccacctccccaggactct

SEQ ID NO: 456177 - DNA, 120 bp, Artificial Sequence
  ENSG00000156650_239 (sequence is synthesized)
tccgtgactatcagtcatagcctgaagtctgtgtccaagggagtgtctcaggagacagccacttaacatggtaggagtagcaggtgctaaaaggtttatgcctaaatgctccccatggac

SEQ ID NO: 456178 - DNA, 120 bp, Artificial Sequence
  ENSG00000156650_240 (sequence is synthesized)
cccaagttgcctgctggtttgagtggcctaacccatttaggctcaggccctgacagggtgtgtgtgcaccacttcggggtgtgaaagcatgaacagctgcggaaagcgtgggttttctga

SEQ ID NO: 456179 - DNA, 120 bp, Artificial Sequence
  ENSG00000156650_241 (sequence is synthesized)
tgctggctgctgctgccttccggattagggactgtagcggggagacagaacaaaggaacacatgtgcttctgggtaagctggcccatcatagtgggggacataaggtatgggggggcaca

SEQ ID NO: 456180 - DNA, 120 bp, Artificial Sequence
  ENSG00000156650_242 (sequence is synthesized)
taccaccttggtatgaacactttggttgtacagaattctttcagcaaggctgagaggagtggggctttctgtccttgactgctggattcaaataagcaccagtagaggacctggggactt

SEQ ID NO: 456181 - DNA, 120 bp, Artificial Sequence
  ENSG00000156650_243 (sequence is synthesized)
tcacactcactgcaggggactttcaattgtgggatctcatggacaaaagggaatggttctatatccacggctctatggttctcacccccccaggagtacaaagctgggaccccccagcct

SEQ ID NO: 456182 - DNA, 120 bp, Artificial Sequence
  ENSG00000156650_244 (sequence is synthesized)
cctgggtacgtttctcagcatgtgccaagcactttggaggcaggtgacggatgtgccaattatctgtattctgaggtgtgggctcccttcatactctggcaacacagagacgtagagagc

SEQ ID NO: 456183 - DNA, 120 bp, Artificial Sequence
  ENSG00000156650_245 (sequence is synthesized)
tcttcttcgtgttgacaggacacaatatgggctggcttcggcacagtggccatcactgtgttagcattcctgacacactgctattgaaagccccaatctgctgccaaattacatgtagac

SEQ ID NO: 456184 - DNA, 120 bp, Artificial Sequence
  ENSG00000156650_246 (sequence is synthesized)
agtggtttcactgtaaaatgttgcggtgcttgtttgcattcagtcaaatactttgcacttaaacatgggttaaagagacaaataagtcaaaagaccttagcaaaacctgaagttaaattt

SEQ ID NO: 456185 - DNA, 120 bp, Artificial Sequence
  ENSG00000156650_247 (sequence is synthesized)
acgcctattcttcataatggcattcagattaaagccatcaaaatgcaaaatgctgtgattatacccttcgagggttcaggctggattcttgttttgtatttctgcattactgtatttgca

SEQ ID NO: 456186 - DNA, 120 bp, Artificial Sequence
  ENSG00000156671_0 (sequence is synthesized)
ggactccgacggcggctcggacgccgactcggaggtgggtccggggagcccgactcggaccgcggaggcagcggaggaggaaatggcaggtcctaatcaactctgcattcgccgctggac

SEQ ID NO: 456187 - DNA, 120 bp, Artificial Sequence
  ENSG00000156671_1 (sequence is synthesized)
taccaagcatgtagctgtgtggctgaaggatgaaggcttttttgaatatgtggacattttatgcaataagcaccgacttgatggaatcacattgctaacattgactgaatatgatctccg

SEQ ID NO: 456188 - DNA, 120 bp, Artificial Sequence
  ENSG00000156671_2 (sequence is synthesized)
gtctcctcctctggaaatcaaagtcttaggggacattaaaaggttaatgctctcagtccgaaaattgcagaaaatacatattgatgttttagaagagatgggctacaacagtgacagtcc

SEQ ID NO: 456189 - DNA, 120 bp, Artificial Sequence
  ENSG00000156671_3 (sequence is synthesized)
catgggttccatgacccctttcatcagtgctcttcagagtacagactggctctgtaatggggagctttcccatgactgtgacggacccataactgacttgaattctgatcagtaccagta

SEQ ID NO: 456190 - DNA, 120 bp, Artificial Sequence
  ENSG00000156671_4 (sequence is synthesized)
catgaatggtaaaaacaaacattctgttcgaagattggacccagaatactggaagactatactgagttgtatatatgtttttatagtatttggatttacatctttcattatggttatagt

SEQ ID NO: 456191 - DNA, 120 bp, Artificial Sequence
  ENSG00000156671_5 (sequence is synthesized)
ccatgagcgagtgcctgacatgcagacctatccaccactcccagatatattcttagacagcgttcctagaatcccatgggcctttgccatgacggaagtatgtggcatgattctgtgcta

SEQ ID NO: 456192 - DNA, 120 bp, Artificial Sequence
  ENSG00000156671_6 (sequence is synthesized)
tatttggctcctggttcttcttcttcacaagcacaggtcaatacttctgcgaaggctctgtagtctgatgggaactgtattcttgcttcgctgctttaccatgtttgtgacctccctctc

SEQ ID NO: 456193 - DNA, 120 bp, Artificial Sequence
  ENSG00000156671_7 (sequence is synthesized)
cgtgccaggacaacacctgcagtgtactggaaagatatatggcagtgtatgggagaaattacatcgagcctttgccatttggagtggctttggtatgaccctgactggcgttcacacatg

SEQ ID NO: 456194 - DNA, 120 bp, Artificial Sequence
  ENSG00000156671_8 (sequence is synthesized)
tggagattacatgtttagtggccacacagtcgtcctaactatgctgaatttctttgtcaccgaatatacaccaagaagctggaatttcttgcacactttatcctgggttctcaacctctt

SEQ ID NO: 456195 - DNA, 120 bp, Artificial Sequence
  ENSG00000156671_9 (sequence is synthesized)
tggaatcttcttcatcttggctgcccatgaacattattctattgatgtgtttattgctttttatataacaacaagactctttttgtactaccatactctggccaataccagagcatatca

SEQ ID NO: 456196 - DNA, 120 bp, Artificial Sequence
  ENSG00000156671_10 (sequence is synthesized)
gcagagtaggagagcaaggatttggtttcccatgttctctttttttgaatgcaatgttaatggcacagtacctaatgaatattgttggccattttcaaaaccagcaataatgaaaagact

SEQ ID NO: 456197 - DNA, 120 bp, Artificial Sequence
  ENSG00000156671_11 (sequence is synthesized)
aattggatgaatactatctttctaatgaatttgtgattaaatatataatagttgttgaaaatgagtaactttgcgttctccccctaggttgttcttagatgcctggcttatgtgttgaca

SEQ ID NO: 456198 - DNA, 120 bp, Artificial Sequence
  ENSG00000156671_12 (sequence is synthesized)
aagtaaagttttctgttctgagcaaagttatgattataaaaagcaagaaagaacaatcaagagtccttatgtagctatttgaacagaaagcttaagtagatgttttctgccccttctctt

SEQ ID NO: 456199 - DNA, 120 bp, Artificial Sequence
  ENSG00000156671_13 (sequence is synthesized)
taggaagacttaatgttgtgattgaagtcaggctgtacccttacctgttgagtatttgcttattgaactttaaacaagtcaacttgagcagtttgctggttgaggaattttcattgattt

SEQ ID NO: 456200 - DNA, 120 bp, Artificial Sequence
  ENSG00000156671_14 (sequence is synthesized)
ccagtagggctctagtcaagaaataatatgttttgaagctccttattacctttagaagaagaaaccctaacaagtgacagtacttgttctttggactaatctttgtttcattttaaaaaa

SEQ ID NO: 456201 - DNA, 120 bp, Artificial Sequence
  ENSG00000156671_15 (sequence is synthesized)
tgcaaccctgggacatgatctgttttactgacaaagagtttttgccttctgaaccatctttaaatatactgagcataccaggatgcctgaaataagaagagaatgaaagaggccatagat

SEQ ID NO: 456202 - DNA, 120 bp, Artificial Sequence
  ENSG00000156671_16 (sequence is synthesized)
gacgtgacagagtactggctaggatgccattggtctcctcattaatgcaaatgtagggctggcatatttcaccaaagatgcaacaaaagatgcagtgccagtgtgaccctcagtgagtat

SEQ ID NO: 456203 - DNA, 120 bp, Artificial Sequence
  ENSG00000156671_17 (sequence is synthesized)
tcatgagggaaaaatggctgcatccataaaaataaatgggcttaatgttagtggtataggtacccagaataacttctttgtgctatagttgttagatgacagttcaattttatgcttttt

SEQ ID NO: 456204 - DNA, 120 bp, Artificial Sequence
  ENSG00000156671_18 (sequence is synthesized)
taatggtgttattaaatgagccaaataggagtgttttaccagatgttagataaagttcttaatgccgttaagtagggaggtatgcatgcaaagaattgttttctcctgaaaagaaactta

SEQ ID NO: 456205 - DNA, 120 bp, Artificial Sequence
  ENSG00000156671_19 (sequence is synthesized)
cagcacgcaaaatataactttttggtttttgaaatttatcattcttggctgttggaagtaaacagtctcagacatacttggatatgaaaaagtttcgttgttttttacttttaaatataa

SEQ ID NO: 456206 - DNA, 120 bp, Artificial Sequence
  ENSG00000156671_20 (sequence is synthesized)
tggtgtatatacattctttctatttagtcttaatttggcagtcaggaagtgatataacttagctgctatttacaacactagaaatttagtactttaagtaatttcacatctatgataaca

SEQ ID NO: 456207 - DNA, 120 bp, Artificial Sequence
  ENSG00000156671_21 (sequence is synthesized)
tttgttactttatttttaatgatttttttacagtagttatgacagtaggatggttatggaattggaatttaaactcccaactaatgagcttaagctgcttggaatattaattatgtagtt

SEQ ID NO: 456208 - DNA, 120 bp, Artificial Sequence
  ENSG00000156671_22 (sequence is synthesized)
tttacattccattttaaaacaaaaacttagaaaaggtgctggcattctgaggcctgcaattaggccacatagcagaagcttgctccttccttatctgggtgaaatattttatttttgcac

SEQ ID NO: 456209 - DNA, 120 bp, Artificial Sequence
  ENSG00000156671_23 (sequence is synthesized)
tttgagtcatattcccacccctgtataagctacataggagcctgaatgaattgggtaggaaaggaaattatgcaaacaagtctcagctagtgctgaatgaccccaatttgggtctgctgt

SEQ ID NO: 456210 - DNA, 120 bp, Artificial Sequence
  ENSG00000156671_24 (sequence is synthesized)
gaacatcatttttgtatttctcacttgagaaatgctgcaaggcaattcaacttttatgcttttaaatctcacaactcagaatctgatatcttaaatcactgattctgttacatgctagga

SEQ ID NO: 456211 - DNA, 120 bp, Artificial Sequence
  ENSG00000156671_25 (sequence is synthesized)
acaaaatgccaacatctcatgtaaagaagttgcataatcatgaaaaataaaggatgtttcctatgccagttagagtggtttgacccttcaggtaaaaagatatgttactgttatttttct

SEQ ID NO: 456212 - DNA, 120 bp, Artificial Sequence
  ENSG00000156671_26 (sequence is synthesized)
acgtgacagaacagactgaatttagctagggaggcagtgatgttggcttttgggaaagggttcaaaaaactgtatggcaacattaatgctaaaatgttaagccgagtgcagtggtgcaag

SEQ ID NO: 456213 - DNA, 120 bp, Artificial Sequence
  ENSG00000156671_27 (sequence is synthesized)
aggaggattgcttgaggccaggagttagaaactagagtgtgttataacgcctatgaataaccactgcattccagcccgggcaaggtagcaagacccattctcttaaaaacatggctgggt

SEQ ID NO: 456214 - DNA, 78 bp, Artificial Sequence
  ENSG00000156671_28 (sequence is synthesized)
ttagctgggcatggcaagaaacacttgaacccaggaggtggagtttgcattgagctgagatcactccactgcactcca

SEQ ID NO: 456215 - DNA, 72 bp, Artificial Sequence
  ENSG00000156671_29 (sequence is synthesized)
acgaaacaaaacaaaacaaaacaaattagagtgggtgcagtgtctaatgcctgtaatcgcagcactttggga

SEQ ID NO: 456216 - DNA, 87 bp, Artificial Sequence
  ENSG00000156671_30 (sequence is synthesized)
gctcaggtaaaagcccacaaaaagttgtttagaaaattagctgggcgtggtgatgcatgcctgtggtcccagctacatgggaggctg

SEQ ID NO: 456217 - DNA, 120 bp, Artificial Sequence
  ENSG00000156671_31 (sequence is synthesized)
gctgaggcagaaggatcacttgagcccaaggaggttgaggctacagtgagctgtaatcatgccactgcactccagccttggggacagagtgagaccctgcctcaatcaatcaatcaatca

SEQ ID NO: 456218 - DNA, 120 bp, Artificial Sequence
  ENSG00000156671_32 (sequence is synthesized)
ataacaaaaacttaaatagctattaacctcagtcttctttccttcatataaattctattctaagaccaaatagaaaaataaatgtaactaactttgcagagctattgacattgagagacc

SEQ ID NO: 456219 - DNA, 120 bp, Artificial Sequence
  ENSG00000156671_33 (sequence is synthesized)
taacaacagactgcaatggggattgtaaaataacttttcagccttgcacttgctcatatatgttttgagaaaaatgtaagttaggtataacttattgttttaactattataaggcagtgt

SEQ ID NO: 456220 - DNA, 120 bp, Artificial Sequence
  ENSG00000156671_34 (sequence is synthesized)
ttacataaattaatcatctctttcttggaaaacattgagacaaatttattttcagttttacttaaacatgaaacctgtattttagttgctttttgttttgtccagaaatttccagatttt

SEQ ID NO: 456221 - DNA, 120 bp, Artificial Sequence
  ENSG00000156671_35 (sequence is synthesized)
gtcttcattttttttcctggttaaaatctaaaccatagtgaagatagtatttatgtttacattttatctgtgaatgtggctaagcagagaagctacatggctttggtctacatatttttt

SEQ ID NO: 456222 - DNA, 120 bp, Artificial Sequence
  ENSG00000156671_36 (sequence is synthesized)
gaccttgtatttggttctgtagttgcagacttgtgaaggcttacatcatcatggagactttagtaaggaaggaaccaaaaggtttttggtttggggatgcaaactggaggttatgttaca

SEQ ID NO: 456223 - DNA, 88 bp, Artificial Sequence
  ENSG00000156671_37 (sequence is synthesized)
agaccaggtagggtagtgttattgaagggtaattgaagagtggtagagagtaagaggttttgaaggaggcaggtttgctgttatcaca

SEQ ID NO: 456224 - DNA, 120 bp, Artificial Sequence
  ENSG00000156671_38 (sequence is synthesized)
agtaagaggttttgaaggaggcaggtttgctgttatcacaaaataatttgggggaaacctttcgtggctgtgctgcaagaattctttatgtggctatcctctccatagttttctgaccag

SEQ ID NO: 456225 - DNA, 120 bp, Artificial Sequence
  ENSG00000156671_39 (sequence is synthesized)
aattgcaagggcaaaaatagaacttctagctctatttatttgtatcctttgaaatcagaacttatccttagaaccagtcagttaaataatgcggactatgcctataatcccagcacttta

SEQ ID NO: 456226 - DNA, 120 bp, Artificial Sequence
  ENSG00000156671_40 (sequence is synthesized)
atctcaaaaaaacaaaacaaaataaaataataatgtgggctattcagaagaaaaagtcagtgacagagagaccagaacccattggatcaagagacctgcagggattataactctttactc

SEQ ID NO: 456227 - DNA, 120 bp, Artificial Sequence
  ENSG00000156671_41 (sequence is synthesized)
tgtgagcagcggtgtttcgtgccctgtctctgcctgtgtgtttttactaagaattccagaaatcctgtaatttgtaaatgggaaacagaggaaccagattgttttatagctgataagaaa

SEQ ID NO: 456228 - DNA, 120 bp, Artificial Sequence
  ENSG00000156671_42 (sequence is synthesized)
cagtctgttttagaaacatctgtttggaaagtattactcatgtattcacaaagtcatatttataacactagtcttctttgactgtattcaacaaaaggcagtttcaccattaatttcata

SEQ ID NO: 456229 - DNA, 120 bp, Artificial Sequence
  ENSG00000156671_43 (sequence is synthesized)
gtaagcttttttaaaggattctagatctaaattgcctaagaatgttaaccacattcttgttttaaactctctaatttaataaatgtaattattttatagtcttttatagacttacatttt

SEQ ID NO: 456230 - DNA, 120 bp, Artificial Sequence
  ENSG00000156671_44 (sequence is synthesized)
cttcatactaaaggtaatgataatatagtcatttgccagtactttaaggtattcaggcatttgagacaagaaagctgtcttgtagaatagtccaattgctttcttaaacagtactggttt

SEQ ID NO: 456231 - DNA, 120 bp, Artificial Sequence
  ENSG00000156671_45 (sequence is synthesized)
catttagacagtttctaagccagcaaaggtgtcaattttaatgccaacttgacagtttaacagttagtgtttgtaagcagtttagcctgaattatcccatactgctgtagaggagaattg

SEQ ID NO: 456232 - DNA, 120 bp, Artificial Sequence
  ENSG00000156671_46 (sequence is synthesized)
ttagtaacatcaaaggtcagaatgcttcaggtgactaataagaatggaaagagactgagtaggttttttgtttcttttccctgtctttgagtaactttgaatgactaaaattagtatgaa

SEQ ID NO: 456233 - DNA, 120 bp, Artificial Sequence
  ENSG00000156671_47 (sequence is synthesized)
actaggttttggacccccttctcacctcacccggatgtaatgccaccaatttcaaataactaaaatgtgaccaattactttgcttcaagttctatacaaatatctctgaaatctgtaagc

SEQ ID NO: 456234 - DNA, 120 bp, Artificial Sequence
  ENSG00000156671_48 (sequence is synthesized)
catatttcagctattctggtttttataatacattctaccctaaattaaccaaaggactttttattcagtgtattccatgtttcagcataaggaaagtttgtgcctgatatggcaggagaa

SEQ ID NO: 456235 - DNA, 120 bp, Artificial Sequence
  ENSG00000156671_49 (sequence is synthesized)
agaacactatggtaatttcattgttacttcaggtctctttcaatctgaagaactgggttgtctggagaattgaacatagccaagcaatattatcaattagtaatgtcatcttaaaaatgt

SEQ ID NO: 456236 - DNA, 120 bp, Artificial Sequence
  ENSG00000156671_50 (sequence is synthesized)
tcacttttactaagttttattcagaggatctatgtattattagaaaaatgaagtatttctgacatggaacaaagaaagtggaaactggtacttaatgggggaagcaaaattagctgggac

SEQ ID NO: 456237 - DNA, 120 bp, Artificial Sequence
  ENSG00000156671_51 (sequence is synthesized)
taaaacggacatgttttgttttgtgaattctacctaaatgtctctctatccacagagaaactagtattacttgaagatgtgaaagttcctgtggtagccataccttgaagcacagtgttt

SEQ ID NO: 456238 - DNA, 120 bp, Artificial Sequence
  ENSG00000156671_52 (sequence is synthesized)
gccataccttgaagcacagtgtttgtacataagtaaatatcttgattctaaattaaatccagatttaactaatatatattattttatatctttgttgtattaaaatgtttaaaaacacta

SEQ ID NO: 456239 - DNA, 120 bp, Artificial Sequence
  ENSG00000156671_53 (sequence is synthesized)
ctcggaccgcggaggtgagcgggagctgaggctgaggagaggggagcttggggggcgcctgctgccaagggcagcggaggaggaaatggcaggtcctaatcaactctgcattcgccgctg

SEQ ID NO: 456240 - DNA, 120 bp, Artificial Sequence
  ENSG00000156671_54 (sequence is synthesized)
ggctgtgggaagggtgtcagatcctgtgaagaatggcaaaacagcctgacctgagaaacgtgactgagaagcattggaaggaatgtagctttaaaatgatctttctgtccttttcctaga

SEQ ID NO: 456241 - DNA, 120 bp, Artificial Sequence
  ENSG00000156671_55 (sequence is synthesized)
gagagccgactgaggccttgtggactgcagtgggccctccggtccctctaaacccccaggcctcctctctgcttggtatctgtttgggattgaagaccgttggttccataaacctccatg

SEQ ID NO: 456242 - DNA, 61 bp, Artificial Sequence
  ENSG00000156671_56 (sequence is synthesized)
cctatgaataaccactgcattccagcccgggcaaggtagcaagacccattctcttaaaaac

SEQ ID NO: 456243 - DNA, 80 bp, Artificial Sequence
  ENSG00000156671_57 (sequence is synthesized)
gagcagctgccggcgcggcggtgacggcggccgggacgatgcctgcgcgcagtcgccaccgcccccgcctccactccggc

SEQ ID NO: 456244 - DNA, 120 bp, Artificial Sequence
  ENSG00000156675_0 (sequence is synthesized)
gtggaggccgccagtcgcggcgatcttctcctcgcttctggagtgttatcgtcaccatgtccctaatggtctcggctggccggggcctgggggccgtgtggtccccaacccacgtgcagg

SEQ ID NO: 456245 - DNA, 120 bp, Artificial Sequence
  ENSG00000156675_1 (sequence is synthesized)
tgacggtgctgcaggcgcggggcctgcgggccaagggccccgggggcacgagcgacgcgtacgcggtgatccaggtgggcaaggagaagtacgccacctccgtgtcggagcgcagcctgg

SEQ ID NO: 456246 - DNA, 120 bp, Artificial Sequence
  ENSG00000156675_2 (sequence is synthesized)
gcgcgcccgtgtggcgcgaggaggccaccttcgagctgccatcgctgctgtcctccggacccgcggccgccgccaccctgcagctcaccgtgctgcaccgcgcgctgctcggcctcgaca

SEQ ID NO: 456247 - DNA, 120 bp, Artificial Sequence
  ENSG00000156675_3 (sequence is synthesized)
agttcctgggccgcgccgaggtggacctgcgggatctgcaccgcgaccagggccgcaggaagacgcagtggtataagttgaaatccaaaccaggaaagaaggacaaggagcgaggagaaa

SEQ ID NO: 456248 - DNA, 120 bp, Artificial Sequence
  ENSG00000156675_4 (sequence is synthesized)
ttgaggttgacatccagtttatgagaaacaacatgactgccagcatgtttgacctttctatgaaagacaagtctcggaatccatttggaaagctgaaggacaagatcaaggggaagaata

SEQ ID NO: 456249 - DNA, 120 bp, Artificial Sequence
  ENSG00000156675_5 (sequence is synthesized)
aggacagtgggtcagacaccgcctccgccatcatccctagcacgacaccttcggtcgacagtgatgatgagtctgtggttaaagacaagaaaaagaaatcaaagatcaagaccttacttt

SEQ ID NO: 456250 - DNA, 120 bp, Artificial Sequence
  ENSG00000156675_6 (sequence is synthesized)
ccaagtcaaatttgcagaagacgcctctttcccagtccatgtctgtcctgccgacttcaaagccagaaaaagtgctgcttcgtcccggagactttcagtcccagtgggatgaagatgaca

SEQ ID NO: 456251 - DNA, 120 bp, Artificial Sequence
  ENSG00000156675_7 (sequence is synthesized)
atgaggatgagtcctcctcggcctcggatgtcatgtctcacaagagaacagcgagtacggatcttaagcaactgaaccaggtcaactttacccttcccaagaaggaaggactttcctttc

SEQ ID NO: 456252 - DNA, 120 bp, Artificial Sequence
  ENSG00000156675_8 (sequence is synthesized)
ttggtggccttcggtctaagaatgatgtcctttcccgctctaatgtctgcatcaatgggaaccatgtttacctggagcagccagaagccaagggtgagatcaaggatagcagcccgtcct

SEQ ID NO: 456253 - DNA, 120 bp, Artificial Sequence
  ENSG00000156675_9 (sequence is synthesized)
cctccccatcccccaagggcttcagaaagaagcatttgttctcttctacagagaacctggcggctgggtcttggaaggagcctgctgaaggaggtgggctgtcttctgacaggcagctct

SEQ ID NO: 456254 - DNA, 120 bp, Artificial Sequence
  ENSG00000156675_10 (sequence is synthesized)
ccgaatcttccaccaaggactccttgaagtctatgaccctgccgtcctaccgacctgccccactggtcagtggggacctcagggaaaacatggcccccgcaaactcagaggccacaaaag

SEQ ID NO: 456255 - DNA, 120 bp, Artificial Sequence
  ENSG00000156675_11 (sequence is synthesized)
aagctaaggagagcaagaagccagagagcaggaggtcctctttgctgtctctgatgacggggaagaaggatgtggctaagggcagtgaaggtgaaaaccctctcacggtcccagggaggg

SEQ ID NO: 456256 - DNA, 120 bp, Artificial Sequence
  ENSG00000156675_12 (sequence is synthesized)
agaaggaaggcatgctgatgggggttaagccgggggaggacgcatcggggcctgctgaagaccttgtgagaagatctgagaaagatactgcagctgttgtctccagacagggcagctccc

SEQ ID NO: 456257 - DNA, 120 bp, Artificial Sequence
  ENSG00000156675_13 (sequence is synthesized)
tgaacctctttgaagatgtgcagatcacagaaccagaagctgagccagagtccaagtctgaaccgagacctccaatttcctctccgagggctccccagaccagagctgtcaagccccgac

SEQ ID NO: 456258 - DNA, 120 bp, Artificial Sequence
  ENSG00000156675_14 (sequence is synthesized)
tggaagtgtctccagaggcgcaacccacagccaggcttccttcccctactgactccccttcctctcttcctcctcttccttctagctctggccaggcatctgtcccctctgaattgggac

SEQ ID NO: 456259 - DNA, 120 bp, Artificial Sequence
  ENSG00000156675_15 (sequence is synthesized)
atggtgcagacacacagtcctctgagagtccttctgtcttctcctctctctcatctcccatagcagctcccatttccacatccactccaattgaaagctggcctctcgtagacaggggcc

SEQ ID NO: 456260 - DNA, 120 bp, Artificial Sequence
  ENSG00000156675_16 (sequence is synthesized)
aggccaagtctgaaggaccacccttgctccctaaggcagagttgcaaactgagagtttaacaccggttccaaattctggttcttctgccctgggatcacttttcaaacagccatcctttc

SEQ ID NO: 456261 - DNA, 120 bp, Artificial Sequence
  ENSG00000156675_17 (sequence is synthesized)
cagcaaataaagggacagaagattctctgatgggcaggacccgtgagacaggcacagagaagaacaccagcagccttgagttggaggagtctctcccagagcagcctgaaacagggcgac

SEQ ID NO: 456262 - DNA, 120 bp, Artificial Sequence
  ENSG00000156675_18 (sequence is synthesized)
aagaggaagaacttccgagattcccctgcaaaaaacaagactacagcccatcatctggagaagcccaggaagtaccgtttgccctttcactcagcagtgatggagctgtgagccctgttg

SEQ ID NO: 456263 - DNA, 120 bp, Artificial Sequence
  ENSG00000156675_19 (sequence is synthesized)
gggagcttgcagcaggaggagacagagacttggagagtcaggctgggtctcttgtggagagcaaagccagggatgcagctgaagaagtggcgccccctcttcccatgggagcatcagtcc

SEQ ID NO: 456264 - DNA, 120 bp, Artificial Sequence
  ENSG00000156675_20 (sequence is synthesized)
cttccattgattccatgatgcggaagctggaagagatgggtctgaacctccgcaaggaccagaagaaaaccaagaagcgtgtgtcattttctgagcagctcttcacggaagaggcagtgg

SEQ ID NO: 456265 - DNA, 120 bp, Artificial Sequence
  ENSG00000156675_21 (sequence is synthesized)
cgggggctgccttgctggtggaaggacacagcagttgtccccaggagctgaaccctgcatggtctgttgctggaaacgcgtctgacggagagcctcctgagtctccccacgcagaggact

SEQ ID NO: 456266 - DNA, 120 bp, Artificial Sequence
  ENSG00000156675_22 (sequence is synthesized)
cagaaagggaatcggtgaccacacctgggccagcgacgtgtggtgcgccagcctccccagcggatcacctcctcctcccctcccaggaggagagtttctccgaagtccccatgagtgaag

SEQ ID NO: 456267 - DNA, 120 bp, Artificial Sequence
  ENSG00000156675_23 (sequence is synthesized)
caagctcagcgaaagacactccactctttaggatggagggagaggatgcccttgtgactcagtatcagagcaaagccagtgaccacgaaggtttattgtctgaccccttgagtgaccttc

SEQ ID NO: 456268 - DNA, 120 bp, Artificial Sequence
  ENSG00000156675_24 (sequence is synthesized)
agttggtctcagattttaaatctccaatcatggccgatctgaacttaagccttccttccattcctgaagtcgcatcggatgatgaaagaatagatcaggttgaagatgacggagatcagg

SEQ ID NO: 456269 - DNA, 120 bp, Artificial Sequence
  ENSG00000156675_25 (sequence is synthesized)
ttgaagatgatggagagacagcaaagtcgtcaactctggacataggagctttgtccttgggcttggtagtcccctgtcctgagaggggaaaggggcccagtggcgaggcagataggttgg

SEQ ID NO: 456270 - DNA, 120 bp, Artificial Sequence
  ENSG00000156675_26 (sequence is synthesized)
tactgggggagggcctgtgtgatttcaggctgcaagcaccccaggcatctgtgacagctccttcagagcagaccacagagttcggaattcacaaaccacatcttggcaagagctcaagct

SEQ ID NO: 456271 - DNA, 120 bp, Artificial Sequence
  ENSG00000156675_27 (sequence is synthesized)
tggataaacagctgccaggccccagtggtggtgaggaagaaaaaccgatgggaaatgggagtccaagcccgcctcctggcacatccctggacaatcctgtacccagcccctccccttctg

SEQ ID NO: 456272 - DNA, 120 bp, Artificial Sequence
  ENSG00000156675_28 (sequence is synthesized)
agatctttcctgtcacacactctttccccagctctgcacattctgacactcaccacaccagcacagcagaatctcaaaaaaaagccacagcagagggctccgctggtagagttgaaaatt

SEQ ID NO: 456273 - DNA, 120 bp, Artificial Sequence
  ENSG00000156675_29 (sequence is synthesized)
ttggcaagaggaagccactcctccaggcctgggtctcaccctcggagacacatccagtctcagctcagccaggcgctggaactgggtcagccaagcacagacttcatcctgtgaagccaa

SEQ ID NO: 456274 - DNA, 120 bp, Artificial Sequence
  ENSG00000156675_30 (sequence is synthesized)
tgaatgcaatggccaccaaggttgctaactgcagcttgggaactgccaccatcatcagtgagaacttgaacaatgaggtcatgatgaagaaatacagcccctcggaccctgcatttgcat

SEQ ID NO: 456275 - DNA, 120 bp, Artificial Sequence
  ENSG00000156675_31 (sequence is synthesized)
atgcgcagctgacccacgatgagctgattcagctggtcctcaaacagaaggaaacgataagcaagaaggagttccaggtccgcgagctggaagactacattgacaacctgcttgtcaggg

SEQ ID NO: 456276 - DNA, 120 bp, Artificial Sequence
  ENSG00000156675_32 (sequence is synthesized)
tcatggaagaaacccccaatatcctccgcatcccgactcaggttggcaaaaaagcaggaaagatgtaaatcagcagaaaaaaaacaccgagacgtttctgtgacttcactttcacctgct

SEQ ID NO: 456277 - DNA, 120 bp, Artificial Sequence
  ENSG00000156675_33 (sequence is synthesized)
ccaggggtcaaggacttgccttgcctgataaccagccagcaggctccgaatcaccatctccctcacatgttatccggcaagagtgaattctaccaatggaagccaggttaatgattacaa

SEQ ID NO: 456278 - DNA, 120 bp, Artificial Sequence
  ENSG00000156675_34 (sequence is synthesized)
ggctttagttttaaatgccactgtgcctttaacaaggttgtaaatattttatgcccaccagagatgtggtcataagatctgatcctgagccagagattcagatggcacaggaagtattca

SEQ ID NO: 456279 - DNA, 120 bp, Artificial Sequence
  ENSG00000156675_35 (sequence is synthesized)
tgtattttaacactggggttttctttctttcatactgagattttttttcagtatgtatcctccagctcttaaagcttacctgagaaagctttaaatgagaaaaggaccatgcgattggtg

SEQ ID NO: 456280 - DNA, 120 bp, Artificial Sequence
  ENSG00000156675_36 (sequence is synthesized)
ctgtgttacatacacatactttcttggcttctgagtagctcaggtgtggcttttggctgcagatgttaaattttgataccatgtaaacctacccagcttctcagacttgggtcttgtttt

SEQ ID NO: 456281 - DNA, 120 bp, Artificial Sequence
  ENSG00000156675_37 (sequence is synthesized)
ttgatgggaacagaggtgtttagagaaagcctctgagtatgcctttcagattttgaacaagcggccttttctaaacatcgacttctactactctctagccttaaaataccttctgcttag

SEQ ID NO: 456282 - DNA, 120 bp, Artificial Sequence
  ENSG00000156675_38 (sequence is synthesized)
atccagggcccttctactggagataggaaaagtagaattcaggaattaaaagaattactctttattcaatttgaggaacttggtgaaagcccctcctcttatgacagccaggttcctgct

SEQ ID NO: 456283 - DNA, 120 bp, Artificial Sequence
  ENSG00000156675_39 (sequence is synthesized)
ggctagaccagcctattcagcgctttgctaggggattgggtggtccacgcactcgctaatacagttctccaggtgtggaatgatgtcaatacgattgcttggccttttccccctgtgcct

SEQ ID NO: 456284 - DNA, 120 bp, Artificial Sequence
  ENSG00000156675_40 (sequence is synthesized)
gcctttgctcggtgctctggtttcctcagcaacactccttgtaaggggcagagacagggtccaccaactccccaagatgaagaagccccttcaggccagtcgtggtggctcatgcctgta

SEQ ID NO: 456285 - DNA, 73 bp, Artificial Sequence
  ENSG00000156675_41 (sequence is synthesized)
agaattgcttgaacttgggagatggaggtttttttaagactcttaaaaaaagagcctgggcaatttttttaag

SEQ ID NO: 456286 - DNA, 120 bp, Artificial Sequence
  ENSG00000156675_42 (sequence is synthesized)
ttaagactcttaaaaaaagagcctgggcaatttttttaagactctgtcttaaaaaaaactaaaaagaaaaaaagaagccccttcactctacaggggacaggagaccatggattggacccc

SEQ ID NO: 456287 - DNA, 120 bp, Artificial Sequence
  ENSG00000156675_43 (sequence is synthesized)
aaagggattgaactgcatctgcatgtctgtcctttgaacactttctctccctgcccaaaaggaaacccaaattatttgtgggatactggggaaattgtagtgaagggcttaatgtagtta

SEQ ID NO: 456288 - DNA, 120 bp, Artificial Sequence
  ENSG00000156675_44 (sequence is synthesized)
ataaaagttaaaagtcagtagaaaacaggtgcctcagccttcaaatggttgctttttttccattttccctcatgaatagactcaccagcattttacccccttgttataaaactgtgcaga

SEQ ID NO: 456289 - DNA, 120 bp, Artificial Sequence
  ENSG00000156675_45 (sequence is synthesized)
gcaagaagatgatacttatttttgaatttgtatttttaaaactagatttatagactttttttttttttaactagggcacttgcttccttcttagctaaaagcaccagctgagatttttca

SEQ ID NO: 456290 - DNA, 120 bp, Artificial Sequence
  ENSG00000156675_46 (sequence is synthesized)
ggtaattttgttgttactcacttaagactggaattagaatgtttctggtatttctcatttttttccctggctatgatagaatctcatctaatcttgacatctctcctaggggaagaatat

SEQ ID NO: 456291 - DNA, 120 bp, Artificial Sequence
  ENSG00000156675_47 (sequence is synthesized)
cacaggctaatagcgtggttgggggtgaagatgatagcagttattaaatcaggaatctcttttatgtgtgtccttgttacattgaggttaagagacaaaatcattggcagtgcaatctct

SEQ ID NO: 456292 - DNA, 120 bp, Artificial Sequence
  ENSG00000156675_48 (sequence is synthesized)
ttccaggatttcgtttgctgtggcattggttatatcagagcactttaatctgaaggatgatactgtaacttgatttatctaattagcttttaattatctacagctattttattttattta

SEQ ID NO: 456293 - DNA, 120 bp, Artificial Sequence
  ENSG00000156675_49 (sequence is synthesized)
attctctcctacagtactgggaccactgtaaacttctcagatgacttgtatttttgtagtgctatgaaatttatttacatacttataaagaaaactgtatgttcacttgaactctgaaaa

SEQ ID NO: 456294 - DNA, 88 bp, Artificial Sequence
  ENSG00000156675_50 (sequence is synthesized)
gggcgaggtacatgtatatatttgtcctgcattatgttttttacttgatataaatgtatttttactgtgatagtccaagtgccctggg

SEQ ID NO: 456295 - DNA, 120 bp, Artificial Sequence
  ENSG00000156675_51 (sequence is synthesized)
tataaatgtatttttactgtgatagtccaagtgccctggggggcaggtgtgctctatgtggttcttcttccattggagagctggcgtagagatctgcagtgttcacaaggatgttggttt

SEQ ID NO: 456296 - DNA, 120 bp, Artificial Sequence
  ENSG00000156675_52 (sequence is synthesized)
ggagatgtctgctgctaggacctggggtgtgtgactcagtccatatgagagggacatctgggtggaggagtaaattcctgtgctctgaaatgccacttggtagctctggacaatgaagga

SEQ ID NO: 456297 - DNA, 120 bp, Artificial Sequence
  ENSG00000156675_53 (sequence is synthesized)
caattgactcaagggtgcctggcttctgctgctgctgggaaaaaattcagtttatagcattcctgcacctcccaaagtagataacctggaggtcattcagttaacaactgtccctgagga

SEQ ID NO: 456298 - DNA, 120 bp, Artificial Sequence
  ENSG00000156675_54 (sequence is synthesized)
ctcagttttgggggaggggttatctgggagaagctttagcctgttctgagccattaggagacattagtgaattggagcactggagaatcctacaaatggcctatgtctcagaagagctgg

SEQ ID NO: 456299 - DNA, 120 bp, Artificial Sequence
  ENSG00000156675_55 (sequence is synthesized)
gacctccttccagctgctgcagatgctgacaggccctgggaggctgctgtgctctggagaagctggagcagctcatttcttggcctagcctggctgcctcagaaagagcagtcaggactt

SEQ ID NO: 456300 - DNA, 120 bp, Artificial Sequence
  ENSG00000156675_56 (sequence is synthesized)
gagggaagcatcaaattctatacccataaactgcagttggaagtcagctttttgaaatgtccagcctttgcccaattgtttcagatcatctcatgcctcaggctttggcaggtatcctgc

SEQ ID NO: 456301 - DNA, 120 bp, Artificial Sequence
  ENSG00000156675_57 (sequence is synthesized)
cctccatcttattccagtgtgttcacctcatcaaggcagcagagtggatgaaggagtaagtctgccctttgccatactgaacagctgtggaccccgattggtgagggctctgcatatgcc

SEQ ID NO: 456302 - DNA, 120 bp, Artificial Sequence
  ENSG00000156675_58 (sequence is synthesized)
tgtatgaaggagatacaggtgtgtgtgcacatgccggtatgaagaagacacaggcatgtgcttctcagttttgctaacagtgggagctcaacggggcagagggaggaaggtccatgatgc

SEQ ID NO: 456303 - DNA, 120 bp, Artificial Sequence
  ENSG00000156675_59 (sequence is synthesized)
tcagccacatactgtagagagaggcaatttaatgttaaatgacgcaccatcctccctcccacccttctcccagtcaactttttttctttttctagaactactaattatctctcaaggctg

SEQ ID NO: 456304 - DNA, 120 bp, Artificial Sequence
  ENSG00000156675_60 (sequence is synthesized)
aaaaattaattgccttaggtggagaacttaattcctagtatccaccaaacttaactccgtatctccatatggtgtctccatatctactgtgtgagctacttaactgacgccctcttcctc

SEQ ID NO: 456305 - DNA, 120 bp, Artificial Sequence
  ENSG00000156675_61 (sequence is synthesized)
caactgaaggatcgcccaacgtttttggattatagaattattatttcctgctttctttctttgggacttttgaatttctttggtttcgtttttaagaagtaacccaacatttcctacaac

SEQ ID NO: 456306 - DNA, 120 bp, Artificial Sequence
  ENSG00000156675_62 (sequence is synthesized)
actaaataaaatggtacttacctttcaaagatttgtgtctgtagtttggtatgggtgcaataaaaatttattttgtcttcctggaaaacctctcttggtgggggtggggggatgaccagt

SEQ ID NO: 456307 - DNA, 120 bp, Artificial Sequence
  ENSG00000156675_63 (sequence is synthesized)
gtttctcatcccatgagggtctctcactgggatttctgttgctgccatcttgcctggttcccaggagtcccaaggccctttttctcaaagaggacggacatgtctggtcccttcggatgc

SEQ ID NO: 456308 - DNA, 120 bp, Artificial Sequence
  ENSG00000156675_64 (sequence is synthesized)
acccttcatcttggcctgagggaccatggcactggccagagaaactgagttggaacgtgctgcccccttttcctttgcagccggtacccttggctgagcatttggacagggtctttcctc

SEQ ID NO: 456309 - DNA, 90 bp, Artificial Sequence
  ENSG00000156675_65 (sequence is synthesized)
acactggatcctatctttgtctagcgcgtgtcttctcaaaaataaaagtgcgtgcaaattctgctctcagccgggtgcagtggctcacgc

SEQ ID NO: 456310 - DNA, 120 bp, Artificial Sequence
  ENSG00000156675_66 (sequence is synthesized)
aaaaaaaaaaaaaaaaaaaaattctgctctcatctaccacttcccgaagagaaagcatgagaatgcatgcattgaagaggctgctggtagcagagaggagaggccagttcatggggattg

SEQ ID NO: 456311 - DNA, 120 bp, Artificial Sequence
  ENSG00000156675_67 (sequence is synthesized)
gagaggagaggccagttcatggggattgtgaacattgttgcagttgcttccattcaaaggtaactcctcagcctttctcctttcaggtggtataagttgaaatccaaaccaggaaagaag

SEQ ID NO: 456312 - DNA, 120 bp, Artificial Sequence
  ENSG00000156675_68 (sequence is synthesized)
caggtgagagatgggggagattgtctatgtaaatgtgagcaatgtccccctttgcttcctacctgcagaggttacggctttctaaccacacagacgtctgatgtgacaacccacctgtca

SEQ ID NO: 456313 - DNA, 120 bp, Artificial Sequence
  ENSG00000156675_69 (sequence is synthesized)
ctgtcctgctggtagggctgccccttgtggtggtaatacctcaagacactgctgcgtttatagcaagaacataatagtagtctgtaaatatagcttaggaattgttctgcacggtcagat

SEQ ID NO: 456314 - DNA, 120 bp, Artificial Sequence
  ENSG00000156675_70 (sequence is synthesized)
ttggagctcgcacattgcagaaacgcaatgccaccagtatcttaactgtctcagaactaactggcattgagtggtagtagtatctagcagtgtcaaaaacttcttcaagcactccccaac

SEQ ID NO: 456315 - DNA, 120 bp, Artificial Sequence
  ENSG00000156675_71 (sequence is synthesized)
gtgaagcttgtatgtttgttttgagctgtctttactgtggagggacagaagcctctgcagagttttacagtgaatgcctaggctctagttgacttaaaaaaataagagactgcctttaat

SEQ ID NO: 456316 - DNA, 120 bp, Artificial Sequence
  ENSG00000156675_72 (sequence is synthesized)
gttctgatgtttgtaacaagaccaagggtcccgtgaagatatcaggacatctggacaaggacatgctttcctggcttgcatgtggcagccctgtcctgactgcttttgtttccacaggaa

SEQ ID NO: 456317 - DNA, 120 bp, Artificial Sequence
  ENSG00000156675_73 (sequence is synthesized)
ctgagacattggagtgctttggcccagagatgagggcagcatgtgacccacctgccccttgtctggcttactggctgccgtctttgcagtgggcagttgctcagttttgccatgaccgga

SEQ ID NO: 456318 - DNA, 120 bp, Artificial Sequence
  ENSG00000156687_0 (sequence is synthesized)
ccgtagttcggggcccggcagcggcgcgagggctgggaactgcgcggcggggactgcgggcgactccggcatccgcgctggcggcagcggtcgccgcgccgtgggaagctatggggacgc

SEQ ID NO: 456319 - DNA, 120 bp, Artificial Sequence
  ENSG00000156687_1 (sequence is synthesized)
gccctttctcggggtgcccattcagcggcggctcggagctccctgccccgctgctttaggaagcgatcgtggagcagagtcactctctgaagactcccgagacccattcgactcgggacc

SEQ ID NO: 456320 - DNA, 120 bp, Artificial Sequence
  ENSG00000156687_2 (sequence is synthesized)
ctcatcgccgaccctttcccgggctcccggagcgtgaagaagagccgccctccggaacgcggcgaggagcatggggagagcggcggccaccgcaggcggcggcggaggggcgcgccgctg

SEQ ID NO: 456321 - DNA, 120 bp, Artificial Sequence
  ENSG00000156687_3 (sequence is synthesized)
gctcccgtggctggggctgtgcttctgggcggcagggaccgcggctgcccgaggaactgacaatggcgaagcccttcccgaatccatcccatcagctcctgggacactgcctcatttcat

SEQ ID NO: 456322 - DNA, 120 bp, Artificial Sequence
  ENSG00000156687_4 (sequence is synthesized)
agaggagccagatgatgcttatattatcaagagcaaccctattgcactcaggtgcaaagcgaggccagccatgcagatattcttcaaatgcaacggcgagtgggtccatcagaacgagca

SEQ ID NO: 456323 - DNA, 120 bp, Artificial Sequence
  ENSG00000156687_5 (sequence is synthesized)
cgtctctgaagagactctggacgagagctcaggtttgaaggtccgcgaagtgttcatcaatgttactaggcaacaggtggaggacttccatgggcccgaggactattggtgccagtgtgt

SEQ ID NO: 456324 - DNA, 120 bp, Artificial Sequence
  ENSG00000156687_6 (sequence is synthesized)
ggcgtggagccacctgggtacctccaagagcaggaaggcctctgtgcgcatagcctatttacggaaaaactttgaacaagacccacaaggaagggaagttcccattgaaggcatgattgt

SEQ ID NO: 456325 - DNA, 120 bp, Artificial Sequence
  ENSG00000156687_7 (sequence is synthesized)
actgcactgccgcccaccagagggagtccctgctgccgaggtggaatggctgaaaaatgaagagcccattgactctgaacaagacgagaacattgacaccagggctgaccataacctgat

SEQ ID NO: 456326 - DNA, 120 bp, Artificial Sequence
  ENSG00000156687_8 (sequence is synthesized)
catcaggcaggcacggctctcggactcaggaaattacacctgcatggcagccaacatcgtggctaagaggagaagcctgtcggccactgttgtggtctacgtgaatggaggctggtcttc

SEQ ID NO: 456327 - DNA, 120 bp, Artificial Sequence
  ENSG00000156687_9 (sequence is synthesized)
ctggacagagtggtcagcctgcaatgttcgctgtggtagaggatggcagaaacgttcccggacctgcaccaacccagctcctctcaatggtggggccttttgtgagggaatgtcagtgca

SEQ ID NO: 456328 - DNA, 120 bp, Artificial Sequence
  ENSG00000156687_10 (sequence is synthesized)
gaaaataacctgcacttctctttgtcctgtggatgggagctgggaagtgtggagcgaatggtccgtctgcagtccagagtgtgaacatttgcggatccgggagtgcacagcaccaccccc

SEQ ID NO: 456329 - DNA, 120 bp, Artificial Sequence
  ENSG00000156687_11 (sequence is synthesized)
gagaaatgggggcaaattctgtgaaggtctaagccaggaatctgaaaactgcacagatggtctttgcatcctagataaaaaacctcttcatgaaataaaaccccaaagcattgagaatgc

SEQ ID NO: 456330 - DNA, 120 bp, Artificial Sequence
  ENSG00000156687_12 (sequence is synthesized)
cagcgacattgctttgtactcgggcttgggtgctgccgtcgtggccgttgcagtcctggtcattggtgtcaccctttacagacggagccagagtgactatggcgtggacgtcattgactc

SEQ ID NO: 456331 - DNA, 120 bp, Artificial Sequence
  ENSG00000156687_13 (sequence is synthesized)
ttctgcattgacaggtggcttccagaccttcaacttcaaaacagtccgtcaaggtaactccctgctcctgaattctgccatgcagccagatctgacagtgagccggacatacagcggacc

SEQ ID NO: 456332 - DNA, 120 bp, Artificial Sequence
  ENSG00000156687_14 (sequence is synthesized)
catctgtctgcaggaccctctggacaaggagctcatgacagagtcctcactctttaaccctttgtcggacatcaaagtgaaagtccagagctcgttcatggtttccctgggagtgtctga

SEQ ID NO: 456333 - DNA, 120 bp, Artificial Sequence
  ENSG00000156687_15 (sequence is synthesized)
gagagctgagtaccacggcaagaatcattccaggacttttccccatggaaacaaccacagctttagtacaatgcatcccagaaataaaatgccctacatccaaaatctgtcatcactccc

SEQ ID NO: 456334 - DNA, 120 bp, Artificial Sequence
  ENSG00000156687_16 (sequence is synthesized)
cacaaggacagaactgaggacaactggtgtctttggccatttaggggggcgcttagtaatgccaaatacaggggtgagcttactcataccacacggtgccatcccagaggagaattcttg

SEQ ID NO: 456335 - DNA, 120 bp, Artificial Sequence
  ENSG00000156687_17 (sequence is synthesized)
ggagatttatatgtccatcaaccaaggtgaacccagcctccagtcagatggctctgaggtgctcctgagtcctgaagtcacctgtggtcctccagacatgatcgtcaccactccctttgc

SEQ ID NO: 456336 - DNA, 120 bp, Artificial Sequence
  ENSG00000156687_18 (sequence is synthesized)
attgaccatcccgcactgtgcagatgtcagttctgagcattggaatatccatttaaagaagaggacacagcagggcaaatgggaggaagtgatgtcagtggaagatgaatctacatcctg

SEQ ID NO: 456337 - DNA, 120 bp, Artificial Sequence
  ENSG00000156687_19 (sequence is synthesized)
ttactgccttttggacccctttgcgtgtcatgtgctcctggacagctttgggacctatgcgctcactggagagccaatcacagactgtgccgtgaagcaactgaaggtggcggtttttgg

SEQ ID NO: 456338 - DNA, 120 bp, Artificial Sequence
  ENSG00000156687_20 (sequence is synthesized)
ctgcatgtcctgtaactccctggattacaacttgagagtttactgtgtggacaataccccttgtgcatttcaggaagtggtttcagatgaaaggcatcaaggtggacagctcctggaaga

SEQ ID NO: 456339 - DNA, 120 bp, Artificial Sequence
  ENSG00000156687_21 (sequence is synthesized)
accaaaattgctgcatttcaaagggaatacctttagtcttcagatttctgtccttgatattcccccattcctctggagaattaaaccattcactgcctgccaggaagtcccgttctcccg

SEQ ID NO: 456340 - DNA, 120 bp, Artificial Sequence
  ENSG00000156687_22 (sequence is synthesized)
cgtgtggtgcagtaaccggcagcccctgcactgtgccttctccctggagcgttatacgcccactaccacccagctgtcctgcaaaatctgcattcggcagctcaaaggccatgaacagat

SEQ ID NO: 456341 - DNA, 120 bp, Artificial Sequence
  ENSG00000156687_23 (sequence is synthesized)
cctccaagtgcagacatcaatcctagagagtgaacgagaaaccatcactttcttcgcacaagaggacagcactttccctgcacagactggccccaaagccttcaaaattccctactccat

SEQ ID NO: 456342 - DNA, 120 bp, Artificial Sequence
  ENSG00000156687_24 (sequence is synthesized)
cagacagcggatttgtgctacatttgatacccccaatgccaaaggcaaggactggcagatgttagcacagaaaaacagcatcaacaggaatttatcttatttcgctacacaaagtagccc

SEQ ID NO: 456343 - DNA, 120 bp, Artificial Sequence
  ENSG00000156687_25 (sequence is synthesized)
atctgctgtcattttgaacctgtgggaagctcgtcatcagcatgatggtgatcttgactccctggcctgtgcccttgaagagattgggaggacacacacgaaactctcaaacatttcaga

SEQ ID NO: 456344 - DNA, 120 bp, Artificial Sequence
  ENSG00000156687_26 (sequence is synthesized)
atcccagcttgatgaagccgacttcaactacagcaggcaaaatggactctagtccacttcctcccatgagacagagtgatggccagcttggggacatttgctttaaatgggaaagaggcc

SEQ ID NO: 456345 - DNA, 120 bp, Artificial Sequence
  ENSG00000156687_27 (sequence is synthesized)
gctttctgcccagtggcgttgggggaattcagccttcatttataatcagtgagattcccctgttgaagaaactaaattttatataggtaaaacatgttaatagggaagagtacaagctct

SEQ ID NO: 456346 - DNA, 120 bp, Artificial Sequence
  ENSG00000156687_28 (sequence is synthesized)
cttacatataagagggctctactatctccttggaatccacatttgggttaactcctcagatttggagtggcaaggataaaagtgagggcagaagtagctgtgggaaaagatgagctatga

SEQ ID NO: 456347 - DNA, 120 bp, Artificial Sequence
  ENSG00000156687_29 (sequence is synthesized)
taatgctgggaaggcagagattgattaagtgcatgctttgaaataggtttttaatgatgtgccccaaagggccagctgattctggtactagattgtcagagttttctaccaactggcatc

SEQ ID NO: 456348 - DNA, 120 bp, Artificial Sequence
  ENSG00000156687_30 (sequence is synthesized)
tgtgatgtcagagatcattgtaaaaatggcttttagacgtgaaacagggttgccaacccatttgtatgacttcaacaacgtcaaggagggcatttagaatttagaatctgagcacatcac

SEQ ID NO: 456349 - DNA, 120 bp, Artificial Sequence
  ENSG00000156687_31 (sequence is synthesized)
accagcaccagctccctgtctcttctagccacttaatggagacacaatggagaggtaagacagaccacaaactagttcttatagtgtactccaccttttacttttttcctgagacaaatc

SEQ ID NO: 456350 - DNA, 120 bp, Artificial Sequence
  ENSG00000156687_32 (sequence is synthesized)
tacccttattctttcttcctcttccttaccccttgcagtagggaggtatcaaggagcataattaaacttgtcaatacggaaagttgttttttctaacacaacaaagtgggaccatctcta

SEQ ID NO: 456351 - DNA, 120 bp, Artificial Sequence
  ENSG00000156687_33 (sequence is synthesized)
ttcccatctaagccactcaaattgctgagtgctattagaacacagcttattacatggatatggggacaggagagattaaagcaggttcaaaaacacatgaactgcagatgccataggcct

SEQ ID NO: 456352 - DNA, 120 bp, Artificial Sequence
  ENSG00000156687_34 (sequence is synthesized)
caaatcagctgtaattctaggagacacgtgttgatctagttatctaacattgttgttataagaaaatgagtttactgcatttttcaatccagattcttgaaattgtctaacatgtgggta

SEQ ID NO: 456353 - DNA, 120 bp, Artificial Sequence
  ENSG00000156687_35 (sequence is synthesized)
ctgtgtcatcacaaaatctctcagtaaggctatatgtgatcctcattttgcctcttgggaaattagcagatagtctttgctctaaatgatatctgagtaaatagacttgaggaatcctct

SEQ ID NO: 456354 - DNA, 120 bp, Artificial Sequence
  ENSG00000156687_36 (sequence is synthesized)
accacagtgtccctgaaaccacatgcatcattcaggaagccttcaccctgtgactattcagcctccctgaatatgctttctctatagaaccactaacatatggctattgctctatgattt

SEQ ID NO: 456355 - DNA, 120 bp, Artificial Sequence
  ENSG00000156687_37 (sequence is synthesized)
ttttttttacattaggaggcagtgatattgtggaagattgaaatccacagataattcatgaccctcatcttatcactttactccatctttttatcctattaaattatttttgacaagatg

SEQ ID NO: 456356 - DNA, 120 bp, Artificial Sequence
  ENSG00000156687_38 (sequence is synthesized)
ctcttgctcatcttctggtggatattttaacttgctattcacaatcaggacaaccaaagtcaaggacccagatgaaccacaaggcagctagtcagctacttagaggttggttacattcga

SEQ ID NO: 456357 - DNA, 120 bp, Artificial Sequence
  ENSG00000156687_39 (sequence is synthesized)
ataaaaagtagtcagggaatgggggaggtggggagttggggagtacttggcagttgggatatgatccatttttttaaacaagttttttgtagatcccttgtaaaataataataataatgt

SEQ ID NO: 456358 - DNA, 120 bp, Artificial Sequence
  ENSG00000156687_40 (sequence is synthesized)
tgtgaatctccatgccaagtgaaaaaggcctaaagatgagttgaatttgtgataccatgggtaaggcatggaagaactcttgaatgtgttggccattttctctaactaacatgtggtatg

SEQ ID NO: 456359 - DNA, 120 bp, Artificial Sequence
  ENSG00000156687_41 (sequence is synthesized)
tatggtcccctatattagatagaagtctttgctacatgtaattcaaaagcatctcgcttttctcaggaaccaaaggcttatgatgtaggacaaagaaatcatcttagaactgtcaagcat

SEQ ID NO: 456360 - DNA, 120 bp, Artificial Sequence
  ENSG00000156687_42 (sequence is synthesized)
attttcacaataccatgtcaagatcaggaaaacacccttttgctagtgtgcttaacttatttatttcttctaggaaacaatagataaacagcatgaaaatgtaaatcatctggcatcact

SEQ ID NO: 456361 - DNA, 120 bp, Artificial Sequence
  ENSG00000156687_43 (sequence is synthesized)
gatagaatttctgaaagagaaagagaagtagatggtcaaccagtcactagttggttggcatgaggtggtgtgcagaggaaagctgcattcactattgagtaaaaacttgtagaaagcaca

SEQ ID NO: 456362 - DNA, 120 bp, Artificial Sequence
  ENSG00000156687_44 (sequence is synthesized)
ttatagagcttatgttggaatccatcttggaggatttttgttttaaactgtctttagcattttccctcttcccttctaatgggcattataattgtttcatctactctgtgaatctacata

SEQ ID NO: 456363 - DNA, 120 bp, Artificial Sequence
  ENSG00000156687_45 (sequence is synthesized)
ggtctttttttttagatgtttgatacattttaagtatttttaaatagatgaaaattctaaatgattttccctcaaatctatctagattattttaagatgagacaagattattgtcaatcc

SEQ ID NO: 456364 - DNA, 120 bp, Artificial Sequence
  ENSG00000156687_46 (sequence is synthesized)
ctgaatgtctggagttacctcccatggatttttttttcctttggcctgggttttataaacaacttgaacatcatatcatataggataacaaaggaggaagttaacttaattcacctcaga

SEQ ID NO: 456365 - DNA, 120 bp, Artificial Sequence
  ENSG00000156687_47 (sequence is synthesized)
cttcagcctaagattcaatcaaattcatccttcagcctgtcttgtttcttctttatgtttcttttacttattgctgctaggatcctacataggatttctatagaaatgtatgaaattctg

SEQ ID NO: 456366 - DNA, 120 bp, Artificial Sequence
  ENSG00000156687_48 (sequence is synthesized)
tggtcactgcatgtcaggattgcacagtatgttacaatacaatttcaaagagaacccacatttgtgagatttacagaccaaggtgtggtggaggaggtagaattgcagatcagataaaaa

SEQ ID NO: 456367 - DNA, 120 bp, Artificial Sequence
  ENSG00000156687_49 (sequence is synthesized)
gtgagcttacacttgaacttagttattcactgtgacctaaatttagtcctattgtaatatgtgcctgtcacaacacaaatacccctcttgaaagagatttactcatctatccaagcactt

SEQ ID NO: 456368 - DNA, 120 bp, Artificial Sequence
  ENSG00000156687_50 (sequence is synthesized)
aatttggaaattttattgtcctattgcaaaatgaaacaaaattaaaagtggcctcgagtacttggtaagttacttaaaatttttacaaaaatatcccactcaatgccaaatctttcagtc

SEQ ID NO: 456369 - DNA, 120 bp, Artificial Sequence
  ENSG00000156687_51 (sequence is synthesized)
ctcaaaggcatttaagtccaatagtcatgctttaaatatggctttaaattatgccaccaaaatggtgcacttcacagattcaccagactgtagcatcataaagttaatttacagttttta

SEQ ID NO: 456370 - DNA, 120 bp, Artificial Sequence
  ENSG00000156687_52 (sequence is synthesized)
caacattgcttctacattcttactggtttacattaaaatcctttaagccaaaaggaagcttgctctatggatttaaatgcaaacttcatttaccagtgcaggaagtctcataaaactcag

SEQ ID NO: 456371 - DNA, 120 bp, Artificial Sequence
  ENSG00000156687_53 (sequence is synthesized)
atgtactcccacaaaaattttattggcctttttgtaagagatgaaaaagaattgacacagttctctttaaagagaagaacttttttattattatttttatctccaactgcaggtggtgtc

SEQ ID NO: 456372 - DNA, 120 bp, Artificial Sequence
  ENSG00000156687_54 (sequence is synthesized)
ttttgccaaggtctctgtatttttctttcagttgtctttgggaggggatgttaagtcaaatcactaaaacagggttctctttggattaaaagttctggatttattgcaactattttcctt

SEQ ID NO: 456373 - DNA, 120 bp, Artificial Sequence
  ENSG00000156687_55 (sequence is synthesized)
gagaaacattctcagcatcaggattgataaacaaatgtagatgattaaaataggataattggttttagataatatcttctactgccaaacttctggcaaatttacctgtgaatttcaaaa

SEQ ID NO: 456374 - DNA, 120 bp, Artificial Sequence
  ENSG00000156687_56 (sequence is synthesized)
tgttataaaatctcttgatatgcttttgtttttccttttagccattttctcttcaatttcttagtccctctgccctctgtaaatgtgttgagtgatatagctatcagatgtattgaaggc

SEQ ID NO: 456375 - DNA, 120 bp, Artificial Sequence
  ENSG00000156687_57 (sequence is synthesized)
aaagttctcgcagaggtctctgttccagctctgtaaaggtcacaggaatcgtgaaggagctgagaaatcttcctctccggcccactgtctgtggcccattgtcattgtttcctcatgaaa

SEQ ID NO: 456376 - DNA, 120 bp, Artificial Sequence
  ENSG00000156687_58 (sequence is synthesized)
cattgcagagtttgaatcctcagtaactctcattgactggattagaggtgatggccacagcaaatgggagagcaaaatgttggcctacagagaatgacacaattttattcgcctttggtg

SEQ ID NO: 456377 - DNA, 120 bp, Artificial Sequence
  ENSG00000156687_59 (sequence is synthesized)
ttagttgccatagtgctgtatttgaaaatcgatgctttagccaaaagctgaatgaccaccgtttccgtagtttccactgttttgtctgcatagaattttcctgaactacaagcaaaaatg

SEQ ID NO: 456378 - DNA, 120 bp, Artificial Sequence
  ENSG00000156687_60 (sequence is synthesized)
tattttgtccaatgtcacaaaagtgaaaatgttactaatcttagatgtgttgcatattttgtgtttttacgttccaaactctttcaaaagctgccgttacaaagctgtttggctgtattg

SEQ ID NO: 456379 - DNA, 120 bp, Artificial Sequence
  ENSG00000156687_61 (sequence is synthesized)
acagcatgtggtgtttttacaaaagcaattctaggagagccagtgtctaccatgaactcctgacatccccactccagggtcattcatgacattgaaatggcaacttgtacactgtaattc

SEQ ID NO: 456380 - DNA, 120 bp, Artificial Sequence
  ENSG00000156687_62 (sequence is synthesized)
ttcgaaaagtaacaggggatggaaatcagacctggccgttagtcactagtgtgtagtaccgtgatctgaagtaggaaatttaactgacatagaataattgtggtttttgaagcagctact

SEQ ID NO: 456381 - DNA, 120 bp, Artificial Sequence
  ENSG00000156687_63 (sequence is synthesized)
cattgctttttccttttgctgtgaagatcatggattgggaatgtcctcgtgaggtggacctaaggcagtaacatttaaacttcatgtcctagcacccgccctccatctgacccaaagata

SEQ ID NO: 456382 - DNA, 120 bp, Artificial Sequence
  ENSG00000156687_64 (sequence is synthesized)
aaaaaggcatcaagcttcatggttatgcctaagcttaaaaattcccttccccactactaatattgagttcagcagggccccatcttacttatttttcaaaaaagttatagctttgaatta

SEQ ID NO: 456383 - DNA, 120 bp, Artificial Sequence
  ENSG00000156687_65 (sequence is synthesized)
tagactatattactaaatttggtaaggtagttctttgcatgaatgggaatgtgtgtcaaaatactttcacaaaaggcatgattacaatggaaatgcccctttgcctccagttttgctaac

SEQ ID NO: 456384 - DNA, 120 bp, Artificial Sequence
  ENSG00000156687_66 (sequence is synthesized)
cctaaaaagtatttcactaatttcaagcactgtttacactcaaatcccaaaattggccaaattatataattctcttaaattttcatttctgtaggtggagatttaactatggttctggtg

SEQ ID NO: 456385 - DNA, 120 bp, Artificial Sequence
  ENSG00000156687_67 (sequence is synthesized)
aatcatagaagggagagacaatatttgaggggagtttatcagcagaatatcatgccttatgaccccattactgaaacacagacattacaatcagaaatagacctaataattccaatatcc

SEQ ID NO: 456386 - DNA, 120 bp, Artificial Sequence
  ENSG00000156687_68 (sequence is synthesized)
ctccattaactagttccagtgatgctgagagacacagcaccctgtgccaggtatcagaaatataagcctcagcagagggtaactgaaaactttcaatcagaaacactctccaaggcttat

SEQ ID NO: 456387 - DNA, 120 bp, Artificial Sequence
  ENSG00000156687_69 (sequence is synthesized)
ggctagattatgtaggtcactaccattcaaaacttttctatacaaaggtggaaaagcactcagaatctgggaattttctggttggaagaacaatgttctccttttccaaattggaataaa

SEQ ID NO: 456388 - DNA, 120 bp, Artificial Sequence
  ENSG00000156687_70 (sequence is synthesized)
gactcagaattacccattcttcataatcatgtctgattggtacatacactccaggaagtctcaacctagaaacatttccaacctaagcatttaaaggaaaactggctcattcttctgacc

SEQ ID NO: 456389 - DNA, 120 bp, Artificial Sequence
  ENSG00000156687_71 (sequence is synthesized)
caaactcaaaaaatatgagtacttgcgtacctccatttctgcatgaagattttaaaacagatttcatttttttctgtttattttgggaaggtgcgtgggggtgttctttcaagtgattca

SEQ ID NO: 456390 - DNA, 120 bp, Artificial Sequence
  ENSG00000156687_72 (sequence is synthesized)
catctcaaacccataccactctcaacttttatttgatgtgttcaaagccaaaaaataaaataaaataaagcagggctgaacacttaatttgacatgaagctgaaggactgagcaagccag

SEQ ID NO: 456391 - DNA, 120 bp, Artificial Sequence
  ENSG00000156687_73 (sequence is synthesized)
aggagagaggttgaatgaagcatagccttggcttcataccacactttttgtgccttgtattatcaatgtaaattctgaatgttgtacagtaaacttggatggacttcttagaaaaggctg

SEQ ID NO: 456392 - DNA, 120 bp, Artificial Sequence
  ENSG00000156687_74 (sequence is synthesized)
cactggcttctttttcagcacatgtacatatctataaatatatatacatatatatttggtaatgccaaacagctctgttatattgtattgaacaaaatggacggtttggatgttttatgt

SEQ ID NO: 456393 - DNA, 120 bp, Artificial Sequence
  ENSG00000156687_75 (sequence is synthesized)
cgagtttgcaaaaaaaaaaaaaaaaaaaaaaactggatggttgcagacttttcaagataaatgtacagacgtaaattactgcatatcagttatttatgaataaagagtcttttattgaca

SEQ ID NO: 456394 - DNA, 120 bp, Artificial Sequence
  ENSG00000156687_76 (sequence is synthesized)
ttaaataagtagggattgtttaaaaaaaaaagctgtaatatgttatctgggggtggatgatcctggtgttagttaaagctctcagtgatgtctgtgctgggacttccgggttcctgttgg

SEQ ID NO: 456395 - DNA, 120 bp, Artificial Sequence
  ENSG00000156687_77 (sequence is synthesized)
ttgcctacacttaaactcaacttatgtgtattgtaaatctctaagacaatattagtcttaccaaacttacctgaccattttgttttatttttatttttagccaagaatatcatggaacta

SEQ ID NO: 456396 - DNA, 120 bp, Artificial Sequence
  ENSG00000156687_78 (sequence is synthesized)
cttgatttacacagcaaaccagaaccaatgctgagattagattttgcagtcttcatctcagcatggattgaatgctccctttgattccctgttagagctgataactatatttgcctgaaa

SEQ ID NO: 456397 - DNA, 120 bp, Artificial Sequence
  ENSG00000156687_79 (sequence is synthesized)
ggtttgggtagtccccaggctttaagcccctttggagtatatttcctaggcatgataagaaagcactgaaaaaattctctggcatgacagaccagggccccatgtttatacctaagcatg

SEQ ID NO: 456398 - DNA, 120 bp, Artificial Sequence
  ENSG00000156687_80 (sequence is synthesized)
gtttatgtactagtttgataatttagataatttagtgaaatgacatctcatcagtaactgacctaatgaacactccatagcccttgctatagtgttactttctggtgagcaacgatgagg

SEQ ID NO: 456399 - DNA, 120 bp, Artificial Sequence
  ENSG00000156687_81 (sequence is synthesized)
ggttgttgtagagttgctcttttgaatttaaacttcagttccagggctatgtcagtataatgaattctcacatattttgttcctccttttagctggaagagaggagattttcatgatgtt

SEQ ID NO: 456400 - DNA, 120 bp, Artificial Sequence
  ENSG00000156687_82 (sequence is synthesized)
ttgacatgatacttaaagtatccagcccagatcacttttaaaatgatatcctttctatggattagttttcaaagttgctgcctaagacctaagtggatggtagacaaggtcaatttctgc

SEQ ID NO: 456401 - DNA, 120 bp, Artificial Sequence
  ENSG00000156687_83 (sequence is synthesized)
tcggatttctaagcaatgagaattaggtagtgcactgaagcaggtagtgatctgttggctgctaagagggaagagtatctgttggatctgtaagtgtttatcaaacaacaggtcagcatt

SEQ ID NO: 456402 - DNA, 120 bp, Artificial Sequence
  ENSG00000156687_84 (sequence is synthesized)
gagtcagggacattatagtctagacagatgtctctctagggtggagctaaccaacctctcaaatcgagcatttcattccataaataaaatctgtaataggactagtctgattctaccatt

SEQ ID NO: 456403 - DNA, 120 bp, Artificial Sequence
  ENSG00000156687_85 (sequence is synthesized)
ctagctaactgacccctctagtagcttagagactggagactgaaattcatttctagttgatgaatgttgtcttgttctcccctagagcaattacttccttaaaatcttcatttcaaaaca

SEQ ID NO: 456404 - DNA, 120 bp, Artificial Sequence
  ENSG00000156687_86 (sequence is synthesized)
tattttacttcatcaaaatagccctcaatggcagccgtaattgaatggttttgttttttaaatttctaattctctaaatcttcattggtcaatgttttaggacatggtaaggatctttgt

SEQ ID NO: 456405 - DNA, 120 bp, Artificial Sequence
  ENSG00000156687_87 (sequence is synthesized)
tcaaatgtgtatgcgtgtcaatgtgtgaatgcctacgcatgatttaattcttccagttgataattggaagataatgagtcaatcagacatatttaccaattaacttttctgtaagaattc

SEQ ID NO: 456406 - DNA, 120 bp, Artificial Sequence
  ENSG00000156689_0 (sequence is synthesized)
cttagaattgtagaagctgctcaatatggaacatattctcagtcctcctctggtctacaaagcctgtgatttcttgtctatggacagaacgtctggtttaatctacaggaacccataact

SEQ ID NO: 456407 - DNA, 120 bp, Artificial Sequence
  ENSG00000156689_1 (sequence is synthesized)
tcctgaagctttatgcttaacagtgacaacgtgagtcagttgaattttattgtgtttcagtccgtagagtattagctacagaaacctttccattgccatactgagaaactgcagcaggca

SEQ ID NO: 456408 - DNA, 120 bp, Artificial Sequence
  ENSG00000156689_2 (sequence is synthesized)
gtgtgcctacaggtctacaaagaaacttcagatcatcttcttgagggaaagaagctgaagtgctacataagatgcttgtgcttcataactctcagaagctgcagattctgtataaatcct

SEQ ID NO: 456409 - DNA, 120 bp, Artificial Sequence
  ENSG00000156689_3 (sequence is synthesized)
tagaaaagagcatccctgaatccataaaggtatatggcgccattttcaacataaaagataaaaaccctttcaacatggaggtgctggtagatgcctggccagattaccagatcgtcatta

SEQ ID NO: 456410 - DNA, 120 bp, Artificial Sequence
  ENSG00000156689_4 (sequence is synthesized)
cccggcctcagaaacaggagatgaaagatgaccaggatcattataccaacacttaccacatcttcaccaaagctcctgacaaattagaggaagtcctgtcatactccaatgtaatcagct

SEQ ID NO: 456411 - DNA, 120 bp, Artificial Sequence
  ENSG00000156689_5 (sequence is synthesized)
gggagcaaactttgcagatccaaggttgccaagagggcttggatgaagcaataagaaaggttgcaacttcaaaatcagtgcaggtagattacatgaaaaccatcctctttataccggaat

SEQ ID NO: 456412 - DNA, 120 bp, Artificial Sequence
  ENSG00000156689_6 (sequence is synthesized)
taccaaagaaacacaagacctcaagtaatgacaagatggagttatttgaagtggatgatgataacaaggaaggaaacttttcaaacatgttcttagatgcttcacatgcaggtcttgtga

SEQ ID NO: 456413 - DNA, 120 bp, Artificial Sequence
  ENSG00000156689_7 (sequence is synthesized)
atgaacactgggcctttgggaaaaatgagaggagcttgaaatatattgaacgctgcctccaggattttctaggatttggtgtgctgggtccagagggccagcttgtctcttggattgtga

SEQ ID NO: 456414 - DNA, 120 bp, Artificial Sequence
  ENSG00000156689_8 (sequence is synthesized)
tggaacagtcctgtgagttgagaatgggttatactgtccccaaatacagacaccaaggcaacatgttgcaaattggttatcatcttgaaaagtatctttctcagaaagaaatcccatttt

SEQ ID NO: 456415 - DNA, 120 bp, Artificial Sequence
  ENSG00000156689_9 (sequence is synthesized)
atttccatgtggcagataataatgagaaaagcctacaggcactgaacaatttggggtttaagatttgtccttgtggctggcatcagtggaaatgcacccccaagaaatattgttgattga

SEQ ID NO: 456416 - DNA, 120 bp, Artificial Sequence
  ENSG00000156689_10 (sequence is synthesized)
ttccactgtccatttcaaatctttcttatcagtaaaaaaacattaattcaaacacaagcattgtgatctacattagcacaaaatgcaactgattatctaggatctgtgtattacttaagc

SEQ ID NO: 456417 - DNA, 120 bp, Artificial Sequence
  ENSG00000156689_11 (sequence is synthesized)
tcacccttaacagttttaccttccttctcctctgtattcttacagaaaattagaagctcaattttatggtctcataatttcctttatgacagacatctcagaattaaaatcacccaaagc

SEQ ID NO: 456418 - DNA, 120 bp, Artificial Sequence
  ENSG00000156689_12 (sequence is synthesized)
caatcattagtgccaagataaccctttaacggcaacactttcttaaatgaagactatttctttcatgaaaaaattcacttttatgactttcttgttaaaataaaaagtctgcttttaaaa

SEQ ID NO: 456419 - DNA, 120 bp, Artificial Sequence
  ENSG00000156689_13 (sequence is synthesized)
agtccgtagagtattagctacagaaacctttccattgccatactgagaaactgcagcaggcagtgtgcctacaggtctacaaagaaacttcagagtctcacactgtcacccaggctggaa

SEQ ID NO: 456420 - DNA, 69 bp, Artificial Sequence
  ENSG00000156689_14 (sequence is synthesized)
acactcaccaccacacccagatcatcttcttgagggaaagaagctgaagtgctacataagatgcttgtg

SEQ ID NO: 456421 - DNA, 120 bp, Artificial Sequence
  ENSG00000156697_0 (sequence is synthesized)
ccttcggcttccgttcttggtccatgtgagagaagctggctgctgaaatgactgcgaaccggcttgcagagagccttctggctttgagccaacaggaagaactagcggatttgccaaaag

SEQ ID NO: 456422 - DNA, 120 bp, Artificial Sequence
  ENSG00000156697_1 (sequence is synthesized)
actacctcttgagtgagagtgaagatgagggggacaatgatggagagagaaagcatcaaaagcttctggaagcaatcagttcccttgatggaaagaataggcggaaattggctgagaggt

SEQ ID NO: 456423 - DNA, 120 bp, Artificial Sequence
  ENSG00000156697_2 (sequence is synthesized)
ctgaggctagtctgaaggtgtcagagttcaatgtcagttctgaaggatcaggagaaaagctggtccttgcagatctgcttgagcctgttaaaacttcatcttctttggccactgtgaaaa

SEQ ID NO: 456424 - DNA, 120 bp, Artificial Sequence
  ENSG00000156697_3 (sequence is synthesized)
agcaactgagtagagtcaaatcaaagaagacagtggagttacctctgaacaaagaagagattgaacggatccacagagaagtagcattcaataaaaccgcacaagtcctctccaaatggg

SEQ ID NO: 456425 - DNA, 120 bp, Artificial Sequence
  ENSG00000156697_4 (sequence is synthesized)
accctgtcgtcctgaagaaccggcaggcagagcagctggtttttcccctggagaaagaggagccagccattgctcccattgaacatgtgctcagtggctggaaggcaagaactcccctgg

SEQ ID NO: 456426 - DNA, 120 bp, Artificial Sequence
  ENSG00000156697_5 (sequence is synthesized)
agcaggaaattttcaacctcctccataagaacaagcagccagtgacagaccctttactgacccctgtggaaaaggcctctctccgagccatgagcctagaagaggcaaagatgcgacgag

SEQ ID NO: 456427 - DNA, 120 bp, Artificial Sequence
  ENSG00000156697_6 (sequence is synthesized)
cagagcttcagagggctcgggctctgcagtcctactatgaggccaaggctcgaagagagaagaaaatcaaaagtaaaaagtatcacaaagtcgtgaagaaaggaaaggccaagaaagccc

SEQ ID NO: 456428 - DNA, 120 bp, Artificial Sequence
  ENSG00000156697_7 (sequence is synthesized)
taaaagagtttgagcagctgcggaaggttaatccagctgcagcactagaagaactggaaaaaattgaaaaggccagaatgatggaaagaatgagccttaagcaccaaaacagtgggaaat

SEQ ID NO: 456429 - DNA, 120 bp, Artificial Sequence
  ENSG00000156697_8 (sequence is synthesized)
gggccaagtcaaaggcaattatggccaaatatgacctggaggctcgccaagctatgcaggaacagttgtctaagaacaaagaactgacacagaaactccaggtagcctctgagagtgagg

SEQ ID NO: 456430 - DNA, 120 bp, Artificial Sequence
  ENSG00000156697_9 (sequence is synthesized)
aagaggagggaggcacagaagatgtggaagaactccttgtccctgatgtagtgaatgaagtgcagatgaatgcagatgggccgaatccctggatgctcaggagctgcaccagtgacacca

SEQ ID NO: 456431 - DNA, 120 bp, Artificial Sequence
  ENSG00000156697_10 (sequence is synthesized)
ttgagagaatttgaggaaaggcgatcccttagaaaaagatctgagctcagccaagatgctgagccagcaggcagtcaagaaacaaaagattctggcagccaggaggtgctgtctgaattg

SEQ ID NO: 456432 - DNA, 120 bp, Artificial Sequence
  ENSG00000156697_11 (sequence is synthesized)
agagtactatctcagaaattgaaggaaaaccatcagtccaggaagcaaaaagcaagttcagaggggactattccccaggtccagagagaggaacctgccccagaagaagaggagcccctg

SEQ ID NO: 456433 - DNA, 120 bp, Artificial Sequence
  ENSG00000156697_12 (sequence is synthesized)
ttgctacagagaccagagagagtacagacgctggaagagctagaagagctgggaaaagaagaatgttttcaaaataaggagcttcccagacctgtgttagaagggcagcagtcagagagg

SEQ ID NO: 456434 - DNA, 120 bp, Artificial Sequence
  ENSG00000156697_13 (sequence is synthesized)
accccaaataatcgccctgatgcccctaaggagaagaaaaagaaggagcaaatgatcgacctacagaacctcctaaccacacaatctccctccgtgaagtctttggcagttcccacaata

SEQ ID NO: 456435 - DNA, 120 bp, Artificial Sequence
  ENSG00000156697_14 (sequence is synthesized)
gaggagctggaagatgaagaggagagaaaccataggcagatgataaaggaagcttttgctggggatgatgtcatcagagatttcttgaaagagaagagggaagctgtggaggcgagtaag

SEQ ID NO: 456436 - DNA, 120 bp, Artificial Sequence
  ENSG00000156697_15 (sequence is synthesized)
ccaaaggacgtggacctgacactacctggctggggcgagtggggtggtgtgggcctaaagcccagtgccaagaaaagacgccggtttctcattaaagcccctgagggtcctccaagaaaa

SEQ ID NO: 456437 - DNA, 120 bp, Artificial Sequence
  ENSG00000156697_16 (sequence is synthesized)
gataagaatttgccaaatgtgattatcaatgagaagcgcaacatccacgcagctgctcatcaggtacgagtgcttccatatccatttacccaccattggcaatttgaaaggaccatccag

SEQ ID NO: 456438 - DNA, 120 bp, Artificial Sequence
  ENSG00000156697_17 (sequence is synthesized)
acccccataggatccacatggaacacccagagggctttccaaaagctgactactcccaaggtcgtcaccaagccaggccatatcattaaccccataaaagcagaagacgtgggctaccgg

SEQ ID NO: 456439 - DNA, 120 bp, Artificial Sequence
  ENSG00000156697_18 (sequence is synthesized)
tcttcctcaaggtcggacctgtctgtcatacagaggaatccaaaacgaatcaccacacgtcacaaaaaacagctgaagaaatgctctgtagattgagttgctggaggagtgacagccagg

SEQ ID NO: 456440 - DNA, 120 bp, Artificial Sequence
  ENSG00000156697_19 (sequence is synthesized)
agccctgacttcacttcctttggtccagttttactctgatacagggtggattccaaaactggctcagtacattgcatgtagttaagccacattttaaaaataaaggcattttttaatcta

SEQ ID NO: 456441 - DNA, 120 bp, Artificial Sequence
  ENSG00000156697_20 (sequence is synthesized)
agactatgggagaaaaaaaaaatgtgtccacccacacacaaaactgcatagtgattaggcgctggggacttgcaagagtgcgtacactggatccctgaagagaaattagattcataacta

SEQ ID NO: 456442 - DNA, 120 bp, Artificial Sequence
  ENSG00000156697_21 (sequence is synthesized)
tttttcttcgaagacatttaataagcagtcatctgcatggccgtgcaacgtggttcaggcacattttctgttcttgggggcttacagccttcagaaacccataataactaaaccatactc

SEQ ID NO: 456443 - DNA, 120 bp, Artificial Sequence
  ENSG00000156697_22 (sequence is synthesized)
gaagtcagggtatgagttagcgttcctggtacctacacaccagggagaagtacgtatggtagaatggcaaatctgaaagtccattcacacctgtagacacagataggtcaattttgagac

SEQ ID NO: 456444 - DNA, 120 bp, Artificial Sequence
  ENSG00000156697_23 (sequence is synthesized)
tttacggaatgaatgactccacagggccacatggcaaattagaattgtgactccatactcaggctctatttgtatgttatattttctacctgttatcttgaagagatcttattgacaatg

SEQ ID NO: 456445 - DNA, 120 bp, Artificial Sequence
  ENSG00000156697_24 (sequence is synthesized)
ttagcacctgtgagattggtcagagagttcccattctggcaataaaccaggacactaaaaaacctgcctaggaaactagctacattgagaaatcacttggctatctggacaaattaccag

SEQ ID NO: 456446 - DNA, 120 bp, Artificial Sequence
  ENSG00000156697_25 (sequence is synthesized)
gtctggtttggtttcacataggaatgcatttagatgatggcaaaaatctggttttacacggcaaaagaattatttttttctacttttttttgtttaagagacagggttttgctctgtcat

SEQ ID NO: 456447 - DNA, 120 bp, Artificial Sequence
  ENSG00000156697_26 (sequence is synthesized)
ccaggctggaatacagcagtgcaatcataccttactgcagcctaagacctcccaggctcaagcgatcctcttggctcagcctcccaactagctgggactacatgcacgtgccaccatgct

SEQ ID NO: 456448 - DNA, 73 bp, Artificial Sequence
  ENSG00000156697_27 (sequence is synthesized)
ctcccaactagctgggactacatgcacgtgccaccatgctgagctaagtttttgtagagactgatatcctctc

SEQ ID NO: 456449 - DNA, 120 bp, Artificial Sequence
  ENSG00000156697_28 (sequence is synthesized)
accgcacccagcctccttttttttttcctttttttttttcaggtttccacatacaaaaatttattttaaaagagctatcatttagaatatattatagggacctttacttaatagttttgg

SEQ ID NO: 456450 - DNA, 120 bp, Artificial Sequence
  ENSG00000156697_29 (sequence is synthesized)
ctggatatttttgggattaataattgcaagtagtcacttctgagagaattttggaaagcagcacagcgggctgagattgtgggggtgtacatatatgaccacaggaccctagtggctttc

SEQ ID NO: 456451 - DNA, 120 bp, Artificial Sequence
  ENSG00000156697_30 (sequence is synthesized)
tcttgagccccctcaacaactggccatctagctaaatgtgcagagcggctgactgtgatatgaaagaatgaaagatagatttgcatttccttggacagtaaataaattgaattttctcac

SEQ ID NO: 456452 - DNA, 120 bp, Artificial Sequence
  ENSG00000156709_0 (sequence is synthesized)
gttccccttccccggctctagcaggccggcttctctgtccaatgcccacccggagctgggaggaggagtctgcgtaatgtgcgtgtgaagagactgggggagctggccggggctcacggt

SEQ ID NO: 456453 - DNA, 120 bp, Artificial Sequence
  ENSG00000156709_1 (sequence is synthesized)
gtttgacccgtcggtcgtgcgtgagaggaaagggaaggaggaggtcccgaatagcggtcgccgaaatgttccggtgtggaggcctggcggcgggtgctttgaagcagaagctggtgccct

SEQ ID NO: 456454 - DNA, 120 bp, Artificial Sequence
  ENSG00000156709_2 (sequence is synthesized)
tggtgcggaccgtgtgcgtccgaagcccgaggcagaggaaccggctcccaggcaacttgttccagcgatggcatgttcctctagaactccagatgacaagacaaatggctagctctggtg

SEQ ID NO: 456455 - DNA, 120 bp, Artificial Sequence
  ENSG00000156709_3 (sequence is synthesized)
catcagggggcaaaatcgataattctgtgttagtccttattgtgggcttatcaacagtaggagctggtgcctatgcctacaagactatgaaagaggatgaaaaaagatacaatgaaagaa

SEQ ID NO: 456456 - DNA, 120 bp, Artificial Sequence
  ENSG00000156709_4 (sequence is synthesized)
tttcagggttagggctgacaccagaacagaaacagaaaaaggccgcgttatctgcttcagaaggagaggaagttcctcaagacaaggcgccaagtcatgttcctttcctgctaattggtg

SEQ ID NO: 456457 - DNA, 120 bp, Artificial Sequence
  ENSG00000156709_5 (sequence is synthesized)
gaggcacagctgcttttgctgcagccagatccatccgggctcgggatcctggggccagggtactgattgtatctgaagatcctgagctgccgtacatgcgacctcctctttcaaaagaac

SEQ ID NO: 456458 - DNA, 120 bp, Artificial Sequence
  ENSG00000156709_6 (sequence is synthesized)
tgtggttttcagatgacccaaatgtcacaaagacactgcgattcaaacagtggaatggaaaagagagaagcatatatttccagccaccttctttctatgtctctgctcaggacctgcctc

SEQ ID NO: 456459 - DNA, 120 bp, Artificial Sequence
  ENSG00000156709_7 (sequence is synthesized)
atattgagaatggtggtgtggctgtcctcactgggaagaaggtagtacagctggatgtgagagacaacatggtgaaacttaatgatggctctcaaataacctatgaaaagtgcttgattg

SEQ ID NO: 456460 - DNA, 120 bp, Artificial Sequence
  ENSG00000156709_8 (sequence is synthesized)
caacaggaggtactccaagaagtctgtctgccattgatagggctggagcagaggtgaagagtagaacaacgcttttcagaaagattggagactttagaagcttggagaagatttcacggg

SEQ ID NO: 456461 - DNA, 120 bp, Artificial Sequence
  ENSG00000156709_9 (sequence is synthesized)
ggcagaaaggctcgagccttgggcacagaagtgattcaactcttccccgagaaaggaaatatgggaaagatcctccccgaatacctcagcaactggaccatggaaaaagtcagacgagag

SEQ ID NO: 456462 - DNA, 120 bp, Artificial Sequence
  ENSG00000156709_10 (sequence is synthesized)
ggggttaaggtgatgcccaatgctattgtgcaatccgttggagtcagcagtggcaagttacttatcaagctgaaagacggcaggaaggtagaaactgaccacatagtggcagctgtgggc

SEQ ID NO: 456463 - DNA, 120 bp, Artificial Sequence
  ENSG00000156709_11 (sequence is synthesized)
ctggagcccaatgttgagttggccaagactggtggcctggaaatagactcagattttggtggcttccgggtaaatgcagagctacaagcacgctctaacatctgggtggcaggagatgct

SEQ ID NO: 456464 - DNA, 120 bp, Artificial Sequence
  ENSG00000156709_12 (sequence is synthesized)
gcatgcttctacgatataaagttgggaaggaggcgggtagagcaccatgatcacgctgttgtgagtggaagattggctggagaaaatatgactggagctgctaagccgtactggcatcag

SEQ ID NO: 456465 - DNA, 120 bp, Artificial Sequence
  ENSG00000156709_13 (sequence is synthesized)
tcaatgttctggagtgatttgggccccgatgttggctatgaagctattggtcttgtggacagtagtttgcccacagttggtgtttttgcaaaagcaactgcacaagacaaccccaaatct

SEQ ID NO: 456466 - DNA, 120 bp, Artificial Sequence
  ENSG00000156709_14 (sequence is synthesized)
gccacagagcagtcaggaactggtatccgatcagagagtgagacagagtccgaggcctcagaaattactattcctcccagcaccccggcagttccacaggctcccgtccagggggaggac

SEQ ID NO: 456467 - DNA, 120 bp, Artificial Sequence
  ENSG00000156709_15 (sequence is synthesized)
tacggcaaaggtgtcatcttctacctcagggacaaagtggtcgtggggattgtgctatggaacatctttaaccgaatgccaatagcaaggaagatcattaaggacggtgagcagcatgaa

SEQ ID NO: 456468 - DNA, 120 bp, Artificial Sequence
  ENSG00000156709_16 (sequence is synthesized)
gatctcaatgaagtagccaaactattcaacattcatgaagactgaagccccacagtggaattggcaaacccactgcagcccctgagaggaggtcgaatgggtaaaggagcatttttttat

SEQ ID NO: 456469 - DNA, 120 bp, Artificial Sequence
  ENSG00000156709_17 (sequence is synthesized)
tcagcagactttctctgtgtatgagtgtgaatgatcaagtcctttgtgaatattttcaactatgtaggtaaattcttaatgttcacatagtgaaataaattctgattcttctaaattaaa

SEQ ID NO: 456470 - DNA, 120 bp, Artificial Sequence
  ENSG00000156709_18 (sequence is synthesized)
tagatcactagcatctacaggtgcttctgggaaagatggcagcaacctagtgtacttcttaattgtaggagcaacagtcactggggcaggagtttattatgcctacaagactatgaaaga

SEQ ID NO: 456471 - DNA, 120 bp, Artificial Sequence
  ENSG00000156709_19 (sequence is synthesized)
gtgagtcactgcacctggccaacagcaatactttctttcctttcttttcctctaccctctatgccaggactccttagaaataaaatattaaggaaagtgagttatgaagatgataagggc

SEQ ID NO: 456472 - DNA, 120 bp, Artificial Sequence
  ENSG00000156709_20 (sequence is synthesized)
aatgcagactacagaattatgggtgtctttgaactgctgcttcctgtaaaatgccaaaaacttctttgggcacatgatggttcccagcttgagagatctgtgagctccagttggaatgtt

SEQ ID NO: 456473 - DNA, 120 bp, Artificial Sequence
  ENSG00000156709_21 (sequence is synthesized)
tcatggcaactagttttcttaatgttctttttcagatatatgaaatcagggcatcttttcaggaggatgcttcctattcagaggttgcaaagcacttatgtaagccttaggtgactgcat

SEQ ID NO: 456474 - DNA, 120 bp, Artificial Sequence
  ENSG00000156709_22 (sequence is synthesized)
gggtggaagtgcacagagttcaccatctgaagcttaatctggggccagcagttctgatacctgttgtatttgcgttacaaatgaacttgagcaccgaggccctcatgcccactgtcctgt

SEQ ID NO: 456475 - DNA, 120 bp, Artificial Sequence
  ENSG00000156709_23 (sequence is synthesized)
aagtgggcgctcggcctggattgcagctctgccctgtctgtagtgagggctgcctgctgctcctttacttctcttcctgtattcctaggattgacttttgcttcctgctgtaactactct

SEQ ID NO: 456476 - DNA, 120 bp, Artificial Sequence
  ENSG00000156709_24 (sequence is synthesized)
tcgccgaaatgttccggtgtggaggcctggcggcgggtgctttgaagcagaagctggtgcccttggtgcggaccgtgtgcgtccgaagcccgaggcagaggaaccggctcccaggcctac

SEQ ID NO: 456477 - DNA, 120 bp, Artificial Sequence
  ENSG00000156711_0 (sequence is synthesized)
ggggcgctgggagcccgttgggccgcgaacgcagccgccacgctggggccgccgagatcgggtgcccgggatgagcctcatccggaaaaagggcttctacaagcaggacgtcaacaagac

SEQ ID NO: 456478 - DNA, 120 bp, Artificial Sequence
  ENSG00000156711_1 (sequence is synthesized)
agcctgggagctgcccaagacctacgtgtccccgacgcacgtcggcagcggggcctatggctccgtgtgctcggccatcgacaagcggtcaggggagaaggtggccatcaagaagctgag

SEQ ID NO: 456479 - DNA, 120 bp, Artificial Sequence
  ENSG00000156711_2 (sequence is synthesized)
ccgaccctttcagtccgagatcttcgccaagcgcgcctaccgggagctgctgctgctgaagcacatgcagcatgagaacgtcattgggctcctggatgtcttcaccccagcctcctccct

SEQ ID NO: 456480 - DNA, 120 bp, Artificial Sequence
  ENSG00000156711_3 (sequence is synthesized)
gcgcaacttctatgacttctacctggtgatgcccttcatgcagacggatctgcagaagatcatggggatggagttcagtgaggagaagatccagtacctggtgtatcagatgctcaaagg

SEQ ID NO: 456481 - DNA, 120 bp, Artificial Sequence
  ENSG00000156711_4 (sequence is synthesized)
ccttaagtacatccactctgctggggtcgtgcacagggacctgaagccaggcaacctggctgtgaatgaggactgtgaactgaagattctggattttgggctggcgcgacatgcagacgc

SEQ ID NO: 456482 - DNA, 120 bp, Artificial Sequence
  ENSG00000156711_5 (sequence is synthesized)
cgagatgactggctacgtggtgacccgctggtaccgagcccccgaggtgatcctcagctggatgcactacaaccagacagtggacatctggtctgtgggctgtatcatggcagagatgct

SEQ ID NO: 456483 - DNA, 120 bp, Artificial Sequence
  ENSG00000156711_6 (sequence is synthesized)
gacagggaaaactctgttcaaggggaaagattacctggaccagctgacccagatcctgaaagtgaccggggtgcctggcacggagtttgtgcagaagctgaacgacaaagcggccaaatc

SEQ ID NO: 456484 - DNA, 120 bp, Artificial Sequence
  ENSG00000156711_7 (sequence is synthesized)
ctacatccagtccctgccacagacccccaggaaggatttcactcagctgttcccacgggccagcccccaggctgcggacctgctggagaagatgctggagctagacgtggacaagcgcct

SEQ ID NO: 456485 - DNA, 120 bp, Artificial Sequence
  ENSG00000156711_8 (sequence is synthesized)
gacggccgcgcaggccctcacccatcccttctttgaacccttccgggaccctgaggaagagacggaggcccagcagccgtttgatgattccttagaacacgagaaactcacagtggatga

SEQ ID NO: 456486 - DNA, 120 bp, Artificial Sequence
  ENSG00000156711_9 (sequence is synthesized)
atggaagcagcacatctacaaggagattgtgaacttcagccccattgcccggaaggactcacggcgccggagtggcatgaagctgtagggactcatcttgcatggcaccgccggccagac

SEQ ID NO: 456487 - DNA, 120 bp, Artificial Sequence
  ENSG00000156711_10 (sequence is synthesized)
actgcccaaggaccagtatttgtcactaccaaactcagcccttcttggaatacagcctttcaagcagaggacagaagggtccttctccttatgtgggaaatgggcctagtagatgcagaa

SEQ ID NO: 456488 - DNA, 120 bp, Artificial Sequence
  ENSG00000156711_11 (sequence is synthesized)
ttcaaagatgtcggttgggagaaactagctctgatcctaacaggccacgttaaactgcccatctggagaatcgcctgcaggtggggccctttccttcccgccagagtggggctgagtggg

SEQ ID NO: 456489 - DNA, 120 bp, Artificial Sequence
  ENSG00000156711_12 (sequence is synthesized)
cgctgagccaggccgggggcctatggcagtgatgctgtgttggtttcctagggatgctctaacgaattaccacaaacctggtggattgaaacagcagaacttgattcccttacagttctg

SEQ ID NO: 456490 - DNA, 120 bp, Artificial Sequence
  ENSG00000156711_13 (sequence is synthesized)
gaggctggaaatctgggatggaggtgttggcagggctgtggtccctttgaaggctctggggaagaatccttccttggctctttttagcttgtggcggcagtgggcagtccgtggcattcc

SEQ ID NO: 456491 - DNA, 120 bp, Artificial Sequence
  ENSG00000156711_14 (sequence is synthesized)
ccagcttattgctgcatcactccagtctctgtctcttctgttctctcctcttttaacaacagtcattggatttagggcccaccctaatcctgtgtgatcttatcttgatccttattaatt

SEQ ID NO: 456492 - DNA, 120 bp, Artificial Sequence
  ENSG00000156711_15 (sequence is synthesized)
aaacctgcaaatactctagttccaaataaagtcacattctcaggttccaggtggacatgaattccagggggaaatgattcaactcactacagacagctgggagggaggggccccttcctg

SEQ ID NO: 456493 - DNA, 120 bp, Artificial Sequence
  ENSG00000156711_16 (sequence is synthesized)
ggccccgtgctgaggccttgtgctctgtgaaggaacccaatgtgtttggctgctaaattaagggagttgcagagagagctgcagctggtgcgattgcattcaggttattttgggtgagtg

SEQ ID NO: 456494 - DNA, 120 bp, Artificial Sequence
  ENSG00000156711_17 (sequence is synthesized)
ataagcaatcaagatatgaaacaacagcaggctcggagactgcgagctgcacaggcagaaatgggctcttgcctggcttgatggcaaaccgttctgctccctttgggagatggcacagct

SEQ ID NO: 456495 - DNA, 120 bp, Artificial Sequence
  ENSG00000156711_18 (sequence is synthesized)
ctccagagctttgacctgacagtggctagaacctctctgtttttatctgagaaactttggcagaacaaatttccatgtgcacaagctgtcgggcacagtgggtctcaaatttccttgtgc

SEQ ID NO: 456496 - DNA, 120 bp, Artificial Sequence
  ENSG00000156711_19 (sequence is synthesized)
accaggggacttgttaaaatgcagattcctgggccccaccccagggcttgtgactcagcaggtctgcagttgagaccttagaatgtgcatttgaatgaggacctctcgccctgacccaag

SEQ ID NO: 456497 - DNA, 120 bp, Artificial Sequence
  ENSG00000156711_20 (sequence is synthesized)
cctagtgattctgatggatatcagaccatagttcgagacatttagtggatttcagtcatacttgatttgttgggaggcctaaatcaaaaacctataggaggagactggggggcttcagat

SEQ ID NO: 456498 - DNA, 120 bp, Artificial Sequence
  ENSG00000156711_21 (sequence is synthesized)
ggagtttcacactcatcttacaggtgttaaaactgaggctcagaaagcttttttttgtttgtttgtttgagacagggtctggctctgtcacccgggctggagttcagtggcacaattaca

SEQ ID NO: 456499 - DNA, 85 bp, Artificial Sequence
  ENSG00000156711_22 (sequence is synthesized)
ctgtgccacccaggtgcaccaggactgcaggtggctaattaaaacattttttttcttttttgtataggcggggtttctctatgtt

SEQ ID NO: 456500 - DNA, 120 bp, Artificial Sequence
  ENSG00000156711_23 (sequence is synthesized)
accaggactgcaggtggctaattaaaacattttttttcttttttgtataggcggggtttctctatgttgcccaggctgatcttgaacttctggactcaagtgatcctcccactttggcct

SEQ ID NO: 456501 - DNA, 120 bp, Artificial Sequence
  ENSG00000156711_24 (sequence is synthesized)
ccaccctgcaggcccagacagcatttttaaggccttgaaactcttctgtataatactgtaatggtggatacctattgtgcatttgttaccatctgtaggactggataacacagagtgaac

SEQ ID NO: 456502 - DNA, 120 bp, Artificial Sequence
  ENSG00000156711_25 (sequence is synthesized)
cctcaagtaaactatggacttcagttaataataatgtatcagtattggttcataaattgtaacaattgtgccacactaatgcaagatgttactcatcaagaaaactgaggagagagaagg

SEQ ID NO: 456503 - DNA, 120 bp, Artificial Sequence
  ENSG00000156711_26 (sequence is synthesized)
tgagactccatctcaaaaaaacaaaaaaaacaaataccctgaggacacagagacattgggtcagacacccacagctaggaagtggtggagtcagattggaacccaagtaggcttgagcac

SEQ ID NO: 456504 - DNA, 120 bp, Artificial Sequence
  ENSG00000156711_27 (sequence is synthesized)
aagtaggcttgagcactgtacccagcttggattcaagggttgcccagccttccctcttcacgccagtctgagacccttactgctgactgtgtccatggtctctgttttctctcccacaga

SEQ ID NO: 456505 - DNA, 120 bp, Artificial Sequence
  ENSG00000156711_28 (sequence is synthesized)
atggccctgctgtcaaggagctggggagtccttgactgggactggctagtcttgccacagccctggcctcgctggttactaaaactgccccaggttccctgagtctacatccctctaagc

SEQ ID NO: 456506 - DNA, 120 bp, Artificial Sequence
  ENSG00000156711_29 (sequence is synthesized)
ctcctgagaattctcactgccccaaggaaaaagtctagccttccttcttggcctggcattcaaaaccccttgtgttctctctaatctcatcagctcccactgcctcccctagctagtcct

SEQ ID NO: 456507 - DNA, 120 bp, Artificial Sequence
  ENSG00000156711_30 (sequence is synthesized)
tatgtcagtgtgggacaccagtcctgggatccaccgtaaggttcattctgcattcacaggttaaaggtcttgacaagtcctgcagtaaagagatccgttcctcatttaatccagaacttc

SEQ ID NO: 456508 - DNA, 120 bp, Artificial Sequence
  ENSG00000156711_31 (sequence is synthesized)
ccagatgtacttaaccgcaggacccattttctcccaacagcatgacacacatagccttttttgcccagtgcagcccagtgcacaggtcccgatattgcctctccccaagtaggcttggcc

SEQ ID NO: 456509 - DNA, 120 bp, Artificial Sequence
  ENSG00000156711_32 (sequence is synthesized)
ttcttttagtgcccgtgcgtggaaggccctccattctcctctccattctccttggccttcaaggctctaccttaggcctccctccaggcagctgttctccatcatcccccctgggctgca

SEQ ID NO: 456510 - DNA, 120 bp, Artificial Sequence
  ENSG00000156711_33 (sequence is synthesized)
ggccctctgtgggcagcatttagtgtgtggtttggcctccccttcccattgcccactgtgagcaaatacctgtgcgtgaatgaataatgagtgaaagatgtcccaggggcctgtcggtca

SEQ ID NO: 456511 - DNA, 120 bp, Artificial Sequence
  ENSG00000156711_34 (sequence is synthesized)
cttctttgccccgaccaggccaatgtcatatggaaggtggcagagagcccagcaggaagcagaagtgggcggccctgggctgtacctttgagctgctctcctgaaaatctctattatttc

SEQ ID NO: 456512 - DNA, 120 bp, Artificial Sequence
  ENSG00000156711_35 (sequence is synthesized)
agactcccagaccccaccccccgcttcatcctctggtgtcctcctaggccatccccactccggaattaaacctcagcccctcccacagagttttctcaaatctgtgaagtttcttcaaaa

SEQ ID NO: 456513 - DNA, 120 bp, Artificial Sequence
  ENSG00000156711_36 (sequence is synthesized)
ggcggtggaggtgctcagcagtgcaaggtggggggtggagggggtggggagtagagggagtgggggttccacgggtttgggtcttgcccagtgggcacatggcctgtgtaataggaaaca

SEQ ID NO: 456514 - DNA, 120 bp, Artificial Sequence
  ENSG00000156711_37 (sequence is synthesized)
agtccattctcctgctgtggggggcagaggagctggcggggcgagggagggggagatgtgggctcaggtattcttggtggatgcgcttcgttctgtggctgatggggtggcttaaaagat

SEQ ID NO: 456515 - DNA, 120 bp, Artificial Sequence
  ENSG00000156711_38 (sequence is synthesized)
cttaacagagagagatcaggaagccagactgcaaggtgggggacatttcctaagagcaagtgtaccctccattccctcttttgaggaacaaagagtatctttgctggggcctgagtcatc

SEQ ID NO: 456516 - DNA, 120 bp, Artificial Sequence
  ENSG00000156711_39 (sequence is synthesized)
catgaaaacagacagcagcggtgtcccagggcagggcttgcctggcgtggattggggtggtgctgcccccagtgaggggcagcacaaggggagacagaaatggaggaatagcccccgtaa

SEQ ID NO: 456517 - DNA, 120 bp, Artificial Sequence
  ENSG00000156711_40 (sequence is synthesized)
gggcaagcccagtgtgcaccagtgcccagagctgcctgatggaggaacagctccgtaagggtgaacccagtgtgcacgggtgcccggagctgcctgcgtgaggctgggggctagtttgga

SEQ ID NO: 456518 - DNA, 120 bp, Artificial Sequence
  ENSG00000156711_41 (sequence is synthesized)
tgagggcatggctcaactttcacttggcacattgaaatagcttttgctgtctgctagggtgtggaaaactgtttttccatggccccaagcaatgctatagctacagctgaggagggagga

SEQ ID NO: 456519 - DNA, 120 bp, Artificial Sequence
  ENSG00000156711_42 (sequence is synthesized)
atctctccctgcctctcctcccaactcttggcttttgcttccttaaatttgaacaattccctaagatctaatgctgggaggctccccttccttcattacacagtgaactcatgtgctcta

SEQ ID NO: 456520 - DNA, 120 bp, Artificial Sequence
  ENSG00000156711_43 (sequence is synthesized)
tctgcattccccctaaatcctcctgagcttttaggtaagaggccgatgatttcacaatcggcagcagaggcctaaggccattccatcaaactgaagatggcagcaagttgtcctcacttc

SEQ ID NO: 456521 - DNA, 120 bp, Artificial Sequence
  ENSG00000156711_44 (sequence is synthesized)
ttcattgagcacccatgggtgtgtactggagcaagggtggtgccagggattctcctgctctggttcctcctgcggggtccctgctcagctgggcagctgccctcactctgggcgggtggc

SEQ ID NO: 456522 - DNA, 120 bp, Artificial Sequence
  ENSG00000156711_45 (sequence is synthesized)
atgtgagtgtcaacagggcccctctcagtcaggggctcttggccattttttgtgccatggatcgcttctcaaaatcatattttcttttcttttcttttgagatggggtctcactccatta

SEQ ID NO: 456523 - DNA, 120 bp, Artificial Sequence
  ENSG00000156711_46 (sequence is synthesized)
atgcctggctaatttcagaataatattttcatacacataaaatatgtaggattacaaagtaagctagttatatttatatacagttgtcaaaatatttttaaaatgtataacgtgatacta

SEQ ID NO: 456524 - DNA, 120 bp, Artificial Sequence
  ENSG00000156711_47 (sequence is synthesized)
tataggtttctttattaacatattgaataaaaagatcgagggtaggcctattaaacaatggtaaactgaagagagatgagtgtaaacaatattttaagatagatacctgtggcaaactgt

SEQ ID NO: 456525 - DNA, 120 bp, Artificial Sequence
  ENSG00000156711_48 (sequence is synthesized)
aaagggatatgaaaaactctgtaatttctattggcactgctgatacaactgcactttgctacctttgttcataaccaaggaaatagaaatgactgaaaataaagttgtattctattccaa

SEQ ID NO: 456526 - DNA, 120 bp, Artificial Sequence
  ENSG00000156711_49 (sequence is synthesized)
cgcctgcagcctctcttccttgcttcctccatctttgtgcctggcctctgccagccctacctgccacctccttcttggtgggcattgtctcctgggtgcttctttctccttgagctgact

SEQ ID NO: 456527 - DNA, 120 bp, Artificial Sequence
  ENSG00000156711_50 (sequence is synthesized)
ggctgagtgaggtctctgggggttgagttgggactgggcctggttctccaggactgtacacttgcaagaccccagagttcatcgggcagatcctcactgttacagacgagtacaccgagg

SEQ ID NO: 456528 - DNA, 120 bp, Artificial Sequence
  ENSG00000156711_51 (sequence is synthesized)
ccccaagagggggaggtggctcgccaagttgcagacagagtgagactcccgccctgccgtggatcccgtcgcaatgagacgttgctgcccctggcgctgtgcccctctctcagctcctgc

SEQ ID NO: 456529 - DNA, 120 bp, Artificial Sequence
  ENSG00000156711_52 (sequence is synthesized)
cttggtatccccaccttcctgggctcacctctgccccactcaggtgtttaagacgtgcagcagagaggcgccatcctgacctggtgccacatcctagcccctttccttactggatcctca

SEQ ID NO: 456530 - DNA, 120 bp, Artificial Sequence
  ENSG00000156735_0 (sequence is synthesized)
agggcagcggatcccatgtcggccctgaggcgctcgggctacggccccagtgacggtccgtcctacggccgctactacgggcctgggggtggagatgtgccggtacacccacctccaccc

SEQ ID NO: 456531 - DNA, 120 bp, Artificial Sequence
  ENSG00000156735_1 (sequence is synthesized)
ttatatcctcttcgccctgaacctccccagcctcccatttcctggcgggtgcgcgggggcggcccggcggagaccacctggctgggagaaggcggaggaggcgatggctactatccctcg

SEQ ID NO: 456532 - DNA, 120 bp, Artificial Sequence
  ENSG00000156735_2 (sequence is synthesized)
ggaggcgcctggccagagcctggtcgagccggaggaagccaccaggagcagccaccatatcctagctacaattctaactattggaattctactgcgagatctagggctccttacccaagt

SEQ ID NO: 456533 - DNA, 120 bp, Artificial Sequence
  ENSG00000156735_3 (sequence is synthesized)
acatatcctgtaagaccagaattgcaaggccagagtttgaattcttatacaaatggagcgtatggtccaacataccccccaggccctggggcaaatactgcctcatactcaggggcttat

SEQ ID NO: 456534 - DNA, 120 bp, Artificial Sequence
  ENSG00000156735_4 (sequence is synthesized)
tatgcacctggttatactcagaccagttactccacagaagttccaagtacttaccgttcatctggcaacagcccaactccagtctctcgttggatctatccccagcaggactgtcagact

SEQ ID NO: 456535 - DNA, 120 bp, Artificial Sequence
  ENSG00000156735_5 (sequence is synthesized)
gaagcaccccctcttagggggcaggttccaggatatccgccttcacagaaccctggaatgaccctgccccattatccttatggagatggtaatcgtagtgttccacaatcaggaccgact

SEQ ID NO: 456536 - DNA, 120 bp, Artificial Sequence
  ENSG00000156735_6 (sequence is synthesized)
gtacgaccacaagaagatgcgtgggcttctcctggtgcttatggaatgggtggccgttatccctggccttcatcagcgccctcagcaccacccggcaatctctacatgactgaaagtact

SEQ ID NO: 456537 - DNA, 120 bp, Artificial Sequence
  ENSG00000156735_7 (sequence is synthesized)
tcaccatggcctagcagtggctctccccagtcacccccttcacccccagtccagcagcccaaggattcttcatacccctatagccaatcagatcaaagcatgaaccggcacaactttcct

SEQ ID NO: 456538 - DNA, 120 bp, Artificial Sequence
  ENSG00000156735_8 (sequence is synthesized)
tgcagtgtccatcagtacgaatcctcggggacagtgaacaatgatgattcagatcttttggattcccaagtccagtatagtgctgagcctcagctgtatggtaatgccaccagtgaccat

SEQ ID NO: 456539 - DNA, 120 bp, Artificial Sequence
  ENSG00000156735_9 (sequence is synthesized)
cccaacaatcaagatcaaagtagcagtcttcctgaagaatgtgtaccttcagatgaaagtactcctccgagtattaaaaaaatcatacatgtgctggagaaggtccagtatcttgaacaa

SEQ ID NO: 456540 - DNA, 120 bp, Artificial Sequence
  ENSG00000156735_10 (sequence is synthesized)
gaagtagaagaatttgtaggaaaaaagacagacaaagcatactggcttctggaagaaatgctaaccaaggaacttttggaactggattcagttgaaactgggggccaggactctgtacgg

SEQ ID NO: 456541 - DNA, 120 bp, Artificial Sequence
  ENSG00000156735_11 (sequence is synthesized)
caggccagaaaagaggctgtttgtaagattcaggccatactggaaaaattagaaaaaaaaggattatgaaaggatttagaacaaagtggaagcctgttactaacttgaccaaagaacact

SEQ ID NO: 456542 - DNA, 120 bp, Artificial Sequence
  ENSG00000156735_12 (sequence is synthesized)
tgatttggttaattaccctctttttgaaatgcctgttgatgacaagaagcaatacattccagctttcctttgattttatacttgaaaaactggcaaaggaatggaagaatattttagtca

SEQ ID NO: 456543 - DNA, 120 bp, Artificial Sequence
  ENSG00000156735_13 (sequence is synthesized)
tgagttgttttcagttttcagacgaatgaatgtaataggaaactatggagttaccaatattgccaagtagactcactccttaaaaaatttatggatatctacaagctgcttcttaccagc

SEQ ID NO: 456544 - DNA, 120 bp, Artificial Sequence
  ENSG00000156735_14 (sequence is synthesized)
aggagggaaacacacttcacacaacaggcttatcagaaacctaccagatgaaactggatataatctgagacaaacaggatgtgtttttttaaacatctggatatcttgtcacatttttgt

SEQ ID NO: 456545 - DNA, 120 bp, Artificial Sequence
  ENSG00000156735_15 (sequence is synthesized)
acattgtgactgctttcaacatatacttcatgtgtaattatagcttagactttagccttcttggacttctgttttgttttgttatttgcagtttacaaatatagtattattctctacttc

SEQ ID NO: 456546 - DNA, 120 bp, Artificial Sequence
  ENSG00000156735_16 (sequence is synthesized)
ttggtacattttgtagtaatatgtttaatataattattcaagagactatattgacagccagatagtatggcagttctgaaaaaatttatatcttttcaccacttgaatatactgcaatgt

SEQ ID NO: 456547 - DNA, 120 bp, Artificial Sequence
  ENSG00000156735_17 (sequence is synthesized)
tttggaaatggcattgacataaaatgaaaatgtttacggacacttttcttttttgcttttttattgtatttggataaagatccacttaaaagttatctgttttttcctgttttttttttt

SEQ ID NO: 456548 - DNA, 120 bp, Artificial Sequence
  ENSG00000156735_18 (sequence is synthesized)
tttccccaaagtgtagttatgttttcactattgctgcttctatagagggcattgtgatagagagttacagatgaaacattaaatgccacagtgagtagaaataattactacaaaaagtaa

SEQ ID NO: 456549 - DNA, 120 bp, Artificial Sequence
  ENSG00000156735_19 (sequence is synthesized)
taaatatgattacttggtaatatcattctccatctaaaatactagtttcacctgtgagcagatttcagctcagtttatagttaaaaacaatgagggtaaaatgggattcatgctcaggga

SEQ ID NO: 456550 - DNA, 120 bp, Artificial Sequence
  ENSG00000156735_20 (sequence is synthesized)
atgaatcagccatagttagagtgggaaattattattttcttcatttaaaggtagattttatgtttatttccctaaattgcataagataaaattgtctgtttaataaaaagacatttatta

SEQ ID NO: 456551 - DNA, 120 bp, Artificial Sequence
  ENSG00000156735_21 (sequence is synthesized)
ccattattaacagtcattttagagccaaatttaagaaaaggatattgaaagggtctttattggccttgtttgggtaactctatgctgttagatagaagagacttaggtaaataacttttt

SEQ ID NO: 456552 - DNA, 120 bp, Artificial Sequence
  ENSG00000156735_22 (sequence is synthesized)
atgtctgaggtgagtacacaatattggttcttggaaaaatagctgtttcttcataagatacccaagtgataattttttttcccctagactgtcaggcctatgagtaaatactaaatctat

SEQ ID NO: 456553 - DNA, 120 bp, Artificial Sequence
  ENSG00000156735_23 (sequence is synthesized)
tagctgtccccactcataaaccaaaccaaaccaatacaaacagatgaggagaggaaatgtagtaaaaatactggctgggtcttatgattgggatgagtgattttataagataatatggtg

SEQ ID NO: 456554 - DNA, 120 bp, Artificial Sequence
  ENSG00000156735_24 (sequence is synthesized)
ataattttattctaggattttatttttggcctaatataggaatgtttaaaaaaggcttttctatgaaaattagaaatttatacttgaaattaaaagtctagaagggggaggaccttaaag

SEQ ID NO: 456555 - DNA, 120 bp, Artificial Sequence
  ENSG00000156735_25 (sequence is synthesized)
ctaagctaccagtaagacaatgaataattcagaagagaacactattcttttactgactgagtgcccaagatgccaatttccatgaagtcttgatttatatatatgtacacatgttatgca

SEQ ID NO: 456556 - DNA, 120 bp, Artificial Sequence
  ENSG00000156735_26 (sequence is synthesized)
catacatgtttgttttctaacagttattttttaagcttttgagataattttagacttacagaagagttgtaaaagtagtagagttcttgtatactctgcacccaccttgcccttatgtta

SEQ ID NO: 456557 - DNA, 120 bp, Artificial Sequence
  ENSG00000156735_27 (sequence is synthesized)
acatcttacgtaacaatagaacatttgtcaaaattaagaaattaaccttgatataatactaactaaagtagaaagtttaaaaagtagagattttagtcttttcactaatgtccttttact

SEQ ID NO: 456558 - DNA, 120 bp, Artificial Sequence
  ENSG00000156735_28 (sequence is synthesized)
gttccaagacccagccttgcatttagctatcatgcctacgtcctgtcttccagtctgtgacagtgtatcataacaggggatacctgatgttgtaatgtatttctggtgttgttaaccttg

SEQ ID NO: 456559 - DNA, 120 bp, Artificial Sequence
  ENSG00000156735_29 (sequence is synthesized)
atcactatgctaaggtggtgtctgctaggattcgctactgtaaacttactgtgttttccttgtaattattgaatatttgctggagatacccggagactatgcaaatgtcccgtttctgct

SEQ ID NO: 456560 - DNA, 120 bp, Artificial Sequence
  ENSG00000156735_30 (sequence is synthesized)
taaacttttgctcattttactatccattggcagatcttgcttgtggcagttactactgtggtgttctaatggtgattttctatttctctcaatccttctacatttattattggaattctt

SEQ ID NO: 456561 - DNA, 120 bp, Artificial Sequence
  ENSG00000156735_31 (sequence is synthesized)
ctgtaaggaagagttgtcagttctggatttatatttttaactataataagatattcaggataagtatagatttagaacttaaagatgttaaatcatgttaaaattattccaaataccaat

SEQ ID NO: 456562 - DNA, 120 bp, Artificial Sequence
  ENSG00000156735_32 (sequence is synthesized)
atcaaagaaaactaagttggtaatctatctcagaaaatatatgaacttaagaaggaaaatagtatttatgatttgtagaattggttcaacttttgacttaatactgactttggactgaat

SEQ ID NO: 456563 - DNA, 120 bp, Artificial Sequence
  ENSG00000156735_33 (sequence is synthesized)
tcaaagttttcttgaaatttcacatctggactttttaaagtgtctacatttatattactttggggatcattttgtcaaagtcttgaataaagttacccagtcctggcatgataaacacaa

SEQ ID NO: 456564 - DNA, 120 bp, Artificial Sequence
  ENSG00000156735_34 (sequence is synthesized)
taacatggtttatatagtttctgtactggtttgtgttaaatggggactaattacaaaaagttggtgactacttatctatagctttacctcagctcggtttcctttttcttttttttaata

SEQ ID NO: 456565 - DNA, 120 bp, Artificial Sequence
  ENSG00000156735_35 (sequence is synthesized)
gactttatatttagagaagatttagattcacatcgtttttgttaaaagacagaaagatacacattttctgtttgttgtaattcttctaaacgttaaatgcaaagatgcattttactactt

SEQ ID NO: 456566 - DNA, 120 bp, Artificial Sequence
  ENSG00000156735_36 (sequence is synthesized)
aggtaagaggaaactccattggataaatggcgaggaaacgtatactccctcttaaggaacacggtgtcttccttcgtctccgggttcccgagaccccagagtcactgacctccgtccctc

SEQ ID NO: 456567 - DNA, 120 bp, Artificial Sequence
  ENSG00000156735_37 (sequence is synthesized)
agctttcggggttcggcagcagaaggggcgggcccgggcctgggattggctggcgtcgtccgacccccttcgctgctctccattcgcaatcgcccgcgggcgcctgcgcgatgggtcggc

SEQ ID NO: 456568 - DNA, 120 bp, Artificial Sequence
  ENSG00000156738_0 (sequence is synthesized)
gtctatcagcgatttcatcttcaggcctggactacaccactcaccctcccagtgtgcttgagaaacaaactgcacccactgaactccgcagctagcatccaaatcagcccttgagatttg

SEQ ID NO: 456569 - DNA, 120 bp, Artificial Sequence
  ENSG00000156738_1 (sequence is synthesized)
aggccttggagactcaggagttttgagagcaaaatgacaacacccagaaattcagtaaatgggactttcccggcagagccaatgaaaggccctattgctatgcaatctggtccaaaacca

SEQ ID NO: 456570 - DNA, 120 bp, Artificial Sequence
  ENSG00000156738_2 (sequence is synthesized)
ctcttcaggaggatgtcttcactggtgggccccacgcaaagcttcttcatgagggaatctaagactttgggggctgtccagattatgaatgggctcttccacattgccctggggggtctt

SEQ ID NO: 456571 - DNA, 120 bp, Artificial Sequence
  ENSG00000156738_3 (sequence is synthesized)
ctgatgatcccagcagggatctatgcacccatctgtgtgactgtgtggtaccctctctggggaggcattatgtatattatttccggatcactcctggcagcaacggagaaaaactccagg

SEQ ID NO: 456572 - DNA, 120 bp, Artificial Sequence
  ENSG00000156738_4 (sequence is synthesized)
aagtgtttggtcaaaggaaaaatgataatgaattcattgagcctctttgctgccatttctggaatgattctttcaatcatggacatacttaatattaaaatttcccattttttaaaaatg

SEQ ID NO: 456573 - DNA, 120 bp, Artificial Sequence
  ENSG00000156738_5 (sequence is synthesized)
gagagtctgaattttattagagctcacacaccatatattaacatatacaactgtgaaccagctaatccctctgagaaaaactccccatctacccaatactgttacagcatacaatctctg

SEQ ID NO: 456574 - DNA, 120 bp, Artificial Sequence
  ENSG00000156738_6 (sequence is synthesized)
ttcttgggcattttgtcagtgatgctgatctttgccttcttccaggaacttgtaatagctggcatcgttgagaatgaatggaaaagaacgtgctccagacccaaatctaacatagttctc

SEQ ID NO: 456575 - DNA, 120 bp, Artificial Sequence
  ENSG00000156738_7 (sequence is synthesized)
ctgtcagcagaagaaaaaaaagaacagactattgaaataaaagaagaagtggttgggctaactgaaacatcttcccaaccaaagaatgaagaagacattgaaattattccaatccaagaa

SEQ ID NO: 456576 - DNA, 120 bp, Artificial Sequence
  ENSG00000156738_8 (sequence is synthesized)
gaggaagaagaagaaacagagacgaactttccagaacctccccaagatcaggaatcctcaccaatagaaaatgacagctctccttaagtgatttcttctgttttctgtttccttttttaa

SEQ ID NO: 456577 - DNA, 120 bp, Artificial Sequence
  ENSG00000156738_9 (sequence is synthesized)
acattagtgttcatagcttccaagagacatgctgactttcatttcttgaggtactctgcacatacgcaccacatctctatctggcctttgcatggagtgaccatagctccttctctctta

SEQ ID NO: 456578 - DNA, 120 bp, Artificial Sequence
  ENSG00000156738_10 (sequence is synthesized)
cattgaatgtagagaatgtagccattgtagcagcttgtgttgtcacgcttcttcttttgagcaactttcttacactgaagaaaggcagaatgagtgcttcagaatgtgatttcctactaa

SEQ ID NO: 456579 - DNA, 120 bp, Artificial Sequence
  ENSG00000156738_11 (sequence is synthesized)
cctgttccttggataggctttttagtatagtatttttttttgtcattttctccatcaacaaccagggagactgcacctgatggaaaagatatatgactgcttcatgacattcctaaacta

SEQ ID NO: 456580 - DNA, 120 bp, Artificial Sequence
  ENSG00000156738_12 (sequence is synthesized)
tcttttttttattccacatctacgtttttggtggagtcccttttgcatcattgttttaaggatgataaaaaaaaataacaactagggacaatacagaacccattccatttatctttctac

SEQ ID NO: 456581 - DNA, 120 bp, Artificial Sequence
  ENSG00000156738_13 (sequence is synthesized)
catagcttatacatggacatgtctctgccttaacttttcctaactcccactctaggctattgtttgcatgtctacctacttttagccattatgcgagaaaagaaaaaaatgaccatagaa

SEQ ID NO: 456582 - DNA, 120 bp, Artificial Sequence
  ENSG00000156738_14 (sequence is synthesized)
aatgccaccatgaggtgcccaaatttcaaataataattaacatttagttatatttataatttccagatgacaaagtatttcatcaaataacttcatttgatgttccatgatcaagaaaga

SEQ ID NO: 456583 - DNA, 120 bp, Artificial Sequence
  ENSG00000156738_15 (sequence is synthesized)
atccctatctctattttacaagtaattcaaagaggccaaataacttgtaaacaagaaaaggtaacttgtcaacagtcataactagtaattatgagagccttgtttcataaccaggtcttc

SEQ ID NO: 456584 - DNA, 120 bp, Artificial Sequence
  ENSG00000156738_16 (sequence is synthesized)
ttactcaaatcctgtgatgtttgaaataaccaaattgtctctccaatgtctgcataaactgtgagagccaagtcaacagcttttatcaagaatttactctctgaccagcaataaacaagc

SEQ ID NO: 456585 - DNA, 120 bp, Artificial Sequence
  ENSG00000156738_17 (sequence is synthesized)
actgagagacacagagagccagattcagattttacccatggggataaaaagactcagactttcaccacatttggaaaactacttgcatcataaatatataataactggtagtttatatga

SEQ ID NO: 456586 - DNA, 120 bp, Artificial Sequence
  ENSG00000156738_18 (sequence is synthesized)
agcagacactaagtgctatagacactctcagaatatcatacttggaaacaatgtaattaaaatgccgaatctgagtcaacagctgccctacttttcaattcagatatactagtaccttac

SEQ ID NO: 456587 - DNA, 120 bp, Artificial Sequence
  ENSG00000156738_19 (sequence is synthesized)
ctagaaataatgttaacctagggtgaagtcactataatctgtagtctattatttgggcatttgctacatgatgagtgctgccagattgtggcaggtaaagagacaatgtaatttgcactc

SEQ ID NO: 456588 - DNA, 120 bp, Artificial Sequence
  ENSG00000156738_20 (sequence is synthesized)
cctatgatatttctacatttttagcgaccactagtggaagacattccccaaaattagaaaaaaaggagatagaagatttctgtctatgtaaagttctcaaaatttgttctaaattaataa

SEQ ID NO: 456589 - DNA, 120 bp, Artificial Sequence
  ENSG00000156738_21 (sequence is synthesized)
aactatctttgtgttcttttctgcaacagatgattccaacatgggtgtttgtctattcttctttactcttgaaacattagaccatgggaggctcttacagccttgagttgatatttatac

SEQ ID NO: 456590 - DNA, 120 bp, Artificial Sequence
  ENSG00000156738_22 (sequence is synthesized)
aacccaaatctaggtttgaacggtgaggtgtcaggtcatcaaatattcatgtctatatagtcttacacaggttctcaaaaaaaatgttcatgggataggtcattgataatggattcctta

SEQ ID NO: 456591 - DNA, 120 bp, Artificial Sequence
  ENSG00000156738_23 (sequence is synthesized)
ttctgagaactccagacgactgaaatatatgagagaaggaaaaggacatagtaggagcaggcctgagaaaaaaatgaaagtcagaaatctttaaaaaaatacaagatcttatttctatct

SEQ ID NO: 456592 - DNA, 120 bp, Artificial Sequence
  ENSG00000156738_24 (sequence is synthesized)
tattttttctcctcttctgaaatatatatgaggattcctctccaaacccatggtttctctaagaattttgagtcatttgtatgacctcaaataattagttttagctgacctcacataact

SEQ ID NO: 456593 - DNA, 120 bp, Artificial Sequence
  ENSG00000156738_25 (sequence is synthesized)
ccttataataggagacatctttaatgtctgctattaaagaaggatgaaaattcctatgaccttctccccgattatccctttggcaatatagagtcaaataataacattgaccaatagtaa

SEQ ID NO: 456594 - DNA, 120 bp, Artificial Sequence
  ENSG00000156738_26 (sequence is synthesized)
acatgctttgccaagaagtagaagatatattctctagccttagtttttcctcccaatttgcatttttgtaaaaataatgttgtatccacaaaggaaataaactttaaaaacccaagtgca

SEQ ID NO: 456595 - DNA, 120 bp, Artificial Sequence
  ENSG00000156738_27 (sequence is synthesized)
tcagaactcagcagtaggccttgcctcagatccaaggtcactcggaagaggccatgtctaccctcaatgacactcatggaggaaatgctgagagaagcattcagatgcatgacacaaggt

SEQ ID NO: 456596 - DNA, 120 bp, Artificial Sequence
  ENSG00000156738_28 (sequence is synthesized)
attttatagtgacaaagaggctaaaaacaactgagagaacttcagtatatttagttgtagttgctttgtgagtcagggcagttgcatttggaattccctcccagattatgttttccaaag

SEQ ID NO: 456597 - DNA, 120 bp, Artificial Sequence
  ENSG00000156738_29 (sequence is synthesized)
tgcctgtgccattcaggtcaagtatttccttctgcatcagttcactcttcagagggcatcagagtcatttatgtcactgtgaaccccaaagggcagttccacaagttaaaaacaaagaaa

SEQ ID NO: 456598 - DNA, 120 bp, Artificial Sequence
  ENSG00000156738_30 (sequence is synthesized)
aactagaaataaaacttttaaatttatggtatgagtattaattgatgaggaaatttgagttctgtctctttggtcttactatattcctagtcacagatccccagatgattgagtaaaagg

SEQ ID NO: 456599 - DNA, 120 bp, Artificial Sequence
  ENSG00000156738_31 (sequence is synthesized)
catgaatttagtgtcactgagcctgaataaaggaggaatatgacagctgaaaaatgaatacaactgataaaaatgggtggatggttgtgtgaaagttgctgaaagtgtaggcttctttct

SEQ ID NO: 456600 - DNA, 120 bp, Artificial Sequence
  ENSG00000156738_32 (sequence is synthesized)
gaccagttatcaatgttaaaaagtgatctccctctctcctctatctcctgtcttgcccaccccctctccatctcccccacctctcttttttacagtatattatttccggatcactcctgg

SEQ ID NO: 456601 - DNA, 120 bp, Artificial Sequence
  ENSG00000156738_33 (sequence is synthesized)
tctcccaaggatgaagaggtctcctaggcatgatgccacaccaactaaggctgaatacaatttaatttgagactcattacttattctttcctatacagaattgattcttcaactgattat

SEQ ID NO: 456602 - DNA, 120 bp, Artificial Sequence
  ENSG00000156738_34 (sequence is synthesized)
tcataccttactttctatcagcaatacacattaaccatctgttgtgtgccaaaagttgtgttaagagttagggttataaagatgctgtctcctgtactagcagttctcacagctattcat

SEQ ID NO: 456603 - DNA, 120 bp, Artificial Sequence
  ENSG00000156738_35 (sequence is synthesized)
tgtctaaagaattgatctcttaatcgttcaattatagtcaacaataacttactgaacaccaacaatgttctttgtgccattattacattttcaccttcattcttctgttgtttttcaggg

SEQ ID NO: 456604 - DNA, 120 bp, Artificial Sequence
  ENSG00000156738_36 (sequence is synthesized)
cactcaccctcccagtgtgcttgagaaacaaactgcacccactgaactccgcagctagcatccaaatcagcccttgagatttgaggccttggagactcagagagaccacaagaggagcaa

SEQ ID NO: 456605 - DNA, 120 bp, Artificial Sequence
  ENSG00000156738_37 (sequence is synthesized)
gcaagagagctgggactaactctgtctgctacatattgccagaaattgggagactgaaggtgcaaagaagaaataatttcttggaagggctaacagcttggttggactgagatgggctga

SEQ ID NO: 456606 - DNA, 120 bp, Artificial Sequence
  ENSG00000156787_0 (sequence is synthesized)
ctgccgggaaggcgctgggacggttacccagcgggccgccggcggtcgtgggcaagcttcgccatgcagagcactgacctaggcaacaaggagagcggcaagatatggcaccgcaagccg

SEQ ID NO: 456607 - DNA, 120 bp, Artificial Sequence
  ENSG00000156787_1 (sequence is synthesized)
tccccggccacgcgggacggaattatagtgaacattattcacaacacttccgattaccatccaaaagttttgcgatttttgaatgtggcttttgatggcacaggcgactgcttaattgct

SEQ ID NO: 456608 - DNA, 120 bp, Artificial Sequence
  ENSG00000156787_2 (sequence is synthesized)
ggggaccaccaaggaaatatttatgtttttgacttacatggaaacaggttcaatcttgttcagcgaacagcacaagcttgcacagctctggcctttaatcttcgtaggaaatctgaattc

SEQ ID NO: 456609 - DNA, 120 bp, Artificial Sequence
  ENSG00000156787_3 (sequence is synthesized)
cttgtggcattagctgattattctattaaatgttttgatacagtcaccaaggagctagttagctggatgagaggacatgaatcatcagtattttcgatctctgtgcatgcatcagggaaa

SEQ ID NO: 456610 - DNA, 120 bp, Artificial Sequence
  ENSG00000156787_4 (sequence is synthesized)
tatgccatcacaacttcttctgatacagcacaattatgggacttggatacctttcagagaaaaagaaagctgaatattcgccagtctgtgggtatacagaaggttttctttctaccatta

SEQ ID NO: 456611 - DNA, 120 bp, Artificial Sequence
  ENSG00000156787_5 (sequence is synthesized)
agtaataccatcctcagctgttttaaagataattccatttttgcctgggaatgtgacacacttttttgcaaatatcaattgccagctccacctgaaagctctagtatattatacaaagtg

SEQ ID NO: 456612 - DNA, 120 bp, Artificial Sequence
  ENSG00000156787_6 (sequence is synthesized)
tttgctgtaaccagagatggccgaatcctggctgctggaggcaagtcaaatcatcttcatttgtggtgcttggaagctaggcagctctttagaattatccagatgcccactaaagttcga

SEQ ID NO: 456613 - DNA, 120 bp, Artificial Sequence
  ENSG00000156787_7 (sequence is synthesized)
gccattcgccatctggaatttcttcctgatagttttgatgctggttctaatcaggttcttggagtactaagtcaagatggtattatgagatttatcaatatgcagacttgtaaacttctc

SEQ ID NO: 456614 - DNA, 120 bp, Artificial Sequence
  ENSG00000156787_8 (sequence is synthesized)
tttgagattgggagcctcgatgaaggaattagctcatcagcaattagcccacatggacggtacattgcatctattatggaaaatggaagtctaaacatatattcagttcaggctttaaca

SEQ ID NO: 456615 - DNA, 120 bp, Artificial Sequence
  ENSG00000156787_9 (sequence is synthesized)
caagaaataaataagccacctccgcctttagtgaaagttattgaagatttgcccaagaataaactgagttccagtgatcttaagatgaaagtaacatcagggagagtacagcagccagca

SEQ ID NO: 456616 - DNA, 120 bp, Artificial Sequence
  ENSG00000156787_10 (sequence is synthesized)
aaatctagggaaagcaaaatgcaaactagaatattaaaacaagacctgactggtgattttgaaagtaaaaagaatgaattaccagatggattaaacaaaaagcgtttacaaatcttatta

SEQ ID NO: 456617 - DNA, 120 bp, Artificial Sequence
  ENSG00000156787_11 (sequence is synthesized)
aaaggctatggtgaatatccaacaaaatacagaatgttcatttggcgctctctgctacaactgcctgaaaatcatactgcgtttagtaccctcatagataaggggactcatgtggcattt

SEQ ID NO: 456618 - DNA, 120 bp, Artificial Sequence
  ENSG00000156787_12 (sequence is synthesized)
ctcaaccttcagaagaaataccccatcaaaagtaggaagctactcagagtattacagagaaccttatctgcattagctcactggtctgtcatttttagtgacacaccatatcttccactc

SEQ ID NO: 456619 - DNA, 120 bp, Artificial Sequence
  ENSG00000156787_13 (sequence is synthesized)
ttggcatttccatttgtaaaattattccagaacaaccaactcatctgttttgaagttattgctactctcataatcaattggtgtcaacactggtttgaatattttcctaatcctcctatc

SEQ ID NO: 456620 - DNA, 120 bp, Artificial Sequence
  ENSG00000156787_14 (sequence is synthesized)
tctcagaagtgctgacaagagaggagtggctgaaattgttcgataatatcttttccaaccatccttccttccttctgatgactgttgtagcctacaacatatgttctagaacgcctctgc

SEQ ID NO: 456621 - DNA, 120 bp, Artificial Sequence
  ENSG00000156787_15 (sequence is synthesized)
tcagctgtaatcttaaagatgactttgagtttttttttcaccatcggaataacctggatataaatgttgtgattagacaagtttatcatctcatggagaccacgcctactgacattcatc

SEQ ID NO: 456622 - DNA, 120 bp, Artificial Sequence
  ENSG00000156787_16 (sequence is synthesized)
cagacagcatgcttaatgtttttgttgcactgacaaaagggcagtatccagtatttaatcaatatccaaagtttattgtggactatcaaacacaggaacgagaaagaataaggaatgatg

SEQ ID NO: 456623 - DNA, 120 bp, Artificial Sequence
  ENSG00000156787_17 (sequence is synthesized)
aattggattacttaagagagaggcagacagttgaagatatgcaagctaaagtcgaccagcaaagagttgaagatgaagcttggtaccagaaacaggagctgcttcgtaaagctgaagaaa

SEQ ID NO: 456624 - DNA, 120 bp, Artificial Sequence
  ENSG00000156787_18 (sequence is synthesized)
caagaagagaaatgctcttacaagaggaggagaaaatgatacaacaaagacagaggctagctgctgtgaaaagagagctgaaagtaaaggaaatgcacttacaagatgctgcaagaaggc

SEQ ID NO: 456625 - DNA, 120 bp, Artificial Sequence
  ENSG00000156787_19 (sequence is synthesized)
gttttctgaagcttcagcaagatcaacaggaaatggaactaagaagactggatgatgaaattgggagaaaggtatatatgagagatcgagaaattgctgccacagccagagacctagaaa

SEQ ID NO: 456626 - DNA, 120 bp, Artificial Sequence
  ENSG00000156787_20 (sequence is synthesized)
tgagacagctggaactcgaatcacaaaagagactttatgagaagaatcttactgaaaatcaagaagctcttgcaaaagaaatgcgagcagatgcagatgcctatagacgaaaagtggatc

SEQ ID NO: 456627 - DNA, 120 bp, Artificial Sequence
  ENSG00000156787_21 (sequence is synthesized)
ttgaagaacacatgtttcataagctgatagaagcaggtgaaacccagagccagaaaactcagaaggtgattaaagaaaatttggcaaaggctgaacaagcatgcctaaataccgactggc

SEQ ID NO: 456628 - DNA, 120 bp, Artificial Sequence
  ENSG00000156787_22 (sequence is synthesized)
agattcagtctttacataaacaaaaatgtgatgatctacaacgaaacaaatgttaccaggaagtagccaaactccttagggaaaacagaaggaaagaaatagagataataaatgcaatgg

SEQ ID NO: 456629 - DNA, 120 bp, Artificial Sequence
  ENSG00000156787_23 (sequence is synthesized)
tggaggaggaagccaagaagtggaaggaagctgaaggaaaagagttccgtttgagatcagcaaagaaagcttctgctctttcagatgcgtctagaaagtggtttttaaagcaagagataa

SEQ ID NO: 456630 - DNA, 120 bp, Artificial Sequence
  ENSG00000156787_24 (sequence is synthesized)
atgcggctgtagaacatgctgaaaatccatgtcataaagaagaacccaggttccaaaatgaacaggactcaagctgtttgcctagaacctcacaattaaatgactcttctgaaatggatc

SEQ ID NO: 456631 - DNA, 120 bp, Artificial Sequence
  ENSG00000156787_25 (sequence is synthesized)
cctcaacacagatttctttaaatagaagagcagtagaatgggacaccacgggacagaatcttattaagaaagtgagaaatcttcgccagagactcactgcccgggctcgtcacagatgtc

SEQ ID NO: 456632 - DNA, 120 bp, Artificial Sequence
  ENSG00000156787_26 (sequence is synthesized)
aaacccctcatcttttggctgcatagaatgcatgtcaccttgagacggtcgagagagagacctattttgcaatcagtgacattgatttttagattatttatttaaaattcctataaagat

SEQ ID NO: 456633 - DNA, 120 bp, Artificial Sequence
  ENSG00000156787_27 (sequence is synthesized)
cagccctttgtacagaaaaatgtgtctataaaaattatgtgttatttaattctgatactttttggcttgtaaatggcttcttgaactttttacaataaaaatgttttagaaactgttaaa

SEQ ID NO: 456634 - DNA, 120 bp, Artificial Sequence
  ENSG00000156787_28 (sequence is synthesized)
acctgaaagcgataaaggaaggcttcgggccagaggaagaggtaggccgggctgatgaggccgagtttgccgaccaagggcacggcgacggtggcggcgaaccaatagcgcgtgatcgcc

SEQ ID NO: 456635 - DNA, 120 bp, Artificial Sequence
  ENSG00000156787_29 (sequence is synthesized)
gggatgctcctgaaccagtctccgatgtccgacatcttcgacccacaggtagccaagatgcacaagaccgcccgactccccgtgccgaccccctcacgacgcggccggctccgcgactgt

SEQ ID NO: 456636 - DNA, 120 bp, Artificial Sequence
  ENSG00000156787_30 (sequence is synthesized)
ggacgtggcgccaccgaattcggaccagcgaggcagccttctgaggcgaaacttccccttccggcgaccgcggacgacgtgaccagaagtcccgccgcttaaaggaattatagtgaacat

SEQ ID NO: 456637 - DNA, 120 bp, Artificial Sequence
  ENSG00000156787_31 (sequence is synthesized)
aactagcagttctgggtgttccaattcttccaagattacatgagattgggtgcatttggagtggcgtttgccacctttttttattctaaaaaaaagtttgtgcctcctcctttttgtttt

SEQ ID NO: 456638 - DNA, 120 bp, Artificial Sequence
  ENSG00000156787_32 (sequence is synthesized)
atcttttaaaaaattatacaagtagtgtcttattgcagaaaaaaataagaatgtacagaatagcaaacagacaaatacaaatcactgaaagtctcaccattctcagaagattctgattta

SEQ ID NO: 456639 - DNA, 120 bp, Artificial Sequence
  ENSG00000156787_33 (sequence is synthesized)
tatgttcccaatttcttttctatgtgtgtaaatatatatagtcactcctcattatttgtgcattctatacatgagaattcacctgctcactaaaatttatttgtaacttcaaaattaata

SEQ ID NO: 456640 - DNA, 120 bp, Artificial Sequence
  ENSG00000156787_34 (sequence is synthesized)
gttgcagtgctttcatggtcattcagggacatgcacagagcagtgaaaatttgagtcaccagataccctttttcccagctgaagtcaaatgaggcaacactctgtcttcttatttcagct

SEQ ID NO: 456641 - DNA, 120 bp, Artificial Sequence
  ENSG00000156787_35 (sequence is synthesized)
ctcatagtgtaaacaagtatcctttttgtgatctacttaataccatttatttttttgcattttgaagctttttgttaagattctactgcttaaagtggtccccaagcgtagcgctgaagc

SEQ ID NO: 456642 - DNA, 120 bp, Artificial Sequence
  ENSG00000156787_36 (sequence is synthesized)
gaatcagcaatgtgtattaaataagatgtctttaaacagaaacacacatatatgtattgattgattaatgaggctctcaggaacctgactctgtgtttcccctaggagcagtgtttcagt

SEQ ID NO: 456643 - DNA, 120 bp, Artificial Sequence
  ENSG00000156787_37 (sequence is synthesized)
attcactaatcgagtgttcatggtgactttatagaaccactgcaaatagtgagaattaactatacatatatgtttctgtgtgtacgcacatgtgtgtgtatgcatacttgtctctaaaca

SEQ ID NO: 456644 - DNA, 120 bp, Artificial Sequence
  ENSG00000156787_38 (sequence is synthesized)
tgcatacttgtctctaaacatatgggattatactctgctgctgttttgctctttatgtcattatgtatactatataagtatatttttacattataatatgtgctatatattaataaattt

SEQ ID NO: 456645 - DNA, 120 bp, Artificial Sequence
  ENSG00000156787_39 (sequence is synthesized)
attaataaatttttttaaatgtattaatatctgctcttactgagagagttttcagcctgctgaatagtcagttttacagtactagctaaaccttcttttctttttttttttgagatggag

SEQ ID NO: 456646 - DNA, 120 bp, Artificial Sequence
  ENSG00000156787_40 (sequence is synthesized)
ttgcaaaccttcttaatagaggcaggcagagagctgagaaaaactatggtaagaatgagtcattgagttcctttctgcttgttatctgttgagcaaattgatatcacatgaatagaaaag

SEQ ID NO: 456647 - DNA, 120 bp, Artificial Sequence
  ENSG00000156787_41 (sequence is synthesized)
ctagcttggaagtagaatgatcttttttattttttgacacattcccagtaccatcagtgtctttatggctgttccaggctacattaatgttcaattctatattctctataaatcataact

SEQ ID NO: 456648 - DNA, 120 bp, Artificial Sequence
  ENSG00000156787_42 (sequence is synthesized)
cacctttgtctcatttttaccagttttattttcttgtcattggagaatttctggtattgtggtaatagagtaaatgaattcttaagtgttgaaggtttaacactacaaaggtatgtcaag

SEQ ID NO: 456649 - DNA, 120 bp, Artificial Sequence
  ENSG00000156787_43 (sequence is synthesized)
tcaggttgtttctcaggttcttttttgggaggttatacttcatggtagaggataaggctcaaacgggaaattgtgacattttaataaattttaattttaataaaattttagtaaatttca

SEQ ID NO: 456650 - DNA, 120 bp, Artificial Sequence
  ENSG00000156787_44 (sequence is synthesized)
ttacagtggtttcctattctgataacatccaaactccttaatatggcacatagcacccttcataatctatttttggcctaaaatggtagctcatttttctgggtttcattttcttcgtct

SEQ ID NO: 456651 - DNA, 120 bp, Artificial Sequence
  ENSG00000156787_45 (sequence is synthesized)
ctacggactccttccacatggaatttgtaattattggaagaatttgtgatactaatgcaatgatctcttaataggttcaatcttgttcagcgaacagcacaagcttgcacagctctggcc

SEQ ID NO: 456652 - DNA, 120 bp, Artificial Sequence
  ENSG00000156787_46 (sequence is synthesized)
tttaatcttcgtaggaaatctgaattccttgtggcattagctgattattctattaaatgttttgatacaggtaagaagttctcctatttttcttttgaagcagagtaaaatataaactga

SEQ ID NO: 456653 - DNA, 120 bp, Artificial Sequence
  ENSG00000156787_47 (sequence is synthesized)
agaactgcaagaactttatcactctgtacagcttgagggggcagtccccatgacagccctcccttcagacactaggtgcaagctgagggtcctagaaacagcctcactttagatcagttg

SEQ ID NO: 456654 - DNA, 120 bp, Artificial Sequence
  ENSG00000156787_48 (sequence is synthesized)
actacaaagtcagggtttcctgactactgtcaggtttgataatttactagaacaactcacagaactcaggaaagcactacacttaatgacagttttaatataacaaaaggatacaaagta

SEQ ID NO: 456655 - DNA, 120 bp, Artificial Sequence
  ENSG00000156787_49 (sequence is synthesized)
taactagccaaaggaagagaaacatggggtggaatttgggaggcttccaaaagggaagcctccattgtcctcagggatgcattgccctctcagatgacactcccagcattggtgtgtggc

SEQ ID NO: 456656 - DNA, 120 bp, Artificial Sequence
  ENSG00000156787_50 (sequence is synthesized)
tggccatctgcgccaagcactgttgacgcagggagtcgacccaagctttggtgtttttggtgttttccctaccaagctgttttctctgcttacaaagatacacacaagtacatcagaatc

SEQ ID NO: 456657 - DNA, 120 bp, Artificial Sequence
  ENSG00000156787_51 (sequence is synthesized)
cttacaaagatacacacaagtacatcagaatcaagtttaaaaaccaaatgtattatcagtatctcacactgataaacctgttcctcctcatgtatttattatttttttttattttttatt

SEQ ID NO: 456658 - DNA, 76 bp, Artificial Sequence
  ENSG00000156787_52 (sequence is synthesized)
ggcccctcctcatgtatttcctacctccgctaacagtatcaccatctgcttaaataactaagctggaaccactgga

SEQ ID NO: 456659 - DNA, 120 bp, Artificial Sequence
  ENSG00000156787_53 (sequence is synthesized)
tatcaccatctgcttaaataactaagctggaaccactggagccttcacttctcttatatctcaggacatcaatttgatcactaatattttttgtttttctccttagtagctcttggattt

SEQ ID NO: 456660 - DNA, 120 bp, Artificial Sequence
  ENSG00000156787_54 (sequence is synthesized)
ggccctccatatctcctgtctgaattattacagcaacatataaattagtctttcttgttcaatctcttcccctccaccagatatcctcaaagtgctctttctaaaacatagactagatat

SEQ ID NO: 456661 - DNA, 120 bp, Artificial Sequence
  ENSG00000156787_55 (sequence is synthesized)
ggtactcttttacataaaattacctgcaagagaaagcccaaactcactagcatcaattttgaagttattcttcatcaaagcctttgtcagccttgtctcctacatgaatgagatgttgct

SEQ ID NO: 456662 - DNA, 120 bp, Artificial Sequence
  ENSG00000156787_56 (sequence is synthesized)
aacatgttccgtcatacactttatcaactagccacaagcttccatttttgtggatattaatggaggtgcctcatataatacctaaccacccattgcatcagttcatctatggtgtttata

SEQ ID NO: 456663 - DNA, 120 bp, Artificial Sequence
  ENSG00000156787_57 (sequence is synthesized)
tccgtctctgaactatattagctcttatttatttaacttacaccctggctgttacaataatttgaaattacaaatatgttatttttgtgaagagtctaggattgaaaaaaatttcaaaat

SEQ ID NO: 456664 - DNA, 120 bp, Artificial Sequence
  ENSG00000156787_58 (sequence is synthesized)
cttgtattctttataccattgacaatttgctctttttataaaatcaacatactgtaaatttatattgtactttatggtttgcagtgtgctttagcatgcaatttttcatttgatccttaa

SEQ ID NO: 456665 - DNA, 120 bp, Artificial Sequence
  ENSG00000156787_59 (sequence is synthesized)
ttctttggcataggcaggaaagatattctccccattttacagattataacactaacgaccagaaacattgactcgtcaacattcctgttaattgtaaggattaaagattggactagaact

SEQ ID NO: 456666 - DNA, 120 bp, Artificial Sequence
  ENSG00000156787_60 (sequence is synthesized)
acaattctgcctcttccaaaggctgcagtttatccatccttaaatccttggatgtgtttagacgcacaagcattcatcaactatttgttgagctcctactgtgtgccaagcacgcctcta

SEQ ID NO: 456667 - DNA, 120 bp, Artificial Sequence
  ENSG00000156787_61 (sequence is synthesized)
ttttacttcatgatcctgtgatacattaatttggatcttccagcaaaacaagataatgtggaaactttttagatatttttaaagaagcaagctaatttattttcaaaggctaatttataa

SEQ ID NO: 456668 - DNA, 120 bp, Artificial Sequence
  ENSG00000156787_62 (sequence is synthesized)
tttattttggattttgaagaaaaaaaaaatccaagcagagtttgttccattgttgaagcattctttttctattgtaagaaaagccttcattttttaattttatgtcagaatttcttatga

SEQ ID NO: 456669 - DNA, 120 bp, Artificial Sequence
  ENSG00000156787_63 (sequence is synthesized)
atgattgtgaaactcttacattttttaaataaattgtctttgttgtaaaacttgagtaaagaaaagctttaatgaatttgcaaaaaaatatatattcttaaagatagatacacttttttt

SEQ ID NO: 456670 - DNA, 120 bp, Artificial Sequence
  ENSG00000156787_64 (sequence is synthesized)
gtcaggcaatctgtgagaatctgaaaggaagttgctctaaaataaattttttacgtgtgatttatatgaaaaatcggaggggcagaatgtcactattgtgattacatctacatgaattat

SEQ ID NO: 456671 - DNA, 120 bp, Artificial Sequence
  ENSG00000156795_0 (sequence is synthesized)
actacaagcccgccctttcctacgtctggtccagtcggtcttcctccggcccgggccctggcccagctagccggccatggaaggtaatggccccgctgctgtccactaccagccggccag

SEQ ID NO: 456672 - DNA, 120 bp, Artificial Sequence
  ENSG00000156795_1 (sequence is synthesized)
ccccccgcgggacgcctgcgtctacagcagctgctactgtgaagaaaatatttggaagctctgtgaatacatcaaaaaccatgaccagtatcctttagaagaatgttatgctgtcttcat

SEQ ID NO: 456673 - DNA, 120 bp, Artificial Sequence
  ENSG00000156795_2 (sequence is synthesized)
atctaatgagaggaagatgatacctatctggaaacaacaggcgagacctggagatggacctgtgatctgggattaccatgttgttttgcttcatgtttcaagtggaggacagaacttcat

SEQ ID NO: 456674 - DNA, 120 bp, Artificial Sequence
  ENSG00000156795_3 (sequence is synthesized)
ttatgatctcgatactgtcttgccatttccctgcctctttgacacttatgtagaagatgcctttaagtctgatgatgacattcacccacagtttaggaggaaatttagagtgatccgtgc

SEQ ID NO: 456675 - DNA, 120 bp, Artificial Sequence
  ENSG00000156795_4 (sequence is synthesized)
agattcatatttgaagaactttgcttctgaccgatctcacatgaaagactccagtgggaattggagagagcctccgccgccatatccctgcattgagactggagattccaaaatgaacct

SEQ ID NO: 456676 - DNA, 120 bp, Artificial Sequence
  ENSG00000156795_5 (sequence is synthesized)
gaacgatttcatcagtatggatcccaaggtaggatggggcgccgtctacacactatccgaatttacacatcggtttggcagtaaaaactgctgaacttggtctcaagatgtggaactgtg

SEQ ID NO: 456677 - DNA, 120 bp, Artificial Sequence
  ENSG00000156795_6 (sequence is synthesized)
ctttctcttttaatttgattgagtggaaatctgagtgaatacaaatataaatgaacaacataaaaacttttgttttgacatgtcaaattgaaacttgataaagtgcgtacttgctaagat

SEQ ID NO: 456678 - DNA, 120 bp, Artificial Sequence
  ENSG00000156795_7 (sequence is synthesized)
attcctgtggctcatgcgttacaacacgaggacttaagccagtaatcgtttttgttcagatagaggtgtggaggtagagccagcccctcatgtctgttttggatgttttgtgtctctcca

SEQ ID NO: 456679 - DNA, 120 bp, Artificial Sequence
  ENSG00000156795_8 (sequence is synthesized)
gctacattgtaagttccttgagggcagggccatggcccattgctctgtgaatctcaaatgcccataaaaggtgcccataaaatgttttcttgaacatttgaatgtgctgttgtctggaaa

SEQ ID NO: 456680 - DNA, 120 bp, Artificial Sequence
  ENSG00000156795_9 (sequence is synthesized)
ggggtaatattgtgagctgaatcagcaataagtattagtctttttggactatggtattgttaaaaagactgcagccctctcagacttgagcgttaattggcttatttatttatggcttta

SEQ ID NO: 456681 - DNA, 120 bp, Artificial Sequence
  ENSG00000156795_10 (sequence is synthesized)
aataaaatcgatttaacgttagttttgttttgaagatttttgtgtcacccttgatgatctgaaatacctaaatatgcctcaattgtagatgagaaccagggctttaaaaaatatttatta

SEQ ID NO: 456682 - DNA, 120 bp, Artificial Sequence
  ENSG00000156795_11 (sequence is synthesized)
catgtgccttctggaagacatcttggttatttggctttaatcatatcattccaaatgaaagatatttggcattacattggcatatagtaccagctctcatgttttcatgattctacttta

SEQ ID NO: 456683 - DNA, 120 bp, Artificial Sequence
  ENSG00000156795_12 (sequence is synthesized)
gccgagttgcatgcctgcctaaatagtatattgtggaactctttcataggagacaaacttatgtattttttaagtcacagaattcttgtctgttgtccaggctggagtgcagttgcgtga

SEQ ID NO: 456684 - DNA, 82 bp, Artificial Sequence
  ENSG00000156795_13 (sequence is synthesized)
cttgtctgttgtccaggctggagtgcagttgcgtgatcccctcagcctccctcagctggaactacaggcatgcaccaccatg

SEQ ID NO: 456685 - DNA, 120 bp, Artificial Sequence
  ENSG00000156795_14 (sequence is synthesized)
ctctccccccgggctccgcccaccccacgccgggaacccacgcgggccactacaagcccgccctttcctacgtctggtccagtcggtcttcctccggcccgggccctggcccagctagcc

SEQ ID NO: 456686 - DNA, 89 bp, Artificial Sequence
  ENSG00000156795_15 (sequence is synthesized)
ttgtatttttagtgagatggggttccgccatgttggtgaagctagtgttgaactcctggcctcaagtgatcgacctgaatgagccactg

SEQ ID NO: 456687 - DNA, 120 bp, Artificial Sequence
  ENSG00000156795_16 (sequence is synthesized)
cttacattcccaccagatattgtatgaaggttttatcacatattcaatggcatgagatagtgttatgagattgttaatgtaatgggatttaagtaccattttgatgtttgaaataatttt

SEQ ID NO: 456688 - DNA, 120 bp, Artificial Sequence
  ENSG00000156795_17 (sequence is synthesized)
taaagtgttttcataaaataattcttgcattaagtgttttatcaatgtctttaagcttggctttagtatcttgagtatagaatgtagctgagggtctgatttcataaattaattactggc

SEQ ID NO: 456689 - DNA, 120 bp, Artificial Sequence
  ENSG00000156795_18 (sequence is synthesized)
cattcatatccaggttccagagggttccttggagcagttagaaccagaccaaatcctgtagaattgtgagcaaggaagaaagggagaggcaagggccagaggagcagtgaatatgagaga

SEQ ID NO: 456690 - DNA, 71 bp, Artificial Sequence
  ENSG00000156795_19 (sequence is synthesized)
agggagaggcaagggccagaggagcagtgaatatgagagacaggttcaaggtatctatttttattttattt

SEQ ID NO: 456691 - DNA, 120 bp, Artificial Sequence
  ENSG00000156795_20 (sequence is synthesized)
ctcctgacctcaagtgatccacccgccttcacctcccaaagtgctggaggttcaggatctctaaatgagaggtaaacaaactgaagcaggaggccagatcaaggagatgcccaccatgat

SEQ ID NO: 456692 - DNA, 120 bp, Artificial Sequence
  ENSG00000156795_21 (sequence is synthesized)
tgatgtcaggaggtgagttgggaaagggcctcaggagatagggattcttgcgtggcccccaaagggggtagtggggtagggaataagcttcctcctaccctaagcaccaataaattcaaa

SEQ ID NO: 456693 - DNA, 120 bp, Artificial Sequence
  ENSG00000156795_22 (sequence is synthesized)
tttatggtaaaaatataacataaaactcactatcttaaagtgtacagtagtgttaagtatatttgcatcatcatgccacagatctccagaagttttcatcttgcaaatggaaactctgta

SEQ ID NO: 456694 - DNA, 120 bp, Artificial Sequence
  ENSG00000156795_23 (sequence is synthesized)
ctcatcaaacaactccccattttcctctctccatatccccccactaactgccattctactttctgtttctatcagtttaactactttagatacctcgtatacgtggaatcataaagcatt

SEQ ID NO: 456695 - DNA, 120 bp, Artificial Sequence
  ENSG00000156795_24 (sequence is synthesized)
tatctgcattattttacttagcttaatgtcctccagtttcattcatgttatagtgtatgataggattttcttattttgaaggactgaataatattccattgtatgtatatatcacatttg

SEQ ID NO: 456696 - DNA, 120 bp, Artificial Sequence
  ENSG00000156795_25 (sequence is synthesized)
ctttatcattttttccatcactgaacatttaggttccatccacctcttggctattgtgaataatactgcaagcgacatagatgtgcaaatatctctgtgagatcttgttttcagttcttt

SEQ ID NO: 456697 - DNA, 120 bp, Artificial Sequence
  ENSG00000156795_26 (sequence is synthesized)
tggatatatatcaaggaatgggattgctggtcatatagttgctggtaattctatttttaattttttgaggaacctccattctgttttccatgggctctaccattttacattccacaaaca

SEQ ID NO: 456698 - DNA, 120 bp, Artificial Sequence
  ENSG00000156795_27 (sequence is synthesized)
gtgcacaagtgttttaatttctttatgtctttaccagcaagcacttgttatacagtctcccttctttcttttcatagtgggcatcctaatgggagtgaggtgatatctccttgtggtttt

SEQ ID NO: 456699 - DNA, 120 bp, Artificial Sequence
  ENSG00000156795_28 (sequence is synthesized)
cagttgcatttttctgatgattagtaatgcgaacatcttttcatgtgcttgttggccatttgtatatcacttttggagacatgtctgttcaagtactttgcccgttttttaattgggtta

SEQ ID NO: 456700 - DNA, 120 bp, Artificial Sequence
  ENSG00000156795_29 (sequence is synthesized)
tttgatttttgttgttgagttgagggaattctttatatattctagatattagtcccttctcagatgtattatatgagcatattttcttcaattccataagttgccttttcactatattga

SEQ ID NO: 456701 - DNA, 120 bp, Artificial Sequence
  ENSG00000156795_30 (sequence is synthesized)
ttgtatcttttggtgcacaaaagtttttaagtttgatataattccatttgtctacttttgctttttgttgcctatgcatttagtgtcataccaagaaatcattggaaatatgttttttca

SEQ ID NO: 456702 - DNA, 120 bp, Artificial Sequence
  ENSG00000156795_31 (sequence is synthesized)
tttgtttaagcctgtaggaggaaatacggtttgagtgaactttaacatcttggaaaagtaagccttggtcaagcttacagacaagagactaggctggttattcatcctgtgaaacagccc

SEQ ID NO: 456703 - DNA, 120 bp, Artificial Sequence
  ENSG00000156795_32 (sequence is synthesized)
tacaaatttacctacaccatggaatccaagatcccactgataatgtgaacttactcctttttgtttgtcttctcccttctaatgttaatttttttaactgcaggaaaaataacaaaataa

SEQ ID NO: 456704 - DNA, 120 bp, Artificial Sequence
  ENSG00000156795_33 (sequence is synthesized)
cagaattcttcttttataagatagatttgggagcatgtactgatcttttgagtgaggtggagaggtcaaaataaaaatactaaaatgtgaataaaactttgagacttagatggagaccta

SEQ ID NO: 456705 - DNA, 120 bp, Artificial Sequence
  ENSG00000156795_34 (sequence is synthesized)
gttaaaccttttcttcaaatgccatcaatgccaaagagcagcagttgttttactaattcattcaccaaaagtgattatcaaacgtctactatgttctgggcactaactagccaaggcaat

SEQ ID NO: 456706 - DNA, 120 bp, Artificial Sequence
  ENSG00000156795_35 (sequence is synthesized)
ataggtgtgtataagaggcaagtctctgctgtctgtgagtctatgcagaatctcgtcttccgttagaagcatcaacaaacatgtattgcctgccctccctctgctagaagtttggggaga

SEQ ID NO: 456707 - DNA, 120 bp, Artificial Sequence
  ENSG00000156795_36 (sequence is synthesized)
catgttatggactaaatgtttgtgtcccccaaaatgtacatgttgaagccttaacgcccaatgtgatggtatttggaagtgaggcttttgggaggtaattagatataaatgaggtcatga

SEQ ID NO: 456708 - DNA, 120 bp, Artificial Sequence
  ENSG00000156795_37 (sequence is synthesized)
ctggaaacaacaggcgagacctggagatggacctgtgatctgggctgacccccagaagcctcctttgttactagtttggagcagatccttgcagacgttttcctctgcattcacatgcat

SEQ ID NO: 456709 - DNA, 120 bp, Artificial Sequence
  ENSG00000156802_0 (sequence is synthesized)
agaattcggagcgcggaagagccagagctgcgagcgcctggagctggatctctctccggtcgcgcacgccgaggccagtagggagagaagatggtggttctccgcagcagcttggagctg

SEQ ID NO: 456710 - DNA, 120 bp, Artificial Sequence
  ENSG00000156802_1 (sequence is synthesized)
cacaaccactccgcggcctcggccacgggctccttggacctgtccagtgacttcctcagtctggagcacatcggccggaggcggctccgctcggccggcgcggcgcagaagaaacccgcg

SEQ ID NO: 456711 - DNA, 120 bp, Artificial Sequence
  ENSG00000156802_2 (sequence is synthesized)
gcgaccacagccaaagcgggcgatgggtcatcagttaaggaagttgaaacctaccaccggacacgtgctttaagatctttgagaaaagatgcacagaattcttcagattctagttttgag

SEQ ID NO: 456712 - DNA, 120 bp, Artificial Sequence
  ENSG00000156802_3 (sequence is synthesized)
aagaatgtggaaataacggagcaacttgctaatggcaggcattttacaaggcagttggccagacagcaggctgataaaaaaaaagaagagcacagagaagacaaagtgattccagttact

SEQ ID NO: 456713 - DNA, 120 bp, Artificial Sequence
  ENSG00000156802_4 (sequence is synthesized)
cggtcattgagggctagaaacatcgttcaaagtacagaacacttacatgaagataatggtgatgttgaagtgcgtcgaagttgtaggattagaagtcgttatagtggtgtaaaccagtcc

SEQ ID NO: 456714 - DNA, 120 bp, Artificial Sequence
  ENSG00000156802_5 (sequence is synthesized)
atgctgtttgacaaacttataactaacactgctgaagctgtacttcaaaaaatggatgacatgaagaagatgcgtagacagcgaatgagagaacttgaagacttgggagtgtttaatgaa

SEQ ID NO: 456715 - DNA, 120 bp, Artificial Sequence
  ENSG00000156802_6 (sequence is synthesized)
acagaagaaagcaatcttaatatgtacacaagaggaaaacagaaagatattcaaagaactgatgaagaaacaactgataatcaagaaggcagtgtggagtcatctgaagagggtgaagac

SEQ ID NO: 456716 - DNA, 120 bp, Artificial Sequence
  ENSG00000156802_7 (sequence is synthesized)
caagaacatgaagatgatggtgaagatgaagatgatgaagatgatgatgatgatgacgatgatgatgatgatgatgatgatgaagatgatgaagatgaagaagatggagaagaagagaat

SEQ ID NO: 456717 - DNA, 120 bp, Artificial Sequence
  ENSG00000156802_8 (sequence is synthesized)
cagaagcgatattatcttagacagagaaaagctactgtttactatcaggctccattggaaaaacctcgtcaccagagaaagcccaacatattttatagtggcccagcttctcctgcaaga

SEQ ID NO: 456718 - DNA, 120 bp, Artificial Sequence
  ENSG00000156802_9 (sequence is synthesized)
ccaagataccgattatcttccgcaggaccaagaagtccttactgtaaacgaatgaacaggcgaaggcatgcaatccacagtagtgactcgacttcatcttcctcctctgaagatgaacag

SEQ ID NO: 456719 - DNA, 120 bp, Artificial Sequence
  ENSG00000156802_10 (sequence is synthesized)
cactttgagaggcggaggaaaaggagtcgtaatagggctatcaataggtgcctcccactaaattttcggaaagatgaattaaaaggcatttataaagatcgaatgaaaattggagcaagc

SEQ ID NO: 456720 - DNA, 120 bp, Artificial Sequence
  ENSG00000156802_11 (sequence is synthesized)
cttgccgatgttgatccaatgcaactagattcttcagtacgatttgatagtgttggtggcctgtctaatcatatagcagctctaaaagagatggtggtgtttccattactttatccagaa

SEQ ID NO: 456721 - DNA, 120 bp, Artificial Sequence
  ENSG00000156802_12 (sequence is synthesized)
gtctttgaaaaatttaaaattcaacccccaagaggttgtttgttttatgggccacctggaactggaaagactctggttgccagagcacttgccaatgagtgcagtcaaggggataaaaga

SEQ ID NO: 456722 - DNA, 120 bp, Artificial Sequence
  ENSG00000156802_13 (sequence is synthesized)
gtagcatttttcatgaggaaaggtgctgattgtctaagtaaatgggtaggagaatctgaaagacagctacgattgctgtttgatcaggcctatcagatgcgcccatcaattatttttttt

SEQ ID NO: 456723 - DNA, 120 bp, Artificial Sequence
  ENSG00000156802_14 (sequence is synthesized)
gacgaaattgatggtctggctccagtacggtcaagcaggcaagatcagattcacagttctattgtttccaccctgctagctcttatggatggattggacagcagaggggaaattgtggtc

SEQ ID NO: 456724 - DNA, 120 bp, Artificial Sequence
  ENSG00000156802_15 (sequence is synthesized)
attggtgctacgaacaggctagattctatagatcctgctttacgaaggcctggtcgctttgatagagaattcctctttagcctgcctgataaagaggctcgaaaagagattctaaagatt

SEQ ID NO: 456725 - DNA, 120 bp, Artificial Sequence
  ENSG00000156802_16 (sequence is synthesized)
cacaccagggattggaatcccaaaccactggacacatttttagaagagctagcagaaaactgtgttggatactgtggagcagatattaaatcaatatgtgctgaagctgctttatgtgct

SEQ ID NO: 456726 - DNA, 120 bp, Artificial Sequence
  ENSG00000156802_17 (sequence is synthesized)
ttacgacgacgctacccacagatctataccactagtgagaaactgcagttggatctctcttcaattaatatctcagctaaggatttcgaggtagctatgcaaaagatgataccagcctcc

SEQ ID NO: 456727 - DNA, 120 bp, Artificial Sequence
  ENSG00000156802_18 (sequence is synthesized)
caaagagctgtgacatcacctgggcaggcactgtccaccgttgtgaaaccactcctgcaaaacactgttgacaagattttagaagccctgcagagagtatttccacatgcagaattcaga

SEQ ID NO: 456728 - DNA, 120 bp, Artificial Sequence
  ENSG00000156802_19 (sequence is synthesized)
acaaataaaacattagactcagatatttcttgtcctctgctagaaagtgacttggcttacagtgatgatgatgttccatcagtttatgaaaatggactttctcagaaatcttctcataag

SEQ ID NO: 456729 - DNA, 120 bp, Artificial Sequence
  ENSG00000156802_20 (sequence is synthesized)
gcaaaagacaattttaattttcttcatttgaatagaaatgcttgttaccaacctatgtcttttcgaccaagaatattgatagtaggagaaccaggatttgggcaaggttctcacttggca

SEQ ID NO: 456730 - DNA, 120 bp, Artificial Sequence
  ENSG00000156802_21 (sequence is synthesized)
ccagctgtcattcatgctttggaaaagtttactgtatatacattagacattcctgttctttttggagttagtactacatcccctgaagaaacatgtgcccaggtgattcgtgaagctaag

SEQ ID NO: 456731 - DNA, 120 bp, Artificial Sequence
  ENSG00000156802_22 (sequence is synthesized)
agaacagcaccaagtatagtgtatgttcctcatatccacgtgtggtgggaaatagttggaccgacacttaaagccacatttaccacattattacagaatattccttcatttgctccagtt

SEQ ID NO: 456732 - DNA, 120 bp, Artificial Sequence
  ENSG00000156802_23 (sequence is synthesized)
cattccgctttgccagaagaggtgcaagaattgtttatccgtgattatggagagatttttaatgtccagttaccggataaagaagaacggacaaaattttttgaagatttaattctaaaa

SEQ ID NO: 456733 - DNA, 120 bp, Artificial Sequence
  ENSG00000156802_24 (sequence is synthesized)
caagctgctaagcctcctatatcaaaaaagaaagcagttttgcaggctttggaggtactcccagtagcaccaccacctgagccaagatcactgacagcagaagaagtgaaacgactagaa

SEQ ID NO: 456734 - DNA, 120 bp, Artificial Sequence
  ENSG00000156802_25 (sequence is synthesized)
gaacaagaagaagatacatttagagaactgaggattttcttaagaaatgttacacataggcttgctattgacaagcgattccgagtgtttactaagcctgttgaccctgatgaggttcct

SEQ ID NO: 456735 - DNA, 120 bp, Artificial Sequence
  ENSG00000156802_26 (sequence is synthesized)
gattatgtcactgtaataaagcaaccaatggacctttcatctgtaatcagtaaaattgatctacacaagtatctgactgtgaaagactatttgagagatattgatctaatctgtagtaat

SEQ ID NO: 456736 - DNA, 120 bp, Artificial Sequence
  ENSG00000156802_27 (sequence is synthesized)
gccttagaatacaatccagatagagatcctggagatcgtcttattaggcatagagcctgtgctttaagagatactgcctatgccataattaaagaagaacttgatgaagactttgagcag

SEQ ID NO: 456737 - DNA, 120 bp, Artificial Sequence
  ENSG00000156802_28 (sequence is synthesized)
ctctgtgaagaaattcaggaatctagaaagaaaagaggttgtagctcctccaaatatgccccgtcttactaccatgtgatgccaaagcaaaattccactcttgttggtgataaaagatca

SEQ ID NO: 456738 - DNA, 120 bp, Artificial Sequence
  ENSG00000156802_29 (sequence is synthesized)
gacccagagcagaatgaaaagctaaagacaccgagtactcctgtggcttgcagcactcctgctcagttgaagaggaaaattcgcaaaaagtcaaactggtacttaggcaccataaaaaag

SEQ ID NO: 456739 - DNA, 120 bp, Artificial Sequence
  ENSG00000156802_30 (sequence is synthesized)
cgaaggaagatttcacaggcaaaggatgatagccagaatgccatagatcacaaaattgagagtgatacagaggaaactcaagacacaagtgtagatcataatgagaccggaaacacagga

SEQ ID NO: 456740 - DNA, 120 bp, Artificial Sequence
  ENSG00000156802_31 (sequence is synthesized)
gagtcttcggtggaagaaaatgaaaaacagcaaaatgcctctgaaagcaaactggaattgagaaataattcaaatacttgtaatatagagaatgagcttgaagactctaggaagactaca

SEQ ID NO: 456741 - DNA, 120 bp, Artificial Sequence
  ENSG00000156802_32 (sequence is synthesized)
gcatgtacagaattgagagacaagattgcttgtaatggagatgcttctagctctcagataatacatatttctgatgaaaatgaaggaaaagaaatgtgtgttctgcgaatgactcgagct

SEQ ID NO: 456742 - DNA, 120 bp, Artificial Sequence
  ENSG00000156802_33 (sequence is synthesized)
agacgttcccaggtagaacagcagcagctcatcactgttgaaaaggctttggcaattctttctcagcctacaccctcacttgttgtggatcatgagcgattaaaaaatcttttgaagact

SEQ ID NO: 456743 - DNA, 120 bp, Artificial Sequence
  ENSG00000156802_34 (sequence is synthesized)
gttgttaaaaaaagtcaaaactacaacatatttcagttggaaaatttgtatgcagtaatcagccaatgtatttatcggcatcgcaaggaccatgataaaacatcacttattcagaaaatg

SEQ ID NO: 456744 - DNA, 120 bp, Artificial Sequence
  ENSG00000156802_35 (sequence is synthesized)
gagcaagaggtagaaaacttcagttgttccagatgatgatgtcatggtatcgagtattctttatattcagttcctatttaagtcatttttgtcatgtccgcctaattgatgtagtatgaa

SEQ ID NO: 456745 - DNA, 120 bp, Artificial Sequence
  ENSG00000156802_36 (sequence is synthesized)
accctgcatctttaaggaaaagattaaaatagtaaaataaaagtatttaaactttcctgatatttatgtacatattaagataaatgtcatgtgtaagataactgataaatattggaactt

SEQ ID NO: 456746 - DNA, 120 bp, Artificial Sequence
  ENSG00000156802_37 (sequence is synthesized)
tgctagaacaagaccctgtagtaatagtaataatagttgaagtttggccaactcttaataaagttattttggtaactaatgttttatggcacttaagaataattagcagcgttaaatttt

SEQ ID NO: 456747 - DNA, 120 bp, Artificial Sequence
  ENSG00000156802_38 (sequence is synthesized)
gtttgtattaagcacttttaattttatccttcctaaaaatagtttattgtatctgacaagaaacttacttaaccattgtgtccttcccatcttttttgtcatctttgttttcttcaaatg

SEQ ID NO: 456748 - DNA, 120 bp, Artificial Sequence
  ENSG00000156802_39 (sequence is synthesized)
ccctcctcccatctgccttgagattccctcgtcttcacttaaaagccagagtgcaagtcatgatttgcgggagggctcttgaaccacttctggctgcaccacaattctgtacttgagtat

SEQ ID NO: 456749 - DNA, 120 bp, Artificial Sequence
  ENSG00000156802_40 (sequence is synthesized)
cacagtcattgtttttgagacaaacatttttataattctaatttgggttaataaagattttaaatatttcttggtttacttttgtaattatatacacaacaaatgtattaataactacct

SEQ ID NO: 456750 - DNA, 120 bp, Artificial Sequence
  ENSG00000156802_41 (sequence is synthesized)
tgttaaacaccttttaatagcacaaggtttttatatttgcaagctgttgatatctttctaaaactgtttaggttatagtctattgatactttttatatacaattttataaatataaatat

SEQ ID NO: 456751 - DNA, 120 bp, Artificial Sequence
  ENSG00000156802_42 (sequence is synthesized)
tataattttatattaatggtaccaaaaatacatttcttaaggttaaaagcatgcacttccatgcatacttgcttttggggagagtggggagaagacattctaataatcagtttgtgaaat

SEQ ID NO: 456752 - DNA, 120 bp, Artificial Sequence
  ENSG00000156802_43 (sequence is synthesized)
agcttctgttggaaaccttttgaggggaataaggaatggtcatctaaaatgagagattctggattttaatgcagttcaaagttgagctgtatttttgttgttgatttatctggatttttt

SEQ ID NO: 456753 - DNA, 120 bp, Artificial Sequence
  ENSG00000156802_44 (sequence is synthesized)
ttaaagccttctaaaacccagtgaattcaataccttaattagtacatactatcttatgtaatgcataaagcaatgccagtcactgagaacatttaaatatatttatattcctggagatac

SEQ ID NO: 456754 - DNA, 120 bp, Artificial Sequence
  ENSG00000156802_45 (sequence is synthesized)
acattctcatttttgttggtttattataaattattcttctagatgcatcttttataactaggatttcattttgtgtgtatagcttatgtaataaattttaaaggtgaaaactctcttaaa

SEQ ID NO: 456755 - DNA, 120 bp, Artificial Sequence
  ENSG00000156802_46 (sequence is synthesized)
gtattgatgtgtgagagatagaatgttaaatggtgaaagaaactttataagctagtagttcctttttttggtagtagaaccccagtatatagtacaaaaataaaaaatgtggatggttgc

SEQ ID NO: 456756 - DNA, 63 bp, Artificial Sequence
  ENSG00000156802_47 (sequence is synthesized)
cccagtatatagtacaaaaataaaaaatgtggatggttgcagtggctcatacctgtattcctg

SEQ ID NO: 456757 - DNA, 120 bp, Artificial Sequence
  ENSG00000156802_48 (sequence is synthesized)
tgttatgaactataaaccagtaaatcttatattagctgcttcatagacattgctgatatttgtttatcatgaaatggtttttctagatactaacttgtagtttcttggggagatacaaaa

SEQ ID NO: 456758 - DNA, 120 bp, Artificial Sequence
  ENSG00000156802_49 (sequence is synthesized)
ggggcggtatcattatactttcaaaaagagttgtttctaccacaataatcataacttattgaaaaaattcaaatgctgtagaagtgaataaaaggataagttttcttatcaaatatacca

SEQ ID NO: 456759 - DNA, 120 bp, Artificial Sequence
  ENSG00000156802_50 (sequence is synthesized)
ttggtaactatttggtatatgtgctcattgggcaagatggtatatgtatatgtgtatgtatatattaaggatacataaattttttctcttgaaaaatggtattatatgccgggtgcagtg

SEQ ID NO: 456760 - DNA, 120 bp, Artificial Sequence
  ENSG00000156802_51 (sequence is synthesized)
gtgctatacatgttatcagctgcaaccctctggacataaatgacttaaaatatgaacagcaaaatattccatagtagatatttactagtacttcatggaaggcgataagcacctttaacc

SEQ ID NO: 456761 - DNA, 120 bp, Artificial Sequence
  ENSG00000156802_52 (sequence is synthesized)
aggtttgggcttggagttgggccctgaatggcgctttgctgtgaatctccgcggggaggctcttccaaccaggggctgagcttctgcgctgtggagaagccaggatctcatttgcctctt

SEQ ID NO: 456762 - DNA, 120 bp, Artificial Sequence
  ENSG00000156802_53 (sequence is synthesized)
tcaacatcactcctgctggagccaccaccagctcaatccttggcatcatcacctcactgaggagggtggtgtggtccttctcagcaagaaagtcgatgtctcgggaagtgacgatgccca

SEQ ID NO: 456763 - DNA, 120 bp, Artificial Sequence
  ENSG00000156802_54 (sequence is synthesized)
ccggcttgctgcccatggtgcctgtctcagtgatggggataccagagaagccatgccgcatcgtggcctccagcacatcacccacagggtgcgaggggctcagcaccatggggtccgtga

SEQ ID NO: 456764 - DNA, 120 bp, Artificial Sequence
  ENSG00000156802_55 (sequence is synthesized)
tgaagccatgttcaaacttcttgaccttccgcacctccttggcctggaactctggggtgcagttgtggtgaatgaaaccaatacctcccaccagagccatcgtgatggccatgttgccct

SEQ ID NO: 456765 - DNA, 80 bp, Artificial Sequence
  ENSG00000156804_0 (sequence is synthesized)
agcactcccggagcctgcaacgcttgagatcctctccgcgcccgccaccccgcagggtgccccgcgccgttcccgccgcc

SEQ ID NO: 456766 - DNA, 120 bp, Artificial Sequence
  ENSG00000156804_1 (sequence is synthesized)
ccccgggtggcacgtccccgagcccaccaggccggccccgtctccccatccgtctagtccgctcgcggtgccatgccattcctcgggcaggactggcggtcccccgggcagaactgggtg

SEQ ID NO: 456767 - DNA, 120 bp, Artificial Sequence
  ENSG00000156804_2 (sequence is synthesized)
aagacggccgacggctggaagcgcttcctggatgagaagagcggcagtttcgtgagcgacctcagcagttactgcaacaaggaggtatacaataaggagaatcttttcaacagcctgaac

SEQ ID NO: 456768 - DNA, 120 bp, Artificial Sequence
  ENSG00000156804_3 (sequence is synthesized)
tatgatgttgcagccaagaagagaaagaaggacatgctgaatagcaaaaccaaaactcagtatttccaccaagaaaaatggatctatgttcacaaaggaagtactaaagagcgccatgga

SEQ ID NO: 456769 - DNA, 120 bp, Artificial Sequence
  ENSG00000156804_4 (sequence is synthesized)
tattgcaccctgggggaagctttcaacagactggacttctcaactgccattctggattccagaagatttaactacgtggtccggctgttggagctgatagcaaagtcacagctcacatcc

SEQ ID NO: 456770 - DNA, 120 bp, Artificial Sequence
  ENSG00000156804_5 (sequence is synthesized)
ctgagtggcatcgcccaaaagaacttcatgaatattttggaaaaagtggtactgaaagtccttgaagaccagcaaaacattagactaataagggaactactccagaccctctacacatcc

SEQ ID NO: 456771 - DNA, 120 bp, Artificial Sequence
  ENSG00000156804_6 (sequence is synthesized)
ttatgtacactggtccaaagagtcggcaagtctgtgctggtcgggaacattaacatgtgggtgtatcggatggagacgattctccactggcagcagcagctgaacaacattcagatcacc

SEQ ID NO: 456772 - DNA, 120 bp, Artificial Sequence
  ENSG00000156804_7 (sequence is synthesized)
aggcctgccttcaaaggcctcaccttcactgacctgcctttgtgcctacaactgaacatcatgcagaggctgagcgacgggcgggacctggtcagcctgggccaggctgcccccgacctg

SEQ ID NO: 456773 - DNA, 120 bp, Artificial Sequence
  ENSG00000156804_8 (sequence is synthesized)
cacgtgctcagcgaagaccggctgctgtggaagaaactctgccagtaccacttctccgagcggcagatccgcaaacgattaattctgtcagacaaagggcagctggattggaagaagatg

SEQ ID NO: 456774 - DNA, 120 bp, Artificial Sequence
  ENSG00000156804_9 (sequence is synthesized)
tatttcaaacttgtccgatgttacccaaggaaagagcagtatggagatacccttcagctctgcaaacactgtcacatcctttcctggaagggcactgaccatccgtgcactgccaataac

SEQ ID NO: 456775 - DNA, 120 bp, Artificial Sequence
  ENSG00000156804_10 (sequence is synthesized)
ccagagagctgctccgtttcactttcaccccaggactttatcaacttgttcaagttctgaatcccagcacatgacaacacttcagaagggtccccctgctgactggagagctgggaatat

SEQ ID NO: 456776 - DNA, 120 bp, Artificial Sequence
  ENSG00000156804_11 (sequence is synthesized)
ggcatttggacacttcatttgtaaatagtgtacattttaaacattggctcgaaacttcagagataagtcatggagaggacattggaggggagaaatgcagttgctgactgggaatttaag

SEQ ID NO: 456777 - DNA, 120 bp, Artificial Sequence
  ENSG00000156804_12 (sequence is synthesized)
aatgtgaacttctcactagaattggtatggaaaagcaaaatactgtaaataaactttttttctaacaatttgccagcaagactataagggcaataattctatttcagcggtgaaaatgga

SEQ ID NO: 456778 - DNA, 120 bp, Artificial Sequence
  ENSG00000156804_13 (sequence is synthesized)
gtcctcttaatggtcacagaaactctcttatagttccctaggaagaaaaaggcaaaactcaaatacaaaataggacgctttgtttacaatgtgaaaatttgtttagaaaagaaaaaatga

SEQ ID NO: 456779 - DNA, 120 bp, Artificial Sequence
  ENSG00000156804_14 (sequence is synthesized)
agaaggaaaactatataggagaaattcctgggctttggggtttgatctggtgtttgttttgagaaggcgaaggaagcgccacccatcctaaacctgcatgggcacagagccttaccctac

SEQ ID NO: 456780 - DNA, 120 bp, Artificial Sequence
  ENSG00000156804_15 (sequence is synthesized)
agagataccacacaatggtctacctctaaaagcgtagagtgccctctctgacaacgcatgtgatccagtaggcagtgtctgtttttctcgtaagtgttttcatcactataaaaagtgatt

SEQ ID NO: 456781 - DNA, 120 bp, Artificial Sequence
  ENSG00000156804_16 (sequence is synthesized)
taaaatggaaagggatattggaggcaatcctctggtttcacacttccttttcaggcaaacagggccctccttagagttatctgttcaccagaacaacccaaaagcacatgttcctttttt

SEQ ID NO: 456782 - DNA, 120 bp, Artificial Sequence
  ENSG00000156804_17 (sequence is synthesized)
ttttcctgtcatgttgtagctcatttgggggaaaagaaggccaacttaaaacagtcccaggggaggattgcttgagcccaggagtctgaggtttgcagtgagctatgattgtgccactgc

SEQ ID NO: 456783 - DNA, 120 bp, Artificial Sequence
  ENSG00000156804_18 (sequence is synthesized)
cagcctgtctccaaaacaaaacaaaacaaaacaaaagccgtcccagaggaagtcctgctgcagaaaagatgatagaattggtcacccaatcaatagctgtgaagacttccttattcctgc

SEQ ID NO: 456784 - DNA, 120 bp, Artificial Sequence
  ENSG00000156804_19 (sequence is synthesized)
tgaacttccttccttggatatcttcatggataagcctgtgtctgtggacagagtggggcccaagtgctgaggctcgaaagacaggttttacaatcagccaattaaacatcttaccagttg

SEQ ID NO: 456785 - DNA, 120 bp, Artificial Sequence
  ENSG00000156804_20 (sequence is synthesized)
ctgtaccccttgccaaggggatgagctgaggagcttcttttctttaggtccaacatcaaaatgagtccatctgagctagggctttttgcaaaggtgattaaaaatcaaggctggagttcc

SEQ ID NO: 456786 - DNA, 120 bp, Artificial Sequence
  ENSG00000156804_21 (sequence is synthesized)
agccaaatagggaggagaggtaccacaagttcatcttaaacttgcttccgggctgggtagttaaaacaggaagatcccaaggggatcttacgaggcaaatatcagcaggtaactgtggaa

SEQ ID NO: 456787 - DNA, 120 bp, Artificial Sequence
  ENSG00000156804_22 (sequence is synthesized)
gaaaggaaatctcaggacctaatgagttcgttgtaaaatattcctgggaatagatgggggatctactcccagttttttactttttacagaatattgttgctttcctacaacaatgtacat

SEQ ID NO: 456788 - DNA, 120 bp, Artificial Sequence
  ENSG00000156804_23 (sequence is synthesized)
atatttgcagttgtatatgctttttttttttccaaataaacttgtcaccctgcatgcccttggcaaataagtgaagcagaaataggaacacagtccacattcaagttgaggaacagtgta

SEQ ID NO: 456789 - DNA, 120 bp, Artificial Sequence
  ENSG00000156804_24 (sequence is synthesized)
tctttaagagctgagctttgggtgacctggaaagggggaaagatggctaagcatggagagaaacgaggcaagagacaagctatgatacaacaccgcttcagcccctgccctcaatagcac

SEQ ID NO: 456790 - DNA, 120 bp, Artificial Sequence
  ENSG00000156804_25 (sequence is synthesized)
acaacccacatatcagctttctgaagagaaggaacctactgtttagtgctcctcactttgcaatgtttgtgctacgccagaatttctccagtttttttcattatcatccccctgagaaaa

SEQ ID NO: 456791 - DNA, 120 bp, Artificial Sequence
  ENSG00000156804_26 (sequence is synthesized)
aaattacattgaatttaaattttccctaataagagaaattaaatatgaaagaataggattttgttgggtaagattgagctttggaaggtcacgaaccattattctatctaaggtgtgtgt

SEQ ID NO: 456792 - DNA, 120 bp, Artificial Sequence
  ENSG00000156804_27 (sequence is synthesized)
ttttgtttttttttgttttttttttgcaatccctctccccctgaaccaatttcacattgggaatgcaggacctagactgctgaataaaaagctacttcttctataattgtcaggttctct

SEQ ID NO: 456793 - DNA, 120 bp, Artificial Sequence
  ENSG00000156804_28 (sequence is synthesized)
aagacatggggtggagttgggtgtgccatcactgagagagctctggaacttttgactcttagtgacatttttagatttaggggttcatggccttccacatgttgccaccaactggtgatc

SEQ ID NO: 456794 - DNA, 120 bp, Artificial Sequence
  ENSG00000156804_29 (sequence is synthesized)
tctgccccttcatgctgatcaagaaagtagaaactcctcgtcgccttcaggtttgcagtcgcagaaacattgcctgctgtggactgtcagcacaaaactgggacactggtgtcatttaga

SEQ ID NO: 456795 - DNA, 120 bp, Artificial Sequence
  ENSG00000156804_30 (sequence is synthesized)
ctgtcagcagtgcacatgattgtacgatagactccaggcaaccatgtgcatctgtgcaagatgacctctgccccaagagaagggttacggtctaattaaatgtttaccaagatggtacca

SEQ ID NO: 456796 - DNA, 120 bp, Artificial Sequence
  ENSG00000156804_31 (sequence is synthesized)
gtgggctctccccgtgtcctttggtgttattggagctggtgtatgacagactcaaggaaattttttaaggaaaatgaagaagaaatcaacctttatggttctctttcattggaagaggag

SEQ ID NO: 456797 - DNA, 120 bp, Artificial Sequence
  ENSG00000156804_32 (sequence is synthesized)
aataaggaaagaaatggcaggtagagagggagggggaaaggaatagaaatggcatgtctttgatgctgtggcttgtgtggggacaatgggaagagcacagcaggcacaacatatctgtgt

SEQ ID NO: 456798 - DNA, 120 bp, Artificial Sequence
  ENSG00000156804_33 (sequence is synthesized)
tagtgccacgtggtatctgttaagtatggccagagcctcacatataagtgaagagagttaagacaattcttgctctttgaacaataatagtctatagaatttctattggcaaaccatccc

SEQ ID NO: 456799 - DNA, 120 bp, Artificial Sequence
  ENSG00000156804_34 (sequence is synthesized)
agacaacctgacctatcaaacaaaagcaaataatccctgtctcagaactgctggtctaaaagctagaaggggcatgataatggaaattgctagaaaagagagaatgctctactctctttc

SEQ ID NO: 456800 - DNA, 120 bp, Artificial Sequence
  ENSG00000156804_35 (sequence is synthesized)
ctgtgcctacctacccccatcctaaaccctgtaaaacagaatttcaaaatagatgtcaaatatgaagtaattcagacttccaaagaaggaaagagttctgcccagggcagtatgagcaaa

SEQ ID NO: 456801 - DNA, 120 bp, Artificial Sequence
  ENSG00000156804_36 (sequence is synthesized)
tccacagggatgttaagatttggtccaactcaaaggtttatgggcagtgagcctagagtctcttgagagtaaacccttgcatttgggacaaggagaatatgtgaagttcaggagtgctca

SEQ ID NO: 456802 - DNA, 120 bp, Artificial Sequence
  ENSG00000156804_37 (sequence is synthesized)
cactagagcaagatccagaaaaaaaaaaatccaatggcattttaaactagattgcattatcactcaatgctgttactttgagcagacaaatcagttgaatgggagggcaaatggcagaaa

SEQ ID NO: 456803 - DNA, 120 bp, Artificial Sequence
  ENSG00000156804_38 (sequence is synthesized)
tgaacaaaagctattaggtgaaagcatccccaatgtatcagttgtgagatgatttttgtttaatgatgatcaggtttacattgaagtggcttggaagacgtatttcagagggactgggtt

SEQ ID NO: 456804 - DNA, 120 bp, Artificial Sequence
  ENSG00000156804_39 (sequence is synthesized)
tgtactgcaaaactctgaacactagagcaggttctactagcacttgggcagtaaggtagcgggtgtgtattatgctattgccatagttctcgtctttgtggattcacataccctttccca

SEQ ID NO: 456805 - DNA, 120 bp, Artificial Sequence
  ENSG00000156804_40 (sequence is synthesized)
tgaggagcttgctactaacagcctcctgtttctgttgtttttatatgggagaagagaaagagcttggaatttcaattgtctaaacaattggtatgatttacaagaaggcaaaccattcag

SEQ ID NO: 456806 - DNA, 120 bp, Artificial Sequence
  ENSG00000156804_41 (sequence is synthesized)
gagatgttcaacagtgtatcattcttagcattcaatacaatgtttattataaaatatacacctgagtttatgtttttctgccaggctgaagggcaataatgtcttgctatgcaaacactc

SEQ ID NO: 456807 - DNA, 120 bp, Artificial Sequence
  ENSG00000156804_42 (sequence is synthesized)
tattttatgtgtgaatttttttaactgtaattttatgtgtgaatttttttaactaaactctatcatcattttctatgttgacatcttttttttttttttaatctgtttccaactctgagt

SEQ ID NO: 456808 - DNA, 120 bp, Artificial Sequence
  ENSG00000156804_43 (sequence is synthesized)
ctgtgaactatctcttctgactggatgctggcctaaaatcctattagtgcttaaacagacctcaaaacactctgaacctgtaggccaatacagagatgttgttctttgatatatcttggg

SEQ ID NO: 456809 - DNA, 120 bp, Artificial Sequence
  ENSG00000156804_44 (sequence is synthesized)
tccttgatggcttcaacaaacaaggtcataatttgtttaaattcagtgttttctgtagataccttcttctcagtttcattaagaagagtaaccatctttggttttccaaagaatggaaac

SEQ ID NO: 456810 - DNA, 120 bp, Artificial Sequence
  ENSG00000156804_45 (sequence is synthesized)
tcctaccctagactttagacttagagcgtctgcctttcacgatgagtaagagatccagaatgtttaggggatgtgcgtcagcccacctggtacagtggcaaagctgaatgcgaacttgag

SEQ ID NO: 456811 - DNA, 120 bp, Artificial Sequence
  ENSG00000156804_46 (sequence is synthesized)
gcctcctgaggcctgaccttctatgcccccagccctccaccccaagcaccttttggtgtggctggaaacacatgacattggatgtgatttttctcaagcccttcactgtggaaggcatgg

SEQ ID NO: 456812 - DNA, 120 bp, Artificial Sequence
  ENSG00000156804_47 (sequence is synthesized)
gagactgcccagcattgggcatgtggctgttaacgtttccatttcaagtccctgattcttactggagaagttaaggagccacttaatgttttcacagacctctgattctgttgtgaatgt

SEQ ID NO: 456813 - DNA, 120 bp, Artificial Sequence
  ENSG00000156804_48 (sequence is synthesized)
ggcattccagtgagtacaacctgcttgctataaagaaagcagcatattttgacaattttatttcttccttgggtacttacatttttattacaaaaatggccgttataaaaaaagacagaa

SEQ ID NO: 456814 - DNA, 120 bp, Artificial Sequence
  ENSG00000156804_49 (sequence is synthesized)
gggctgggcagtggcttgctccctagaaactgagattccgaagcaggtgtttcctctcccctagactcagaggtacatttaatccatcttctccatttcctccttcaggaccagctatga

SEQ ID NO: 456815 - DNA, 120 bp, Artificial Sequence
  ENSG00000156804_50 (sequence is synthesized)
gattcagtgcatttctagcccagcggatgttcattctccactaaacttcatcttttactaagcaaagggggattattccatgaggcagccaggagcaaggggccatgatattcatgactt

SEQ ID NO: 456816 - DNA, 120 bp, Artificial Sequence
  ENSG00000156804_51 (sequence is synthesized)
tgtctgctgggcatttttcaaagtgtccttgaattcactcagcaaacaaagctttctggagaatctctcaaaacttaggccctgctccatttggccaaaaatgatggctgctccaaaact

SEQ ID NO: 456817 - DNA, 120 bp, Artificial Sequence
  ENSG00000156804_52 (sequence is synthesized)
ctgaacttcttaaaactccatctgctacattatttctggagtttaaacatgactttttctgtctttgagtatagatgtgtttgtttaattaacgaagcacaagtctgttaagcagaaggc

SEQ ID NO: 456818 - DNA, 120 bp, Artificial Sequence
  ENSG00000156804_53 (sequence is synthesized)
tccaagctgtattctatacttgggaatccttggtgccatctttattctaccaagtgccaatcaccatggctaaagtgggcgtatattacagcctgtgtcctaagcttagaagctttaatg

SEQ ID NO: 456819 - DNA, 120 bp, Artificial Sequence
  ENSG00000156804_54 (sequence is synthesized)
tacttttttaaatgaaaagtattagagggggttgaacattgtaactaaagcataaagttagaccaattacatgcagagatgtttatttaatattgtgtgagctgagtccttctgtataaa

SEQ ID NO: 456820 - DNA, 120 bp, Artificial Sequence
  ENSG00000156804_55 (sequence is synthesized)
ttatttgcacacttttcttgcatgatgaactgattttttatagttgtttgtaccagacggtggcatatttttgtaaaaaacttttgacactgaattgcaataaatgtttttccaacaaca

SEQ ID NO: 456821 - DNA, 120 bp, Artificial Sequence
  ENSG00000156804_56 (sequence is synthesized)
ttttccaatgaagtggacgtgtcattagacttaaagacatgtgaatggatggaaatgaataactccagctacattttagagacactaaattccagttcggaaaggggtacaactcatcct

SEQ ID NO: 456822 - DNA, 120 bp, Artificial Sequence
  ENSG00000156804_57 (sequence is synthesized)
catggcaaaggtccttgaagaccagcaaaacattagactaataagggaactactccagaccctctacacatccttatgtacactggtccaaagagtcggcaagtctgtgctggtcgggaa

SEQ ID NO: 456823 - DNA, 120 bp, Artificial Sequence
  ENSG00000156804_58 (sequence is synthesized)
agggaaatagatgaaatagatctgactctaccttgaaggtctgcagcaggggtcagcaaacttctagccctcaggtcaatagcctgccgcctgtttttgtatggcccatgagctaagaat

SEQ ID NO: 456824 - DNA, 120 bp, Artificial Sequence
  ENSG00000156804_59 (sequence is synthesized)
gatttgtacgtttttcaatgttttaaaaaattgaaaggagtataatgtttcataacacatggaaattatgtgcagctcaaatttcagtatccataaataaagttttattggaacacagct

SEQ ID NO: 456825 - DNA, 120 bp, Artificial Sequence
  ENSG00000156804_60 (sequence is synthesized)
gggtacaggaaagaagccagtgccccaggtcacctaagacaggcatcaagctcattcggcaaaatccagttgggttgttctaactggctcattcttacttgggtgacctctgcatggcag

SEQ ID NO: 456826 - DNA, 120 bp, Artificial Sequence
  ENSG00000156831_0 (sequence is synthesized)
ctcacttttcagcggcaggcgaagggggctgaggaaaggaggtgggtctaggcaggggaaattggggtgccaccagacggagacagcttggactaccagaatcaagcactcttttggaag

SEQ ID NO: 456827 - DNA, 120 bp, Artificial Sequence
  ENSG00000156831_1 (sequence is synthesized)
agggtaatctctctccaaaaactgaggacacttaccttccccatatattgagtccagctgtgtttggtggcccaggtactaatttcaagatgccaggacgttccagttcaaattcaggtt

SEQ ID NO: 456828 - DNA, 120 bp, Artificial Sequence
  ENSG00000156831_2 (sequence is synthesized)
caactggtttcatctccttcagtggtgtagagtctgctctctcctccttgaaaaacttccaagcctgtatcaactctggtatggacacagcttctagtgttgctttggatcttgtggaaa

SEQ ID NO: 456829 - DNA, 120 bp, Artificial Sequence
  ENSG00000156831_3 (sequence is synthesized)
gtcagactgaagtgagtagtgaatatagtatggacaaggcaatggttgaatttgctacattggatcggcaactaaaccattatgtaaaggctgttcaatctacaataaatcatgtgaaag

SEQ ID NO: 456830 - DNA, 120 bp, Artificial Sequence
  ENSG00000156831_4 (sequence is synthesized)
tacagtttaaacaacagctgaaagaactaaagaagcaatgtggtcttcaagctgacagagaagctgacggaacagaaggagtggatgaagatataattgtgacccaaagtcagaccaact

SEQ ID NO: 456831 - DNA, 120 bp, Artificial Sequence
  ENSG00000156831_5 (sequence is synthesized)
tcacctgccccattacaaaggaggaaatgaagaagccagtgaaaaataaagtgtgtggccacacctatgaagaggacgccattgttcgcatgattgagtccaggcaaaagcggaagaaaa

SEQ ID NO: 456832 - DNA, 120 bp, Artificial Sequence
  ENSG00000156831_6 (sequence is synthesized)
aggcctattgccctcaaattggctgtagccacacggatataagaaagtcagatcttatccaggatgaagcacttagaagggcaattgagaaccataacaagaaaagacatcgtcattccg

SEQ ID NO: 456833 - DNA, 120 bp, Artificial Sequence
  ENSG00000156831_7 (sequence is synthesized)
agtaggaaaagccacctgcctgcagggacaccagcagcctacctcctaccccagctgtctgttgagagcagtgctgaccccagcagttagggactggctgcatagcatacttgttggggg

SEQ ID NO: 456834 - DNA, 120 bp, Artificial Sequence
  ENSG00000156831_8 (sequence is synthesized)
taaaacttgttgcttttatgtgtgcttgaaaacatttttcaaagttacacaacagaaatgcaatcatattgtttatttttaagtgttctataatgttaaataaaactttgatcatctgca

SEQ ID NO: 456835 - DNA, 120 bp, Artificial Sequence
  ENSG00000156831_9 (sequence is synthesized)
agcggcaggcgaagggggctgaggaaaggaggtgggtctaggcaggggaaattggggtgccaccagacggagacagcttggactaccaggtactaatttcaagatgccaggacgttccag

SEQ ID NO: 456836 - DNA, 120 bp, Artificial Sequence
  ENSG00000156831_10 (sequence is synthesized)
cccaggagttcaagatcagcctggacaacatagtgaaagaagaacgtccagaaaaaataccagatttaaaattattggtagagaagaaatttttggctttacagagcaagaattctgatg

SEQ ID NO: 456837 - DNA, 120 bp, Artificial Sequence
  ENSG00000156831_11 (sequence is synthesized)
cagactttcaaaataatgaaaaatttgtacagtttaaacaacagctgaaagaactaaagaagcaatgtaagtcaacatgctttgctttggttcggctttttgaaattagggaactgactt

SEQ ID NO: 456838 - DNA, 120 bp, Artificial Sequence
  ENSG00000156831_12 (sequence is synthesized)
gatgaacagccccagttaactgattttataaagtttgcttatctgcttggcttgatcctcattctaagttgcgttttattgttgttgcaattctgtattttgtctaatttttggttcaaa

SEQ ID NO: 456839 - DNA, 120 bp, Artificial Sequence
  ENSG00000156831_13 (sequence is synthesized)
tgctcatttctgaaagccaacagtttccacaaagtgctcagaaaatttcccagcagctagttatgtgtattgtcccattgctggggagggaaattgggaaaacaaaataaaagtgaaaac

SEQ ID NO: 456840 - DNA, 120 bp, Artificial Sequence
  ENSG00000156831_14 (sequence is synthesized)
tattttatttaaataacaatggtatcgttcaagttttaaactgctgtgccatgctttaaaataaccatactttgattctggttttgcctctttggagtaatattagctatgttttctctc

SEQ ID NO: 456841 - DNA, 120 bp, Artificial Sequence
  ENSG00000156831_15 (sequence is synthesized)
agaagaccactttatcttctcaactatagaccaaaatctccttgatccattttagcattgtggtagtataaattccatgtggtttttaaattgttgccttcttaataaactattacattc

SEQ ID NO: 456842 - DNA, 120 bp, Artificial Sequence
  ENSG00000156831_16 (sequence is synthesized)
cttttcagcggcaggcgaagggggctgaggaaaggaggtgggtctaggcaggggaaattggggtgccaccagacggagacagcttggactaccagaattacagaagagcatgatcgtgtt

SEQ ID NO: 456843 - DNA, 120 bp, Artificial Sequence
  ENSG00000156831_17 (sequence is synthesized)
gacgcaagagcccgctctcacttttcagcggcaggcgaagggggctgaggaaaggaggtgggtctaggcaggggaaattggggtgccaccagacggagacagcttggactaccaggcttt

SEQ ID NO: 456844 - DNA, 120 bp, Artificial Sequence
  ENSG00000156831_18 (sequence is synthesized)
agtttccacccctccctcaaggcggcggtcctcttctatccgcagtcccggacctggagcgggtcagaccccgacttccgcccctgactccccaggcggtcacatgaccgaagcggctgg

SEQ ID NO: 456845 - DNA, 120 bp, Artificial Sequence
  ENSG00000156831_19 (sequence is synthesized)
gagcagggaggggcatcatgtgaccactcgccggcgacggctgatgacgcaagagcccgctctcacttttcagcggcaggcgaagggggctgaggaaaggaggcttttaagaactgtgct

SEQ ID NO: 456846 - DNA, 120 bp, Artificial Sequence
  ENSG00000156831_20 (sequence is synthesized)
caggagttcaagatcagcctggacaacatagtaagactccatctctttaaaaaaaaaaatgtttttggtgaccagtatagtctcagagtttagcaaaagtaactaaagcttgagagtcac

SEQ ID NO: 456847 - DNA, 120 bp, Artificial Sequence
  ENSG00000156831_21 (sequence is synthesized)
agagtttagcaaaagtaactaaagcttgagagtcacattatacttcagcttttattgtttttattatgatccttagttgtgtagttttaagacattttacctcttaaaagaattttcaaa

SEQ ID NO: 456848 - DNA, 120 bp, Artificial Sequence
  ENSG00000156831_22 (sequence is synthesized)
taatatgtggtcttttgtgactggctgttttcttagcataaggttttcaaggttcatccatgttgcatgtatcagtgagagaggtggatgctttggagcttttggctcagaaatgataat

SEQ ID NO: 456849 - DNA, 120 bp, Artificial Sequence
  ENSG00000156831_23 (sequence is synthesized)
agagaccaaggccaggcagtccaaagcagatattcagggttatgttttaagggagggtcatcccagcaacctacttggagttgcatttcaatgtcatggaagccaaagttatgatacttg

SEQ ID NO: 456850 - DNA, 120 bp, Artificial Sequence
  ENSG00000156831_24 (sequence is synthesized)
aaagttatgatacttggcttttctagtcacaaaagtgtctgtatcctcttcatgatcttagctgctttttttcatacttacagacataattcaccaggcacggtggctcatgcctgtaat

SEQ ID NO: 456851 - DNA, 120 bp, Artificial Sequence
  ENSG00000156853_0 (sequence is synthesized)
gccattacacttgagggcaaagaggttaggaagccggcatggcgctccggtcaataaaatcgatagctggaagctgcctgtgttccaggcaaaggcggtgcggtagcagcgccgccattt

SEQ ID NO: 456852 - DNA, 120 bp, Artificial Sequence
  ENSG00000156853_1 (sequence is synthesized)
tccccgaaggcatcttccggtgcctttcacccaagttcgggcaggagtttcctgaataacagcaaaaggtttccgttagccccgcgggcgaccaattccgattccctccgggcctccccg

SEQ ID NO: 456853 - DNA, 120 bp, Artificial Sequence
  ENSG00000156853_2 (sequence is synthesized)
gccacgctcagccctggtccggcaggggctcctcgatcccaggggccgccagcgcccgagggccgaggcctggacacggaaggccgtggcgccggcttctcgggtcccatggcgccacct

SEQ ID NO: 456854 - DNA, 120 bp, Artificial Sequence
  ENSG00000156853_3 (sequence is synthesized)
tcggctccgctccctgcgcagggaccaggaaaggccagacccagtcggaaaaggggcaggaggccgagggctctgaagttcgtggacgtggccgtgtacttctccccggaggagtggggc

SEQ ID NO: 456855 - DNA, 120 bp, Artificial Sequence
  ENSG00000156853_4 (sequence is synthesized)
tgcctgcggcccgcgcagagggccctgtaccgggacgtgatgcgggagacctacggtcacctgggcgcgctcgggtgcgcaggtcccaaaccagccctcatctcctggttggaacgaaac

SEQ ID NO: 456856 - DNA, 120 bp, Artificial Sequence
  ENSG00000156853_5 (sequence is synthesized)
accgatgactgggaaccggctgctctagatccgcaggagtacccgagagggctaacagtccagagaaaaagcagaaccagaaagaagaatggggagaaggaagtattcccgcctaaggag

SEQ ID NO: 456857 - DNA, 120 bp, Artificial Sequence
  ENSG00000156853_6 (sequence is synthesized)
gcaccccgaaaggggaagcgaggccggaggcccagcaaaccccgactgattcctaggcagacgtccgggggccccatctgccctgactgcggctgtaccttccctgatcatcaggccctg

SEQ ID NO: 456858 - DNA, 120 bp, Artificial Sequence
  ENSG00000156853_7 (sequence is synthesized)
gagagccacaagtgcgcccagaatctaaaaaagccttacccttgcccagactgtgggcgccgcttttcctatccatccctgctggtcagtcaccggcgggcacactccggcgagtgcccc

SEQ ID NO: 456859 - DNA, 120 bp, Artificial Sequence
  ENSG00000156853_8 (sequence is synthesized)
tatgtttgtgaccagtgtggcaaacgtttctcccagcgcaagaacctctcccagcaccaggtcatccatacaggggagaagccctatcactgccctgactgtggtcgctgcttccggagg

SEQ ID NO: 456860 - DNA, 120 bp, Artificial Sequence
  ENSG00000156853_9 (sequence is synthesized)
agccggtccttggccaatcaccggaccacacacacaggtgaaaaaccccaccagtgccctagctgtggacgtcgcttcgcctacccctccctgctagccatccaccagcgtacacacacg

SEQ ID NO: 456861 - DNA, 120 bp, Artificial Sequence
  ENSG00000156853_10 (sequence is synthesized)
ggagagaagccctacacttgcctcgagtgcaaccgccgcttccgccagcgcacggccctcgtcatccaccagcgcatccacacgggcgagaagccctacccgtgcccggactgcgagcgg

SEQ ID NO: 456862 - DNA, 120 bp, Artificial Sequence
  ENSG00000156853_11 (sequence is synthesized)
cgcttctcctcctcctctcgcctggtcagtcaccggcgtgtgcactctggggagcgtccctatgcctgcgagcactgtgaggcccgcttctcccagcgcagcacgctgctccagcaccag

SEQ ID NO: 456863 - DNA, 120 bp, Artificial Sequence
  ENSG00000156853_12 (sequence is synthesized)
ctcttgcacaccggagagaagccctacccctgcccagactgtgggcgtgccttccggcggagcggctccctggccatccatcgcagcacgcacacagaggagaagctgcacgcctgcgac

SEQ ID NO: 456864 - DNA, 120 bp, Artificial Sequence
  ENSG00000156853_13 (sequence is synthesized)
gactgtggtcgccgctttgcctacccctcactgctggccagccaccggcgcgtgcactcgggcgagcggccctatgcctgcgacctttgctccaagcgttttgctcagtggagccacctg

SEQ ID NO: 456865 - DNA, 120 bp, Artificial Sequence
  ENSG00000156853_14 (sequence is synthesized)
gtctctggctgtccacaagtgtagccccaaggccccaaactgtagccctagatctgctatcgggggctccagtcagaggggcaacgcccattagaaggggaaggactgcctacgttcatt

SEQ ID NO: 456866 - DNA, 120 bp, Artificial Sequence
  ENSG00000156853_15 (sequence is synthesized)
tcattttatggagggtcccagaaaagggaaggaggagccccaggtcatacagggcagagtcagaactaaacccgggtctcctgctgcacagagctgaactttgtatcttgcaatgcgctg

SEQ ID NO: 456867 - DNA, 120 bp, Artificial Sequence
  ENSG00000156853_16 (sequence is synthesized)
gctgcctccctgtgcgtgtctggaacagtcccattaggagaggtgacgtcatttgcttaaagttttccaagctaccctatcctaaaatagtttgtgtggatatcagggctaaaagttctc

SEQ ID NO: 456868 - DNA, 120 bp, Artificial Sequence
  ENSG00000156853_17 (sequence is synthesized)
cccatctattttaggggctgtctgcttttctagtctgtccacacagggattacctgtcatcttgcatgcaatcaggagaatctcataggggcaggaccttcccctactctgcctcttcct

SEQ ID NO: 456869 - DNA, 120 bp, Artificial Sequence
  ENSG00000156853_18 (sequence is synthesized)
ccatactaggttggaaaaatctggtttagcccactttttgcaacactcctgccaagtggtcttctacccattgcttgaaaatctctcttgacagggagctcactacctcacaaggcaggt

SEQ ID NO: 456870 - DNA, 120 bp, Artificial Sequence
  ENSG00000156853_19 (sequence is synthesized)
catttcattgtgggatctatagaaggttaagtaccacattctcctctaaaccttgcctacgacatgtttaatacttcatctacatagcagcccttcagataatcacaaccactttgcccc

SEQ ID NO: 456871 - DNA, 120 bp, Artificial Sequence
  ENSG00000156853_20 (sequence is synthesized)
caagttttcaggttaagtagcatgaatttggtcattccttaaagacagggtttcaatttccacacatgatctctgcaaacaggcactgggttttcagtgtcctttttgaagggtcatata

SEQ ID NO: 456872 - DNA, 120 bp, Artificial Sequence
  ENSG00000156853_21 (sequence is synthesized)
aaaataaggtaacaccacagtgccactacaccttctggggctggacttgtttcagcagctttggttgcactgaatttgggggagctgcatggtaccaggggtttattgggttgcagatat

SEQ ID NO: 456873 - DNA, 120 bp, Artificial Sequence
  ENSG00000156853_22 (sequence is synthesized)
ataaatgccctaaacttaaaaaaaaaaaaaaaagctataaaactaagtcttcatcttgtatttggaaaattggttcaagctgggtatgagacataagtgtagtcagctctgggagaaggt

SEQ ID NO: 456874 - DNA, 120 bp, Artificial Sequence
  ENSG00000156853_23 (sequence is synthesized)
tgctcttaaggagaagcagggacctgtggtttagcagcaggaagtgcaaatgggactggcttgtgctctacctggcagacctggattggcttcaggcagccagtgcctggaaaagcctgg

SEQ ID NO: 456875 - DNA, 120 bp, Artificial Sequence
  ENSG00000156853_24 (sequence is synthesized)
agaattgggccgtacttgaccctgattctcatcaggcacagatgaatcacaggcacctaagaatcggcacagaacttccatgaggcctcagtcagcattttttcacaaaatgagctgagg

SEQ ID NO: 456876 - DNA, 120 bp, Artificial Sequence
  ENSG00000156853_25 (sequence is synthesized)
ccattcaaggaggctagaaagagggaactgaatccagagaggaagagtctatagtcatcaagttgtatccatgccagcctccctccacagaggtggcagcagcgtggctcaatctgatcc

SEQ ID NO: 456877 - DNA, 120 bp, Artificial Sequence
  ENSG00000156853_26 (sequence is synthesized)
acctccatggcacccactgggtaggtgcttcataaagctttaccgagttaaatgtgaacaaggcctaccactttgccttgggcagctgcaccaaattagaatttccagatgtgactcatc

SEQ ID NO: 456878 - DNA, 120 bp, Artificial Sequence
  ENSG00000156853_27 (sequence is synthesized)
tcatattccaacagctggagtgggtcatcctttacccctgtggctccttcctacagctctcctgatctcagcacaagcaggggagcagctgggggaacacagctttatgtaattacctct

SEQ ID NO: 456879 - DNA, 120 bp, Artificial Sequence
  ENSG00000156853_28 (sequence is synthesized)
gttcaatatttagcaagttgcattgtaacattgtaactgtttgtttctccttggatgatgagctacccccaagaaggggtcatatcagattgggtctcattaaaatgtctgatgaatgaa

SEQ ID NO: 456880 - DNA, 120 bp, Artificial Sequence
  ENSG00000156853_29 (sequence is synthesized)
ggccccatccgctgccgcggggcgcgaagggatgcaggagccggagagggtgtaggcagggaggccacggtcctggcaggcgaccagggtgcgcaggtcccaaaccagccctcatctcct

SEQ ID NO: 456881 - DNA, 120 bp, Artificial Sequence
  ENSG00000156853_30 (sequence is synthesized)
aaggagccccctgaccccttccttaaaacagatccttttgtctttgtcttcatttctgcgtttgtcctccttcattcagtcccaaaccaacagccacaagtggtgcctaatcagggacgt

SEQ ID NO: 456882 - DNA, 120 bp, Artificial Sequence
  ENSG00000156853_31 (sequence is synthesized)
gaaggaagaagatctgctggagcagagaaactgaaactgaccagatgagtgagaaaccccaggacaaatctgctggcagaggatataagggtgcgcaggtcccaaaccagccctcatctc

SEQ ID NO: 456883 - DNA, 120 bp, Artificial Sequence
  ENSG00000156853_32 (sequence is synthesized)
tcggccagagtggctccatcgctcaaatcgttccctccttcagtgattggctgagcctgccagagtcgaacagcggaaagcagccccggggcctcttgctgcccccagggtgcgcaggtc

SEQ ID NO: 456884 - DNA, 120 bp, Artificial Sequence
  ENSG00000156858_0 (sequence is synthesized)
gaaggaaacttctgaaccatctggtcccgggccgggggagaccgctgggcggggacgcgaggagggaaggggcgtctgtgggcgggacctcccgggattggagtgaagagggtatctgct

SEQ ID NO: 456885 - DNA, 120 bp, Artificial Sequence
  ENSG00000156858_1 (sequence is synthesized)
tgacagtggatccctggggatctacgctgagttcggagatgctccagctcgggccgcccctgtctgagcggagctttgcggcgctgaagcttacaggggaaggaaaagcctcgcccggcg

SEQ ID NO: 456886 - DNA, 120 bp, Artificial Sequence
  ENSG00000156858_2 (sequence is synthesized)
tctgattggcggaaccgcgctgccgcagcctgggattccccagggacccccccggagccgccgcgtctcccatggacttgcccggggactccagcccgcctggccagccgcgtctgtgcc

SEQ ID NO: 456887 - DNA, 120 bp, Artificial Sequence
  ENSG00000156858_3 (sequence is synthesized)
gccagcctctgactcgagcattatggggagccaggagcccgaaacggccgaggctgcagctcccgggggccccttctcccctggaaaaggcctctcggcgggtcctggccgtggtgctag

SEQ ID NO: 456888 - DNA, 120 bp, Artificial Sequence
  ENSG00000156858_4 (sequence is synthesized)
aagatgtcatggctgttcacatggtccccgtggtgccctcaaagcagacctccataccacagcaccacagctaccatcaggatcctgtccacaggcagccgcctgcctcgccaccccggc

SEQ ID NO: 456889 - DNA, 120 bp, Artificial Sequence
  ENSG00000156858_5 (sequence is synthesized)
aggccgggtggtcctcgcaggccaggcctcccgaccctctgtgtttgtgtcgcgagcccttgagccgcatccaccggacctcttccaccctgaggcggcgatcaaggacaacccctggcc

SEQ ID NO: 456890 - DNA, 120 bp, Artificial Sequence
  ENSG00000156858_6 (sequence is synthesized)
cagaggagggcccttcacaaaaggtggaccgggccccccagcccaccctggtggtgatgctggaagacatcgccagtcctagaccccccgctgagggcttcattgatgagacccccaact

SEQ ID NO: 456891 - DNA, 120 bp, Artificial Sequence
  ENSG00000156858_7 (sequence is synthesized)
tcatcatcccagcacaaagagctgagcccatgaggatagttcgccagccaacgcctccacctggggacctagaacccccattccagccatctgctctgcctgcagaccctctggagagcc

SEQ ID NO: 456892 - DNA, 120 bp, Artificial Sequence
  ENSG00000156858_8 (sequence is synthesized)
caccaacagccccagatcctgctctggagctcccatccaccccaccaccgtccagccttttacgcccccgcctcagtccctggggcttggccccgctcttccgttccgtccgctccaagc

SEQ ID NO: 456893 - DNA, 120 bp, Artificial Sequence
  ENSG00000156858_9 (sequence is synthesized)
accccacagcccccacccccgtcccccccaatgaagctggagttgaagatcgccatctcagaggccgagcagtctggggctgctgagggcactgcgtctgtcagcccccggcccccaatc

SEQ ID NO: 456894 - DNA, 120 bp, Artificial Sequence
  ENSG00000156858_10 (sequence is synthesized)
cgccagtggcgaactcaggaccacaataccccagcacttctccctaagccctctctgggccgaagctactcctgccctgatctggggccccctggcccaggtacctgcacctggccacct

SEQ ID NO: 456895 - DNA, 120 bp, Artificial Sequence
  ENSG00000156858_11 (sequence is synthesized)
gctccaccccaaccaagccgaccacggccgcggcggcacactgtgggtggtggggaaatggcccgagccccgccaccccctcggccctgtctccggaaagaggtcttccctctcggagga

SEQ ID NO: 456896 - DNA, 120 bp, Artificial Sequence
  ENSG00000156858_12 (sequence is synthesized)
gtgggagcctccccttctctcaccacatcttgctcgtccacggcatccacttccttctccgaaccagcagaacccaggttgggttcaaccaaagggaaggagccaagagcctcaaaggac

SEQ ID NO: 456897 - DNA, 120 bp, Artificial Sequence
  ENSG00000156858_13 (sequence is synthesized)
caggtgctttcagaacctgagaccaagaccatgggaaaggtttctcgattcagaatacgcagaacaccagcccgtcctcagctaaaccttacaccaatgggactgcctcgaccaatcagg

SEQ ID NO: 456898 - DNA, 120 bp, Artificial Sequence
  ENSG00000156858_14 (sequence is synthesized)
ttgaacaagaaggagttcagcttggaagaaatttacaccaacaagaattaccaatcacccacaaccaggaggacctttgagaccatctttgaggaaccccgggagcgcaatgggactctg

SEQ ID NO: 456899 - DNA, 120 bp, Artificial Sequence
  ENSG00000156858_15 (sequence is synthesized)
attttcaccagctcaaggaagctccggcgggctgtggaatttcgggacagcagccttcctcgatcacgaagaccgtcccgtggggtccgggctgcagggggcaggactgttcctcccaat

SEQ ID NO: 456900 - DNA, 120 bp, Artificial Sequence
  ENSG00000156858_16 (sequence is synthesized)
gtggcccccagccctgatgtgggccccctgctccagcagcggctggaggagctagatgccttgctcctggaggaagaaacagtagatcgggagcagccccactggacctaggtgccccat

SEQ ID NO: 456901 - DNA, 120 bp, Artificial Sequence
  ENSG00000156858_17 (sequence is synthesized)
ctgttggtcatccatcctgaagggacaggaaacctcccaggcagttatttttttttctctatatttctagtaaagttttcgatatgtttctgattcttttgtatctctagctgagtttaa

SEQ ID NO: 456902 - DNA, 120 bp, Artificial Sequence
  ENSG00000156858_18 (sequence is synthesized)
atggagtattgctttggagtcctcggccactcgctgggagaggaggaggatcgcagagggatccagcggaaatagcctcccaggaccgggatccccgtggatcccgggggatctcggggc

SEQ ID NO: 456903 - DNA, 120 bp, Artificial Sequence
  ENSG00000156858_19 (sequence is synthesized)
ataatctgcagggacaaaggcctcgggaggctcgggccgcgggagaactggggccgctgcattctgggttctggcggcaggtgccaggcagggcgcgagtgatccgctgatcgaggcggt

SEQ ID NO: 456904 - DNA, 80 bp, Artificial Sequence
  ENSG00000156858_20 (sequence is synthesized)
cgccctttcgcgccccagggctgcggccgctgggctacggggagccgcgggcggaccatgaagggcggagccccagggaa

SEQ ID NO: 456905 - DNA, 120 bp, Artificial Sequence
  ENSG00000156858_21 (sequence is synthesized)
aggctctgtctcaaaaaaaaaaaaaaagaagaagccttaagggataggggagttgctggctcaggtgggatacctggaagttcccctagcctttaccttgcccttcaccccagagctgag

SEQ ID NO: 456906 - DNA, 120 bp, Artificial Sequence
  ENSG00000156858_22 (sequence is synthesized)
ggagcctccccttctctcaccacatcttgctcgtccacggcatccacttccttctccgaaccagcagaacccaggtagtgctctcaaaaaacccccttgaagcctggctgcagcctggtc

SEQ ID NO: 456907 - DNA, 120 bp, Artificial Sequence
  ENSG00000156858_23 (sequence is synthesized)
ccagcctccttccctgagtatccagtgggcaggagacgggggataatgcagtgaatcctgtttgtccctgagccttgaccttcttggcaggttgggttcaaccaaagggaaggagccaag

SEQ ID NO: 456908 - DNA, 120 bp, Artificial Sequence
  ENSG00000156858_24 (sequence is synthesized)
aggctgaggtctttgactccactgcacagataagaaaaactggcccaaaaaaggcagtgacccaccctagctcaccctgtctttttcatttctctaaacagcgtggatgagattacccag

SEQ ID NO: 456909 - DNA, 120 bp, Artificial Sequence
  ENSG00000156858_25 (sequence is synthesized)
gtcctacacctgcagtttaggactcttaatatctggcccctaattcagtccaattcatctcttctcttgggatccgagtgaattctagccccaatctctgttatgtttgtggctcagggc

SEQ ID NO: 456910 - DNA, 120 bp, Artificial Sequence
  ENSG00000156858_26 (sequence is synthesized)
actgtgaggcacagggaaaccttgtcccgtccagcctcattctatcaccttgctcttgacacctctttctcttccaggtccccgtggtgccctcaaagcagacctccataccacagcacc

SEQ ID NO: 456911 - DNA, 120 bp, Artificial Sequence
  ENSG00000156858_27 (sequence is synthesized)
aagacccgggatccacgggaggcggcggccgcagcctgggattccccagggacccccccggagccgccgcgtctcccatggacttgcccggggactccaggtgagagcgtacccgggcgg

SEQ ID NO: 456912 - DNA, 120 bp, Artificial Sequence
  ENSG00000156858_28 (sequence is synthesized)
cccgcctgtcttgaccccgggagatggggatcctggcgaccgtgccgggaaactacagagccagcgacaggttcgggcgaccgtcctctgcttctttcaccctccagcccgcctggccag

SEQ ID NO: 456913 - DNA, 120 bp, Artificial Sequence
  ENSG00000156858_29 (sequence is synthesized)
atggtttgtgctcaaaattgcctgtctgccttatgtagcactcctggccctgacatgtcccagaaactgaaatacagaccaggccttacctgtcccttcaggccccactggcccaaggtt

SEQ ID NO: 456914 - DNA, 120 bp, Artificial Sequence
  ENSG00000156860_0 (sequence is synthesized)
gagagaggaaggaggcgtaggctgaggaggaagagggaggaggggtagggaagtcctggcggagaagcgccctaagactccaaaggagacaacaggagtttgtgctggagctcccccgct

SEQ ID NO: 456915 - DNA, 120 bp, Artificial Sequence
  ENSG00000156860_1 (sequence is synthesized)
gcccatcggccgttccggatcccctaaggcccaagtcggacagagacggaggaaaggaggaagagacttttatgtcggcggacaggggagctgtacccgtcaccgttgcctcacatccgg

SEQ ID NO: 456916 - DNA, 120 bp, Artificial Sequence
  ENSG00000156860_2 (sequence is synthesized)
ggctttggagggctggcctcgctgccccgccccgcctcgcgcctttcatggcgaccggaggcggaggctggaggagctgggcccggaggaggcccctttaaatctccttaaaggggtggc

SEQ ID NO: 456917 - DNA, 120 bp, Artificial Sequence
  ENSG00000156860_3 (sequence is synthesized)
cactgaactcggcggactgcaacgccagccttaaaggggaagccgccgagcagacgctgacaaattgagaactgtgccgttgggagaactggggcgagtggggtttttctttacgtcctc

SEQ ID NO: 456918 - DNA, 120 bp, Artificial Sequence
  ENSG00000156860_4 (sequence is synthesized)
ctcccccacacacaagaagtcttttaaattcaacttaaaggggaagtggccgcttgtggaggactagaaactaactccgagcccttaaagggacggcctgctgttagaaggaccctggac

SEQ ID NO: 456919 - DNA, 120 bp, Artificial Sequence
  ENSG00000156860_5 (sequence is synthesized)
tccttaaaggggtggcctctttgagccggaggacttgagacacttttaaaggggaggtctgcgtttcggggcgagctttcggccccttttaaaggggtggcccttcctcttcctcgggga

SEQ ID NO: 456920 - DNA, 120 bp, Artificial Sequence
  ENSG00000156860_6 (sequence is synthesized)
gacttgcatcgacccctggcagggggtggccaccgcactaggccgccggacactgtcgggtcgtcttaaaggggccgggagctggacaacttggggcctcgccttaaagggacggccgcc

SEQ ID NO: 456921 - DNA, 120 bp, Artificial Sequence
  ENSG00000156860_7 (sequence is synthesized)
cccgcagggggggccctcgggcttgtcgccccgggggcggcgccggctccccgggccgtggccttggggcaagctcggggccagcagatccggctttaaaggagaagccgtggccctctc

SEQ ID NO: 456922 - DNA, 120 bp, Artificial Sequence
  ENSG00000156860_8 (sequence is synthesized)
gctttaaaggagaagccgtggccctctcgtcactgtgcagccgccagcgccgcgcctgcgaccccgggcctgcggacaggccgcttcgggccccgccgcctccggatgcggcgctgaggg

SEQ ID NO: 456923 - DNA, 80 bp, Artificial Sequence
  ENSG00000156860_9 (sequence is synthesized)
gggctgggcagcagagggggagcgccgacggcggcgctgctcgcgccgagaccgagaccgggagcagcggcgccgccgag

SEQ ID NO: 456924 - DNA, 120 bp, Artificial Sequence
  ENSG00000156860_10 (sequence is synthesized)
ccccgcgcggctcctcgtcctcgtcgtcgccgccgccgcccgccaggccttggtcgtcagcttcgtctggagagcggcctgggggcccgagacgccggcggccccgtccgagacctcgac

SEQ ID NO: 456925 - DNA, 120 bp, Artificial Sequence
  ENSG00000156860_11 (sequence is synthesized)
gcccgagacgccggcggccccgtccgagacctcgacccccgcgaccccgagctcggaagcggcctgccggctcgggcagccgcggggaggaagaggaggaggaggaggaggaggggggcg

SEQ ID NO: 456926 - DNA, 120 bp, Artificial Sequence
  ENSG00000156860_12 (sequence is synthesized)
cagacgacggcgaagccgaggaggagcctgaggaggaggaagaggaggaggaggacttgatcgatggcttcgccatcgccagcttcgccaccctcgaggccttgcagaaggatgcatctc

SEQ ID NO: 456927 - DNA, 120 bp, Artificial Sequence
  ENSG00000156860_13 (sequence is synthesized)
ttcagcccccagagcgactggaacatcggctgaagcattctgggaagcggaaaagggggggctccagtggggccaccggggagccaggggacagctctgatcgagagcctggccggcccc

SEQ ID NO: 456928 - DNA, 120 bp, Artificial Sequence
  ENSG00000156860_14 (sequence is synthesized)
ctggggatcgggcccgaaaatggcccaataagcggagaagaaaagaggcgtcctcccgtcactctctggaagctggatacatatgtgacgcggaaagtgatctggacgagagggtctccg

SEQ ID NO: 456929 - DNA, 120 bp, Artificial Sequence
  ENSG00000156860_15 (sequence is synthesized)
atgatgacctcgacccatcctttactgtctcaaccagcaaagcctcgggcccccacggcgccttcaatgggaactgtgaagcaaaactctccgtggtccctaaagtgtcgggcctggagc

SEQ ID NO: 456930 - DNA, 120 bp, Artificial Sequence
  ENSG00000156860_16 (sequence is synthesized)
ggagccaagaacagcccccggggcccgacccgctgctagtgcctttccccccaaaggaaccaccgcctccaccggtccctcggcctcctgtctcaccccctgcacccctgccggccactc

SEQ ID NO: 456931 - DNA, 120 bp, Artificial Sequence
  ENSG00000156860_17 (sequence is synthesized)
ccagtctgccacccccaccccagccccagctgcagcttcgggtctcacccttcggcctccgcacttctccatatggcagcagcctggacctcagcactggcagctcttcacggccgcccc

SEQ ID NO: 456932 - DNA, 120 bp, Artificial Sequence
  ENSG00000156860_18 (sequence is synthesized)
ccaaggccccggcccctcccgtggctcagcctcccccctcatcatcctcttcgtcctcctcctcctcatctgcctcctcctcgtccgcgcagctcacccaccggcccccgacgccctcac

SEQ ID NO: 456933 - DNA, 120 bp, Artificial Sequence
  ENSG00000156860_19 (sequence is synthesized)
tgcccctgcctttgtccacccacagctttccccctcccgggctgcggccccccccaccaccccaccacccctccttgttctcccctggccccaccctgcccccacccccacccctgctgc

SEQ ID NO: 456934 - DNA, 120 bp, Artificial Sequence
  ENSG00000156860_20 (sequence is synthesized)
aggtgccagggcaccctggggcctcagccgctaacgccctttctgagcaggacctgatcggccaggacctgaactctcgctacctgaatgcccagggtggccctgaggtggtgggggcag

SEQ ID NO: 456935 - DNA, 120 bp, Artificial Sequence
  ENSG00000156860_21 (sequence is synthesized)
agcacaaccaccagcaccagcacacccaccagcacacccaccagcacttcaccccttatcccccgggcctgctgccaccccacggcccccacatgtttgagaaatatccaggaaagatgg

SEQ ID NO: 456936 - DNA, 120 bp, Artificial Sequence
  ENSG00000156860_22 (sequence is synthesized)
aaggccttttccgacataatccgtacacggccttccctcccgcagtgcccgggctgcctccgggcctcccgccggccgtctcctttggctccctgcagggggccttccagcccaagagca

SEQ ID NO: 456937 - DNA, 120 bp, Artificial Sequence
  ENSG00000156860_23 (sequence is synthesized)
cgaaccctgagctgccaccacgactggggccggtgccgagcgggctctcccagaaggggacacagatccccgaccatttccggccacctttgaggaaaccagggaagtggtgtgccatgc

SEQ ID NO: 456938 - DNA, 120 bp, Artificial Sequence
  ENSG00000156860_24 (sequence is synthesized)
acgtgcgtgtggcttacatgatcctgagacaccaggagaaaatgaagggtgactcccacaagcttgactttcggaatgacctcctgccctgccttccggggccctatggggccctgcccc

SEQ ID NO: 456939 - DNA, 120 bp, Artificial Sequence
  ENSG00000156860_25 (sequence is synthesized)
ctgggcaggagctctcccacccggcctccctcttcactgcgactggtgccgtccacgctgcagccaaccctttcacggcagctcccggggcccacggacccttcctgagccccagcaccc

SEQ ID NO: 456940 - DNA, 120 bp, Artificial Sequence
  ENSG00000156860_26 (sequence is synthesized)
acattgatccctttgggcgtcccacaagcttcgcctctttggctgccctctccaacggggcctttggaggcctgggcagccccacattcaactccggcgccgtctttgcccagaaagaaa

SEQ ID NO: 456941 - DNA, 120 bp, Artificial Sequence
  ENSG00000156860_27 (sequence is synthesized)
gcccaggggccccaccagccttcgcctccccaccggacccatggggccgcctgcaccgcagtcctctgacctttcctgcctgggtccggccccctgaggccgcccggactccaggctcag

SEQ ID NO: 456942 - DNA, 120 bp, Artificial Sequence
  ENSG00000156860_28 (sequence is synthesized)
acaaggagcggcctgtggagcggagggagccctccatcaccaaggaggagaaggacagggacctccccttctcacggccccagctccgagtttctcctgctactcccaaggcccgggctg

SEQ ID NO: 456943 - DNA, 120 bp, Artificial Sequence
  ENSG00000156860_29 (sequence is synthesized)
gtgaggaggggcctcggccaaccaaggaatctgtgcgggtaaaggaagagcggaaggaggaggctgccgccgccgctgccgctgctgctgccgccgccgctgccgccgccgcagcagcca

SEQ ID NO: 456944 - DNA, 120 bp, Artificial Sequence
  ENSG00000156860_30 (sequence is synthesized)
ctgggccccagggccttcacctgctgtttgagaggccccggccgcccccgtttctgggccctagcccaccagatcgctgtgctggcttcctggagccaacctggttggcagcacccccac

SEQ ID NO: 456945 - DNA, 120 bp, Artificial Sequence
  ENSG00000156860_31 (sequence is synthesized)
gcctggcaaggccaccccgcttctatgaggcgggtgaggagctaactggacccggggccgtggccgctgcccgcctctacggtctggaacctgctcaccccttgctctacagccgcttgg

SEQ ID NO: 456946 - DNA, 120 bp, Artificial Sequence
  ENSG00000156860_32 (sequence is synthesized)
ctcctccaccaccacctgctgcggccccgggaacccctcaccttctcagcaagaccccaccgggagcccttttgggggcaccacctccgcttgtgcccgccccccggcccagttccccac

SEQ ID NO: 456947 - DNA, 120 bp, Artificial Sequence
  ENSG00000156860_33 (sequence is synthesized)
ctaggggccctggcccagctcgggctgacaggtgaggggaacgggggggggtcggggcaaagctccatctccccttcctttaaccaggtcctagggctgaggttttaagccagggctgga

SEQ ID NO: 456948 - DNA, 120 bp, Artificial Sequence
  ENSG00000156860_34 (sequence is synthesized)
gggcaaaggtcataacctcaccagccacctctgaggtcatggaacctgggaacagaagcctcaacccccacaagaccaagcatcacatggagtgtagggtcactgggagagcagaggtca

SEQ ID NO: 456949 - DNA, 120 bp, Artificial Sequence
  ENSG00000156860_35 (sequence is synthesized)
cagcctctagagaagggagaggggcgtgtgcatgggagtgtggctcatctcgggggccatggggcctcctgaggtacacctttgcccctgtaagggcctctaggccctgggcctgcctcc

SEQ ID NO: 456950 - DNA, 120 bp, Artificial Sequence
  ENSG00000156860_36 (sequence is synthesized)
ccaagggctcactaagccagaggccaaagtgccccctcccgttcacctaccacccaagtcctcatgccctccgagggctgggggaggaggggctcaaggaaggggggttccatgtacata

SEQ ID NO: 456951 - DNA, 120 bp, Artificial Sequence
  ENSG00000156860_37 (sequence is synthesized)
tttatcacccctttcacatagccccaagaccttttgtacatttttacaggggtgcccctcccaacagttcccttcctggttaattaaaccctcagactggtgctgtgttcctagcctctg

SEQ ID NO: 456952 - DNA, 120 bp, Artificial Sequence
  ENSG00000156860_38 (sequence is synthesized)
gcctctctgtggggaaaggggactgcagggggaagagccgggaagggacagtcaggcttctccctgggaaggtggggccagcaggagatgaccaacagggggcaggacctggggacctgg

SEQ ID NO: 456953 - DNA, 120 bp, Artificial Sequence
  ENSG00000156860_39 (sequence is synthesized)
gctggagggaagggcagaagcttcctacttggctgacagccccggttcccccaacatgttcccgttcactctgcccccacccccaaaggctcagcctctaaatctcagactccaccacct

SEQ ID NO: 456954 - DNA, 120 bp, Artificial Sequence
  ENSG00000156860_40 (sequence is synthesized)
cttaatggctcagtccccttcaccccatttccaagtgcccccaggactcctgggccctgcttccctgaaccctgttctccaaaaccctgccccaggctaagggtggccagagaaggtcac

SEQ ID NO: 456955 - DNA, 120 bp, Artificial Sequence
  ENSG00000156860_41 (sequence is synthesized)
catgtaccacacaccaaagaagggggtcggcccaggggtgggcgacacaggcagcttcttcggcagcctcacggcagcaaccccagccttcccaaagcagcaggcgcctccaggctgggg

SEQ ID NO: 456956 - DNA, 120 bp, Artificial Sequence
  ENSG00000156860_42 (sequence is synthesized)
cccaacctagaaggcaggggtcaatctaacaaaaccctaacgttgacttttttccctggtggggcttcttctgtaacatgacttgcgaatatttatataaaaacgagtgttacaatgaga

SEQ ID NO: 456957 - DNA, 120 bp, Artificial Sequence
  ENSG00000156860_43 (sequence is synthesized)
acgagaacagggggcccattcttgaggcaatctgcaagcctgagttttaatgaggaatctccggattcttaaatatctgcagttggtttaaaacttttaccaacgctggtggaccaaata

SEQ ID NO: 456958 - DNA, 120 bp, Artificial Sequence
  ENSG00000156860_44 (sequence is synthesized)
aatctgtaagcgagggaggcctgtgggccagcagctagtgacctctgacgttttggtttggtttgcctgcttctctgctgcttcaacgctgcctccatttagtcctcttggcctatcgga

SEQ ID NO: 456959 - DNA, 120 bp, Artificial Sequence
  ENSG00000156860_45 (sequence is synthesized)
agctaaactgaaggaacagacttgccactaccaccagttcctagcagcctccagaggctatttggccttcctgggtggaggcctggcccacccacaacctaactctatcccttgcccttc

SEQ ID NO: 456960 - DNA, 120 bp, Artificial Sequence
  ENSG00000156860_46 (sequence is synthesized)
ttccccaggtctccgatgatgacctcgacccatcctttactgtctcaaccagcaaagcctcgggcccccacggcgccttcaatgggaactgtgaagcaaaactctccgtggtccctaaag

SEQ ID NO: 456961 - DNA, 120 bp, Artificial Sequence
  ENSG00000156860_47 (sequence is synthesized)
gatcttggcaggcttcttggggaggtttcacctgggtttgggtggacaaggaagagttgagcctggtggcttggagaaaggtgttcctggctggggacgtggtgacattccagtggcggg

SEQ ID NO: 456962 - DNA, 120 bp, Artificial Sequence
  ENSG00000156860_48 (sequence is synthesized)
ataggttagttgttctgtctggctgtgtgacgcatgcatgaagttagggtcaggtcgggaagggccctgcatgtcaggtggggggaagccaacaaggtcttcaggcttgctgcggagcgg

SEQ ID NO: 456963 - DNA, 120 bp, Artificial Sequence
  ENSG00000156860_49 (sequence is synthesized)
agatctgctgtgatgggtccaggcggctggtgttggggagttggggagaagagcgtgacttcatgtcaaggaagccctgggttggtaccgctccctggctagatgaccaccagcaagtca

SEQ ID NO: 456964 - DNA, 120 bp, Artificial Sequence
  ENSG00000156860_50 (sequence is synthesized)
tttcacctctctgagcctctctgttttatcatcttcaagtgggcatgatcctaaccacctcttgggctttttgtgaggttaaccgacagggtgcttgtcaaagctcaacaccttcctggc

SEQ ID NO: 456965 - DNA, 120 bp, Artificial Sequence
  ENSG00000156860_51 (sequence is synthesized)
ccaaggaagtgctcagcacatggctgctgaaagcaggcagctgaggactccaggcaccggtcctgcctctgcccagccaggcctggtgcctgctcagcaccggctgcccagtgctctgac

SEQ ID NO: 456966 - DNA, 120 bp, Artificial Sequence
  ENSG00000156860_52 (sequence is synthesized)
cacccccctttcctcccacagatccctttgggcgtcccacaagcttcgcctctttggctgccctctccaacggggcctttggaggcctgggcagccccacattcagtgagtgcgggtgcg

SEQ ID NO: 456967 - DNA, 120 bp, Artificial Sequence
  ENSG00000156860_53 (sequence is synthesized)
gtggggtgggggggctgcggccacagggtgagagctcagacggtctgggaggaggcctgaacagggcctcccacttctggcccctgtcactctctgcttcaccctctgcccagactccgg

SEQ ID NO: 456968 - DNA, 120 bp, Artificial Sequence
  ENSG00000156860_54 (sequence is synthesized)
ctctttaggcagaatgtatttcccacagccccgtttttcatcagcaacgccactgccccttgtaaacagagaccccagtttctaagggcaaagaggcaagcagggcaaatttgagccctt

SEQ ID NO: 456969 - DNA, 120 bp, Artificial Sequence
  ENSG00000156860_55 (sequence is synthesized)
tttttccaaatgacatcataccaggaagccctgttcggaaaacaaaagataagctgccccttggtgaagtgaggagagccagagcctccctccccttagcacttgcagcagtgtagaccc

SEQ ID NO: 456970 - DNA, 120 bp, Artificial Sequence
  ENSG00000156860_56 (sequence is synthesized)
cagggctgcgggaacgttgtgaaacgcacaggaccagtttcctacagggaagactaggccagaggttttccaacttccttcaaaggcattttccctaaataaatcttaaacagaccgcta

SEQ ID NO: 456971 - DNA, 120 bp, Artificial Sequence
  ENSG00000156860_57 (sequence is synthesized)
tactctaaagttggtaataggagagcttctctgagaaacctgtcctgcctgccccctcaccacccgcagccttccagcagggcagctccctggggcttggttcagaaaccttgtgctgga

SEQ ID NO: 456972 - DNA, 120 bp, Artificial Sequence
  ENSG00000156860_58 (sequence is synthesized)
ggagagatgcctagactgggagagatggggaaaggagtttgggcctgagcaggaagggtttgagggagtcccagtgtctcaggcatgttgggggtgagtggatgctgtggagatgcgagg

SEQ ID NO: 456973 - DNA, 120 bp, Artificial Sequence
  ENSG00000156860_59 (sequence is synthesized)
aaccagcaaaggttggtcccaaggtctggggctggaggcacgggagggcagtggggtgagcatgagcctcaactgagcatgtctgccatcctgccccacagcctcgggcccccacggcgc

SEQ ID NO: 456974 - DNA, 120 bp, Artificial Sequence
  ENSG00000156869_0 (sequence is synthesized)
gttaggctgccttcgcttctcaaggtaaggaagtggaggattaaatgatttgcccaaagtctcacagtaatttgtagagctgagattgaaattcgggtgaaacttcacatatcacattct

SEQ ID NO: 456975 - DNA, 120 bp, Artificial Sequence
  ENSG00000156869_1 (sequence is synthesized)
ttttatcagatggcagtttctggatttactcttggtacctgcatacttctgttgcacattagttatgtggctaattatcccaatggaaaagtaacacagtcatgccatggaatgattcct

SEQ ID NO: 456976 - DNA, 120 bp, Artificial Sequence
  ENSG00000156869_2 (sequence is synthesized)
gaacatggtcatagtccacagtctgttcctgttcatgacatttacgtgagtcagatgacattcaggccaggagatcagattgaagttactttgtcagggcatccatttaaaggctttctc

SEQ ID NO: 456977 - DNA, 120 bp, Artificial Sequence
  ENSG00000156869_3 (sequence is synthesized)
ctagaagcgcgtaatgctgaggatctgaatggccctcctattggctccttcacattgattgacagtgaagtgtcacaacttttgacctgtgaagatatacagggatcagcagtgagtcac

SEQ ID NO: 456978 - DNA, 120 bp, Artificial Sequence
  ENSG00000156869_4 (sequence is synthesized)
agaagtgcatctaaaaaaacagaaattaaagtctactggaatgctccaagcagtgctccaaatcacacacagtttctagtcacagttgttgagaagtataaaatctactgggtgaagatt

SEQ ID NO: 456979 - DNA, 120 bp, Artificial Sequence
  ENSG00000156869_5 (sequence is synthesized)
cctggtcctataatttcacaaccaaatgcatttccttttacaacacctaaagctacagtagtacctttgccaacgttacctcccgtttcccacttaaccaaaccattcagtgcctcagat

SEQ ID NO: 456980 - DNA, 120 bp, Artificial Sequence
  ENSG00000156869_6 (sequence is synthesized)
tgtgggaacaagaagttctgtattaggagtcctttgaactgtgacccagagaaggaggcttcctgtgtcttcttgtccttcacaagagatgaccaatcggtgatggttgaaatgagcggc

SEQ ID NO: 456981 - DNA, 120 bp, Artificial Sequence
  ENSG00000156869_7 (sequence is synthesized)
cccagtaaaggctatttatcctttgcattgtctcatgatcagtggatgggtgatgatgatgcttatctgtgtattcatgaagatcagactgtgtacatccagccttcccatttaacgggg

SEQ ID NO: 456982 - DNA, 120 bp, Artificial Sequence
  ENSG00000156869_8 (sequence is synthesized)
cgaagtcaccctgtaatggactccagggatacccttgaggatatggcttggaggttggcggacggtgttatgcagtgttctttcagaagaaacattacccttcctggagttaagaataga

SEQ ID NO: 456983 - DNA, 120 bp, Artificial Sequence
  ENSG00000156869_9 (sequence is synthesized)
atatttctagcagatggtgcagctaatgatggtcgaatttacaagcactctcagcaacctttgattacctatgaaaaatatgatgtgacagactctccaaagaacataggaggatcccat

SEQ ID NO: 456984 - DNA, 120 bp, Artificial Sequence
  ENSG00000156869_10 (sequence is synthesized)
tctgtactccttctgaaggttcatggtgccttaatgtttgtggcatggatgactactgttagcataggtgtactggttgcccggttcttcaagccagtttggtcaaaagctttcttgctt

SEQ ID NO: 456985 - DNA, 120 bp, Artificial Sequence
  ENSG00000156869_11 (sequence is synthesized)
ggtgaagcagcttggtttcaggtgcatcggatgctcatgttcaccacaactgtcctcacctgcattgcttttgttatgccgtttatatacaggggaggctggagtaggcatgcaggttac

SEQ ID NO: 456986 - DNA, 120 bp, Artificial Sequence
  ENSG00000156869_12 (sequence is synthesized)
cacccatacctcggctgtatagtgatgactttggcagttcttcagcctcttctggcagtcttcaggccacctttacatgacccaagaaggcaaatgtttaactggactcattggagtatg

SEQ ID NO: 456987 - DNA, 120 bp, Artificial Sequence
  ENSG00000156869_13 (sequence is synthesized)
ggaacagctgctagaataatagcagtggcagcgatgttcctgggaatggatttaccaggactgaatcttcctgattcatggaaaacctatgcaatgaccggattcgtagcctggcatgtt

SEQ ID NO: 456988 - DNA, 120 bp, Artificial Sequence
  ENSG00000156869_14 (sequence is synthesized)
gggactgaggttgttctggaggtacatgcttatcggctctctcgcaaagttgaaatattggatgatgacagaattcagatccttcagtcatttactgcagtggaaacagagggtcatgct

SEQ ID NO: 456989 - DNA, 120 bp, Artificial Sequence
  ENSG00000156869_15 (sequence is synthesized)
tttaaaaaggcagtgttggcaatttatgtctgtgggaatgttacttttctcatcatatttttatctgcaatcaaccatctatgagcaagcaaagaccttggcttttgcaggccaagtgat

SEQ ID NO: 456990 - DNA, 120 bp, Artificial Sequence
  ENSG00000156869_16 (sequence is synthesized)
aattatcatcaaaccaaagaaacttgaagcctgtcctgactgcctggagcatatttgtgaattctcacttggaagactggggtcatgtctgtagaggaattctgaagtccagcctttaga

SEQ ID NO: 456991 - DNA, 120 bp, Artificial Sequence
  ENSG00000156869_17 (sequence is synthesized)
gaacaacattcaagagggtcatatagactataaattaatgtcatgccctatatgtaattctgggtcttaaaggaaagattgtacttcaggagaagtaactctcaaatatttcatgccaag

SEQ ID NO: 456992 - DNA, 120 bp, Artificial Sequence
  ENSG00000156869_18 (sequence is synthesized)
ctcaaatatttcatgccaagattttaagaatgttggtatttaagaaaataaatagtgatttggaaaatcacaacagatgtcactaggataataaagagatatattacgatatatatatat

SEQ ID NO: 456993 - DNA, 120 bp, Artificial Sequence
  ENSG00000156869_19 (sequence is synthesized)
tagcaacatggatgctgctggaagtgattatcctacatgaattaatgcagaaacagaaaatcacataccacatgttctcacttataaattggcagcgatgttcctgggaatggatttacc

SEQ ID NO: 456994 - DNA, 120 bp, Artificial Sequence
  ENSG00000156869_20 (sequence is synthesized)
tttcactcttttactgtttattgaatctttattattacttgatttagaagatttcacttaaatctgttttcttttgtaagatactatcatacttcttatttttggttccagatgactgta

SEQ ID NO: 456995 - DNA, 120 bp, Artificial Sequence
  ENSG00000156869_21 (sequence is synthesized)
ttacttaagtagtctgtgtattccccatccagaacaggctttaaaataagtttttatcgttatttactatttttattaattgtgctatcacttcaagagaagagaaaaatgaagtttatt

SEQ ID NO: 456996 - DNA, 120 bp, Artificial Sequence
  ENSG00000156869_22 (sequence is synthesized)
taaatctataacagcattttgcaaactattttttgcaactctagaaatgcaaaatgttaacaggtactctgttacatagagagtatatagaaaaataagtttggaatattctgtgtgata

SEQ ID NO: 456997 - DNA, 120 bp, Artificial Sequence
  ENSG00000156869_23 (sequence is synthesized)
tataatataccttagagttcacactgtacagtaggatattaaatatcctaagaaatttgcagtaaagaaacaagtatttactttcatccagtgtttttctttttttgtaattcaataaga

SEQ ID NO: 456998 - DNA, 120 bp, Artificial Sequence
  ENSG00000156869_24 (sequence is synthesized)
atttattgagtgtcactgtgagccagacactgtgttaaatactgcaattcaaaagaaaacacctcatgttttttcctctaatgaggtcaagtaaacattttttttttaaacttttatttt

SEQ ID NO: 456999 - DNA, 120 bp, Artificial Sequence
  ENSG00000156869_25 (sequence is synthesized)
gggttcaggggtacatgtgtaggtttgtttataggtaaattccatgtcacgagggtttggtgtacagattatttcatcactcaggtgataagcatagtacccaattggtatcatctagca

SEQ ID NO: 457000 - DNA, 120 bp, Artificial Sequence
  ENSG00000156869_26 (sequence is synthesized)
ttttccaaactaacttagccttatggactgcccctggaccatcacctatttttcttttctctttgcggaatggctattaatatctcacagattgaatatcttatggaacactggaaaaaa

SEQ ID NO: 457001 - DNA, 120 bp, Artificial Sequence
  ENSG00000156869_27 (sequence is synthesized)
ctgggattacaggcttgagccaccgcgtctggcctatttatttattattttcgagacggagtgttgctcttgtggcccaggctggagtgcaacggcgggatttcggctcactgcaacctc

SEQ ID NO: 457002 - DNA, 120 bp, Artificial Sequence
  ENSG00000156873_0 (sequence is synthesized)
gactgcaggcaaacccggcgacagcgcagctcgcgtcgaccctggctcctctgcctgccccctcaggcccccgcctccttcaggatgacgctggacgtggggccggaggatgagctgccc

SEQ ID NO: 457003 - DNA, 120 bp, Artificial Sequence
  ENSG00000156873_1 (sequence is synthesized)
gactgggccgccgccaaagagttttaccagaagtacgaccctaaggacgtcatcggcagaggagtgagctctgtggtccgccgttgtgttcatcgagctactggccacgagtttgcggtg

SEQ ID NO: 457004 - DNA, 120 bp, Artificial Sequence
  ENSG00000156873_2 (sequence is synthesized)
aagattatggaagtgacagctgagcggctgagtcctgagcagctggaggaggtgcgggaagccacacggcgagagacacacatccttcgccaggtcgccggccacccccacatcatcacc

SEQ ID NO: 457005 - DNA, 120 bp, Artificial Sequence
  ENSG00000156873_3 (sequence is synthesized)
ctcatcgattcctacgagtcttctagcttcatgttcctggtgtttgacctgatgcggaagggagagctgtttgactatctcacagagaaggtggccctctctgaaaaggaaaccaggtcc

SEQ ID NO: 457006 - DNA, 120 bp, Artificial Sequence
  ENSG00000156873_4 (sequence is synthesized)
atcatgcggtctctgctggaagcagtgagctttctccatgccaacaacattgtgcatcgagatctgaagcccgagaatattctcctagatgacaatatgcagatccgactttcagatttc

SEQ ID NO: 457007 - DNA, 120 bp, Artificial Sequence
  ENSG00000156873_5 (sequence is synthesized)
gggttctcctgccacttggaacctggcgagaagcttcgagagttgtgtgggaccccagggtatctagcgccagagatccttaaatgctccatggatgaaacccacccaggctatggcaag

SEQ ID NO: 457008 - DNA, 120 bp, Artificial Sequence
  ENSG00000156873_6 (sequence is synthesized)
gaggtcgacctctgggcctgtggggtgatcttgttcacactcctggctggctcgccacccttctggcaccggcggcagatcctgatgttacgcatgatcatggagggccagtaccagttc

SEQ ID NO: 457009 - DNA, 120 bp, Artificial Sequence
  ENSG00000156873_7 (sequence is synthesized)
agttcccccgagtgggatgaccgttccagcactgtcaaagacctgatctccaggctgctgcaggtggatcctgaggcacgcctgacagctgagcaggccctacagcaccccttctttgag

SEQ ID NO: 457010 - DNA, 120 bp, Artificial Sequence
  ENSG00000156873_8 (sequence is synthesized)
cgttgtgaaggcagccaaccctggaacctcaccccccgccagcggttccgggtggcagtgtggacagtgctggctgctggacgagtggccctaagcacccatcgtgtacggccactgacc

SEQ ID NO: 457011 - DNA, 120 bp, Artificial Sequence
  ENSG00000156873_9 (sequence is synthesized)
aagaatgcactgttgagggacccttatgcgctgcggtcagtgcggcacctcatcgacaactgtgccttccggctctacgggcactgggtaaagaaaggggagcagcagaaccgggcggct

SEQ ID NO: 457012 - DNA, 120 bp, Artificial Sequence
  ENSG00000156873_10 (sequence is synthesized)
ctctttcagcaccggccccctgggccttttcccatcatgggccctgaagaggagggagactctgctgctataactgaggatgaggccgtgcttgtgctgggctaggacctcaaccccagg

SEQ ID NO: 457013 - DNA, 120 bp, Artificial Sequence
  ENSG00000156873_11 (sequence is synthesized)
gattcccaggaagcagaactctccagaagaagggttttgatcattccagctcctctgggctctggcctctggcctcaggcccactaatgatcctgctaccctcttgaagaccagcccggt

SEQ ID NO: 457014 - DNA, 120 bp, Artificial Sequence
  ENSG00000156873_12 (sequence is synthesized)
acctctctccccactggccaggactctgagatcagagctggggtggaagggagccattctgaacgccacgcctggcccggtcagtgctgcatgcactgcatatgaaataaaatctgctac

SEQ ID NO: 457015 - DNA, 120 bp, Artificial Sequence
  ENSG00000156873_13 (sequence is synthesized)
acgccagggagaacaggtgtcctgtgtctgtctggcttgggcaggaaagcccagaaggtgctcagcagggtgcagggatggtgccattctggcccagacctttattggggaaaatgttgg

SEQ ID NO: 457016 - DNA, 120 bp, Artificial Sequence
  ENSG00000156873_14 (sequence is synthesized)
gggtcacttggtcttgctcttgcctttacccggaggtagctggaagggccgctctagtgcagtcaacttgctgctgagcctttcctcgctggccttgagccgctcctccaccagcccctg

SEQ ID NO: 457017 - DNA, 120 bp, Artificial Sequence
  ENSG00000156873_15 (sequence is synthesized)
gagctgctccagctctttgttcacttgggtcttgatgtaggctcggaggacgtggatgtggcctgcaggggcagggaagaaggggcagggtgaggagagatgctgtctggcaatgggggg

SEQ ID NO: 457018 - DNA, 120 bp, Artificial Sequence
  ENSG00000156873_16 (sequence is synthesized)
atggtccctagttgggcaaacagtccccaaatttcccctggtggggatatagaggtagcaatgttgtttccctttaggaaatgttagcaagcccttgtgtgagaggtagttgggtagggt

SEQ ID NO: 457019 - DNA, 120 bp, Artificial Sequence
  ENSG00000156873_17 (sequence is synthesized)
ggctatgctggactttgcagcttcaaattctgatccctactcagtagctgtgtgaccttaggcaggttatttaacctatctgtgcctcagtttccttgtatgaaatgtggatagtgatac

SEQ ID NO: 457020 - DNA, 120 bp, Artificial Sequence
  ENSG00000156873_18 (sequence is synthesized)
ctagcacataggattgagggaggattaaatgagttaatttatgtaaaatgcttagagcagggcatgcactgcacacctattgccaagtatgtgctggctgttattgtcattggctttctc

SEQ ID NO: 457021 - DNA, 82 bp, Artificial Sequence
  ENSG00000156873_19 (sequence is synthesized)
atgtgctggctgttattgtcattggctttatcccccaggctggagtgcagtggcagcgatctcagctcactgcaagctctgc

SEQ ID NO: 457022 - DNA, 120 bp, Artificial Sequence
  ENSG00000156873_20 (sequence is synthesized)
acagttgtgagccactgcacctggcctgttctttgtttttttttaactcttaagttctgggatacgagcagaacatgcaggtttgctacgtaggtatacatgggccatggtggtttgctt

SEQ ID NO: 457023 - DNA, 77 bp, Artificial Sequence
  ENSG00000156873_21 (sequence is synthesized)
caccaccatgcctggctattttttgtattttagtagatagggggtttcacggtgttgcccaggctggtcgcgaactc

SEQ ID NO: 457024 - DNA, 84 bp, Artificial Sequence
  ENSG00000156873_22 (sequence is synthesized)
gctgtgcttttatctgtcatcttggacttctgcataagggatcatttagagaaaggactctgactaaaaacaaaaagtctgaag

SEQ ID NO: 457025 - DNA, 120 bp, Artificial Sequence
  ENSG00000156873_23 (sequence is synthesized)
tttagagaaaggactctgactaaaaacaaaaagtctgaagtcctgatgtcatccaaacccttcattctacacctgctcagagggacagggcagcctgccctctccagatcctcacttggc

SEQ ID NO: 457026 - DNA, 120 bp, Artificial Sequence
  ENSG00000156873_24 (sequence is synthesized)
tctggctctggtggggccactgtctctagttcctctttctgcggggtaactgcctgctcctccatctccttgctttcttctttctctgcaaaccagaagcaggaagagactgtggcccca

SEQ ID NO: 457027 - DNA, 120 bp, Artificial Sequence
  ENSG00000156873_25 (sequence is synthesized)
ggcctggcccagcccagccctgccctggcactctcccttacccgtctcactctctggccacagtttgggtggctgtagccccatgtaagtcaaagacagatccagccgcacctgggaagc

SEQ ID NO: 457028 - DNA, 120 bp, Artificial Sequence
  ENSG00000156873_26 (sequence is synthesized)
aaggcagagggaggctgaaaggagtgcacctgtgctgaggggaggggcggttgagggtggctcctcatggtccaccaccccctacctggggtgtgaagacgtatttatagagcttgaagt

SEQ ID NO: 457029 - DNA, 120 bp, Artificial Sequence
  ENSG00000156873_27 (sequence is synthesized)
ggcggaagtaagtgttgaccacgtagtcttccaaggccagcagctgttcctctttgaagaggtcgatgctgaaaggaggccgctgtggtggtgactcggaattagaaccctgactacctt

SEQ ID NO: 457030 - DNA, 120 bp, Artificial Sequence
  ENSG00000156873_28 (sequence is synthesized)
ccggagccctggctttgcctccaaaagcccagcaacaggagcaaggagagcccactggggtcttcacaagaagataagggtgatgaatgtgagagagactgggtgagaccttgtctgggg

SEQ ID NO: 457031 - DNA, 120 bp, Artificial Sequence
  ENSG00000156873_29 (sequence is synthesized)
atgggtaaagtttccagaatgttccaggggaactgaccctgactccatggcaaaaaaggacactggtgaagtagcggtagcactcctccacgttgcccaagggggttgctggtagggaaa

SEQ ID NO: 457032 - DNA, 120 bp, Artificial Sequence
  ENSG00000156873_30 (sequence is synthesized)
gcaagatgcagcagtgaggccctctctggtatccattcattcacttcactcaacagctgtttatgaccatgagcttcagaagcagacagatctgggtttcagcactggcttgtttcctta

SEQ ID NO: 457033 - DNA, 120 bp, Artificial Sequence
  ENSG00000156873_31 (sequence is synthesized)
actcatgtaacaaatactgaatacccactatatgcccactgtatggttttcggcactgaacaagacagacaaggtcctgcccttacgaagcttatattctaggggaataaaccaagaaat

SEQ ID NO: 457034 - DNA, 120 bp, Artificial Sequence
  ENSG00000156873_32 (sequence is synthesized)
agatcatttcagctattaaacattctgaagcaagagctattaaacattctaaagcaggtgttattgtgcactatgcatatatttgcatatattatttctcagaacagtcctgtaaaatgt

SEQ ID NO: 457035 - DNA, 120 bp, Artificial Sequence
  ENSG00000156873_33 (sequence is synthesized)
gtgctgtatccttaatttctagataaggaagcagtggattggaaagctgatggcttgtgtatgatgatgctactaataatgacatattccaggcagaaatcccctgcttctgcttcccat

SEQ ID NO: 457036 - DNA, 120 bp, Artificial Sequence
  ENSG00000156873_34 (sequence is synthesized)
ggtcacttgtgccaggcccggttcctcttctccctggggctcaaacctggtagctgccccctctcaccaatacaagccttgtgaagatcctggagcagggcacaagccgctgacgtctgc

SEQ ID NO: 457037 - DNA, 120 bp, Artificial Sequence
  ENSG00000156873_35 (sequence is synthesized)
tccagtgagaagccctgctggcggcagaaaatgagcgcgtggcagaagaggtccagggtgatggcgtccctcaggctctgctcaggacaccctagctccagcagctcagccagcaccctt

SEQ ID NO: 457038 - DNA, 120 bp, Artificial Sequence
  ENSG00000156873_36 (sequence is synthesized)
gggagggagagaggagtgagtgacaactgggcctcctttcatcaccctacacccaccacatgctttggagtcagccattcctcatgttttcccaacctgacccctcagcctttgccaaga

SEQ ID NO: 457039 - DNA, 120 bp, Artificial Sequence
  ENSG00000156873_37 (sequence is synthesized)
gctcttcccacgcccccctcagtccctactccctcatctcagcattggtggtcttctccagctggtgcatggaatggacgtccaggtacttcctgttatagtaaaagaaaaagagtattg

SEQ ID NO: 457040 - DNA, 120 bp, Artificial Sequence
  ENSG00000156873_38 (sequence is synthesized)
gtggccgttacctatcatgacaaggctgtgacagctagtgcgtgagactgggagttggccaccggcgtgaagctgggctcttttgccagcttgctgtgtgactatgcaaatcgttaactc

SEQ ID NO: 457041 - DNA, 120 bp, Artificial Sequence
  ENSG00000156873_39 (sequence is synthesized)
tctgggcctaaatgaactcttatgagcctctccatttctaaagcctagggttaggaatcttgaattcttttttctgctctgccactaccttgtatgaccttggtcaagtactccctgtgg

SEQ ID NO: 457042 - DNA, 120 bp, Artificial Sequence
  ENSG00000156873_40 (sequence is synthesized)
ccctcagtgtccccctctgtacaatactccttagcggccatgagactccatttacattctgtctttggctctttttttctcacactgcctcctctttggactggagaggctggaaagcca

SEQ ID NO: 457043 - DNA, 120 bp, Artificial Sequence
  ENSG00000156873_41 (sequence is synthesized)
acttccagtcacctggagtaattgcatctccaggcctcagtctcatctgtaaaatggggatgccctggccacagacaggactgttggggagacaataaagaacgcaaatattcagtgtaa

SEQ ID NO: 457044 - DNA, 120 bp, Artificial Sequence
  ENSG00000156873_42 (sequence is synthesized)
ggttctcctttcttcccagtaacagcccgctgctgtcccagggtggccaagccccgttaatgtgcatccactcctttccatctctgtctctctgcctctcttcctctctccctagtcacc

SEQ ID NO: 457045 - DNA, 120 bp, Artificial Sequence
  ENSG00000156873_43 (sequence is synthesized)
ctcatcgattcctacgagtcttctagcttcatgttcctggtgtttgacctgtgagtatctccctgccaccatctgagaagcctcctccccacctccatgtatggcccagcatttgtggtg

SEQ ID NO: 457046 - DNA, 120 bp, Artificial Sequence
  ENSG00000156873_44 (sequence is synthesized)
cagtgggctggacccatcctgctcacaccttcctgttccagctggggctctctatcacctgggcctgcctgctagcgcatggctctggccttctcccttggtgccatgattgaggcaaat

SEQ ID NO: 457047 - DNA, 120 bp, Artificial Sequence
  ENSG00000156873_45 (sequence is synthesized)
gtctctgcccatcagttctttttctggtcagaatctgaatgtccgatgcaattggtataatgcaaaccaactgcaaaggtattttgaaagagaatgatttgaattccaaagatttaaaag

SEQ ID NO: 457048 - DNA, 120 bp, Artificial Sequence
  ENSG00000156873_46 (sequence is synthesized)
aggcccttggaaaaaattcatgaaggcttcgatatatttacagaaatggccctctgcaaaagtcagaggggacgtaaggatgtctattatgccatcctgcagccatgcagagtgcctaca

SEQ ID NO: 457049 - DNA, 120 bp, Artificial Sequence
  ENSG00000156873_47 (sequence is synthesized)
ctccccaaaacagcacctgataatgttactttgaggactgatgcagagtgcaagtataacctcaattttgaaagtattatttttaattgacacataattataacctcagcttttaaagac

SEQ ID NO: 457050 - DNA, 120 bp, Artificial Sequence
  ENSG00000156873_48 (sequence is synthesized)
gaaacttcaaaataaggtcctattcaacctttgtgccacaaaaaactgaaattttggtccattttctttatagattcactttgagaggcctttttcaggcatagttactctcaacaagaa

SEQ ID NO: 457051 - DNA, 120 bp, Artificial Sequence
  ENSG00000156873_49 (sequence is synthesized)
catcatggcataatgcaggtatttcagctgccaacacaccaggccaaactgccttgttggagtgctgtgtttctagaccctttggtttgtctgcagagatctatctttagtggcctcttc

SEQ ID NO: 457052 - DNA, 120 bp, Artificial Sequence
  ENSG00000156873_50 (sequence is synthesized)
cacaatattttgtatgagcactggtctgttttctcagcccccactgtgggatgcagctgcctcctatgcccctccttcccttaggatgcggaagggagagctgtttgactatctcacaga

SEQ ID NO: 457053 - DNA, 120 bp, Artificial Sequence
  ENSG00000156873_51 (sequence is synthesized)
cctcctgggcacatctccccactcccctccctgccctgccatcctcccgcccccaggctcttctgcggggtctccccagtccgggtccttcccccacccccccccaccccccaggaccct

SEQ ID NO: 457054 - DNA, 120 bp, Artificial Sequence
  ENSG00000156873_52 (sequence is synthesized)
ggcgccccagctgcaagggctgcgcccccgggagccgccatgcgggtcgtctcagagcctgtgggcctccctgccctcactgccctcctcctccgcgcaggcccccgcctccttcaggat

SEQ ID NO: 457055 - DNA, 120 bp, Artificial Sequence
  ENSG00000156873_53 (sequence is synthesized)
gttagcagacgaccccccacctcctgctggccctgcccatagcccacttccgccaacattgcctccacacctctcctcccttcattccactaaagagtggccatccgttgggcgcccact

SEQ ID NO: 457056 - DNA, 120 bp, Artificial Sequence
  ENSG00000156873_54 (sequence is synthesized)
atttgccacttggcaaatcagtgcaacttggcattcaagaaatacttggtgtaggaatgaatttcccaacaaagtcagtttcaattcggggctgttaaaatctcctggaagtgtgccatg

SEQ ID NO: 457057 - DNA, 120 bp, Artificial Sequence
  ENSG00000156873_55 (sequence is synthesized)
gaacaaggttcagaaagtactggaagaattggtgcccgagtggtagaacaaactaaaaatacagacttgagccaagcgtggtggcacgcatctgtcaccccagctactcgggaggctgaa

SEQ ID NO: 457058 - DNA, 120 bp, Artificial Sequence
  ENSG00000156873_56 (sequence is synthesized)
ggaggaggctcacttgagcctaggagcccaaggctacaatgagctgtgatagtgccaccacactccagcctgtgtgacatagcgaccctgtctctaaaaataaataaatataaaaataca

SEQ ID NO: 457059 - DNA, 120 bp, Artificial Sequence
  ENSG00000156873_57 (sequence is synthesized)
aattgggcggccggtttccaattggaagggcttctgagcctcagtcttcgggcggcgctgaccattggcgggcaggatggaggcggagccttgggttgtcgcccgccgccgggggttaag

SEQ ID NO: 457060 - DNA, 120 bp, Artificial Sequence
  ENSG00000156875_0 (sequence is synthesized)
ggaggcaggccgggccctcaagatggcggcgggcgcccagagcggctcggcccggcagtagtggtgggacggcactagctgctggggcctgccgccccgggagtggctgcagcagcgcca

SEQ ID NO: 457061 - DNA, 120 bp, Artificial Sequence
  ENSG00000156875_1 (sequence is synthesized)
ggaatcgaggatggtaaaatgacccaggggaagaagaagaaacgggccgcgaaccgcagtatcatgctggccaagaagatcatcattaaggacggaggcacgcctcaaggaataggttct

SEQ ID NO: 457062 - DNA, 120 bp, Artificial Sequence
  ENSG00000156875_2 (sequence is synthesized)
cctagtgtctatcatgcagttatcgtcatctttttggagttttttgcttggggactattgacagcacccaccttggtggtattacatgaaacctttcctaaacatacatttctgatgaac

SEQ ID NO: 457063 - DNA, 120 bp, Artificial Sequence
  ENSG00000156875_3 (sequence is synthesized)
ggcttaattcaaggagtaaagggtttgttgtcattccttagtgccccgcttattggtgctctttctgatgtttggggccgaaaatccttcttgctgctaacggtgtttttcacatgtgcc

SEQ ID NO: 457064 - DNA, 120 bp, Artificial Sequence
  ENSG00000156875_4 (sequence is synthesized)
ccaattcctttaatgaagatcagcccatggtggtactttgctgttatctctgtttctggggtttttgcagtgactttttctgtggtatttgcatacgtagcagatataacccaagagcat

SEQ ID NO: 457065 - DNA, 120 bp, Artificial Sequence
  ENSG00000156875_5 (sequence is synthesized)
gaaagaagtatggcttatggactggtttcagcaacatttgctgcaagtttagtcaccagtcctgcaattggagcttatcttggacgagtatatggggacagcttggtggtggtcttagct

SEQ ID NO: 457066 - DNA, 120 bp, Artificial Sequence
  ENSG00000156875_6 (sequence is synthesized)
acagcaatagctttgctagatatttgttttatccttgttgctgtgccagagtcgttgcctgagaaaatgcggccagcatcctggggagcacccatttcctgggaacaagctgaccctttt

SEQ ID NO: 457067 - DNA, 120 bp, Artificial Sequence
  ENSG00000156875_7 (sequence is synthesized)
gcgtccttaaaaaaagtcggccaagattccatagtgctgctgatctgcattacagtgtttctctcctacctaccggaggcaggccaatattccagcttttttttatacctcagacagata

SEQ ID NO: 457068 - DNA, 120 bp, Artificial Sequence
  ENSG00000156875_8 (sequence is synthesized)
atgaaattttcaccagaaagtgttgcagcgtttatagcagtccttggcattctttccattattgcacagaccatagtcttgagtttacttatgaggtcaattggaaataagaacaccatt

SEQ ID NO: 457069 - DNA, 120 bp, Artificial Sequence
  ENSG00000156875_9 (sequence is synthesized)
ttactgggtctaggatttcaaatattacagttggcatggtatggctttggttcagaaccttggatgatgtgggctgctggggcagtagcagccatgtctagcatcacctttcctgctgtc

SEQ ID NO: 457070 - DNA, 120 bp, Artificial Sequence
  ENSG00000156875_10 (sequence is synthesized)
agtgcacttgtttcacgaactgctgatgctgatcaacagggtgtcgttcaaggaatgataacaggaattcgaggattatgcaatggtctgggaccggccctctatggattcattttctac

SEQ ID NO: 457071 - DNA, 120 bp, Artificial Sequence
  ENSG00000156875_11 (sequence is synthesized)
aagaactgccaataacaggaacagacttgggaacaaacacaagccctcagcaccactttgaacagaattccatcatccctggccctcccttcctatttggagcctgttcagtactgctgg

SEQ ID NO: 457072 - DNA, 120 bp, Artificial Sequence
  ENSG00000156875_12 (sequence is synthesized)
ctctgcttgttgccttgtttattccggaacataccaatttaagcttaaggtccagcagttggagaaagcactgtggcagtcacagccatcctcataatacacaagcgccaggagaggcca

SEQ ID NO: 457073 - DNA, 120 bp, Artificial Sequence
  ENSG00000156875_13 (sequence is synthesized)
aagaacctttactccaggacacaaatgtgtgacgactgaaatcaggaagatttttctatcagcacccaggtcttagttttcacctctagttctggatgtacattccatttccatccacag

SEQ ID NO: 457074 - DNA, 120 bp, Artificial Sequence
  ENSG00000156875_14 (sequence is synthesized)
tgtactttaagattgtcttaagaaatgtatctgcatgaactccgtgggaactaaaggaagtgggaacttagaaccagacagttttccaaagatgttacaatttcttttgaaaaacctttt

SEQ ID NO: 457075 - DNA, 120 bp, Artificial Sequence
  ENSG00000156875_15 (sequence is synthesized)
gtttattagcaccaatttcttgccactaagctatttgttttattatacatcctttaattaaaaactatatatgtaacttcttagatattagcaaatgtctctgctaccatttccttaagg

SEQ ID NO: 457076 - DNA, 120 bp, Artificial Sequence
  ENSG00000156875_16 (sequence is synthesized)
tgttgagctttaactctatgctgactcagtgagacacagtaggtagtatggttgtggacctatttgttttaacattgtaaaattttgagtcagattttaatattgtaaaatcttgggtca

SEQ ID NO: 457077 - DNA, 120 bp, Artificial Sequence
  ENSG00000156875_17 (sequence is synthesized)
aataattcaaagccttaatgcagatgcactaaaacaaagaaatggtaaatgaattgtttgcatttaaaaaaaaaaactcttaagaaaactgtactaaatctgaatcatgttttgagcttg

SEQ ID NO: 457078 - DNA, 120 bp, Artificial Sequence
  ENSG00000156875_18 (sequence is synthesized)
tttgcagtacttttaaacattattcactactgtttttgaagtgagaaagtatcagccatttagcatttaagttggggtatttagagcctgtaatctaaatgctggctcaaatttattccc

SEQ ID NO: 457079 - DNA, 120 bp, Artificial Sequence
  ENSG00000156875_19 (sequence is synthesized)
cagctacttcttataccactattcttttaatgtttgcataatcataagcacctcaacacttgaatacataatctaaaaattatatagtaaagctggtagccttgaaaatgtcagtgtgat

SEQ ID NO: 457080 - DNA, 120 bp, Artificial Sequence
  ENSG00000156875_20 (sequence is synthesized)
atctattatgtagataaatatatatagtggcctttcaggactgtcacagtaacactttatttacagagctaatgtttgtcctaaattttcaggaccctagaggagagctttatacaatta

SEQ ID NO: 457081 - DNA, 120 bp, Artificial Sequence
  ENSG00000156875_21 (sequence is synthesized)
ccgatgtgaatttctctaaagtgtatatttttgtgtccagttatattatttaaaaaagtgttactttgtaaaaattgtatataaagaactgtatagtttacactgttttcatcttgtgtg

SEQ ID NO: 457082 - DNA, 120 bp, Artificial Sequence
  ENSG00000156875_22 (sequence is synthesized)
tggttattgcttaatgctttttaaacttggaacactcactatggttaaataaggtcttaaaagaaatgtaaatattctgttaataaagttaaatattttaatgattttttttttaaaaaa

SEQ ID NO: 457083 - DNA, 120 bp, Artificial Sequence
  ENSG00000156875_23 (sequence is synthesized)
tgtttttaagataaatattattataaggagtgcaaacctttgcattacaagatttttgcgtaaaatatattttgtaataaaatcattcattagactacatttaaaatttttttgcggtat

SEQ ID NO: 457084 - DNA, 120 bp, Artificial Sequence
  ENSG00000156876_0 (sequence is synthesized)
ctccgcagaagccgagcgccaaactcaaactttatcaggacccggacctctcaggctaatcccgagggccgggcctgttgggcttttctgcacaccagccgaggcagcgagccaacatga

SEQ ID NO: 457085 - DNA, 120 bp, Artificial Sequence
  ENSG00000156876_1 (sequence is synthesized)
gccaagtgctgttccaccaactagtcccgttgcaggtgaaatgcaaagactgtgaggagaggagagtaagtataagaatgagcattgaactacaatcagtttctaatccagttcacagaa

SEQ ID NO: 457086 - DNA, 120 bp, Artificial Sequence
  ENSG00000156876_2 (sequence is synthesized)
aggacttagttattcgtctgactgatgacacggatccattttttttatataaccttgttatatctgaggaagattttcaaagtttaaaattccagcaaggtcttctggtagacttcttag

SEQ ID NO: 457087 - DNA, 120 bp, Artificial Sequence
  ENSG00000156876_3 (sequence is synthesized)
ctttcccacaaaaatttatagatctccttcagcaatgtactcaagaacatgccaaagaaattccaaggtttttgctacagttagtttctccagcagctattttggataactcacctgcat

SEQ ID NO: 457088 - DNA, 120 bp, Artificial Sequence
  ENSG00000156876_4 (sequence is synthesized)
ttttaaatgtggtagagacaaatccttttaagcatcttacacacctctcactaaaacttttacctggaaatgatgtggagataaagaaatttctcgcaggctgtttgaaatgtagcaagg

SEQ ID NO: 457089 - DNA, 120 bp, Artificial Sequence
  ENSG00000156876_5 (sequence is synthesized)
aagaaaaattatcattgatgcaatcactagatgatgctactaagcaactggactttacacgaaagacattagcagaaaaaaaacaagaattagataagttacggaatgaatgggcgtcac

SEQ ID NO: 457090 - DNA, 120 bp, Artificial Sequence
  ENSG00000156876_6 (sequence is synthesized)
atacagcagccttgacaaacaagcattctcaggaactgacaaatgaaaaggaaaaagccttgcaggcacaggttcaatatcaacagcagcatgaacaacagaaaaaagatttagaaatcc

SEQ ID NO: 457091 - DNA, 120 bp, Artificial Sequence
  ENSG00000156876_7 (sequence is synthesized)
tccatcaacaaaacatccaccagctacaaaacagactgtctgagttagaagcggctaataaagacttaaccgaaagaaaatataaaggagactccactattagagaacttaaagcaaaac

SEQ ID NO: 457092 - DNA, 120 bp, Artificial Sequence
  ENSG00000156876_8 (sequence is synthesized)
tttctggtgttgaagaggagctacagcggactaagcaagaagtcctctctttgcgaagagagaattctacactagatgttgaatgccacgagaaagaaaagcacgttaatcagctacaaa

SEQ ID NO: 457093 - DNA, 120 bp, Artificial Sequence
  ENSG00000156876_9 (sequence is synthesized)
caaaagtggcagttttagaacaggaaatcaaggataaggaccagcttgttttaagaacaaaagaggcatttgatacaatccaggaacaaaaggtggttttagaagaaaatggtgagaaaa

SEQ ID NO: 457094 - DNA, 120 bp, Artificial Sequence
  ENSG00000156876_10 (sequence is synthesized)
atcaagtacaactaggaaagcttgaagctacaataaaatcattatctgcagaacttctgaaggcaaatgaaattatcaagaagttacaaggggatctgaaaactttaatgggtaagttga

SEQ ID NO: 457095 - DNA, 120 bp, Artificial Sequence
  ENSG00000156876_11 (sequence is synthesized)
aattgaagaatacagttactattcagcaagaaaaactcttggctgagaaggaggaaaaattacaaaaggaacaaaaggaattacaagatgttggacagtctcttcgaattaaagagcaag

SEQ ID NO: 457096 - DNA, 120 bp, Artificial Sequence
  ENSG00000156876_12 (sequence is synthesized)
aggtatgcaaattacaagaacaattagaagctacagttaaaaaacttgaagaaagcaaacaacttctaaaaaataatgaaaagttaatcacgtggttaaataaagaactaaatgaaaatc

SEQ ID NO: 457097 - DNA, 120 bp, Artificial Sequence
  ENSG00000156876_13 (sequence is synthesized)
agctagtgagaaagcaagatgtattgggaccttctactactccgcctgcacattccagcagcaacacaatcagaagtggaatttctcctaacctgaatgtggttgatggtagactgactt

SEQ ID NO: 457098 - DNA, 120 bp, Artificial Sequence
  ENSG00000156876_14 (sequence is synthesized)
acccaacctgtgggattggttatcctgtctcctctgcatttgcattccagaataccttccctcattcgatatctgccaaaaataccagccaccctggttcaggaacaaaggttcagttta

SEQ ID NO: 457099 - DNA, 120 bp, Artificial Sequence
  ENSG00000156876_15 (sequence is synthesized)
atttgcagtttacaaaaccaaatgcatcactaggagatgttcagtcaggagcaactattagtatgccttgctcaactgataaggaaaatggtgaaaatgtagggttggaatccaaatacc

SEQ ID NO: 457100 - DNA, 120 bp, Artificial Sequence
  ENSG00000156876_16 (sequence is synthesized)
agggaagatagcattcctttacgcggactcagccagaacctatttagtaattcagaccatcagagagatggcactttaggagcattacatacatcttccaaacccacagcgctcccctct

SEQ ID NO: 457101 - DNA, 120 bp, Artificial Sequence
  ENSG00000156876_17 (sequence is synthesized)
gcgtcttcagcctatttccctgggcagttaccaaacagttaattctagtgtcatgttttactttttattggtattttagaaactcaggtgcttaaaaaatatgtcaacacaaaccagatc

SEQ ID NO: 457102 - DNA, 120 bp, Artificial Sequence
  ENSG00000156876_18 (sequence is synthesized)
ctcaaatagcaagtttcaaattttacttgagctgttaaagactggatactttaagtactgcttttatggcagtttataatataggaacaaatttgtacttggggattggtaaagattgtg

SEQ ID NO: 457103 - DNA, 120 bp, Artificial Sequence
  ENSG00000156876_19 (sequence is synthesized)
agtaaatgacattttttggtttgtgaacatggcgttttatagaataatatgaattttattaagctattctttagaaattcagttctaaggaaagagttgatccttatgagggagattctg

SEQ ID NO: 457104 - DNA, 120 bp, Artificial Sequence
  ENSG00000156876_20 (sequence is synthesized)
atcatattaaaaatctgggtaaactaaaacctgctcataacctcatagtatgcaaccaaagaatactaattcattttatcactttcattggtaaaacttttaaattcaacacctgaaaat

SEQ ID NO: 457105 - DNA, 120 bp, Artificial Sequence
  ENSG00000156876_21 (sequence is synthesized)
catgagggaaaatgattacctcttgagatatattattgatgacatttaaagggaaaagtcctaaatttaccttaaataactgaaatgaattaagccttcatagcgtattttccttgaagc

SEQ ID NO: 457106 - DNA, 120 bp, Artificial Sequence
  ENSG00000156876_22 (sequence is synthesized)
atttaaatttgctagtgatgaatcaaataaatttgatatacttaaaataatttggacagtttttatgtgaccagattaagtgcttttgtcatttgagctgacaagtttttaaaacttcag

SEQ ID NO: 457107 - DNA, 120 bp, Artificial Sequence
  ENSG00000156876_23 (sequence is synthesized)
tgcttcctaaatgtttatactcatctagtttttctcaatttgtagttttattatgcagttaaatctgtatcagtggacttttaaaacttggtactactactaaatctactatatcatgaa

SEQ ID NO: 457108 - DNA, 120 bp, Artificial Sequence
  ENSG00000156876_24 (sequence is synthesized)
tattcatttatttttatagtatcagaacttgggttgatttcaatgttaataaactaggcaaaacaaataactgttagaaggtacaattttcttctcttccctgtaactgaaagttttaag

SEQ ID NO: 457109 - DNA, 120 bp, Artificial Sequence
  ENSG00000156876_25 (sequence is synthesized)
aattgttccttggggaaaaatttttttaaaattcacctagaatcatagggcctcattttgttttcttattgacaaacaatacctggtagcattctctaaagagtcttctagatcaatttt

SEQ ID NO: 457110 - DNA, 120 bp, Artificial Sequence
  ENSG00000156876_26 (sequence is synthesized)
tataaagtactaatgctcatgtgataatttaaaattattttcaactactttattacacagatgaagaaacatttcaagatattgatgtaataacattactgagtcccatggtaagaaaga

SEQ ID NO: 457111 - DNA, 120 bp, Artificial Sequence
  ENSG00000156876_27 (sequence is synthesized)
atctttgctaattttttttttttttttacgaagccagtatcttgaaactattggcaattgcaagtgtctttaaactagggatctaatctgaaaattcagtaactaatattaggcagttga

SEQ ID NO: 457112 - DNA, 120 bp, Artificial Sequence
  ENSG00000156876_28 (sequence is synthesized)
tactcccccacctcccccatttagatacactactgtattagtgagaatacttggtacagtaacttgaaagcacttgctattctggaaagaagcctcttggtgattttggaaggagcttta

SEQ ID NO: 457113 - DNA, 120 bp, Artificial Sequence
  ENSG00000156876_29 (sequence is synthesized)
ttgtaaatactatggaaggggctttgttgtaaatactatgtaatatatataaaatattgtgacatgttttggatgggatgcatgacatacaggtagctctcttttttaaaatataggtat

SEQ ID NO: 457114 - DNA, 120 bp, Artificial Sequence
  ENSG00000156876_30 (sequence is synthesized)
ctctttgcatatatatacacaaggaaagttgaattttcaggagagatcattctgatatcttgcaaatttgtattaaatgtatacagacttccaagtgtgctaattctttacctcctaaac

SEQ ID NO: 457115 - DNA, 120 bp, Artificial Sequence
  ENSG00000156876_31 (sequence is synthesized)
ttttagttgcaattgttttgcagtgtaaaattgtacatgtgttaataatcaaaaagtgttgcatttaatgttatttctgtaaactttgagctttgttaataaactattatgcagcatcta

SEQ ID NO: 457116 - DNA, 120 bp, Artificial Sequence
  ENSG00000156885_0 (sequence is synthesized)
gaggacagcgctggttcccggctccccgcaccatcatggctttgcctctgaggcccctgacccggggcttggccagcgctgccaaaggaggccacggaggagcaggagctcgtacctggc

SEQ ID NO: 457117 - DNA, 120 bp, Artificial Sequence
  ENSG00000156885_1 (sequence is synthesized)
tcgtgctggcgctgcccagcgtggccctctgcaccttcaactcctatctccactcgggccaccgcccgcgccccgagttccgtccctaccaacacctccgcatccgcaccaagccctacc

SEQ ID NO: 457118 - DNA, 120 bp, Artificial Sequence
  ENSG00000156885_2 (sequence is synthesized)
cctggggggacggcaaccacactctgttccacaatagccacgtgaaccctctgcccacgggctacgaacacccctgaggccccggacgcccccggacacaataaaggtgtgaagcttcga

SEQ ID NO: 457119 - DNA, 120 bp, Artificial Sequence
  ENSG00000156885_3 (sequence is synthesized)
gcgctgccaaaggaggccacggaggagcaggaggtgagtggggaacgggcggatccgggggctcccctaccctgcccacctgttcacaggcccgccgccccaggaccgccgcgctcaccc

SEQ ID NO: 457120 - DNA, 120 bp, Artificial Sequence
  ENSG00000156886_0 (sequence is synthesized)
acttcccctcaacgcgctgctcagggatgaccttcggcactgtgcttcttctgagtgtcctggcttcttatcatggattcaacctggatgtggaggagcctacgatcttccaggaggatg

SEQ ID NO: 457121 - DNA, 120 bp, Artificial Sequence
  ENSG00000156886_1 (sequence is synthesized)
caggcggctttgggcagagcgtggtgcagttcggtggatctcgactcgtggtgggagcacccctggaggtggtggcggccaaccagacgggacggctgtatgactgcgcagctgccaccg

SEQ ID NO: 457122 - DNA, 120 bp, Artificial Sequence
  ENSG00000156886_2 (sequence is synthesized)
gcatgtgccagcccatcccgctgcacatccgccctgaggccgtgaacatgtccttgggcctgaccctggcagcctccaccaacggctcccggctcctggcctgtggcccgaccctgcaca

SEQ ID NO: 457123 - DNA, 120 bp, Artificial Sequence
  ENSG00000156886_3 (sequence is synthesized)
gagtctgtggggagaactcatactcaaagggttcctgcctcctgctgggctcgcgctgggagatcatccagacagtccccgacgccacgccagagtgtccacatcaagagatggacatcg

SEQ ID NO: 457124 - DNA, 120 bp, Artificial Sequence
  ENSG00000156886_4 (sequence is synthesized)
tcttcctgattgacggctctggaagcattgaccaaaatgactttaaccagatgaagggctttgtccaagctgtcatgggccagtttgagggcactgacaccctgtttgcactgatgcagt

SEQ ID NO: 457125 - DNA, 120 bp, Artificial Sequence
  ENSG00000156886_5 (sequence is synthesized)
actcaaacctcctgaagatccacttcaccttcacccaattccggaccagcccgagccagcagagcctggtggatcccatcgtccaactgaaaggcctgacgttcacggccacgggcatcc

SEQ ID NO: 457126 - DNA, 120 bp, Artificial Sequence
  ENSG00000156886_6 (sequence is synthesized)
tgacagtggtgacacagctatttcatcataagaatggggcccgaaaaagtgccaagaagatcctcattgtcatcacagatgggcagaagtacaaagaccccctggaatacagtgatgtca

SEQ ID NO: 457127 - DNA, 120 bp, Artificial Sequence
  ENSG00000156886_7 (sequence is synthesized)
tcccccaggcagagaaggctggcatcatccgctacgctatcggggtgggacacgctttccagggacccactgccaggcaggagctgaataccatcagctcagcgcctccgcaggaccacg

SEQ ID NO: 457128 - DNA, 120 bp, Artificial Sequence
  ENSG00000156886_8 (sequence is synthesized)
tgttcaaggtggacaactttgcagcccttggcagcatccagaagcagctgcaggagaagatctatgcagttgagggaacccagtccagggcaagcagctccttccagcacgagatgtccc

SEQ ID NO: 457129 - DNA, 120 bp, Artificial Sequence
  ENSG00000156886_9 (sequence is synthesized)
aagaaggcttcagcacagccctcacaatggatggcctcttcctgggggctgtggggagctttagctggtctggaggtgccttcctgtatcccccaaatatgagccccaccttcatcaaca

SEQ ID NO: 457130 - DNA, 120 bp, Artificial Sequence
  ENSG00000156886_10 (sequence is synthesized)
tgtctcaggagaatgtggacatgagggactcttacctgggttactccaccgagctagccctgtggaagggggtacagaacctggtcctgggggccccccgctaccagcataccgggaagg

SEQ ID NO: 457131 - DNA, 120 bp, Artificial Sequence
  ENSG00000156886_11 (sequence is synthesized)
ctgtcatcttcacccaggtgtccaggcaatggaggaagaaggccgaagtcacagggacgcagatcggctcctacttcggggcctccctctgctctgtggatgtggacagcgatggcagca

SEQ ID NO: 457132 - DNA, 120 bp, Artificial Sequence
  ENSG00000156886_12 (sequence is synthesized)
ccgacctgatcctcattggggccccccattactatgagcagacccgagggggccaggtgtccgtgtgtcccttgcctagggggagggtgcagtggcagtgtgacgctgttctccgtggtg

SEQ ID NO: 457133 - DNA, 120 bp, Artificial Sequence
  ENSG00000156886_13 (sequence is synthesized)
agcagggccacccctggggccgctttggggcagccctgacagtgttgggggatgtgaatgaggacaagctgatagacgtggccattggggccccgggagagcaggagaaccggggtgctg

SEQ ID NO: 457134 - DNA, 120 bp, Artificial Sequence
  ENSG00000156886_14 (sequence is synthesized)
tctacctgtttcacggagcctcagaatccggcatcagcccctcccacagccagcggattgccagctcccagctctcccccaggctgcagtattttgggcaggcgctgagtgggggtcagg

SEQ ID NO: 457135 - DNA, 120 bp, Artificial Sequence
  ENSG00000156886_15 (sequence is synthesized)
acctcacccaggatggactgatggacctggccgtgggggcccggggccaggtgctcctgctcaggagtctgccggtgctgaaagtgggggtggccatgagattcagccctgtggaggtgg

SEQ ID NO: 457136 - DNA, 120 bp, Artificial Sequence
  ENSG00000156886_16 (sequence is synthesized)
tggggacgccaccgtctgtctcaccatccagaaaagctcactggaccagctaggtgacatccaaagctctgtcaggtttgatctggcactggacccaggtcgtctgacttctcgtgccat

SEQ ID NO: 457137 - DNA, 120 bp, Artificial Sequence
  ENSG00000156886_17 (sequence is synthesized)
tttcaatgaaaccaagaaccccactttgactcgaagaaaaaccctgggactggggattcactgtgaaaccctgaagctgcttttgccagattgtgtggaggatgtggtgagccccatcat

SEQ ID NO: 457138 - DNA, 120 bp, Artificial Sequence
  ENSG00000156886_18 (sequence is synthesized)
tctgcacctcaacttctcactggtgagagagcccatcccctccccccagaacctgcgtcctgtgctggccgtgggctcacaagacctcttcactgcttctctccccttcgagaagaactg

SEQ ID NO: 457139 - DNA, 120 bp, Artificial Sequence
  ENSG00000156886_19 (sequence is synthesized)
tgggcaagatggcctctgtgaaggggacctgggtgtcaccctcagcttctcaggcctgcagaccctgaccgtggggagctccctggagctcaacgtgattgtgactgtgtggaacgcagg

SEQ ID NO: 457140 - DNA, 120 bp, Artificial Sequence
  ENSG00000156886_20 (sequence is synthesized)
tgaggattcctacggaaccgtggtcagcctctactatccagcagggctgtcgcaccgacgggtgtcaggagcccagaagcagccccatcagagtgccctgcgcctggcatgtgagacagt

SEQ ID NO: 457141 - DNA, 120 bp, Artificial Sequence
  ENSG00000156886_21 (sequence is synthesized)
gcccactgaggatgagggcctaagaagcagccgctgcagtgtcaaccaccccatcttccatgagggctctaacggcaccttcatagtcacattcgatgtctcctacaaggccaccctggg

SEQ ID NO: 457142 - DNA, 120 bp, Artificial Sequence
  ENSG00000156886_22 (sequence is synthesized)
agacaggatgcttatgagggccagtgcaagcagtgagaacaataaggcttcaagcagcaaggccaccttccagctggagctcccggtgaagtatgcagtctacaccatgatcagcaggca

SEQ ID NO: 457143 - DNA, 120 bp, Artificial Sequence
  ENSG00000156886_23 (sequence is synthesized)
ggaagaatccaccaagtacttcaactttgcaacctccgatgagaagaaaatgaaagaggctgagcatcgataccgtgtgaataacctcagccagcgagatctggccatcagcattaactt

SEQ ID NO: 457144 - DNA, 120 bp, Artificial Sequence
  ENSG00000156886_24 (sequence is synthesized)
ctgggttcctgtcctgctgaacggggtggctgtgtgggatgtggtcatggaggccccatctcagagtctcccctgtgtttcagagagaaaacctccccagcattctgacttcctgaccca

SEQ ID NO: 457145 - DNA, 120 bp, Artificial Sequence
  ENSG00000156886_25 (sequence is synthesized)
gatttcaagaagtcccatgctggactgctccattgctgactgcctgcagttccgctgtgacgtcccctccttcagcgtccaggaggagctggatttcaccctgaagggcaatctcagttt

SEQ ID NO: 457146 - DNA, 120 bp, Artificial Sequence
  ENSG00000156886_26 (sequence is synthesized)
cggctgggtccgcgagacattgcagaagaaggtgttggtcgtgagtgtggctgaaattacgttcgacacatccgtgtactcccagcttccaggacaggaggcatttatgagagctcagat

SEQ ID NO: 457147 - DNA, 120 bp, Artificial Sequence
  ENSG00000156886_27 (sequence is synthesized)
ggagatggtgctagaagaagacgaggtctacaatgccattcccatcatcatgggcagctctgtgggggctctgctactgctggcgctcatcacagccacactgtacaagcttggcttctt

SEQ ID NO: 457148 - DNA, 120 bp, Artificial Sequence
  ENSG00000156886_28 (sequence is synthesized)
caaacgccactacaaggaaatgctggaggacaagcctgaagacactgccacattcagtggggacgatttcagctgtgtggccccaaatgtgcctttgtcctaataatccactttcctgtt

SEQ ID NO: 457149 - DNA, 120 bp, Artificial Sequence
  ENSG00000156886_29 (sequence is synthesized)
tatctctaccactgtgggctggacttgcttgcaaccataaatcaacttacatggaaacaacttctgcatagatctgcactggcctaagcaacctaccaggtgctaagcaccttctcggag

SEQ ID NO: 457150 - DNA, 120 bp, Artificial Sequence
  ENSG00000156886_30 (sequence is synthesized)
agatagagattgtaatgtttttacatatctgtccatctttttcagcaatgacccactttttacagaagcaggcatggtgccagcataaattttcatatgcttaagaattgtcacatgaaa

SEQ ID NO: 457151 - DNA, 120 bp, Artificial Sequence
  ENSG00000156886_31 (sequence is synthesized)
tgaggatgtttatagcacactttccttgcgtggaagagctataacccagggacctgagtgcctctctgggaatagtcgggggaacctatttgtgggcattgaaaaagttttttcactttc

SEQ ID NO: 457152 - DNA, 120 bp, Artificial Sequence
  ENSG00000156886_32 (sequence is synthesized)
ggcagagaaggctggcatcatccgctacgctatcggggtgcgcctcttcttcacccctgccccaggctcagcctgcatctccttcaggtgcagtgctgctgggctcatcctcctcggctg

SEQ ID NO: 457153 - DNA, 120 bp, Artificial Sequence
  ENSG00000156886_33 (sequence is synthesized)
tgggtagagcctgccctcaatccatagctcttggataccaactctgcacccaccctgggctgggggctgggagccagacataaacaagagcagaccccatcctcaatcgccagggagagg

SEQ ID NO: 457154 - DNA, 120 bp, Artificial Sequence
  ENSG00000156886_34 (sequence is synthesized)
tcggctgggtccgcgaggtgtgtgggggcagcggcagagcccctgccccagactcaggcaggacctggcatgtctgtgcccatctgcaagccagggcacccccgaagctctgagcctccc

SEQ ID NO: 457155 - DNA, 120 bp, Artificial Sequence
  ENSG00000156920_0 (sequence is synthesized)
aggctgtgtgaccccacgttggggacaggtcacaaaacctaagccttgtgcctactggaaagaagaagcagtggagtccttgacagaagcagtggtgctggaacctggtgctaggcgctg

SEQ ID NO: 457156 - DNA, 120 bp, Artificial Sequence
  ENSG00000156920_1 (sequence is synthesized)
ggccaagcactttacatactgtgtgttatgtaatcttcacagcaatatgagacttagacaatgaaagaacacatcatatatcagaagctttatggattgattctcatgtcgagttttatc

SEQ ID NO: 457157 - DNA, 120 bp, Artificial Sequence
  ENSG00000156920_2 (sequence is synthesized)
tttctctcagatacactttcactaaaaggaaaaaagctggatttttttggaagaggtgacacatatgtaagcctgatagataccattcctgaactcagccgattcacagcatgcattgat

SEQ ID NO: 457158 - DNA, 120 bp, Artificial Sequence
  ENSG00000156920_3 (sequence is synthesized)
ctggtattcatggatgacaactcaaggtattggatggccttctcttatattactaataacgccctcctgggcagagaagacatagaccttggacttgcaggagaccatcagcagctaata

SEQ ID NO: 457159 - DNA, 120 bp, Artificial Sequence
  ENSG00000156920_4 (sequence is synthesized)
ctatacagattgggaaagaccttttctatccgtcaccacctggcttcatttcaatggcatacaatatgcttgatatgggatggtgtgaagggcaaattagaactcttcctgaataaagaa

SEQ ID NO: 457160 - DNA, 120 bp, Artificial Sequence
  ENSG00000156920_5 (sequence is synthesized)
aggatactggaagtaacggatcaaccacacaacctgacacctcatgggactctgttcctagggcactttctcaagaatgagagcagcgaggttaaaagcatgatgcgtagctttcctggc

SEQ ID NO: 457161 - DNA, 120 bp, Artificial Sequence
  ENSG00000156920_6 (sequence is synthesized)
agcttgtactactttcaactctgggaccacatcctggaaaacgaagagtttatgaagtgtttagatggaaatatagttagttgggaagaagacgtctggcttgtcaacaagatcatccca

SEQ ID NO: 457162 - DNA, 120 bp, Artificial Sequence
  ENSG00000156920_7 (sequence is synthesized)
actgttgacaggacactgcgctgctttgttcctgaaaatatgacaattcaagaaaaaagtacaactgtttcacaacagatagatatgaccactccatcccaaattactggagtaaaacca

SEQ ID NO: 457163 - DNA, 120 bp, Artificial Sequence
  ENSG00000156920_8 (sequence is synthesized)
caaaatactgcacattcctctacactattgtctcaaagcatacctatatttgcaactgattacacaaccatatcatattccaatacaacatctccacctctggaaacaatgactgcacaa

SEQ ID NO: 457164 - DNA, 120 bp, Artificial Sequence
  ENSG00000156920_9 (sequence is synthesized)
aaaatcttaaagacactggtagatgagacagctacatttgcagtggatgttttatcaacttcatcagccatctctctgcctacccagagtatatccatagacaatactaccaattccatg

SEQ ID NO: 457165 - DNA, 120 bp, Artificial Sequence
  ENSG00000156920_10 (sequence is synthesized)
aaaaaaacgaaatctccatcttcagaaagcacaaagacaacaaaaatggttgaagccatggctactgaaatctttcaaccacctacaccttctaatttcctatccacatccagatttacc

SEQ ID NO: 457166 - DNA, 120 bp, Artificial Sequence
  ENSG00000156920_11 (sequence is synthesized)
aagaattcagttgtatctacaacttcagcaattaaatctcagtcggctgttacgaagacaacatctttattttcaactattgagtcaacatctatgtctacaacaccttgtctcaaacaa

SEQ ID NO: 457167 - DNA, 120 bp, Artificial Sequence
  ENSG00000156920_12 (sequence is synthesized)
aaatccacaaatactggggcactccctatctccacagctggccaggagttcattgaatctacagctgccggaactgtaccttggtttacagtggaaaagacttcacctgcatctactcat

SEQ ID NO: 457168 - DNA, 120 bp, Artificial Sequence
  ENSG00000156920_13 (sequence is synthesized)
gttgggactgcatcatcattcccacctgagcctgtgctcatctccacagctgctccagtagattctgtatttcctagaaaccagacagcatttccattggcaacaactgatatgaaaata

SEQ ID NO: 457169 - DNA, 120 bp, Artificial Sequence
  ENSG00000156920_14 (sequence is synthesized)
gcatttacagtccattcattgactctcccaactaggcttattgagaccacacctgccccaaggacagctgaaacagaattgacatctacaaattttcaggatgtctctttacccagagtg

SEQ ID NO: 457170 - DNA, 120 bp, Artificial Sequence
  ENSG00000156920_15 (sequence is synthesized)
gaagatgccatgtctacttccatgtcgaaagagacctcctctaagaccttttctttcttaacatccttttcatttactgggactgagagtgtacagacagttattgatgctgaagctaca

SEQ ID NO: 457171 - DNA, 120 bp, Artificial Sequence
  ENSG00000156920_16 (sequence is synthesized)
cgtacagccttaactcctgaaatcacacttgcatctacagtggctgaaactatgctttcctccacaatcacaggacgagtttacacccagaatacacctacagctgatggacacttgctt

SEQ ID NO: 457172 - DNA, 120 bp, Artificial Sequence
  ENSG00000156920_17 (sequence is synthesized)
actttgatgtccactagatcagcttccacatccaaggcacctgagtcaggtcccacatccacaactgatgaagctgcccatctgttctccagcaatgagaccatttggacttctaggcca

SEQ ID NO: 457173 - DNA, 120 bp, Artificial Sequence
  ENSG00000156920_18 (sequence is synthesized)
gaccaggccctgctggcatctatgaacacaaccaccatactcacatttgtgcctaatgaaaattttacatcagcatttcatgagaatactacttatacagaatatttatccgcaactacc

SEQ ID NO: 457174 - DNA, 120 bp, Artificial Sequence
  ENSG00000156920_19 (sequence is synthesized)
aatatcaccccactgaaagcatctccagagggcaaaggtaccactgccaatgatgctactacagccagatatacaacagctgtatccaaattgacatcaccatggtttgctaatttctcc

SEQ ID NO: 457175 - DNA, 120 bp, Artificial Sequence
  ENSG00000156920_20 (sequence is synthesized)
atagtttctggaaccacatccataaccaatatgcctgaatttaaacttaccactttactactaaaaacaatacctatgtctacaaaacctgcaaatgaacttcctttgacaccaagggag

SEQ ID NO: 457176 - DNA, 120 bp, Artificial Sequence
  ENSG00000156920_21 (sequence is synthesized)
actgttgttccatcagtagatataatatctactcttgcttgcattcaaccaaatttttctactgaggaaagtgcttctgagaccacacaaacagaaataaatggtgcaattgtatttgga

SEQ ID NO: 457177 - DNA, 120 bp, Artificial Sequence
  ENSG00000156920_22 (sequence is synthesized)
ggtacaacgacccctgtaccaaagtcagcaacaacacaaagattaaatgccactgtgacaagaaaagaagcaacttcccattatcttatgagaaaatcaactatagcagcagtggctgag

SEQ ID NO: 457178 - DNA, 120 bp, Artificial Sequence
  ENSG00000156920_23 (sequence is synthesized)
gtttctccattttcaacaatgctggaagtgacagacgaatcagcacaaagggtgacagcttctgtcactgtttcctcttttcctgatatagaaaagctaagtaccccattggataataaa

SEQ ID NO: 457179 - DNA, 120 bp, Artificial Sequence
  ENSG00000156920_24 (sequence is synthesized)
actgcaacaactgaggtgagagaaagttggcttttgacaaaattggtgaaaaccacacctaggagttcatacaatgaaatgacagaaatgtttaattttaaccacacctatgtagcacat

SEQ ID NO: 457180 - DNA, 120 bp, Artificial Sequence
  ENSG00000156920_25 (sequence is synthesized)
tggacttcagagacatctgagggaatttcagctggatctcccacttctgggagcacacatatattcggtgaacccctgggtgcttctaccacaaggatatcagaaaccagtttctccact

SEQ ID NO: 457181 - DNA, 120 bp, Artificial Sequence
  ENSG00000156920_26 (sequence is synthesized)
acccctacagacaggacagctacgtccttgtctgatggtatcttacctccacagcctacagctgctcattcctcagcaacccctgtgcctgttactcatatgttctcattgccagttaat

SEQ ID NO: 457182 - DNA, 120 bp, Artificial Sequence
  ENSG00000156920_27 (sequence is synthesized)
ggcagttctgtggtggctgaggagactgaggttaccatgtctgagccttctacactggccagggctttttctacatctgtgctctcagatgtctcaaatctatcctcaactacaatgacc

SEQ ID NO: 457183 - DNA, 120 bp, Artificial Sequence
  ENSG00000156920_28 (sequence is synthesized)
acagcattggtaccacctttggatcagactgcttccacaaccattgttattgtgcctacccatggagacttgattcgtaccacttcagaggccacggtaatctctgtcaggaagacatcc

SEQ ID NO: 457184 - DNA, 120 bp, Artificial Sequence
  ENSG00000156920_29 (sequence is synthesized)
atggcagttccttctctgacagaaacaccatttcattcactgagactctccactcctgtgacagctaaggctgagaccacccttttctctacctcagttgatacagtaaccccatctaca

SEQ ID NO: 457185 - DNA, 120 bp, Artificial Sequence
  ENSG00000156920_30 (sequence is synthesized)
cacactcttgtctgctcaaaacctccccctgacaacattcctcctgcgtcctccactcatgtgatctcaactacgtctacaccagaagcaactcaaccaatatctcaagtagaggagact

SEQ ID NO: 457186 - DNA, 120 bp, Artificial Sequence
  ENSG00000156920_31 (sequence is synthesized)
tctacctatgctctcagcttcccatatactttcagtggtggtggagttgttgccagcttggctactggcaccacagagacctctgttgttgatgagaccacaccctcacacatctctgcc

SEQ ID NO: 457187 - DNA, 120 bp, Artificial Sequence
  ENSG00000156920_32 (sequence is synthesized)
aataagttgactacttcagtaaacagtcacatttcttcatctgccacatatcgtgtacacacaccagtgtccatccagttggtgactagcacctctgtcttatcttccgacaaagaccag

SEQ ID NO: 457188 - DNA, 120 bp, Artificial Sequence
  ENSG00000156920_33 (sequence is synthesized)
atgaccatatccctgggaaaaacccctagaactatggaggtgacagaaatgtccccatcaaagaattcttttatttcatactcccggggtactccatctttggaaatgacagatacagga

SEQ ID NO: 457189 - DNA, 120 bp, Artificial Sequence
  ENSG00000156920_34 (sequence is synthesized)
tttcctgagaccacaaaaatttccagtcaccaaacacattcgccttcagagattccacttgggactccctctgatggaaatttggcttcatctcccacttctggaagcacacagattaca

SEQ ID NO: 457190 - DNA, 120 bp, Artificial Sequence
  ENSG00000156920_35 (sequence is synthesized)
ccaaccttgacctcaagtaacacagtaggtgttcacattccagaaatgtctaccagtcttgggaaaacagctctcccctcacaagctctgacaatcaccacttttttgtgtcctgaaaag

SEQ ID NO: 457191 - DNA, 120 bp, Artificial Sequence
  ENSG00000156920_36 (sequence is synthesized)
gaaagcacgagtgcccttccagcatatactcccaggactgtggaaatgatagtaaactccacctatgtgactcactctgtctcatatggccaggatacttcatttgtagataccacaact

SEQ ID NO: 457192 - DNA, 120 bp, Artificial Sequence
  ENSG00000156920_37 (sequence is synthesized)
tccagctcaacaaggatatcaaatcctatggacatcaatacaactttttcacacttgcattcacttaggacacaacctgaggtgacttcagttgcctctttcatttctgaaagcacacag

SEQ ID NO: 457193 - DNA, 120 bp, Artificial Sequence
  ENSG00000156920_38 (sequence is synthesized)
actttccctgagtccttgtctctttccacagctggactatataatgacggttttacagttctctccgacaggatcactacagccttttctgttccaaatgtacctacaatgcttcctaga

SEQ ID NO: 457194 - DNA, 120 bp, Artificial Sequence
  ENSG00000156920_39 (sequence is synthesized)
gaatcctctatggcaacgtccactcctatttaccagatgtcctcattgccagttaatgtaactgccttcacctccaaaaaagtttctgacactcccccaatagtgataactaaatcttct

SEQ ID NO: 457195 - DNA, 120 bp, Artificial Sequence
  ENSG00000156920_40 (sequence is synthesized)
ctgcaacagtctcttctgacacttccacaagagttgggttattctctactttattgtcttcagttacccccaggactactatgaccatgcaaacatctacattggatgtcacacctgtga

SEQ ID NO: 457196 - DNA, 120 bp, Artificial Sequence
  ENSG00000156920_41 (sequence is synthesized)
tatatgctggggctacttcaaaaaacaaaatggtttcctctgctttcactacagaaatgatagaggcaccttccaggatcacacctacgacctttctctctccaacagagccaactttgc

SEQ ID NO: 457197 - DNA, 120 bp, Artificial Sequence
  ENSG00000156920_42 (sequence is synthesized)
cctttgtaaaaaccgttcccaccaccattatggctgggatagtgactccatttgtaggcaccactgccttctctccactcagttctaagagcactggagctatttcctccattccaaaga

SEQ ID NO: 457198 - DNA, 120 bp, Artificial Sequence
  ENSG00000156920_43 (sequence is synthesized)
ccacattttcaccatttctatcagcaactcaacagtcatcacaagcagatgaggctacaactttgggcatattatctgggattactaacaggtccctatctactgtgaacagtggtacag

SEQ ID NO: 457199 - DNA, 120 bp, Artificial Sequence
  ENSG00000156920_44 (sequence is synthesized)
gggtagctctcacagatacttattccagaatcactgttcctgaaaatatgctttcacctactcatgcagatagtctccatacttccttcaatattcaggtttccccatctctgactagct

SEQ ID NO: 457200 - DNA, 120 bp, Artificial Sequence
  ENSG00000156920_45 (sequence is synthesized)
ttaagagtgcttctggacccacaaaaaatgttaaaacaaccaccaattgcttttcttctaatactagaaagatgacttccttgttagaaaagacttccttaacaaactatgccacatctt

SEQ ID NO: 457201 - DNA, 120 bp, Artificial Sequence
  ENSG00000156920_46 (sequence is synthesized)
tgaatacccctgtttcataccctccatggaccccatccagtgcaactctaccctctttgacatcatttgtttattcacctcatagtactgaagctgagatctctactccaaagacctctc

SEQ ID NO: 457202 - DNA, 120 bp, Artificial Sequence
  ENSG00000156920_47 (sequence is synthesized)
ctcctcccacatcccaaatggttgaatttccagttctgggaacaagaatgacatctagtaatacccaacctctgcttatgacttcctggaacatacccacagctgaaggttctcagtttc

SEQ ID NO: 457203 - DNA, 120 bp, Artificial Sequence
  ENSG00000156920_48 (sequence is synthesized)
caatttccaccactattaatgtacctacatccaatgagatggaaacagagactctacaccttgttcctgggcctttgtcaacattcacagcctctcagactggtctagtatctaaagatg

SEQ ID NO: 457204 - DNA, 120 bp, Artificial Sequence
  ENSG00000156920_49 (sequence is synthesized)
tcatggcaatgtcatcaattcctatgtcaggaattcttcctaaccatgggctttctgagaacccttcattatcaacatctttaagagctatcacttccacattggctgacgttaagcaca

SEQ ID NO: 457205 - DNA, 120 bp, Artificial Sequence
  ENSG00000156920_50 (sequence is synthesized)
catttgagaaaatgaccacatctgtaactcctgggaccacactcccatcaattctttctggtgccacttcaggatctgtaatttcaaagtcacccattctgacatggctcttatctagtc

SEQ ID NO: 457206 - DNA, 120 bp, Artificial Sequence
  ENSG00000156920_51 (sequence is synthesized)
tcccttctggctcccctccggcaactgtatctaatgcccctcatgttatgacttcctctacagtagaggtgtcaaaatcaacatttctgacatctgacatgatatcagcgcacccattca

SEQ ID NO: 457207 - DNA, 120 bp, Artificial Sequence
  ENSG00000156920_52 (sequence is synthesized)
ctaacttgacaacactaccctctgctactatgagcaccatactcacccgaaccattcctacacctacactgggtggtatcactactggcttcccaacttctctccctatgtctataaatg

SEQ ID NO: 457208 - DNA, 120 bp, Artificial Sequence
  ENSG00000156920_53 (sequence is synthesized)
tcacagatgacattgtgtacatttccacacaccctgaggcatcctccagaaccacaataactgccaaccccaggactgtgtctcatccttcatccttcagcagaaagactatgtcacctt

SEQ ID NO: 457209 - DNA, 120 bp, Artificial Sequence
  ENSG00000156920_54 (sequence is synthesized)
ctacaactgaccacactctatctgttggtgccatgcctctgcctagctctacaataacatcttcatggaacagaattccaactgcatcatcaccctctactttaattattcctaagccca

SEQ ID NO: 457210 - DNA, 120 bp, Artificial Sequence
  ENSG00000156920_55 (sequence is synthesized)
cactggactcccttctaaatataatgactactacatccactgttcctggagcctcatttccactcatatccactggggtgacatatccttttacagcaactgtgtcttcaccaatatcgt

SEQ ID NO: 457211 - DNA, 120 bp, Artificial Sequence
  ENSG00000156920_56 (sequence is synthesized)
ccttttttgaaacaacttggctggactccacaccttcctttctatctacggaagcatcgacttcgcctactgccaccaagtccacagtttccttctacaatgttgaaatgagcttctctg

SEQ ID NO: 457212 - DNA, 120 bp, Artificial Sequence
  ENSG00000156920_57 (sequence is synthesized)
tctttgttgaagagccaaggatccctattaccagtgttataaatgaatttacggaaaattcgttgaattctatatttcagaacagtgaattttctcttgctactctggaaacccaaatta

SEQ ID NO: 457213 - DNA, 120 bp, Artificial Sequence
  ENSG00000156920_58 (sequence is synthesized)
aaagcagggacatttcagaggaagagatggtcatggatcgagctattttggaacagagagaaggacaagaaatggctacaatttcctatgtaccatacagttgtgtttgtcaggtcatca

SEQ ID NO: 457214 - DNA, 120 bp, Artificial Sequence
  ENSG00000156920_59 (sequence is synthesized)
taaaagccagctcttccttagcatcctctgaattgatgagaaaaatcaaaagtaaaatacatggcaacttcacacatggaaacttcacacaagatcaattgacgttattagtaaactgtg

SEQ ID NO: 457215 - DNA, 120 bp, Artificial Sequence
  ENSG00000156920_60 (sequence is synthesized)
aacacgttgcagtgaaaaaactagagcctggaaattgcaaagctgatgaaacagcctctaaatacaaagggacctataagtggctattaaccaaccctacggagacagcccaaaccagat

SEQ ID NO: 457216 - DNA, 120 bp, Artificial Sequence
  ENSG00000156920_61 (sequence is synthesized)
gcataaaaaatgaggatggaaatgccacaagattctgttcaatcagcatcaacacgggcaaatctcagtgggaaaagccaaagtttaaacaatgcaaattgcttcaagaacttcctgaca

SEQ ID NO: 457217 - DNA, 120 bp, Artificial Sequence
  ENSG00000156920_62 (sequence is synthesized)
agattgtggatcttgctaatattaccataagtgatgagaatgctgaggatgttgcagagcatattttaaatttgataaatgaatccccagccctgggtaaagaagagacaaagattattg

SEQ ID NO: 457218 - DNA, 120 bp, Artificial Sequence
  ENSG00000156920_63 (sequence is synthesized)
tttctaaaatatcagatatttcacaatgtgatgagataagtatgaacctaactcatgttatgttacaaataatcaacgttgttttggaaaagcaaaacaattccgcctctgatctgcatg

SEQ ID NO: 457219 - DNA, 120 bp, Artificial Sequence
  ENSG00000156920_64 (sequence is synthesized)
aaataagcaatgaaattctgaggataattgagcgtactggtcacaagatggagttttctgggcagatagcaaatctgacggtggccgggctggctttggctgtgctgcggggggaccaca

SEQ ID NO: 457220 - DNA, 120 bp, Artificial Sequence
  ENSG00000156920_65 (sequence is synthesized)
cgtttgatggcatggctttcagcattcactcctatgaagaaggcacagaccctgagattttcctaggcaatgtccctgtgggagggattttggcttccatatatttgcctaaatcactga

SEQ ID NO: 457221 - DNA, 120 bp, Artificial Sequence
  ENSG00000156920_66 (sequence is synthesized)
cggagagaattcctcttagcaacttacaaacgatcttgtttaatttctttggccaaacttcactctttaagaccaaaaatgtcactaaagcattaaccacctatgttgtgagtgccagca

SEQ ID NO: 457222 - DNA, 120 bp, Artificial Sequence
  ENSG00000156920_67 (sequence is synthesized)
tttcagatgatatgttcattcaaaacttagctgacccagtggttatcactctgcagcatattggaggaaaccagaattatggtcaagttcactgtgccttttgggattttgagaataata

SEQ ID NO: 457223 - DNA, 120 bp, Artificial Sequence
  ENSG00000156920_68 (sequence is synthesized)
atgggctgggtggatggaattcgtcaggctgtaaagtaaaggaaacaaatgtaaattacacaatctgtcagtgtgaccacctcacccattttggagtcttaatggatttatccaggtcta

SEQ ID NO: 457224 - DNA, 120 bp, Artificial Sequence
  ENSG00000156920_69 (sequence is synthesized)
cagtggattcagtgaatgaacagatattagcgcttataacatacaccggatgtggaatctcctccatttttctgggagttgcagtggtgacatacatagcttttcacaaacttcgaaaag

SEQ ID NO: 457225 - DNA, 120 bp, Artificial Sequence
  ENSG00000156920_70 (sequence is synthesized)
attatcctgccaaaattctgatcaacctgtgcacagcactactgatgctaaacctggtatttttgatcaattcttggttgtcatcatttcagaaagtgggagtttgtatcacagctgcag

SEQ ID NO: 457226 - DNA, 120 bp, Artificial Sequence
  ENSG00000156920_71 (sequence is synthesized)
tggcacttcattacttcctgcttgtttcttttacttggatgggcctggaggcagtccacatgtatttggctctagtcaaagtcttcaacatatacattccaaattatatccttaaatttt

SEQ ID NO: 457227 - DNA, 120 bp, Artificial Sequence
  ENSG00000156920_72 (sequence is synthesized)
gtctagttggttggggaatcccggctatcatggtggcaatcacagtcagtgtgaaaaaagatctgtatggaactctgagcccaacaactccgttttgttggattaaagatgattctatct

SEQ ID NO: 457228 - DNA, 120 bp, Artificial Sequence
  ENSG00000156920_73 (sequence is synthesized)
tttacatctcagtggtggcttatttttgcctcatatttctcatgaatctctccatgttctgcactgttcttgttcaactgaattctgtgaaatcccaaatccagaagactcggcggaaga

SEQ ID NO: 457229 - DNA, 120 bp, Artificial Sequence
  ENSG00000156920_74 (sequence is synthesized)
tgatcctgcatgacctcaaaggcacaatgagcctgacattcttacttggcctcacctgggggtttgcattttttgcttggggacccatgaggaactttttcttgtatttgtttgccattt

SEQ ID NO: 457230 - DNA, 120 bp, Artificial Sequence
  ENSG00000156920_75 (sequence is synthesized)
ttaacactttgcaaggattcttcatttttgtgtttcactgtgtgatgaaggagagtgtgcgggagcagtggcagatacacctctgctgtgggtggttgcgattggataactcttctgatg

SEQ ID NO: 457231 - DNA, 120 bp, Artificial Sequence
  ENSG00000156920_76 (sequence is synthesized)
ggagcagccggtgtcagataaaggttggatataaacaggagggactaaagaaaatctttgagcacaaactgttgacgccatctctcaagtcaactgcaactagctccactttcaaatctt

SEQ ID NO: 457232 - DNA, 120 bp, Artificial Sequence
  ENSG00000156920_77 (sequence is synthesized)
taggctctgcacaaggcacaccttcagaaataagctttccaaatgatgactttgacaaagatccttactgttcctctccttgatttgtgaagttgtgcctaattatgtaaaaagaatata

SEQ ID NO: 457233 - DNA, 77 bp, Artificial Sequence
  ENSG00000156920_78 (sequence is synthesized)
tgatttgtgaagttgtgcctaattatgtaaaaagaatataatacctgtggaaataaaaatgaattccaagtgtatac

SEQ ID NO: 457234 - DNA, 120 bp, Artificial Sequence
  ENSG00000156920_79 (sequence is synthesized)
aaaaacaaaaataaaaagcaaaacaaaaatcccaaaatgaattccattcacaaacagaatttttcaataaatcccagtagagatacttgcctcctcccaacccctgattggggaaaaggt

SEQ ID NO: 457235 - DNA, 120 bp, Artificial Sequence
  ENSG00000156920_80 (sequence is synthesized)
cccctgattggggaaaaggttgaatttgtgaaacaatctgctccaaccttctattttaattattattttgtaaggggaagaataacatttgataaatattaaagtcagaataattctcct

SEQ ID NO: 457236 - DNA, 120 bp, Artificial Sequence
  ENSG00000156920_81 (sequence is synthesized)
cagaaaagaaggtgactgaggcatggacagcagaaaatgagtctcctgtttagtacttctttcatttcacatcaaacataggaatttagagacaagatctggtcatttgagggtgggaag

SEQ ID NO: 457237 - DNA, 120 bp, Artificial Sequence
  ENSG00000156920_82 (sequence is synthesized)
ttaaaagagtccagttctcagacttagacaatgaaagaacacatcatatatcagaagctttatggattgattctcatgtcgagttttatctttctctcagttgttcctgaaaatatgaca

SEQ ID NO: 457238 - DNA, 120 bp, Artificial Sequence
  ENSG00000156925_0 (sequence is synthesized)
atcagtccaaggacattactctggaggcgaagaggctgggactcgcgcggcgagcggcaagcggcgagtaacgagcctgcctactgcccgctgcccgcctgcccggccgctagccggctc

SEQ ID NO: 457239 - DNA, 120 bp, Artificial Sequence
  ENSG00000156925_1 (sequence is synthesized)
cgccacttggcgcagcccagcccggaggccggtacccagggagcctcctggccccgcggttctgtgcactcggggagaggaggggtgcccgggacaggattggcaaactccgccctccac

SEQ ID NO: 457240 - DNA, 120 bp, Artificial Sequence
  ENSG00000156925_2 (sequence is synthesized)
ttactattttgcttatttttctttgtgcgcgcctgttagtttgttaaaccagatctagtccgagtcttttctcctcccttctcctccctcctcctccccccgccaacaccccctccctgc

SEQ ID NO: 457241 - DNA, 120 bp, Artificial Sequence
  ENSG00000156925_3 (sequence is synthesized)
tctttcttcccctcctccctcctatccctctgcaggagactcttgcagtgacggaaagttgcagcccctggtagcgccttgggggtctccccgcagtgtccaaccgccgccacccctttc

SEQ ID NO: 457242 - DNA, 120 bp, Artificial Sequence
  ENSG00000156925_4 (sequence is synthesized)
cgactacggcacttcggagatctcctccttcgccggtaccctctctcacttcggccggatcgcctgtgcccagaacgtcccacccatgacgatgctcctggacggaggcccgcagttccc

SEQ ID NO: 457243 - DNA, 120 bp, Artificial Sequence
  ENSG00000156925_5 (sequence is synthesized)
tgggctgggagtgggcagcttcggcgcgccgcgccaccacgagatgcccaaccgtgagccggcaggcatggggctgaatcccttcggggactcaacccacgccgccgccgccgccgccgc

SEQ ID NO: 457244 - DNA, 120 bp, Artificial Sequence
  ENSG00000156925_6 (sequence is synthesized)
cgccgctgccttcaagctgagccctgccgcggcgcacgatctatcttcaggccagagctcggctttcacgccgcagggttcgggctacgccaacgccctgggccaccatcaccaccacca

SEQ ID NO: 457245 - DNA, 120 bp, Artificial Sequence
  ENSG00000156925_7 (sequence is synthesized)
tcaccatcatcaccacaccagccaggtgcccagctacggtggcgctgcctctgccgccttcaactcaacgcgcgagtttctgttccgccagcgcagctccgggctcagtgaggcggcctc

SEQ ID NO: 457246 - DNA, 120 bp, Artificial Sequence
  ENSG00000156925_8 (sequence is synthesized)
gggtggcgggcagcacgggctcttcgccggctcggcgagcagcctgcatgctccagctggcatccccgagccccctagctacttgctgtttcccgggctgcatgagcagggcgctgggca

SEQ ID NO: 457247 - DNA, 120 bp, Artificial Sequence
  ENSG00000156925_9 (sequence is synthesized)
cccgtcgcccacagggcacgtggacaacaaccaggtccacctggggctgcgtggggagctgttcggccgtgctgacccataccgcccagtggccagcccgcgcacggacccctacgcggc

SEQ ID NO: 457248 - DNA, 120 bp, Artificial Sequence
  ENSG00000156925_10 (sequence is synthesized)
cggcgctcagtttcctaactacagccccatgaacatgaacatgggagtgaacgtggcggcccaccacgggcccggcgccttcttccgttatatgcggcagcctatcaagcaggagctgtc

SEQ ID NO: 457249 - DNA, 120 bp, Artificial Sequence
  ENSG00000156925_11 (sequence is synthesized)
gtgcaagtggatcgacgaggctcagctgagccggcccaagaagagctgcgaccggaccttcagcaccatgcatgagctggtgacacatgtcaccatggagcatgtggggggcccggagca

SEQ ID NO: 457250 - DNA, 120 bp, Artificial Sequence
  ENSG00000156925_12 (sequence is synthesized)
gaacaaccacgtctgctactgggaggagtgcccccgggagggcaagtctttcaaggcgaagtacaaactggtcaaccacatccgagtgcacacgggcgagaagcccttcccatgcccctt

SEQ ID NO: 457251 - DNA, 120 bp, Artificial Sequence
  ENSG00000156925_13 (sequence is synthesized)
cccgggctgcgggaagatctttgcccgttctgagaacctcaagatccacaagaggacccacacaggtgagaaacctttcaaatgtgaatttgaaggctgtgacagacgctttgccaacag

SEQ ID NO: 457252 - DNA, 120 bp, Artificial Sequence
  ENSG00000156925_14 (sequence is synthesized)
cagcgaccgtaagaagcacatgcatgtgcatacctcggacaagccctatatctgcaaagtgtgcgacaagtcctacacgcacccgagctccctgcgcaaacacatgaaggttcatgaatc

SEQ ID NO: 457253 - DNA, 120 bp, Artificial Sequence
  ENSG00000156925_15 (sequence is synthesized)
tcaagggtcagattcctcccctgctgccagttcaggctatgaatcttccactccacccgctatagcttctgcaaacagtaaagataccactaaaaccccttctgcagttcaaactagcac

SEQ ID NO: 457254 - DNA, 120 bp, Artificial Sequence
  ENSG00000156925_16 (sequence is synthesized)
acgtctgaggacaaacacaaaccctgttaattatagaatggaccaaatacatttttaaaagaaaactgagaccaatcagatggaaatggagttttaaggcaagaggccatatatagggct

SEQ ID NO: 457255 - DNA, 120 bp, Artificial Sequence
  ENSG00000156925_17 (sequence is synthesized)
acatcttgttaattgcaattgtccaggaaggttttgggcaagatccaaaagtagccatgcccttttctcaggatagaaaatatgttttggcatttgaagcattttttacaaaatctttac

SEQ ID NO: 457256 - DNA, 120 bp, Artificial Sequence
  ENSG00000156925_18 (sequence is synthesized)
actactttttcttccccttcctcttgctctctgcacaccccattcttaaactcctccaattcattttaacacttgtcctgtttcttgagaggaagttatagaaggcttgttggtggtggt

SEQ ID NO: 457257 - DNA, 120 bp, Artificial Sequence
  ENSG00000156925_19 (sequence is synthesized)
gatgttaaactgatggaaattctttttcgccttagtggtgattgtttaaactctcacagtcttaaaccgtgccaaagtcctgttatgtcttgaacttttcctcaaagcattacacttgtg

SEQ ID NO: 457258 - DNA, 120 bp, Artificial Sequence
  ENSG00000156925_20 (sequence is synthesized)
aatgtatttttgtctaatagggtcgaaactgttgttcagtattttttcaggctgaggatgtgatgttactctacacattgtgacgtttagtatacagttgccttttgtaataactttttt

SEQ ID NO: 457259 - DNA, 120 bp, Artificial Sequence
  ENSG00000156925_21 (sequence is synthesized)
tttgtaaatacatatccattgatgccatatttatcgtttgtaatttaattattgctacaagtgccgggaactgaacaatatttatggataaatgttttctaacaaattctgtacagcttt

SEQ ID NO: 457260 - DNA, 120 bp, Artificial Sequence
  ENSG00000156925_22 (sequence is synthesized)
tgattataactgctttagcattaaaaattgttttgaaagaagaacacaatttacaattttggaaccactgactcctttctcttgttttgtaacagccttcttctacaaagaggagatgtg

SEQ ID NO: 457261 - DNA, 120 bp, Artificial Sequence
  ENSG00000156925_23 (sequence is synthesized)
agcaaattaaatcttgtttgttggtatttataactcactcagatcccttttttaattgttaaattatttttctattacagtataaattccttacagtgtcagtttccatctgggaagact

SEQ ID NO: 457262 - DNA, 120 bp, Artificial Sequence
  ENSG00000156925_24 (sequence is synthesized)
ctcctttctttatctctatctcagatggttgtttaactgcgagtttaaatgtgtttgtcctggattttcggcatgcaaatcaaatattactgatcaattcagttagtggccatgacatct

SEQ ID NO: 457263 - DNA, 120 bp, Artificial Sequence
  ENSG00000156925_25 (sequence is synthesized)
caatcttgtacttcaaagactgagaagctggatttaatcatccctgccctacatatataaacataaggtaacctactgaattttatgtcccttagttctttattaccttacataaaaatg

SEQ ID NO: 457264 - DNA, 120 bp, Artificial Sequence
  ENSG00000156925_26 (sequence is synthesized)
aaaattgcggcaggatgcatgtctgtctgttctatctagagatcacccatatacctatatatgtttgtatctatgacttatctaatctgcctatcaatctatctagtagctatctatata

SEQ ID NO: 457265 - DNA, 120 bp, Artificial Sequence
  ENSG00000156925_27 (sequence is synthesized)
ttttcaaaagatagcttatgtctaaaacagtggtgatgagtaaggccagttgagcattgcttacttatggttaaagtgcttcttaaaagaaccatagtccatttacaattttggaaggca

SEQ ID NO: 457266 - DNA, 120 bp, Artificial Sequence
  ENSG00000156925_28 (sequence is synthesized)
aaggctgatttgtttgctgtatatagttcaattcataattatcgcaattatccataacatttatatagcggtgtaataactgcagcagttctgaaatgatgctatgggaaaaaaattgca

SEQ ID NO: 457267 - DNA, 120 bp, Artificial Sequence
  ENSG00000156925_29 (sequence is synthesized)
aaatatgtatttttaaagttcatgatttgtaggcaaagatgttaagagcattgtttccattaaaatcaataacaatgaaaaacggttgtttgctttgtgataaaatgttaacaatccatt

SEQ ID NO: 457268 - DNA, 120 bp, Artificial Sequence
  ENSG00000156925_30 (sequence is synthesized)
taatcttcagtgaagcaactcatttggacaaacagttcttttacagtggttatatggaaaagaaattgattgctattttggggggctggagtgggtagagtattgagaccttttttatta

SEQ ID NO: 457269 - DNA, 120 bp, Artificial Sequence
  ENSG00000156925_31 (sequence is synthesized)
gggtgctgtttgttattgagagcccaatctctgcatgaataacagaaaggtggacataaggaattgtaaagtatttagaatgtattgaataggcttaagtacctcctttaaggggcaatg

SEQ ID NO: 457270 - DNA, 120 bp, Artificial Sequence
  ENSG00000156925_32 (sequence is synthesized)
ctctaggtttttggtggcagtcaatttggtattatatatgatcattttcaattctagaattttgtttattgttctttttgaagaaataaagtcttggcacatcttatttatgttataaca

SEQ ID NO: 457271 - DNA, 120 bp, Artificial Sequence
  ENSG00000156925_33 (sequence is synthesized)
cgggaagaccgccgggagctcagtctcctgctgcttgcctctgagaaactccggcgctgaccgtattttaccccccttgggtttttgccttttgcaggtgagaaacctttcaaatgtgaa

SEQ ID NO: 457272 - DNA, 120 bp, Artificial Sequence
  ENSG00000156925_34 (sequence is synthesized)
actacctatcctaaatgcagggttaatgccgaacctactgtgcaagaaatgatttactgatgaggtttcaaagaaaaccacatcaatttggatgtctgttaccttgaagtgatcatttta

SEQ ID NO: 457273 - DNA, 120 bp, Artificial Sequence
  ENSG00000156925_35 (sequence is synthesized)
agagtagtagcttcttccctaggtataaaaagactattttcttcttttggtgtatttcatcctgtgttgagcaatcatttgtgaaatgaaaaagcaaaaaaactccccccactttaggat

SEQ ID NO: 457274 - DNA, 120 bp, Artificial Sequence
  ENSG00000156925_36 (sequence is synthesized)
ttataaatgggaagatggaggtgaagactggcctaattcataacccagtatgcattatctcatgcattgtgttgaccttggtgaaaatctttttcaaataccagcattctatatgtagaa

SEQ ID NO: 457275 - DNA, 120 bp, Artificial Sequence
  ENSG00000156925_37 (sequence is synthesized)
ctaaagtgtttaaaactagaaacatgaattgttgttttgttaattttatgtttgtgttcagaaagcaatacccaggatccctttaatttttgtttgacttaaataaaaccatttaaatta

SEQ ID NO: 457276 - DNA, 120 bp, Artificial Sequence
  ENSG00000156928_0 (sequence is synthesized)
gcaaggctgctgctatggggccgggcggccgtgtggcgcggctgctcgccccactaatgtggcgcagggcggtttcctcggtggcggggtccgcggttggagccgagcccgggcttcggc

SEQ ID NO: 457277 - DNA, 120 bp, Artificial Sequence
  ENSG00000156928_1 (sequence is synthesized)
tgctggccgtgcagcggcttcccgtaggagcagcgttctgccgggcttgccagaccccaaactttgtccgcggcctgcacagcgagcctgggctggaggagcgggcggaggggacggtca

SEQ ID NO: 457278 - DNA, 120 bp, Artificial Sequence
  ENSG00000156928_2 (sequence is synthesized)
acgagggacgcccagaatcggacgcggcagatcatactggtcccaagtttgacatcgatatgatggtttcacttctgaggcaagaaaatgcaagagacatttgtgtgatccaggttcctc

SEQ ID NO: 457279 - DNA, 120 bp, Artificial Sequence
  ENSG00000156928_3 (sequence is synthesized)
cagaaatgagatatacagattactttgtgattgttagtggaacttctacccgacacttacatgccatggccttctacgttgtgaaaatgtacaaacacctgaaatgtaaacgtgaccctc

SEQ ID NO: 457280 - DNA, 120 bp, Artificial Sequence
  ENSG00000156928_4 (sequence is synthesized)
atgttaagatagaagggaaggacactgatgactggctgtgcgtggattttggcagcatggtgattcatttgatgcttccagaaaccagagaaatctatgaattagagaaattatggaccc

SEQ ID NO: 457281 - DNA, 120 bp, Artificial Sequence
  ENSG00000156928_5 (sequence is synthesized)
tacgttcttatgatgaccagttagctcagatagcacctgagacagtacctgaagacttcattcttggaatagaagatgatacttcatctgtgactccagtggagttaaaatgtgaataaa

SEQ ID NO: 457282 - DNA, 120 bp, Artificial Sequence
  ENSG00000156928_6 (sequence is synthesized)
atattttatgcactgcgttagtcatttcagatttggattgagtcacttattggaaaatacagctcctaaagtccgtctccttggttaggctgctcttaggacaaggcttgtgtacctcat

SEQ ID NO: 457283 - DNA, 120 bp, Artificial Sequence
  ENSG00000156928_7 (sequence is synthesized)
gggcactcctgctaactggcatgcagagactgtcgataagtgagctatacctgcaaccaaaaatcagtacattctacccaaaacttatgacacgctgcctttatcctggaaatgtcatca

SEQ ID NO: 457284 - DNA, 120 bp, Artificial Sequence
  ENSG00000156928_8 (sequence is synthesized)
gaatttcctggagttagcactggctcctgtgcttgacttctctgctcagatttttattaatttaatttagcttaaatgtaaatcttaaccctgtttgtttaatggaatggcaaaaatttt

SEQ ID NO: 457285 - DNA, 120 bp, Artificial Sequence
  ENSG00000156928_9 (sequence is synthesized)
aaaaaataatataaaacatagcccactggtcttatttttatactttgaggtgataatattcttctaggaggacttctgtaacccttccagaatactccagtaacacaagaaagtaaacaa

SEQ ID NO: 457286 - DNA, 120 bp, Artificial Sequence
  ENSG00000156928_10 (sequence is synthesized)
agtgtttgttaggaaaaactctgaacgctctagttcttagttcatatgcaagagtattatcaaggttcacattaagtaccatggctggacatggtataacagaaatctgcgtagagtttg

SEQ ID NO: 457287 - DNA, 120 bp, Artificial Sequence
  ENSG00000156928_11 (sequence is synthesized)
aaaaaaaattcagaacattcccattcaattgaaaaccaaaaataaaacatactacacaacaagctgcacctaaatgatgaaaaaatttattctgcgtcaaggtatctggaaaatgaagct

SEQ ID NO: 457288 - DNA, 120 bp, Artificial Sequence
  ENSG00000156928_12 (sequence is synthesized)
gaatgatccatatatggtgagtacaaaactcaattatagaattatttcttagctagtaccagatactccaaattacaaatgcttaagtaaaagtaaaatatgatttgccatactaaaagg

SEQ ID NO: 457289 - DNA, 120 bp, Artificial Sequence
  ENSG00000156928_13 (sequence is synthesized)
ctagaagtgaaatatgacagaatttaaaccagcagatataaatgcagcacctatgtgtatatttttaaaaaatcaaatattggggaaaaaaatcaaatactgagaaaagctctggcctta

SEQ ID NO: 457290 - DNA, 120 bp, Artificial Sequence
  ENSG00000156928_14 (sequence is synthesized)
aacacatcttacctgaaatccaaccagaaagccagtccatgattttagcaattttaattcattgtatgaaaaaaaaatcatgaatgctaggagaatccagtgacaaaaagggcacttttt

SEQ ID NO: 457291 - DNA, 120 bp, Artificial Sequence
  ENSG00000156928_15 (sequence is synthesized)
tggttaaaactacaaaagaaacttgttttcagagaacattaaggaaaacactttaaatcattttcaaaatgtctaattgatcttcagaaaaacatctagtctgtatagaaattcatcttg

SEQ ID NO: 457292 - DNA, 120 bp, Artificial Sequence
  ENSG00000156928_16 (sequence is synthesized)
aaataagaatgaggcagtgattttttttttaaagggttatatatatgtcctttagatcagtgtaacatgactgtgatcatcttacaaacaaaactcaaaaaatcaattcagagagcagcg

SEQ ID NO: 457293 - DNA, 120 bp, Artificial Sequence
  ENSG00000156928_17 (sequence is synthesized)
tggccttggagaccacccacacccaacacaattgtacgtactgggctttgctgtcaaggagtgagcaaatgagttcgttatcaaaggtcatatgttttcacagtcattcaaattatatcc

SEQ ID NO: 457294 - DNA, 120 bp, Artificial Sequence
  ENSG00000156928_18 (sequence is synthesized)
caaaaacttttcttgtattctctatcttttgacttttttttcaaagaactgattgcacagtatacagaaatcctgttatactttactacttaaggtggagtctaattttttttttttaat

SEQ ID NO: 457295 - DNA, 120 bp, Artificial Sequence
  ENSG00000156928_19 (sequence is synthesized)
ttatcagtgcttaaaaatcttcaaaatagcttagtgaggctcatgacagtgctggccccatggaaatgtagccttttgttgcgtttaaacactgtcacaccatctatgactgtcccattg

SEQ ID NO: 457296 - DNA, 120 bp, Artificial Sequence
  ENSG00000156928_20 (sequence is synthesized)
gtctgaagtgtagtggcaaactaagcatcctataagacaagctaaagcttgctttttgccagtcagttgaaagtcttgcatctcttcactgatgcactttctttaggtattgatagtcag

SEQ ID NO: 457297 - DNA, 120 bp, Artificial Sequence
  ENSG00000156928_21 (sequence is synthesized)
aagcacaaagcatttattatgcattcaatcatgtagctaaacaaaaaactgaagtctcctgaagccatttaaaccagccgttccaaaatctcctgcgaccactttgttagtaccgtcaaa

SEQ ID NO: 457298 - DNA, 120 bp, Artificial Sequence
  ENSG00000156928_22 (sequence is synthesized)
aactttcccaactataaatgaaagaataaatggtagtgctgctctccagatactaggcactgctccgtatttttgaacatttgatttaactaataactgtgtcaaaagcctcaaaaaacc

SEQ ID NO: 457299 - DNA, 120 bp, Artificial Sequence
  ENSG00000156928_23 (sequence is synthesized)
ctgaaattaattttccagctttactgtcaccagccagaagtaaaaatcttaatttgcctgttagctgattgctgttaaattttaaatttattttttaaaaaacggttggacttctatcat

SEQ ID NO: 457300 - DNA, 86 bp, Artificial Sequence
  ENSG00000156928_24 (sequence is synthesized)
agatttagagggagaaatagtttccctaagttattcatcacagggcaaagtatagcaatgagaaatgagtaagaaagatccttcag

SEQ ID NO: 457301 - DNA, 120 bp, Artificial Sequence
  ENSG00000156928_25 (sequence is synthesized)
attcttacagagctggtccccacagtaccgcccctgggcgtaaactcctccatacagggagtgtagatgatgggctgacctaagaacggtttccaaatggtcctttacacctctgcctcc

SEQ ID NO: 457302 - DNA, 120 bp, Artificial Sequence
  ENSG00000156928_26 (sequence is synthesized)
caccccactctagcccaggataacagattttcctcgcgcaatttcaaatttgcaagggaatcttgaatattttctggtaatgagagagggtagattatatgtcctaatcccagcctaatc

SEQ ID NO: 457303 - DNA, 120 bp, Artificial Sequence
  ENSG00000156928_27 (sequence is synthesized)
tggacattcagtaccaggaactgttttaggtgctgtggagagaagagttaaaaatgaaacaaaaattattgccttcatgagcctcacattagtggacagagtccaaaaaaaaagtgacaa

SEQ ID NO: 457304 - DNA, 120 bp, Artificial Sequence
  ENSG00000156928_28 (sequence is synthesized)
cgtaatgcgctactgcgacacaaagcaaagcaagatcatactggtcccaagtttgacatcgatatgatggtttcacttctgaggcaagaaaatgcaagagacatttgtgtgatccaggtt

SEQ ID NO: 457305 - DNA, 120 bp, Artificial Sequence
  ENSG00000156928_29 (sequence is synthesized)
caggccaaggagcaacacttagagggtaaacccatcatacaaagttacagaagaagcccaaattttcagaatttgcatgaattcattttatgttctttgatagtgaaacatatgggagca

SEQ ID NO: 457306 - DNA, 120 bp, Artificial Sequence
  ENSG00000156931_0 (sequence is synthesized)
ggaatggcagcaagctcagagataatcattcaggtcttcgtgagctaaggccaaacaaacaaaaaacacttgctttgatggactgaatactgttattagaagtaaatatggaaaatgaac

SEQ ID NO: 457307 - DNA, 120 bp, Artificial Sequence
  ENSG00000156931_1 (sequence is synthesized)
cagaccatgaaaatgtggaacagagcctctgtgccaagacgagcgaagaagagctgaataagtctttcaatctagaagcttcactttcaaaattctcttacatagatatggacaaggaac

SEQ ID NO: 457308 - DNA, 120 bp, Artificial Sequence
  ENSG00000156931_2 (sequence is synthesized)
tggagttcaaaaatgatctgattgatgacaaggagtttgatattcctcaagttgatactcctccaacactggaaagcatactaaatgagactgatgatgaagatgagtcttttattcttg

SEQ ID NO: 457309 - DNA, 120 bp, Artificial Sequence
  ENSG00000156931_3 (sequence is synthesized)
aggatcctacattgttaaacattgatactattgattctcactcctatgatacttcatctgtggcaagctcagatagtggtgacaggaccaacttaaaaaggaagaagaaattacctgatt

SEQ ID NO: 457310 - DNA, 120 bp, Artificial Sequence
  ENSG00000156931_4 (sequence is synthesized)
ctttttcacttcatggatcagttatgcgccattcacttttgaagggaatttctgcccagatagtgtctgcagctgacaaagtagatgctggcttgcctacagcaattgcagtatccagtc

SEQ ID NO: 457311 - DNA, 120 bp, Artificial Sequence
  ENSG00000156931_5 (sequence is synthesized)
tgatagcagtgggtacatctcatggattggctttaatatttggaaaagatcagaatcaagctttgcgactctgtctgggtagcactagtgttggaggtcagtatggcgctatctctgccc

SEQ ID NO: 457312 - DNA, 120 bp, Artificial Sequence
  ENSG00000156931_6 (sequence is synthesized)
tcagtatcaacaatgattgctcaagacttctttgtggctttgctaaaggacagatcaccatgtgggatttggccagtggaaaacttctaagatcaataacagatgctcatcctccaggaa

SEQ ID NO: 457313 - DNA, 120 bp, Artificial Sequence
  ENSG00000156931_7 (sequence is synthesized)
cagcaatattgcatatcaagtttacagatgatccaactcttgcaatttgcaacgacagcggaggctctgtttttgaattgacatttaagagagtgatgggagtgagaacctgtgaatcta

SEQ ID NO: 457314 - DNA, 120 bp, Artificial Sequence
  ENSG00000156931_8 (sequence is synthesized)
gatgtctgttcagtggttccaagggtgaagtctgctgtattgagcctctgcattctaagcctgagttgaaagatcatcccatcacacagttttcattattggccatggcatccttgacaa

SEQ ID NO: 457315 - DNA, 120 bp, Artificial Sequence
  ENSG00000156931_9 (sequence is synthesized)
aaatactggtcattggattgaaaccatccttgaaagtatggatgacttttccctatggccggatggatccttccagtgtgccactgctggcctggcactttgtagcagtacaaaattacg

SEQ ID NO: 457316 - DNA, 120 bp, Artificial Sequence
  ENSG00000156931_10 (sequence is synthesized)
tgaatcccatgcttgccttctgcagaggagatgttgttcattttctattggtaaagagagatgaatctggagcaatacatgttactaagcaaaagcatcttcacctatactatgacctca

SEQ ID NO: 457317 - DNA, 120 bp, Artificial Sequence
  ENSG00000156931_11 (sequence is synthesized)
tcaactttacctggataaattcacgcacagttgtgctcttagacagcgtagagaagttgcatgtgattgatcggcaaacacaagaggaattggagacagtggagatctcagaagttcagc

SEQ ID NO: 457318 - DNA, 120 bp, Artificial Sequence
  ENSG00000156931_12 (sequence is synthesized)
tggtctacaatagcagccatttcaaatcactagccactggaggaaatgttagccaggcactggctttggttggagagaaggcttgttatcaatccatcagtagctatggtggtcagatct

SEQ ID NO: 457319 - DNA, 120 bp, Artificial Sequence
  ENSG00000156931_13 (sequence is synthesized)
tttatttggggacaaaatctgtttatgtgatgatgctgaggagctggagagagagagtggatcatctcctgaaacaagattgtcttacagaagcgttggctcttgcgtggtctttccatg

SEQ ID NO: 457320 - DNA, 120 bp, Artificial Sequence
  ENSG00000156931_14 (sequence is synthesized)
aaggaaaagcaaaagcagtagtgggattatcaggggatgccagtaagcgaaaggctattgttgcagaccggatggtagaaatcctattccattatgcagatcgagctctgaaaaagtgcc

SEQ ID NO: 457321 - DNA, 120 bp, Artificial Sequence
  ENSG00000156931_15 (sequence is synthesized)
cagaccaaggaaaaatccaagtgatggagcagcattttcaggatatggtgcctgtcatagttgattactgccttctgctgcagcgaaaggatcttttatttagtcagatgtatgataaat

SEQ ID NO: 457322 - DNA, 120 bp, Artificial Sequence
  ENSG00000156931_16 (sequence is synthesized)
taagtgagaattcagtggccaaaggagtatttttggagtgccttgagccatatattttaagtgataaattggtgggaatcacaccccaagtaatgaaagacttgattgttcatttccaag

SEQ ID NO: 457323 - DNA, 120 bp, Artificial Sequence
  ENSG00000156931_17 (sequence is synthesized)
ataaaaaattaatggaaaatgtggaagcgctcattgtacatatggatatcaccagcctagatattcagcaggtagttctcatgtgttgggaaaatcgtttatatgatgctatgatctatg

SEQ ID NO: 457324 - DNA, 120 bp, Artificial Sequence
  ENSG00000156931_18 (sequence is synthesized)
tctacaacagaggcatgaatgaatttattagtccaatggagaaacttttcagagtcattgctcctcctctgaatgcaggaaaaacactaacagatgaacaagttgttatgggcaataagc

SEQ ID NO: 457325 - DNA, 120 bp, Artificial Sequence
  ENSG00000156931_19 (sequence is synthesized)
tccttgtatatattagctgttgtctagcaggtcgtgcctatccccttggtgacatccctgaagatctggttcccttggttaaaaaccaggtttttgaatttctaattcgcctgcattcag

SEQ ID NO: 457326 - DNA, 120 bp, Artificial Sequence
  ENSG00000156931_20 (sequence is synthesized)
acattttgacacaagagaatttctaaatgtattggcactgacttttgaagattttaaaaatgacaagcaagctgtggaatatcaacagcgaattgtggatattttgttgaaagttatggt

SEQ ID NO: 457327 - DNA, 120 bp, Artificial Sequence
  ENSG00000156931_21 (sequence is synthesized)
ggagaattcagactttaccccctcacaagtaggatgtctctttaccttccttgctcggcagcttgcaaagcctgacaacaccttgtttgtaaacagaacactttttgatcaggtccttga

SEQ ID NO: 457328 - DNA, 120 bp, Artificial Sequence
  ENSG00000156931_22 (sequence is synthesized)
attcctttgtagtcctgacgatgactcccgacactctgaaagacagcaggtccttttagaattgctgcaggctggaggcatagttcaatttgaagagagtcgactcatccggatggcaga

SEQ ID NO: 457329 - DNA, 120 bp, Artificial Sequence
  ENSG00000156931_23 (sequence is synthesized)
aaaagctgagttctatcaaatttgtgaatttatgtatgaaagagaacaccaatatgataaaattattgattgctacttacgtgaccctctgcgagaggaagaagtctttaattacattca

SEQ ID NO: 457330 - DNA, 120 bp, Artificial Sequence
  ENSG00000156931_24 (sequence is synthesized)
caatatcttatccattcccggacacagtgcagaggagaagcagtctgtatggcagaaagcaatggatcatattgaggaactcgtgtccctgaagccttgtaaagctgcggagctggttgc

SEQ ID NO: 457331 - DNA, 120 bp, Artificial Sequence
  ENSG00000156931_25 (sequence is synthesized)
cacccacttttctggacatattgaaacggtcattaaaaaacttcagaaccaggttttgcttttcaaatttttgaggagtcttcttgacccaagggaaggtattcatgtaaatcaagaatt

SEQ ID NO: 457332 - DNA, 120 bp, Artificial Sequence
  ENSG00000156931_26 (sequence is synthesized)
actgcaaatatctccttgtatcacagagcagttcattgagctgttgtgtcagttcaacccaacccaagttatagagactctgcaagtccttgagtgctaccgtctggaagaaactattca

SEQ ID NO: 457333 - DNA, 120 bp, Artificial Sequence
  ENSG00000156931_27 (sequence is synthesized)
gattactcagaagtatcaacttcatgaagtcaccgcttatctattggaaaagaaaggagatattcatggtgccttcctaataatgttagagagactacaaagcaaacttcaagaggtaac

SEQ ID NO: 457334 - DNA, 120 bp, Artificial Sequence
  ENSG00000156931_28 (sequence is synthesized)
acatcaaggtgaaaataccaaagaggatccctcattgaaggatgttgaagatactatggtggagaccattgctctttgccagagaaattcacataatttgaaccagcagcaacgtgaggc

SEQ ID NO: 457335 - DNA, 120 bp, Artificial Sequence
  ENSG00000156931_29 (sequence is synthesized)
actttggtttccgttattggaggcaatgatggcccctcagaagctgtccagttcagccattcctcatctacactctgaagctctgaagtctttgaccatgcaagttttaaatagcatggc

SEQ ID NO: 457336 - DNA, 120 bp, Artificial Sequence
  ENSG00000156931_30 (sequence is synthesized)
agcatttattgcccttccatcaatcttgcaaagaatcttacaggatccagtttatggaaaaggaaaacttggagaaatccagggacttatcttgggaatgttagatacctttaactatga

SEQ ID NO: 457337 - DNA, 120 bp, Artificial Sequence
  ENSG00000156931_31 (sequence is synthesized)
acaaaccctgctggaaacaacaaccagccttctaaaccaagatctccattggtcattgtgtaacctgagagcttcggtcaccagaggactgaatcccaaacaagattactgctctatatg

SEQ ID NO: 457338 - DNA, 120 bp, Artificial Sequence
  ENSG00000156931_32 (sequence is synthesized)
tttgcagcagtacaagagacgccaagaaatggctgatgaaataattgtctttagctgtggccatttgtatcactcattctgcctacaaaacaaagaatgcactgtggaatttgagggcca

SEQ ID NO: 457339 - DNA, 120 bp, Artificial Sequence
  ENSG00000156931_33 (sequence is synthesized)
aacaagatggacatgctacaaatgcagttcaagtaacaaagtaggaaaactcagtgaaaattcatctgaaattaaaaagggaaggataaccccatcacaggtaaaaatgtctccatcgta

SEQ ID NO: 457340 - DNA, 120 bp, Artificial Sequence
  ENSG00000156931_34 (sequence is synthesized)
tcatcagtccaaaggggatcccactgctaaaaagggaacctcagaacctgttctggatccacagcaaatccaagcatttgatcagctttgccgtctctaccgaggaagctccaggctggc

SEQ ID NO: 457341 - DNA, 120 bp, Artificial Sequence
  ENSG00000156931_35 (sequence is synthesized)
tctcctcacggaactctcccagaatcgcagcagcgagagctataggccattcagtggctcgcagagtgctcctgctttcaacagcatcttccagaatgagaacttccagctgcagctcat

SEQ ID NO: 457342 - DNA, 120 bp, Artificial Sequence
  ENSG00000156931_36 (sequence is synthesized)
tcctccacctgtgactgaggattgatgactccatggagcctggcccaggagaaccagagatgatcccgaggcagctggggagaggccccgcctctggtgggcttggcctccaccacctcc

SEQ ID NO: 457343 - DNA, 120 bp, Artificial Sequence
  ENSG00000156931_37 (sequence is synthesized)
cacgcttctgagaagaggttccaaattgggcttctgtgcccagagcgtccacagcaccattcccagtgtagactcccagtcttctccacattgctgtcatggcgtcagttcaccagactc

SEQ ID NO: 457344 - DNA, 120 bp, Artificial Sequence
  ENSG00000156931_38 (sequence is synthesized)
attgattttgttttgcttgttaagcaaaggaatgtcacatacctctgtccagctttttaggaaatacatttcgcctattgcgactttttccatttaccctgaagcctagaaagtaggtgg

SEQ ID NO: 457345 - DNA, 120 bp, Artificial Sequence
  ENSG00000156931_39 (sequence is synthesized)
aactcacacaaatggcattccagagtctgccatactccgtctcctccagctgctggataatacagaggaacttcaacttctacagggaacagtggttggccaggctgcagtataactgaa

SEQ ID NO: 457346 - DNA, 120 bp, Artificial Sequence
  ENSG00000156931_40 (sequence is synthesized)
gcatgccttggagagagcagacactgtgggggccagggccatctccctttaatgtgttcatgttaaaacctatttgagtgtaagacttgccctttctaacaataaatgctccgtgtttaa

SEQ ID NO: 457347 - DNA, 120 bp, Artificial Sequence
  ENSG00000156931_41 (sequence is synthesized)
atgagtcaaaaccccatcctagtcctttcaggagcttccttgatgtttttgtggaacttgtcatgaaagaccatacctgtgaataaataaaccatttaccactttctacaattgacatga

SEQ ID NO: 457348 - DNA, 120 bp, Artificial Sequence
  ENSG00000156931_42 (sequence is synthesized)
tttttattttttctaatgtttaccaacaaatgtatgtgagaagtacgtttcaacctgtaaaacatcatgctgatgttagttattcttttgtttttcattgttttctttgaccacttttct

SEQ ID NO: 457349 - DNA, 120 bp, Artificial Sequence
  ENSG00000156931_43 (sequence is synthesized)
aatgccaaattgcttaccaaaagcatgatatgaagttatatcctcctaacaatctaaaagcatcttaagcagacctgtcattatcagtggaccactggacagggttgtggggctgatgct

SEQ ID NO: 457350 - DNA, 120 bp, Artificial Sequence
  ENSG00000156931_44 (sequence is synthesized)
ggtccacggccggaatggcagcaagctcagttcagcaagacgcttccagttacttcctgctcttaaaaaaaaaaaaaaaaaaagaataaatctctcatgactctatatccttcttgacac

SEQ ID NO: 457351 - DNA, 120 bp, Artificial Sequence
  ENSG00000156931_45 (sequence is synthesized)
cctgcatcagtcagttatgtgaagaagaaaagggaatatatttcagcgtacacaaggcccttgtgctttttaggaggagttctttggagctgaagtgggtctgagaagagacattctcat

SEQ ID NO: 457352 - DNA, 120 bp, Artificial Sequence
  ENSG00000156931_46 (sequence is synthesized)
gatagtggagacagtattatagaagctggaagtgatcatttttctctgttatttatttcacttattacctcacacacatattgatataaaactgatcaataaagttagaatttctacatt

SEQ ID NO: 457353 - DNA, 120 bp, Artificial Sequence
  ENSG00000156931_47 (sequence is synthesized)
ttctatttgattgggttttcttagatttatcattacattgttcaaaatactacataagttgttatggtaataaattcacaagtcattttactgccagtaatcaggtttaacatttatcca

SEQ ID NO: 457354 - DNA, 120 bp, Artificial Sequence
  ENSG00000156931_48 (sequence is synthesized)
tgttgaatgctttcttttttcctaattttttgttactttttaggcttttgtttgagaagcagataatggagtaatattagccttctccaggtttatttgtttgtagtactaccctgccca

SEQ ID NO: 457355 - DNA, 120 bp, Artificial Sequence
  ENSG00000156931_49 (sequence is synthesized)
agtaaatttgcttcttctgtgatttggctccccttccacaaggaatggaaagcatcatttgataggatcactttgtggaaaatagtacatttaacagctctggattccattgtcaggctt

SEQ ID NO: 457356 - DNA, 120 bp, Artificial Sequence
  ENSG00000156931_50 (sequence is synthesized)
gccaaatagaactctgttgcagtattgtagagaactaggggatattgaaagcacgctggtactctctcttcttgtcttcctccagtgcctttttagcattccttttagtcagtctttggt

SEQ ID NO: 457357 - DNA, 120 bp, Artificial Sequence
  ENSG00000156931_51 (sequence is synthesized)
tccccatgcctcgtaggaagctctaggttgggtagcataagtgcctcttactttgcctggatccctgattttttatttgaaagttgctttagaggaagctaagtggcatgttattgccta

SEQ ID NO: 457358 - DNA, 120 bp, Artificial Sequence
  ENSG00000156931_52 (sequence is synthesized)
taatgttgaacatatgatattttgatagtgttactcctagagtaaatttagagggattctcagaaataaaatgtcctgagtttcatttcccgttttgcctcctggatgaaattcttctta

SEQ ID NO: 457359 - DNA, 120 bp, Artificial Sequence
  ENSG00000156931_53 (sequence is synthesized)
tttacaatagtttgtatgtcatctggtgcctagaggaaggcaggccaacaaattcaactctgattatttcaagattcttaatgtaatgtcttaaaacgtaatcttcccttttgttttcag

SEQ ID NO: 457360 - DNA, 120 bp, Artificial Sequence
  ENSG00000156931_54 (sequence is synthesized)
gcagtatccagtctgatagcagtgggtacatctcatggattggctttaatatttggtaaatttttaagtgctttcctgcttttaaatattaagtgtccttttgggttttataatgtcctt

SEQ ID NO: 457361 - DNA, 120 bp, Artificial Sequence
  ENSG00000156931_55 (sequence is synthesized)
taatcacagtttatatagtgtacttgattttcttgaacaaaaccagaaaaacttgaaaagtagcagtcagtatttttatagctaaaaattatttgcctcacagctttgttttgctgctta

SEQ ID NO: 457362 - DNA, 120 bp, Artificial Sequence
  ENSG00000156931_56 (sequence is synthesized)
ttgcaagtttattttcttcttcatgaatttataagctatcatatctattgatctctctgcaaacctagacaaaaagaataaagttgaagggaaccttgggttatcatcttgtctgcctcc

SEQ ID NO: 457363 - DNA, 120 bp, Artificial Sequence
  ENSG00000156931_57 (sequence is synthesized)
ggttgttggtggtggggatttttgattctgaatcaccttccagtaatgggtattctaaaagatcttcaggaaaacaggctttctcagtaattttcaggagctctcactgacaataagctt

SEQ ID NO: 457364 - DNA, 120 bp, Artificial Sequence
  ENSG00000156931_58 (sequence is synthesized)
ttttaaaaaatttccattgtaaatcactctaaaccgaattttttttggcctgtaatcacattgctttcttggttgaaagagaactagttttatttgtatagtagaagatagttgtatttt

SEQ ID NO: 457365 - DNA, 120 bp, Artificial Sequence
  ENSG00000156931_59 (sequence is synthesized)
ctcatttttttctacatgagactaaatgactatagtttcattaaaccttctttgcttttgaattcaatgtatgagtagaatattttgttctttttaaatttaaaaactgttagatttttg

SEQ ID NO: 457366 - DNA, 120 bp, Artificial Sequence
  ENSG00000156931_60 (sequence is synthesized)
aatgttaaaacaagatgaatttacaaaaacttacatcttagatcaaagaccaaaatacgtgttatgaagtaatatgtttgtagagctaaccagagattgctgaatctgagttttgtcttg

SEQ ID NO: 457367 - DNA, 120 bp, Artificial Sequence
  ENSG00000156931_61 (sequence is synthesized)
gatcagctgctgtgtcatatcggcacggggaatagaatggtgaacaaggcagatctggtctttgctctctcatggaacctgcattccaactgggggcaaggaatggtggtttagacaatg

SEQ ID NO: 457368 - DNA, 120 bp, Artificial Sequence
  ENSG00000156931_62 (sequence is synthesized)
gggaatttctgcccagatagtgtctgcagctgtaagtattttgttcttttccctcaactttgtaacctgcaatggcataatgaagtaggaatgagcatagaacaaaatacagcacttctc

SEQ ID NO: 457369 - DNA, 120 bp, Artificial Sequence
  ENSG00000156931_63 (sequence is synthesized)
ttggcccgaggcttaagaaaaatagaatctggctttcatggtttttgtgtgatgatttttgacttatgagacatggctacacgtcttgacagaaattagtgcagccatgaaaataaagtt

SEQ ID NO: 457370 - DNA, 120 bp, Artificial Sequence
  ENSG00000156931_64 (sequence is synthesized)
gaccggatggtagaaatcctattccattatgcagatcgagctctgaaaaagtgcccagaccaaggaaaaatccaagtgatggagcagcattttcaggctattggcatggcatatcgtaat

SEQ ID NO: 457371 - DNA, 120 bp, Artificial Sequence
  ENSG00000156931_65 (sequence is synthesized)
gctgtggagagtaactcatatttgctagaatgggaaccacctgttgaggattacatttccatgacgttttctgaatttaatccttatgacaaagtagatgctggcttgcctacagcaatt

SEQ ID NO: 457372 - DNA, 120 bp, Artificial Sequence
  ENSG00000156931_66 (sequence is synthesized)
atgttatataaaatgtacttccttacagtcgtgtaaataatggaggctgctttttagaaagattctgtgttcctggataacgatttttgcatttctttcttcttctgaaactggcattag

SEQ ID NO: 457373 - DNA, 120 bp, Artificial Sequence
  ENSG00000156931_67 (sequence is synthesized)
attatggtttttttatcttctgattcatacatcactagctagtttggcagtaagcctttccgatactttttactagtgctaaacagattgacttattagagaaatatcttttgtctctca

SEQ ID NO: 457374 - DNA, 120 bp, Artificial Sequence
  ENSG00000156931_68 (sequence is synthesized)
gaataaaggctctatgctttaatggatctgcaacctttaggtatgttttaactttatagttctttgcctgcaatgtttatagtcaaggaatagattattccagccagaaggcaggatact

SEQ ID NO: 457375 - DNA, 120 bp, Artificial Sequence
  ENSG00000156931_69 (sequence is synthesized)
cttaagtaaaaagggatttattggctccaaacctggaaggggctgaggtatcactaaatccagtgactccggtgatgtatttgtgtatctctccctttctgcaaagggccagtaacccct

SEQ ID NO: 457376 - DNA, 120 bp, Artificial Sequence
  ENSG00000156931_70 (sequence is synthesized)
gagggactggcgcgcccgctcccccgactgtgagcctaggcggcgggtgtcatgcccctccccactcccgggcggaacagaatattgggacatgttggtgattcttagctgtatctcact

SEQ ID NO: 457377 - DNA, 120 bp, Artificial Sequence
  ENSG00000156931_71 (sequence is synthesized)
attccattgacatttcaaccagtgtgacacaaaatgtcagttatgtatgtgaatgagaagtaagatcttttgaatttaatgaattcagcaagacgcttccagttacttcctgctcttaaa

SEQ ID NO: 457378 - DNA, 120 bp, Artificial Sequence
  ENSG00000156931_72 (sequence is synthesized)
gtaatttcacatgtcagagttactgaattggtagcttcttaacatttctgttttgacttttcagaagaagattatttggtaagcttcttaatttcagaagtgtacaagaaaaccattata

SEQ ID NO: 457379 - DNA, 120 bp, Artificial Sequence
  ENSG00000156931_73 (sequence is synthesized)
gctgttaggtacttgatttgctagaactgacagtataagttagaattaggtttgtctacatatattagaaaattcaaaataatagtggcttaaataagatttctctgtcatgtaaaagca

SEQ ID NO: 457380 - DNA, 120 bp, Artificial Sequence
  ENSG00000156931_74 (sequence is synthesized)
cggtccacggccggaatggcagcaagctcaggggaactggagcactaccctggggtttggaatgtaaagaaggcattaattgcagcttttggcaccgatttacccttatgctgttagaga

SEQ ID NO: 457381 - DNA, 120 bp, Artificial Sequence
  ENSG00000156931_75 (sequence is synthesized)
ttcctgtatttaaggtattatttaaatgttacaaaattggccaattatatgtgtgcagtgtgaatgttggtaatcatgtacagtcatgtaacaccaccataatcaagctgcagaaggagc

SEQ ID NO: 457382 - DNA, 120 bp, Artificial Sequence
  ENSG00000156931_76 (sequence is synthesized)
catagcttctcacactaaaaagtttcctccttcccctttgtacttgatcctttccccacagccctgctctgggcagtcactgatctactttctgtcactatacttcatgtaaatggaatt

SEQ ID NO: 457383 - DNA, 120 bp, Artificial Sequence
  ENSG00000156931_77 (sequence is synthesized)
atgtgctatgtaacctttggtgttttatttctttcactttacgtggatgaagcataatatttttgagagtcatccatgttgttttatgtatattaatattttgttcccttttaccactga

SEQ ID NO: 457384 - DNA, 120 bp, Artificial Sequence
  ENSG00000156958_0 (sequence is synthesized)
gtttcctccgaagtggttggtgccttagcaactaaagctggcaactgggacatcgtccggtgctgcaggtctcagccgaagggcgtcggaaactgcgctcgcatcgagcagtttccagcc

SEQ ID NO: 457385 - DNA, 120 bp, Artificial Sequence
  ENSG00000156958_1 (sequence is synthesized)
tcctgggtaaaggagcagtctcctcccttgcttgggactctggacgcatctcattccggtgaaagtaagggacagcttaggaccagaagcctttcgcggagaaaaggctgacatgcccgt

SEQ ID NO: 457386 - DNA, 120 bp, Artificial Sequence
  ENSG00000156958_2 (sequence is synthesized)
cctatatgacaggttactgaagctaaaggagatgtttaactccaagtttggatctattcccaagttttatgttcgagcaccaggaagagtcaacataataggagagcatatagattattg

SEQ ID NO: 457387 - DNA, 120 bp, Artificial Sequence
  ENSG00000156958_3 (sequence is synthesized)
tggatattctgttcttcctatggctgtagaacaagatgtgctaatagctgtagaacctgtgaaaacgtacgctctccaactggccaatacaaatcccttgtatccggacttcagtactag

SEQ ID NO: 457388 - DNA, 120 bp, Artificial Sequence
  ENSG00000156958_4 (sequence is synthesized)
tgctaataacatccagattgataaaaccaagcctttgtggcacaactatttcttatgtggacttaaaggaattcaggaacactttggtcttagtaacctgactggaatgaactgcctggt

SEQ ID NO: 457389 - DNA, 120 bp, Artificial Sequence
  ENSG00000156958_5 (sequence is synthesized)
agatggaaatatcccaccaagttctggcctctccagctccagtgctttggtctgttgtgctggcttggtgacgctcacagtgctgggaaggaatctatccaaggtggaacttgcagaaat

SEQ ID NO: 457390 - DNA, 120 bp, Artificial Sequence
  ENSG00000156958_6 (sequence is synthesized)
ctgtgccaagagtgagcgttacattggcactgaaggaggaggcatggaccagtctatatcatttcttgcagaagaaggaactgccaagttgatagaatttagtcctctgagggcaaccga

SEQ ID NO: 457391 - DNA, 120 bp, Artificial Sequence
  ENSG00000156958_7 (sequence is synthesized)
tgtaaaactcccaagtggagcagtgtttgtgattgccaacagttgtgtggagatgaataaggcagcaacttcccatttcaatatcagggtgatggagtgtcggctggctgcgaagctcct

SEQ ID NO: 457392 - DNA, 120 bp, Artificial Sequence
  ENSG00000156958_8 (sequence is synthesized)
ggctaaatacaaaagcttgcaatgggacaaagtactgaggctggaggaggtgcaggctaaactagggattagtctagaagaaatgctgttggtcacagaagatgcccttcatcctgaacc

SEQ ID NO: 457393 - DNA, 120 bp, Artificial Sequence
  ENSG00000156958_9 (sequence is synthesized)
ctataaccctgaggagatctgcaggtgtctgggaattagcctggaggaactccgaacccaaatcctgagtccaaacactcaagatgtgctcatcttcaaactctatcagcgggcaaagca

SEQ ID NO: 457394 - DNA, 120 bp, Artificial Sequence
  ENSG00000156958_10 (sequence is synthesized)
tgtgtacagcgaggctgcgcgagtgctccagtttaagaagatatgtgaagaagcacctgaaaacatggtccagctgctgggagagttgatgaaccagagccacatgagctgccgggacat

SEQ ID NO: 457395 - DNA, 120 bp, Artificial Sequence
  ENSG00000156958_11 (sequence is synthesized)
gtatgagtgcagctgccccgagctggatcagctggtggacatctgtcggaagtttggggctcaagggtcacgacttactggagcaggatggggaggctgcacagtatcaatggtacctgc

SEQ ID NO: 457396 - DNA, 120 bp, Artificial Sequence
  ENSG00000156958_12 (sequence is synthesized)
ggacaagctgcccagctttctagcaaatgtgcacaaagcttattaccagaggagtgatggaagcttagcaccggagaagcaaagtttgtttgctaccaaacctggaggtggggctttggt

SEQ ID NO: 457397 - DNA, 120 bp, Artificial Sequence
  ENSG00000156958_13 (sequence is synthesized)
tttgcttgaggcctgaaaaaatgtaaaaagtctgagagaaactacttagggcacttaggaattggcaggactttctgtgccacagtaaattaatcttccttctgttttgtattatgatga

SEQ ID NO: 457398 - DNA, 120 bp, Artificial Sequence
  ENSG00000156958_14 (sequence is synthesized)
acggttgctattatatcaagatatattttcaaagaaatggttgaaagctctctatgcttcataatgattctttttccatcttaaaatatggttttactattaagagccaagatcatgctt

SEQ ID NO: 457399 - DNA, 120 bp, Artificial Sequence
  ENSG00000156958_15 (sequence is synthesized)
ggacagatcttttaagaataacttactgagatttattgatttgaagattttaaagatgaatggtaaaacacactcttaatactgattacatggattggacttgaattaaatatattgtta

SEQ ID NO: 457400 - DNA, 120 bp, Artificial Sequence
  ENSG00000156958_16 (sequence is synthesized)
caattaaactgataccactgaattgtatgcattattcttgaatagagttcatttctggtttctcttagtattcttcttcctcaaagttgtagttgtctgttgatgatggtgatgatgatg

SEQ ID NO: 457401 - DNA, 120 bp, Artificial Sequence
  ENSG00000156958_17 (sequence is synthesized)
atgatgacgatagtgatgccacacattctctctcaatttcagcttcggaacgctatgaaaataatacatgattaaagtttcacagatcttcttggacattgtataattgaatttgaatgt

SEQ ID NO: 457402 - DNA, 120 bp, Artificial Sequence
  ENSG00000156958_18 (sequence is synthesized)
gagatttctccagttatcaagagactaaggatttttttttttttttgacaaaaggaggatacaggaagaaaattcagactcatttgaatatttgtaaaccatgtaatatataaataacca

SEQ ID NO: 457403 - DNA, 120 bp, Artificial Sequence
  ENSG00000156958_19 (sequence is synthesized)
ctttcaattcttttggccctgagctatctccattacttaatagaaaaacttagataaaaaacactttaagactcttctattcacattgaaataaagaattatctagatgataattcagat

SEQ ID NO: 457404 - DNA, 120 bp, Artificial Sequence
  ENSG00000156958_20 (sequence is synthesized)
aattcagtttgttcatagaattactttcttatcactctttttctactactttttctcaaatacctctctaatccaagaggcacttccaagaaattccacacattccttatatcccttttt

SEQ ID NO: 457405 - DNA, 120 bp, Artificial Sequence
  ENSG00000156958_21 (sequence is synthesized)
tgcttgtctagcaaagcttgtttgtatatatgcaccccattgtaaagcaggtatgcaggtatgtgggtgaaagtgactatgaaaagacttaatgaattctgggatttgtaatggtattga

SEQ ID NO: 457406 - DNA, 120 bp, Artificial Sequence
  ENSG00000156958_22 (sequence is synthesized)
atcaagagtgggcagaaatgtttggctggtgatggcaaatgactggctttctcttgtggatggactataggaagcactttctgaattatgtaatgatttggaccaaaaagtattttgctg

SEQ ID NO: 457407 - DNA, 120 bp, Artificial Sequence
  ENSG00000156958_23 (sequence is synthesized)
aaatactcaggtaattgagatagcaatggttttatggcatgaattatccaaaaaaatatcagaattacttattattctgtgatttcattagctcattaatgtttaactcacagattgggc

SEQ ID NO: 457408 - DNA, 120 bp, Artificial Sequence
  ENSG00000156958_24 (sequence is synthesized)
atcaccatctagaatttcagtttaagggaggcctgcgcaaagctagttttatttcttaaaggataacagtcatacatagaatactaggaaagccaatattctatttaaaaataaacttct

SEQ ID NO: 457409 - DNA, 120 bp, Artificial Sequence
  ENSG00000156958_25 (sequence is synthesized)
gatgcattttcattcttagcagaaaggtaaatgcttgagaaagcttgagtcaaatttgttaaaagaattttgagttctataaatccaaaaatctgaaacctgaatttatttaaatttata

SEQ ID NO: 457410 - DNA, 120 bp, Artificial Sequence
  ENSG00000156958_26 (sequence is synthesized)
atcctttattttttaataccgtgccattttccacaaaggatttgtggttggtatataattctttaaagatacctggatcagtgtaaaaaaaaaaaaaaaaaggcacctgtcattgttttg

SEQ ID NO: 457411 - DNA, 120 bp, Artificial Sequence
  ENSG00000156958_27 (sequence is synthesized)
ctgttccatttacaattttcaccaggtgatttcttcttcacaaaaggtgagtaaaaatttccaatgtgcactcttctttgggggacacacatggtcattctaagcgagggatctattcta

SEQ ID NO: 457412 - DNA, 120 bp, Artificial Sequence
  ENSG00000156958_28 (sequence is synthesized)
tatttgttttgatttctctcgataaaaagaactatgtttcagtcttactatcactgtgtggtatctagatattatgagagatgctaaacttacctggaagggatagggccggggccatta

SEQ ID NO: 457413 - DNA, 120 bp, Artificial Sequence
  ENSG00000156958_29 (sequence is synthesized)
gaaaaaagatcatgcagtaaatggactttgagcatggccctaaaagatgagtagagtttaaaagctgtggagtgcacactgcagatgagcaaagcctatgggtataggcaaacatggtgt

SEQ ID NO: 457414 - DNA, 120 bp, Artificial Sequence
  ENSG00000156958_30 (sequence is synthesized)
gtgtaggaggctcagtgagagtgaaggctttgctttggtatgtagtgaagaataagattgactacactggctggagctagcttttgaagagtcaaatccaggcagcatttagatcagggg

SEQ ID NO: 457415 - DNA, 120 bp, Artificial Sequence
  ENSG00000156958_31 (sequence is synthesized)
ttatagcccagcagcccatgggccacatctggtctgcagatgtatatagtttggcccacagaatgactaaaaacttgggctccaaatcaggagattgtacaagcagtatcagatattctg

SEQ ID NO: 457416 - DNA, 120 bp, Artificial Sequence
  ENSG00000156958_32 (sequence is synthesized)
gattactcagaatctggattactgagtggtggaatatctgatactacttgtccaacatttctacagggcatcaatgaactagggctgagatagtagctgccttgttagatgaggcatggc

SEQ ID NO: 457417 - DNA, 120 bp, Artificial Sequence
  ENSG00000156958_33 (sequence is synthesized)
tatccagtgcgctacagtttccacaactgcttgtataatagtttccctgacactcaaatcatttaccacttaccagctgaggtcacttgccctttatcaggacacttgcactgttgtttt

SEQ ID NO: 457418 - DNA, 120 bp, Artificial Sequence
  ENSG00000156958_34 (sequence is synthesized)
cctattctaattaggtatttctctgtgcccatgtccctatcaatagtagggaagatagaccaaaaaaaaaaaaaaagagagaaagaatgaatatttttgtgtgtggatgtaaaaaatagt

SEQ ID NO: 457419 - DNA, 85 bp, Artificial Sequence
  ENSG00000156958_35 (sequence is synthesized)
gaggacttcaaagctacagtgagccatgactgcagcactgcactccagcctgggagacaggtgacagagtgagaccctgtttcaa

SEQ ID NO: 457420 - DNA, 120 bp, Artificial Sequence
  ENSG00000156958_36 (sequence is synthesized)
cagcctgggagacaggtgacagagtgagaccctgtttcaacaacaacaacaaaaatgaatagtcctgtttgcttattatactgtcctgtttgtatattatacaacacccaggtgtttcac

SEQ ID NO: 457421 - DNA, 120 bp, Artificial Sequence
  ENSG00000156958_37 (sequence is synthesized)
tctttctatcacttttctgccccatgtaggaatttgatttgatccatttttgacattatactagcagccaatgggattgctctagatttttgaatggaagccttgacatgctgaaagtaa

SEQ ID NO: 457422 - DNA, 120 bp, Artificial Sequence
  ENSG00000156958_38 (sequence is synthesized)
aaggctctcctctatccctgacctccaattgtccagcattcagacatattgtacactagtctctacatgttcttgtctgttgggagagaagaagcccttcagacttaacaagaatgccca

SEQ ID NO: 457423 - DNA, 120 bp, Artificial Sequence
  ENSG00000156958_39 (sequence is synthesized)
taagtaaagagaagcaaaagagaagatgacaaggaaaatcagaaagatggaacaggctcctttcttttctttctttctcatacttgagtcctgtttagaaccttatcatattctgccttg

SEQ ID NO: 457424 - DNA, 120 bp, Artificial Sequence
  ENSG00000156958_40 (sequence is synthesized)
ataattgagggcagggaccattcatctaacacagctgttggtacccaatatgattttgttgaattattaatgaaaaacttacaattttaaacatcagtgattattagtttgtaattctaa

SEQ ID NO: 457425 - DNA, 120 bp, Artificial Sequence
  ENSG00000156958_41 (sequence is synthesized)
ctgcatttggagcttttcagttacataaactgttcctggtcagaagctggaaatggggaatgtgaacatgagttgtcactaaatatgtaaaacagattttcttacatgtgcatgtagatg

SEQ ID NO: 457426 - DNA, 120 bp, Artificial Sequence
  ENSG00000156958_42 (sequence is synthesized)
attaagtaacaagaatgtatcctctcctgccactgtaatttgggtgtgccaccatacattgcttatgaaatattgtccagtctatataaaagaagctagagagagaattctcaattattt

SEQ ID NO: 457427 - DNA, 120 bp, Artificial Sequence
  ENSG00000156958_43 (sequence is synthesized)
tcagaaagaaaacctaccagtttatgtaggaacttctcaaagtcctgtttcacttcatgaggtttcttggtagcctttgcttggagtctaatcatggaataaagaaaatcagtaaccaaa

SEQ ID NO: 457428 - DNA, 120 bp, Artificial Sequence
  ENSG00000156958_44 (sequence is synthesized)
acagaagtctcgtgattgctctgggagctttgcttagacacttgaaactacaggagaaagaaggatctagcgaaatatggctacagagagccctgctacgcgtcgggtccaggtggcaga

SEQ ID NO: 457429 - DNA, 120 bp, Artificial Sequence
  ENSG00000156958_45 (sequence is synthesized)
ggctccctcaggcagaggctatgacctgcagataggccacaccattcttggactggtcctgtagagcagggttccccaatccctgttactgcttcatggcctgttcagaagtgggccaca

SEQ ID NO: 457430 - DNA, 120 bp, Artificial Sequence
  ENSG00000156958_46 (sequence is synthesized)
taaactctggaccagtactactatagtgcgactgtaagaggaagaaaataatcaagacaacgattacttttgtgtttctaaaaaactgtgaataaaatataacttcatatttagcataaa

SEQ ID NO: 457431 - DNA, 120 bp, Artificial Sequence
  ENSG00000156958_47 (sequence is synthesized)
agacacttgaaactacaggagaaagaaggatctagcgaaatatggctacagagagccctgctacgcgtcgggtccaggtggcagaacatcctagatggagtctcgctctgtcacctgtgc

SEQ ID NO: 457432 - DNA, 120 bp, Artificial Sequence
  ENSG00000156958_48 (sequence is synthesized)
gattgctctgggagctttgcttagacacttgaaactacaggagaaagaaggatctagcgaaatatggctacagagagccctgctacgcgtcgggtccaggtggcagaacatcctagcctc

SEQ ID NO: 457433 - DNA, 120 bp, Artificial Sequence
  ENSG00000156958_49 (sequence is synthesized)
atcagcatctgttagtttttgacacattttggtaacagccattctgactagtgtaagatggagtctcgctctgtcacctgtgctggaggctagagtgcaagtggcacgatcttggctcac

SEQ ID NO: 457434 - DNA, 120 bp, Artificial Sequence
  ENSG00000156958_50 (sequence is synthesized)
agcatgggtgaaaatgtgctcatcttcaaactctatcagcgggcaaagcatgtgtacagcgaggctgcgcgagtgctccagtttaagaagatatgtgaagaagcacctgaaaacatggtc

SEQ ID NO: 457435 - DNA, 67 bp, Artificial Sequence
  ENSG00000156958_51 (sequence is synthesized)
ctttcgcggagaaaaggctgacatgcccgtcctatatgacagatggagtcttgctttgttgcccagt

SEQ ID NO: 457436 - DNA, 120 bp, Artificial Sequence
  ENSG00000156958_52 (sequence is synthesized)
tgacctcgtgatccgcccacgtcagcctccaaatgtgctgggattacaggtgtgatgtactagcattctttattaaaaatttacctttgtgggctgggtgcagaggctcatgcctgtaat

SEQ ID NO: 457437 - DNA, 120 bp, Artificial Sequence
  ENSG00000156958_53 (sequence is synthesized)
gctggagtgcagtggcaccatcatagcttactgcagcctcgaactccttggtttaagtgaccttcccatctcagcctcctcagtggctaggacttcaggttactgaagctaaaggagatg

SEQ ID NO: 457438 - DNA, 120 bp, Artificial Sequence
  ENSG00000156958_54 (sequence is synthesized)
ttagaggaatttaccaaagtatgagtctataagtacatgcagtaaggctcttctactcttttgagttatcatcagacttgcatataggcaatagacattattcagtcttaagaacagaaa

SEQ ID NO: 457439 - DNA, 120 bp, Artificial Sequence
  ENSG00000156959_0 (sequence is synthesized)
gggagaacccgagcaagatggaggccgcgcagaggccgccgcctgggccgaggcagccgctgctgggagcgccgagccgcggcgcctaggccgtgccagtcccggatccgctgcctccgg

SEQ ID NO: 457440 - DNA, 120 bp, Artificial Sequence
  ENSG00000156959_1 (sequence is synthesized)
gcctccggccgtgcccagcagctcccagacgcccccagctctgccccaggccccgccctcgcgggttccttgactcagggccgcttctcgcgtgcgtccccagctcccgcccggcagccc

SEQ ID NO: 457441 - DNA, 120 bp, Artificial Sequence
  ENSG00000156959_2 (sequence is synthesized)
ctccgtcccgggccggcggcccccgccagccgccgccgccgccggccccgcctccgggcaccatgctgccctcgcaggaggcctccaagctctaccacgagcactacatgcggaactcgc

SEQ ID NO: 457442 - DNA, 120 bp, Artificial Sequence
  ENSG00000156959_3 (sequence is synthesized)
tcgcgggccatcggcgtgctgtgggccatcttcaccatctgcttcgccatcatcaacgtggtggtcttcatccagccctactgggtgggcgacagcgtgagcacccccaagcctggctac

SEQ ID NO: 457443 - DNA, 120 bp, Artificial Sequence
  ENSG00000156959_4 (sequence is synthesized)
ttcggcctcttccactactgcgtgggcagcgggctggcgggccgcgagctcacctgccggggctccttcaccgacttcagcaccatcccgtccagcgccttcaaggcggccgccttcttc

SEQ ID NO: 457444 - DNA, 120 bp, Artificial Sequence
  ENSG00000156959_5 (sequence is synthesized)
gtgctgctctccatggtgctgatcctcggctgcatcacctgcttttcgcttttcttcttctgcaacacggctacggtctacaagatctgcgcctggatgcagctcttggcagctctgtgc

SEQ ID NO: 457445 - DNA, 120 bp, Artificial Sequence
  ENSG00000156959_6 (sequence is synthesized)
ctcgtcctgggctgcatgatctttcctgatggctgggatgccgagaccatccgggacatgtgtggggccaagacggggaagtactccctgggggactgttcagtgcgctgggcatacatc

SEQ ID NO: 457446 - DNA, 120 bp, Artificial Sequence
  ENSG00000156959_7 (sequence is synthesized)
ctggccatcatcggcatcctcaacgccctcatcctctccttcctcgccttcgtgctgggcaaccggcaaacagacctgctgcaggaggagctcaagccggagaacaaagattttgtgggc

SEQ ID NO: 457447 - DNA, 120 bp, Artificial Sequence
  ENSG00000156959_8 (sequence is synthesized)
tctacagtaagctccgtgttgcggcccgggggtgatgtctctggatggggagtccttccctgccccgtggctcactcacagggaccctgaaaggccaggatcacagcccagtaattggcc

SEQ ID NO: 457448 - DNA, 120 bp, Artificial Sequence
  ENSG00000156959_9 (sequence is synthesized)
tgacctcagcttgtcctgccttctgccctctcgtcactccattcaagctctgagggaagaccctgatctcagacttacttctcaccgactaccctgcaagctccaggctttgaggagagg

SEQ ID NO: 457449 - DNA, 120 bp, Artificial Sequence
  ENSG00000156959_10 (sequence is synthesized)
aaagcctggatgtggcctgggggagaggagaggccctccaaaccttgggagggtctaattcttgctcctccctcaatttgacctaagggagcctgcatctgcgtaggcccttgggcttct

SEQ ID NO: 457450 - DNA, 120 bp, Artificial Sequence
  ENSG00000156959_11 (sequence is synthesized)
cctctcctctctagactggcctggaggtccctgcagatccccagggagagcggagctgtagttccagctccccaggccccctcagtctggagggctgccgcctggctgtatccgcacctc

SEQ ID NO: 457451 - DNA, 120 bp, Artificial Sequence
  ENSG00000156959_12 (sequence is synthesized)
ttctggtccctgcctcttcaagaaatttattctagatactgctccagggtgggctggactctttcctactttttttttttttcttttttggctgatgttggttccaccacatctgccaca

SEQ ID NO: 457452 - DNA, 120 bp, Artificial Sequence
  ENSG00000156959_13 (sequence is synthesized)
aagctccaggtgccaccagtctcccctgggacctcctctgctccattccggcctgctcccagctcaccctgagggagagctgcaccgagggatgcacagggccctgctgtcagctgcaga

SEQ ID NO: 457453 - DNA, 120 bp, Artificial Sequence
  ENSG00000156959_14 (sequence is synthesized)
ccggggccctgatcagcccagagtcagaaaagactttcaggctctggaggtagcgggagggggtacgtggcctcggcagttggagcttagaagctgctcagcccgggctggcctggcctc

SEQ ID NO: 457454 - DNA, 120 bp, Artificial Sequence
  ENSG00000156959_15 (sequence is synthesized)
ctcttcctctctgctggaacatctcactgatgactgagcccttgaccttggcctcttttgcccaggcctcctctctgctgggatgtctcaccaatgactggacccttgaccctggcctgt

SEQ ID NO: 457455 - DNA, 120 bp, Artificial Sequence
  ENSG00000156959_16 (sequence is synthesized)
tttgtacagcacagacttcttggccctgttgtcagggttgggggtgtggaggggaccccagaggtggggagttgggggatgcattaccccttctgccccttttcatgccctccatacccc

SEQ ID NO: 457456 - DNA, 120 bp, Artificial Sequence
  ENSG00000156959_17 (sequence is synthesized)
aggcgtctaccaagggcagagactgtcttgtctctttgatacttttctgcataacttgaacttgcaggtcatctctgaacagggtacccctgtcccccttcctaagccttgttaccctgt

SEQ ID NO: 457457 - DNA, 120 bp, Artificial Sequence
  ENSG00000156959_18 (sequence is synthesized)
cccagcctcttcctcctcctggcccacctctcgccttgcgatatgcccagggtctgcacctatgggcagtgcttggagccgaggcatgagtgtatgtgtatgtgggtgaaatgtgtgtgc

SEQ ID NO: 457458 - DNA, 120 bp, Artificial Sequence
  ENSG00000156959_19 (sequence is synthesized)
gtgtgtgtgcgcgtgtgagcgtgtgtgtgtgtgtgtgtgttgggggacaggtgagaagtttctcccccctccacccactgtgggggcgtctcccttccccttggcagggagcaggtgagg

SEQ ID NO: 457459 - DNA, 120 bp, Artificial Sequence
  ENSG00000156959_20 (sequence is synthesized)
ccctcagcactagttgctggtgcagaccggcttcgtccagcgccccctcctggcggcctggacctgcagggaaggggcggtgccctgcaggatgccaggggaagccgcctcgggcctcgg

SEQ ID NO: 457460 - DNA, 120 bp, Artificial Sequence
  ENSG00000156959_21 (sequence is synthesized)
cggaggggagagggtcgcttgagcgccatgtgtttgccaaccttgtgttcatttccacaggacttggacctgagagttagggtttccaagaaagaccctagaagtcccctgcctgtctcc

SEQ ID NO: 457461 - DNA, 120 bp, Artificial Sequence
  ENSG00000156959_22 (sequence is synthesized)
ccactctggaccctagccggaatcagatgttgggacctagtgggttcctgccacctggaacttaccaagtcccgacttcactcctccacttactcctcccgggcaaagcctccccgcagt

SEQ ID NO: 457462 - DNA, 120 bp, Artificial Sequence
  ENSG00000156959_23 (sequence is synthesized)
gctctggtcccagcgctgggctccccttccccgccggcgccttcccggacagtccagtcggcctggggtaggggcgctgcgggacagagggtccgagttaaatgcgggaggatgcgggag

SEQ ID NO: 457463 - DNA, 120 bp, Artificial Sequence
  ENSG00000156959_24 (sequence is synthesized)
ccccgtgggagggagttggggtaggagggagttcctcaaagatgcaaaccaagcccagcgttggagggggagagcagagttaggagagagtgaggggaggggcgcagcaagcgactggga

SEQ ID NO: 457464 - DNA, 120 bp, Artificial Sequence
  ENSG00000156959_25 (sequence is synthesized)
atgggagaagacactggggtgaggagaagaggggtgcagagacagggagatgagagatgattggagaaggagcgagggggacgcacaggcacagagaaacagcgcgaggaggagagatcg

SEQ ID NO: 457465 - DNA, 120 bp, Artificial Sequence
  ENSG00000156959_26 (sequence is synthesized)
agagagacggggcagaggtggagagagatgagagaccagctgagaggctgcccgagagcttggggtgggggaggggaaatggatgaaaaggcggaaaaaggactcgggagcggggaagag

SEQ ID NO: 457466 - DNA, 120 bp, Artificial Sequence
  ENSG00000156959_27 (sequence is synthesized)
gtaaatggagatgtgggttgggggcaagaatgggatgcagaggaaggagaggaggatgaaggagccaggatgcggggcagtggggagggggttgctatctgggcactgggtgaggggaga

SEQ ID NO: 457467 - DNA, 120 bp, Artificial Sequence
  ENSG00000156959_28 (sequence is synthesized)
gcttgttcccccaaggacgcctgccaccaggtgtccttgccacaccttgttccccaaggacacccaccaaacctgtgccctggtgcgggggatagaactgacctttcagaggctggaggc

SEQ ID NO: 457468 - DNA, 120 bp, Artificial Sequence
  ENSG00000156959_29 (sequence is synthesized)
ccggggcacaggcagccaaggccgcatccttttgggaagaactggagtgaaggaagccacttcagaggacgtagtgggtccagctgacttaggagtgggtcagcgccgggtggagaggag

SEQ ID NO: 457469 - DNA, 120 bp, Artificial Sequence
  ENSG00000156959_30 (sequence is synthesized)
ggaggctagttccctggtggggtagcctggcaacattcccattccaccgcacctggccagctgccatcttggcagagccagggggagatgcaccagggagtttggagtcaggaaggcaga

SEQ ID NO: 457470 - DNA, 120 bp, Artificial Sequence
  ENSG00000156959_31 (sequence is synthesized)
gttgtgtgggctgaagtctgcgggaaccccagggtgacacaggcaaggggtagaagtcagagtggggaccaaaccatagactggggccctgggttctgcagaggtgtggatggggcaggt

SEQ ID NO: 457471 - DNA, 120 bp, Artificial Sequence
  ENSG00000156959_32 (sequence is synthesized)
ggcaggtgctccagtgggggccccaggtgaggccctgatggccctcctggggcaataaagacatcatgggaagggggctttgtggtttgcctctgctctcgtcgggcgatctggctttag

SEQ ID NO: 457472 - DNA, 120 bp, Artificial Sequence
  ENSG00000156959_33 (sequence is synthesized)
ccttcaggaggaggtaagcagaggagatcagtgcctgtttctgaccccaggagggccttgttgggctccaacctagagccttccggcttcaggtcccaagagaagtccccccctaactgt

SEQ ID NO: 457473 - DNA, 120 bp, Artificial Sequence
  ENSG00000156959_34 (sequence is synthesized)
gacccccctaactgtgatcaggggtctgccattgcccgcttttctctgcctgatctggggactcaggagaggccacggcagccacagcctaggggtggttcagtccctggcccacagtct

SEQ ID NO: 457474 - DNA, 120 bp, Artificial Sequence
  ENSG00000156959_35 (sequence is synthesized)
ggtcagttgagtccttctgggaaccggggctatgaaaactttcgtctttggggaccggtacccatgaaggaaaactttcctgagggggtgaggaccaaagaatcaagatccttttcaggc

SEQ ID NO: 457475 - DNA, 120 bp, Artificial Sequence
  ENSG00000156959_36 (sequence is synthesized)
ctgatagccaagatgatgagaacttttagataaggctgtggggagagtccctggccttttgagcatcctgcttgggcacacggggaataacctttctccagcttccagtgtgaactgaga

SEQ ID NO: 457476 - DNA, 120 bp, Artificial Sequence
  ENSG00000156959_37 (sequence is synthesized)
aagagaaagggaaaccctgtctttggagaagctgggatgttcccagcaccagaaacttctgcaggcccctgcctggcccacggctaacctttgggtgggactggagtttcctgaacaggg

SEQ ID NO: 457477 - DNA, 120 bp, Artificial Sequence
  ENSG00000156959_38 (sequence is synthesized)
aacaagggagccttccgcagagctctgatgggcaggcctccgagggcctgtgctgtgtgctgttaggatagcttggtgttgtctataccccattagtaagttttgtctgagtgtgtcctc

SEQ ID NO: 457478 - DNA, 120 bp, Artificial Sequence
  ENSG00000156959_39 (sequence is synthesized)
gctgttcattgtctaatttggtaacatttattttggtcctgaccccttctgctgctgctgggtttaagcttcagtgcaggtggaatgacattcaaataaagaaacactttctatcaccca

SEQ ID NO: 457479 - DNA, 80 bp, Artificial Sequence
  ENSG00000156959_40 (sequence is synthesized)
ctgctgggagcgccgagccgcggcgcctaggccgtgccagtcccggatccgctgcctccggccgtgcccagctcccgccc

SEQ ID NO: 457480 - DNA, 120 bp, Artificial Sequence
  ENSG00000156959_41 (sequence is synthesized)
tacaagatctgcgcctggatgcagctcttggcaggaggaatgtaacttttggaaatggctggaagtcactccagatcaagtatagagaatacgatgggtcatcaaattgataattgtcac

SEQ ID NO: 457481 - DNA, 120 bp, Artificial Sequence
  ENSG00000156959_42 (sequence is synthesized)
ttggaatgacagccaaggtgtgaggacaaagtcatgaggctggtctgtttccacaagaggacttttacaaatccagggaggaattactgcctcattggaagaattgcccaaactcctaaa

SEQ ID NO: 457482 - DNA, 120 bp, Artificial Sequence
  ENSG00000156959_43 (sequence is synthesized)
actattttgaagaaggcagatgtggacattctaatgggcttgtttcaaattcatctcacccaactcaatttagatgtggatctttgaagagggtgggaaaggtgaactataggatatggg

SEQ ID NO: 457483 - DNA, 120 bp, Artificial Sequence
  ENSG00000156959_44 (sequence is synthesized)
ggatatggctccatacttctctgtggtacccagggaggtgatattatgtatttctattctatttctcctgcaaaggcaagctggaatcctcaactcatcaaccttaatttggagtctgca

SEQ ID NO: 457484 - DNA, 120 bp, Artificial Sequence
  ENSG00000156966_0 (sequence is synthesized)
ctccgtccccacccgcccgccgtcccgccggcccgagccgtggcgcccagagctgcgagccgctcgcccctccgccgctccggcccgggccgccatgtcgctgtggaagaaaaccgtcta

SEQ ID NO: 457485 - DNA, 120 bp, Artificial Sequence
  ENSG00000156966_1 (sequence is synthesized)
ccggagtctgtgcctggccctggccctgctcgtggccgtgacggtgttccaacgcagtctcacccctggtcagtttctgcaggagcctccgccacccaccctggagccacagaaggccca

SEQ ID NO: 457486 - DNA, 120 bp, Artificial Sequence
  ENSG00000156966_2 (sequence is synthesized)
gaagccaaatggacagctggtgaaccccaacaacttctggaagaacccgaaagatgtggctgcgcccacgcccatggcctctcaggggccccaggcctgggacgtgaccaccactaactg

SEQ ID NO: 457487 - DNA, 120 bp, Artificial Sequence
  ENSG00000156966_3 (sequence is synthesized)
ctcagccaatatcaacttgacccaccagccctggttccaggtcctggagccgcagttccggcagtttctcttctaccgccactgccgctacttccccatgctgctgaaccacccggagaa

SEQ ID NO: 457488 - DNA, 120 bp, Artificial Sequence
  ENSG00000156966_4 (sequence is synthesized)
gtgcaggggcgatgtctacctgctggtggttgtcaagtcggtcatcacgcagcacgaccgccgcgaggccatccgccagacctggggccgcgagcggcagtccgcgggtgggggccgagg

SEQ ID NO: 457489 - DNA, 120 bp, Artificial Sequence
  ENSG00000156966_5 (sequence is synthesized)
cgccgtgcgcaccctcttcctgctgggcacggcctccaagcaggaggagcgcacgcactaccagcagctgctggcctacgaagaccgcctctacggcgacatcctgcagtggggctttct

SEQ ID NO: 457490 - DNA, 120 bp, Artificial Sequence
  ENSG00000156966_6 (sequence is synthesized)
cgacaccttcttcaacctgaccctcaaggagatccacttcctcaagtggctggacatctactgcccccacgtccccttcattttcaaaggcgacgatgacgtcttcgtcaaccccaccaa

SEQ ID NO: 457491 - DNA, 120 bp, Artificial Sequence
  ENSG00000156966_7 (sequence is synthesized)
cctgctagaatttctggctgaccggcagccacaggaaaacctgttcgtgggcgatgtcctgcagcacgctcggcccattcgcaggaaagacaacaaatactacatcccgggggccctgta

SEQ ID NO: 457492 - DNA, 120 bp, Artificial Sequence
  ENSG00000156966_8 (sequence is synthesized)
cggcaaggccagctatccgccgtatgcaggcggcggtggcttcctcatggccggcagcctggcccggcgcctgcaccatgcctgcgacaccctggagctctacccgatcgacgacgtctt

SEQ ID NO: 457493 - DNA, 120 bp, Artificial Sequence
  ENSG00000156966_9 (sequence is synthesized)
tctgggcatgtgcctggaggtgctgggcgtgcagcccacggcccacgagggcttcaagactttcggcatctcccggaaccgcaacagccgcatgaacaaggagccgtgctttttccgcgc

SEQ ID NO: 457494 - DNA, 120 bp, Artificial Sequence
  ENSG00000156966_10 (sequence is synthesized)
catgctcgtggtgcacaagctgctgccccctgagctgctcgccatgtgggggctggtgcacagcaatctcacctgctcccgcaagctccaggtgctctgaccccagccgggctactagga

SEQ ID NO: 457495 - DNA, 120 bp, Artificial Sequence
  ENSG00000156966_11 (sequence is synthesized)
caggccagggcacttgctcctgagcccccatggtattggggctggagccacagtgcccaggcctagcctttggtccccaaggggaggtggagggttgaggcctacgtgccactgggtgtg

SEQ ID NO: 457496 - DNA, 120 bp, Artificial Sequence
  ENSG00000156966_12 (sequence is synthesized)
gtggggtgcaggtagccagaaagggacctccctgtgtggataattctaggaaactgaggcccaggaacggttggagctgcccagtctggaggccctctctgaggagcgaggcgccaggcc

SEQ ID NO: 457497 - DNA, 120 bp, Artificial Sequence
  ENSG00000156966_13 (sequence is synthesized)
ctggcagccctcctgacctgggtccgttgctggccccctcagatgtggtgggaggtcctggtgacctctggaggaacgctgtgctcaggtacctgggctaggcctggcctgatgggtctg

SEQ ID NO: 457498 - DNA, 120 bp, Artificial Sequence
  ENSG00000156966_14 (sequence is synthesized)
ggccgggcggccctggcaggagaaactcaaccctgtgcgggctcacaggcaccccccagtccacaccctggtctcctgggagagagggcccagccggctctccgcagccccaggcctgcc

SEQ ID NO: 457499 - DNA, 120 bp, Artificial Sequence
  ENSG00000156966_15 (sequence is synthesized)
tggagacgggccgcctctgccacagggcctccactcctggctgtgtcctgtaaggtctggaagggcgaccgctctgactacctcagcgcccctcagaatctccctggggctgcagcccta

SEQ ID NO: 457500 - DNA, 120 bp, Artificial Sequence
  ENSG00000156966_16 (sequence is synthesized)
ccccaccccgacacagggcagaagagcagcgctcctggccccccgaagtcccagagctgctgacccccaccccaggcaagtctctcccgcagcccccacacccccaggcctggctccctg

SEQ ID NO: 457501 - DNA, 120 bp, Artificial Sequence
  ENSG00000156966_17 (sequence is synthesized)
gctggaaagcagccggtttggccctggaagtggacattcctctattactgtgaagttttatttatgaagaatttggagggagaaggctccaggcttcaggagggggtggtgtcctccctg

SEQ ID NO: 457502 - DNA, 120 bp, Artificial Sequence
  ENSG00000156966_18 (sequence is synthesized)
gccctcctcccttccctcccctcattccagctgcctgccctcagcacccccaggcccctcacagcccagccccctccagagccctgccccaccgcaccctgcttctccagggcctagcag

SEQ ID NO: 457503 - DNA, 120 bp, Artificial Sequence
  ENSG00000156966_19 (sequence is synthesized)
accagcatctgccccggtgaagggatggatcagctgtgggggtgggtgcagaaggttgccacctcctacctcagcgggagtcacctaggaaagatggagggattgacactattttctcaa

SEQ ID NO: 457504 - DNA, 120 bp, Artificial Sequence
  ENSG00000156966_20 (sequence is synthesized)
tttttttttttttttttttttggtgtgaaacttcctgttcccagctgcatcagagagcctgtctggggccaaggttgccagagatttctgaagacacagcttgttccttgttcttggctg

SEQ ID NO: 457505 - DNA, 120 bp, Artificial Sequence
  ENSG00000156966_21 (sequence is synthesized)
tccttgttcttggctggtgggtgcacaaggacttctggaagggatttagacggggctgagtgctaggattaaagtggggatgggagtacggcaacagaaaaacctgggagctagcaatgc

SEQ ID NO: 457506 - DNA, 120 bp, Artificial Sequence
  ENSG00000156966_22 (sequence is synthesized)
acccagcccttgactgtgccctggtggacagccgagctgtggctctagcgtgagccagtgccttcctgtccctgccaagggtgaggccagagttggccccgaggctaatgtttcagtggg

SEQ ID NO: 457507 - DNA, 120 bp, Artificial Sequence
  ENSG00000156966_23 (sequence is synthesized)
tgagattaggtcggccgtacagaggccggtgggctccctgacatcccttccaggcaacctgaaagcactgaaatagcttatggccctgtgccagggaccttggcccaagctgctgacctc

SEQ ID NO: 457508 - DNA, 120 bp, Artificial Sequence
  ENSG00000156966_24 (sequence is synthesized)
cagggtggggagggagctacccccaggagaagagtcactcagacagcagtatgagcaagccagccagcagctccgtgcctgcacccagctcaggggaatcccagggggttcagatgccca

SEQ ID NO: 457509 - DNA, 71 bp, Artificial Sequence
  ENSG00000156966_25 (sequence is synthesized)
gcacccagctcaggggaatcccagggggttcagatgcccaggaaggaaaaggggacagcgctactgctacc

SEQ ID NO: 457510 - DNA, 78 bp, Artificial Sequence
  ENSG00000156966_26 (sequence is synthesized)
gataataatattaacccctgaccaaaacgactggtgttatctgtaaatcccagacattgtgtgagaaagcaccgtaaa

SEQ ID NO: 457511 - DNA, 120 bp, Artificial Sequence
  ENSG00000156966_27 (sequence is synthesized)
ttaacccctgaccaaaacgactggtgttatctgtaaatcccagacattgtgtgagaaagcaccgtaaaactttttgtcctattagctgatgtgtgtagcccccagtcacgttcctcacgc

SEQ ID NO: 457512 - DNA, 70 bp, Artificial Sequence
  ENSG00000156966_28 (sequence is synthesized)
tggaccccttagagttgtaagccgagtctgccgacgctcccggccgaataaaaacctcttccttctttaa

SEQ ID NO: 457513 - DNA, 120 bp, Artificial Sequence
  ENSG00000156968_0 (sequence is synthesized)
aatcgctccggagcttctggagggggcagatgcaggtgccggctgctgcagtgcagtagctgctggaggctggggaggcccggacccggtgcaggaagacgccgaccacgcgggctcctg

SEQ ID NO: 457514 - DNA, 120 bp, Artificial Sequence
  ENSG00000156968_1 (sequence is synthesized)
atcgcgggcgcccacagcgcggacatggcgggctggtggccggcgttgtcgcgcgcggcccggcgccacccgtggcccaccaacgtgctgctttacggctcgctcgtctcggccggggac

SEQ ID NO: 457515 - DNA, 120 bp, Artificial Sequence
  ENSG00000156968_2 (sequence is synthesized)
gcgctgcaacagcggctgcagggccgcgaggccaactggcgccagacgcggcgcgtggccacgttggtggtgaccttccacgccaacttcaactacgtgtggctgcgcctgctggagcgc

SEQ ID NO: 457516 - DNA, 120 bp, Artificial Sequence
  ENSG00000156968_3 (sequence is synthesized)
gcgctcccgggccgagcgccgcacgccctgctggccaagttgctgtgcgaccaggtggtcggtgcgcccatcgcggtctcggccttctatgtcggtatgagcattctccaaggaaaggat

SEQ ID NO: 457517 - DNA, 120 bp, Artificial Sequence
  ENSG00000156968_4 (sequence is synthesized)
gacatatttttggacctgaaacagaaattctggaatacctatctgagtggactgatgtactggccctttgtacagctgaccaacttcagccttgttcctgttcaatggagaacagcttac

SEQ ID NO: 457518 - DNA, 120 bp, Artificial Sequence
  ENSG00000156968_5 (sequence is synthesized)
gctggagtctgtggttttctctgggccaccttcatctgtttttcccagcagagtggtgacggcacattcaagtcagctttcaccattttatatacaaaggggaccagtgccacagaaggg

SEQ ID NO: 457519 - DNA, 120 bp, Artificial Sequence
  ENSG00000156968_6 (sequence is synthesized)
tacccgaagaaatgagaagtcaaggactctcttaaagggaccacattttttacctaaaatgcacagaattgcctgcagacaaaatatttgatgtgccaattatgcacttcattttgagga

SEQ ID NO: 457520 - DNA, 120 bp, Artificial Sequence
  ENSG00000156968_7 (sequence is synthesized)
aggaattactactatttatagacccactttttaaaaaattatcaatgattatttttgaattgtattcagacttttttcctgttctagtctgaaatattacttctctaatattttggttaa

SEQ ID NO: 457521 - DNA, 120 bp, Artificial Sequence
  ENSG00000156968_8 (sequence is synthesized)
aataatagtggcaaaatggcattttagaattattaatatttctaatattttaacacaagtttcaggaaacttggttttgattgttcacatttctattctaaaatctcaggttatctcctg

SEQ ID NO: 457522 - DNA, 120 bp, Artificial Sequence
  ENSG00000156968_9 (sequence is synthesized)
aacacttttgggcagatgaagttttataccaaaaaatagttcttagagtgaattttaatttacatagaactcaatcgaaatgaagatttaataaccagatttctttctccaaaacataca

SEQ ID NO: 457523 - DNA, 120 bp, Artificial Sequence
  ENSG00000156968_10 (sequence is synthesized)
caatttgttattttagtaaatacctttttttttttttttttttttgtggtggagtcttgctgtctccccggctggagcgcagtggcacgatcgcggctcactgcagcctccatcctctgg

SEQ ID NO: 457524 - DNA, 81 bp, Artificial Sequence
  ENSG00000156968_11 (sequence is synthesized)
ctgagtagctgggattacaggcacgtgacaccaggcccagctgatttttgtatttttgttcatttgcttttgtttttgtgt

SEQ ID NO: 457525 - DNA, 78 bp, Artificial Sequence
  ENSG00000156968_12 (sequence is synthesized)
attacaggcagggcgttttgccatgttggctaggctggtctctgtccgtcctctgagctcaagctaagccatcatatc

SEQ ID NO: 457526 - DNA, 82 bp, Artificial Sequence
  ENSG00000156968_13 (sequence is synthesized)
ttttagtagagagggcgttttgccatgttggctaggctggtctctgtccgtcctctgagctcaagctaagccatcatattta

SEQ ID NO: 457527 - DNA, 84 bp, Artificial Sequence
  ENSG00000156968_14 (sequence is synthesized)
ctgatgacattgcaccattgtgatatgttactcccacccttaagaaggttctttttaattctccccacccttgagaatgtactt

SEQ ID NO: 457528 - DNA, 120 bp, Artificial Sequence
  ENSG00000156968_15 (sequence is synthesized)
ggtgaaataaacagccatgttgctcatacaaagcctgtttggtggcctcttcacacggacacgtgagacagtctccaactcctggcctcaactgatccactctcattggcctcccaaggt

SEQ ID NO: 457529 - DNA, 120 bp, Artificial Sequence
  ENSG00000156968_16 (sequence is synthesized)
ggattataggcatgagccaccgcacctggctcagtaagtacattttttattatcaaaaacagagtagtgtatgattggcgtattctgtgtagaatgtattttattgatgtcttctatttt

SEQ ID NO: 457530 - DNA, 120 bp, Artificial Sequence
  ENSG00000156968_17 (sequence is synthesized)
tttttataatttttaatgaatgctttttagttttgggcagattcagttgactaaagcacctcatttcccagatacatgaaataaaatacttggtttcttttccaatttcacactgatgtt

SEQ ID NO: 457531 - DNA, 120 bp, Artificial Sequence
  ENSG00000156968_18 (sequence is synthesized)
tgtgaaaatcagtgctttaagataaatatttatactttaaggtaaacatgagaaacttgatctaatatttaatatttattcagttctacactttattaacttctacaccagcagatttaa

SEQ ID NO: 457532 - DNA, 82 bp, Artificial Sequence
  ENSG00000156968_19 (sequence is synthesized)
tattcagttctacactttattaacttctacaccagcagatttaaaaattatgtaactatctcaagaagtttcacttggacgt

SEQ ID NO: 457533 - DNA, 90 bp, Artificial Sequence
  ENSG00000156968_20 (sequence is synthesized)
gcttaaggcacaagatcccatctctattttaaagaaaagtttcactttgggaggccaaggcggttggatcacaaggtcaggagatcgaga

SEQ ID NO: 457534 - DNA, 120 bp, Artificial Sequence
  ENSG00000156968_21 (sequence is synthesized)
gtgagactccgtctcaaaaaaaaaaagtttcagtaaattccacctaagaattccaccagagttctgtcatctccaatgtcatgttccacagatttcaagttgtgaagccctgaactgtta

SEQ ID NO: 457535 - DNA, 120 bp, Artificial Sequence
  ENSG00000156968_22 (sequence is synthesized)
aagttgtgaagccctgaactgttaatttatcctgagaatgtatatttaagcttaatttaagactatatacctaaaaattgagcatataatttgtataatttgtttatgtaagtttctgta

SEQ ID NO: 457536 - DNA, 120 bp, Artificial Sequence
  ENSG00000156968_23 (sequence is synthesized)
agtcataaatatgtagtttccaagtggataatttacctgaatgtaaaaggcattaatatattttacattattgggaccatagtacagaaatttctaaatggtttgtaaaataacttgtta

SEQ ID NO: 457537 - DNA, 120 bp, Artificial Sequence
  ENSG00000156968_24 (sequence is synthesized)
gtaaaataacttgttatttgctttgttgtaaaagtagttaatacaatggaaaaatggtttcgtaataagaagatacattttaacatcaaaacgtaggccgggcacagtggcttacgcctg

SEQ ID NO: 457538 - DNA, 120 bp, Artificial Sequence
  ENSG00000156968_25 (sequence is synthesized)
aaaacaaacaaacaaacaaaaaactgtacccaagttaattataagtactacctggtgcaaaactttacagaagctgtggtatcacttttatgatagaagaatagtgtttgcattttgtat

SEQ ID NO: 457539 - DNA, 120 bp, Artificial Sequence
  ENSG00000156968_26 (sequence is synthesized)
tgtttgcattttgtataaaagtacttggggctgggcatgatcgcttatgtctataatccaagtgctttgggaggcgaaggcaggtggatcatctgagcccaggagtttgagaccagccta

SEQ ID NO: 457540 - DNA, 120 bp, Artificial Sequence
  ENSG00000156968_27 (sequence is synthesized)
ggtgtgagcctgtagtcccagctacttggaagactcatgcaggaggatctctcgagctcaggaggcagaagatgaataaataaatggatgcaactgaatgagatgaggtctctcttgaag

SEQ ID NO: 457541 - DNA, 120 bp, Artificial Sequence
  ENSG00000156968_28 (sequence is synthesized)
gcagaagatgaataaataaatggatgcaactgaatgagatgaggtctctcttgaaggagagagcaaaagagatttaaataataacaattataagaaggctgggcgcggtggctcatgctt

SEQ ID NO: 457542 - DNA, 75 bp, Artificial Sequence
  ENSG00000156968_29 (sequence is synthesized)
aggagttcaagaccagcaaccggacatggtagtgcgtcctgtagtctcagctactcaggtggctgagacaggaga

SEQ ID NO: 457543 - DNA, 120 bp, Artificial Sequence
  ENSG00000156968_30 (sequence is synthesized)
atcgcttgaacctgggaggcataggttgtagtgagccgataaatataaaaagtattaaagtactaacagaagaaaatttccactgatcaccctttagctttaaataatgcagaagcatat

SEQ ID NO: 457544 - DNA, 120 bp, Artificial Sequence
  ENSG00000156968_31 (sequence is synthesized)
accctttagctttaaataatgcagaagcatatgcccagtttacttgtaattaaaaatcatgcatcattcacaatttatcagtcttttttgtttgtacaaaaactaatataagttattctc

SEQ ID NO: 457545 - DNA, 120 bp, Artificial Sequence
  ENSG00000156968_32 (sequence is synthesized)
aactaatataagttattctcttttatttgtattgtgattggtttgatgagagggaattaggccacttgagagtttgtgcgtgtttataattttctggctgggcccggtggctcatgcctg

SEQ ID NO: 457546 - DNA, 83 bp, Artificial Sequence
  ENSG00000156968_33 (sequence is synthesized)
cacttgagctcaggagtttgagaccaacttgggcaatgtggtgaaaccctatcctgcacctgtcctcccagctacttgggggt

SEQ ID NO: 457547 - DNA, 78 bp, Artificial Sequence
  ENSG00000156968_34 (sequence is synthesized)
tacaaaaattagccgggtgtggtggcttgcacctgtcctcccagctacttgggggtgctgaggcaggaggatcactca

SEQ ID NO: 457548 - DNA, 120 bp, Artificial Sequence
  ENSG00000156968_35 (sequence is synthesized)
aaaaaaaaaaaaaagaaagaaaagtaaattaactttggtatttcaggttgtatttatatggggacttcacatcaactatgttcactacaattgaccaagttaagtgtagacagtctcttt

SEQ ID NO: 457549 - DNA, 84 bp, Artificial Sequence
  ENSG00000156968_36 (sequence is synthesized)
atctggaactgcgtagcccaggttggagtgcagtgtcgcgatctcgcctcactgcaacctctgtctcccgggttcacgccattc

SEQ ID NO: 457550 - DNA, 86 bp, Artificial Sequence
  ENSG00000156968_37 (sequence is synthesized)
aagtagcagggactaaaggcgcccgccaccatgacccactaattttttttttttttggatttttagtagagtcggggtttcactgt

SEQ ID NO: 457551 - DNA, 68 bp, Artificial Sequence
  ENSG00000156968_38 (sequence is synthesized)
actgcaatttctaactcatacatcattgctataaaccttatttgtttactgtttctcttccaaggacg

SEQ ID NO: 457552 - DNA, 120 bp, Artificial Sequence
  ENSG00000156968_39 (sequence is synthesized)
ctataaaccttatttgtttactgtttctcttccaaggacggtcagtcatcctttaaaattcatttgaagttatgaaaagatagtttttgttacatgggaaatttacttttagtacagtaa

SEQ ID NO: 457553 - DNA, 120 bp, Artificial Sequence
  ENSG00000156968_40 (sequence is synthesized)
aatgttatgtgaatttctacagaatgtttgctagaatgaattatatctaggatatgcttaacaatatattctggaggcagctttcatttgaaattaggttcatcttctgagagtattaaa

SEQ ID NO: 457554 - DNA, 120 bp, Artificial Sequence
  ENSG00000156968_41 (sequence is synthesized)
aagttaatgggtttttgtgcctgaagattttgatgttgcatttggctacatttaatccactttcacccataaggtttagcatctaaaaaaattaaatcactgctaatgcaattaaaatga

SEQ ID NO: 457555 - DNA, 120 bp, Artificial Sequence
  ENSG00000156968_42 (sequence is synthesized)
ccaggtggtcggtgcgcccatcgcggtctcggccttctatgtcgggtctcactctattccccaggctgaagtgcagtgatgtgatcacagctcattgcagcctcgacctcctgggctcaa

SEQ ID NO: 457556 - DNA, 120 bp, Artificial Sequence
  ENSG00000156970_0 (sequence is synthesized)
gaccgcgcgggaccgttaaatttgaaacttggcggctaggggtgtgggcttgaggtggccggtttgttagggagtcgtgtacgtgccttggtcgcttctgtagctccgagggcaggttgc

SEQ ID NO: 457557 - DNA, 120 bp, Artificial Sequence
  ENSG00000156970_1 (sequence is synthesized)
ggaagaaagcccaggcggtctgtggcccagaggaaaggcctgcagcaggacgaggacctgagccaggaatgcaggatggcggcggtgaagaaggaagggggtgctctgagtgaagccatg

SEQ ID NO: 457558 - DNA, 120 bp, Artificial Sequence
  ENSG00000156970_2 (sequence is synthesized)
tccctggagggagatgaatgggaactgagtaaagaaaatgtacaacctttaaggcaagggcggatcatgtccacgcttcagggagcactggcacaagaatctgcctgtaacaatactctt

SEQ ID NO: 457559 - DNA, 120 bp, Artificial Sequence
  ENSG00000156970_3 (sequence is synthesized)
cagcagcagaaacgggcatttgaatatgaaattcgattttacactggaaatgaccctctggatgtttgggataggtatatcagctggacagagcagaactatcctcaaggtgggaaggag

SEQ ID NO: 457560 - DNA, 120 bp, Artificial Sequence
  ENSG00000156970_4 (sequence is synthesized)
agtaatatgtcaacgttattagaaagagctgtagaagcactacaaggagaaaaacgatattatagtgatcctcgatttctcaatctctggcttaaattagggcgtttatgcaatgagcct

SEQ ID NO: 457561 - DNA, 120 bp, Artificial Sequence
  ENSG00000156970_5 (sequence is synthesized)
ttggatatgtacagttacttgcacaaccaagggattggtgtttcacttgctcagttctatatctcatgggcagaagaatatgaagctagagaaaactttaggaaagcagatgcgatattt

SEQ ID NO: 457562 - DNA, 120 bp, Artificial Sequence
  ENSG00000156970_6 (sequence is synthesized)
caggaagggattcaacagaaggctgaaccactagaaagactacagtcccagcaccgacaattccaagctcgagtgtctcggcaaactctgttggcacttgagaaagaagaagaggaggaa

SEQ ID NO: 457563 - DNA, 120 bp, Artificial Sequence
  ENSG00000156970_7 (sequence is synthesized)
gtttttgagtcttctgtaccacaacgaagcacactagctgaactaaagagcaaagggaaaaagacagcaagagctccaatcatccgtgtaggaggtgctctcaaggctccaagccagaac

SEQ ID NO: 457564 - DNA, 120 bp, Artificial Sequence
  ENSG00000156970_8 (sequence is synthesized)
agaggactccaaaatccatttcctcaacagatgcaaaataatagtagaattactgtttttgatgaaaatgctgatgaggcttctacagcagagttgtctaagcctacagtccagccatgg

SEQ ID NO: 457565 - DNA, 120 bp, Artificial Sequence
  ENSG00000156970_9 (sequence is synthesized)
atagcaccccccatgcccagggccaaagagaatgagctgcaagcaggcccttggaacacaggcaggtccttggaacacaggcctcgtggcaatacagcttcactgatagctgtacccgct

SEQ ID NO: 457566 - DNA, 120 bp, Artificial Sequence
  ENSG00000156970_10 (sequence is synthesized)
gtgcttcccagtttcactccatatgtggaagagactgcacgacagccagttatgacaccatgtaaaattgaacctagtataaaccacatcctaagcaccagaaagcctggaaaggaagaa

SEQ ID NO: 457567 - DNA, 120 bp, Artificial Sequence
  ENSG00000156970_11 (sequence is synthesized)
ggagatcctctacaaagggttcagagccatcagcaagcgtctgaggagaagaaagagaagatgatgtattgtaaggagaagatttatgcaggagtaggggaattctcctttgaagaaatt

SEQ ID NO: 457568 - DNA, 120 bp, Artificial Sequence
  ENSG00000156970_12 (sequence is synthesized)
cgggctgaagttttccggaagaaattaaaagagcaaagggaagccgagctattgaccagtgcagagaagagagcagaaatgcagaaacagattgaagagatggagaagaagctaaaagaa

SEQ ID NO: 457569 - DNA, 120 bp, Artificial Sequence
  ENSG00000156970_13 (sequence is synthesized)
atccaaactactcagcaagaaagaacaggtgatcagcaagaagagacgatgcctacaaaggagacaactaaactgcaaattgcttccgagtctcagaaaataccaggaatgactctatcc

SEQ ID NO: 457570 - DNA, 120 bp, Artificial Sequence
  ENSG00000156970_14 (sequence is synthesized)
agttctgtttgtcaagtaaactgttgtgccagagaaacttcacttgcggagaacatttggcaggaacaacctcattctaaaggtcccagtgtacctttctccatttttgatgagtttctt

SEQ ID NO: 457571 - DNA, 120 bp, Artificial Sequence
  ENSG00000156970_15 (sequence is synthesized)
agaaaagaagaataaaagtcctcctgcagatcccccacgagttttagctcaacgaagaccccttgcagttctcaaaacctcagaaagcatcacctcaaatgaagatgtgtctccagatgt

SEQ ID NO: 457572 - DNA, 120 bp, Artificial Sequence
  ENSG00000156970_16 (sequence is synthesized)
ttgtgatgaatttacaggaattgaacccttgagcgaggatgccattatcacaggcttcagaaatgtaacaatttgtcctaacccagaagacacttgtgactttgccagagcagctcgttt

SEQ ID NO: 457573 - DNA, 120 bp, Artificial Sequence
  ENSG00000156970_17 (sequence is synthesized)
tgtatccactccttttcatgagataatgtccttgaaggatctcccttctgatcctgagagactgttaccggaagaagatctagatgtaaagacctctgaggaccagcagacagcttgtgg

SEQ ID NO: 457574 - DNA, 120 bp, Artificial Sequence
  ENSG00000156970_18 (sequence is synthesized)
cactatctacagtcagactctcagcatcaagaagctgagcccaattattgaagacagtcgtgaagccacacactcctctggcttctctggttcttctgcctcggttgcaagcacctcctc

SEQ ID NO: 457575 - DNA, 120 bp, Artificial Sequence
  ENSG00000156970_19 (sequence is synthesized)
catcaaatgtcttcaaattcctgagaaactagaacttactaatgagacttcagaaaaccctactcagtcaccatggtgttcacagtatcgcagacagctactgaagtccctaccagagtt

SEQ ID NO: 457576 - DNA, 120 bp, Artificial Sequence
  ENSG00000156970_20 (sequence is synthesized)
aagtgcctctgcagagttgtgtatagaagacagaccaatgcctaagttggaaattgagaaggaaattgaattaggtaatgaggattactgcattaaacgagaatacctaatatgtgaaga

SEQ ID NO: 457577 - DNA, 120 bp, Artificial Sequence
  ENSG00000156970_21 (sequence is synthesized)
ttacaagttattctgggtggcgccaagaaactctgcagaattaacagtaataaaggtatcttctcaacctgtcccatgggacttttatatcaacctcaagttaaaggaacgtttaaatga

SEQ ID NO: 457578 - DNA, 120 bp, Artificial Sequence
  ENSG00000156970_22 (sequence is synthesized)
agattttgatcatttttgcagctgttatcaatatcaagatggctgtattgtttggcaccaatatataaactgcttcacccttcaggatcttctccaacacagtgaatatattacccatga

SEQ ID NO: 457579 - DNA, 120 bp, Artificial Sequence
  ENSG00000156970_23 (sequence is synthesized)
aataacagtgttgattatttataaccttttgacaatagtggagatgctacacaaagcagaaatagtccatggtgacttgagtccaaggtgtctgattctcagaaacagaatccacgatcc

SEQ ID NO: 457580 - DNA, 120 bp, Artificial Sequence
  ENSG00000156970_24 (sequence is synthesized)
ctatgattgtaacaagaacaatcaagctttgaagatagtggacttttcctacagtgttgaccttagggtgcagctggatgtttttaccctcagcggctttcggactgtacagatcctgga

SEQ ID NO: 457581 - DNA, 120 bp, Artificial Sequence
  ENSG00000156970_25 (sequence is synthesized)
aggacaaaagatcctggctaactgttcttctccctaccaggtagacctgtttggtatagcagatttagcacatttactattgttcaaggaacacctacaggtcttctgggatgggtcctt

SEQ ID NO: 457582 - DNA, 120 bp, Artificial Sequence
  ENSG00000156970_26 (sequence is synthesized)
ctggaaacttagccaaaatatttctgagctaaaagatggtgaattgtggaataaattctttgtgcggattctgaatgccaatgatgaggccacagtgtctgttcttggggagcttgcagc

SEQ ID NO: 457583 - DNA, 120 bp, Artificial Sequence
  ENSG00000156970_27 (sequence is synthesized)
agaaatgaatggggtttttgacactacattccaaagtcacctgaacaaagccttatggaaggtagggaagttaactagtcctggggctttgctctttcagtgagctaggcaatcaagtct

SEQ ID NO: 457584 - DNA, 120 bp, Artificial Sequence
  ENSG00000156970_28 (sequence is synthesized)
cacagattgctgcctcagagcaatggttgtattgtggaacactgaaactgtatgtgctgtaatttaatttaggacacatttagatgcactaccattgctgttctactttttggtacaggt

SEQ ID NO: 457585 - DNA, 120 bp, Artificial Sequence
  ENSG00000156970_29 (sequence is synthesized)
atattttgacgtcactgatattttttatacagtgatatacttactcatggccttgtctaacttttgtgaagaactattttattctaaacagactcattacaaatggttaccttgttattt

SEQ ID NO: 457586 - DNA, 120 bp, Artificial Sequence
  ENSG00000156970_30 (sequence is synthesized)
aacccatttgtctctacttttccctgtacttttcccatttgtaatttgtaaaatgttctcttatgatcaccatgtattttgtaaataataaaatagtatctgttaaatttgtgcttctaa

SEQ ID NO: 457587 - DNA, 120 bp, Artificial Sequence
  ENSG00000156970_31 (sequence is synthesized)
cactggaaatgaccctctggatgtttgggataggtgggtctttttatttcacaaggacaatagaaacattaacaggtatatcagctggacagagcagaactatcctcaaggtgggaagga

SEQ ID NO: 457588 - DNA, 79 bp, Artificial Sequence
  ENSG00000156970_32 (sequence is synthesized)
tgcctgtaacaatactcttcagcagcagaaacgagacggagtctcgctctttcggctctgcctcctgggttcacgccaa

SEQ ID NO: 457589 - DNA, 120 bp, Artificial Sequence
  ENSG00000156970_33 (sequence is synthesized)
agtatatgcctggcactgctcagttgagtacaacagtactggtttagagtaggaataaaaattattggaaatgacttttgtggtacactcattttgtactgttagtggatgtctagggaa

SEQ ID NO: 457590 - DNA, 120 bp, Artificial Sequence
  ENSG00000156970_34 (sequence is synthesized)
tttttaccatctcttttaattcctcttgaatatttagccatggtctatatatgctgtctgagaacataaaactatggtaattttagttttcttcttcatctccagcctcgtggcaataca

SEQ ID NO: 457591 - DNA, 120 bp, Artificial Sequence
  ENSG00000156970_35 (sequence is synthesized)
actgatagctgtacccgctgtgcttcccagtttcactccatatgtggaagagactgcacgacagccagttatagtcttgctctgttgcccagcaggctgaagtgcagtggcaccatctca

SEQ ID NO: 457592 - DNA, 120 bp, Artificial Sequence
  ENSG00000156973_0 (sequence is synthesized)
atcagaagcgggagctgaggggagagagaggccggtcctggtctggccgctgcggctgctagcccgaggtctccaagccgggctgcggctccatcctcggctcctgggcaccgtctgcga

SEQ ID NO: 457593 - DNA, 120 bp, Artificial Sequence
  ENSG00000156973_1 (sequence is synthesized)
ggctccgccgaccagagtgagaaagccgcgggcggcgaccgccgcatcatgtcagccaaggacgagcgggccagggagatcctgaggggcttcaaactaaattggatgaaccttcgggat

SEQ ID NO: 457594 - DNA, 120 bp, Artificial Sequence
  ENSG00000156973_2 (sequence is synthesized)
gctgagacagggaagatactctggcaaggaacagaagacctgtctgtccctggtgtggagcatgaagcccgtgttcccaagaaaatcctcaagtgcaaggcagtgtctcgagaacttaat

SEQ ID NO: 457595 - DNA, 120 bp, Artificial Sequence
  ENSG00000156973_3 (sequence is synthesized)
ttttcttcgacagaacaaatggaaaaattccgcctggaacaaaaagtttacttcaaagggcaatgcctagaagaatggttcttcgagtttggctttgtgatccctaactccacaaatacc

SEQ ID NO: 457596 - DNA, 120 bp, Artificial Sequence
  ENSG00000156973_4 (sequence is synthesized)
gggaacgttatcatagaaacaaagttttttgacgacgatcttcttgtaagcacatccagagtgagacttttctatgtttgaaagaagaatgtgtgtacatttcaagaatttgggtttttt

SEQ ID NO: 457597 - DNA, 120 bp, Artificial Sequence
  ENSG00000156973_5 (sequence is synthesized)
ggagggaggaggaaactgtttacttttttcctccacacgtttgatttttgacacatacacccctaattccctcaacagcagaacctacctgcagccaccaggggaccagctctgtgtagg

SEQ ID NO: 457598 - DNA, 120 bp, Artificial Sequence
  ENSG00000156973_6 (sequence is synthesized)
taaccagatggctctttttcccaagccaccatcttccagctgaccagactaaactcccaaccccagaccagggcaggggacaggtctcaagtccttcccagcatacacacagggaacaaa

SEQ ID NO: 457599 - DNA, 120 bp, Artificial Sequence
  ENSG00000156973_7 (sequence is synthesized)
cacataccacaaaccggtaactgtacctgtcaccctccttgtctcctccttgggccctacaggctacacatctacctttggcccctggttttggaaaaattccgtgttcctgacccatgt

SEQ ID NO: 457600 - DNA, 120 bp, Artificial Sequence
  ENSG00000156973_8 (sequence is synthesized)
cctgacccatgtttagttttttcctaccatttctatttcatacattctcatacatttaacttgtaaaatagactgtgatattattacataatgtaattaaaaatatgaattaaaatattc

SEQ ID NO: 457601 - DNA, 120 bp, Artificial Sequence
  ENSG00000156973_9 (sequence is synthesized)
ggcggggagggggtggctaggggcccaaggagaggaatgcggcctagacggtactgcagcccaaccgtcgccatcgccatcccgggccccaaatcctccccttaggctgtgctttctctc

SEQ ID NO: 457602 - DNA, 120 bp, Artificial Sequence
  ENSG00000156973_10 (sequence is synthesized)
tcaggagctccccatggctactgcgctacccctgggcaccgagatacattaagcctactaactaccacttattgagcgttttaccatgtgccagccttaccatgatttgcagatgtctga

SEQ ID NO: 457603 - DNA, 120 bp, Artificial Sequence
  ENSG00000156973_11 (sequence is synthesized)
attgagagatttcagaagcaacgttttcatctgattggaaataccgtattgctgaaaagaagaaaggcctttttaatggcttttgaacaaagcagaaaagtttgagcttctcaccttcag

SEQ ID NO: 457604 - DNA, 120 bp, Artificial Sequence
  ENSG00000156973_12 (sequence is synthesized)
tcttagctcttgaacctgttgagaaagaggataagagacaaatacggaaaagagtttcagaaagcagaatctgtgtcagcccactggaaggaaaagcgaatcaaccgattcagtgatgtt

SEQ ID NO: 457605 - DNA, 120 bp, Artificial Sequence
  ENSG00000156973_13 (sequence is synthesized)
cctgagctgattaaatcctgaagcacaagggaagcagccacatcaaaaagttagcatgagagcagtggcgtgctcatcctctggtagcctttactgggcatttgtggagtaagagagaaa

SEQ ID NO: 457606 - DNA, 120 bp, Artificial Sequence
  ENSG00000156973_14 (sequence is synthesized)
agaaaagcaggaatgttaagatatgctactaccttcaggaaaaagtaaaattaatgttttagtaagaaactgactattgtccaccttttattgggtaaatagattttctgaactttcttt

SEQ ID NO: 457607 - DNA, 120 bp, Artificial Sequence
  ENSG00000156973_15 (sequence is synthesized)
cagagtatctgtttctgtaagaatagtttatcactgcaaaaagagcaccattatgttctcccaccagcagtgttgatagtactcagttttccacgttgactaggtcagtcttttttattt

SEQ ID NO: 457608 - DNA, 120 bp, Artificial Sequence
  ENSG00000156973_16 (sequence is synthesized)
gccagtttggataacaaatgatacattgttttaattggtattcttctggatccctagatccatgaaaaggtaatgtagcatagtggttaagagctatactggactatgtctctatactgc

SEQ ID NO: 457609 - DNA, 120 bp, Artificial Sequence
  ENSG00000156973_17 (sequence is synthesized)
tttgtggtaggattcctacactctgcaagactgtgaatccccagtgaaacaaaccaaaacaaagctagccactacaaggggctttgaggtctctgacactgggagcgtggatggtggtgc

SEQ ID NO: 457610 - DNA, 120 bp, Artificial Sequence
  ENSG00000156973_18 (sequence is synthesized)
ctggtttaggcactgacgttgtattgtgatatgatcatggaggaagctgctatgagcagggcctagtacagtgctctacatacagtatcatacagatttgactggcaaggccactctgca

SEQ ID NO: 457611 - DNA, 120 bp, Artificial Sequence
  ENSG00000156973_19 (sequence is synthesized)
ttgaattctcaccatgcagtgtaaagggcacataagccccttcaagctaattccaagtgaatttaactatgtatctatatatagttcacatctagcctacctctaagaaaatgctgctta

SEQ ID NO: 457612 - DNA, 120 bp, Artificial Sequence
  ENSG00000156973_20 (sequence is synthesized)
tattgtgtcctgctcgctggtcctagtcctttagacctcaaagcatgagaagcaagcctttggtgtggttcagaggacaacctgagcaggcttccctgtcttttttacgcccctggtctg

SEQ ID NO: 457613 - DNA, 120 bp, Artificial Sequence
  ENSG00000156976_0 (sequence is synthesized)
cttttcagtcgggcgctgagtggtttttcggatcatgtctggtggctccgcggattataacagagaacatggcggcccagagggaatggaccccgatggtgtcatcgagagcaactggaa

SEQ ID NO: 457614 - DNA, 120 bp, Artificial Sequence
  ENSG00000156976_1 (sequence is synthesized)
tgagattgttgataactttgatgatatgaatttaaaggagtctctccttcgtggcatctatgcttacggttttgagaagccttccgctattcagcagagagctattattccctgtattaa

SEQ ID NO: 457615 - DNA, 120 bp, Artificial Sequence
  ENSG00000156976_2 (sequence is synthesized)
agggtatgatgtgattgctcaagctcagtcaggtactggcaagacagccacatttgctatttccatcctgcaacagttggagattgagttcaaggagacccaagcactagtattggcccc

SEQ ID NO: 457616 - DNA, 120 bp, Artificial Sequence
  ENSG00000156976_3 (sequence is synthesized)
caccagagaactggctcaacagatccaaaaggtaattctggcacttggagactatatgggagccacttgtcatgcctgcattggtggaacaaatgttcgaaatgaaatgcaaaaactgca

SEQ ID NO: 457617 - DNA, 120 bp, Artificial Sequence
  ENSG00000156976_4 (sequence is synthesized)
ggctgaagcaccacatattgttgttggtacacccgggagagtgtttgatatgttaaacagaagatacctttctccaaaatggatcaaaatgtttgttttggatgaagcagatgaaatgtt

SEQ ID NO: 457618 - DNA, 120 bp, Artificial Sequence
  ENSG00000156976_5 (sequence is synthesized)
gagccgtggttttaaggatcaaatctatgagattttccaaaaactaaacacaagtattcaggttgtgttgctttctgccacaatgccaactgatgtgttggaagtgaccaaaaaattcat

SEQ ID NO: 457619 - DNA, 120 bp, Artificial Sequence
  ENSG00000156976_6 (sequence is synthesized)
gagagatccaattcgaattctggtgaaaaaggaagaattgacccttgaaggaatcaaacagttttatattaatgttgagagagaggaatggaagttggatacactttgtgacttgtacga

SEQ ID NO: 457620 - DNA, 120 bp, Artificial Sequence
  ENSG00000156976_7 (sequence is synthesized)
tcacagtttctgctctgcatggtgacatggaccagaaggagagagatgttatcatgagggaattccggtcagggtcaagtcgtgttctgatcactactgacttgttggctcgcgggattg

SEQ ID NO: 457621 - DNA, 120 bp, Artificial Sequence
  ENSG00000156976_8 (sequence is synthesized)
atgtgcaacaagtgtctttggttataaattatgatctacctaccaatcgtgaaaactatattcacagaattggcagagggggtcgatttgggaggaaaggtgtggctataaactttgtta

SEQ ID NO: 457622 - DNA, 120 bp, Artificial Sequence
  ENSG00000156976_9 (sequence is synthesized)
ctgaagaagacaagaggattcttcgtgacattgagactttctacaatactacagtggaggagatgcccatgaatgtggctgaccttatttaattcctgggatgagagttttggatgcagt

SEQ ID NO: 457623 - DNA, 120 bp, Artificial Sequence
  ENSG00000156976_10 (sequence is synthesized)
gctcgctgttgctgaataggcgatcacaacgtgcattgtgcttctttctttgggaatatttgaatcttgtctcaatgctcataacggatcagaaatacagattttgatagcaaagcgacg

SEQ ID NO: 457624 - DNA, 120 bp, Artificial Sequence
  ENSG00000156976_11 (sequence is synthesized)
ttagtcgtgagctcttgtgaggaaagtcattggctttatcctctttagagttagactgttggggtgggtataaaagatggggtctgtaaaatctttctttcttagaaatttatttcctag

SEQ ID NO: 457625 - DNA, 120 bp, Artificial Sequence
  ENSG00000156976_12 (sequence is synthesized)
ttctgtagaaatggttgtattagatgttctctatcatttaataatatacttgtggactaaaagatataagtgctgtataaaatcagccaattatgttaaactagcatatctgcctttatt

SEQ ID NO: 457626 - DNA, 120 bp, Artificial Sequence
  ENSG00000156976_13 (sequence is synthesized)
gtgtttgtcattagcctgagtagaaaggcctttaaaatttttttagaaagcatttgaatgcattttgtttggtattgtatttattcaataaagtatttaattagtgctaagtgtgaactg

SEQ ID NO: 457627 - DNA, 120 bp, Artificial Sequence
  ENSG00000156976_14 (sequence is synthesized)
gaccctgttgctaagccccagcaagcaatcctaggtagggtttaatccccagtaaaattgccatattgcacatgtcttaatgaagtttgaatgttaaataaattgtatattcactttaaa

SEQ ID NO: 457628 - DNA, 120 bp, Artificial Sequence
  ENSG00000156976_15 (sequence is synthesized)
cttttcagtcgggcgctgagtggtttttcggatcatgtctggtggctccgcggattataacagcagagaacatggcggcccagagggaatggaccccgatggtgtcatcgagagcaactg

SEQ ID NO: 457629 - DNA, 120 bp, Artificial Sequence
  ENSG00000156976_16 (sequence is synthesized)
agttgaaacgggatcgccatgcgctcgggcctggggggctgcctttccgggcatccgcaggccccaacctttagggaaggcgcacagtgtggatattcgccctgaggctgctgctttagc

SEQ ID NO: 457630 - DNA, 120 bp, Artificial Sequence
  ENSG00000156976_17 (sequence is synthesized)
ttgtgcaggggaggctaacgtgctgagacgggttgcaaagggctatgcgcttaaggtgcagttgaggtggcctggaaggggtgtctgactgcagtattcttgtcagcagagaacatggcg

SEQ ID NO: 457631 - DNA, 120 bp, Artificial Sequence
  ENSG00000156976_18 (sequence is synthesized)
tagttgaaaagtcaaattgtatcactgagtagatctagaaatgacagtatgactttgtttctaacagctccaaaatggatcaaaatgtttgttttggatgaagcagatgaaatgttgagc

SEQ ID NO: 457632 - DNA, 120 bp, Artificial Sequence
  ENSG00000156976_19 (sequence is synthesized)
aacacaagtattcaggtaagcattacttcacccccctcttaaaggtagagatggggtttatttaatgcaggtactgttacaatacaactgatgtgttttgttgtcgttccccctgcttaa

SEQ ID NO: 457633 - DNA, 120 bp, Artificial Sequence
  ENSG00000156976_20 (sequence is synthesized)
agcacttgatgcataactctgtctaccttcattccgtagtaagacagagacgcttggcttcagacattttcctttgggtattaatgtgtaagttgtgctacaacataattttctcttttt

SEQ ID NO: 457634 - DNA, 120 bp, Artificial Sequence
  ENSG00000156976_21 (sequence is synthesized)
ttggctgtattgaaaaaaattcatacgtttttctactgtgatttgtatgaaaggtaacatcaaatcaaggaatagattcagtaaagtcagtagtgttcagtaagatgatgtaattaaatt

SEQ ID NO: 457635 - DNA, 120 bp, Artificial Sequence
  ENSG00000156976_22 (sequence is synthesized)
gaaggttgatgagaacaaagtgggaaaacttgtaaacattgcccagattgtggacatagggtttttttccacaattgttggtcttaccttatgcttgagcttttagtgatgttcttgtgt

SEQ ID NO: 457636 - DNA, 120 bp, Artificial Sequence
  ENSG00000156976_23 (sequence is synthesized)
ccatgtgtttttcttggtgattttttctatagttgggattttcttggtgtcgcctggtagcaatttgagtgaaccctggtttagttatagtggctttatccctaaataaattgaattgta

SEQ ID NO: 457637 - DNA, 120 bp, Artificial Sequence
  ENSG00000156976_24 (sequence is synthesized)
ctttgttatatgatgtaaaaaaagactttttaaaaaatacaggagtcgatagcagcagttggtgacgagatggcactcagaaacggcgttgacgtaatttaggacgtggaatcataagcg

SEQ ID NO: 457638 - DNA, 120 bp, Artificial Sequence
  ENSG00000156976_25 (sequence is synthesized)
aaacagcacactgtttgaataaagagcgagtcggtatttatatttgtttttcttttgtcatgattatttgatttttaagttgctccagctaaggcatttttttgtattagtatttctatt

SEQ ID NO: 457639 - DNA, 120 bp, Artificial Sequence
  ENSG00000156976_26 (sequence is synthesized)
ggtaaaagaaactggcatttttaggaaattgttctacatagacatgaaccataaaagggaaagtaacctctgggggactagcacctgtttgtattccttaaagtgaaatgatggcaatca

SEQ ID NO: 457640 - DNA, 120 bp, Artificial Sequence
  ENSG00000156976_27 (sequence is synthesized)
tctttcgggactgacctgaaatgaagagaatactcattgctgatcacttgattatttgggcataatgttccaaatggaatacatggtgtgaagtagaagtgacaatttgatgtgggatcg

SEQ ID NO: 457641 - DNA, 120 bp, Artificial Sequence
  ENSG00000156976_28 (sequence is synthesized)
aaacttagtataaattggtcctaccagatccctccttttaattgtccatgcatgcagggagtttttgttgaaagttttaaaagaactgggtatgcaggtatggtttgtagggttgtatac

SEQ ID NO: 457642 - DNA, 120 bp, Artificial Sequence
  ENSG00000156976_29 (sequence is synthesized)
taatagattgagaatccgaagcgctctcttggatgtactagatctgtccccattttttaagtttgaatgcagttgtgcaacatgaaaactgcagtgacatgttaccatttgactgtctcc

SEQ ID NO: 457643 - DNA, 120 bp, Artificial Sequence
  ENSG00000156976_30 (sequence is synthesized)
gtagttcgtgatgcatctgttgcatgctatgttttcaaagctcactgctatattggctttgaagtaaaccttcctaataaagctgtaggctttattgaggtcaggattatataaggcaca

SEQ ID NO: 457644 - DNA, 120 bp, Artificial Sequence
  ENSG00000156976_31 (sequence is synthesized)
ataccctctgggggaaaaaaatcatttgccctagctgtaattacagaacataaatttcactacgtactccctacctacagtgaagaataatgtaggaaacgttattcttggattgtctag

SEQ ID NO: 457645 - DNA, 120 bp, Artificial Sequence
  ENSG00000156976_32 (sequence is synthesized)
ctgatgcgtggagcagcagcatcccaagtttgacaaggcataagaaagacattaagggaattttaccttgcagcagttaggtcgtctgcattttaagcttggaagtagttttgtgctgtg

SEQ ID NO: 457646 - DNA, 120 bp, Artificial Sequence
  ENSG00000156976_33 (sequence is synthesized)
catgcataaaagctgttggcagaccagattatatttgcctttatgctttaaaaattagtcattgatcctggagttctgcggaataataattaaggcttgggttttagatccaaaaggtaa

SEQ ID NO: 457647 - DNA, 120 bp, Artificial Sequence
  ENSG00000156976_34 (sequence is synthesized)
gtttttgcaataatgctagcagagtacacacaagaagaaaagtaacagcactagattgtaaagactggggtggacctctttcttaatgtccaatgtcctttgtcttaagatttggtgcaa

SEQ ID NO: 457648 - DNA, 120 bp, Artificial Sequence
  ENSG00000156976_35 (sequence is synthesized)
tatctcattagacctaacagaatgaagttaatttttataatttctacgttttgagactgggttatgagactggctaagactggccaattttggtattttgggtagagacagtttcacttt

SEQ ID NO: 457649 - DNA, 120 bp, Artificial Sequence
  ENSG00000156976_36 (sequence is synthesized)
cttgaaaccctggtctggttggaactctgggctctaagtgctaggatcccaaagggctgggattacaggcattagcactgtggctggcccagaatgaatttttaactgaagagttggaaa

SEQ ID NO: 457650 - DNA, 120 bp, Artificial Sequence
  ENSG00000156976_37 (sequence is synthesized)
aactaaatgactgttaactttaacttctaaacattacaggaatggaagttggatacactttgtgacttgtacgagacactgaccattacacaggctgttatttttctcaatacgaggcgc

SEQ ID NO: 457651 - DNA, 120 bp, Artificial Sequence
  ENSG00000156976_38 (sequence is synthesized)
ttctgctctggtaagaggtgttctaaaatgtctggatttccactaaagcaggattcagactacaatatagctgctaagtgctgtgttgtcgttccccctgcttaaaataaagttgtttct

SEQ ID NO: 457652 - DNA, 120 bp, Artificial Sequence
  ENSG00000156976_39 (sequence is synthesized)
taactatacctgtctgctattctcctgtagcagccagggacgcttggtctcatacatgttgattaaaattaaataccgacctgactggtgattcttgaattaaggtttattaatttgcag

SEQ ID NO: 457653 - DNA, 120 bp, Artificial Sequence
  ENSG00000156976_40 (sequence is synthesized)
ccaaaagttagctttttggggggcaggtttttaagtaacctttgccaacttgggctatttggaagagtaaaagaccacactccacagtgggctataccacttagtatagttcgctactat

SEQ ID NO: 457654 - DNA, 120 bp, Artificial Sequence
  ENSG00000156976_41 (sequence is synthesized)
tttgtggcctacatgacaggtgtcaagtttttttgaatcaatttttaaaacatgccattgtgtttcaggctcgcgggattgatgtgcaacaagtgtctttggttataaattatgatctac

SEQ ID NO: 457655 - DNA, 120 bp, Artificial Sequence
  ENSG00000156976_42 (sequence is synthesized)
taaacacgtttagagtaatttgagttacaacgtgtgaaactgagcaaaaaagcagtgataagtttgggttaccataccaaatatttgttttcccactggaaaaaagtaagttttagaaaa

SEQ ID NO: 457656 - DNA, 120 bp, Artificial Sequence
  ENSG00000156976_43 (sequence is synthesized)
tagttaacctttgcagcatttgtttacagtttacagttccagaagtgcgtcgaaatggattacataactgctcttttattcctggtgttcacatctgtcccaggctgacacctgctcttg

SEQ ID NO: 457657 - DNA, 120 bp, Artificial Sequence
  ENSG00000156976_44 (sequence is synthesized)
gctggcccactttggtatgggctttaatttcactaccccaaacacgatactgtcatctgctttataataatgctcaagatgcctgataaaaatctcattttgcagccagacaagccttga

SEQ ID NO: 457658 - DNA, 120 bp, Artificial Sequence
  ENSG00000156976_45 (sequence is synthesized)
atccttttggcactaactgcaaaggaagatttttttctctagatatgcattagcagctagtgctccagttagaagcacgaactataaccttgataagtaaacagcagctggtggttaaca

SEQ ID NO: 457659 - DNA, 120 bp, Artificial Sequence
  ENSG00000156976_46 (sequence is synthesized)
agtggatcgtcatgttcagtagtttatacattatgtgagaagtaacgttctgattctttttcttacacagaattggcagagggggtcgatttgggaggaaaggtgtggctataaactttg

SEQ ID NO: 457660 - DNA, 120 bp, Artificial Sequence
  ENSG00000156976_47 (sequence is synthesized)
gagatggcactcagaaacggcgttgacgtaatttaggacgtggaatcataagcgaaacagcacactgtttgaataaagagcgaaattggcagagggggtcgatttgggaggaaaggtgtg

SEQ ID NO: 457661 - DNA, 120 bp, Artificial Sequence
  ENSG00000156976_48 (sequence is synthesized)
cttttcagtcgggcgctgagtggtttttcggatcatgtctggtggctccgcggattataacagcagagaacatggcggcccagagggaatggaccccgatggtgtcatcgaggtaagaaa

SEQ ID NO: 457662 - DNA, 120 bp, Artificial Sequence
  ENSG00000156976_49 (sequence is synthesized)
gtcttttcagtcgggcgctgagtggtttttcggatcatgtctggtggctccgcggattataacagagaacatggcggcccagagggaatggaccccgatggtgtcatcgaggtaagaaac

SEQ ID NO: 457663 - DNA, 120 bp, Artificial Sequence
  ENSG00000156976_50 (sequence is synthesized)
aaagcgaggtttaactaactccgcagctatattcttccgccgcgaggtaaagagtcccaacccaaccccgggccctaggatttccagcgaccctgtaatatcgagaaattaccacatttg

SEQ ID NO: 457664 - DNA, 120 bp, Artificial Sequence
  ENSG00000156976_51 (sequence is synthesized)
ggtttttctaccaacttgcttaggattttatccgaggtaacgaccccaggatcacaattttgtagctgaccgaagcacggcgagaaaattcctccgcaagaaacgggttccggccacgag

SEQ ID NO: 457665 - DNA, 120 bp, Artificial Sequence
  ENSG00000156976_52 (sequence is synthesized)
gaacagcatctccggtttccgcctccggctccggcgcggctcccccggcccgcctctgcgtcagggacgcggaaaccccgtaggagcagggcgggcggggaaagcgaggtttaactaact

SEQ ID NO: 457666 - DNA, 120 bp, Artificial Sequence
  ENSG00000156983_0 (sequence is synthesized)
gatgtgacagcatgggggtggactttgatgtgaagactttctgccacaacttgcgggcgactaagccaccatacgagtgcccggtggagacctgccgaaaggtctacaagagttacagtg

SEQ ID NO: 457667 - DNA, 120 bp, Artificial Sequence
  ENSG00000156983_1 (sequence is synthesized)
gtattgagtaccacctgtaccactatgaccacgacaacccaccacccccacaacaaactccactccgcaagcacaagaaaaaggggcgccagtcacgcccagccaacaagcagtcaccca

SEQ ID NO: 457668 - DNA, 120 bp, Artificial Sequence
  ENSG00000156983_2 (sequence is synthesized)
gcccctcagaggtctcacagtcaccaggccgtgaggtgatgagctatgcacaggcccagcgcatggtggaggtggacttgcatggccgcgtccaccgcatcagcatctttgacaacctgg

SEQ ID NO: 457669 - DNA, 120 bp, Artificial Sequence
  ENSG00000156983_3 (sequence is synthesized)
atgtggtgtcagaggatgaggaagcccccgaggaggcccctgagaatggcagcaacaaggagaacactgagacaccagctgctactcccaagtcaggcaaacataagaacaaggagaagc

SEQ ID NO: 457670 - DNA, 120 bp, Artificial Sequence
  ENSG00000156983_4 (sequence is synthesized)
gcaaggactccaaccatcaccaccaccacaatgtttctgcgagcaccactcccaagctgccagaggtggtctatcgggagctggaacaggacacccctgatgccccaccccggccaactt

SEQ ID NO: 457671 - DNA, 120 bp, Artificial Sequence
  ENSG00000156983_5 (sequence is synthesized)
cctattaccggtacatcgagaagtctgcagaggagctggacgaggaagtagagtatgacatggacgaggaggactacatctggctggatatcatgaatgagcgtcggaagacagagggtg

SEQ ID NO: 457672 - DNA, 120 bp, Artificial Sequence
  ENSG00000156983_6 (sequence is synthesized)
taagtcccatcccgcaggagatctttgagtacctaatggaccgactggagaaggagtcgtactttgagagtcataataaaggcgaccctaatgcgctagtggacgaggatgctgtttgct

SEQ ID NO: 457673 - DNA, 120 bp, Artificial Sequence
  ENSG00000156983_7 (sequence is synthesized)
gtatctgcaatgatggtgagtgccagaacagcaatgtcatcctcttctgtgacatgtgcaacctggccgtgcaccaggagtgctacggtgtcccctatatccctgagggccagtggctgt

SEQ ID NO: 457674 - DNA, 120 bp, Artificial Sequence
  ENSG00000156983_8 (sequence is synthesized)
gccgccgttgcctgcagtcaccctctcgtgctgtggattgtgccctgtgccccaacaagggcggtgccttcaagcagacagatgacgggcgctgggcccatgtggtgtgtgccttgtgga

SEQ ID NO: 457675 - DNA, 120 bp, Artificial Sequence
  ENSG00000156983_9 (sequence is synthesized)
tccctgaggtctgcttcgccaacacggtcttcctagagcctattgacagcattgagcacatcccaccagctcgctggaagctcacctgctacatttgcaaacaacggggctcaggggcct

SEQ ID NO: 457676 - DNA, 120 bp, Artificial Sequence
  ENSG00000156983_10 (sequence is synthesized)
gcatccagtgccacaaggccaactgttacacagctttccatgtgacatgcgcccagcaggctggcctttacatgaagatggagcctgtgcgggagacaggcgccaacggcacctctttca

SEQ ID NO: 457677 - DNA, 120 bp, Artificial Sequence
  ENSG00000156983_11 (sequence is synthesized)
gtgtccgcaagacagcctactgcgacatccacacgcctccaggttcagcacgccgactgcctgccctgtcccacagcgagggtgaggaggatgaagatgaggaggaggatgagggtaagg

SEQ ID NO: 457678 - DNA, 120 bp, Artificial Sequence
  ENSG00000156983_12 (sequence is synthesized)
gctggagctcagagaaagtcaagaaggccaaggccaagtcccggatcaaaatgaagaaggcacggaagatcctggcagagaagcgggcagcagcacctgtggtgtcagtgccctgcatcc

SEQ ID NO: 457679 - DNA, 120 bp, Artificial Sequence
  ENSG00000156983_13 (sequence is synthesized)
caccacacaggcttagtaaaatcaccaaccgcctgaccatccaaaggaagagccagttcatgcagaggctgcacagctactggacactgaagcggcagtcacggaatggggtcccattgc

SEQ ID NO: 457680 - DNA, 120 bp, Artificial Sequence
  ENSG00000156983_14 (sequence is synthesized)
tacgtcgcctgcagacacacctgcaatctcagaggaactgtgaccaagttgggagagattctgaggataagaactgggcccttaaagaacagctcaagtcctggcagcggctccggcatg

SEQ ID NO: 457681 - DNA, 120 bp, Artificial Sequence
  ENSG00000156983_15 (sequence is synthesized)
acttggagcgagctcggctgctcgtggaattgatccgcaagcgggaaaaactcaaaagggagacgatcaaggttcagcagattgccatggagatgcagctgactcctttcctcatcctcc

SEQ ID NO: 457682 - DNA, 120 bp, Artificial Sequence
  ENSG00000156983_16 (sequence is synthesized)
ttcgcaaaaccttggagcagctccaagagaaggacacaggcaacatcttcagcgagccggtccctctgtctgaggtacctgactacctagaccacatcaaaaagcccatggactttttca

SEQ ID NO: 457683 - DNA, 120 bp, Artificial Sequence
  ENSG00000156983_17 (sequence is synthesized)
tcttctaccgggcagcagtgcggcttcgtgagcagggtggtgctgtgctccgccaggcccggcgccaggcagaaaaaatgggcattgactttgagacgggcatgcatatcccccacagcc

SEQ ID NO: 457684 - DNA, 120 bp, Artificial Sequence
  ENSG00000156983_18 (sequence is synthesized)
tggctggagatgaggccacacaccacactgaagatgcagccgaggaagagcggctggtcttgctggagaaccagaagcacctgccagtggaagaacagctaaagctgcttctggagcggc

SEQ ID NO: 457685 - DNA, 120 bp, Artificial Sequence
  ENSG00000156983_19 (sequence is synthesized)
tggacgaagtgaatgccagcaagcagagtgtgggccgctcacggcgtgcaaagatgatcaagaaagagatgacggcactgcggcggaagcttgcccatcagcgagagacgggacgtgatg

SEQ ID NO: 457686 - DNA, 120 bp, Artificial Sequence
  ENSG00000156983_20 (sequence is synthesized)
gccctgagcggcatggcccctcgagccggggtagtctgacaccccacccggcagcctgtgacaaggatgggcagacagatagtgcggcagaggagagcagcagccaggagacaagcaaag

SEQ ID NO: 457687 - DNA, 120 bp, Artificial Sequence
  ENSG00000156983_21 (sequence is synthesized)
gcctgggtcccaacatgtcctcaacccccgcacatgaggtgggcaggagaacctcagttctgttctccaaaaagaacccgaagacagctggaccgcccaagaggccgggccggcccccca

SEQ ID NO: 457688 - DNA, 120 bp, Artificial Sequence
  ENSG00000156983_22 (sequence is synthesized)
aaaaccgggagagccagatgacccccagccacggaggcagtcctgtggggcccccccagctccccatcatgagttccctgcgtcagcgcaagcggggtaggagcccccggcccagttcga

SEQ ID NO: 457689 - DNA, 120 bp, Artificial Sequence
  ENSG00000156983_23 (sequence is synthesized)
gctcagacagcgacagtgataagtccacagaagaccccccaatggacttaccagccaatggcttcagcggtggaaaccaaccagtgaagaagagtttcttggtataccgtaatgactgca

SEQ ID NO: 457690 - DNA, 120 bp, Artificial Sequence
  ENSG00000156983_24 (sequence is synthesized)
gccttccccggagcagctcagactctgagtccagcagcagtagcagtagcagcgctgcttcagaccggaccagcacaacgccctcaaaacaaggccggggcaaaccctccttctctcggg

SEQ ID NO: 457691 - DNA, 120 bp, Artificial Sequence
  ENSG00000156983_25 (sequence is synthesized)
gcactttcccagaggacagcagtgaggatacctcaggcactgagaatgaggcctactccgtgggcactggccgcggcgtgggccacagcatggtaaggaagagtctgggccggggagctg

SEQ ID NO: 457692 - DNA, 120 bp, Artificial Sequence
  ENSG00000156983_26 (sequence is synthesized)
gctggctgtcagaggatgaggactccccgctggatgctctggacctcgtgtgggccaaatgccgaggctatccatcatacccagctctgatcattgatccaaagatgccccgagaaggta

SEQ ID NO: 457693 - DNA, 120 bp, Artificial Sequence
  ENSG00000156983_27 (sequence is synthesized)
tgttccaccatggggttcccatccctgtgcccccactggaggtgctgaaacttggggagcagatgacccaggaagcccgagagcatctctacctcgtcctcttctttgacaacaaacgaa

SEQ ID NO: 457694 - DNA, 120 bp, Artificial Sequence
  ENSG00000156983_28 (sequence is synthesized)
cctggcagtggctgcccaggaccaagctggttcctctgggtgtgaaccaggacctagacaaggagaagatgctggagggccgcaagtccaacatccgcaagtcagtacagatcgcctacc

SEQ ID NO: 457695 - DNA, 120 bp, Artificial Sequence
  ENSG00000156983_29 (sequence is synthesized)
acagggctctgcagcaccgcagcaaggtgcaaggcgagcagagcagtgagaccagcgatagtgattgatactgctcaacacagcccaacctatagtgccctgtgacttctctcctcccct

SEQ ID NO: 457696 - DNA, 120 bp, Artificial Sequence
  ENSG00000156983_30 (sequence is synthesized)
ttgctcactgtcctggagtggcaccggcctctgcactgactcatttctggtcttggggccagtctcaggggaagctgggtgggggaggtccctcctgccctaagtgcagctggactgtac

SEQ ID NO: 457697 - DNA, 120 bp, Artificial Sequence
  ENSG00000156983_31 (sequence is synthesized)
agaacactccaagggccaatggcagttcagcgcaaggagagggagggcccacaggtcagaaaaagctccagagacctcacagcattgtagggcggggtggtgggccaaagttaggacact

SEQ ID NO: 457698 - DNA, 120 bp, Artificial Sequence
  ENSG00000156983_32 (sequence is synthesized)
gcgtaaaacaggccatcccaccacctctacctgctcatgccaggagaatccataactgcctagaggcctggggcccctaccggtcgtgaggtgagtgggcatctgtccagcctggaagag

SEQ ID NO: 457699 - DNA, 120 bp, Artificial Sequence
  ENSG00000156983_33 (sequence is synthesized)
gggcactaggtgactccctcccctgctgttgtaaatactgtaattatcggagaatttaaattattctcatttgtaactgcgtttccgggtcgcgccagagtcatttggtactaaaaaaaa

SEQ ID NO: 457700 - DNA, 120 bp, Artificial Sequence
  ENSG00000156983_34 (sequence is synthesized)
aaaaaaaaaagactgggggctgtccccatttcccttctctttcccatagattcccccacctttcaaactggtttgtatttatttcaaaggaagaaaatatattgattcttagaaaataaa

SEQ ID NO: 457701 - DNA, 120 bp, Artificial Sequence
  ENSG00000156983_35 (sequence is synthesized)
accctgcgcagacgccgtcgccgccgctgctgccgccgccgctgccacagcctttgccgccacggtctccgccgccgctgtcctcgcgctgcctctgggagcctccattgttccagcagc

SEQ ID NO: 457702 - DNA, 120 bp, Artificial Sequence
  ENSG00000156983_36 (sequence is synthesized)
gcccggtcccgagaccgggcatcttgggggctcgcgaaacgggcggcggccgacggagttgagaccccagggcgccggcgggaccaggagcggcaggggtcagctcaggaatcccgggga

SEQ ID NO: 457703 - DNA, 120 bp, Artificial Sequence
  ENSG00000156983_37 (sequence is synthesized)
gccgggaccaaagcgtggggcggcagggggccggggtggcgaggtctacggtctccggagttggggctcccccttcccggcccgactttccccgccgacctccccaagtggggtcggagc

SEQ ID NO: 457704 - DNA, 120 bp, Artificial Sequence
  ENSG00000156983_38 (sequence is synthesized)
tgagtctgccaaatgaataatcccagggcaggaagacactttcggggtgctgaaccctagaacggagactttagaaggctcagcacctaaagaaccagctctgaagccctaggtcctgac

SEQ ID NO: 457705 - DNA, 120 bp, Artificial Sequence
  ENSG00000156983_39 (sequence is synthesized)
gcggcgtgggccacagcagtaagttcccttgcccaaggccagggatgctggggacccagtgtcagggtctcgccagccccccagctgctgatccaccccctctcccccattcctgtgaag

SEQ ID NO: 457706 - DNA, 120 bp, Artificial Sequence
  ENSG00000156983_40 (sequence is synthesized)
aggcagcagcctccttataagttactgttaagtaaaaagagctgtaggaatgcaaggtggtgtttattttcagaggagtccccaagccattttcttactaaagcctcatatagtctagaa

SEQ ID NO: 457707 - DNA, 120 bp, Artificial Sequence
  ENSG00000156983_41 (sequence is synthesized)
agtatatttggctctactttcatcattttccaggagaggaaaagtaggcccagagaggttaagagacttgccaaagtcacacagcttgtgactggtaaagtcaggaccagaatccagctt

SEQ ID NO: 457708 - DNA, 120 bp, Artificial Sequence
  ENSG00000156983_42 (sequence is synthesized)
tcctttcccctgtgctatatgcctgcctctaactgtggtgggaggaggttgctggatgtgtttcaggggggcttgttaggagcagggttcggggcaataaggaggatatctccacttaaa

SEQ ID NO: 457709 - DNA, 120 bp, Artificial Sequence
  ENSG00000156983_43 (sequence is synthesized)
agatgcagccgccattctccttgggccctccccacgggctttctggtctaagttctcgtctccctcgcctgtgcctctgctgccgggttccaaggggagattgctgattcgctgtgctac

SEQ ID NO: 457710 - DNA, 120 bp, Artificial Sequence
  ENSG00000156983_44 (sequence is synthesized)
ggagcaggcagtgtaggcagaaagcagctaggctgagcagtggcaagctatccccaggaatgctccccaagaagccagactgggtgaatggatagcagtgcccgccattccacatcttgg

SEQ ID NO: 457711 - DNA, 120 bp, Artificial Sequence
  ENSG00000156983_45 (sequence is synthesized)
attctttctgtgatccagtgatttctgcaggagtccaacgctaaagcattagccacccacccattcagctttctacatggccttcatcccatctgagctctcagtctggtgatcccctca

SEQ ID NO: 457712 - DNA, 120 bp, Artificial Sequence
  ENSG00000156990_0 (sequence is synthesized)
acatgcgcgctgtcctggctcgggagatggacggccgccgtgttttgggccggttctggagtggctggcggcggggcctgggtgtccgcccagtgcccgaggacgcaggctttggcaccg

SEQ ID NO: 457713 - DNA, 120 bp, Artificial Sequence
  ENSG00000156990_1 (sequence is synthesized)
aagcccggcatcagaggcaaccccgcggctcctgccaacggtcggggcccctcggggaccagcccttcgcggggctgctgccaaaaaacctcagtcgggaggagctggttgatgcgctgc

SEQ ID NO: 457714 - DNA, 120 bp, Artificial Sequence
  ENSG00000156990_2 (sequence is synthesized)
gggcagccgtggtggaccggaaaggacctctagtgacgttgaacaagccacagggtctaccagtgacaggaaaaccaggagagctgacgttgttctcagtgctgccagagctgagccagt

SEQ ID NO: 457715 - DNA, 120 bp, Artificial Sequence
  ENSG00000156990_3 (sequence is synthesized)
ccctagggctcagggagcaggagcttcaggttgtccgagcatctgggaaagaaagctctgggcttgtactcctctccagctgtccccagacagctagtcgcctccagaagtacttcaccc

SEQ ID NO: 457716 - DNA, 120 bp, Artificial Sequence
  ENSG00000156990_4 (sequence is synthesized)
atgcacggagagcccaaaggcccacagccacctactgtgctgtcactgatgggatcccagctgcttctgaggggaagatccaggctgccctgaaactggaacacattgatggggtcaatc

SEQ ID NO: 457717 - DNA, 120 bp, Artificial Sequence
  ENSG00000156990_5 (sequence is synthesized)
ccgaaaggacatcctggaaggtgtcaagaagactctcagtcactttcgtgtggtagccacaggctctggctgtgccctggtccagctgcagccactgacagtgttctccagtcaactaca

SEQ ID NO: 457718 - DNA, 120 bp, Artificial Sequence
  ENSG00000156990_6 (sequence is synthesized)
ggtgcacatggtactacagctctgccctgtgcttggggaccacatgtactctgcccgtgtgggcactgtcctgggccagcgatttctgctgccagctgagaacaacaagccccaaagaca

SEQ ID NO: 457719 - DNA, 120 bp, Artificial Sequence
  ENSG00000156990_7 (sequence is synthesized)
ggtcctggatgaagccctcctcagacgcctccacctgaccccctcccaggctgcccagctgcccttgcacctccacctacatcggctccttctcccaggcaccagggccagggacacccc

SEQ ID NO: 457720 - DNA, 120 bp, Artificial Sequence
  ENSG00000156990_8 (sequence is synthesized)
tgttgagctcctggcaccactgcccccttatttctccaggaccctacagtgcctggggctccgcttacaatagtcctccctctgttcctgaccccctcacacacactggaaagtgagggt

SEQ ID NO: 457721 - DNA, 120 bp, Artificial Sequence
  ENSG00000156990_9 (sequence is synthesized)
gggggctctgcagtcagacaaacctaagatcacatcctggacaggccacttgcttgctgtgtggcattgggcaagtaactttacctctctggacttgtgataataaaagttcctacctca

SEQ ID NO: 457722 - DNA, 120 bp, Artificial Sequence
  ENSG00000156990_10 (sequence is synthesized)
agccacgggatcagccctgcttctgcctcccactagcagcatgagctgggacaagccacctaatttgcaccctctccccgcttttaaccctactgccatgatgcagtagggttaagagtg

SEQ ID NO: 457723 - DNA, 120 bp, Artificial Sequence
  ENSG00000156990_11 (sequence is synthesized)
taagagtggggagaagatgcaaataactaccgagccttgcacatagccggcgctcagttacgggagttgctatactagattattgtttattggccgcggtggctcacgcctgtaatcccg

SEQ ID NO: 457724 - DNA, 120 bp, Artificial Sequence
  ENSG00000156990_12 (sequence is synthesized)
ctgaattttcgaggtcagcccagacattgtgaggcatttgtcagaggccgcaggatttgggaagaggcgtccggagataggaatgggtggcacctcgggatggaatgactcccattgctt

SEQ ID NO: 457725 - DNA, 120 bp, Artificial Sequence
  ENSG00000156990_13 (sequence is synthesized)
aggggtgacaggaagctaggagtacaggcatccatctgtggtggggaaacagctgcttggggataagctgagacattttccatgggaaggtttgagatcatagaggtggatacaagtact

SEQ ID NO: 457726 - DNA, 120 bp, Artificial Sequence
  ENSG00000156990_14 (sequence is synthesized)
cctctctcatgcgggacggaggctagggcagggggaaggcacgtgcgggatctggatcaggtagatgttacccgaaaacagccccgttggcctctctgagcctcggtgccctccgctgta

SEQ ID NO: 457727 - DNA, 120 bp, Artificial Sequence
  ENSG00000156990_15 (sequence is synthesized)
gaatgggaccggtcgtacctgaattttcgaggacctctagtgacgttgaacaagccacagggtctaccagtgacaggtatgggccggggatgtgggaagggaatgcagcggaagggggtt

SEQ ID NO: 457728 - DNA, 120 bp, Artificial Sequence
  ENSG00000156990_16 (sequence is synthesized)
aaatcctcaagtacaaatggtgtgataccaggcaaagcatgacacctccctgacgctgggcacagtgactcacacctgtaatcccaacacttctggaggccaaggcaagaggatcacttg

SEQ ID NO: 457729 - DNA, 77 bp, Artificial Sequence
  ENSG00000156990_17 (sequence is synthesized)
tctggctgtgccctggtccagctgcagccactgacaggtaggtctggcaccctagccagcctttaaaactgcacttg

SEQ ID NO: 457730 - DNA, 86 bp, Artificial Sequence
  ENSG00000156990_18 (sequence is synthesized)
agaccagcctgggcaaaatagaccccatctctggaaaaacaacaacaaaactttccgcgtggtggctcatgcctataatcaatagg

SEQ ID NO: 457731 - DNA, 120 bp, Artificial Sequence
  ENSG00000156990_19 (sequence is synthesized)
ctatctttacttaaaaaacaaaataaaacacacacacacacacacacaaaaacctagctgggcagagcagcacatgcctgtagtgctcgggtggctgagatgggagaatcacctgagctc

SEQ ID NO: 457732 - DNA, 84 bp, Artificial Sequence
  ENSG00000156990_20 (sequence is synthesized)
cctgggagacagaggttgcagtgagcgaagatcagctggctaaaaaaaaaaaaaactgcacttggcttagggaggcaaggagct

SEQ ID NO: 457733 - DNA, 120 bp, Artificial Sequence
  ENSG00000156990_21 (sequence is synthesized)
aaaaaaaaaaactgcacttggcttagggaggcaaggagctggggagacagtggtatcagcagcagcctggggagcatttgatggcccccagaggtgtatgtgaccaggcccagctagagg

SEQ ID NO: 457734 - DNA, 120 bp, Artificial Sequence
  ENSG00000156990_22 (sequence is synthesized)
aggcagcttcaggctagcaccccaacaggaaagaacagtccttaggcccggtggcttcagcaattaaatcagggttgcatctcatcatgagtggatcccacagccaggcagattgatagc

SEQ ID NO: 457735 - DNA, 120 bp, Artificial Sequence
  ENSG00000156990_23 (sequence is synthesized)
tgtgatcgtcctgacgtgttatgtgtccctctctggatgcaggggccatagtactgacctcactgaaacatatgatctgagaaagggggtggtgtttccccaaaggaaaaggggaggagt

SEQ ID NO: 457736 - DNA, 120 bp, Artificial Sequence
  ENSG00000156990_24 (sequence is synthesized)
gggtgcttctagatatagtacccctacagagaggagtcaggggtatggatttgggatggctggctctcctgtcccctaaaacaggcaagtgaccactgcctatactgtggccctgcccgg

SEQ ID NO: 457737 - DNA, 63 bp, Artificial Sequence
  ENSG00000156990_25 (sequence is synthesized)
ggtgtggcggcgatagcagaggttgcagtgagccgacatcgtgctactgcgctccagcctggg

SEQ ID NO: 457738 - DNA, 120 bp, Artificial Sequence
  ENSG00000156990_26 (sequence is synthesized)
tgcagtgagccgacatcgtgctactgcgctccagcctgggatgacagagcaagactcagtctaaataaataaataaataaataatgattatttatcgacggacaaaacacaggctttgga

SEQ ID NO: 457739 - DNA, 120 bp, Artificial Sequence
  ENSG00000156990_27 (sequence is synthesized)
gtcagacatacctaggctctgtgatcagcttgctgtgcggctttaggaaaataactgaatttctctgaaccccactctctattcagtgatttattccttttctcaactatttcttgaaca

SEQ ID NO: 457740 - DNA, 120 bp, Artificial Sequence
  ENSG00000156990_28 (sequence is synthesized)
tatgctatgttccaggcactgttctaggcaggctatacagtgctgaaaaagatagatatggtttctgctctcaggggagaaatggatttctctctaacgggagaaatggatgtcagaaaa

SEQ ID NO: 457741 - DNA, 120 bp, Artificial Sequence
  ENSG00000156990_29 (sequence is synthesized)
taaatgaacaagttactagtggtaagtgctatgcataaactaaaacagggtgttatgatggtgaggaactgcaggaggaaggcagacattagattggagattcagacctctccgtgatgt

SEQ ID NO: 457742 - DNA, 120 bp, Artificial Sequence
  ENSG00000156990_30 (sequence is synthesized)
gacatttgagccaagatgatagggagccagacctgggaaatttggggacaggaaacagcaagtgccgaggctctgaggtggcagaggaacagaaagaagttgaatttggtgtggggtagt

SEQ ID NO: 457743 - DNA, 120 bp, Artificial Sequence
  ENSG00000156990_31 (sequence is synthesized)
agagtcatgatggggacatgtgctaagatgcgtgagaaagtgctctggaaactctttagtgctgcataaagggttaccgttgcttttgctgatgttcgtgtgatgtatgtttcaggacct

SEQ ID NO: 457744 - DNA, 120 bp, Artificial Sequence
  ENSG00000156990_32 (sequence is synthesized)
ataccctccctgagcttcagttcccctaatggtaaaatagagaaaataatacctatgctcagtgtgcagtcatttctccatgacggtactcgtggcaggcattgctagtcgatccatgat

SEQ ID NO: 457745 - DNA, 120 bp, Artificial Sequence
  ENSG00000156990_33 (sequence is synthesized)
cttatttaagagctaatatgtacagaatttctagtagaattctggcacatggtagacaatcgttacgacatttggctctgagttccctgggggccggggcaaaatgagaaacacattaag

SEQ ID NO: 457746 - DNA, 120 bp, Artificial Sequence
  ENSG00000156990_34 (sequence is synthesized)
ctacatagtcttgttatcaaagaaggggaaaccttacttgtttctcaggagttggtctaggttatagtcctggtgttagtgtttggcctgaagcaggtcagtgttcctaagagtttcctt

SEQ ID NO: 457747 - DNA, 120 bp, Artificial Sequence
  ENSG00000157005_0 (sequence is synthesized)
acaagccgctttaggagcgaggttcggagccatcgctgctgcctgctgatccgcgcctagagtttgaccagccactctccagctcggctttcgcggcgccgagatgctgtcctgccgcct

SEQ ID NO: 457748 - DNA, 120 bp, Artificial Sequence
  ENSG00000157005_1 (sequence is synthesized)
ccagtgcgcgctggctgcgctgtccatcgtcctggccctgggctgtgtcaccggcgctccctcggaccccagactccgtcagtttctgcagaagtccctggctgctgccgcggggaagca

SEQ ID NO: 457749 - DNA, 120 bp, Artificial Sequence
  ENSG00000157005_2 (sequence is synthesized)
gccaagtacttcttggcagagctgctgtctgaacccaaccagacggagaatgatgccctggaacctgaagatctgtcccaggctgctgagcaggatgaaatgaggcttgagctgcagaga

SEQ ID NO: 457750 - DNA, 120 bp, Artificial Sequence
  ENSG00000157005_3 (sequence is synthesized)
tctgctaactcaaacccggctatggcaccccgagaacgcaaagctggctgcaagaatttcttctggaagactttcacatcctgttagctttcttaactagtattgtccatatcagacctc

SEQ ID NO: 457751 - DNA, 120 bp, Artificial Sequence
  ENSG00000157005_4 (sequence is synthesized)
tgatccctcgcccccacaccccatctctcttccctaatcctccaagtcttcagcgagacccttgcattagaaactgaaaactgtaaatacaaaataaaattatggtgaaattatgaaaaa

SEQ ID NO: 457752 - DNA, 120 bp, Artificial Sequence
  ENSG00000157014_0 (sequence is synthesized)
tttttttttttttttttggtgccttctaattctaattcttcccatttctgggtgtgtacttagtctctctgagccacagttttctgctctataaagtggggtgataatgctcagtacacg

SEQ ID NO: 457753 - DNA, 120 bp, Artificial Sequence
  ENSG00000157014_1 (sequence is synthesized)
gtttgctttggctcgatgagaaatccaggtctgaaagcttcaggtacagcggccggcgctgaggaaaacagcgttaagtgaggcgcgtcagcggacaccacctgcctgcacatctggctg

SEQ ID NO: 457754 - DNA, 120 bp, Artificial Sequence
  ENSG00000157014_2 (sequence is synthesized)
gcctcaacttcccgctgttcgagcccacgtgagtggctccgccccatctggcttctgaccaatggacgagcttcctaaggcgtaccgtcccgactccaaggcgcctggctttgaggcggg

SEQ ID NO: 457755 - DNA, 120 bp, Artificial Sequence
  ENSG00000157014_3 (sequence is synthesized)
ctgcgtcttgctcggagtcccgccccttgccgggtcgagcaatgggcgccttccgtttggcgcaggccccgcccctgtcgctctccggcctgcgggccgcagggctcgttccggagggcg

SEQ ID NO: 457756 - DNA, 80 bp, Artificial Sequence
  ENSG00000157014_4 (sequence is synthesized)
ggcgccacggaggccggagtggtcgcagttcgggcggaggccgggccaggcggggctgtagggctggggcaggcggcggg

SEQ ID NO: 457757 - DNA, 80 bp, Artificial Sequence
  ENSG00000157014_5 (sequence is synthesized)
ctgagttggcggtcgagggcgctgccagctcccgaggggccgctcgggccccttccggcccgggtctggttgggccgcag

SEQ ID NO: 457758 - DNA, 120 bp, Artificial Sequence
  ENSG00000157014_6 (sequence is synthesized)
acgggctaagcgcccggccccggggccgcggatccggcagccatgtgtggatcttgaagcgccatgtggtcttctgaagcgcttgacagttctaaagggctttatattgcaaactgatca

SEQ ID NO: 457759 - DNA, 120 bp, Artificial Sequence
  ENSG00000157014_7 (sequence is synthesized)
aagcgcttcgtagccccggaagcgcttaggcatctccgaagtagcgctgggcaaagtgaaggcttcctgatctcagaagcacgttgtgggcttggaaaccgacggcagcctttagtcaat

SEQ ID NO: 457760 - DNA, 120 bp, Artificial Sequence
  ENSG00000157014_8 (sequence is synthesized)
tttggatcgctttgacttctccaacacggtttggcatctctgaaaccttgagaactgtgatgggcagtggaaagaagagggaaaggtgcccatggcgtccgagcggggcaaggtcaagca

SEQ ID NO: 457761 - DNA, 120 bp, Artificial Sequence
  ENSG00000157014_9 (sequence is synthesized)
caactggagcagcacgtcggaagggtgtccccgcaagcgcagctgcctccgggagccctgtgatgtggccccctccagccggccagctcagaggtctgcgtcgcgttctggagggcccag

SEQ ID NO: 457762 - DNA, 120 bp, Artificial Sequence
  ENSG00000157014_10 (sequence is synthesized)
cagccccaagcgcctgaaagcccagaaggaggacgatgtggcttgctcgcggaggttatcctggggctcatcccgccgcagaaataactcctcctcctccttctccccacatttcttggg

SEQ ID NO: 457763 - DNA, 120 bp, Artificial Sequence
  ENSG00000157014_11 (sequence is synthesized)
ccctggtgtgggcggggccgcctccaaaggctgcctgattcggaacactcgggggttcctgtcttcagggggatcccctctgcgtcctgccaacgcctctttggaagaaatggcttctct

SEQ ID NO: 457764 - DNA, 120 bp, Artificial Sequence
  ENSG00000157014_12 (sequence is synthesized)
agaggaggaagcctgcagccttaaggttgattccaaagatagttctcataactccacaaactctgaatttgcagctgaagctgagggtcagaatgatacaattgaggaacccaacaaggt

SEQ ID NO: 457765 - DNA, 120 bp, Artificial Sequence
  ENSG00000157014_13 (sequence is synthesized)
ccagaaaaggaagagggatagacttcgagaccagggctccacaatgatctacctgaaggctatccagggcatcctggggaaatcgatgccaaaaaggaagggagaggctgccactcgggc

SEQ ID NO: 457766 - DNA, 120 bp, Artificial Sequence
  ENSG00000157014_14 (sequence is synthesized)
aaaaccaagcgcagcagagcatcccagccatggagaaggaccagccaggagtgaaggaccagccaagactgcagaaggagcagccaggagtgtcacagtcactgctgctcagaaggagaa

SEQ ID NO: 457767 - DNA, 120 bp, Artificial Sequence
  ENSG00000157014_15 (sequence is synthesized)
agacgcaaccccagaggtcagcatggaggaggataagacagtgccagagaggagcagcttctatgacaggagagtagttatagaccctcaagagaaacccagtgaggagccccttgggga

SEQ ID NO: 457768 - DNA, 120 bp, Artificial Sequence
  ENSG00000157014_16 (sequence is synthesized)
ccgaaggactgtcattgacaaatgctctccacccctagagttcttggatgactctgactctcatttagaaatccaaaagcataaagatagggaggtggtgatggagcacccctcttctgg

SEQ ID NO: 457769 - DNA, 120 bp, Artificial Sequence
  ENSG00000157014_17 (sequence is synthesized)
aagtgactggtctgatgttgaggagatctccacagtcagattctctcaggaggaacctgtctccctgaaaccttcagccgttccggagccttcttccttcaccaccgactatgtcatgta

SEQ ID NO: 457770 - DNA, 120 bp, Artificial Sequence
  ENSG00000157014_18 (sequence is synthesized)
ccctcctcatttgtacagtagtccttggtgtgactacgccagctattggaccagcagccccaagccttctagctacccctccacaggcagcagcagcaacgatgcagcccaggttgggaa

SEQ ID NO: 457771 - DNA, 120 bp, Artificial Sequence
  ENSG00000157014_19 (sequence is synthesized)
gagcagccggagccgcatgagtgattattcccccaactctacagggagtgtccaaaacacctccagagacatggaggcctcagaggaaggctggtcccagaattctcgttcatttcgctt

SEQ ID NO: 457772 - DNA, 120 bp, Artificial Sequence
  ENSG00000157014_20 (sequence is synthesized)
ctccagaagctcagaagaaagagaggtgaaggagaaaagaacattccaagaggagatgcctccgcgtccttgtggaggacacgcatccagctccctgccaaagagccacctggagccaag

SEQ ID NO: 457773 - DNA, 120 bp, Artificial Sequence
  ENSG00000157014_21 (sequence is synthesized)
cctagaggagggcttcattgacactcattgtcacctggacatgctctattccaagctatctttccaagggacctttacaaagttcagaaaaatttacagcagctccttccctaaggaatt

SEQ ID NO: 457774 - DNA, 120 bp, Artificial Sequence
  ENSG00000157014_22 (sequence is synthesized)
tgttgaaagaggatctggtctggggggcctttggctgtcaccctcattttgcacgttactacagtgagagtcaagaaagaaatcttttgcaagccttaaggcaccctaaggctgtggcat

SEQ ID NO: 457775 - DNA, 120 bp, Artificial Sequence
  ENSG00000157014_23 (sequence is synthesized)
ttggagaaatgggcttggattactcttacaagtgcaccacgcctgtcccagaacagcacaaggtatttgagagacagctgcagctggctgtgtctctaaagaagcccttggtgatccact

SEQ ID NO: 457776 - DNA, 120 bp, Artificial Sequence
  ENSG00000157014_24 (sequence is synthesized)
gccgagaagctgatgaagatctgctagaaatcatgaaaaagtttgtgccccctgactacaagatccataggcattgcttcaccggcagctacccggtcattgagcccctgctgaagtact

SEQ ID NO: 457777 - DNA, 120 bp, Artificial Sequence
  ENSG00000157014_25 (sequence is synthesized)
ttcccaacatgtctgtgggcttcacggcagtgctgacatactcctctgcctgggaggcccgggaagccttgaggcagatcccactggagagaatcatcgtggaaacggatgctccctatt

SEQ ID NO: 457778 - DNA, 120 bp, Artificial Sequence
  ENSG00000157014_26 (sequence is synthesized)
tcctccctcgccaggttcccaaaagcctttgccagtatgcccacccgggcctggccttgcatacggtccgagagattgccagagtcaaagatcagccactctccctcaccttggctgcct

SEQ ID NO: 457779 - DNA, 120 bp, Artificial Sequence
  ENSG00000157014_27 (sequence is synthesized)
tgcgtgagaacaccagtcgcctctacagtctttaagcagagaagggcgaccagcagcctgacagaacacaggctggcttgaagtctgtgtctcaggtcgaggatgtgtttagagagctga

SEQ ID NO: 457780 - DNA, 120 bp, Artificial Sequence
  ENSG00000157014_28 (sequence is synthesized)
ttggaacacagaaaaccaggacaggatgttttcctccaagcgggtcataaggcttcagcttctgggtggtgggtggggtggggtgggcatggaatgaggggtatggggactgcctgtaat

SEQ ID NO: 457781 - DNA, 120 bp, Artificial Sequence
  ENSG00000157014_29 (sequence is synthesized)
agcactgggattttgcctcccagccaaaatgctccagggtaggcagcaaagaagaaagagtgcgatatgagggtacagtgagtttggcagtccaaattctgttctctgcagcctgttttt

SEQ ID NO: 457782 - DNA, 120 bp, Artificial Sequence
  ENSG00000157014_30 (sequence is synthesized)
gagtagttggtgaataaagtcacccgcctacttgtctaagcacatgtgggtgtgtaactcagttcctggttctcggttctaaaaacagacttccaactgggaaactttttgggggaaatt

SEQ ID NO: 457783 - DNA, 120 bp, Artificial Sequence
  ENSG00000157014_31 (sequence is synthesized)
aactggacacctatctcggaggtttattttcttgcaaccagtgaagtcgtcctcctcccttccctggataactcttcagtttgactgtcactgttctggtgtcaactccagcgtcggcac

SEQ ID NO: 457784 - DNA, 120 bp, Artificial Sequence
  ENSG00000157014_32 (sequence is synthesized)
aggcagaaggacttcagctgctggtctcattggttccactgccattgatatgggggggtgcagaggagcactcattgtccatgatggagatccaggacagactgggggactccgggaaga

SEQ ID NO: 457785 - DNA, 120 bp, Artificial Sequence
  ENSG00000157014_33 (sequence is synthesized)
ggctttcttggggaagaggaccccaaaggaggtacttcctcctcactgatgccctcagggctgctgtgtgggtgtgttaagctgataaggttcagtttgcggcggaaactacctgctagt

SEQ ID NO: 457786 - DNA, 120 bp, Artificial Sequence
  ENSG00000157014_34 (sequence is synthesized)
cttgtgtcaggggctgccagcctccttttgtttcacttttgcccccttcttgggaacatttgaccaaaaataatcctcatttcatcttgtgtacagtcctttgtgtaccccgcccaggtt

SEQ ID NO: 457787 - DNA, 120 bp, Artificial Sequence
  ENSG00000157014_35 (sequence is synthesized)
gagaggtgaatcagcgtaattctccgaagctctgctgggcagctcagccatgttacattgtctatgcagaataagcaggcctggtgtctgcaaatgtaccagtccttctcccgcatctcc

SEQ ID NO: 457788 - DNA, 120 bp, Artificial Sequence
  ENSG00000157014_36 (sequence is synthesized)
tgggtgcccccttggctttgcctctcctgtgtcctgtctttctgcgttttagaagtgagagcctctccttcaccttttgagcaactgagtcatctcaagtcctgagctctgctctgccgc

SEQ ID NO: 457789 - DNA, 120 bp, Artificial Sequence
  ENSG00000157014_37 (sequence is synthesized)
ctgctggtgccttgtaaaggtatactcgttacaggccctagaggttctaatggtccagggttaagtgagaggagactgtactttgtttcaaaggatccttcaccctgatctgcagtgagg

SEQ ID NO: 457790 - DNA, 120 bp, Artificial Sequence
  ENSG00000157014_38 (sequence is synthesized)
tggatagatcacctggagtccctcgtctgtggtcttggaggcttaaattgtaaaatacatcccttatggaatcctaaattcctctaggtgtttttggaaggcgcatttgagccttgtgag

SEQ ID NO: 457791 - DNA, 120 bp, Artificial Sequence
  ENSG00000157014_39 (sequence is synthesized)
ctaaaatggaatggatttaatatttcctatctggcatttccatcttgcccctggtacacaagtcactggcctggaactcagccttgattcactgtccgtcttcacggattagctgtgctg

SEQ ID NO: 457792 - DNA, 120 bp, Artificial Sequence
  ENSG00000157014_40 (sequence is synthesized)
ttatgttgtctgtgctgcagattggcccatgtgggaagtcgggggggacctgatttcctgcttggaagacttgggggactgccgagcatatcaaagtgtttatagtcaccaagtgaactg

SEQ ID NO: 457793 - DNA, 120 bp, Artificial Sequence
  ENSG00000157014_41 (sequence is synthesized)
cagcacaaccatctcctctccagcaagccctgaagtcagtagtgcctgcaggtgaaaccaaccagccctgtgttagaggaggaaaagcggagatgacatggaagtctccaagcctgtgcc

SEQ ID NO: 457794 - DNA, 120 bp, Artificial Sequence
  ENSG00000157014_42 (sequence is synthesized)
atccacctgccaaggaaaagcacaaggtgctatctacttttctctctaggatttagattatcatttatgtgctgttgcacagtgaaacctcacctgtgtgggcgtgaaagctgattggca

SEQ ID NO: 457795 - DNA, 120 bp, Artificial Sequence
  ENSG00000157014_43 (sequence is synthesized)
ttgtttttgattcagctttttggatggctaattgttttcactgtgctgtgggaatgcctctgtattttttcccctctttggccatctttttctgaaaataaagtgatggatcctctagcc

SEQ ID NO: 457796 - DNA, 120 bp, Artificial Sequence
  ENSG00000157014_44 (sequence is synthesized)
gggagtctcctagaaaaggtcgtaaaactcacattctgtattttttaaaaaccaggacaagtcttttgttgcattttgttaatgtaaagaatataaacatagtatgagcattaagcctga

SEQ ID NO: 457797 - DNA, 120 bp, Artificial Sequence
  ENSG00000157017_0 (sequence is synthesized)
agttccccaaagataacacagctttgcacagtggatgtttacttgctggtggtcttatctaagatcaacattggcagctgtgcccggagaggcctccagggtccaggtccaatgcacttc

SEQ ID NO: 457798 - DNA, 120 bp, Artificial Sequence
  ENSG00000157017_1 (sequence is synthesized)
cctctcagaagaggcatccgctaaaatagggaccaaagctgctggagggaggcaaggcaagctgctatgtgaaaaaacgccaggccaggcagtcatgtcacacctggcagaaatgactga

SEQ ID NO: 457799 - DNA, 120 bp, Artificial Sequence
  ENSG00000157017_2 (sequence is synthesized)
agcatagccactggctgaagttatccccacacccactctctggagaggatgatcaggagcagtctgctcaaccgggaggtgggactcctcctcgggaaggtgtagaatcaccagcctggc

SEQ ID NO: 457800 - DNA, 120 bp, Artificial Sequence
  ENSG00000157017_3 (sequence is synthesized)
tccctgcggactcccggggctcacagaggccagagcagcaacagcacatgggaaacaacggggcgctggactggggaggtctcagagctctcctagtgatgacagcctcattttacccag

SEQ ID NO: 457801 - DNA, 120 bp, Artificial Sequence
  ENSG00000157017_4 (sequence is synthesized)
ggagaaagggcgagtaagctaaggtcacacagcaacaaagctgcacccagaccccagagccactctcctccctccctcctccaccagggccatgcccacttggggcaccccgccaccgtg

SEQ ID NO: 457802 - DNA, 120 bp, Artificial Sequence
  ENSG00000157017_5 (sequence is synthesized)
aggaatgtacatcagccccacggaagctaggccacctctgggatggggttgctggtttagaacaaacgccagtcatcctatataaggacctgacagccaccaggcaccacctccgccagg

SEQ ID NO: 457803 - DNA, 120 bp, Artificial Sequence
  ENSG00000157017_6 (sequence is synthesized)
aactgcaggcccacctgtctgcaacccagctgaggccatgccctccccagggaccgtctgcagcctcctgctcctcggcatgctctggctggacttggccatggcaggctccagcttcct

SEQ ID NO: 457804 - DNA, 120 bp, Artificial Sequence
  ENSG00000157017_7 (sequence is synthesized)
gagccctgaacaccagagagtccagcagagaaaggagtcgaagaagccaccagccaagctgcagccccgagctctagcaggctggctccgcccggaagatggaggtcaagcagaaggggc

SEQ ID NO: 457805 - DNA, 120 bp, Artificial Sequence
  ENSG00000157017_8 (sequence is synthesized)
agaggatgaactggaagtccggttcaacgccccctttgatgttggaatcaagctgtcaggggttcagtaccagcagcacagccaggccctggggaagtttcttcaggacatcctctggga

SEQ ID NO: 457806 - DNA, 120 bp, Artificial Sequence
  ENSG00000157017_9 (sequence is synthesized)
agaggccaaagaggccccagccgacaagtgatcgcccacaagccttactcacctctctctaagtttagaagcgctcatctggcttttcgcttgcttctgcagcaactcccacgactgttg

SEQ ID NO: 457807 - DNA, 120 bp, Artificial Sequence
  ENSG00000157017_10 (sequence is synthesized)
tacaagctcaggaggcgaataaatgttcaaactgtatgctgatgttccaaatgggaatttatttcaaagaggaaaagttaatattttactttaaaaaaatcaaaataatacaaataaaaa

SEQ ID NO: 457808 - DNA, 120 bp, Artificial Sequence
  ENSG00000157017_11 (sequence is synthesized)
aacacagctttgcacagtggatgtttacttgctggtggtcttatctaagatcaacattggcagctgtgcccggagaggcctccagggtccagcaattccgcagggcatctgacctccact

SEQ ID NO: 457809 - DNA, 120 bp, Artificial Sequence
  ENSG00000157017_12 (sequence is synthesized)
gtggatgtttacttgctggtggtcttatctaagatcaacattggcagctgtgcccggagaggcctccagggtccagggccatgcccacttggggcaccccgccaccgtgttccagggaca

SEQ ID NO: 457810 - DNA, 120 bp, Artificial Sequence
  ENSG00000157017_13 (sequence is synthesized)
tgggaggtggaagcgggggtcctctctacacagcagtcaggaccccagatggtaaagcccttcacgccatctgctgggctcctacctgagcaagctcagaggcacatgagaaggggaggc

SEQ ID NO: 457811 - DNA, 120 bp, Artificial Sequence
  ENSG00000157017_14 (sequence is synthesized)
agatggaggtcaagcagaaggggcagaggatgaactggaagtccggtttcagagtagaagactttggagaccaagtcccactcccattgaacagatgggccactgaggccaggagggaag

SEQ ID NO: 457812 - DNA, 120 bp, Artificial Sequence
  ENSG00000157017_15 (sequence is synthesized)
ctgccccccaccagccagcactgtgtcaccactcacttgcctgcaccacagcgccaggtgttaggccaggccagcagtttcccagaccggtgctcctgtttcctaagatgtctgccaggc

SEQ ID NO: 457813 - DNA, 120 bp, Artificial Sequence
  ENSG00000157017_16 (sequence is synthesized)
atcaaagaaaggtctatgcatatgagagaaaaaatacctagggaaggagaaaaaggagaagaaacagacaagagagaaaggagaaagagctgggagcagggaaggaatagaaggccagca

SEQ ID NO: 457814 - DNA, 120 bp, Artificial Sequence
  ENSG00000157017_17 (sequence is synthesized)
ctgagaatgctgggcagaccccctgccagggcctgaaatgctgccattggtgactcaaccttttgtcttcaaaactgcaagggagaaaaaaaatctcacactagggggcaccacagcttt

SEQ ID NO: 457815 - DNA, 120 bp, Artificial Sequence
  ENSG00000157020_0 (sequence is synthesized)
gttccgaggcgccgccgggagctgccacgtccgagacctggagcagccaccgccgcaatcatggtgtcagtaattaacactgtggatacctcccatgaggacatgattcacgacgcccag

SEQ ID NO: 457816 - DNA, 120 bp, Artificial Sequence
  ENSG00000157020_1 (sequence is synthesized)
atggactactatggcacccgcctggcaacctgctcatcagacaggtccgtcaaaatctttgatgtgcgcaatggagggcagatccttatcgccgacctcaggggtcatgagggtcctgtg

SEQ ID NO: 457817 - DNA, 120 bp, Artificial Sequence
  ENSG00000157020_2 (sequence is synthesized)
tggcaagtggcctgggctcaccccatgtacggcaacatcctggcatcgtgctcctatgaccggaaagtcattatctggagagaggaaaacggcacctgggagaagagccacgagcatgcg

SEQ ID NO: 457818 - DNA, 120 bp, Artificial Sequence
  ENSG00000157020_3 (sequence is synthesized)
ggacacgactcctcagtgaactcggtgtgctgggccccccatgactacggcctgatcctggcctgtgggagctcggatggggccatctccctgctgacttacaccggggaaggccaatgg

SEQ ID NO: 457819 - DNA, 120 bp, Artificial Sequence
  ENSG00000157020_4 (sequence is synthesized)
gaagtaaagaagatcaacaacgctcacaccattggctgcaatgccgtcagctgggcccctgctgttgtacctggaagcctcatagaccacccatcggggcagaaacccaattacatcaag

SEQ ID NO: 457820 - DNA, 120 bp, Artificial Sequence
  ENSG00000157020_5 (sequence is synthesized)
tggaaggaggaggaggacggccagtggaaggaggagcagaagctagaagcgcacagtgactgggttcgagatgtggcctgggccccctccatcggcctgcccaccagcaccatcgccagc

SEQ ID NO: 457821 - DNA, 120 bp, Artificial Sequence
  ENSG00000157020_6 (sequence is synthesized)
tgctcccaggatggtcgtgtgttcatttggacctgtgatgatgcctcaagcaatacgtggtcccctaaattgttgcacaagttcaacgatgtggtgtggcatgtgagctggtccatcaca

SEQ ID NO: 457822 - DNA, 120 bp, Artificial Sequence
  ENSG00000157020_7 (sequence is synthesized)
gccaacatcctggctgtctctggtggagacaataaggtgaccctgtggaaggagtcagttgatgggcagtgggtgtgcatcagtgatgtcaacaagggccagggctccgtatcagcatca

SEQ ID NO: 457823 - DNA, 120 bp, Artificial Sequence
  ENSG00000157020_8 (sequence is synthesized)
gtgacagagggccagcagaacgagcagtgacaagacaggtggggcctggctccccacccgccagctccaggactgccccttcctgggccaactaaccagacaactgggaagagcccccaa

SEQ ID NO: 457824 - DNA, 120 bp, Artificial Sequence
  ENSG00000157020_9 (sequence is synthesized)
ctccaacaggattattttcccaggaggagttacagatgcagccacagattgatcatctgccttaacgtgatcggagatgctttgtaatctactgtccagctgaaagcactcatgttacga

SEQ ID NO: 457825 - DNA, 120 bp, Artificial Sequence
  ENSG00000157020_10 (sequence is synthesized)
ggaagaaactacaagtgatgttcaaatctattttgggtcatttttatgtacctttgggttcaggcattatttggggggttttgtttccaaaggaactaaataaagtcatattgcttataa

SEQ ID NO: 457826 - DNA, 120 bp, Artificial Sequence
  ENSG00000157020_11 (sequence is synthesized)
ccgagacctggagcagccaccgccgcaatcatgggcttgtgctggaaaagatgaaatggggaaaatggtgtcagtaattaacactgtggatacctcccatgaggacatgattcacgacgc

SEQ ID NO: 457827 - DNA, 120 bp, Artificial Sequence
  ENSG00000157020_12 (sequence is synthesized)
cactgaattaaaaagcataaactaagtcagtgtccatttggggaaatgggcctagaagctcccctctgtctgagtgtcaaatgatcaagtgactgaggagccaaatcaagcttctctatg

SEQ ID NO: 457828 - DNA, 120 bp, Artificial Sequence
  ENSG00000157020_13 (sequence is synthesized)
caggagccccccaggcaggcagagagctgctgcagtgcagcgtgttggccaaggcagttatgtttgctgtgactctgtcctttctgctgtttttcttacattcaaaggatgtgaaatatt

SEQ ID NO: 457829 - DNA, 120 bp, Artificial Sequence
  ENSG00000157020_14 (sequence is synthesized)
ggagggataaaaaaaattcccaccccattcttttttccccttagtaaaaactgtgctagttgttggaagattgagtctactcagtttcattagcagcagctttgtagggactgggaatgt

SEQ ID NO: 457830 - DNA, 120 bp, Artificial Sequence
  ENSG00000157020_15 (sequence is synthesized)
cctgttgtcccagccagagggaggaggagacttgagtgtgtgcagcccacggtgaaggagtaaaccaggagcagcactaatagctaatgggtattgagtggcttttttctttccttctac

SEQ ID NO: 457831 - DNA, 120 bp, Artificial Sequence
  ENSG00000157020_16 (sequence is synthesized)
caagcattgttccaaactttatgaaagaattcttattgatgtctccattttcaggtaaagagacaaagatatccttgcctaaagtcaagagctagtgaatgggagaatgggtctggtctc

SEQ ID NO: 457832 - DNA, 120 bp, Artificial Sequence
  ENSG00000157020_17 (sequence is synthesized)
ctaaccactaactctaccatgctactctacctcttgagtgctaaggtgcaaaaccttccctgggccagagaaatggtcaccgtacaaagcctggcacagagcatgtgctcagatagcacc

SEQ ID NO: 457833 - DNA, 120 bp, Artificial Sequence
  ENSG00000157020_18 (sequence is synthesized)
tgttatcaggtgaatggataaagatcagaagagaagggaaagacatgcctttcgaacaaattaaaagagtagtggaaaacatcaaaatgaaaccaataatgcctcctcaggaagctgacc

SEQ ID NO: 457834 - DNA, 120 bp, Artificial Sequence
  ENSG00000157020_19 (sequence is synthesized)
gtcgggaaggatgaatagcaattcagtctacaaatatttcctgaacacttctggctggaaaccttggaccaattaatgactatgctgtagacagcacatacagacagtgctggctgcagt

SEQ ID NO: 457835 - DNA, 120 bp, Artificial Sequence
  ENSG00000157020_20 (sequence is synthesized)
ctgggcaagtgaggctcctgcctggccaggacaggaaggctgacccagaggctcaactctctctcaaaggctctgtgaccttaggttgcttaacctcttaggacctcaggctcctcactg

SEQ ID NO: 457836 - DNA, 120 bp, Artificial Sequence
  ENSG00000157020_21 (sequence is synthesized)
agcgcctgccttgccccgtgtctgctgcagcctccctagagggtggcacgggagggtccccgctggacagtgggccggggagtggtcagctgaccagacatgattgctctagagcagctt

SEQ ID NO: 457837 - DNA, 120 bp, Artificial Sequence
  ENSG00000157020_22 (sequence is synthesized)
tgagcctctctgccctgaagccagaccaggcagggcttggcactgcttccttgttgtgtgctcccaagcaggggagggctggtgcagcagcagcctgctcactgccaccttagctatggt

SEQ ID NO: 457838 - DNA, 120 bp, Artificial Sequence
  ENSG00000157020_23 (sequence is synthesized)
tgcctccaggtgacatgccctgcagtagtcattgggaccctgtagaatggagtggtgttattaaaacttttaaaaagtatgtgagctatgcatacatttaagaaagattaatataaacaa

SEQ ID NO: 457839 - DNA, 120 bp, Artificial Sequence
  ENSG00000157020_24 (sequence is synthesized)
gccgcaatcatggtgagtgttggtactgaggaggcctagcagggtgaaggccacggtcgcggccttcacgggttcctcggccgtcctgagtcccaaatcccaagctggagccgttcagct

SEQ ID NO: 457840 - DNA, 120 bp, Artificial Sequence
  ENSG00000157020_25 (sequence is synthesized)
cccctccaccgcttagagatttggggggctctggccccgtccttgcggaccattccgaggggagtccagaggtgaggccgaggaacctccctgactttgcggggcgcgccgctcctgcgt

SEQ ID NO: 457841 - DNA, 120 bp, Artificial Sequence
  ENSG00000157020_26 (sequence is synthesized)
ctcctgccagtctcccttccttcttttcggtcaacaattgaaaacaaaacgaggaacagcagaggagctactgtataccgagccctcagcattgttcgtaatctccgcctgctaacagcc

SEQ ID NO: 457842 - DNA, 120 bp, Artificial Sequence
  ENSG00000157020_27 (sequence is synthesized)
ttgtgaagaaggtgctattcttctcaacactttacagatgaggacacttgaggttcggagacgtggagcctcttgcacagctgcttaagtggtagtagagccgagatttgaaccctccta

SEQ ID NO: 457843 - DNA, 120 bp, Artificial Sequence
  ENSG00000157020_28 (sequence is synthesized)
accattcctttctgccgcctactgcagctcccagcagagatgattgaactgttgctcggggtagggcccccaggtgtcagtaattaacactgtggatacctcccatgaggacatgattca

SEQ ID NO: 457844 - DNA, 120 bp, Artificial Sequence
  ENSG00000157020_29 (sequence is synthesized)
gcttaagtgacttcggggacctggtttttagagagtctagaatctgatgagagaacctgtgcttacttggtgtgtacctcttgaactgctttgcagccatcctcttccactgtctgcctt

SEQ ID NO: 457845 - DNA, 120 bp, Artificial Sequence
  ENSG00000157020_30 (sequence is synthesized)
cgctgggatcccagccagcctggctgtcctcagcggacgtccccagggatgatgctgttaagggcacaggtggatacaggtgtgaatctcagctctgccactttatgtgtacccaccaga

SEQ ID NO: 457846 - DNA, 120 bp, Artificial Sequence
  ENSG00000157020_31 (sequence is synthesized)
agaccttgggcaagtgactcagtttctctctcagagccttcatctgctcatcctcaaaattgggccaatgctacctcctatccagctagtgtatgcaaggccctgacacagggcccagga

SEQ ID NO: 457847 - DNA, 120 bp, Artificial Sequence
  ENSG00000157020_32 (sequence is synthesized)
caacatcctggctgtctctggtggagacaataaggcaggccctcaagagacccgcaacagaaaggaaagccaccgactggagagaacctgcttcctgagccccaccaagttccaaaaagg

SEQ ID NO: 457848 - DNA, 120 bp, Artificial Sequence
  ENSG00000157020_33 (sequence is synthesized)
agaatggggcttcgtcctcaccctcaaggagttgccaaactgggcttggttattattcacacttgaaaagaatgaggaaggtcagccagtcccctccaggtcgctcgggcttcctccaag

SEQ ID NO: 457849 - DNA, 120 bp, Artificial Sequence
  ENSG00000157020_34 (sequence is synthesized)
gtccgagacctggagcagccaccgccgcaatcatgacttcggggacctggtttttagagagtctagaatctgatgagagaacctgtgcttacttggtgtgtacctcttgaactgctttgc

SEQ ID NO: 457850 - DNA, 120 bp, Artificial Sequence
  ENSG00000157020_35 (sequence is synthesized)
gcaattctgccctgatatatcgtctcagggagccatttagttctgtccaaagtagtgcctgcagaggcactgtgggttcctctggcctatctctccctttgtagtcatgagggtcctgtg

SEQ ID NO: 457851 - DNA, 120 bp, Artificial Sequence
  ENSG00000157020_36 (sequence is synthesized)
cttaatttctacttttagcgcacactgcagaaaaatgcacacactgttgggatccttgagggagaattctgagcagtggaccccatgatgagtgcttcatgtcagccttcacacacactc

SEQ ID NO: 457852 - DNA, 120 bp, Artificial Sequence
  ENSG00000157020_37 (sequence is synthesized)
cagtcctgagaagcggaggggagagggacagcaggcttgggtctgcagaagcagtgttctcttgcaaggcagagtcaccatgtgtcccatctttacagattggctgcaatgccgtcagct

SEQ ID NO: 457853 - DNA, 120 bp, Artificial Sequence
  ENSG00000157020_38 (sequence is synthesized)
ggtggctgtgacaacctcatcaagctgtggaagtaagtagggatgtgtggccttctctttgaggggacacttctaccctttaccctactcaccatgactcagccacactcacaagaaaca

SEQ ID NO: 457854 - DNA, 120 bp, Artificial Sequence
  ENSG00000157020_39 (sequence is synthesized)
aggtcacctttctttctccctcctgccagtaaaatactgttttcaatctgttggaggacatccttgaaaaacaacacaacacctgttcacctaattcccaactgttggagctgactcttt

SEQ ID NO: 457855 - DNA, 120 bp, Artificial Sequence
  ENSG00000157020_40 (sequence is synthesized)
ttctggagggttttttttacagctggggtgaagggaataaaatgccacaaactccatgaatgaaagaagaaagatggaatcgcttctccaccccaggcagagcctgttgggttggggagg

SEQ ID NO: 457856 - DNA, 120 bp, Artificial Sequence
  ENSG00000157020_41 (sequence is synthesized)
ataaggtacatacccattccccgtggcatggtggacacagcctgttggtcttcaccccgcccactagagagggcacttgacattcccatctgactgcaggctgggcaggagccttagcca

SEQ ID NO: 457857 - DNA, 120 bp, Artificial Sequence
  ENSG00000157020_42 (sequence is synthesized)
ggactgcgttttgagtgtgcctcttagttacatcattaatgtcacagcccctgaggtagtattaacacgtccccctttcacagatgaggaaagaagctgacagaggcgatttgacttgca

SEQ ID NO: 457858 - DNA, 120 bp, Artificial Sequence
  ENSG00000157020_43 (sequence is synthesized)
tgggggtcccaaaactatgaggtggcagagccagtcaggcccatcaccctactaagcatttggtcacctcatggtgatgttcagttagctgtgccaaaaaggcaagtgtataagaaccca

SEQ ID NO: 457859 - DNA, 120 bp, Artificial Sequence
  ENSG00000157020_44 (sequence is synthesized)
taaacagaagaagattggggatattttttgtccataacactgaaaaggctttttaaaaacctttagagtttatgaatacttgttatgctggtaagaggcaggtacacagtgggtgcactg

SEQ ID NO: 457860 - DNA, 120 bp, Artificial Sequence
  ENSG00000157036_0 (sequence is synthesized)
gtggtaaaaggccggtacctcgggcaagatggctatcaagagtatcgcttcccgcctccggggttcccgtcgttttctgagcggcttcgtggctggggctgtagtgggcgctgcgggagc

SEQ ID NO: 457861 - DNA, 120 bp, Artificial Sequence
  ENSG00000157036_1 (sequence is synthesized)
tgggctcgcggccctgcagttcttccggagtcagggcgctgagggagcgttgacagggaagcagccggatggatctgcagaaaaggctgtcttggaacaatttggattccctttaactgg

SEQ ID NO: 457862 - DNA, 120 bp, Artificial Sequence
  ENSG00000157036_2 (sequence is synthesized)
aacagaggcaaggtgttacactaatcacgctttgtcttatgatcaggcaaagcgggtgcctagatgggttcttgaacatatttccaaaagcaagataatgggtgatgcagacagaaagca

SEQ ID NO: 457863 - DNA, 120 bp, Artificial Sequence
  ENSG00000157036_3 (sequence is synthesized)
ttgtaaatttaagcctgatcccaatatccctccaaccttcagtgccttcaatgaagattatgttggaagtgggtggtcacgaggacacatggctccagcaggaaataacaaattttcaag

SEQ ID NO: 457864 - DNA, 120 bp, Artificial Sequence
  ENSG00000157036_4 (sequence is synthesized)
taaagccatggctgaaaccttttacctttctaacattgtgcctcaggattttgataataattctggatattggaacagaatagaaatgtactgtcgagagctgacagaaaggtttgaaga

SEQ ID NO: 457865 - DNA, 120 bp, Artificial Sequence
  ENSG00000157036_5 (sequence is synthesized)
tgtttgggtggtatctgggcctttgaccttacctcagactagaggcgatggaaagaaaatagttagttaccaggtgattggcgaggacaacgtggcagtcccctcacacctttataaggt

SEQ ID NO: 457866 - DNA, 120 bp, Artificial Sequence
  ENSG00000157036_6 (sequence is synthesized)
aatcctggcccgcagaagctcagtatctaccgaaccactggcgctaggggcctttgtggtacccaatgaagccatcggcttccagccccagttaactgaattccaagtgagcctccagga

SEQ ID NO: 457867 - DNA, 120 bp, Artificial Sequence
  ENSG00000157036_7 (sequence is synthesized)
cctagagaagttgtcaggactggtgttttttcctcatttggatagaactagtgatatccggaatatctgctctgtggacacctgtaagctcctggatttccaggagttcaccttgtactt

SEQ ID NO: 457868 - DNA, 120 bp, Artificial Sequence
  ENSG00000157036_8 (sequence is synthesized)
gagtacaagaaagattgaaggagcccgatcagtgctcagactggaaaagatcatggaaaacttgaagaatgcagagattgaaccagatgattactttatgagtcgctatgagaagaagct

SEQ ID NO: 457869 - DNA, 120 bp, Artificial Sequence
  ENSG00000157036_9 (sequence is synthesized)
agaagaactcaaagctaaggagcagtcaggaacccagataagaaagccatcctagtttttatctcaagatgtgtcataccgtctgtaatgaagcaggcatgccctctttaggctaacata

SEQ ID NO: 457870 - DNA, 120 bp, Artificial Sequence
  ENSG00000157036_10 (sequence is synthesized)
ttttagtggctttgctttttgctttttaaaaagtttttctctttaagagatgtggtctcgccgtgtcatccaggctggagtgcagtggtggaatcatagctcactatagcctcaaacttc

SEQ ID NO: 457871 - DNA, 120 bp, Artificial Sequence
  ENSG00000157036_11 (sequence is synthesized)
tgagcagctgggactacaggcacacaccatcaccctcagctactagtggctttgctttaaagaaacagtggaatcctaaatttatgactaaaaattcccccaaaagatgaaagatctaca

SEQ ID NO: 457872 - DNA, 120 bp, Artificial Sequence
  ENSG00000157036_12 (sequence is synthesized)
gggagctttgacacctgcagatggagggctgatcttgtgtcaagttaacaggaagactgcccacagatgacactgcatttgtatccctgtggatgtagagtattgggaaggcatttgttt

SEQ ID NO: 457873 - DNA, 120 bp, Artificial Sequence
  ENSG00000157036_13 (sequence is synthesized)
agtttcatgcctccaaaccatgcattgtctgtgatgtatctgcccagccttctcagaactcaatgttgtacatttttccctctaggacctgaattggtcttggaggcagcttttagaaat

SEQ ID NO: 457874 - DNA, 120 bp, Artificial Sequence
  ENSG00000157036_14 (sequence is synthesized)
cctctgtgtagttcctgtccacatgcactatatatttgtttcttttttctcctctcatgaatctgctcgtttctctacttctgtctacgtagaagcactcagcaactagtttctgctcat

SEQ ID NO: 457875 - DNA, 120 bp, Artificial Sequence
  ENSG00000157036_15 (sequence is synthesized)
taaatgtgttctatatactaggctcagtgctttacatgtgttgtctcacaatgactctctgaggtaaatacactatccccattttacctgtgagaaaattgaggcttagagagcttagtg

SEQ ID NO: 457876 - DNA, 120 bp, Artificial Sequence
  ENSG00000157036_16 (sequence is synthesized)
tcttacctgagtttcacttttccaaagtagtcatccacaaagtatgaggcagacagatctaagagaagaaagacagctgaggtagattcaaatcttttctgacatggatggtggcttttt

SEQ ID NO: 457877 - DNA, 120 bp, Artificial Sequence
  ENSG00000157036_17 (sequence is synthesized)
actcagaaatatatacctatttccatgggtatttgtgggcctgaggcatgcttggcaagaagagtctggtttctcgtctgctatgcaagccaaagggactttaatgttctttgaattgaa

SEQ ID NO: 457878 - DNA, 120 bp, Artificial Sequence
  ENSG00000157036_18 (sequence is synthesized)
ccctccttagctctgtggaaagagacagtcaggaatatttgggaattagacggcaatactttgtggggtttattagagcccatgcttgcctccagagatacagttcttttagtgaccaga

SEQ ID NO: 457879 - DNA, 120 bp, Artificial Sequence
  ENSG00000157036_19 (sequence is synthesized)
tactgccaaattgatgtgttcttgctttccaggtgagctttttgttcttaagattaagaaacctatgaaggatctgcagccaggcatggtggctcaggcctataatctcagcactttggg

SEQ ID NO: 457880 - DNA, 120 bp, Artificial Sequence
  ENSG00000157036_20 (sequence is synthesized)
gtcccagctactcgggaggctgaaatgggaggattgcttgagcctggcaggtcaaggctgcgatgggacatggtcatgccactggacgccagcctgggccacagagggagaccctgtctc

SEQ ID NO: 457881 - DNA, 120 bp, Artificial Sequence
  ENSG00000157036_21 (sequence is synthesized)
aaaaaaagaaaagaaaaaagaaaaaggtctgcccacaaaatcactagcttattatttgcttcctgtgtgcctgcttgtctacctagcatagtaggccaaaggtccaaaggcatttagcat

SEQ ID NO: 457882 - DNA, 120 bp, Artificial Sequence
  ENSG00000157036_22 (sequence is synthesized)
tcctaggggaaattgtggctgtttttctgagccagatctcttgatttgggtttacacggagtcctttcatggactatcctgagtattgtcagtaaaacgtcttggggcataagaacttgt

SEQ ID NO: 457883 - DNA, 120 bp, Artificial Sequence
  ENSG00000157036_23 (sequence is synthesized)
ctgaatctgtcatacataccactgctgtcttttccgagtggtattacaagaaagatttttgtggtgtgtttgttctaagagaaatgccaaggctttcagataaagataagatgataatga

SEQ ID NO: 457884 - DNA, 120 bp, Artificial Sequence
  ENSG00000157036_24 (sequence is synthesized)
ttcaagaagaggttgattccagacaagtgaaacatacctgaagattctggtttggacattataaatggtctgacaagaaagtgattggcgaggacaacgtggcagtcccctcacaccttt

SEQ ID NO: 457885 - DNA, 120 bp, Artificial Sequence
  ENSG00000157036_25 (sequence is synthesized)
cgggcatcttcgttttctgcacagaaccacccccgccgcccgactttcttccccccagttactcatcgcgatatctatgttttaatgtctgtgttctctactaagattgttagctccata

SEQ ID NO: 457886 - DNA, 120 bp, Artificial Sequence
  ENSG00000157036_26 (sequence is synthesized)
agacttgagactatgtctgttttggtctccatcatctaaccagcacagtacctggtacataattggcattcagtaagtatgaatgaaggaataaattaatacataattttagtagatgag

SEQ ID NO: 457887 - DNA, 120 bp, Artificial Sequence
  ENSG00000157036_27 (sequence is synthesized)
ttaactgcccttctttcgtcattgttcagttgaagaatacctgctatccctccaaagtgtataaaaactcatgttgcaatgggtaccttatatttgacaaaaaaaaaaaaaaaattaaca

SEQ ID NO: 457888 - DNA, 120 bp, Artificial Sequence
  ENSG00000157036_28 (sequence is synthesized)
cgagctcatttcttgtactttgcggatgtgctaatttaacttgctcctttggatacttggcatctagcaagagaactacccccttggggggttgaggatttgagaaggcatcggggagga

SEQ ID NO: 457889 - DNA, 120 bp, Artificial Sequence
  ENSG00000157036_29 (sequence is synthesized)
ttatctcgaaactgactcactgctgaatgtgtgcttggtttctcccactaggaaaaacagtaccagttttactgtcatcttgcaacagcacacatatcagtgcttcagagatgatttgga

SEQ ID NO: 457890 - DNA, 120 bp, Artificial Sequence
  ENSG00000157036_30 (sequence is synthesized)
aatttgatgtgaaagactaataagatcaagtctttattcaaaagttaatgcagtagctgcattttattcactgattataggcaaatcagtactttgcctactgtctgttttcttcatctc

SEQ ID NO: 457891 - DNA, 120 bp, Artificial Sequence
  ENSG00000157036_31 (sequence is synthesized)
ataagtaattgcaaaaatgagattttctggttgattagacttctgagccagtcctttgtaaatcacaccgctctccttttccttataatctttcattattaagagccactaattgtgtgt

SEQ ID NO: 457892 - DNA, 120 bp, Artificial Sequence
  ENSG00000157036_32 (sequence is synthesized)
gacaaggaccagtgaggaggccactgcaagaatccaggagagagatgatggcggctcagaccagcgcagtggcctggttgaacttgggatatatttcgaaggtagagccaacaggatttc

SEQ ID NO: 457893 - DNA, 120 bp, Artificial Sequence
  ENSG00000157036_33 (sequence is synthesized)
cggccggattggatgtagggtgtgagaaacagagaggaggcaaggatgacgtcaagggttttggcctgagcagctggaaatccagccgggcacccccgtgggggctgttgagtggtttta

SEQ ID NO: 457894 - DNA, 120 bp, Artificial Sequence
  ENSG00000157036_34 (sequence is synthesized)
actgtctcctggggcctgtgggtgaagctgagacagagaccgaagggaggggctgagccctacccctggctctgtggctcagggaataggctgcacatactgattattccattacccttt

SEQ ID NO: 457895 - DNA, 120 bp, Artificial Sequence
  ENSG00000157036_35 (sequence is synthesized)
gtggttggataaaaaaactgaagtaacagtatttatgaaagatgtctccaaatttaaaacagggatgattattaatattctcaacctttttcatatcatagcacatgtagaaaattatat

SEQ ID NO: 457896 - DNA, 120 bp, Artificial Sequence
  ENSG00000157036_36 (sequence is synthesized)
ttatataacttactggttaaatcaaccctgcctggcagccagaaagccagaccctttccagctgtctcagggctgaaaatacccatatcttgacacactagttgggaggctctgtcataa

SEQ ID NO: 457897 - DNA, 120 bp, Artificial Sequence
  ENSG00000157036_37 (sequence is synthesized)
cctggtgctgttctgggtgcttctgatacagcattaaacaaggcagaaaagagtaccctcatggagcatgcattatagtggaggagatacctagtgattggcgaggacaacgtggcagtc

SEQ ID NO: 457898 - DNA, 120 bp, Artificial Sequence
  ENSG00000157036_38 (sequence is synthesized)
ctttcctagactagtactttctaaattcagatgaagtatctgaactatcccaggaacttgagacatgcatgcaatccctaatactagctgcttggagagacaccagccagtagcaaccag

SEQ ID NO: 457899 - DNA, 120 bp, Artificial Sequence
  ENSG00000157036_39 (sequence is synthesized)
cggagtcagggcgctgagggagcgttgacagggaagcagccggatgattgttagctccataagacttgagactatgtctgttttggtctccatcatctaaccagcacagtacctggtaca

SEQ ID NO: 457900 - DNA, 120 bp, Artificial Sequence
  ENSG00000157036_40 (sequence is synthesized)
attttcttctcatgactatatatagcataccactaagccctctagacatcatattccccatccatcgccccgtccagtggaccagggatgaagcggggatgcgctaggcatcccggtttg

SEQ ID NO: 457901 - DNA, 120 bp, Artificial Sequence
  ENSG00000157036_41 (sequence is synthesized)
attggcattcagatctgcagaaaaggctgtcttggaacaatttggattccctttaactggaacagaggcaagggaactaaaagagtgccagtagatgaatgagggggaaggtgatgtgaa

SEQ ID NO: 457902 - DNA, 80 bp, Artificial Sequence
  ENSG00000157036_42 (sequence is synthesized)
attcttcaagtttacactcctagcatcattgtttcttctctctctcaaccttcacctatggctggtcttgaatttctggg

SEQ ID NO: 457903 - DNA, 80 bp, Artificial Sequence
  ENSG00000157045_0 (sequence is synthesized)
gcctccctgggcctgcctgggcggccgcctccgcgatgccgctgctcgtcgaggggcggcgagtgcggctgccgcagtca

SEQ ID NO: 457904 - DNA, 120 bp, Artificial Sequence
  ENSG00000157045_1 (sequence is synthesized)
ggggcggcgagtgcggctgccgcagtcagccggggacctcgtccgagcccacccgcctttggaggaaagagccagacttctcagaggtcagtctgttcaacaagtgggaccccagggcct

SEQ ID NO: 457905 - DNA, 120 bp, Artificial Sequence
  ENSG00000157045_2 (sequence is synthesized)
tctgtatgttcagcaaagagagcttgcagtgacctccccaaaggatggctccatctccattctgggttctgatgatgccactacttgtcacattgtggtcctgaggcacacaggtaatgg

SEQ ID NO: 457906 - DNA, 120 bp, Artificial Sequence
  ENSG00000157045_3 (sequence is synthesized)
ggccacctgcttgacacattgtgacggaaccgacaccaaagctgaggtccccttgatcatgaactccataaaatccttttctgaccacgctcaatgtggaaggctggaagtacaccttgt

SEQ ID NO: 457907 - DNA, 120 bp, Artificial Sequence
  ENSG00000157045_4 (sequence is synthesized)
tggaggcttcagtgacgacaggcagttgtcacaaaaactcactcatcaacttcttagtgaatttgacaggcaagaagatgacattcacttagtgacattatgtgtgacagaattaaatga

SEQ ID NO: 457908 - DNA, 120 bp, Artificial Sequence
  ENSG00000157045_5 (sequence is synthesized)
aacgaaaaccactttccagtaatatatggcattgctgtcaacattaagactgcagagatttacagagcatcctttcaagatcggggtccggaggagcagcttcgtgctgcgcgaacttta

SEQ ID NO: 457909 - DNA, 120 bp, Artificial Sequence
  ENSG00000157045_6 (sequence is synthesized)
gcaggaggaccaatgattagcatttatgatgcagagacagaacaacttcgtataggaccgtactcctggacaccatttccacatgtggatttctggttgcaccaagatgacaagcaaata

SEQ ID NO: 457910 - DNA, 120 bp, Artificial Sequence
  ENSG00000157045_7 (sequence is synthesized)
ctagagaatctttccacttcgcctctggctgagccaccccactttgttgaacatattagatctaccttgatgtttttaaaaaaacacccatctccagctcacacactgttttctggaaat

SEQ ID NO: 457911 - DNA, 120 bp, Artificial Sequence
  ENSG00000157045_8 (sequence is synthesized)
aaagccctactctacaaaaaaaatgaagatggcttgtgggaaaagatctcttctccaggaagttaaaaaacatgaattaccaaagaaagcaccttcttggcctgacagaccattggtggg

SEQ ID NO: 457912 - DNA, 120 bp, Artificial Sequence
  ENSG00000157045_9 (sequence is synthesized)
gctggcacgaatccagatctggatcctacatctgttgggtcttaggcctccttccctcctcagtgtctttcaaatgactttcatcaaatgactttcaaaataaaaccttattttggcaaa

SEQ ID NO: 457913 - DNA, 120 bp, Artificial Sequence
  ENSG00000157045_10 (sequence is synthesized)
agaacgtgcttgtcagctcttcctgatctgttgtagaactgtgatcgctcagggagtcagaggcaaacctggtggcccagtggcaaagccatggtggtcgcagctctccttactgctact

SEQ ID NO: 457914 - DNA, 120 bp, Artificial Sequence
  ENSG00000157045_11 (sequence is synthesized)
acttggagtttattatgaggccccttgaggctgtgccctatgttgggtacatccaagcttctggttcatcccttaggaagattttgtgtctgagaaggcagcgtaaagtctggcaacact

SEQ ID NO: 457915 - DNA, 120 bp, Artificial Sequence
  ENSG00000157045_12 (sequence is synthesized)
ttgccgagcgtgaattcgcccacttgacgggctgtggaaaagggggttagtagatgagtgtgggaaacactgggttcaagaaagttagttggatttttcagtcgcaggacttctcaagag

SEQ ID NO: 457916 - DNA, 120 bp, Artificial Sequence
  ENSG00000157045_13 (sequence is synthesized)
cttcactgtgcaatgcgcagtgtgactcctaaggagggcttccagcaggcagttgcccagtctttttgttttgttttgtttttgttttagagccggggtttcaccctgtcacccaggcta

SEQ ID NO: 457917 - DNA, 120 bp, Artificial Sequence
  ENSG00000157045_14 (sequence is synthesized)
gctagtctcaaacttctgggctgaagcattccttccacctctgcctcccgcgtagctgggaatagaggtatatgccagcacacctggcctcaaaccttttttttttttttttgagacaga

SEQ ID NO: 457918 - DNA, 120 bp, Artificial Sequence
  ENSG00000157045_15 (sequence is synthesized)
cccgagtagccgggattacagacgcccaccaccacgcccaacttacttatttattttttccccctgagacggagtcttgctcgattgcccagagctggagtgcagtggcgcgatctcagc

SEQ ID NO: 457919 - DNA, 77 bp, Artificial Sequence
  ENSG00000157045_16 (sequence is synthesized)
ttcccgagtagctgggattacaggtgtgccaccatgcccggactctgtagcccaagctggagtgcagtggcacgatc

SEQ ID NO: 457920 - DNA, 62 bp, Artificial Sequence
  ENSG00000157045_17 (sequence is synthesized)
cctcccaggaatgtccagctaatttttttttgtattttagtagagatggagttttaccttgt

SEQ ID NO: 457921 - DNA, 120 bp, Artificial Sequence
  ENSG00000157045_18 (sequence is synthesized)
ggattacagatgtgagccactgcacctgtcctgtgcctgtgctcttccagagcaaagttccccactggtgcatggaggcggcatcacatttgtgttcagatacggatcccctcagtcatc

SEQ ID NO: 457922 - DNA, 120 bp, Artificial Sequence
  ENSG00000157045_19 (sequence is synthesized)
catcagggcccctgggcagggtccccagaagctcgccactggccttggcagtgtgctgccgatactttcttttgcggtggcacgaagatgacctgcagctctgctgtagagcaagtgttc

SEQ ID NO: 457923 - DNA, 120 bp, Artificial Sequence
  ENSG00000157045_20 (sequence is synthesized)
ctattctctgtaacttcgtgtatgtataaaatactaaattgtgaagattcaaacagaacgatcacagttcacccagccacccctggccgtacaccagtagggatgaccagaggttttgct

SEQ ID NO: 457924 - DNA, 120 bp, Artificial Sequence
  ENSG00000157045_21 (sequence is synthesized)
acatgtccgactgaaggaatggctgcctcccatgtggaaagcagctcttggtttagaacaaaatctcaccgagtccagctcgagcctcagcgattttcaccgagatgcttggggtaaagg

SEQ ID NO: 457925 - DNA, 120 bp, Artificial Sequence
  ENSG00000157045_22 (sequence is synthesized)
gctcaatgtggaaggtgagatctacgctgctctcataggtgaattgagatcttggaaccgtcgcatacaggacgtggctgtggaagctgttaggggaacacaggatgccaccactgccgt

SEQ ID NO: 457926 - DNA, 120 bp, Artificial Sequence
  ENSG00000157045_23 (sequence is synthesized)
gtctgcctcgttcccctggaacagaacctggcacgacgtgggcactgcgtcagcagtggttgagtgaatgagtgggtgctgggcacaggcaaggagtctgtgctggatttgagatggaag

SEQ ID NO: 457927 - DNA, 120 bp, Artificial Sequence
  ENSG00000157060_0 (sequence is synthesized)
aacggctgcctcggccctcgggctgctgaggagatggcgtcgggctccaaggcctcggtgcccgcggactcattccgcaccatcagcccggacaggcgaggcgagaagtccgcctccgct

SEQ ID NO: 457928 - DNA, 120 bp, Artificial Sequence
  ENSG00000157060_1 (sequence is synthesized)
gtctccggggacacggcggccgcgaccaccctgaagggcaccgcgatcccagtgcggtcggtggtggcctcccctcgcccggtgaaggggaaagcgggccgggagacggccaggctgcgg

SEQ ID NO: 457929 - DNA, 120 bp, Artificial Sequence
  ENSG00000157060_2 (sequence is synthesized)
ctccagcgcctgcccgcggctcaggccgaggacacgggagaggcggcggcggcggcggcggaggagcccctgctgccagtgcctgaggatgaagaggaggcgcagcccctgcccccagtc

SEQ ID NO: 457930 - DNA, 120 bp, Artificial Sequence
  ENSG00000157060_3 (sequence is synthesized)
tgcgtgtcccgtatgagggggatgtggcgggacgagaaggtgtcgctgtattgcgacgaagtgctgcaggactgtaaggcagaagatgctgatgaagttatgggtaaatacctatcagaa

SEQ ID NO: 457931 - DNA, 120 bp, Artificial Sequence
  ENSG00000157060_4 (sequence is synthesized)
aaattaaagttgaaagacaaatggcttggagtctggaagactaatcccagtgtattctttgtgaaatatgaagaagcttctatcccttttgttggtatattggttgaggtaacttgtgaa

SEQ ID NO: 457932 - DNA, 120 bp, Artificial Sequence
  ENSG00000157060_5 (sequence is synthesized)
ccataccaagactcatcatctcgtttcaaagttactgtttctgttgctgagcccttttcttccaacattgcaaatattccaagagatttggttgatgagattttggaggaactggaacac

SEQ ID NO: 457933 - DNA, 120 bp, Artificial Sequence
  ENSG00000157060_6 (sequence is synthesized)
agtgtgcctcttttggaagtgtatcctgttgagggacaagatactgatatacatgttattgctttggccttggaagttgtcaggtttttttatgactttctttggagagactgggatgat

SEQ ID NO: 457934 - DNA, 120 bp, Artificial Sequence
  ENSG00000157060_7 (sequence is synthesized)
gaagaaagttgtgagaattatactgcacttattgaagaaagaattaatttgtggtgtgatatacaggatggaacaatacctggtcctatcgcacaacgttttaaaaaaactttggagaaa

SEQ ID NO: 457935 - DNA, 120 bp, Artificial Sequence
  ENSG00000157060_8 (sequence is synthesized)
ttgaatgctggaaaaaatactatgagatagtcatgctctgtggattactgaaaatgtgggaagatttacgcctccgagttcatggacctttctttccaagaattctgaggcgtaggaaag

SEQ ID NO: 457936 - DNA, 120 bp, Artificial Sequence
  ENSG00000157060_9 (sequence is synthesized)
gaaaaagagaatttggaaagactataacacatattgtagcaaaaatgatgactactgaaatgataaaggatttatcttcagacacacttctccaacagcatggtgatttggatttggctt

SEQ ID NO: 457937 - DNA, 120 bp, Artificial Sequence
  ENSG00000157060_10 (sequence is synthesized)
tggataattgttatagtggagatacagtaataatttttccaggagaatatcaagctgcaaatcttgctttgttgacagatgacatcattataaagggagttggaaagagagaggaaatta

SEQ ID NO: 457938 - DNA, 120 bp, Artificial Sequence
  ENSG00000157060_11 (sequence is synthesized)
tgattacttctgaaccttctcgtgacagttttgtggtgtccaaagctgacaatgtgaaactaatgcatctatctttgatacaacaagggacggttgatggtatcgtggtggtggagtctg

SEQ ID NO: 457939 - DNA, 120 bp, Artificial Sequence
  ENSG00000157060_12 (sequence is synthesized)
gtcacatgactctagaaaactgcatattaaaatgtgaaggaacaggagtgtgtgttcttacaggggctgctttgacaattacagacagtgaaataactggcgcccagggtgctggtgttg

SEQ ID NO: 457940 - DNA, 120 bp, Artificial Sequence
  ENSG00000157060_13 (sequence is synthesized)
aactgtatcctggaagcatagctattttggaaagaaatgaaattcatcactgtaataacctcagaaccagtaacagttcaaaaagcaccttaggtggagttaatatgaaggttcttccag

SEQ ID NO: 457941 - DNA, 120 bp, Artificial Sequence
  ENSG00000157060_14 (sequence is synthesized)
cacccaaattgaagatgactaataatcatatttatagcaacaaaggctatggagtaagcattcttcaaccaatggaacagttttttatcgtagcagaagaagctctcaacaaaagggctt

SEQ ID NO: 457942 - DNA, 120 bp, Artificial Sequence
  ENSG00000157060_15 (sequence is synthesized)
cttcaggagataaaaaagatgataaaatgctcttcaaagtaatgcaaaatctgaatctggaaatgaataataataagatagaagcaaacgtcaagggggatatcagaatagtcacaagtt

SEQ ID NO: 457943 - DNA, 120 bp, Artificial Sequence
  ENSG00000157060_16 (sequence is synthesized)
aaagcgtctgaattgatgttaaagttttatatttcacaaatttgtttaatacatgattctcataccccactgaaatggtagtttcaattcaaagcttaattaaaaaatatttaaatatca

SEQ ID NO: 457944 - DNA, 120 bp, Artificial Sequence
  ENSG00000157060_17 (sequence is synthesized)
gaagtgctgcaggactgtaaggtgagcggatccgggacaggaagactacggtcggaagctcgtcggaacctggggacaggcatctggggcttccctcttaggcggatggggatccacagg

SEQ ID NO: 457945 - DNA, 120 bp, Artificial Sequence
  ENSG00000157060_18 (sequence is synthesized)
gcacaacgaaaacttgcgtttcaaaaaagtaaatggagtcaacatgtatagagcgttcaccttgttagaggtgcccgcgtcctgccctagaggagttaaggttcgagtttccgacaaaat

SEQ ID NO: 457946 - DNA, 120 bp, Artificial Sequence
  ENSG00000157060_19 (sequence is synthesized)
ggggttagagccattgcgttgggctcgtctggcaccttctggtgtgtgcggcacctggtgggggttcggcacggagccgcacccaacactgacccgggcccccccacccctgtcctgagc

SEQ ID NO: 457947 - DNA, 120 bp, Artificial Sequence
  ENSG00000157060_20 (sequence is synthesized)
ccaggcgcttcgccctgtcccacctagctctgagcagcgccccccagcaccctgaatgcgtccgcaggaccccgcgctctacccgcaggccccgcaccccctagctctgggccgcgcctc

SEQ ID NO: 457948 - DNA, 120 bp, Artificial Sequence
  ENSG00000157060_21 (sequence is synthesized)
cacttattgaagaaagaattaatttgtaagtatagtttataaacttataccgcacattagaaaaaataaacattgtaattatgttgataattttcaggtggtgtgatatacaggatggaa

SEQ ID NO: 457949 - DNA, 120 bp, Artificial Sequence
  ENSG00000157064_0 (sequence is synthesized)
ggagtccacagcatccaccgccggagcctcgccttcctttctccctctgcagacacaacgagacacaaaaagagaggcaacccctagaccaccgcgaaggacccatctgcaccatgaccg

SEQ ID NO: 457950 - DNA, 120 bp, Artificial Sequence
  ENSG00000157064_1 (sequence is synthesized)
agaccaccaagacccacgttatcttgctcgcctgcggcagcttcaatcccatcaccaaagggcacattcagatgtttgaaagagccagggattatctgcacaaaactggaaggtttattg

SEQ ID NO: 457951 - DNA, 120 bp, Artificial Sequence
  ENSG00000157064_2 (sequence is synthesized)
tgattggcgggattgtctcccctgtccacgactcctatggaaaacagggcctcgtgtcaagccggcaccgtctcatcatgtgtcagctggccgtccagaattctgattggatcagggtgg

SEQ ID NO: 457952 - DNA, 120 bp, Artificial Sequence
  ENSG00000157064_3 (sequence is synthesized)
acccttgggagtgctaccaggacacctggcagacgacctgcagcgtgttggaacaccaccgggacctcatgaagagggtgactggctgcatcctctccaatgtcaacacaccttccatga

SEQ ID NO: 457953 - DNA, 120 bp, Artificial Sequence
  ENSG00000157064_4 (sequence is synthesized)
cacctgtgatcggacagccacaaaacgagaccccccagcccatttaccagaacagcaacgtggccaccaagcccactgcagccaagatcttggggaaggtgggagaaagcctcagccgga

SEQ ID NO: 457954 - DNA, 120 bp, Artificial Sequence
  ENSG00000157064_5 (sequence is synthesized)
tctgctgtgtccgcccgccggtggagcgtttcacctttgtagatgagaatgccaatctgggcacggtgatgcggtatgaagagattgagctacggatcctgctgctgtgtggtagtgacc

SEQ ID NO: 457955 - DNA, 120 bp, Artificial Sequence
  ENSG00000157064_6 (sequence is synthesized)
tgctggagtccttctgcatcccagggctctggaacgaggcagatatggaggtgattgttggtgactttgggattgtggtggtgccccgggatgcagccgacacagaccgaatcatgaatc

SEQ ID NO: 457956 - DNA, 120 bp, Artificial Sequence
  ENSG00000157064_7 (sequence is synthesized)
actcctcaatactccgcaaatacaaaaacaacatcatggtggtgaaggatgacatcaaccatcccatgtctgttgtcagctcaaccaagagcaggctggccctgcagcatggggacggcc

SEQ ID NO: 457957 - DNA, 120 bp, Artificial Sequence
  ENSG00000157064_8 (sequence is synthesized)
atgttgtggattacctgtcccagccggtcatcgactacatcctcaaaagccagctgtacatcaatgcctccggctagcagcccctcgtcctccggcaacacaatggcccctccatctttg

SEQ ID NO: 457958 - DNA, 120 bp, Artificial Sequence
  ENSG00000157064_9 (sequence is synthesized)
tcagccccctgtttctctcctgcctctctgtttctccatctcctcgtcttgactgttttccctacttgctgacttaaccccccatagtgtgggggacctgcagagaaccatggcattccc

SEQ ID NO: 457959 - DNA, 120 bp, Artificial Sequence
  ENSG00000157064_10 (sequence is synthesized)
tattccacagtcatctttggacagactttcctctagtctccgggttgggggtgggtgagggaatggggtgggagtcgggggaagtgcagtccttggagatgtactggtgtccgtctccca

SEQ ID NO: 457960 - DNA, 120 bp, Artificial Sequence
  ENSG00000157064_11 (sequence is synthesized)
gcatgctctagagaggcggctctggtgcccatcctcccagcacgctctggggaggcggctctggtgcccatcctcccagcatgctctagagaggcggctctggtgcccctcctcccagca

SEQ ID NO: 457961 - DNA, 120 bp, Artificial Sequence
  ENSG00000157064_12 (sequence is synthesized)
tgctctggggaggcggctctggctcttgccttcccagcatgccctttactacaaagggctatttttcttttctttcttttgtttatttatttttctttgttcactccctgtagaacttgg

SEQ ID NO: 457962 - DNA, 120 bp, Artificial Sequence
  ENSG00000157064_13 (sequence is synthesized)
atgaaatcagtgtccatggttctttatgtttgtagtcttgatgtgctcctgtggtattacttcccctctgataggacattgtagccagcctcagcactcagtgagttcatcagggccaca

SEQ ID NO: 457963 - DNA, 120 bp, Artificial Sequence
  ENSG00000157064_14 (sequence is synthesized)
cccagtagagaaggccaagcaacctccacttcttcagcaccacacacacgcacacacacacacacgcacacatgcgtgtgcacccgcgcacgcacatacacacacacatatagcagtagc

SEQ ID NO: 457964 - DNA, 120 bp, Artificial Sequence
  ENSG00000157064_15 (sequence is synthesized)
agcagcagcagcagcagcagcaacctttgatcaggagtgagattttcgggttctgaaacctgggacacgagtctgtgaatagtcggttttctcagaataatttgaatctgttttcttagt

SEQ ID NO: 457965 - DNA, 120 bp, Artificial Sequence
  ENSG00000157064_16 (sequence is synthesized)
ttcaaatgaccatttccctgatgctctgagcttatgatcacacagagccagtccatcctcatttcctggtggcatctgttcatttacctttgtggactgtagctgatggcacagtgcggg

SEQ ID NO: 457966 - DNA, 120 bp, Artificial Sequence
  ENSG00000157064_17 (sequence is synthesized)
ttccctaccagccaggggtttccaagggacctttggaggccatgcttagacacattcctgtacctgagaacaaccacataggcaggaccagatccacatcgtgcagtcgtgtcataaaaa

SEQ ID NO: 457967 - DNA, 120 bp, Artificial Sequence
  ENSG00000157064_18 (sequence is synthesized)
aacaaaacaaaacaaaaaaacactaggagtccactcaaccctggaggtctttgctaattggaattatgtattgtctgttgggctgggaaatgtctctttcatattgtaagtccaggatga

SEQ ID NO: 457968 - DNA, 120 bp, Artificial Sequence
  ENSG00000157064_19 (sequence is synthesized)
actaggagaaagcaatttgttgccctgatgataactgatgattttcaccctctctagctgaggtaactcagacagtgcatgaggtcagtttcttcttgagaagcagtgccttggtcttgt

SEQ ID NO: 457969 - DNA, 120 bp, Artificial Sequence
  ENSG00000157064_20 (sequence is synthesized)
ttctgtggttggttctagcccctgcagagcctgggagctgcaggaactgtctgagaaaatctccctaataggggagtgggttcccagaagggagatctgggaggggtcaggagccactaa

SEQ ID NO: 457970 - DNA, 120 bp, Artificial Sequence
  ENSG00000157064_21 (sequence is synthesized)
gttgcttcactccttttttctctaattttctaccttcctctctgttcctgcagacagttttgccagctttgcttctggttactagggtctcatgcgtgtcctgcttggagagccataagg

SEQ ID NO: 457971 - DNA, 120 bp, Artificial Sequence
  ENSG00000157064_22 (sequence is synthesized)
gctcttgggattctggtctttgagaaatagtccctgagtattaggatacttttatcaaaatctagtaccagctacggccagaaagggccaggtgggacctgaaagcaaagacaatgttct

SEQ ID NO: 457972 - DNA, 120 bp, Artificial Sequence
  ENSG00000157064_23 (sequence is synthesized)
ttaccacacgtttcacatctgcaacatccttcaattgcgggaaaaggaacttgatttaacagaagaacatggtagagcagcatccagaaagtctgttattcctcttggattttttgaaat

SEQ ID NO: 457973 - DNA, 120 bp, Artificial Sequence
  ENSG00000157064_24 (sequence is synthesized)
aatcttcagaggaaggaaggaaaatcctattttggggtatcagtgtttgactagggatcatgaaataataaactgaaaaaaactttagagttcagttgatccaacactttcctttaaaag

SEQ ID NO: 457974 - DNA, 120 bp, Artificial Sequence
  ENSG00000157064_25 (sequence is synthesized)
ttgagggagcagaggcccatgggattaaatggctggtccaggtcagccagcaggtgtagggcctgacaagaacatattgtttccctgacccctaggccgtcacaccacaccctccatttc

SEQ ID NO: 457975 - DNA, 120 bp, Artificial Sequence
  ENSG00000157064_26 (sequence is synthesized)
ctcatgttgctgaccaggtgcccatatgatttctacacttcccaagccttaccctggcatctttcttttaaattatatctgtcccaggtgctctccacacataggatggtaatgccagtc

SEQ ID NO: 457976 - DNA, 120 bp, Artificial Sequence
  ENSG00000157064_27 (sequence is synthesized)
ccaggggagggtgtgatagtaaggaaggccactgttaggtttcctttagaaataaagagatctcagcagcttggaagaaatcccagaagcggactccatcaatccaagaaagagttgctt

SEQ ID NO: 457977 - DNA, 120 bp, Artificial Sequence
  ENSG00000157064_28 (sequence is synthesized)
tgtggaaggtgaaggaagacccacagagtgctcaggatgatgctattgctggagagcgaaagatggaacagccttgtccaggcagaacagtcataagccaggaaatgaaacaaaggaaaa

SEQ ID NO: 457978 - DNA, 120 bp, Artificial Sequence
  ENSG00000157064_29 (sequence is synthesized)
caggtgcctgaatttcctggggaaacatggcttgtttaaggacttggagttatggatggaatttatgggacccacgtgagcagacctgaggaaggctcgatttcttttgtttcttggtcc

SEQ ID NO: 457979 - DNA, 120 bp, Artificial Sequence
  ENSG00000157064_30 (sequence is synthesized)
actctgtcactctgctctggtcaagccccatttggtctacagcccatgagaaggaatgaggctggttctgcactctcagcatgcagtccgaaagcatgtgggagtggggagggaaagtga

SEQ ID NO: 457980 - DNA, 120 bp, Artificial Sequence
  ENSG00000157064_31 (sequence is synthesized)
gatgaattaagacaaagaacaggtgccatagaagtagatttctaggaatgaagtggggcagatcttatctttgtggattacaggcactgtactaaaaacaggtttcctatttaatataaa

SEQ ID NO: 457981 - DNA, 120 bp, Artificial Sequence
  ENSG00000157064_32 (sequence is synthesized)
cactgtactaaaaacaggtttcctatttaatataaaaagaaagtgaatcttcttttggatagaatcatccattcccatcgccgcaccccctaccccccaaacacacacacacacacacac

SEQ ID NO: 457982 - DNA, 120 bp, Artificial Sequence
  ENSG00000157064_33 (sequence is synthesized)
ctcttcatttgctaggggaaggtcacagcacaactaaatccaggacaggacattgtgaccatgacccagccacagtcaataccagaaagatgattcagagtctgaagtggtgccccaggt

SEQ ID NO: 457983 - DNA, 120 bp, Artificial Sequence
  ENSG00000157064_34 (sequence is synthesized)
gccaacaggataacctctaccccccgactttgtctctggggtcctgttccttcctgcaaagcccaatccaagactggcatggctcagaggttgtgagaaaggcatggactggaacaatca

SEQ ID NO: 457984 - DNA, 120 bp, Artificial Sequence
  ENSG00000157064_35 (sequence is synthesized)
tgtccagaggggtctggagctttgtttcctgttcaccagcaaaaaatgtctctcccatttttctgaaagtggctgatgtaagaacaggcagaaggaaaaccctttttgtcaataactctg

SEQ ID NO: 457985 - DNA, 120 bp, Artificial Sequence
  ENSG00000157064_36 (sequence is synthesized)
tccttaaggaatggtcctctgggagggctgtgctgctagtgggtacctcagtcacacacccccaaccccaggcagcctctagagccttcttgctttcattttccttgaatgtacatagga

SEQ ID NO: 457986 - DNA, 120 bp, Artificial Sequence
  ENSG00000157064_37 (sequence is synthesized)
acaagggggaaagtctcttactgaagtgcctgaaacccaaagctagagcttctagagacgccgttcttcctgtctcagcttggccagcctttcaacaatgttctctagtttcaagctcca

SEQ ID NO: 457987 - DNA, 120 bp, Artificial Sequence
  ENSG00000157064_38 (sequence is synthesized)
gcttctcagaaagaattaaagaacttgctgttcaaattaagtagaaagtgagactcaataataactgaactacagcaaaaggcagagaattacagggagaaaaaacttgtacttaccagc

SEQ ID NO: 457988 - DNA, 89 bp, Artificial Sequence
  ENSG00000157064_39 (sequence is synthesized)
aggggactaagagagagaagcatgttattacattttactcatccaaacagtaatgcaaaaataaaacggtagaatatgaaaagctcagg

SEQ ID NO: 457989 - DNA, 120 bp, Artificial Sequence
  ENSG00000157064_40 (sequence is synthesized)
gtaatgcaaaaataaaacggtagaatatgaaaagctcaggatctctcccaaggctacctactgcaggagggccaacaggtgagatgggaagaatggaaacagggaccgattttgtagctc

SEQ ID NO: 457990 - DNA, 120 bp, Artificial Sequence
  ENSG00000157064_41 (sequence is synthesized)
atacaattaggacaccttaggaatagcattgtagtaatggtgatgaatatgctctgccaaattcatccagtctgcaccatcttatagctgcccagcacactcgactgttcatgtggtctc

SEQ ID NO: 457991 - DNA, 120 bp, Artificial Sequence
  ENSG00000157064_42 (sequence is synthesized)
tttgtagtgtgagtttggagtgtcctattagcctgttctggttaggaatgagttaacggctctttccctcaaccttagtctagtcccagggctgaggattcagctggatccacatggtct

SEQ ID NO: 457992 - DNA, 120 bp, Artificial Sequence
  ENSG00000157064_43 (sequence is synthesized)
tgagggttggcatgaggagggggaagcttttttgaatcgctttttgatcacataatctgccattttaagagtaagatttgctttatggaaatcaattcattaataaaaaatgatattcaa

SEQ ID NO: 457993 - DNA, 120 bp, Artificial Sequence
  ENSG00000157064_44 (sequence is synthesized)
gttgcaataccatttcacagtgaaatattttgagtacaattttgttgctagaatagtcatgggcaagagttttatgcaaaatgtttcaattatgttaataaataagacaatgctacaaga

SEQ ID NO: 457994 - DNA, 120 bp, Artificial Sequence
  ENSG00000157064_45 (sequence is synthesized)
ttcaaattctcccaagctggaggtagtggagcaaacaagatcagcaacaatgagggagcagctgcaccactttgtgttactctctgatggccagcacagggctgcaagtagtggctgcaa

SEQ ID NO: 457995 - DNA, 120 bp, Artificial Sequence
  ENSG00000157064_46 (sequence is synthesized)
aaaccagacaaatagatggaaatccaggaactagaggaaattcaggcctgccaggggctctgggaagtgtttgttactctctcagaaagagccagggattatctgcacaaaactggaagg

SEQ ID NO: 457996 - DNA, 120 bp, Artificial Sequence
  ENSG00000157064_47 (sequence is synthesized)
tttggagctccctgccttcacgacaggcaacatggggagcagagaggcttgaaaacccagggactgttttgcagcagggtctcctctcggaagagggatcgttcccaggctaagattgca

SEQ ID NO: 457997 - DNA, 120 bp, Artificial Sequence
  ENSG00000157064_48 (sequence is synthesized)
ttcgtagttagctccctttaacatctcttaactggactccagccaactcccaagagataggactggatcatttggtgatttttccttcagagcctccactccctcctctaaaaaacatga

SEQ ID NO: 457998 - DNA, 120 bp, Artificial Sequence
  ENSG00000157064_49 (sequence is synthesized)
gcaccagctggaaagacccttcttttgggcacagacactgcacacaaatgaggcagaagagcaccccggccttcctcattcagtgcttgtagatgaagaaacagagaggggactgaaagc

SEQ ID NO: 457999 - DNA, 120 bp, Artificial Sequence
  ENSG00000157064_50 (sequence is synthesized)
cacctccacacctcccttgcagccttgggcagaggctaaggcacttcactgtctgtgtgagggctgcctgcccaacccaataccagagcaggccagggcaggcccgagccggtggagggc

SEQ ID NO: 458000 - DNA, 120 bp, Artificial Sequence
  ENSG00000157064_51 (sequence is synthesized)
ggttacacagctgtcagggtgggaagaagttgatgacccctacaagcaaattgagaagcagataggaacactgaaatcttcccagggtttcagaatggtgggagacgcaggtgtctgaag

SEQ ID NO: 458001 - DNA, 120 bp, Artificial Sequence
  ENSG00000157064_52 (sequence is synthesized)
ctggggaaagggcagggagacaccagaatagagctggagctggcacaggtaccaggggacaagaagggtcagtgacatcaggaatgcctggagctctagggcaaggcagcctggtgtcca

SEQ ID NO: 458002 - DNA, 120 bp, Artificial Sequence
  ENSG00000157064_53 (sequence is synthesized)
caccctcaatcttcaacttccagctgaaaagatcctccaagcatcccttcctggtacttttctgtccaaggactggaagtcagggctcccactgcaatcctgagaggcagggtttgtcct

SEQ ID NO: 458003 - DNA, 120 bp, Artificial Sequence
  ENSG00000157064_54 (sequence is synthesized)
gagcacttggttcacacagacccggcagatgtgatgtcatttcaaggggcttctctgggtctcatcctctcatctgaggtgcagtggtgtccctgaattggctcaggtggtttcctacaa

SEQ ID NO: 458004 - DNA, 120 bp, Artificial Sequence
  ENSG00000157064_55 (sequence is synthesized)
ccatttgtaaagttttcaggaattttgtgaaccagttttaaatagagccattactaaaaattaagttatattaacttaaaattaaatttaattaaaaacaaaaggaatgaatactcaaaa

SEQ ID NO: 458005 - DNA, 80 bp, Artificial Sequence
  ENSG00000157077_0 (sequence is synthesized)
acgctggaggcttcgctgaggatccccgcctgccgcacctcggtcgtcccgccgcagccttgcgcccccggcccggctcg

SEQ ID NO: 458006 - DNA, 120 bp, Artificial Sequence
  ENSG00000157077_1 (sequence is synthesized)
gcgccgatgcggctgggcgggtgccgggccttagcagcagtagcagccgcagctgcggctaccgcagctcctacaggagtgggaggtttcgcggcggcgcctggggccgcgccggtgccc

SEQ ID NO: 458007 - DNA, 120 bp, Artificial Sequence
  ENSG00000157077_2 (sequence is synthesized)
tccggaggaggctttcggctcagggacgacccccgtggccatgctgaagcggaggcggccgctgctcgaggatcaaacagagcatactgaatcagcaggactggctggtggtgcagcaga

SEQ ID NO: 458008 - DNA, 120 bp, Artificial Sequence
  ENSG00000157077_3 (sequence is synthesized)
catcatgagtaagcaccgagaagtctgttccttatcacgtgtgtaaggggaaaaaggtttaaacaagtctcttaagtggtgtttcctcaccgatggagaattacttccaagcagaagctt

SEQ ID NO: 458009 - DNA, 120 bp, Artificial Sequence
  ENSG00000157077_4 (sequence is synthesized)
acaacctggacaaggtgttagatgaatttgaacaaaacgaagatgaaacagtttcttctactttattggatacaaagtggaataagattctagatcccccttctcaccggctgtcattta

SEQ ID NO: 458010 - DNA, 120 bp, Artificial Sequence
  ENSG00000157077_5 (sequence is synthesized)
accctactttggccagtgtgaatgaatctgcagtttctaatgagtcacaaccacaactgaaagtcttctccctggctcattcagctcccctgaccacagaggaagaggatcactgtgcta

SEQ ID NO: 458011 - DNA, 120 bp, Artificial Sequence
  ENSG00000157077_6 (sequence is synthesized)
atggacaggactgtaatctaaatccagagattgccacaatgtggattgatgaaaatgctgttgcagaagaccagttaattaagagaaactatagttgggatgatcaatgcagtgctgttg

SEQ ID NO: 458012 - DNA, 120 bp, Artificial Sequence
  ENSG00000157077_7 (sequence is synthesized)
aagtgggagagaagaaatgtggaaacctggcttgtctgccagatgagaagaatgttcttgttgtagccgtcatgcataactgtgataaaaggacattacaaaacgatttacaggattgta

SEQ ID NO: 458013 - DNA, 120 bp, Artificial Sequence
  ENSG00000157077_8 (sequence is synthesized)
ataattataatagtcaatcccttatggatgcttttagctgttcactggataatgaaaacagacaaactgatcaatttagttttagtataaatgagtccactgaaaaagatatgaattcag

SEQ ID NO: 458014 - DNA, 120 bp, Artificial Sequence
  ENSG00000157077_9 (sequence is synthesized)
agaaacaaatggatccattgaatagaccgaaaacagaggggagatctgttaaccatctgtgtcctacttcatctgatagtctagccagtgtctgttccccttcacaattaaaggatgacg

SEQ ID NO: 458015 - DNA, 120 bp, Artificial Sequence
  ENSG00000157077_10 (sequence is synthesized)
gaagtataggtagagacccctccatgtctgcgattacaagtttaacggttgattcagtaatctcatcccagggaacagatggatgtcctgctgttaaaaagcaagagaactatataccag

SEQ ID NO: 458016 - DNA, 120 bp, Artificial Sequence
  ENSG00000157077_11 (sequence is synthesized)
atgaggacctcactggcaaaatcagctctcctaggacagatctagggagtccaaattccttttcccacatgagtgaggggattttgatgaaaaaagagccagcagaggagagcaccactg

SEQ ID NO: 458017 - DNA, 120 bp, Artificial Sequence
  ENSG00000157077_12 (sequence is synthesized)
aagaatccctccggtctggtttacctttgcttctcaaaccagacatgcctaatgggtctggaaggaataatgactgtgaacggtgttcagattgccttgtgcctaatgaagttagggctg

SEQ ID NO: 458018 - DNA, 120 bp, Artificial Sequence
  ENSG00000157077_13 (sequence is synthesized)
atgaaaatgaaggttatgaacatgaagaaactcttggcactacagaattccttaatatgacagagcatttctctgaatctcaggacatgactaattggaagttgactaaactaaatgaga

SEQ ID NO: 458019 - DNA, 120 bp, Artificial Sequence
  ENSG00000157077_14 (sequence is synthesized)
tgaatgatagccaagtaaacgaagaaaaggaaaagtttctacagattagtcagcctgaggacactaatggtgatagtggaggacagtgtgttggattggcagatgcaggtctagatttaa

SEQ ID NO: 458020 - DNA, 120 bp, Artificial Sequence
  ENSG00000157077_15 (sequence is synthesized)
aaggaacttgcattagtgaaagtgaagaatgtgatttctccactgttatagacacaccagcagcaaattatctatctaatggttgtgattcctatggaatgcaagacccaggtgtttctt

SEQ ID NO: 458021 - DNA, 120 bp, Artificial Sequence
  ENSG00000157077_16 (sequence is synthesized)
ttgttccaaagactttaccctccaaagaagattcagtaacagaagaaaaagaaatagaggaaagcaagtcagaatgctactcaaatatttatgaacagagaggaaatgaggccacagaag

SEQ ID NO: 458022 - DNA, 120 bp, Artificial Sequence
  ENSG00000157077_17 (sequence is synthesized)
ggagtggactacttttaaacagcactggtgacctaatgaagaaaaattatttacataatttctgtagtcaagttccatcagtgcttgggcaatcttcccccaaggtagtagcaagcctgc

SEQ ID NO: 458023 - DNA, 120 bp, Artificial Sequence
  ENSG00000157077_18 (sequence is synthesized)
catctatcagtgttccttttggtggtgcaagacccaagcaaccttctaatcttaaacttcaaattccaaagccattatcagaccatttacaaaatgactttcctgcaaacagtggaaata

SEQ ID NO: 458024 - DNA, 120 bp, Artificial Sequence
  ENSG00000157077_19 (sequence is synthesized)
atactaaaaataaaaatgatattcttgggaaagcaaaattaggggaaaactcagcaaccaatgtatgcagtccatctttgggaaacatctctaatgtcgatacaaatggggaacatttag

SEQ ID NO: 458025 - DNA, 120 bp, Artificial Sequence
  ENSG00000157077_20 (sequence is synthesized)
aaagttatgaggctgagatctccactagaccatgccttgcattagctccagatagcccagataatgatctcagagctggtcagtttggaatttctgccagaaagccattcaccactctgg

SEQ ID NO: 458026 - DNA, 120 bp, Artificial Sequence
  ENSG00000157077_21 (sequence is synthesized)
ggctccaaattgcatgaaatgtgaagccaggtttacattcaccaaaaggaggcatcactgcagagcatgtgggaaggttttctgtgcttcctgctgtagcctgaaatgtaaactgttata

SEQ ID NO: 458027 - DNA, 120 bp, Artificial Sequence
  ENSG00000157077_22 (sequence is synthesized)
catggacagaaaggaagctagagtgtgtgtaatctgccattcagtgctaatgaatgctcaagcctgggagaacatgatgagtgcctcaagccagagccctaaccctaacaatcctgctga

SEQ ID NO: 458028 - DNA, 120 bp, Artificial Sequence
  ENSG00000157077_23 (sequence is synthesized)
atactgttctactatccctcccttgcagcaagctcaggcctcaggagctctgagctctccacctcccactgtgatggtacctgtgggagttttaaagcaccctggagcagaagtggctca

SEQ ID NO: 458029 - DNA, 120 bp, Artificial Sequence
  ENSG00000157077_24 (sequence is synthesized)
gcccagagagcagaggcgagtttggtttgctgatgggatcttgcccaatggagaagttgctgatgcagccaaattaacaatgaatggaacttcctctgcaggaaccctggctgtgtcaca

SEQ ID NO: 458030 - DNA, 120 bp, Artificial Sequence
  ENSG00000157077_25 (sequence is synthesized)
cgacccagtcaagccagtaactaccagtcctctaccagcagagacggatatttgtctattctctgggagtataactcaggttggaagtcctgttggaagtgcaatgaatcttattcctga

SEQ ID NO: 458031 - DNA, 120 bp, Artificial Sequence
  ENSG00000157077_26 (sequence is synthesized)
agatggccttcctcccattctcatctccactggtgtaaaaggagactatgctgtggaagagaaaccatcacagatttcagtaatgcagcagttggaggatggtggccctgacccacttgt

SEQ ID NO: 458032 - DNA, 120 bp, Artificial Sequence
  ENSG00000157077_27 (sequence is synthesized)
atttgttttaaatgcaaatttgttgtcaatggttaaaattgtaaattatgtgaacaggaagtgctggtgtttcacaaccaagggaatgcatgcagtgggtcagtctgagatagtcattct

SEQ ID NO: 458033 - DNA, 120 bp, Artificial Sequence
  ENSG00000157077_28 (sequence is synthesized)
tctacagtgtttaccggatgaaaagtgtttgccaaaggatatctttaatcactttgtgcagctttatcgggatgctctggcagggaatgtggtgagcaacttgggacattccttcttcag

SEQ ID NO: 458034 - DNA, 120 bp, Artificial Sequence
  ENSG00000157077_29 (sequence is synthesized)
tcaaagtttccttggcagtaaagaacatggtggattcttatatgtgacatctacctaccagtcactgcaagacctagtactcccaaccccaccttacttgtttgggattcttatccagaa

SEQ ID NO: 458035 - DNA, 120 bp, Artificial Sequence
  ENSG00000157077_30 (sequence is synthesized)
atgggaaactccttgggctaaagtatttcctatccgtctgatgttgagacttggagctgaatatcgactttatccatgcccactattcagtgtcagatttcggaagccattgtttggaga

SEQ ID NO: 458036 - DNA, 120 bp, Artificial Sequence
  ENSG00000157077_31 (sequence is synthesized)
gacggggcataccatcatgaatcttcttgcagacttcagaaattaccagtataccttgccagtagttcaaggtttggtggttgatatggaagttcggaaaactagcatcaaaattcccag

SEQ ID NO: 458037 - DNA, 120 bp, Artificial Sequence
  ENSG00000157077_32 (sequence is synthesized)
caacagatacaatgagatgatgaaagccatgaacaagtccaatgagcatgtcctggcaggaggtgcctgcttcaatgaaaaggcagactctcatcttgtgtgtgtacagaatgatgatgg

SEQ ID NO: 458038 - DNA, 120 bp, Artificial Sequence
  ENSG00000157077_33 (sequence is synthesized)
aaactatcagacccaggctatcagtattcacaatcagcccagaaaagtgactggtgccagtttctttgtgttcagtggcgctctgaaatcctcttctggataccttgccaagtccagtat

SEQ ID NO: 458039 - DNA, 120 bp, Artificial Sequence
  ENSG00000157077_34 (sequence is synthesized)
tgtggaagatggtgttatggtccagattactgcagagaacatggattccttgaggcaggcactgcgagagatgaaggacttcaccatcacctgtgggaaggcggacgcggaggaacccca

SEQ ID NO: 458040 - DNA, 120 bp, Artificial Sequence
  ENSG00000157077_35 (sequence is synthesized)
ggagcacatccacatccagtgggtggatgatgacaagaacgttagcaagggtgtcgtaagtcctatagatgggaagtccatggagactataacaaatgtgaagatattccatggatcaga

SEQ ID NO: 458041 - DNA, 120 bp, Artificial Sequence
  ENSG00000157077_36 (sequence is synthesized)
atataaagcaaatggaaaagtaatcagatggacagaggtgtttttcctagaaaacgatgaccagcacaattgcctcagtgatcctgcagatcacagtagattgactgagcatgttgccaa

SEQ ID NO: 458042 - DNA, 120 bp, Artificial Sequence
  ENSG00000157077_37 (sequence is synthesized)
agctttttgccttgctctctgtcctcacctgaaacttctgaaggaagatggaatgaccaaactgggactacgtgtgacacttgactcagatcaggttggctatcaagcagggagcaatgg

SEQ ID NO: 458043 - DNA, 120 bp, Artificial Sequence
  ENSG00000157077_38 (sequence is synthesized)
ccagccccttccctcgcagtacatgaatgatctggacagcgccttggtgccggtgatccatggaggggcctgccagcttagtgagggccccgttgtcatggaactcatcttttatattct

SEQ ID NO: 458044 - DNA, 120 bp, Artificial Sequence
  ENSG00000157077_39 (sequence is synthesized)
ggaaaacatcgtataaacagagaagacttcatttttttctgttcagacttgttgcaacagcagtcatacccaaatcatttgcactttaaaactggaagattaagcttttgttaacactat

SEQ ID NO: 458045 - DNA, 120 bp, Artificial Sequence
  ENSG00000157077_40 (sequence is synthesized)
taatggggtggggaatagggtgggagtgggggtttgggagacgggtgggaaagggtggttggggggaccgatgttccataattctaagtcttctatgcattgtccaccaagaagatctgg

SEQ ID NO: 458046 - DNA, 120 bp, Artificial Sequence
  ENSG00000157077_41 (sequence is synthesized)
gcagcttctgttcctgcacaacagttatgctatccttgcagctaatccccttctgttactgtttagacaagaattccgctcctctctcaagatttacttatggtcatgtgctcagaaatg

SEQ ID NO: 458047 - DNA, 120 bp, Artificial Sequence
  ENSG00000157077_42 (sequence is synthesized)
ctcaaatgggtacaaccatcaccaagggtgggatgggagggcagaggggaaataaaatataaagcatcagttcttgcactctttgtacagaattggtataaaaaggataattccacactg

SEQ ID NO: 458048 - DNA, 120 bp, Artificial Sequence
  ENSG00000157077_43 (sequence is synthesized)
gatgtctgactcctactgttttttcagtagcatctcttcagcaaattaaaactgccatgagagtgcttagttctctgaagaaaggagtaagtggtagggataccatgtgacaatgacatt

SEQ ID NO: 458049 - DNA, 120 bp, Artificial Sequence
  ENSG00000157077_44 (sequence is synthesized)
aaaactaggagatggcctttcagagctctgggataaggtacctgagggcatgtagtctgagttcaaatatatcattgggtggaaatattaatatctaaatgtgtagatgaaagtcctgtc

SEQ ID NO: 458050 - DNA, 120 bp, Artificial Sequence
  ENSG00000157077_45 (sequence is synthesized)
cacaagaatgctgtggtcatcatttggagtacaaaatggcatgtgcttgctgctagtgtgctataattagacatgacacatatgttgacaaaagttaattaaactaaaagctaattggca

SEQ ID NO: 458051 - DNA, 120 bp, Artificial Sequence
  ENSG00000157077_46 (sequence is synthesized)
gatgagaagacttttttccccctgcctttctttacaagttgctcaccttctcaaatgtcataactttaactgaaaatatttagctaaatttccatgttttgaaagtatcttagcatttca

SEQ ID NO: 458052 - DNA, 120 bp, Artificial Sequence
  ENSG00000157087_0 (sequence is synthesized)
agctgccgcaccgcgattacggggctgcccgccgggaaaccgtgcaggattggtggtgattttcatagccaagagccaccacccctgaccatgtagatgccagttccagggagcagcatg

SEQ ID NO: 458053 - DNA, 120 bp, Artificial Sequence
  ENSG00000157087_1 (sequence is synthesized)
ggccccactgaatggagactcctgggtctacagccctgagcccctccggcccctggacctcgtcccacaccggaggacacctcttggagctcaccaccactgtcaccagcccgcctcggc

SEQ ID NO: 458054 - DNA, 120 bp, Artificial Sequence
  ENSG00000157087_2 (sequence is synthesized)
cacccccaccccccgggacccggagtcggccgcctggtgccacagctgaccagtgagggtgtgctgaggacagccacaagcagccatcacccggcagcctcttgtccagcgctgaccctt

SEQ ID NO: 458055 - DNA, 120 bp, Artificial Sequence
  ENSG00000157087_3 (sequence is synthesized)
gggcccagcccgagcaaggaccgcagcaaacatgggtgacatgaccaacagcgacttttactccaaaaaccaaagaaatgagtcgagccatgggggcgagttcgggtgcacaatggagga

SEQ ID NO: 458056 - DNA, 120 bp, Artificial Sequence
  ENSG00000157087_4 (sequence is synthesized)
gctccgctccctcatggagctgcggggcactgaggctgtggtcaagatcaaggagacttatggggacaccgaagccatctgccggcgcctcaaaacctcacctgttgaaggtttgccggg

SEQ ID NO: 458057 - DNA, 120 bp, Artificial Sequence
  ENSG00000157087_5 (sequence is synthesized)
caccgctccagacctggaaaagagaaagcaaatttttgggcaaaactttatacctccaaagaagccaaaaaccttcctgcagctcgtgtgggaggcgctgcaggacgtgacgctcatcat

SEQ ID NO: 458058 - DNA, 120 bp, Artificial Sequence
  ENSG00000157087_6 (sequence is synthesized)
cctggagattgccgccatcatctccctggggctgtccttctaccacccgcccggcgagggcaacgaaggatgtgcgacggcccagggtggggcagaggatgaaggagaggcagaggcagg

SEQ ID NO: 458059 - DNA, 120 bp, Artificial Sequence
  ENSG00000157087_7 (sequence is synthesized)
ttggatcgagggggccgccattctcctctcagttatctgtgtggtcctggtcacggccttcaatgactggagcaaagagaaacagttccggggcctgcagagccgcatcgagcaggaaca

SEQ ID NO: 458060 - DNA, 120 bp, Artificial Sequence
  ENSG00000157087_8 (sequence is synthesized)
gaaatttaccgtggtccgggctggccaggtggtccagatccctgtggctgagatcgtggttggggacatagcccaggtcaaatatggtgacctcctccctgccgacggcctcttcatcca

SEQ ID NO: 458061 - DNA, 120 bp, Artificial Sequence
  ENSG00000157087_9 (sequence is synthesized)
gggcaatgacctcaagattgatgaaagctccctaactggagagtctgaccaggtgcgcaagtccgtggacaaggaccccatgctgctgtcaggaacccacgtgatggagggctcaggacg

SEQ ID NO: 458062 - DNA, 120 bp, Artificial Sequence
  ENSG00000157087_10 (sequence is synthesized)
gatgttggtgactgctgtgggtgtgaactctcagactggcatcatctttaccctcctgggggctggtggtgaagaggaagagaagaaagacaaaaaagccaaacaacaggacggggcagc

SEQ ID NO: 458063 - DNA, 120 bp, Artificial Sequence
  ENSG00000157087_11 (sequence is synthesized)
cgccatggagatgcagcccctcaagagtgccgagggcggcgacgctgacgacaggaagaaggccagcatgcacaagaaggagaagtccgtgctgcagggcaagctcaccaagctggctgt

SEQ ID NO: 458064 - DNA, 120 bp, Artificial Sequence
  ENSG00000157087_12 (sequence is synthesized)
gcagatcgggaaggcgggcttggtgatgtcagccatcacggtgatcatcctggtgctctacttcactgtggacaccttcgtggtcaacaagaagccgtggctgcctgagtgcacgcccgt

SEQ ID NO: 458065 - DNA, 120 bp, Artificial Sequence
  ENSG00000157087_13 (sequence is synthesized)
ctacgtgcagtactttgtcaagttcttcatcattggcgtgacggtgctggtggtcgccgtgcccgaggggctccctctggccgtcaccatctcgttggcctattcggtgaagaaaatgat

SEQ ID NO: 458066 - DNA, 120 bp, Artificial Sequence
  ENSG00000157087_14 (sequence is synthesized)
gaaggacaacaacctggtacgccacctggatgcctgtgagaccatgggcaatgccacagccatctgctcagacaagacaggcacgctgaccaccaatcgcatgacagtggtacaggccta

SEQ ID NO: 458067 - DNA, 120 bp, Artificial Sequence
  ENSG00000157087_15 (sequence is synthesized)
tgtcggcgacgtccactataaagagatccccgaccccagctccatcaacaccaagaccatggagctgctgatcaatgccatcgccatcaacagcgcctacaccaccaagattctgccccc

SEQ ID NO: 458068 - DNA, 120 bp, Artificial Sequence
  ENSG00000157087_16 (sequence is synthesized)
agagaaggagggcgccctgcctcggcaggtgggcaacaagacggagtgcggcctgctgggcttcgtgctggacctgaagcaggactacgagcccgtgcgcagccagatgccagaggagaa

SEQ ID NO: 458069 - DNA, 120 bp, Artificial Sequence
  ENSG00000157087_17 (sequence is synthesized)
gttgtacaaagtgtacaccttcaactccgtgcgcaagtccatgagcactgtcatcaagctgcccgacgagagcttccgcatgtacagcaagggggcttctgagatcgtgctcaagaagtg

SEQ ID NO: 458070 - DNA, 120 bp, Artificial Sequence
  ENSG00000157087_18 (sequence is synthesized)
ctgcaaaatcctcaatggggcgggagagcctcgtgtcttccggccccgcgaccgggacgagatggtaaagaaggtgattgagcccatggcttgcgatgggctccgcactatctgcgtggc

SEQ ID NO: 458071 - DNA, 120 bp, Artificial Sequence
  ENSG00000157087_19 (sequence is synthesized)
ctaccgcgacttccccagcagcccggagccggactgggacaatgagaatgacatcctcaacgaactcacctgcatctgcgtggtgggcatcgaggacccggtgcggccagaggtcccaga

SEQ ID NO: 458072 - DNA, 120 bp, Artificial Sequence
  ENSG00000157087_20 (sequence is synthesized)
agccatccgcaagtgccagcgggcaggcatcacggtccgcatggtcactggcgacaatatcaacacggctcgggccatcgccatcaagtgtggcatcatccatcctggggaggactttct

SEQ ID NO: 458073 - DNA, 120 bp, Artificial Sequence
  ENSG00000157087_21 (sequence is synthesized)
gtgcctcgagggcaaggagttcaacaggaggatccgcaacgagaagggggagattgagcaggagcgaattgacaagatctggccaaagctgcgggtgctggctcgctcctccccaacgga

SEQ ID NO: 458074 - DNA, 120 bp, Artificial Sequence
  ENSG00000157087_22 (sequence is synthesized)
caagcataccctggttaaaggcatcatcgacagcacacacactgagcagcggcaggtggtggccgtgacgggggacgggaccaacgacgggcctgcactcaagaaggccgacgtgggctt

SEQ ID NO: 458075 - DNA, 120 bp, Artificial Sequence
  ENSG00000157087_23 (sequence is synthesized)
cgccatgggcatcgcaggcactgacgtggccaaggaggcctcagacatcatcctgacagacgacaatttcagcagcatcgtcaaggcagtgatgtggggccgcaacgtctatgacagcat

SEQ ID NO: 458076 - DNA, 120 bp, Artificial Sequence
  ENSG00000157087_24 (sequence is synthesized)
ctccaaattcttgcagttccagctcaccgtcaacgtggtggccgtgattgtggccttcacaggcgcctgcatcacgcaggactcccctctgaaggccgtgcagatgctctgggtgaacct

SEQ ID NO: 458077 - DNA, 120 bp, Artificial Sequence
  ENSG00000157087_25 (sequence is synthesized)
catcatggacacgtttgcctcgctggcactggccactgagccgcccacggagaccctgctgctgaggaagccgtacggccgcaacaagccgctcatctccaggaccatgatgaagaacat

SEQ ID NO: 458078 - DNA, 120 bp, Artificial Sequence
  ENSG00000157087_26 (sequence is synthesized)
cctgggccatgctgtctaccagcttgccctcatcttcaccctgctctttgttggcgagaagatgttccagatcgacagcgggaggaacgcgcccctgcattcgccaccctcagaacatta

SEQ ID NO: 458079 - DNA, 120 bp, Artificial Sequence
  ENSG00000157087_27 (sequence is synthesized)
caccatcatcttcaacaccttcgtcatgatgcagctcttcaacgagatcaacgcccgcaagatccacggcgagcgcaatgtctttgacggcatcttccggaaccccatcttctgcaccat

SEQ ID NO: 458080 - DNA, 120 bp, Artificial Sequence
  ENSG00000157087_28 (sequence is synthesized)
cgtgctgggcacctttgccatccagatagtgatcgtgcagtttggagggaagccattcagctgctctccactgcagctggaccagtggatgtggtgcatattcattgggttaggagagct

SEQ ID NO: 458081 - DNA, 120 bp, Artificial Sequence
  ENSG00000157087_29 (sequence is synthesized)
cgtttggggccaggtcatcgccaccatcccgaccagcagactcaagttcctcaaggaggcaggcaggctcacacagaaggaggagatcccggaggaggagctcaacgaggacgtggagga

SEQ ID NO: 458082 - DNA, 120 bp, Artificial Sequence
  ENSG00000157087_30 (sequence is synthesized)
gatcgaccacgcggagcgggagctgcggcggggccagatcctgtggttccgaggcctgaatcggatccagacacagatccgcgtcgtgaaggcgttccgtagctctctctatgaaggttt

SEQ ID NO: 458083 - DNA, 120 bp, Artificial Sequence
  ENSG00000157087_31 (sequence is synthesized)
agaaaagcctgaatctcgaacctccatccataacttcatggctcatcctgaattccggatcgaagattcccagccccacatccccctcattgatgacaccgacctggaagaagatgccgc

SEQ ID NO: 458084 - DNA, 120 bp, Artificial Sequence
  ENSG00000157087_32 (sequence is synthesized)
gctcaagcagaactcgagcccgccgtcatccctcaacaagaacaacagcgccatcgacagtgggatcaacctgacgaccgacacaagcaaatcagctacctcttcaagtccagggagccc

SEQ ID NO: 458085 - DNA, 120 bp, Artificial Sequence
  ENSG00000157087_33 (sequence is synthesized)
catccacagcctggagacgtcgctttagctgaggaccctctcgcctgcccgcccgccctcatggaccccgctgccacccgctttccgggcacccatccatccaggcacccaactcaccca

SEQ ID NO: 458086 - DNA, 120 bp, Artificial Sequence
  ENSG00000157087_34 (sequence is synthesized)
agcagcaacgagcaacaatcggaaaccaaatactggagagaaaaccaacgtttccacccacagaccctttctctggctgcgatgctgtttgaactctttttcacttcaaggcaaggggcg

SEQ ID NO: 458087 - DNA, 120 bp, Artificial Sequence
  ENSG00000157087_35 (sequence is synthesized)
ggatctccactgggggcttacgggagtgagcggttttcccaaaacaagcccttcctggctcccacccagacatggaccagccatgcacccgcccagccaccacgtcccccgcatgaatgt

SEQ ID NO: 458088 - DNA, 120 bp, Artificial Sequence
  ENSG00000157087_36 (sequence is synthesized)
ccccttgtttggtttttgggggttggggaggggtttttgtttgtttgtttgttttcttaggcgggaactgcaaacagactcttttctgagactatttatccaatccactggtctgtgagt

SEQ ID NO: 458089 - DNA, 120 bp, Artificial Sequence
  ENSG00000157087_37 (sequence is synthesized)
ttttgaaatgcttgcacagcatggtctcagttgtatagattaatttaataactttttgaaattgcagagcttaactcgcctagtagatttgcaccaatggaaccgaagaacttcatagac

SEQ ID NO: 458090 - DNA, 120 bp, Artificial Sequence
  ENSG00000157087_38 (sequence is synthesized)
agacactcacaaggttatatccatttctttgtatctatatcaacgtatacttttccgagactgtatacgtccatatagataggtagatatatatatatatatataaatatatatacatgg

SEQ ID NO: 458091 - DNA, 120 bp, Artificial Sequence
  ENSG00000157087_39 (sequence is synthesized)
ataaagtttctttgccggcatgttgccttgtttccgcttaaattgctctattttaacttatttatgtcctaaaagaagaatgtaatttgtttacaaacctgtagataacgtctttggcta

SEQ ID NO: 458092 - DNA, 120 bp, Artificial Sequence
  ENSG00000157087_40 (sequence is synthesized)
tttgtatggtttaagaacactggtggctgagatgctataaaaacagctcggcccaacagacacttcccctgggttgcatcctggatgttttatgatagccatgctctgatttttgcctgc

SEQ ID NO: 458093 - DNA, 120 bp, Artificial Sequence
  ENSG00000157087_41 (sequence is synthesized)
tatttccgttcaataatgtcactaccgtgagaggctcaggcagaagccaaatgctaccgagttgccatcctgaggggtttaacaacatgctccgtagacgaagggagaggaggagagaag

SEQ ID NO: 458094 - DNA, 120 bp, Artificial Sequence
  ENSG00000157087_42 (sequence is synthesized)
gcttcctgggtttgcaacactaacggccatccggcccaaggatgccaggatctgcaaagcactgctcgaagacttttctctcaatgaaactcgcttgagtttactaagagcatttcaaaa

SEQ ID NO: 458095 - DNA, 120 bp, Artificial Sequence
  ENSG00000157087_43 (sequence is synthesized)
ataggttctctttggcactgtctgtacagagattgaggtagtgttgaaatattataaatggtattgtgttgatttttttttttatttagtaacttacaggtttgtttccttattaatggc

SEQ ID NO: 458096 - DNA, 120 bp, Artificial Sequence
  ENSG00000157087_44 (sequence is synthesized)
agcatctgagctgttggcatattggatgaggatcagtatggcttgctgcttttatttttatttttgaagaagaatagcctttttctctgcactatttagatccgaatgaaccttatgatg

SEQ ID NO: 458097 - DNA, 120 bp, Artificial Sequence
  ENSG00000157087_45 (sequence is synthesized)
tgtatattgagatgtactcagtgtgattttaaaccaaattgtcttcctgtagtcacaatatatactgtagccttttaacagcaagtcttgctttcccaaacagaaagccattctgaaacc

SEQ ID NO: 458098 - DNA, 120 bp, Artificial Sequence
  ENSG00000157087_46 (sequence is synthesized)
ctacagtatcacaggtgagaaaaggtggttattttttccccaagacaacagcactagtaatcccacttaataagagcttatttaattggatgtcagcctcttaactgctaagcactttgt

SEQ ID NO: 458099 - DNA, 120 bp, Artificial Sequence
  ENSG00000157087_47 (sequence is synthesized)
gggtctcagcgtttttcataaaagaacttttgtatttaatacaaagtttgctttgagacttttcagcatatgatcttttttccataaacttgtacagtgcaaaagacattttgaatacca

SEQ ID NO: 458100 - DNA, 120 bp, Artificial Sequence
  ENSG00000157087_48 (sequence is synthesized)
tgatcgatgatgtcccatgcttcgaggaaaaccaaacactttccgcctctcttgcaaaatccattcctcatgctgaccctcctcacgatggctgtgtcagcccagccccttcccttctcc

SEQ ID NO: 458101 - DNA, 120 bp, Artificial Sequence
  ENSG00000157087_49 (sequence is synthesized)
aggcccagagaactcttccacaaacaagatgagagccactcgggaaaagagccatagtcaactgggagggcctacatctggatggcggtggaaaaacttgagggtttggggttcaaagtc

SEQ ID NO: 458102 - DNA, 120 bp, Artificial Sequence
  ENSG00000157087_50 (sequence is synthesized)
agcccatcccacctggcaaaatcctcctggaaggaggaccttcaagagcgcatcacctgaatgtcgtgaagaagtatctctgaatgtatccaggagaggaactgcataaccaaaggggtg

SEQ ID NO: 458103 - DNA, 120 bp, Artificial Sequence
  ENSG00000157087_51 (sequence is synthesized)
accagccctcagatgtgcttattggattccagtacaaacgccaccaaagccagcccactgctctcctacaaggaaggaaagatctgcacgtgtaaaacatggggcagccttggaacatgg

SEQ ID NO: 458104 - DNA, 120 bp, Artificial Sequence
  ENSG00000157087_52 (sequence is synthesized)
tgttttttggagtttcctttctcacagttttccatctccccacttctttgatcagtcatgtgtccgtgacctcgttccatgacatcaggatagctgtgtttgcacaccatgctccatgtt

SEQ ID NO: 458105 - DNA, 120 bp, Artificial Sequence
  ENSG00000157087_53 (sequence is synthesized)
cattcggagccaggaggggttctcagtggagcctggcttagggaacagggagcgatggaagaatgccaacattagcgttggtcttctcttgtcaggaatgaaggatgcttgcacacatgc

SEQ ID NO: 458106 - DNA, 120 bp, Artificial Sequence
  ENSG00000157087_54 (sequence is synthesized)
accccctcactctcacacttgcacacatacacacacacacacacgaaatggttggtttgtcaaaactcactgtagtacataaagcttgcactctgcgtcctatatctagcagcatggggt

SEQ ID NO: 458107 - DNA, 120 bp, Artificial Sequence
  ENSG00000157087_55 (sequence is synthesized)
acgtttggcagttcactccattagggggtaaataatttatgaccattcatctgtttttatgaatttttttatctagacaataatgtaaataaagaactcaccatctctgttcatttaata

SEQ ID NO: 458108 - DNA, 120 bp, Artificial Sequence
  ENSG00000157087_56 (sequence is synthesized)
ctatgcaatggttatgctttcaatcgctggctcttctgactcgtgcagtgtggttctgaaatgtttgtggtttaaaaaaaaaagcaaaaaacaacatcaaacagaacatagtaaatatat

SEQ ID NO: 458109 - DNA, 120 bp, Artificial Sequence
  ENSG00000157087_57 (sequence is synthesized)
ctgtaatgtatacttttttctactttgggactgcatcatccacatagcttcttttctgtcctctagacaagggctccaggagtaagtggcagatttggttctgagagctaagctcaccaa

SEQ ID NO: 458110 - DNA, 120 bp, Artificial Sequence
  ENSG00000157087_58 (sequence is synthesized)
cttgtctccccctcaacagatgagggaagggcagggagcccgttcagtgactcctggcgctgcagaatcactcatctttggaggtgagcagagagagctctgaggagtttccttcttgca

SEQ ID NO: 458111 - DNA, 120 bp, Artificial Sequence
  ENSG00000157087_59 (sequence is synthesized)
actcaggcggagctttctttaactcaggagcagcctccattgctcccgccaacccctcaccatggccccttgtccccttgtcccaaccatagcatagagatgacaagagagaggcagtcc

SEQ ID NO: 458112 - DNA, 120 bp, Artificial Sequence
  ENSG00000157087_60 (sequence is synthesized)
tatttctgagactggaccaattaaaatgactgcactggctcaaaggactctgaacctgtcttgtcctgggtcctccagttgttggaagccactcttttccccaaccatgctgaaatgcca

SEQ ID NO: 458113 - DNA, 120 bp, Artificial Sequence
  ENSG00000157087_61 (sequence is synthesized)
cctttaccacacactgatgtcttacatagacttagatctatttctggaacttctcttctcttcgcttacttgggtgtctcatctggcaccagccatacaattttaactattgtcaatttc

SEQ ID NO: 458114 - DNA, 120 bp, Artificial Sequence
  ENSG00000157087_62 (sequence is synthesized)
taatgtcttattatgtggtgggatgagtcccttcactcttcttttacaaaatttcctagttattctctcacatctattcttccacataaactttaaattgtgcccagtcctccaccccct

SEQ ID NO: 458115 - DNA, 120 bp, Artificial Sequence
  ENSG00000157087_63 (sequence is synthesized)
gtcccattcccacccccaaattctgggctctgtcattccctgtgccatcatcttccccccattgtaattactgtccactcagggctgtgaaatagactatgttctgtaaagagggacaaa

SEQ ID NO: 458116 - DNA, 120 bp, Artificial Sequence
  ENSG00000157087_64 (sequence is synthesized)
aagggcatcctgatcttgagagaagcctgctgttcctcccatcatttcacctgccccctaagcccaggagttgtcatgagaggtcaccaggcccccactcaatctcagcttgggaaccaa

SEQ ID NO: 458117 - DNA, 120 bp, Artificial Sequence
  ENSG00000157087_65 (sequence is synthesized)
agtcacccaccttggttgtgttggggtggacccgccatctgtccctggtccagacgagaaagaggagtctctcctaggcctggagctgggaaagaatgtgtggcccagttgtctgcactt

SEQ ID NO: 458118 - DNA, 120 bp, Artificial Sequence
  ENSG00000157087_66 (sequence is synthesized)
ctaattctcatcatggagaaacctttattcctatctccctttcctgaactggttttttgttgtttttgtttcattttgttttggggggatagtttcttgctctttaatttggagtctcca

SEQ ID NO: 458119 - DNA, 120 bp, Artificial Sequence
  ENSG00000157087_67 (sequence is synthesized)
gtacctttgggatgcaggcagttcttgcctgggccttctcggaaccctcactcccctagcccactcttgcgctacctgcaggaggctgccaacctggtgcattctgacaagcctcccacc

SEQ ID NO: 458120 - DNA, 120 bp, Artificial Sequence
  ENSG00000157087_68 (sequence is synthesized)
caaatctctctcctgccattgtgtccaaaatcccaccattagaggctcttgtagggaagagcgtttcttgaaggcttttaggccttccagagccaggagggaagtcagacaatagcagga

SEQ ID NO: 458121 - DNA, 120 bp, Artificial Sequence
  ENSG00000157087_69 (sequence is synthesized)
agtccccaggccttttcaaagttccaaaccaagctctcctgattttaatgtagagatcataccaacccaggtgggggaggagggtccccagccccaggcagcagccatcaccccctccac

SEQ ID NO: 458122 - DNA, 120 bp, Artificial Sequence
  ENSG00000157087_70 (sequence is synthesized)
tgaaaacaatattggaggctgctttgggactgcccttctcagccccctaagtctgttttgtaatgcctgtggtgctctccctcctggacctttcctctcgggggtcaccacactttgcta

SEQ ID NO: 458123 - DNA, 120 bp, Artificial Sequence
  ENSG00000157087_71 (sequence is synthesized)
actcttgtgtgcacatattttataatagagtagcgagggaatggtgccgcctccagcttccgtaagctgcccgggctctggggggctctgggacaatcggggctgggaagtgactgtgct

SEQ ID NO: 458124 - DNA, 120 bp, Artificial Sequence
  ENSG00000157087_72 (sequence is synthesized)
cttattgtacactctttatttctctgtatctttggcttgtgctctttgtaattaatgggatttgtctgccttttcaacactatactgagcaataacaataaatgcacacgtggaaatgca

SEQ ID NO: 458125 - DNA, 120 bp, Artificial Sequence
  ENSG00000157087_73 (sequence is synthesized)
gcagcggggccgggccgggccgggcgcgcaccagcggcagcggcggcggcagcggcggcggcagcatctcgctctcggagccggcgcaggtttccctgtacttagagcgtggactgtgaa

SEQ ID NO: 458126 - DNA, 120 bp, Artificial Sequence
  ENSG00000157087_74 (sequence is synthesized)
tgaacccccaagcagacgagctgaacttcgtcacccagtccctagagccagcaagacatgggccccagtttccagaccctgacacctctcatttaaccagaagacgtggaggggagccac

SEQ ID NO: 458127 - DNA, 120 bp, Artificial Sequence
  ENSG00000157087_75 (sequence is synthesized)
gaagaaagacaaaaaaggtgtgaagaagggggatggccttcagctaccagcagcagacggtgcggcagcttcaaatgctgcagatagtgcgaatgccagcctagtcaatggtaaaatgca

SEQ ID NO: 458128 - DNA, 120 bp, Artificial Sequence
  ENSG00000157087_76 (sequence is synthesized)
ctttcagggggccctgcggagacagtcctcggtcaccagccagagccaggatgtagccaatctctctagccctagtcgcgtgtcgttgtccaatgctctttcctctccgaccagccttcc

SEQ ID NO: 458129 - DNA, 120 bp, Artificial Sequence
  ENSG00000157087_77 (sequence is synthesized)
accgagggccagccacgggccaggctcatgcaggacgagttagaccctccaccgtgcccagttctcaccatgcccagagcggcccccactttacagctaggaaaaccaaagctcggtcat

SEQ ID NO: 458130 - DNA, 120 bp, Artificial Sequence
  ENSG00000157087_78 (sequence is synthesized)
agccaggtccaagccacattctggacgccgtaccttgctagacagataaggcacctcctgctcccacttcccctgcagattcctggttctgacgactcctagggcaaggagtttgcactg

SEQ ID NO: 458131 - DNA, 120 bp, Artificial Sequence
  ENSG00000157087_79 (sequence is synthesized)
gctcttaaggccacattttttttttgtttatttgttcactcaacaaaatagttattgagtgccttctacgtccgcaccctgtgctgacagccacctcctgcatccttaaggcctgcatgg

SEQ ID NO: 458132 - DNA, 120 bp, Artificial Sequence
  ENSG00000157087_80 (sequence is synthesized)
gccaggtaggctctgtctgttccatctccaggtcttgtcccagtctctgtcttgtccaatcatgtcatggaggcccctccttcccctccgggccaggccaaggatgctgaccatgttgtt

SEQ ID NO: 458133 - DNA, 120 bp, Artificial Sequence
  ENSG00000157087_81 (sequence is synthesized)
gagtctccagcctcaagtggtggaaacagccagcatcaattggtcccatcatcactccagtattgagtagaaatccccacccattggaagcatattccttccaatattgtcaactccact

SEQ ID NO: 458134 - DNA, 120 bp, Artificial Sequence
  ENSG00000157093_0 (sequence is synthesized)
agaagagcatgtcatggagaactcttgggtgcagacaagtggatgattaatgaagtagcatctgaaaaacccaaggaaccaaatgtaggtggagcaacttccctgcaacacacgtcgaag

SEQ ID NO: 458135 - DNA, 120 bp, Artificial Sequence
  ENSG00000157093_1 (sequence is synthesized)
ctgctgcagtggctgttcttcccctccccttggaaaggcaccaaaagccagcctttggaagggctggtggactgtgcccttctttcccttcagagaaccagtgtccctgtgactccaccc

SEQ ID NO: 458136 - DNA, 120 bp, Artificial Sequence
  ENSG00000157093_2 (sequence is synthesized)
actcatctggccaccgttgccctgacctgccaggagcctggagaagatgaaggcatccgtggttctctccctccttggctacctggtggttccaagtggtgcttacatcttggggcgttg

SEQ ID NO: 458137 - DNA, 120 bp, Artificial Sequence
  ENSG00000157093_3 (sequence is synthesized)
gtgcctggcctacttcgagagcaagttcaaccccatggccatctacgagaacacacgtgagggctacactggctttggcctctttcagatgcgtggcagtgactggtgtggcgaccatgg

SEQ ID NO: 458138 - DNA, 120 bp, Artificial Sequence
  ENSG00000157093_4 (sequence is synthesized)
caggaaccgctgccatatgtcatgttccgctttactgaatcctaatttagagaagacaattaaatgtgccaagaccattgtaaaaggaaaagaagggatgggagcatggcccacctggtc

SEQ ID NO: 458139 - DNA, 120 bp, Artificial Sequence
  ENSG00000157093_5 (sequence is synthesized)
ccggtactgccagtactccgataccctggcacggtggctggatggttgcaagctgtagccacctgcatggcccctgcagcactcaccagttgcatcttgtgaatgaaggtgcttttctgc

SEQ ID NO: 458140 - DNA, 120 bp, Artificial Sequence
  ENSG00000157093_6 (sequence is synthesized)
ttgctgcttcagtcaatccttttgatgatctcaccactttaagagttccagatggaaaaagacaaaagtttgcttcatccggggatgcaggatgcagaataaaccaaactagttactcaa

SEQ ID NO: 458141 - DNA, 120 bp, Artificial Sequence
  ENSG00000157093_7 (sequence is synthesized)
agaaaataggaggtcaagaggaggagaaggggcagagtttcaggtgtcccagatttgcagtgacacgaagcagagaattaggatgggaagaagtgtcatggcttaccagtggctaagaaa

SEQ ID NO: 458142 - DNA, 120 bp, Artificial Sequence
  ENSG00000157103_0 (sequence is synthesized)
gccctcggaagaccgagacagcggagaggttgcgggtgagctgcgctgagcccaggagccgaggagtcgggagcgcagtagcgctgagcccgagcccgagcggccccgcgtcccgagcgc

SEQ ID NO: 458143 - DNA, 120 bp, Artificial Sequence
  ENSG00000157103_1 (sequence is synthesized)
atcggagcggccgagccgcccggatgcagcgcctgtcccgggcagcgcagccccggccgcaggatctcacccagggtggcagaaggaggccttctggagctgacccacccccgacgacca

SEQ ID NO: 458144 - DNA, 120 bp, Artificial Sequence
  ENSG00000157103_2 (sequence is synthesized)
tcagggtgaggcaactccaaggtcctactctctttctgtgcctgttacccaccccgtcctcctagggtgcccttgagccgcaaaactgctgtccacgtggaccgggggtgacatcgcacg

SEQ ID NO: 458145 - DNA, 120 bp, Artificial Sequence
  ENSG00000157103_3 (sequence is synthesized)
tccatctgccaggacccctgcgtccaaattccgagacatggcgaccaacggcagcaaggtggccgacgggcagatctccaccgaggtcagcgaggcccctgtggccaatgacaagcccaa

SEQ ID NO: 458146 - DNA, 120 bp, Artificial Sequence
  ENSG00000157103_4 (sequence is synthesized)
aaccttggtggtcaaggtgcagaagaaggcggcagacctccccgaccgggacacgtggaagggccgcttcgacttcctcatgtcctgtgtgggctatgccatcggcctgggcaacgtctg

SEQ ID NO: 458147 - DNA, 120 bp, Artificial Sequence
  ENSG00000157103_5 (sequence is synthesized)
gaggttcccctatctctgcgggaaaaatggtgggggagccttcctgatcccctatttcctgacactcatctttgcgggggtcccactcttcctgctggagtgctccctgggccagtacac

SEQ ID NO: 458148 - DNA, 120 bp, Artificial Sequence
  ENSG00000157103_6 (sequence is synthesized)
ctccatcggggggctaggggtatggaagctggctcctatgttcaagggcgtgggccttgcggctgctgtgctatcattctggctgaacatctactacatcgtcatcatctcctgggccat

SEQ ID NO: 458149 - DNA, 120 bp, Artificial Sequence
  ENSG00000157103_7 (sequence is synthesized)
ttactacctgtacaactccttcaccacgacactgccgtggaaacagtgcgacaacccctggaacacagaccgctgcttctccaactacagcatggtcaacactaccaacatgaccagcgc

SEQ ID NO: 458150 - DNA, 120 bp, Artificial Sequence
  ENSG00000157103_8 (sequence is synthesized)
tgtggtggagttctgggagcgcaacatgcatcagatgacggacgggctggataagccaggtcagatccgctggccactggccatcacgctggccatcgcctggatccttgtgtatttctg

SEQ ID NO: 458151 - DNA, 120 bp, Artificial Sequence
  ENSG00000157103_9 (sequence is synthesized)
tatctggaagggtgttggctggactggaaaggtggtctacttttcagccacatacccctacatcatgctgatcatcctgttcttccgtggagtgacgctgcccggggccaaggagggcat

SEQ ID NO: 458152 - DNA, 120 bp, Artificial Sequence
  ENSG00000157103_10 (sequence is synthesized)
cctcttctacatcacacccaacttccgcaagctgtctgactccgaggtgtggctggatgcggcaacccagatcttcttctcatacgggctgggcctggggtccctgatcgctctcgggag

SEQ ID NO: 458153 - DNA, 120 bp, Artificial Sequence
  ENSG00000157103_11 (sequence is synthesized)
ctacaactctttccacaacaatgtctacagggactccatcatcgtctgctgcatcaattcgtgcaccagcatgttcgcaggattcgtcatcttctccatcgtgggcttcatggcccatgt

SEQ ID NO: 458154 - DNA, 120 bp, Artificial Sequence
  ENSG00000157103_12 (sequence is synthesized)
caccaagaggtccattgctgatgtggcggcctcaggccccgggctggcgttcctggcatacccagaggcggtgacccagctgcctatctccccactctgggccatcctcttcttctccat

SEQ ID NO: 458155 - DNA, 120 bp, Artificial Sequence
  ENSG00000157103_13 (sequence is synthesized)
gctgttgatgctgggcattgacagccagttctgcactgtggagggcttcatcacagccctggtggatgagtaccccaggctcctccgcaaccgcagagagctcttcattgctgctgtctg

SEQ ID NO: 458156 - DNA, 120 bp, Artificial Sequence
  ENSG00000157103_14 (sequence is synthesized)
catcatctcctacctgatcggtctctctaacatcactcaggggggtatttatgtcttcaaactctttgactactactctgccagtggcatgagcctgctgttcctcgtgttctttgaatg

SEQ ID NO: 458157 - DNA, 120 bp, Artificial Sequence
  ENSG00000157103_15 (sequence is synthesized)
tgtctctatttcctggttttacggtgtcaaccgattctatgacaatatccaagagatggttggatccaggccctgcatctggtggaaactctgctggtctttcttcacaccaatcattgt

SEQ ID NO: 458158 - DNA, 120 bp, Artificial Sequence
  ENSG00000157103_16 (sequence is synthesized)
ggcgggcgtgttcattttcagtgctgtgcagatgacgccactcaccatgggaaactatgttttccccaagtggggccagggtgtgggctggctgatggctctgtcttccatggtcctcat

SEQ ID NO: 458159 - DNA, 120 bp, Artificial Sequence
  ENSG00000157103_17 (sequence is synthesized)
ccccgggtacatggcctacatgttcctcaccttaaagggctccctgaagcagcgcatccaagtcatggtccagcccagcgaagacatcgttcgcccagagaatggtcctgagcagcccca

SEQ ID NO: 458160 - DNA, 120 bp, Artificial Sequence
  ENSG00000157103_18 (sequence is synthesized)
gtgggggccactcaccgacccgacactctcaccccccgacctggctgagtgcgaccaccacttgatgtctgaggataccttccatctcaacctacctcgagtggcgagtccagacaccat

SEQ ID NO: 458161 - DNA, 120 bp, Artificial Sequence
  ENSG00000157103_19 (sequence is synthesized)
caccacgcagagaggggaggtgggaggacagttagacccctgggtgggccctgccgtgggcaaggatacccggtggcttctggcacctggcgggctggtgacctttttaatccaggcccc

SEQ ID NO: 458162 - DNA, 120 bp, Artificial Sequence
  ENSG00000157103_20 (sequence is synthesized)
atcagcatcccacgatcggccttggtaaccgccgcggtagatcatttttatcccgccagggagtgtgatgcaggaagaccacatgcgctcctggcttttaaacctgttcctgactgttct

SEQ ID NO: 458163 - DNA, 120 bp, Artificial Sequence
  ENSG00000157103_21 (sequence is synthesized)
cttactgccgaaacccttgactgttatctcggactttgcaggagttcctttccctccgaacgctgctccatgcacaggaaaagggcattttgtacaatggggacttcccgggaacgcttg

SEQ ID NO: 458164 - DNA, 120 bp, Artificial Sequence
  ENSG00000157103_22 (sequence is synthesized)
ctcttaagtaccagaagccggcggagctctggctttcgtgtttttggttttctccttcccaaggcagctggattgaaaaaacaaaacaaaacaaaaaaacccaggggcgtcagtcgatat

SEQ ID NO: 458165 - DNA, 120 bp, Artificial Sequence
  ENSG00000157103_23 (sequence is synthesized)
tcccagggccgcttctcctgcagtctgtggagcgtccttgtccccgccgccggaatgaatgagcattctgcagcccgatgtccctgtcccctcctcgccgggccattctgattggacctg

SEQ ID NO: 458166 - DNA, 120 bp, Artificial Sequence
  ENSG00000157103_24 (sequence is synthesized)
gcccagtgcaatctgtccagacaagccctgcttgctggaaaactgccacaagcacaattgatctctttttatcgccattccaggggcctcaggtcctactggggaaacttcctataccgg

SEQ ID NO: 458167 - DNA, 120 bp, Artificial Sequence
  ENSG00000157103_25 (sequence is synthesized)
agctccagtttctcttaagctgcccaatttcacagagtacaaaatagttgtaggggaaatcaaggtgaaggatctgtccgacagtcaagacggatccacagtaatctttcggtctcctta

SEQ ID NO: 458168 - DNA, 120 bp, Artificial Sequence
  ENSG00000157103_26 (sequence is synthesized)
aactaccaccctcgctgccacccaccccaagctgctgccgcctcaccttccttgaaatttctcagcgggagtctcctcactgccactaaaatccacccagcccactaactgaggagctag

SEQ ID NO: 458169 - DNA, 120 bp, Artificial Sequence
  ENSG00000157103_27 (sequence is synthesized)
tgttaatccagagaaccccccgcaatgtgcttccgagattcagactgcttcattgggaagtatgatttgttcctttctggaattgggctccgtggtggcggcggcacttcaagcaaagac

SEQ ID NO: 458170 - DNA, 120 bp, Artificial Sequence
  ENSG00000157103_28 (sequence is synthesized)
agtttcttgcaagctccagtagctccgcgtgtctcatttgccaggaagatgggttcccacgtagcaaatcgtacattgtgccctgtagctccttagctagttagctcacaagccgtgttt

SEQ ID NO: 458171 - DNA, 120 bp, Artificial Sequence
  ENSG00000157103_29 (sequence is synthesized)
tatgactaatccttaataactatggtaaataactgtgactgtggggtttttaatctcttgtcattctcatccaaaagtgaccagcataccagttcttgcaataagatattaccctcagaa

SEQ ID NO: 458172 - DNA, 120 bp, Artificial Sequence
  ENSG00000157103_30 (sequence is synthesized)
tattaagcacattattgtagagaaaaaaaaatatgtgtacacatatgaacgcacaacatgcacattcatcctcacatgtggcacgtaaggtctcatttgatattgtgtaggaaatctgaa

SEQ ID NO: 458173 - DNA, 120 bp, Artificial Sequence
  ENSG00000157103_31 (sequence is synthesized)
gccttttcctgaggtcatctgtaaaatagtctcattgccaaggcatccccagtgccagctggtgaatccatgatcaaaatgcatacgtattgttaaatgataaggtttagaatgacagga

SEQ ID NO: 458174 - DNA, 120 bp, Artificial Sequence
  ENSG00000157103_32 (sequence is synthesized)
acccatcactgtgtctcatggtcccacttccccatctgtgtgtgaattcctttagactaagggcaggaagacttccagctttctctttgttcttcaatgtgaaactgagaccaagtctct

SEQ ID NO: 458175 - DNA, 120 bp, Artificial Sequence
  ENSG00000157103_33 (sequence is synthesized)
ctaagacaaatgcagtgtatttaatgtttgtaagcaattctaagtgagatgtttggcaagaaatcccctaactgatttccatccaaacctaccttatagagcacaatattaagtgttgta

SEQ ID NO: 458176 - DNA, 120 bp, Artificial Sequence
  ENSG00000157103_34 (sequence is synthesized)
caattactgtgagaactgtgaatatgtgtaacttttttttagtatttgcccggggggaaaaagatattgtattatcatatatgcttttttgcaataaggatttattctcagaacaccaag

SEQ ID NO: 458177 - DNA, 120 bp, Artificial Sequence
  ENSG00000157103_35 (sequence is synthesized)
atgcttttttgcaataaggatttattctcagaacaccaagtaaatctatctctatataaaaaatatatgtaatatatacatattcaaagtatatacagagcctgttttaaaaaatacagt

SEQ ID NO: 458178 - DNA, 120 bp, Artificial Sequence
  ENSG00000157103_36 (sequence is synthesized)
aatatttataaatgaagatgcattttaaatgtctataaatggtgtcataactagagcacgggcgttatgtaagtttctaagaatttagaggataaataataaaggttctatgatatacaa

SEQ ID NO: 458179 - DNA, 120 bp, Artificial Sequence
  ENSG00000157103_37 (sequence is synthesized)
aggaatgtggagccgcatgctgggtctgcagaatgttgtcacctgatgaagaagaactggaagacgctggaagaaggctttggaaaaatgcccagatcatgagaaggtcttcagagcagc

SEQ ID NO: 458180 - DNA, 120 bp, Artificial Sequence
  ENSG00000157103_38 (sequence is synthesized)
caccgtctctgatcgttcagggcttggcatgaggaggtgctcaatatagtcatggagaagaactcatggactgaacttcctggtgaaccagagggatggtgcagagatttaagattgcaa

SEQ ID NO: 458181 - DNA, 120 bp, Artificial Sequence
  ENSG00000157103_39 (sequence is synthesized)
caggaacccccaagccaatgtaagcaaaacatctatttcatgactatgggaatgttttgtaaaatccaagcaccagcctgaagaaagcctggaactgcaaactaggagctttgagacact

SEQ ID NO: 458182 - DNA, 120 bp, Artificial Sequence
  ENSG00000157103_40 (sequence is synthesized)
ctatcttttgatgtctagttttctccttcctcagcagaccaaatctcactctgagtacaagatgggcagaggatggctgccccagagtccccaagtcactagcaaaactgcccttcttcc

SEQ ID NO: 458183 - DNA, 120 bp, Artificial Sequence
  ENSG00000157103_41 (sequence is synthesized)
tgggtcccatgccaaattccagagaaggaatttgattggctagcctgggtcaggtggtcagtcctgattcaaggtgattggatcattttgaacaaatatggcagctggagcccacaaggg

SEQ ID NO: 458184 - DNA, 120 bp, Artificial Sequence
  ENSG00000157103_42 (sequence is synthesized)
tagatcatgggaccgttaagggcatcattgttaccagagttaatggctgaggctgctctctcctgcgtatcccaagagtccctggtagaccacagaatcggccgcctcctactatcctgc

SEQ ID NO: 458185 - DNA, 120 bp, Artificial Sequence
  ENSG00000157103_43 (sequence is synthesized)
cattctccagaaggggaggcaggcaccctactgagtccagagctctctctaacattgccatgcccaggccaggatctagatgggcatccaagaccagcctgtgtgccgtgaaggagttca

SEQ ID NO: 458186 - DNA, 120 bp, Artificial Sequence
  ENSG00000157103_44 (sequence is synthesized)
aagtgagcaggccatccctgagaacgaggagcaggggtgttaggaaagtttggattatctgaagatggcctggttctccgtgaactctgggaggagatgatggtgtttggatctcaccca

SEQ ID NO: 458187 - DNA, 120 bp, Artificial Sequence
  ENSG00000157103_45 (sequence is synthesized)
agcccaagggccagttttgacccattttgccacttctgatgtagagcttccaaactgtacatgttttctttccctacaaagcatcttgtcattcagagattggcagaggaattctttgtg

SEQ ID NO: 458188 - DNA, 120 bp, Artificial Sequence
  ENSG00000157103_46 (sequence is synthesized)
cttggtttggccccatttttatcaatggctttaacacttggtcatagagcatccactgaggaaggatgggatatcctgggaatgttttaccatcttcctgcctggagtgtctttcactaa

SEQ ID NO: 458189 - DNA, 120 bp, Artificial Sequence
  ENSG00000157103_47 (sequence is synthesized)
ctccgtccttcccagaggccccatgagcgagtcatcttctggtttacgaatctgatcccattatcagccctgccccatccctgcagctagtccccaggttccttagtccggtgtccaaga

SEQ ID NO: 458190 - DNA, 120 bp, Artificial Sequence
  ENSG00000157103_48 (sequence is synthesized)
cccttcatatactgaccttcctagcttcacactgtatactttagtacatgtgtttccctccacttggaacgccttttctctctttttaaacctgatgaacacctattcaaccttcaaagc

SEQ ID NO: 458191 - DNA, 120 bp, Artificial Sequence
  ENSG00000157103_49 (sequence is synthesized)
cttgctcaaaggacgcctcgcctaggatactttctctggctgtattaatgcgtttcttctaggcctcccgtgtcttgttcttacacctcttgcagcacttatcacagggtattatgatca

SEQ ID NO: 458192 - DNA, 120 bp, Artificial Sequence
  ENSG00000157103_50 (sequence is synthesized)
gctataggcagaaatatttctccttctaggccatgaccttgacaagggcaagggtcttgtcttatgaaattctcacaccctgagtgtccaccccagctccacccacataggaggcctcag

SEQ ID NO: 458193 - DNA, 120 bp, Artificial Sequence
  ENSG00000157103_51 (sequence is synthesized)
taaggatttacagaaatgaatctttctgctggaacctgttagttcactgattcggattctggtgaccagggtgtagttcagaatacaaaatgcttgaagagacggctccattgtcgtttc

SEQ ID NO: 458194 - DNA, 120 bp, Artificial Sequence
  ENSG00000157103_52 (sequence is synthesized)
agcacatagcatgtgctcagtaaatacttgcagaatgaatgtgttagtgagtgagtacagaggacctgacatgtcatcactggtggtctcacgttaatagtgccctttgaacgtggcttt

SEQ ID NO: 458195 - DNA, 120 bp, Artificial Sequence
  ENSG00000157103_53 (sequence is synthesized)
cactacagacccgcagagctgtcctccaacatgatccaagagagccacaaaacacaggggtgtgtcttgggaaaggaaaagtaacaacttgcaaaaaggttggttctgcttcagagaaat

SEQ ID NO: 458196 - DNA, 120 bp, Artificial Sequence
  ENSG00000157103_54 (sequence is synthesized)
gttctagaaagacagccaagttaccctgccgtgaactcacacacacctgtgctttctgcatgttatgtttcataggagagggaagtgccgggaattaaaattgcggatgcactgttcccc

SEQ ID NO: 458197 - DNA, 120 bp, Artificial Sequence
  ENSG00000157103_55 (sequence is synthesized)
aggtgtgtgggtgaggcacgcttcctgggaccactccatttaagcattgggtcccaggcatgttcactactagcaggaggctctttatcaatttcctcccgtggaccagatgattgggat

SEQ ID NO: 458198 - DNA, 120 bp, Artificial Sequence
  ENSG00000157103_56 (sequence is synthesized)
ttttttttctaccagactttattacagaataactatttttgtattaactaagcaaacaaatgtaccgctcccagcttctgactggcccaaggtgctgagctagacctctttgctttggta

SEQ ID NO: 458199 - DNA, 120 bp, Artificial Sequence
  ENSG00000157103_57 (sequence is synthesized)
caaagagagcccaaagccaagagacttggcatttctgttagctggtattccccagggtgactaaaaggatgatttccattggattttttaaaatgctgaagacactgaaagacctgaata

SEQ ID NO: 458200 - DNA, 120 bp, Artificial Sequence
  ENSG00000157103_58 (sequence is synthesized)
gtaagcccgtaataaacgttattcggtattattattgttgttgttgtagccttctgggaagttgcgaatgccaaattaagaacaatggacccatacccagatggtggcgattgcagtgat

SEQ ID NO: 458201 - DNA, 120 bp, Artificial Sequence
  ENSG00000157103_59 (sequence is synthesized)
aacaatggctgagatttcctaagccctaactatatgccaggcatagttgtacatgctttacacacatgatctcatttaatcatcaccataaccctcggaaggagttattattatcttccc

SEQ ID NO: 458202 - DNA, 120 bp, Artificial Sequence
  ENSG00000157103_60 (sequence is synthesized)
attttatagatgagggtcagagaggtgaagtaactcacccagcattagtaggtgttggagggagccgaggtctgtctgactcagcaccagggtggctttgctgctgtgtaagtcaaagag

SEQ ID NO: 458203 - DNA, 120 bp, Artificial Sequence
  ENSG00000157103_61 (sequence is synthesized)
ccttctccgttctaaatcctcaaagaagtatgagttatatcaattcatggctttactttgtttatcttcatatgtgccacatcttctaaaaggaaaactccaaatatagtcatgtggctc

SEQ ID NO: 458204 - DNA, 120 bp, Artificial Sequence
  ENSG00000157103_62 (sequence is synthesized)
gagggcagcgggccccactcctgcatgttcccagcaccccaagggccagtgccatgctgcatggtctcgctgcggccaccctggctggggacgctctgcgggacacgcgcacagcccaga

SEQ ID NO: 458205 - DNA, 120 bp, Artificial Sequence
  ENSG00000157103_63 (sequence is synthesized)
cgccctggcaggcttcctgcacccctgctgccctctgtaggagctgcctgcctgccccatcgctgcttcaccatccctcctctcctccccttctctgctttgcaggatctcacccagggt

SEQ ID NO: 458206 - DNA, 120 bp, Artificial Sequence
  ENSG00000157103_64 (sequence is synthesized)
cgcagccccggccgcagccagcccagctcctccgttaagaaattattaaatagagttggtggaaggactctggttgccgtgacaacggagcctgtgtcctcgggagataatggcgttgca

SEQ ID NO: 458207 - DNA, 120 bp, Artificial Sequence
  ENSG00000157103_65 (sequence is synthesized)
gagaaacggaaaggacaggccaacggaagcagtactgcaaggctggaaggagaaaagccaggaggggagtgcttgctgtgaaagacagggagacagagaccaagacggacaggcagacag

SEQ ID NO: 458208 - DNA, 120 bp, Artificial Sequence
  ENSG00000157103_66 (sequence is synthesized)
gcggccgagccgcccggatgcagcgcctgtcccgggcagcgcagccccggccgcagccttttctgggcagccagagggagactcttaaactaaccgatctcacccagggtggcagaagga

SEQ ID NO: 458209 - DNA, 120 bp, Artificial Sequence
  ENSG00000157103_67 (sequence is synthesized)
gagcccacccttggcccaccacggccaccactctgctgacaaggccattcctccaggagtggggaacttggtttgtcttttgtgggccttggtctccccacaacagccatagcctcacaa

SEQ ID NO: 458210 - DNA, 120 bp, Artificial Sequence
  ENSG00000157103_68 (sequence is synthesized)
gtgagacaggcactccttgcaggctcacatccaatcctcatgacacccctctaaagtgcgtattgttagcacattttatatggacacagacagcctgggttcaaatcctgactctactat

SEQ ID NO: 458211 - DNA, 120 bp, Artificial Sequence
  ENSG00000157103_69 (sequence is synthesized)
ataccagctgtgcaacttcagaaaagagacttaacctctctgagtctcagtgccctcatttataaaatggaaataaaattagaacctgccccagttcctcaaaaaattaaacatagaatt

SEQ ID NO: 458212 - DNA, 120 bp, Artificial Sequence
  ENSG00000157103_70 (sequence is synthesized)
accatatgatccagcaattctgcttctgagtagatacctgaagaattacaagcagctctcaaagagatatttgtacactcctgttcacagcagcactattcacagtaggcaaaaggtgga

SEQ ID NO: 458213 - DNA, 120 bp, Artificial Sequence
  ENSG00000157103_71 (sequence is synthesized)
agcaagccaagcgttcactgataaatgaattggtaagcaaaatgtggtctatacatacaatggaatgtaattcagccttaaaaggaaggaaattctgacgcatgcatcaacatggatgga

SEQ ID NO: 458214 - DNA, 120 bp, Artificial Sequence
  ENSG00000157103_72 (sequence is synthesized)
ccttgaggatattatgtcaagtgaaataagccggtcacaaaaatacaaatagtgtttgatcttgcttatatgagttccctagagtaatcaaatttatagagacagaaagtagaatgatgg

SEQ ID NO: 458215 - DNA, 120 bp, Artificial Sequence
  ENSG00000157103_73 (sequence is synthesized)
ttgccaggggttgtgggtagggggatgaggagttgttgtttagtgggtggagttgcagttttgcaaaatgaaaaaagttctggagctggatgctgacaatgttaggcaatacatttctca

SEQ ID NO: 458216 - DNA, 120 bp, Artificial Sequence
  ENSG00000157103_74 (sequence is synthesized)
caatgtactcccattgttaagtgacacatgactgtatttgcagaggtgtggcagggttcagggagctacattatgggtatacttaatgcttctaaattgtacaggcaccaatagttaaga

SEQ ID NO: 458217 - DNA, 120 bp, Artificial Sequence
  ENSG00000157103_75 (sequence is synthesized)
tcaggtaagctcagtaagcacctggcactcccccagcactgcccagggccatgcccagggcctcctctcccctcctctgttgtatcccacctttcctgccttcattgagcatcatctctg

SEQ ID NO: 458218 - DNA, 120 bp, Artificial Sequence
  ENSG00000157103_76 (sequence is synthesized)
tgccaagctctgggcacataacagtgagtcagatggggtccctgccctccagaggctcccaggctggtggagacacaaacattgagctaagacatataggacagagctagagaatgcagc

SEQ ID NO: 458219 - DNA, 120 bp, Artificial Sequence
  ENSG00000157103_77 (sequence is synthesized)
aatgcagcacctaactggactcggagcaccagggactgcttcttggaggaggggatgtagaaattgagctttgaaaggcccacagaaggcctggcatggtggctcatgtctataatccca

SEQ ID NO: 458220 - DNA, 120 bp, Artificial Sequence
  ENSG00000157103_78 (sequence is synthesized)
gtcaggagtttgagaccagcttggccaatgtggtgaaaacccgtctctacttaaaaaaataaaataaagtaaataaataatacaaaaattagtcaggcattggggcaggtgcctgtaatc

SEQ ID NO: 458221 - DNA, 120 bp, Artificial Sequence
  ENSG00000157103_79 (sequence is synthesized)
ggcagggacggggcatgtcagccagagcccggcaggagacagaggcccctcggaggggtaacagaagaggtggataaaggggctacagtcatgtgtcacatcatgacattttggtcatca

SEQ ID NO: 458222 - DNA, 120 bp, Artificial Sequence
  ENSG00000157103_80 (sequence is synthesized)
gtggaccacatatgcaacgatggtcccataagattataataccatatttttactttaccttttctacgtctagacatgtctagtaccgaaatgcattgtgttacagttgcgtacaatatt

SEQ ID NO: 458223 - DNA, 120 bp, Artificial Sequence
  ENSG00000157103_81 (sequence is synthesized)
cagtacagtcatgtgctgtacaggtttgtagtctaggagcaataggccacaccgtatggcataggagtgtagcaggctagaccatctaggtttgtgcaagtacacgctatgatatgcaca

SEQ ID NO: 458224 - DNA, 120 bp, Artificial Sequence
  ENSG00000157103_82 (sequence is synthesized)
caacaacaaaattgcttaagaacgcatttctcagaacatatccctgttgttaagtgacacatgactatacttgcagagttgtggcagggctaaggcagccacaagggatgctgaagacct

SEQ ID NO: 458225 - DNA, 120 bp, Artificial Sequence
  ENSG00000157103_83 (sequence is synthesized)
tttctccccaaaaagagttggaccacagatagagccatgagacacacaaactctgacctttgatagcaaaacccagctactcacaaagccaaggtccagcaggaagaatacattccccaa

SEQ ID NO: 458226 - DNA, 120 bp, Artificial Sequence
  ENSG00000157103_84 (sequence is synthesized)
catctctgcctctaatctcctgccagctcctcccaatggtcaaacccagctagaagccagagggcaggggaccagataatgtggccatagtcgtcagcatcctggggcctggcacagagt

SEQ ID NO: 458227 - DNA, 120 bp, Artificial Sequence
  ENSG00000157103_85 (sequence is synthesized)
ggtcaaggggaagagtggatcagagaggcaaacggaggggaataaccagcatagccaattagaatcacctggagaggttgaccacatcctgattcatcctgaaaaccagcctgatctact

SEQ ID NO: 458228 - DNA, 120 bp, Artificial Sequence
  ENSG00000157103_86 (sequence is synthesized)
tacgaacctagagtcactcggaataaacatgcacacacactctggccatagtgaaggccgtgctgattgtatcttcaggggagtaccttgtagagatgtgtgtcgggggtcactgatgtg

SEQ ID NO: 458229 - DNA, 120 bp, Artificial Sequence
  ENSG00000157103_87 (sequence is synthesized)
acacaatgaggtgctggggcccaaatctctctggcatgaaggaagcatccatgctggacagctcagaaggatccgggagcagtctagaaggtctcagagcaccttggataagctcccagg

SEQ ID NO: 458230 - DNA, 120 bp, Artificial Sequence
  ENSG00000157103_88 (sequence is synthesized)
aggagctgttctcaggcactgtcagaatcagagttgcctgatctcttcatggccaatgtccatggttacactgtttctttacaaataaaaatcaaattctgctctggtgggttctgcttt

SEQ ID NO: 458231 - DNA, 120 bp, Artificial Sequence
  ENSG00000157103_89 (sequence is synthesized)
ctggcatctcccgcatgctgctctcaggcacgttcggacttttcattcaaccatttattcagtaaacacttcttgatctcctactatgtgccaactgatgacaggcacggacatgcagac

SEQ ID NO: 458232 - DNA, 120 bp, Artificial Sequence
  ENSG00000157103_90 (sequence is synthesized)
aggcaatggcaccaccaggcggccaatgcggagaggagggaagcccaggcagctgggctgcggggacctcagggagtcccctggaccaccccaggtcgggagtggcatctagaagagaaa

SEQ ID NO: 458233 - DNA, 120 bp, Artificial Sequence
  ENSG00000157103_91 (sequence is synthesized)
actgcagggcaggcaggtgctggagagaaacagtgtgaaggctgggaggcagatgaggtcaggccaggcaccggcaaacagctgcagtgagtgctgagaggagagagagatgcaagggcc

SEQ ID NO: 458234 - DNA, 120 bp, Artificial Sequence
  ENSG00000157103_92 (sequence is synthesized)
ttgaaaggctggccagggagtttgggcttcattctgagaacaagcgggtgctattcatcgcagtaagcagaggagtgacatgatcagacttgcaatttagaaggctctctggggctggag

SEQ ID NO: 458235 - DNA, 120 bp, Artificial Sequence
  ENSG00000157103_93 (sequence is synthesized)
aggggatagagcaaaactgaaggcagggtcccactaggaggccactgggccatccagatgagcagtagtggtggctgactaaggccctggcaggtcctgttctctttgatctcttgacca

SEQ ID NO: 458236 - DNA, 120 bp, Artificial Sequence
  ENSG00000157103_94 (sequence is synthesized)
aacagcactttctactgattagtataatgggcctcacagtccccagctacctcttgaatcacggtgatgacggtgtcagcacagttctagggcggggatatcatctgtggccatgccctg

SEQ ID NO: 458237 - DNA, 120 bp, Artificial Sequence
  ENSG00000157103_95 (sequence is synthesized)
ggagctctccatccccagactcctcagtccccgagtaaacagggagaggaggcaactcttaggctgccaagaagatgaccaaaaattccaggtccctagaatgttccactgcatgaaatt

SEQ ID NO: 458238 - DNA, 120 bp, Artificial Sequence
  ENSG00000157103_96 (sequence is synthesized)
tcaggaaacagctcagccaccttctccattttccagaaggggaaactgatgcccagaggggagggactctcctgaggtcacaaagtgagtcacaggcagaatcaggctggaccctgggct

SEQ ID NO: 458239 - DNA, 120 bp, Artificial Sequence
  ENSG00000157103_97 (sequence is synthesized)
ctcctggctcggtgctgctgggcctcccgtccttccttagagggccaggctttgggtgggttggggctggggctgctgcaggtggctgacctctgttcccacctgaagttctgcactgtg

SEQ ID NO: 458240 - DNA, 120 bp, Artificial Sequence
  ENSG00000157103_98 (sequence is synthesized)
ctgcaaaaaggatcctgcttaggcatttttctggggcaactgtaggagaaaagcccccctaaagactccagagggagcaccaggccccatttcttgtttcttgtccctttatcaaaagat

SEQ ID NO: 458241 - DNA, 120 bp, Artificial Sequence
  ENSG00000157103_99 (sequence is synthesized)
tcctgaaggacaattgtcctctgttaatgataccaagaaattcatctattcacctgcaaaaaatgggatgtatttcacatatggctttccttgggcctgtggttggctgtgggtcctgct

SEQ ID NO: 458242 - DNA, 120 bp, Artificial Sequence
  ENSG00000157103_100 (sequence is synthesized)
tttgaggcaggtataaagaaatactggatggggacccagacccacgacactccctctaccagggcgggtcttgaaagtcttggggccacgagctctgtcttctttacctgcaggagcctt

SEQ ID NO: 458243 - DNA, 120 bp, Artificial Sequence
  ENSG00000157103_101 (sequence is synthesized)
caagggtaagtctgcagatcagggacctgggtggtggtgcccctgcccacacacacctcttgccctctggagagagcgagctgtctacccagaccagggctgacatcacatatccatcca

SEQ ID NO: 458244 - DNA, 120 bp, Artificial Sequence
  ENSG00000157103_102 (sequence is synthesized)
ccaggtgcatatctgagcagagtgagggctgttgcaaggggccaggtggcagatgacagtgctggtcagaagctagggaggtggaggtggagaggcccaatccagagtcccccgcacatc

SEQ ID NO: 458245 - DNA, 120 bp, Artificial Sequence
  ENSG00000157103_103 (sequence is synthesized)
ctcactgaccgagggcctgggcctcacctcgtccggcaagctgagaccccagccctgcctgccaccagtctgcactgggccccagacatgagtcctggccccctggcttgtcagatgtac

SEQ ID NO: 458246 - DNA, 120 bp, Artificial Sequence
  ENSG00000157103_104 (sequence is synthesized)
atgaccttcagcaagtcactgcctctctcttagcctcagtgtcctcagtaatgcctgtctccgagatcaataagattgtagaggtcatggaacatgccacgacagttcatgttaattccg

SEQ ID NO: 458247 - DNA, 120 bp, Artificial Sequence
  ENSG00000157103_105 (sequence is synthesized)
gggattggattagatctctctctgcttatttatgtgttatattattgtctcatttaagtcctgaaaggttttaagcaggggagagacctgactgatttacactgtaaaaagatggccctg

SEQ ID NO: 458248 - DNA, 120 bp, Artificial Sequence
  ENSG00000157103_106 (sequence is synthesized)
gtgaccaactccgctttctgccctccaaccttaccagaaattggcattttcctctaccacctggacatttccttcccaatgcccggactgtcaatgtccacatcctctcgtggtcacaaa

SEQ ID NO: 458249 - DNA, 120 bp, Artificial Sequence
  ENSG00000157103_107 (sequence is synthesized)
gccctcagtgcttcatctaatctaccctgaagcctaatcccagccccatcagcctccagagtccatgtggtctgtgaactggatgcagtgggcgccggggacaatgcacctgttctcacc

SEQ ID NO: 458250 - DNA, 120 bp, Artificial Sequence
  ENSG00000157103_108 (sequence is synthesized)
tctggaagggtgttggctggactggaaaggtaagggatatatgtgcacagtggggacaggagggcactggatagaggaacaggtctacaaaggaagctctgcccacaactcccaagagtc

SEQ ID NO: 458251 - DNA, 120 bp, Artificial Sequence
  ENSG00000157103_109 (sequence is synthesized)
ccatccaaccttgaattaagcaggtcccttcaacactcggtgtgtccgtttcttttactgtgaaatgggaataataacattaccttaccttctggggcagttgtgaggataaaaggaaat

SEQ ID NO: 458252 - DNA, 120 bp, Artificial Sequence
  ENSG00000157103_110 (sequence is synthesized)
agtgcaagtcaagtacgcagcacagtgcgaagctcacagtgagtcccatgggattccactgggcctaacagagtcatctcaaaacagagggcaaatgttgctcctggactgttgaacaaa

SEQ ID NO: 458253 - DNA, 120 bp, Artificial Sequence
  ENSG00000157103_111 (sequence is synthesized)
cttttccagagcatctgctctgcaccaaaccttgttctaggtgcagaaactccagagatgacagcttcacatcctgacccttgaggaacaacagagatgaataggttaatggttagattc

SEQ ID NO: 458254 - DNA, 120 bp, Artificial Sequence
  ENSG00000157103_112 (sequence is synthesized)
aggctctgtattaagcagtccatgagttaagatcccaacctcaccatttactagctgtgagctcaggcaagtcactttgcctccctggaactcagtttccttctctgtaaaacggggcta

SEQ ID NO: 458255 - DNA, 120 bp, Artificial Sequence
  ENSG00000157103_113 (sequence is synthesized)
ataattatacttatctgttggtttattatgataatcagatgagatggtgcttttgtcaagcgctcagcacccagcaaggagagttgttattactcttgtttttattctcagcaagtgcag

SEQ ID NO: 458256 - DNA, 120 bp, Artificial Sequence
  ENSG00000157103_114 (sequence is synthesized)
agcaaatgccaagctgggatgtctagcccagggacacccgggaggtggaaaactggccttactccaccttttctccctttcaagccctaccccaggagcctgggggcagaagatggcagt

SEQ ID NO: 458257 - DNA, 120 bp, Artificial Sequence
  ENSG00000157103_115 (sequence is synthesized)
ctctcactggccctgacctgaagggaacccggaggacaagtgtgttgtctcagatcttatggcaagtcaagggcagagaagggatttgtactgaataagatgggaggcaggaaggtcaga

SEQ ID NO: 458258 - DNA, 120 bp, Artificial Sequence
  ENSG00000157103_116 (sequence is synthesized)
actacccaagaagtgaatgcaaggttctagaagcagtagtagaaatgaaccaagcagaaccttaacaaattccacacttgggcagggcagagctgatgaaaagctaccctagtttcatct

SEQ ID NO: 458259 - DNA, 120 bp, Artificial Sequence
  ENSG00000157103_117 (sequence is synthesized)
agtgggaacttctggacccactgggttctcaaatccaaggctggtgtaaaagtatctctgatccattcctaggactagggacgccggaggagggcacaagtatctcccagtctaaatttc

SEQ ID NO: 458260 - DNA, 120 bp, Artificial Sequence
  ENSG00000157103_118 (sequence is synthesized)
aggagcagaaaagtatagggcttatgggctttggaagggtttgagtctcagtccctgagcttctagctgtgtgcacttgagcaagccatttcatctctctgagcctcagtcccctcatct

SEQ ID NO: 458261 - DNA, 120 bp, Artificial Sequence
  ENSG00000157103_119 (sequence is synthesized)
gttcaatggtcacaataacagtaccttacagggttgtcccaaagactgagggagatgagtagaatgcttagcatatgccttacacatagtaagcactcaatacatagtatcaattataat

SEQ ID NO: 458262 - DNA, 120 bp, Artificial Sequence
  ENSG00000157103_120 (sequence is synthesized)
agtggtaattagagttcgtgctacattaggagactggccacttcttggggacagagagtagggccccctcactgcatatattgaggatgtcaaccaatccatccacaagcatttattgaa

SEQ ID NO: 458263 - DNA, 120 bp, Artificial Sequence
  ENSG00000157103_121 (sequence is synthesized)
tacctactatgtgcctggcttcatgctgaacacggaaggcacagggaagtacgagaccaaggtgacatataataagcctgcggcatgtcctgatgtgactgacctttctgagcagtaggt

SEQ ID NO: 458264 - DNA, 120 bp, Artificial Sequence
  ENSG00000157103_122 (sequence is synthesized)
gtgactgtgcctgattccagacaagagaaagtgaagctaagagaaaatacaacattgaccctaagttacgcagcttgtgggtgacacagatgagtttgaattcccttttcctagctccaa

SEQ ID NO: 458265 - DNA, 120 bp, Artificial Sequence
  ENSG00000157103_123 (sequence is synthesized)
gtacaatgggttttctcttggattgtggctgccttccttaatcctgcagaatctcggggtcaagtcagggaggtgaagctaagccagtgaactgtccatgctgaccgggaaacaggctca

SEQ ID NO: 458266 - DNA, 120 bp, Artificial Sequence
  ENSG00000157103_124 (sequence is synthesized)
cattagactctgagatacaaaggtcatcaaacttgaacattgctcttccatactagtgagcaaagaaatgcaattttagacaatgatcatcagtttggcaaaaaataattgtttaaatga

SEQ ID NO: 458267 - DNA, 120 bp, Artificial Sequence
  ENSG00000157103_125 (sequence is synthesized)
tgatacctagtgctggccttgtgacagaaaggcactctctgtaatgccaggtgaagttccatttctcgaaagcaacaaggtaatatggatcaaaagcctgtgatgaatttattcctttta

SEQ ID NO: 458268 - DNA, 120 bp, Artificial Sequence
  ENSG00000157103_126 (sequence is synthesized)
attcagtagttccacctctaaaaatttttcccaagagtggtataataattttgtagctgaagatttatatacaggggtgtttaatttggtgttatttagagtcacataaaattggaggta

SEQ ID NO: 458269 - DNA, 120 bp, Artificial Sequence
  ENSG00000157103_127 (sequence is synthesized)
acctgaatgcatagcagtggggaagcttaaaagagaatggtaggaccttctgagggactgttttgtgcaattaaaacgtcaaattgttcatgaggcaataaaacaacgtttagtgaacaa

SEQ ID NO: 458270 - DNA, 120 bp, Artificial Sequence
  ENSG00000157103_128 (sequence is synthesized)
aatgggaaacaaacctgtatgtactgcgttttttttaactctaaacatgttacatggaaaggcaagtacctaatttgaacctcattttgtaagaaaatgtgattgcatctgcaaaggaga

SEQ ID NO: 458271 - DNA, 120 bp, Artificial Sequence
  ENSG00000157103_129 (sequence is synthesized)
gtttcagaggagcattaaagtaggaacatccctgcatttatgtgttcgtcagacaattcttgagtgtctactatatacggtggactgttctagacatggggatgtgaacaacacaagccc

SEQ ID NO: 458272 - DNA, 120 bp, Artificial Sequence
  ENSG00000157103_130 (sequence is synthesized)
tgccccccacataacttacattctaggtgctggttaaaggaactttcattttatgtgtgtgtgtgcatatgtaatttaaaagttttcctgtcaccacatgcaatacttggataatttaga

SEQ ID NO: 458273 - DNA, 120 bp, Artificial Sequence
  ENSG00000157103_131 (sequence is synthesized)
agtcaaaaaataggaggggacaggggaagggaaaaaccaaatgtgagctggttggctcagactccaaggaggagcttcagataagtggccaaggagagcaaggatctgggaaggcttcct

SEQ ID NO: 458274 - DNA, 120 bp, Artificial Sequence
  ENSG00000157103_132 (sequence is synthesized)
ggaggcggaagaactggaatcaagcccagagccacaacagatacggatgtaggggaaatgggggaggaggaagcaagggtgtacaggaggaggggtcaccagtcacccactttcctccca

SEQ ID NO: 458275 - DNA, 120 bp, Artificial Sequence
  ENSG00000157103_133 (sequence is synthesized)
gattacaggcataagccaccaagcccagcagtacattctacccactaagtaatttctcatcatccaccccagctcccattcccccacccttctgagtctccagtgtctattattccacct

SEQ ID NO: 458276 - DNA, 120 bp, Artificial Sequence
  ENSG00000157103_134 (sequence is synthesized)
cagtgtctattattccacctgtgcccagtgtttagctcctacctttaagtgagaacatgcagtatttgacttcctgtttctgagttgttttgcttaagatgatggcctccagttccatcc

SEQ ID NO: 458277 - DNA, 120 bp, Artificial Sequence
  ENSG00000157103_135 (sequence is synthesized)
acgttgctgcaataggcatgacttcattctattttatggctgaatagtattccatcgtgtatgtataccatatttcctttatccagccatccacggatggacacttaggttgattcccta

SEQ ID NO: 458278 - DNA, 120 bp, Artificial Sequence
  ENSG00000157103_136 (sequence is synthesized)
tctttgctattgtgaataaacacgagtgcaaatatctttttgatataataatttcttttcctttggatagatagccagtagtgggattgctggatcaaatggtggttctatttctgattc

SEQ ID NO: 458279 - DNA, 120 bp, Artificial Sequence
  ENSG00000157103_137 (sequence is synthesized)
tttgagaaatctctgtactggtttccatagaggttgcactaatttacactcccaataacaccttctctctctaactgttccaacacggtcagatcctcactggtcagtgactctgcttat

SEQ ID NO: 458280 - DNA, 120 bp, Artificial Sequence
  ENSG00000157103_138 (sequence is synthesized)
aatttgagcagtgcccgaagccgctctggtgaacttcaagacaccagtttggggtttggggtttttctttttcatgagatttgcagttctttgcaattgattgtcaatttctttttcttt

SEQ ID NO: 458281 - DNA, 63 bp, Artificial Sequence
  ENSG00000157103_139 (sequence is synthesized)
ttgcagttctttgcaattgattgtcaatttctttttctttcatgctcttgttccccaggctgg

SEQ ID NO: 458282 - DNA, 77 bp, Artificial Sequence
  ENSG00000157103_140 (sequence is synthesized)
tccggcagattgccagtttcttatagcatctgaccatcagggagaaacagcccctgcccaggaaagcctttgaagga

SEQ ID NO: 458283 - DNA, 120 bp, Artificial Sequence
  ENSG00000157103_141 (sequence is synthesized)
cagggagaaacagcccctgcccaggaaagcctttgaaggaatggctgggatagatgtcgagtgggagggacattgagagtggcaggggtggaggggatcatcatgtcagtctccttttgt

SEQ ID NO: 458284 - DNA, 120 bp, Artificial Sequence
  ENSG00000157103_142 (sequence is synthesized)
tggtagatatcttcacattaaagtgacttgctcacctacacaacccacttgctgtgagaattgggctattgaaaaatacttggtaacgaggacccccagagcataacccccatggtacag

SEQ ID NO: 458285 - DNA, 120 bp, Artificial Sequence
  ENSG00000157103_143 (sequence is synthesized)
acaaggaaactgagactcagagaggttaggtgacttgcccatggtcacactgtgagaaagtggtagaaccaggctttgaccctgaagcacccacagctcatccatccctcctgctcccaa

SEQ ID NO: 458286 - DNA, 120 bp, Artificial Sequence
  ENSG00000157106_0 (sequence is synthesized)
gacagcggcggcgcggcgggcggagccgggaggcggggaagcagtggccgtgtgagcgtgaggagctgccgccaccgcctgctcctcgtcgtcctcgtcctccggggccccggcgacgtg

SEQ ID NO: 458287 - DNA, 120 bp, Artificial Sequence
  ENSG00000157106_1 (sequence is synthesized)
cgtgggccgcgcacggccctggaaaagacgtcgcctccccttcatccgcctctctctcaccgcgccgctcccgcctcctcgtcctgcgctgcgggctcaggcggaacccggaacggccgt

SEQ ID NO: 458288 - DNA, 120 bp, Artificial Sequence
  ENSG00000157106_2 (sequence is synthesized)
cctcttcccccgccctccgccgcctcctccttctcctcctcctcctcctcctcctccttctcggcttcctcctcagccccgggccggagcggggtgtcggcggcggccggttcgggcggc

SEQ ID NO: 458289 - DNA, 120 bp, Artificial Sequence
  ENSG00000157106_3 (sequence is synthesized)
gactcgcgcttctttgggcggcggcgcttggccatgtcgtgtcggggaaggtaatgagccgcagagccccggggtctcggctgagcagcggcggcggcggcggcggcaccaagtatccgc

SEQ ID NO: 458290 - DNA, 120 bp, Artificial Sequence
  ENSG00000157106_4 (sequence is synthesized)
ggagctggaatgactggcaacccagaactgatagtgcatcagccgacccagataatttaaaatattcttcatccagagatagaggtggttcttcctcttatggactgcaaccttcaaatt

SEQ ID NO: 458291 - DNA, 120 bp, Artificial Sequence
  ENSG00000157106_5 (sequence is synthesized)
cagctgtggtgtctcggcaaaggcacgatgataccagagtccacgctgacatacagaatgacgaaaagggtggctacagtgtcaatggaggatctggggaaaatacttatggtcggaagt

SEQ ID NO: 458292 - DNA, 120 bp, Artificial Sequence
  ENSG00000157106_6 (sequence is synthesized)
cgttggggcaagagctgagggttaacaatgtgaccagccctgagttcaccagtgttcagcatggcagtcgtgctttagccaccaaagacatgaggaaatcacaggagagatcgatgtctt

SEQ ID NO: 458293 - DNA, 120 bp, Artificial Sequence
  ENSG00000157106_7 (sequence is synthesized)
attctgatgagtctcgactgtcgaatcttcttcggaggatcacccgggaagacgacagagaccgaagattggctactgtaaagcagttgaaagaatttattcagcaaccagaaaataagc

SEQ ID NO: 458294 - DNA, 120 bp, Artificial Sequence
  ENSG00000157106_8 (sequence is synthesized)
tggtactagttaaacaattggataatatcttggctgctgtacatgacgtgcttaatgaaagtagcaaattgcttcaggagttgagacaggagggagcttgctgtcttggccttctttgtg

SEQ ID NO: 458295 - DNA, 120 bp, Artificial Sequence
  ENSG00000157106_9 (sequence is synthesized)
cttctctgagctatgaggctgagaagatcttcaagtggatttttagcaaatttagctcatctgcaaaagatgaagttaaactcctctacttatgtgccacctacaaagcactagagactg

SEQ ID NO: 458296 - DNA, 120 bp, Artificial Sequence
  ENSG00000157106_10 (sequence is synthesized)
taggagaaaagaaagccttttcatctgtaatgcagcttgtaatgaccagcctgcagtctattcttgaaaatgtggatacaccagaattgctttgtaaatgtgttaagtgcattcttttgg

SEQ ID NO: 458297 - DNA, 120 bp, Artificial Sequence
  ENSG00000157106_11 (sequence is synthesized)
tggctcgatgttaccctcatattttcagcactaattttagggatacagttgatatattagttggatggcatatagatcatactcagaaaccttcgctcacgcagcaggtatctgggtggt

SEQ ID NO: 458298 - DNA, 120 bp, Artificial Sequence
  ENSG00000157106_12 (sequence is synthesized)
tgcagagtttggagccattttgggtagctgatcttgcattttctactactcttcttggtcagtttctggaagacatggaagcatatgctgaggacctcagccatgtggcctctggggaat

SEQ ID NO: 458299 - DNA, 120 bp, Artificial Sequence
  ENSG00000157106_13 (sequence is synthesized)
cagtggatgaagatgtccctcctccatcagtgtcattaccaaagctggctgcacttctccgggtatttagtactgtggtgaggagcattggggaacgcttcagcccaattcggggtcctc

SEQ ID NO: 458300 - DNA, 120 bp, Artificial Sequence
  ENSG00000157106_14 (sequence is synthesized)
caattactgaggcatatgtaacagatgttctgtacagagtaatgagatgtgtgacggctgcaaaccaggtgtttttttctgaggctgtgttgacagctgctaatgagtgtgttggtgttt

SEQ ID NO: 458301 - DNA, 120 bp, Artificial Sequence
  ENSG00000157106_15 (sequence is synthesized)
tgctcggcagcttggatcctagcatgactatacattgtgacatggtcattacatatggattagaccaactggagaattgccagacttgtggtaccgattatatcatctcagtcttgaatt

SEQ ID NO: 458302 - DNA, 120 bp, Artificial Sequence
  ENSG00000157106_16 (sequence is synthesized)
tactcacgctgattgttgaacagataaatacgaaactgccatcatcatttgtagaaaaactgtttataccatcatctaaactactattcttgcgttatcataaagaaaaagaggttgttg

SEQ ID NO: 458303 - DNA, 120 bp, Artificial Sequence
  ENSG00000157106_17 (sequence is synthesized)
ctgtagcccatgctgtttatcaagcagtgctcagcttgaagaatattcctgttttggagactgcctataagttaatattgggagaaatgacttgtgccctaaacaacctcctacacagtc

SEQ ID NO: 458304 - DNA, 120 bp, Artificial Sequence
  ENSG00000157106_18 (sequence is synthesized)
tacaacttcctgaggcctgttctgaaataaaacatgaggcttttaagaatcatgtgttcaatgtagacaatgcaaaatttgtagttatatttgacctcagtgccctgactacaattggaa

SEQ ID NO: 458305 - DNA, 120 bp, Artificial Sequence
  ENSG00000157106_19 (sequence is synthesized)
atgccaaaaactcactaatagggatgtgggcgctatctccaactgtctttgcacttctgagtaagaatctgatgattgtgcacagtgacctggctgttcacttccctgccattcagtatg

SEQ ID NO: 458306 - DNA, 120 bp, Artificial Sequence
  ENSG00000157106_20 (sequence is synthesized)
ctgtgctctacacattgtattctcattgtaccaggcatgatcactttatctctagtagcctcagttcttcctctccttctttgtttgatggagctgtgattagcactgtaactacggcta

SEQ ID NO: 458307 - DNA, 120 bp, Artificial Sequence
  ENSG00000157106_21 (sequence is synthesized)
caaagaaacatttctcaattatattaaatcttctgggaatattacttaagaaagataaccttaaccaggacacgaggaaactgttaatgacttgggctttggaagcagctgttttaatga

SEQ ID NO: 458308 - DNA, 120 bp, Artificial Sequence
  ENSG00000157106_22 (sequence is synthesized)
agaagtctgaaacatacgcacctttattctctcttccgtctttccataaattttgcaaaggccttttagccaacactctcgttgaagatgtgaatatctgtctgcaggcatgcagcagtc

SEQ ID NO: 458309 - DNA, 120 bp, Artificial Sequence
  ENSG00000157106_23 (sequence is synthesized)
tacatgctctgtcctcttccttgccagatgatcttttacagagatgtgtcgatgtttgccgtgttcaactagtgcacagtggaactcgtattcgacaagcatttggaaaactgttgaaat

SEQ ID NO: 458310 - DNA, 120 bp, Artificial Sequence
  ENSG00000157106_24 (sequence is synthesized)
caattcctttagatgttgtcctaagcaataacaatcacacagaaattcaagaaatttctttagcattaagaagtcacatgagtaaagcaccaagtaatacattccacccccaagatttct

SEQ ID NO: 458311 - DNA, 120 bp, Artificial Sequence
  ENSG00000157106_25 (sequence is synthesized)
ctgatgttattagttttattttgtatgggaactctcatagaacagggaaggacaattggttggaaagactgttctatagctgccagagactggataagcgtgaccagtcaacaattccac

SEQ ID NO: 458312 - DNA, 120 bp, Artificial Sequence
  ENSG00000157106_26 (sequence is synthesized)
gcaatctcctgaagacagatgctgtcctttggcagtgggccatatgggaagctgcacaattcactgttctttctaagctgagaaccccactgggcagagctcaagacaccttccagacaa

SEQ ID NO: 458313 - DNA, 120 bp, Artificial Sequence
  ENSG00000157106_27 (sequence is synthesized)
ttgaaggtatcattcgaagtctcgcagctcacacattaaaccctgatcaggatgttagtcagtggacaactgcagacaatgatgaaggccatggtaacaaccaacttagacttgttcttc

SEQ ID NO: 458314 - DNA, 120 bp, Artificial Sequence
  ENSG00000157106_28 (sequence is synthesized)
ttctgcagtatctggaaaatctggagaaattaatgtataatgcatacgagggatgtgctaatgcattaacttcacctcccaaggtcattagaacttttttctataccaatcgccaaactt

SEQ ID NO: 458315 - DNA, 120 bp, Artificial Sequence
  ENSG00000157106_29 (sequence is synthesized)
gtcaggactggctaacgcggattcgactctccatcatgagggtaggattgttggcaggccagcctgcagtgacagtgagacatggctttgacttgcttacagagatgaaaacaaccagcc

SEQ ID NO: 458316 - DNA, 120 bp, Artificial Sequence
  ENSG00000157106_30 (sequence is synthesized)
tatctcaggggaatgaattggaagtaaccattatgatggtggtagaagcattatgtgaacttcattgtcctgaagctatacagggaattgctgtctggtcatcatctattgttggaaaaa

SEQ ID NO: 458317 - DNA, 120 bp, Artificial Sequence
  ENSG00000157106_31 (sequence is synthesized)
atcttctgtggattaactcagtggctcaacaggctgaagggaggtttgaaaaggcctctgtggagtaccaggaacacctgtgtgccatgacaggtgttgattgctgcatctccagctttg

SEQ ID NO: 458318 - DNA, 120 bp, Artificial Sequence
  ENSG00000157106_32 (sequence is synthesized)
acaaatcggtgctcaccttagccaatgctgggcgtaacagtgccagcccgaaacattctctgaatggtgaatccagaaaaactgtgctgtccaaaccgactgactcttcccctgaggtta

SEQ ID NO: 458319 - DNA, 120 bp, Artificial Sequence
  ENSG00000157106_33 (sequence is synthesized)
taaattatttaggaaataaagcatgtgagtgctacatctcaattgccgattgggctgctgtgcaggaatggcagaacgctatccatgacttgaaaaagagtaccagtagcacttccctca

SEQ ID NO: 458320 - DNA, 120 bp, Artificial Sequence
  ENSG00000157106_34 (sequence is synthesized)
acctgaaagctgacttcaactatataaaatcattaagcagctttgagtctggaaaatttgttgaatgtaccgagcagttagaattgttaccaggagaaaatatcaatctacttgctggag

SEQ ID NO: 458321 - DNA, 120 bp, Artificial Sequence
  ENSG00000157106_35 (sequence is synthesized)
gatcaaaagaaaaaatagacatgaaaaaactgcttcctaacatgttaagtccggatccgagggaacttcagaaatccattgaagttcaattgttaagaagttctgtttgtttggcaactg

SEQ ID NO: 458322 - DNA, 120 bp, Artificial Sequence
  ENSG00000157106_36 (sequence is synthesized)
ctttaaacccgatagaacaagatcagaagtggcagtctataactgaaaatgtggtaaagtacttgaagcaaacatcccgcatcgctattggacctctgagactttctactttaacagttt

SEQ ID NO: 458323 - DNA, 120 bp, Artificial Sequence
  ENSG00000157106_37 (sequence is synthesized)
cacagtctttgccagttctaagtaccttgcagctgtattgctcatctgctttggagaacacagtttctaacagactttcaacagaggactgtcttattccactcttcagtgaagctttac

SEQ ID NO: 458324 - DNA, 120 bp, Artificial Sequence
  ENSG00000157106_38 (sequence is synthesized)
gttcatgtaaacagcatgacgtgaggccatggatgcaggcattaaggtatactatgtaccagaatcagttgttggagaaaattaaagaacaaacagtcccaattagaagccatctcatgg

SEQ ID NO: 458325 - DNA, 120 bp, Artificial Sequence
  ENSG00000157106_39 (sequence is synthesized)
aattaggtctaacagcagcaaaatttgctagaaaacgagggaatgtgtcccttgcaacaagactgctggcacagtgcagtgaagttcagctgggaaagaccaccactgcacaggatttag

SEQ ID NO: 458326 - DNA, 120 bp, Artificial Sequence
  ENSG00000157106_40 (sequence is synthesized)
tccaacattttaaaaaactatcaacccaaggtcaagtggatgaaaaatgggggcccgaacttgatattgaaaaaaccaaattgctttatacagcaggccagtcaacacatgcaatggaaa

SEQ ID NO: 458327 - DNA, 120 bp, Artificial Sequence
  ENSG00000157106_41 (sequence is synthesized)
tgttgagttcttgtgccatatctttctgcaagtctgtgaaagctgaatatgcagttgctaaatcaattctgacactggctaaatggatccaggcagaatggaaagagatttcaggacagc

SEQ ID NO: 458328 - DNA, 120 bp, Artificial Sequence
  ENSG00000157106_42 (sequence is synthesized)
tgaaacaggtttacagagctcagcaccaacagaacttcacaggtctttctactttgtctaaaaacatactcactctaatagaactgccatctgttaatacgatggaagaagagtatcctc

SEQ ID NO: 458329 - DNA, 120 bp, Artificial Sequence
  ENSG00000157106_43 (sequence is synthesized)
ggatcgagagtgaatctacagtgcatattggagttggagaacctgacttcattttgggacagttgtatcacctgtcttcagtacaggcacctgaagtagccaaatcttgggcagcgttgg

SEQ ID NO: 458330 - DNA, 120 bp, Artificial Sequence
  ENSG00000157106_44 (sequence is synthesized)
ccagctgggcttataggtggggcagaaaggtggttgacaatgccagtcagggagaaggtgttcgtctgctgcctagagaaaaatctgaagttcagaatctacttccagacactataactg

SEQ ID NO: 458331 - DNA, 120 bp, Artificial Sequence
  ENSG00000157106_45 (sequence is synthesized)
aggaagagaaagagagaatatatggtattcttggacaggctgtgtgtcggccggcggggattcaggatgaagatataacacttcagataactgagagtgaagacaacgaagaagatgaca

SEQ ID NO: 458332 - DNA, 120 bp, Artificial Sequence
  ENSG00000157106_46 (sequence is synthesized)
tggttgatgttatctggcgtcagttgatatcaagctgcccatggctttcagaacttgatgaaagtgcaactgaaggagttattaaagtgtggaggaaagttgtagatagaatattcagcc

SEQ ID NO: 458333 - DNA, 120 bp, Artificial Sequence
  ENSG00000157106_47 (sequence is synthesized)
tgtacaaactctcttgcagtgcatactttactttccttaaactcaacgctggtcaaattcctttagatgaggatgaccctaggctgcatttaagtcacagagtggaacagagcactgatg

SEQ ID NO: 458334 - DNA, 120 bp, Artificial Sequence
  ENSG00000157106_48 (sequence is synthesized)
acatgattgtgatggccacattgcgcctgctgcggttgctcgtgaagcatgctggtgagcttcggcagtatctggagcacggcttggagacaacacccactgcaccatggagaggaatta

SEQ ID NO: 458335 - DNA, 120 bp, Artificial Sequence
  ENSG00000157106_49 (sequence is synthesized)
ttccgcaacttttctcacgcttaaaccaccctgaagtgtatgtgcgccaaagtatttgtaaccttctctgccgtgtggctcaagattccccacatctcatattgtatcctgcaatagtgg

SEQ ID NO: 458336 - DNA, 120 bp, Artificial Sequence
  ENSG00000157106_50 (sequence is synthesized)
gtaccatatcgcttagtagtgaatcccaggcttcaggaaataaattttccactgcaattccaactttacttggcaatattcaaggagaagaattgctggtttctgaatgtgagggaggaa

SEQ ID NO: 458337 - DNA, 120 bp, Artificial Sequence
  ENSG00000157106_51 (sequence is synthesized)
gtcctcctgcatctcaggatagcaataaggatgaacctaaaagtggattaaatgaagaccaagccatgatgcaggattgttacagcaaaattgtagataagctgtcctctgcaaacccca

SEQ ID NO: 458338 - DNA, 120 bp, Artificial Sequence
  ENSG00000157106_52 (sequence is synthesized)
ccatggtattacaggttcagatgctcgtggctgaactgcgcagggtcactgtgctctgggatgagctctggctgggagttttgctgcaacaacacatgtatgtcctgagacgaattcagc

SEQ ID NO: 458339 - DNA, 120 bp, Artificial Sequence
  ENSG00000157106_53 (sequence is synthesized)
agcttgaagatgaggtgaagagagtccagaacaacaacaccttacgcaaagaagagaaaattgcaatcatgagggagaagcacacagctttgatgaagcccatcgtatttgctttggagc

SEQ ID NO: 458340 - DNA, 120 bp, Artificial Sequence
  ENSG00000157106_54 (sequence is synthesized)
atgtgaggagtatcacagcggctcctgcagaaacacctcatgaaaaatggtttcaggataactatggtgatgccattgaaaatgccctagaaaaactgaagactccattgaaccctgcaa

SEQ ID NO: 458341 - DNA, 120 bp, Artificial Sequence
  ENSG00000157106_55 (sequence is synthesized)
agcctgggagcagctggattccatttaaagagataatgctaagtttgcaacagagagcacagaaacgtgcaagttacatcttgcgtcttgaagaaatcagtccatggttggctgccatga

SEQ ID NO: 458342 - DNA, 120 bp, Artificial Sequence
  ENSG00000157106_56 (sequence is synthesized)
ctaacactgaaattgctcttcctggggaagtctcagccagagacactgtcacaatccatagtgtgggcggaaccatcacaatcttaccgactaaaaccaagccaaagaaacttctctttc

SEQ ID NO: 458343 - DNA, 120 bp, Artificial Sequence
  ENSG00000157106_57 (sequence is synthesized)
ttggatcagatgggaagagctatccttatcttttcaaaggactggaggatttacatctggatgagagaataatgcagttcctatctattgtgaataccatgtttgctacaattaatcgcc

SEQ ID NO: 458344 - DNA, 120 bp, Artificial Sequence
  ENSG00000157106_58 (sequence is synthesized)
aagaaacaccccggttccatgctcgacactattctgtaacaccactaggaacaagatcaggactaatccagtgggtagatggagccacacccttatttggtctttacaaacgatggcaac

SEQ ID NO: 458345 - DNA, 120 bp, Artificial Sequence
  ENSG00000157106_59 (sequence is synthesized)
aacgggaagctgccttacaagcacaaaaggcccaagattcctaccaaactcctcagaatcctggaattgtaccccgtcctagtgaactttattacagtaaaattggccctgctttgaaaa

SEQ ID NO: 458346 - DNA, 120 bp, Artificial Sequence
  ENSG00000157106_60 (sequence is synthesized)
cagttgggcttagcctggatgtgtcccgtcgggattggcctcttcatgtaatgaaggcagtattggaagagttaatggaggccacacccccgaatctccttgccaaagagctctggtcat

SEQ ID NO: 458347 - DNA, 120 bp, Artificial Sequence
  ENSG00000157106_61 (sequence is synthesized)
cttgcacaacacctgatgaatggtggagagttacgcagtcttatgcaagatctactgcagtcatgtctatggttggatacataattggccttggagacagacatctggataatgttctta

SEQ ID NO: 458348 - DNA, 120 bp, Artificial Sequence
  ENSG00000157106_62 (sequence is synthesized)
tagatatgacgactggagaagttgttcacatagattacaatgtttgctttgaaaaaggtaaaagccttagagttcctgagaaagtaccttttcgaatgacacaaaacattgaaacagcac

SEQ ID NO: 458349 - DNA, 120 bp, Artificial Sequence
  ENSG00000157106_63 (sequence is synthesized)
tgggtgtaactggagtagaaggtgtatttaggctttcatgtgagcaggttttacacattatgcggcgtggcagagagaccctgctgacgctgctggaggcctttgtgtacgaccctctgg

SEQ ID NO: 458350 - DNA, 120 bp, Artificial Sequence
  ENSG00000157106_64 (sequence is synthesized)
tggactggacagcaggaggcgaggctgggtttgctggtgctgtctatggtggaggtggccagcaggccgagagcaagcagagcaagagagagatggagcgagagatcacccgcagcctgt

SEQ ID NO: 458351 - DNA, 120 bp, Artificial Sequence
  ENSG00000157106_65 (sequence is synthesized)
tttcttctagagtagctgagattaaggtgaactggtttaagaatagagatgagatgctggttgtgcttcccaagttggacggtagcttagatgaatacctaagcttgcaagagcaactga

SEQ ID NO: 458352 - DNA, 120 bp, Artificial Sequence
  ENSG00000157106_66 (sequence is synthesized)
cagatgtggaaaaactgcagggcaaactactggaggaaatagagtttctagaaggagctgaaggggtggatcatccttctcatactctgcaacacaggtattctgagcacacccaactac

SEQ ID NO: 458353 - DNA, 120 bp, Artificial Sequence
  ENSG00000157106_67 (sequence is synthesized)
gtgaagctgaatgaatttgaacaatggataacacattatcaggctgcattcaataatttagaagcaacacagcttgcaagcttgcttcaagagataagcacacaaatggaccttggtcct

SEQ ID NO: 458354 - DNA, 120 bp, Artificial Sequence
  ENSG00000157106_68 (sequence is synthesized)
ccaagttacgtgccagcaacagcctttctgcagaatgctggtcaggcccacttgattagccagtgcgagcagctggagggggaggttggtgctctcctgcagcagaggcgctccgtgctc

SEQ ID NO: 458355 - DNA, 120 bp, Artificial Sequence
  ENSG00000157106_69 (sequence is synthesized)
cgtggctgtctggagcaactgcatcactatgcaaccgtggccctgcagtatccgaaggccatatttcagaaacatcgaattgaacagtggaagacctggatggaagagctcatctgtaac

SEQ ID NO: 458356 - DNA, 120 bp, Artificial Sequence
  ENSG00000157106_70 (sequence is synthesized)
accacagtagagcgttgtcaagagctctataggaaatatgaaatgcaatatgctccccagccacccccaacagtgtgtcagttcatcactgccactgaaatgaccctgcagcgatacgca

SEQ ID NO: 458357 - DNA, 120 bp, Artificial Sequence
  ENSG00000157106_71 (sequence is synthesized)
gcagacatcaacagcagacttattagacaagtggaacgcttgaaacaggaagctgtcactgtgccagtttgtgaagatcagttgaaagaaattgaacgttgcattaaagttttccttcat

SEQ ID NO: 458358 - DNA, 120 bp, Artificial Sequence
  ENSG00000157106_72 (sequence is synthesized)
gagaatggagaagaaggatctttgagtctagcaagtgttattatttctgccctttgtacccttacaaggcgtaacctgatgatggaaggtgcagcgtcaagtgctggagaacagctggtt

SEQ ID NO: 458359 - DNA, 120 bp, Artificial Sequence
  ENSG00000157106_73 (sequence is synthesized)
gatctgacttctcgggatggagcctggttcttggaggaactctgcagtatgagcggaaacgtcacctgcttggttcagttactgaagcagtgccacctggtgccacaggacttagatatc

SEQ ID NO: 458360 - DNA, 120 bp, Artificial Sequence
  ENSG00000157106_74 (sequence is synthesized)
ccgaaccccatggaagcgtctgagacagttcacttagccaatggagtgtatacctcacttcaggaattgaattcgaatttccggcaaatcatatttccagaagcacttcgatgtttaatg

SEQ ID NO: 458361 - DNA, 120 bp, Artificial Sequence
  ENSG00000157106_75 (sequence is synthesized)
aaaggggaatacacgttagaaagtatgctgcatgaactggacggtcttattgagcagaccaccgatggcgttcccctgcagactctagtggaatctcttcaggcctacttaagaaacgca

SEQ ID NO: 458362 - DNA, 120 bp, Artificial Sequence
  ENSG00000157106_76 (sequence is synthesized)
gctatgggactggaagaagaaacacatgctcattacatcgatgttgccagactactacatgctcagtacggtgaattaatccaaccgagaaatggttcagttgatgaaacacccaaaatg

SEQ ID NO: 458363 - DNA, 120 bp, Artificial Sequence
  ENSG00000157106_77 (sequence is synthesized)
tcagctggccagatgcttttggtagcattcgatggcatgtttgctcaagttgaaactgctttcagcttattagttgaaaagttgaacaagatggaaattcccatagcttggcgaaagatt

SEQ ID NO: 458364 - DNA, 120 bp, Artificial Sequence
  ENSG00000157106_78 (sequence is synthesized)
gacatcataagggaagccaggagtactcaagttaatttttttgatgatgataatcaccggcaggtgctagaagagattttctttctaaaaagactacagactattaaggagttcttcagg

SEQ ID NO: 458365 - DNA, 120 bp, Artificial Sequence
  ENSG00000157106_79 (sequence is synthesized)
ctctgtggtaccttttctaaaacattgtcaggatcaagttcacttgaagatcagaatactgtgaatgggcctgtacagattgtcaatgtgaaaaccctttttagaaactcttgtttcagt

SEQ ID NO: 458366 - DNA, 120 bp, Artificial Sequence
  ENSG00000157106_80 (sequence is synthesized)
gaagaccaaatggccaaacctatcaaggcattcacagctgactttgtgaggcagctcttgatagggctacccaaccaagccctcggactcacactgtgcagttttatcagtgctctgggt

SEQ ID NO: 458367 - DNA, 120 bp, Artificial Sequence
  ENSG00000157106_81 (sequence is synthesized)
gtagacatcattgctcaagtagaggcaaaggactttggtgccgaaagcaaagtttctgttgatgatctctgtaagaaagcggtggaacataacatccagatagggaagttctctcagctg

SEQ ID NO: 458368 - DNA, 120 bp, Artificial Sequence
  ENSG00000157106_82 (sequence is synthesized)
gttatgaacagggcaactgtgttagcaagttcttacgacactgcctggaagaagcatgacttggtgcgaaggctagaaaccagtatttcttcttgtaagacaagcctgcagcgggttcag

SEQ ID NO: 458369 - DNA, 120 bp, Artificial Sequence
  ENSG00000157106_83 (sequence is synthesized)
ctgcatattgccatgtttcagtggcaacatgaagatctacttatcaatagaccacaagccatgtcagtcacacctcccccacggtctgctatcctaaccagcatgaaaaagaagctgcat

SEQ ID NO: 458370 - DNA, 120 bp, Artificial Sequence
  ENSG00000157106_84 (sequence is synthesized)
accctgagccagattgaaacttctattgcaacagttcaggagaagctagctgcacttgaatcaagtattgaacagcgactcaagtgggcaggtggtgccaaccctgcattggcccctgta

SEQ ID NO: 458371 - DNA, 120 bp, Artificial Sequence
  ENSG00000157106_85 (sequence is synthesized)
ctacaagattttgaagcaacgatagctgaaagaagaaatcttgtccttaaagagagccaaagagcaagtcaggtcacatttctctgcagcaatatcattcattttgaaagtttacgaaca

SEQ ID NO: 458372 - DNA, 120 bp, Artificial Sequence
  ENSG00000157106_86 (sequence is synthesized)
agaactgcagaagccttaaacctggatgcggcgttatttgaactaatcaagcgatgtcagcagatgtgttcgtttgcatcacagtttaacagttcagtgtctgagttagagcttcgttta

SEQ ID NO: 458373 - DNA, 120 bp, Artificial Sequence
  ENSG00000157106_87 (sequence is synthesized)
ttacagagagtggacactggtcttgaacatcctattggcagctctgaatggcttttgtcagcacacaaacagttgacccaggatatgtctactcagagggcaattcagacagagaaagag

SEQ ID NO: 458374 - DNA, 120 bp, Artificial Sequence
  ENSG00000157106_88 (sequence is synthesized)
cagcagatagaaacggtctgtgaaacaattcagaatctggttgataatataaagactgtgctcactggtcataaccgacagcttggagatgtcaaacatctcttgaaagctatggctaag

SEQ ID NO: 458375 - DNA, 120 bp, Artificial Sequence
  ENSG00000157106_89 (sequence is synthesized)
gatgaagaagctgctctggcagatggtgaagatgttccctatgagaacagtgttaggcagtttttgggtgaatataaatcatggcaagacaacattcaaacagttctatttacattagtc

SEQ ID NO: 458376 - DNA, 120 bp, Artificial Sequence
  ENSG00000157106_90 (sequence is synthesized)
caggctatgggtcaggttcgaagtcaagaacacgttgaaatgctccaggaaatcactcccaccttgaaagaactgaaaacacaaagtcagagtatctataataatttagtgagttttgca

SEQ ID NO: 458377 - DNA, 120 bp, Artificial Sequence
  ENSG00000157106_91 (sequence is synthesized)
tcacccttagtcaccgatgcaacaaatgaatgttcgagtccaacgtcatctgctacttatcagccatccttcgctgcagcagtccggagtaacactggccagaagactcagcctgatgtc

SEQ ID NO: 458378 - DNA, 120 bp, Artificial Sequence
  ENSG00000157106_92 (sequence is synthesized)
atgtcacagaatgctagaaagctgatccaaaaaaatcttgctacatcagctgatactccaccaagcaccgttccaggaactggcaagagtgttgcttgtagtcctaaaaaggcagtcaga

SEQ ID NO: 458379 - DNA, 120 bp, Artificial Sequence
  ENSG00000157106_93 (sequence is synthesized)
gaccctaaaactgggaaagcggtgcaagagagaaactcctatgcagtgagtgtgtggaagagagtgaaagccaagttagagggccgagatgttgatccgaataggaggatgtcagttgct

SEQ ID NO: 458380 - DNA, 120 bp, Artificial Sequence
  ENSG00000157106_94 (sequence is synthesized)
gaacaggttgactatgtcattaaggaagcaactaatctagataacttggctcagctgtatgaaggttggacagcctgggtgtgaatggcaagacagtagatgagtctggttaagcgaggt

SEQ ID NO: 458381 - DNA, 120 bp, Artificial Sequence
  ENSG00000157106_95 (sequence is synthesized)
cagacatccaccagaatcaactcagcctcaggcatccaaagccacaccacagtcggtggtgatgcaactgggggcttactctgaggaaacctaggaaatctcggtgcactaggaagtgaa

SEQ ID NO: 458382 - DNA, 120 bp, Artificial Sequence
  ENSG00000157106_96 (sequence is synthesized)
tcccgcaggacagctgcactcagggatacgcccaacaccatggcctgcaaccccagggtcaagggtgaaggaaagcaagctcaccgcctgaacacggagattgtctttctgccacagaac

SEQ ID NO: 458383 - DNA, 120 bp, Artificial Sequence
  ENSG00000157106_97 (sequence is synthesized)
agcagcagacgtgtcgggaggttagctgcggaaagaaatcgggatgccgcggagcacagagtgatttggaactccattccacctgaccctgtgtgtacaatccaggaaaaaaacaaaccc

SEQ ID NO: 458384 - DNA, 120 bp, Artificial Sequence
  ENSG00000157106_98 (sequence is synthesized)
cactcagaaacagagaaaactggggtcgcgaagaaatcacagccaaggaagatttgatgcattcagattctcgtgtaacacttgttgcttggcaacagtactggttgggttgaccagtaa

SEQ ID NO: 458385 - DNA, 120 bp, Artificial Sequence
  ENSG00000157106_99 (sequence is synthesized)
gtagaaaaaggctaaaggctatgcgatatgaatttcagaaatggactgaaaatggagagctatgtaacagatacactacagtagaagaacttacttctgaaatgaagggaaaaaaaccac

SEQ ID NO: 458386 - DNA, 120 bp, Artificial Sequence
  ENSG00000157106_100 (sequence is synthesized)
cccatcgttccctactcctccccaccacttacccgttccccctttacctaatctagtagattagccatctttcaaattcacttttatttcagtccttatatttcatatacttccgtctcg

SEQ ID NO: 458387 - DNA, 120 bp, Artificial Sequence
  ENSG00000157106_101 (sequence is synthesized)
atgctgttaacaacttctgataacatggaaaattcaaggattgtttaaaggtctgatgatcacacacaaaatgtaattccggttatttaagtcatttctgtgattctatcatgtacagtt

SEQ ID NO: 458388 - DNA, 120 bp, Artificial Sequence
  ENSG00000157106_102 (sequence is synthesized)
tccagaattgtcactgtgcattcaaaagtaatgaatctaacagacatttgatttaatgtacactcccttttgcttatagtgtgcattttttttggaggtcattcaaattttccctcttct

SEQ ID NO: 458389 - DNA, 120 bp, Artificial Sequence
  ENSG00000157106_103 (sequence is synthesized)
gtgatagctgtagtttctttcatagaaagtagctaatccagtgtaatcttttacctttttaaaaaccaagatagagtatctattagagttttacattgttgatgatagattaacaataaa

SEQ ID NO: 458390 - DNA, 120 bp, Artificial Sequence
  ENSG00000157106_104 (sequence is synthesized)
gtgatgttctggtggaggtagactgaaatttttttaattcatgtttttcatttgatacttttaatttacacttagtaaattaaaagttgtttaatttacttggcattttaggacatgtac

SEQ ID NO: 458391 - DNA, 120 bp, Artificial Sequence
  ENSG00000157106_105 (sequence is synthesized)
atgaaacagtgaaaatgagatccaccaacatcttttattaagttcagttattagtctgtgaagtgctttactttttgcacaattttaatagcttgctattcagtaatacattatagtgaa

SEQ ID NO: 458392 - DNA, 120 bp, Artificial Sequence
  ENSG00000157106_106 (sequence is synthesized)
ttcatgatcaaggtttccttaaatttagcattgcatttcagtactgactgtgtaagctaaattgctgatccaaaataaaaacccagactagaatagggttcttaaaatcaagtatcaata

SEQ ID NO: 458393 - DNA, 88 bp, Artificial Sequence
  ENSG00000157106_107 (sequence is synthesized)
gtcaaaaataaatgactagataaaaaaaaaaattgtttgagtacattttccctgcattttagagattaggacagtggtcactttctag

SEQ ID NO: 458394 - DNA, 120 bp, Artificial Sequence
  ENSG00000157106_108 (sequence is synthesized)
tccctgcattttagagattaggacagtggtcactttctagttgccgtcttcacagacaaacttgaaaggtattaaggaaaaaattccacatagctctgggccttttttgtattctgattg

SEQ ID NO: 458395 - DNA, 120 bp, Artificial Sequence
  ENSG00000157106_109 (sequence is synthesized)
ccacgttaatctgtaatcgttaagtacccatgaaagaatgtgtttcagtatcagtgcttttttggtactttaacaagtattgtaggcacggtggatttttttgaaatacccatgtgtcca

SEQ ID NO: 458396 - DNA, 120 bp, Artificial Sequence
  ENSG00000157106_110 (sequence is synthesized)
atagcaagttaaggaacctagcgcatcaaattttgttttcttcattcatttggaaccttattttcgcaaaaaacctagctggaataataatgccatattgtattttgcacactgctttat

SEQ ID NO: 458397 - DNA, 120 bp, Artificial Sequence
  ENSG00000157106_111 (sequence is synthesized)
tttctagaggctctgggagcaaattacattcatcacattacctctgctctctcaagattaaagtctttcagcaacattctttattgtcatcataaggaaaaacttttatcgcaatgatag

SEQ ID NO: 458398 - DNA, 120 bp, Artificial Sequence
  ENSG00000157106_112 (sequence is synthesized)
tcagttcacattagtttagcactatagatagtattcagaaattgctttctctttggtaaagaagataaataggtgaattttattgcctgtgttttcaggcttcagaggtacctggcacct

SEQ ID NO: 458399 - DNA, 120 bp, Artificial Sequence
  ENSG00000157106_113 (sequence is synthesized)
tactcaagcaaaaacaaaaaacagctttacttcaaaagcatgtgcctctggtaaattatccatcacttttgttttaaagtggtccctccaagaataatgtggcatacacagtgggtttgg

SEQ ID NO: 458400 - DNA, 120 bp, Artificial Sequence
  ENSG00000157106_114 (sequence is synthesized)
ttgtaaggcagatgtaatagatgacttcaaaagcctgctccttactgcactctggacaaggccctggtctgtatagtttggcttcctctgttaagtcattctacaaggtgacttgccatt

SEQ ID NO: 458401 - DNA, 120 bp, Artificial Sequence
  ENSG00000157106_115 (sequence is synthesized)
tgaactttcgtaagagacctcagcagttagactgagaaaagttagagtgctgtagttatgaagtcatacatttttgataaaatacctgtggaaaaccagggatcctctcctgtttctctc

SEQ ID NO: 458402 - DNA, 120 bp, Artificial Sequence
  ENSG00000157106_116 (sequence is synthesized)
tcttgcctccccctttccctccattcctctgtcgcctccccctctcctccactttctttaagaatcagggggtacagaataacctacaaacaacctcttcaaagtacccttggaaattga

SEQ ID NO: 458403 - DNA, 120 bp, Artificial Sequence
  ENSG00000157106_117 (sequence is synthesized)
agttcaatcttaagttttttgctgtctttaatttactagaattgcctaatttttagttgatttctctacagagcttagcttgtgtagttatttctcttttactgttgctttggtgtgtct

SEQ ID NO: 458404 - DNA, 120 bp, Artificial Sequence
  ENSG00000157106_118 (sequence is synthesized)
tgaagtttgattgattatttttggtcattgagttcttagtgtagtttgctagatgattattaagattcttttgtgtctgacacttgtggtgagttgcttttgaaatctgttgagatttcc

SEQ ID NO: 458405 - DNA, 120 bp, Artificial Sequence
  ENSG00000157106_119 (sequence is synthesized)
atgtgagaactgataatcaggctcttgatctgcttccctaaattacttttttagagcccaaaccccaggtttagggtgagggtttgtaatacaaagaaacacttccatcacttctgccct

SEQ ID NO: 458406 - DNA, 120 bp, Artificial Sequence
  ENSG00000157106_120 (sequence is synthesized)
taacccttgcctctattacctaagcttagtaagtagttttcttaatattgtccaatgtttggtgttatctgcattgttttttgtttttttaattgtggttgttctgacgtgtgaaattta

SEQ ID NO: 458407 - DNA, 120 bp, Artificial Sequence
  ENSG00000157106_121 (sequence is synthesized)
aggaaagagccattttttaaaaatgccgagcagggcaatgcaagtacagccaaatattagacttgatgtgcaatcttcggtcctttttaatctggggtattataggcagtactttaaatt

SEQ ID NO: 458408 - DNA, 120 bp, Artificial Sequence
  ENSG00000157106_122 (sequence is synthesized)
gcaaagtcttccgggcctattttcctctacatttttgtaattaactctgggggcttacttgttttggcagtactgaaatcaaaggagctggttcttcttttctcccaattattttcatat

SEQ ID NO: 458409 - DNA, 120 bp, Artificial Sequence
  ENSG00000157106_123 (sequence is synthesized)
gaaagcacctacaattagcctgttagtcctattcagatacatcaaatatcagtgaatgctttactattcgcacatttaagcatctttgttttacataaaattagagtatgaaaaccagtg

SEQ ID NO: 458410 - DNA, 120 bp, Artificial Sequence
  ENSG00000157106_124 (sequence is synthesized)
ttcaattttttatcttgttgagcttgtaaaatgccagcaatttaaaactaggacttttccccccataagccaaggaggtagaattactaatacaagggttaaagaaggtagattttgttt

SEQ ID NO: 458411 - DNA, 120 bp, Artificial Sequence
  ENSG00000157106_125 (sequence is synthesized)
tcaatatttgggtaatattagaaagattcttcccacagggaagaactagcaagtgtcccaattttttccaaacgttggggaggggaaaattcactgtatcatgaaaccctaagggtttgt

SEQ ID NO: 458412 - DNA, 120 bp, Artificial Sequence
  ENSG00000157106_126 (sequence is synthesized)
tgcacttcctgctttttaggcctggataacagtatcaccatccttatttacagaagggtaaaactgactcttaatgagaaaagctttataagttcaagggctgtaaaatatgaactactt

SEQ ID NO: 458413 - DNA, 120 bp, Artificial Sequence
  ENSG00000157106_127 (sequence is synthesized)
agggtcgtttgccttccatgggaacttggctagacttagaaaaagctgtttgttgtgctaatgtaaaagtgtcatacaatttagaagatttttgaagatggtaaacttagaagaattcta

SEQ ID NO: 458414 - DNA, 120 bp, Artificial Sequence
  ENSG00000157106_128 (sequence is synthesized)
tgttctgaaatgcacacttttagaatgtttttctttgaaaacaggctaatagttttttctttttttgacaaagtttcagctcctctttaaagttattgtgtcatttttctggtttaaatt

SEQ ID NO: 458415 - DNA, 120 bp, Artificial Sequence
  ENSG00000157106_129 (sequence is synthesized)
tcccttatatttccacctgtaatgtcagtggcaacaacatcatacttcacttacttgttaatttactttttacccttattctaagagcaagttgagttgaactgaatcttccttgtctta

SEQ ID NO: 458416 - DNA, 120 bp, Artificial Sequence
  ENSG00000157106_130 (sequence is synthesized)
gtaacaatgtataaatagtggcttttctgtacaaaaggttgtaatgcctcctgatggatataattttgtgattgtatttaaaagttgaataaatcacaccagcttcctgaaaatgttcat

SEQ ID NO: 458417 - DNA, 120 bp, Artificial Sequence
  ENSG00000157106_131 (sequence is synthesized)
aatgcatcttttggaaaacaaatacatgcctactttgtgcatatttgcattaacatggcaaagattgtatgaaatacctgtttttcagaaaataaaggttcagtctcaaaagatacagca

SEQ ID NO: 458418 - DNA, 120 bp, Artificial Sequence
  ENSG00000157106_132 (sequence is synthesized)
acatagattacaatgtttgctttgaaaaaggtaatataaaagtagactttacatttatgagggccaaatgttttttggtgaaagggcaaaaatataatgatttgtcttttcaaggtaaaa

SEQ ID NO: 458419 - DNA, 120 bp, Artificial Sequence
  ENSG00000157106_133 (sequence is synthesized)
gagccgcagagccccggggtctcggctgagcagcggcggcggcggcggcggcaccaagtatccgcggagctggaatgactggcaacccagccgccacgtgagagctcttctaacctctgt

SEQ ID NO: 458420 - DNA, 120 bp, Artificial Sequence
  ENSG00000157106_134 (sequence is synthesized)
tcctttctgtgacccccacgtgttaatattgaaaaaaacaaaacaaaactccagctaaggcattgctctgactctaggcagaacattcattagtggagcatgagatgagattgtgtgact

SEQ ID NO: 458421 - DNA, 120 bp, Artificial Sequence
  ENSG00000157106_135 (sequence is synthesized)
gttgatgggatcgacccacgctggtcttgggcgatggaagttttccctaagtgcaaggccggttactctggtgaatcgtaattcatacctggacacttgagtgaactctttgggcaccca

SEQ ID NO: 458422 - DNA, 120 bp, Artificial Sequence
  ENSG00000157106_136 (sequence is synthesized)
ttagaagtctagagaatttcctcatttatggaggatttgatctcagaccgttttggggcttagtgagatttgaatatattaggaacattaactttttaaataaatgtagtttcctgtctt

SEQ ID NO: 458423 - DNA, 120 bp, Artificial Sequence
  ENSG00000157106_137 (sequence is synthesized)
tttgatcaatgggagggcagctgtgcctaatttaggactgatttattctaatctctcttaataaatgcttgtattcagagtctgtttggaatttaacccaatgcttagaactccttaaat

SEQ ID NO: 458424 - DNA, 120 bp, Artificial Sequence
  ENSG00000157106_138 (sequence is synthesized)
atacagaaatatattttaggggtaattgattcatggaactctcctactttggagcacaattgttataattgtccagaaactggccaaataatgtagaacgcgcaagttgttgggaagccc

SEQ ID NO: 458425 - DNA, 120 bp, Artificial Sequence
  ENSG00000157106_139 (sequence is synthesized)
cccagcactttgggaggccaaagcagaaggattgcttgcatccaggaattctggcacagcttgggcaatgtagtgagaccccatctgtacaaaaagtcaaaaattagcttggtgtagtgg

SEQ ID NO: 458426 - DNA, 87 bp, Artificial Sequence
  ENSG00000157106_140 (sequence is synthesized)
gaggaggatcgattaagcccaggaacttgaggttgaagagagctctgattgtgccactgcactcagccaaggtgacaaaaaaaggcc

SEQ ID NO: 458427 - DNA, 120 bp, Artificial Sequence
  ENSG00000157106_141 (sequence is synthesized)
attgtgccactgcactcagccaaggtgacaaaaaaaggccctgtctccaaaaaagaaaaaaaaataagggctttgctttattatattattttcttagagtacattcatcagttataatct

SEQ ID NO: 458428 - DNA, 87 bp, Artificial Sequence
  ENSG00000157106_142 (sequence is synthesized)
attattttcttagagtacattcatcagttataatctgtgctttcattttagtgtctatttacttttatttttaatgcaacaggatga

SEQ ID NO: 458429 - DNA, 120 bp, Artificial Sequence
  ENSG00000157106_143 (sequence is synthesized)
acctcttgggctcaggtgatcctcccacctcagccccccaggtagctaggactacaggcgtgcgtcaccacacctggctaattttttgtattattttgtagagatggagttttgccatgt

SEQ ID NO: 458430 - DNA, 84 bp, Artificial Sequence
  ENSG00000157106_144 (sequence is synthesized)
atgagccactctaccaggcctctatttttactggttgatagctagtctcagtgtagctttacttgtgttttttgaggaaacatt

SEQ ID NO: 458431 - DNA, 120 bp, Artificial Sequence
  ENSG00000157106_145 (sequence is synthesized)
ctctaccaggcctctatttttactggttgatagctagtctcagtgtagctttacttgtgttttttgaggaaacattgctctatgcaccagattctttcttttttttcttttcttttcttt

SEQ ID NO: 458432 - DNA, 89 bp, Artificial Sequence
  ENSG00000157106_146 (sequence is synthesized)
tcagcctcccgactatctgggactacagatgcatgccaccatgcctggctaacctttgtattttttggagagaaggggtctcactacat

SEQ ID NO: 458433 - DNA, 120 bp, Artificial Sequence
  ENSG00000157106_147 (sequence is synthesized)
tgcatgccaccatgcctggctaacctttgtattttttggagagaaggggtctcactacattgtctaggctggcctcaaattcttggtctcaagtaatcctcctgccttgccctcccaaag

SEQ ID NO: 458434 - DNA, 68 bp, Artificial Sequence
  ENSG00000157106_148 (sequence is synthesized)
aaagtgctgggattacaggtgtgagcaatcatgcctggcctcctttaatttcttttttttttttttgt

SEQ ID NO: 458435 - DNA, 120 bp, Artificial Sequence
  ENSG00000157106_149 (sequence is synthesized)
ctggcctcctttaatttcttaaccataaatatcctcccctcacttttattatggacattctgaagcacataaaaatagggagcatagtataataaatttgtacatatttaacactcagct

SEQ ID NO: 458436 - DNA, 120 bp, Artificial Sequence
  ENSG00000157106_150 (sequence is synthesized)
tctataattagaaacaaatggcccatctggtttcatctaggcctctttgctatcctttcatctccaactggagtattttaaagcaaattctagatgacattctgctgagcatttctgcca

SEQ ID NO: 458437 - DNA, 120 bp, Artificial Sequence
  ENSG00000157106_151 (sequence is synthesized)
gaattacacctctttttactaatgtgaaaaaatgcccatgataactgtaaaatacgtgtgtcctatttaggtgtctaaacactttaatgtcacagtattaaggccttaaaatatagctta

SEQ ID NO: 458438 - DNA, 120 bp, Artificial Sequence
  ENSG00000157106_152 (sequence is synthesized)
gatatatttttctaaattaaaagactattttttagatatacagaaaattgagcagaaaacaatgagttcccatataccttcttcatcccaacagtttccccctcattaacatattgtgtt

SEQ ID NO: 458439 - DNA, 120 bp, Artificial Sequence
  ENSG00000157106_153 (sequence is synthesized)
agtgtggtacatttattacaaaggagcgaatatggatatattattattaactaattttatagtttactttgtgttatgtattctatggactttaacatgtgtaatgacatgtatccccta

SEQ ID NO: 458440 - DNA, 120 bp, Artificial Sequence
  ENSG00000157106_154 (sequence is synthesized)
ttaccagtatcatacaggatagtttcacttccctaaaaatcttttatgttccacccactccttcctcgttccctctccccactcctccctccctccatcttaagcccatggcaatccctg

SEQ ID NO: 458441 - DNA, 120 bp, Artificial Sequence
  ENSG00000157106_155 (sequence is synthesized)
atctttttactgtctccgtcgttttgccttttccagaatgccatgtagttggagtcatatagtatgtagccttttcaattggcttctttcacttatcagtgtgcatttaaggtttctcca

SEQ ID NO: 458442 - DNA, 120 bp, Artificial Sequence
  ENSG00000157106_156 (sequence is synthesized)
atatttatgtatttcactgtcatgtcaagatgtctgcagaatcactgtgtgtaacaaacagccatatttaagacatgcctggataaataaaattggtaggaatgttttcttggcattata

SEQ ID NO: 458443 - DNA, 120 bp, Artificial Sequence
  ENSG00000157106_157 (sequence is synthesized)
gagaaaattaaaggtgttctttttttaaattttgctttattgaggtttatattacacattctaagtgtatggtttgatgagttctaacatgtcttcacttgtgtgaccaccaatacgatc

SEQ ID NO: 458444 - DNA, 120 bp, Artificial Sequence
  ENSG00000157106_158 (sequence is synthesized)
gagatacagaacaccgtcttaccccagaaggttcccttgggatcatctcctcatttgcccctgtcagcagttactgatttgctttctgtcactatggattagacttgtctttactaaagt

SEQ ID NO: 458445 - DNA, 120 bp, Artificial Sequence
  ENSG00000157106_159 (sequence is synthesized)
ttcatgtacgtgaaatcataacaacatgttctcttgtgtttggcttctcttgctcaacatgatatttttaaggttcacccatattgcatgtatcaggaatacaatcctttttattattga

SEQ ID NO: 458446 - DNA, 120 bp, Artificial Sequence
  ENSG00000157106_160 (sequence is synthesized)
aatgggaagacaaagatcttttgtattggcactaccagctgtgtccctctgagggggtaatttttgccttttgaagacgttgggagggttaaagttcaggaaattatttttaaaactgtt

SEQ ID NO: 458447 - DNA, 120 bp, Artificial Sequence
  ENSG00000157106_161 (sequence is synthesized)
tcagtgaatatttagaaaaatattagtggagatagaattaattgctccgcagtggagtggctctctttctacattttctttttttttgagacgagtctcgctctgtcccccaggctggag

SEQ ID NO: 458448 - DNA, 120 bp, Artificial Sequence
  ENSG00000157106_162 (sequence is synthesized)
agagtgagaaacagtgtcttcttcctggctggagagcccgtgtcatgaaaatggggacagggtaagggatctgaaaggagcagcatagaagctgggaggatgaggcctgtcttcctggca

SEQ ID NO: 458449 - DNA, 120 bp, Artificial Sequence
  ENSG00000157106_163 (sequence is synthesized)
ttgatgctgcaggactacaggaaagaatttcagaggtgtcattatttttcatataagcagatgaaagagaagaagtctttgaaaaaagagaagtaggtgaaaaagggagagacggaggga

SEQ ID NO: 458450 - DNA, 120 bp, Artificial Sequence
  ENSG00000157106_164 (sequence is synthesized)
tgccagcagtgaaagaagccaggactgagatacaagattgtgatgctgggagagctgtgcaagggctcatgctgtaggtgaggagtgaggctgcacagggagctcactggcagcttggag

SEQ ID NO: 458451 - DNA, 120 bp, Artificial Sequence
  ENSG00000157106_165 (sequence is synthesized)
agaactgggtgtcaaagttgtcctgcagaggtctactgtcagtgtgttaggatctgaagagaacaggctgcaacacatgaaaacaggaaggagacacaggggcgagtcagctccactgaa

SEQ ID NO: 458452 - DNA, 120 bp, Artificial Sequence
  ENSG00000157106_166 (sequence is synthesized)
agtctgtagctgtgactttctggtttgccactccaatttgagtactaattaagtggtagtcacatcttcaacataaaaaccaaaataatggcatcctcgtggaaggaattttgtcagaaa

SEQ ID NO: 458453 - DNA, 120 bp, Artificial Sequence
  ENSG00000157106_167 (sequence is synthesized)
aatgctgtgtactttgctgtcttcctaggatttgttctgtttttgtttgtttttttttaatggttccacaggctgcataggaatacaagctaaccaatattttaattacagatcattaag

SEQ ID NO: 458454 - DNA, 120 bp, Artificial Sequence
  ENSG00000157106_168 (sequence is synthesized)
tataactgagtaagtttactcttacggaggtaaatgtacattgtgtatatcatgtgataaacatacatggggtgaagagggctggaaggagagttactagattactaaatactagtgcta

SEQ ID NO: 458455 - DNA, 120 bp, Artificial Sequence
  ENSG00000157106_169 (sequence is synthesized)
atagcttcattttagttgtagaagtcatatgatatatgaatgctgcttgccaacataaactgaggttgaaatgaaataaaatgtaaaaatccccaaaagcaaatgtcttgacttgctaat

SEQ ID NO: 458456 - DNA, 120 bp, Artificial Sequence
  ENSG00000157106_170 (sequence is synthesized)
atcattttattatagagcaggctgctcctcttactgccccctaactttggatgtcagtttgatagcatcttatcaattgctttattctttgagtggttatgaattgtaatttttattaat

SEQ ID NO: 458457 - DNA, 120 bp, Artificial Sequence
  ENSG00000157106_171 (sequence is synthesized)
aaagaccttatttttttagttttttgaaataggatttgtagctgggcaagctagtagatccagaaatctaacatgctgttttcaggcagtttttcatttgagaagtacatggggcagatg

SEQ ID NO: 458458 - DNA, 120 bp, Artificial Sequence
  ENSG00000157106_172 (sequence is synthesized)
gaagaacctgagataatctcaaggatggcaaattgctcagttttttccttctaatttcggggtgggaggtggtgtatgtaaagacagttcctttaggcggattacgtaaattttagattt

SEQ ID NO: 458459 - DNA, 120 bp, Artificial Sequence
  ENSG00000157106_173 (sequence is synthesized)
gctgcaaacaaagatctctcctcttcatcctaaatggggtaaagttcaaccagagatgggggcttctgaatgaatgatgatcttcgagaacttcattataaagcattagttgtaatgttt

SEQ ID NO: 458460 - DNA, 120 bp, Artificial Sequence
  ENSG00000157106_174 (sequence is synthesized)
ttctgcagtctgctttatagtaaatgtgctgtgacttttttttttgtaatgtgctttattaagtatactgataaattagacttaatattctgaagaagatttcccttcaaaacaaaaggc

SEQ ID NO: 458461 - DNA, 120 bp, Artificial Sequence
  ENSG00000157106_175 (sequence is synthesized)
gcagtcttggacttaagacttgctatatatctgcaaacatatcaacagcctgttttatgttgagtaattttggtttttctctggcaggactgtcttattccactcttcagtgaagcttta

SEQ ID NO: 458462 - DNA, 120 bp, Artificial Sequence
  ENSG00000157106_176 (sequence is synthesized)
ctattgtatgtatataccccagtttatttctcccttcatcctttgctagattttggggttttttcacattgcgctattcagtataaacctgctctcaacattcatgtgcaagtctttgag

SEQ ID NO: 458463 - DNA, 120 bp, Artificial Sequence
  ENSG00000157106_177 (sequence is synthesized)
tggacgtatatttgtgtttctctcgagtgaatgcaccttgttgggtcacgtagcttaacttaaaaaaattttaatcactgtggtgcatatgtagtgattattagtgattatctcataatt

SEQ ID NO: 458464 - DNA, 120 bp, Artificial Sequence
  ENSG00000157106_178 (sequence is synthesized)
ttatttacattttcttgattaatgatgctgagtgtatttcatttgtattttagtttgcaaatgtttgttcaaattcttcacccatttttaatgaagacataagacttatttttgtgttct

SEQ ID NO: 458465 - DNA, 120 bp, Artificial Sequence
  ENSG00000157106_179 (sequence is synthesized)
gaacctaagttctttgtcacgtaaaatgcgctatgaatattgagttttaaatactccaaatgaatggctagagaattactatttgtataaatatttatatgtcaaagggatgctaacaat

SEQ ID NO: 458466 - DNA, 120 bp, Artificial Sequence
  ENSG00000157106_180 (sequence is synthesized)
ttactttattgctctaaaatagaaaagttgccagaatgctgtgcagttttagtggaaaacatgatagctggtgttactgagtaaatttgagtgttaaatgtcaatgtaagctaacagcca

SEQ ID NO: 458467 - DNA, 120 bp, Artificial Sequence
  ENSG00000157106_181 (sequence is synthesized)
agatagggaccactgcagagtggttacttgaagctgtgactcaactggtccttcactgccaaatatacctggggttggatcattggcctgatgtttgcaaattgaggaaccttagggcaa

SEQ ID NO: 458468 - DNA, 120 bp, Artificial Sequence
  ENSG00000157106_182 (sequence is synthesized)
atcagtgaacttctgaactgctttcctcttcagttatatggggatttccccacttttgagatacttgtaaggattatatgagatgaagagatgagacaaggtatataaaagtcctagcac

SEQ ID NO: 458469 - DNA, 120 bp, Artificial Sequence
  ENSG00000157106_183 (sequence is synthesized)
agagcgtgtcatataatatggcttcacaagtaccctcatctcctttccagtcctgtttttttttttttttgagaccatctcactctgttgcccaggctggagtgcctcttcatttttatt

SEQ ID NO: 458470 - DNA, 120 bp, Artificial Sequence
  ENSG00000157106_184 (sequence is synthesized)
tctttattcagcaagtattgatcaaatgtgctttgtactaggtactgagctctacgttgtgatataatggtgatcaaggagattgtagattctggcagggaaaactgacatcaaacacgg

SEQ ID NO: 458471 - DNA, 120 bp, Artificial Sequence
  ENSG00000157106_185 (sequence is synthesized)
attctggcagggaaaactgacatcaaacacggtgacccaacatagcaagaccctgtctctgctagaagaatttaaaaaatcacccgggtgtgggctgggcgcggtggctcacgcctgtag

SEQ ID NO: 458472 - DNA, 120 bp, Artificial Sequence
  ENSG00000157106_186 (sequence is synthesized)
atggaaaacaatgcctcagctcctttgaatataatcagtgatatttgaggttccagggttaaataccgcatttttctttctgacattcataccttaaaatatttgaagaaaataaactat

SEQ ID NO: 458473 - DNA, 120 bp, Artificial Sequence
  ENSG00000157106_187 (sequence is synthesized)
ttcattgttgtcagaaatgtagttcttttattttcctgcccctctcccctttctaagtttctagaatgtcaagtaggtagaacatagatgctccttttaggatcttttgctgtgaaatgg

SEQ ID NO: 458474 - DNA, 120 bp, Artificial Sequence
  ENSG00000157106_188 (sequence is synthesized)
tccacaggtgaatggcagtaatatcttaaaatgattggccccctctctctttgtttccatcaaggatacagttgatatattagttggatggcatatagatcatactcagaaaccttcgct

SEQ ID NO: 458475 - DNA, 120 bp, Artificial Sequence
  ENSG00000157106_189 (sequence is synthesized)
cacgcagcaggtatctggtaagtcttgcagcctataccagttatttaaatactgtcggggaggagcagtggtcccccagtgaccatctatcaataccatttctttaataatgcaagaaaa

SEQ ID NO: 458476 - DNA, 120 bp, Artificial Sequence
  ENSG00000157106_190 (sequence is synthesized)
ctaattcagagaaatgttttattgtaaatgaacattacttgttagctaaatatgtattttcagaggaaattactagtaggtgggtacagtaagtacagacaggacttacccaagttattt

SEQ ID NO: 458477 - DNA, 120 bp, Artificial Sequence
  ENSG00000157106_191 (sequence is synthesized)
gtagtttgtactggtaggaaagtgtatggtaagaatatattgtagtggcaataccctgaagtggacaatggaagatccaagttatttgtcacattttattgtttttctggtaattttttt

SEQ ID NO: 458478 - DNA, 120 bp, Artificial Sequence
  ENSG00000157106_192 (sequence is synthesized)
tcagttattttataaatgcttttgaacttgatccctagttgagctccttccccctcagagtctgatacaaattaccctttattgtcagagtatttgctcattagtcctgtgaactctaca

SEQ ID NO: 458479 - DNA, 120 bp, Artificial Sequence
  ENSG00000157106_193 (sequence is synthesized)
ttcagactcattgcttcctccaggtagaggagcttgtaccataatattctgtgtccatttatgttagtttaatgaaatcttgcgaatttaggaaaataaaagaactgctcatacttccat

SEQ ID NO: 458480 - DNA, 120 bp, Artificial Sequence
  ENSG00000157106_194 (sequence is synthesized)
tttgtttgtaactgagttaacttgtgttttcatcaactattttttaaagccagtagtagtagtttgaatttcatacacagagaagctaaggcttaattagattcctttattgtgatataa

SEQ ID NO: 458481 - DNA, 120 bp, Artificial Sequence
  ENSG00000157106_195 (sequence is synthesized)
cttgtaataaaaccaagatatgaacctagtctgagcattcagatatccagcttgtctttctctttcttagctataccaacaaacccatacagtttgcctccaaaatgaatgaaatgttgt

SEQ ID NO: 458482 - DNA, 120 bp, Artificial Sequence
  ENSG00000157106_196 (sequence is synthesized)
ctcttccctccagtgttgtacatagtctagtaagtaagaaaactaagcctccagaaaaggctattacttcatcattacaaacagtaaataatttaattttagaatttacttttactttga

SEQ ID NO: 458483 - DNA, 120 bp, Artificial Sequence
  ENSG00000157106_197 (sequence is synthesized)
atttttatttgatggtggaaacaaagttcctataaaaatggagttgaactaagcagtttaaacacactcatatttgaaacatttgttacttaatcactaggtgactgtcttgagagtaat

SEQ ID NO: 458484 - DNA, 120 bp, Artificial Sequence
  ENSG00000157106_198 (sequence is synthesized)
ctagcatgcttatagaaaatgtcagtgtttcttacagctcaaatttgtgtagttgttttaaaatgcggtctctttcttcttcccctggtacttttttctttctgtctactgaagttagtt

SEQ ID NO: 458485 - DNA, 120 bp, Artificial Sequence
  ENSG00000157106_199 (sequence is synthesized)
cttatacatggtcttatattttggctgtctcttttccctaggaacattcatacaggttgaatattccttatctgaaatacttgggactggaagtgttttggattttggattttggaatac

SEQ ID NO: 458486 - DNA, 90 bp, Artificial Sequence
  ENSG00000157106_200 (sequence is synthesized)
aggctggagtgccatggcgcgggtacaagcgattctcctgtttcagcctcccaggtagctcggattacaggcatgcaccaccatgcctgg

SEQ ID NO: 458487 - DNA, 120 bp, Artificial Sequence
  ENSG00000157106_201 (sequence is synthesized)
tgggattacaggtgggcaccaccatgcccagccggattttggagtattttcataacacttactggtgagcatccctaatctgaaaatcctaaatctaaaatgctccaaaatttgaaactt

SEQ ID NO: 458488 - DNA, 120 bp, Artificial Sequence
  ENSG00000157106_202 (sequence is synthesized)
tttgagcaccagtatgatgccccaagtggaaaatcccacacctgatctcatgtgatgagtccaaactgttgtatgcacaaaattatttaaaatattgcataaaatgaccttcaggctatg

SEQ ID NO: 458489 - DNA, 120 bp, Artificial Sequence
  ENSG00000157107_0 (sequence is synthesized)
gtgtttacacagcggcgggcgggcgcggacgcggaacccggcgcggcggcggcacgatggtcatggcgtatttcgtcgagaatttttggggggaaaaaaatagtggctttgatgtcctct

SEQ ID NO: 458490 - DNA, 120 bp, Artificial Sequence
  ENSG00000157107_1 (sequence is synthesized)
accataatatgaaacatggacagatatcaacaaaagaactagcagattttgtaagggaacgagctaccatagaggaggcatactccaggtcaatgacaaaactagcaaaatctgcaagca

SEQ ID NO: 458491 - DNA, 120 bp, Artificial Sequence
  ENSG00000157107_2 (sequence is synthesized)
attattcacaacttggaacatttgcaccagtatgggatgtattcaaaacatctacagagaaattagcaaattgtcacttggatcttgttagaaaattacaagaattaataaaggaagttc

SEQ ID NO: 458492 - DNA, 120 bp, Artificial Sequence
  ENSG00000157107_3 (sequence is synthesized)
agaagtatggagaagaacaagtaaagtctcataaaaagactaaagaagaagttgcaggaactctggaagctgtccaaaccattcagagcataactcaggccctccagaaatccaaggaaa

SEQ ID NO: 458493 - DNA, 120 bp, Artificial Sequence
  ENSG00000157107_4 (sequence is synthesized)
attacaatgccaagtgtgtagaacaggagcgtttgaaaaaggaaggagctacacaaagagaaatagaaaaggcagctgttaaatctaagaaagctacagatacctataaactctatgtgg

SEQ ID NO: 458494 - DNA, 120 bp, Artificial Sequence
  ENSG00000157107_5 (sequence is synthesized)
aaaaatatgcattagcaaaagctgatttcgaacagaaaatgacagaaacagctcagaaatttcaagatattgaagaaactcatctcattcacataaaggaaattataggatccttgtcaa

SEQ ID NO: 458495 - DNA, 120 bp, Artificial Sequence
  ENSG00000157107_6 (sequence is synthesized)
atgctataaaggaaattcatttgcagataggccaggtccatgaagaatttataaataacatggctaatactacagttgaaagtttgatacaaaaatttgctgagtcaaaaggcactggga

SEQ ID NO: 458496 - DNA, 120 bp, Artificial Sequence
  ENSG00000157107_7 (sequence is synthesized)
aggaaagacctggcctcattgaatttgaagaatgtgacactgctagtgcagttgaaggtataaaaccaaggaaaagaaagacctttgctttgccaggaatcattaaaaaggaaaaagatg

SEQ ID NO: 458497 - DNA, 120 bp, Artificial Sequence
  ENSG00000157107_8 (sequence is synthesized)
cagaatctgtggaatgtcctgatgcagattcattgaacattcctgatgtagatgaagaaggctacagtattaaaccagaaacaaatcagaatgataccaaagagaaccatttctactcat

SEQ ID NO: 458498 - DNA, 120 bp, Artificial Sequence
  ENSG00000157107_9 (sequence is synthesized)
ctagtgattctgactccgaagatgaagaaccaaagaagtatcggatagaaattaagcctatgcatccaaataactcacatcacacaatggcttctttggatgaattaaaagtatctatag

SEQ ID NO: 458499 - DNA, 120 bp, Artificial Sequence
  ENSG00000157107_10 (sequence is synthesized)
ggaatataacactctccccagcaatatctagacacagtccagtacagatgaatcggaatttgtctaatgaggagttaacaaaatcaaagccatctgctccacccaatgaaaaaggaacca

SEQ ID NO: 458500 - DNA, 120 bp, Artificial Sequence
  ENSG00000157107_11 (sequence is synthesized)
gtgatttacttgcttgggaccccctatttggaccatctcttgattcatcttcttcatcttcactaacttcatcatcatcagccaggcccacaactcctctttctgtaggcaccattgtcc

SEQ ID NO: 458501 - DNA, 120 bp, Artificial Sequence
  ENSG00000157107_12 (sequence is synthesized)
cacctccgaggcctgcttccagaccaaagcttacttcaggcaaactcagtgggattaatgaaatacccaggccattcagcccacctgtaacttccaacaccagcccacctcctgctgcac

SEQ ID NO: 458502 - DNA, 120 bp, Artificial Sequence
  ENSG00000157107_13 (sequence is synthesized)
cattagcccgggcagaaagttcttcttctatctcatcatctgcttcattgagtgctgccaatactccaacagtaggtgtgtcacggggtcccagccctgtcagccttggaaatcaggata

SEQ ID NO: 458503 - DNA, 120 bp, Artificial Sequence
  ENSG00000157107_14 (sequence is synthesized)
ccttacctgtggcagttgcccttacagaatctgttaatgcctactttaaaggagcagatcccaccaagtgtattgtgaagatcactggtgatatgacaatgtcatttccaagtggaatta

SEQ ID NO: 458504 - DNA, 120 bp, Artificial Sequence
  ENSG00000157107_15 (sequence is synthesized)
ttaaagtcttcaccagcaatccaactccagctgtgttgtgcttcagggtgaaaaatatcagcagactagagcagattcttccaaatgcacagcttgtgttcagtgatccatcacaatgtg

SEQ ID NO: 458505 - DNA, 120 bp, Artificial Sequence
  ENSG00000157107_16 (sequence is synthesized)
attccaacacaaaagatttttggatgaacatgcaagctgttacagtctacctcaagaagctgtcagagcaaaatccagctgcttcttattataatgtagatgtattaaagtatcaggtat

SEQ ID NO: 458506 - DNA, 120 bp, Artificial Sequence
  ENSG00000157107_17 (sequence is synthesized)
catcaaatggtattcagtccactcctctgaatcttgcaacatactggaaatgtagtgctagcaccacagatcttagagtggattataaatacaatccagaagctatggtggcacctagtg

SEQ ID NO: 458507 - DNA, 120 bp, Artificial Sequence
  ENSG00000157107_18 (sequence is synthesized)
tgctttccaacatacaggtggtggtaccagtggatggaggagtaacgaacatgcagtcccttccccctgcaatatggaatgcagaacaaatgaaagccttttggaaattgtctagtattt

SEQ ID NO: 458508 - DNA, 120 bp, Artificial Sequence
  ENSG00000157107_19 (sequence is synthesized)
cagaaaaatcagaaaatggaggttctgggtccctccgagcaaaatttgatctttcagaaggacctagtaaacccacgacacttgcagtacaattcctcagcgagggaagtaccctttcag

SEQ ID NO: 458509 - DNA, 120 bp, Artificial Sequence
  ENSG00000157107_20 (sequence is synthesized)
agtagatttcgaacttgtgggcactggctataggctttccttaataaagaagcggtttgctactggacgatacctggcggattgttgatggacctgggaaagtgatgtggcttcagggat

SEQ ID NO: 458510 - DNA, 120 bp, Artificial Sequence
  ENSG00000157107_21 (sequence is synthesized)
tacaaacctgccattctgcattatctgttctttccaaacactattttaacttgtatgatgtctttcaaacttagacatatttgagagctgactacaaacattaaatcgcacttttaaagt

SEQ ID NO: 458511 - DNA, 120 bp, Artificial Sequence
  ENSG00000157107_22 (sequence is synthesized)
gagtcattgaaataaatagtactgaaatgattctctatgttgtaaatgatcaactacaatattcaggaagcacatttattcagattctcagtaaaaatgaagtttttgtaggattaattt

SEQ ID NO: 458512 - DNA, 120 bp, Artificial Sequence
  ENSG00000157107_23 (sequence is synthesized)
ttaaattatttccagtgtctatgttgaaaaaaagggttatagtgtaatatcaggcctaaagtttcagaagagcaagcacaaagtaatttagctttccatacatttttagagtcagagata

SEQ ID NO: 458513 - DNA, 120 bp, Artificial Sequence
  ENSG00000157107_24 (sequence is synthesized)
actttgaaatttcataagtttgatattcagtggatacaaatagaacatgaattctaagttttgggtaatgttaactcagaacacttaatcaaattgagctatgtgccataaggtaatcag

SEQ ID NO: 458514 - DNA, 120 bp, Artificial Sequence
  ENSG00000157107_25 (sequence is synthesized)
accagagtccaagttgtatgcaaaaaatctataatttgattctcataaacatattaataaagtataagtgatgttttatatgatttttaaaaaaaattctcaagtgcaatgtgttttaaa

SEQ ID NO: 458515 - DNA, 120 bp, Artificial Sequence
  ENSG00000157107_26 (sequence is synthesized)
ataagcttgcaaatgacagcagagacatttacttctgcagttagttaactttataggagttgtgatttttttgatgaattaatgctgtagatttaatttatttttatatggaattgcata

SEQ ID NO: 458516 - DNA, 120 bp, Artificial Sequence
  ENSG00000157107_27 (sequence is synthesized)
atgtgtgccttttaaaacaataacaaaaaccagagatgtgcctatacaatttgtgttcattaatgtgcctcactttttttctcagtctgaatcttctgttcagaatcttacagtgatcaa

SEQ ID NO: 458517 - DNA, 120 bp, Artificial Sequence
  ENSG00000157107_28 (sequence is synthesized)
gcatttttataagatatttgcaatttttgtaaatatttttggcctgcaactgggaaggggattcagagtcataaagcctaacttaagaatcctggctcacttctttggtgatacactgta

SEQ ID NO: 458518 - DNA, 120 bp, Artificial Sequence
  ENSG00000157107_29 (sequence is synthesized)
gccactagaaagagaaataaacccaatggcatgtgtttacaggaagaaagattaccttcagatacttgacattaacctcatcaaaagtgtgtgaattttaaaacaaattctaaaaaaact

SEQ ID NO: 458519 - DNA, 120 bp, Artificial Sequence
  ENSG00000157107_30 (sequence is synthesized)
atagtgctaaattggtaactggtattttaactctcaatttagcattttccttgatactttatcattgaaaatttatgcatttatttactgattgtgttgtgaacatgagttttatggtat

SEQ ID NO: 458520 - DNA, 120 bp, Artificial Sequence
  ENSG00000157107_31 (sequence is synthesized)
tttgtgagggatgcattttttaaaagattaattttggaaacagaaggagaagcactgccatttgtttttatttcaacaattggaaaaattaccaatttgtacattttaattattcaattt

SEQ ID NO: 458521 - DNA, 120 bp, Artificial Sequence
  ENSG00000157107_32 (sequence is synthesized)
ctactttgtaaaaatagggaaattatttgaagtgatatatttggttaaacatttctaaaaataaactaccaatactaaatagtaagaaacctaactttagtagcaaatcttgattaattg

SEQ ID NO: 458522 - DNA, 120 bp, Artificial Sequence
  ENSG00000157107_33 (sequence is synthesized)
aagaaataaaatatttcggataaggtttcataatttacaaatgggaatttcatttataataataaatatgagtgtcctttatttgcctagtagaagtgataaattgtgttatatatgata

SEQ ID NO: 458523 - DNA, 120 bp, Artificial Sequence
  ENSG00000157107_34 (sequence is synthesized)
atttatataaaaccactaattgttccgttaagcttcacagaaaataaaacctctattactagacatttatgtaacatcttgctgtactaaatacagcagaaaatctactctttagcaata

SEQ ID NO: 458524 - DNA, 120 bp, Artificial Sequence
  ENSG00000157107_35 (sequence is synthesized)
tataacacagtatatgcttttttatatattcaatgttagcccaagtctgaatttacatttgactaaagcagcacataagataatttgctaaaatgctaatctttactaaatagtgagcta

SEQ ID NO: 458525 - DNA, 120 bp, Artificial Sequence
  ENSG00000157107_36 (sequence is synthesized)
aattagaatttctaactcttatattgtgctcttttaaatgccaattacagtcccttactggaattctaactgtaatttgctttgcaatcaaactgcttttagggcagccaatattttatt

SEQ ID NO: 458526 - DNA, 120 bp, Artificial Sequence
  ENSG00000157107_37 (sequence is synthesized)
attggaattcagacactgttcttaccgtgtttgtttttaatcaaatattacctaaaaatgtacaaattagtgaaatggttaaacttctgcactttcttagttaccacagtcttcatacca

SEQ ID NO: 458527 - DNA, 120 bp, Artificial Sequence
  ENSG00000157107_38 (sequence is synthesized)
agtattgggtacaggttacaattttgaagccatatgagtttatattgattttttttttccatttaaaaatccactaatggtgtaaaagagaccagtagattttcaatgggaaatgtacct

SEQ ID NO: 458528 - DNA, 120 bp, Artificial Sequence
  ENSG00000157107_39 (sequence is synthesized)
agcaagctggttcttgcttatatatagtgataaactttgtagctgcctctttaaccaagaatttgtaaacacaactctaataaatgtgagttttaaaggattgttatttactactttgga

SEQ ID NO: 458529 - DNA, 120 bp, Artificial Sequence
  ENSG00000157107_40 (sequence is synthesized)
tggattgtaattagaacaatgcacatctgtcttccaagattttgtaaatatttttgatttttttcattaaatgtaaattttacataaaagttgtgctcttaataaacatgtaatatataa

SEQ ID NO: 458530 - DNA, 74 bp, Artificial Sequence
  ENSG00000157107_41 (sequence is synthesized)
cgcccggcctgatttaccttcttttaaaaataaaaaattaatatacaaagaatatgtaataaacatgtaagaaa

SEQ ID NO: 458531 - DNA, 120 bp, Artificial Sequence
  ENSG00000157107_42 (sequence is synthesized)
attgctgatattttaattattaggtaacaactagaaccatttcagaacaattaaaaagatgcgttgtcaattaaaagtagaataaaaaatttaaaatgtaaaaaaaaagttttaaaattt

SEQ ID NO: 458532 - DNA, 120 bp, Artificial Sequence
  ENSG00000157107_43 (sequence is synthesized)
agtttttcaatttctttttttccaggcctcattgaatttgaagaatgtgacactgctagtgcagttgaaggtataaaaccaaggaaaagaaagacctttgctttgccaggaatcattaaa

SEQ ID NO: 458533 - DNA, 120 bp, Artificial Sequence
  ENSG00000157107_44 (sequence is synthesized)
attatgagttgtgtttctcctgtttcattttgcaggtctttcctctttcaggtagccagagcatggagtgtgatttgaagctaattaactaaaaaggtgtaatttttcttcggtgttcat

SEQ ID NO: 458534 - DNA, 120 bp, Artificial Sequence
  ENSG00000157107_45 (sequence is synthesized)
catttcattaacctgttgatatctgagaagcggtttggttcctaagtaatacctgaggctactttgataatctctaataattttgtacattggagttgtcattataatttttttttcttt

SEQ ID NO: 458535 - DNA, 120 bp, Artificial Sequence
  ENSG00000157107_46 (sequence is synthesized)
cagcaatatctgtaagtacaaacacgtttgtactctttatataaaagtctttatttttcttacctacctgtgtctggtcaaacattacttagcaattgttaagcatgttgactgaggaaa

SEQ ID NO: 458536 - DNA, 120 bp, Artificial Sequence
  ENSG00000157107_47 (sequence is synthesized)
tacttagtttataatttttatacagggaaataaacttgtgaatttggcttaattttgcttttgaaagtagaaagtgaaaatgtcaaaaatttactatttctgccatttgttgcatttcat

SEQ ID NO: 458537 - DNA, 120 bp, Artificial Sequence
  ENSG00000157107_48 (sequence is synthesized)
aaacagtgctgtgtgtctctggcagaattctttgaattggcagtattaatttttgcctcatctaattttgaagtgtttcttctatgttttgtgagccttatgtaggagggaattttataa

SEQ ID NO: 458538 - DNA, 120 bp, Artificial Sequence
  ENSG00000157110_0 (sequence is synthesized)
aaagggagctgcttccatcccggacttcccagagcctgcctggagcgcgtactcagcggctctcgggtcccagcgtcccagccgcggcccgcgctcctccgccccgctcctcctcctcct

SEQ ID NO: 458539 - DNA, 120 bp, Artificial Sequence
  ENSG00000157110_1 (sequence is synthesized)
cttcctcctcctcctcctctctaggcacccccgtcccctccttccagcggctgcagcccccagccccaactctccgcgcttactcctgggacgcgcgtcctcgccccatcctttgcttcc

SEQ ID NO: 458540 - DNA, 120 bp, Artificial Sequence
  ENSG00000157110_2 (sequence is synthesized)
ttccttccttccttcttccttcctcccctggctcccgccctccctctccaggtcgccctcccggggcccgattgtctcggtgccccgctcccggcccgcgccctgccccgtctctccctt

SEQ ID NO: 458541 - DNA, 120 bp, Artificial Sequence
  ENSG00000157110_3 (sequence is synthesized)
ccttgcacttcctgagtcgcccgccgccgccgtcgcagactcgccgcgggagccccagcccaacccgagcccgacagccactgccccggctccagctccagccccacagcccgcggcgcc

SEQ ID NO: 458542 - DNA, 120 bp, Artificial Sequence
  ENSG00000157110_4 (sequence is synthesized)
cgagggagccccggcgcccggggaaggctccagtgggctagcgcgccctcgcccagccccgcgccccagccctgcccggcccggcgaggaaggaccgggaagatgaacaacggcggcaaa

SEQ ID NO: 458543 - DNA, 120 bp, Artificial Sequence
  ENSG00000157110_5 (sequence is synthesized)
gccgagaaggagaacaccccgagcgaggccaaccttcaggaggaggaggtccggaccctatttgtcagtggccttcctctggatatcaaacctcgggagctctatctgcttttcagacca

SEQ ID NO: 458544 - DNA, 120 bp, Artificial Sequence
  ENSG00000157110_6 (sequence is synthesized)
tttaagggctatgagggttctcttataaagctcacatctaaacagcctgtaggttttgtcagttttgacagtcgctcagaagcagaggctgcaaagaatgctttgaatggcatccgcttc

SEQ ID NO: 458545 - DNA, 120 bp, Artificial Sequence
  ENSG00000157110_7 (sequence is synthesized)
gatcctgaaattccgcaaacactacgactagagtttgctaaggcaaacacgaagatggccaagaacaaactcgtagggactccaaaccccagtactcctctgcccaacactgtacctcag

SEQ ID NO: 458546 - DNA, 120 bp, Artificial Sequence
  ENSG00000157110_8 (sequence is synthesized)
ttcattgccagagagccatatgagctcacagtgcctgcactttaccccagtagccctgaagtgtgggccccgtaccctctgtacccagcggagttagcgcctgctctacctcctcctgct

SEQ ID NO: 458547 - DNA, 120 bp, Artificial Sequence
  ENSG00000157110_9 (sequence is synthesized)
ttcacctatcccgcttcactgcatgcccagatgcgctggctccctccctccgaggctacttctcagggctggaagtcccgtcagttctgctgaatactatacccttcagcaatggctact

SEQ ID NO: 458548 - DNA, 120 bp, Artificial Sequence
  ENSG00000157110_10 (sequence is synthesized)
agaaggacgaacaattgccctcctttggaagtacggctaatagaagccctagatccgaataagatccgaataagaatatgtaatggaccaggcgcagtgcctcacgcctgtcatcccagc

SEQ ID NO: 458549 - DNA, 120 bp, Artificial Sequence
  ENSG00000157110_11 (sequence is synthesized)
tgggaggctgaggcaggcggatcacttgatgccagaagtttgagaccagcccagccaacatggtcccaggtgtgtgatggcggctgcaatctgtcttgtgggtattaatgcaatcttcag

SEQ ID NO: 458550 - DNA, 120 bp, Artificial Sequence
  ENSG00000157110_12 (sequence is synthesized)
catctgtttttctcgaagaaaaaaatataattaataaaaatgttttactcttttacactgtataattgtaagaaatagcgtattatttgtgaatgcatggtctgaaatttctgtacagtt

SEQ ID NO: 458551 - DNA, 120 bp, Artificial Sequence
  ENSG00000157110_13 (sequence is synthesized)
tggagatattttcaaacgaaacgtaagagaagtcaacaataaaaccaagaaaagtgagtatttttataccaaacattttaagtatgctgggatggacgatcttacactggtttggatcac

SEQ ID NO: 458552 - DNA, 120 bp, Artificial Sequence
  ENSG00000157110_14 (sequence is synthesized)
agtttttgttcttgacttttgaatgcttgtaattaaaaatatctatttttttcctctgaagtaagttgcatgtttgaggcatgtttccaaatattatcaaaatatcctgaattgtattgt

SEQ ID NO: 458553 - DNA, 120 bp, Artificial Sequence
  ENSG00000157110_15 (sequence is synthesized)
gaatatatagaaatctgtgcctggccggagtccagggtaaattagtagcatggtgttagatgttagaaacagaactgttatttgcagtgttaggtctaggatcccagttctagtaggaca

SEQ ID NO: 458554 - DNA, 120 bp, Artificial Sequence
  ENSG00000157110_16 (sequence is synthesized)
gccctgcaagacaatcaaccagaagcctccaggagcttctacctatggcttattcacaactgggcaagaaaacatcattggtaagaactgctgagtgtgcccttagaaagccctagtagc

SEQ ID NO: 458555 - DNA, 120 bp, Artificial Sequence
  ENSG00000157110_17 (sequence is synthesized)
tccagctgtgactatatcaactgtgtgccaagtgtgactttgtacagttttatgtttccactctcctgtatgtgtagccactcgatgcctaacctaccttccacaagccagccccgcatc

SEQ ID NO: 458556 - DNA, 120 bp, Artificial Sequence
  ENSG00000157110_18 (sequence is synthesized)
cctgctcccgcagtgtaagtgcagagcctgcctcactggtaagggaaaaccttggcttgggaggccagccctggcccttgaaggggttggctgtgcccagcccacctggctgcagtgggc

SEQ ID NO: 458557 - DNA, 120 bp, Artificial Sequence
  ENSG00000157110_19 (sequence is synthesized)
agctcatgtctgtatctccaaagtgatgtttgtttgcaaaacaccggctgaactgagctggtgttgccaactcttggcagcactgggccaaaccgaccacataccatgagctcccaaatg

SEQ ID NO: 458558 - DNA, 120 bp, Artificial Sequence
  ENSG00000157110_20 (sequence is synthesized)
gcgtgtgctcactgtgagacgtcctgccacaccccacaggagacggaggcagtgggcatttggaaccaattctattcagacttcgtcaaagccaaagtcagtctggtgttgtcagttgac

SEQ ID NO: 458559 - DNA, 120 bp, Artificial Sequence
  ENSG00000157110_21 (sequence is synthesized)
acatctccagagttcatgacagctcaacctctccccttgtacagaagccatttttgtaaaaccacactgacctaaattcagctgccaaacacagtctttcctattgatccgctcggctta

SEQ ID NO: 458560 - DNA, 120 bp, Artificial Sequence
  ENSG00000157110_22 (sequence is synthesized)
tgttgaaaatttcaatgtcatgattacctggttggtttgggtttttgttttgttattttccattagaaatataaagatgtcaagaagcttttaaaggtcaacacaaaaaaccaaggccag

SEQ ID NO: 458561 - DNA, 120 bp, Artificial Sequence
  ENSG00000157110_23 (sequence is synthesized)
gagtgaggggctctttcttaccgtaaataaggggaaaaggcagttagctcaaggacttgtgacggatccactttggtgttcaaggacctgcttatgccctcagtgccaatcggctcttgg

SEQ ID NO: 458562 - DNA, 120 bp, Artificial Sequence
  ENSG00000157110_24 (sequence is synthesized)
tgagatgactgtactcctaaggaaaatagccacttctgcagtctattatgcttttataactgtttaaaggtacttttctattgtcatttttaaaaaataaagtgcttattccagctgtca

SEQ ID NO: 458563 - DNA, 120 bp, Artificial Sequence
  ENSG00000157110_25 (sequence is synthesized)
catgcccagtgtttctctcctgaggcaaagcccaacacacctgtcttttgtccacttctccagcaaattagatttgtctctgggaatgtgtttgtaacataccaacctactgcagaccag

SEQ ID NO: 458564 - DNA, 120 bp, Artificial Sequence
  ENSG00000157110_26 (sequence is synthesized)
cagagggagctcccatgttgaatttgtttgttagctattttcccccctttcacaaaaactatttcttgacgacctttgagagatttcaataaaaattttaatcagagcaaaaatgaactc

SEQ ID NO: 458565 - DNA, 120 bp, Artificial Sequence
  ENSG00000157110_27 (sequence is synthesized)
ggccggcggggcgcgggcccggggcgcggcggtggaagaaggttcaggcatggcccgtgccccggacgcagccccacagtgtggcccggggagggtggatctcgggagcgtgtgtttttg

SEQ ID NO: 458566 - DNA, 120 bp, Artificial Sequence
  ENSG00000157110_28 (sequence is synthesized)
cactgcatgcccagctctgtgaaggtcagactgtgaggagaagccaccccttgagcgctccgtctcctgatagtgccagcctggcctggtttcctgtttgatgcgctggctccctccctc

SEQ ID NO: 458567 - DNA, 120 bp, Artificial Sequence
  ENSG00000157110_29 (sequence is synthesized)
ttcccgagagcacaccatacaactaacacctatccagctaacagatccaccctcaagagattaatgatcccctctaaatcaagctgacactccttcaggactgacgaggatcgtctgaca

SEQ ID NO: 458568 - DNA, 120 bp, Artificial Sequence
  ENSG00000157110_30 (sequence is synthesized)
gcaatgatatcacccactgcctgatgtttgccccaaatgacacctctctcttccttaatgatctcacctcatatcgcacatgagagaccggggcaggtttatccacctggctcccagcta

SEQ ID NO: 458569 - DNA, 120 bp, Artificial Sequence
  ENSG00000157110_31 (sequence is synthesized)
gctagagggcatcaccagagtgtatacgtgtgtgccttgtgtggaagggctgcagaggaaggtgtgtgctaggagaaggggatatgtgcgtctgtgcgtgtttctgtgtgttgagagttt

SEQ ID NO: 458570 - DNA, 120 bp, Artificial Sequence
  ENSG00000157110_32 (sequence is synthesized)
tccactctcgtgtacggtgagaagaatctctgaccaaagggaaagcttccaggggggaaggctgtactttcttaaatatgttacaggaaagattaagggttccttctctccattttcagg

SEQ ID NO: 458571 - DNA, 120 bp, Artificial Sequence
  ENSG00000157110_33 (sequence is synthesized)
tgttttcccagtgaggagacgcaagcctggttctgcaattctttccagctctggagtctgttatggttcccatctgagctctaaaggtcccaggtgtgtgatggcggctgcaatctgtct

SEQ ID NO: 458572 - DNA, 120 bp, Artificial Sequence
  ENSG00000157110_34 (sequence is synthesized)
gtttgccttcgtctggctgagccgggctggtgcgctgagctctaggtgcaggcggaagctgggtcaggtgcgcggccgcacttctggttgcgcggcccacactggccgccattgtggtgg

SEQ ID NO: 458573 - DNA, 120 bp, Artificial Sequence
  ENSG00000157110_35 (sequence is synthesized)
tattctgaccagctttctttcttagttaaaaatagcctgatttttataaacaaacttcctgtttctccgcaaagattactgtctacatactaacacttcctctccccttggagaaaatat

SEQ ID NO: 458574 - DNA, 120 bp, Artificial Sequence
  ENSG00000157110_36 (sequence is synthesized)
ttctcttagcttcgcttttagtgcaagtggtagtaatcagtgtaaagattcacctctggagatcaccactcattctttggcctgcaaagattgatgaccagtaacaaatagaaagtacgt

SEQ ID NO: 458575 - DNA, 120 bp, Artificial Sequence
  ENSG00000157110_37 (sequence is synthesized)
acgtaggtttcatttgtctttctgcatgtgtaattcagcctttaaattttaaatttttaaaaattattaggctggacaggcagagttttcgtttgcctgttttgctcagtgtttgtttac

SEQ ID NO: 458576 - DNA, 120 bp, Artificial Sequence
  ENSG00000157110_38 (sequence is synthesized)
caccgaaagcagaaccatgccatccactgtgcagctctcctccccgggcagccctccccctcctgtgtctcctgtgaaacaccgtcacgtcttggcctcgtcggggctcagcgccccaac

SEQ ID NO: 458577 - DNA, 120 bp, Artificial Sequence
  ENSG00000157110_39 (sequence is synthesized)
ccacacccaggccgcaccagtcacaccactgcgctccacactgacccagtgcacacagacccatcaccctctactgtgtgtttaggtgtccagccccccacctgccatgggggctctgtg

SEQ ID NO: 458578 - DNA, 120 bp, Artificial Sequence
  ENSG00000157110_40 (sequence is synthesized)
ctctgctctttgcttagtgagcaagtggattcagatgcaccaggccatgagccgtgggtagatgcgctggctccctccctccgaggctacttctcagggctggaagtcccgtcagttctg

SEQ ID NO: 458579 - DNA, 120 bp, Artificial Sequence
  ENSG00000157110_41 (sequence is synthesized)
gggtctaatttttctctgcctgtgtgagattcactcacggcctgattcaaaggcctctgctccaagatcaagaaaatcttcccaacgatcttcagtggcacttggcaataggagctttca

SEQ ID NO: 458580 - DNA, 120 bp, Artificial Sequence
  ENSG00000157110_42 (sequence is synthesized)
cttggcataggacctggaatatgctgccaggtgggcaaagtgttgctcaatgcacctgtgtttgcggctggccttccactttagaaagctaatggaagagacagggctgctggtcccagc

SEQ ID NO: 458581 - DNA, 120 bp, Artificial Sequence
  ENSG00000157110_43 (sequence is synthesized)
tgggaggctccttgctgaaggctgtaggcccatctcctcagtagggtgaacagagggcctggggtaccagacacacacagtgccaagaagctggaaccctttttttaaaagaacaggaat

SEQ ID NO: 458582 - DNA, 120 bp, Artificial Sequence
  ENSG00000157110_44 (sequence is synthesized)
agaatcgcaaagtagtcctggccaggccactggtgtggatggggtcgtgaactgccccttccttaccaaagcagctatgtttccacactctgcttagaaagccattagatagcctttcac

SEQ ID NO: 458583 - DNA, 120 bp, Artificial Sequence
  ENSG00000157110_45 (sequence is synthesized)
cagcctaggcctgggaaaaggaattcgctgtgccggatcttagcctcaaatggctgctaacctttaaaaggaggatgagagcagaggagttggtggaacctcgggcacttctcgaggtgg

SEQ ID NO: 458584 - DNA, 120 bp, Artificial Sequence
  ENSG00000157110_46 (sequence is synthesized)
gaacgcctctcaggacaccgctctgatgcttttcagccccttggggaagaggccctcacaggctagtgtgagtgggtaccatcttggaacagtagggaagtggtagccaagcaggaccct

SEQ ID NO: 458585 - DNA, 120 bp, Artificial Sequence
  ENSG00000157110_47 (sequence is synthesized)
agaacccaagttgtccaagagagatgtcgtgtacaaaacagttaagaccgtgaagagaggggggtttataatgtcagaaattgaggaaaagaaactaaggtggcctgaatgatccaggtc

SEQ ID NO: 458586 - DNA, 120 bp, Artificial Sequence
  ENSG00000157110_48 (sequence is synthesized)
ggccgccattgtggtggaagtcggagcgagtctcctgggcccgaaccggctgttggaagtgcgagggcaccgagagccacggtctgtttttcccatggtaaaagaacaagaaagacagaa

SEQ ID NO: 458587 - DNA, 120 bp, Artificial Sequence
  ENSG00000157110_49 (sequence is synthesized)
caaagaaggcagagcagaaaagttccatgttcctcctcactccatcttgcctagccaaaacaattgaacagtttcagatatctatttcaaagatttcagataagttctaaaatgttttct

SEQ ID NO: 458588 - DNA, 120 bp, Artificial Sequence
  ENSG00000157110_50 (sequence is synthesized)
tttgttgtgacttcagccttgacttgcctctactcttaagcacacgtctaagcctgatcaaaaggacaatgtgggaatgcatgaaagaataatgtgtgcttttcaaaagataagccagat

SEQ ID NO: 458589 - DNA, 120 bp, Artificial Sequence
  ENSG00000157110_51 (sequence is synthesized)
attcagggaataaataataaggccaggtaagcagctcagtgttgtggtacggccagcacttctggtgccttctgcttcaagttagcaaagcaggcagggtccgcctgagaaggtaacatc

SEQ ID NO: 458590 - DNA, 120 bp, Artificial Sequence
  ENSG00000157110_52 (sequence is synthesized)
tcagcaaagacctagaacttcaccagctttatacggggtttctttttcagaacacattccactttagtgaggcttggaaaatatttaactcctgtaatcttaaagtaaatggactggaag

SEQ ID NO: 458591 - DNA, 120 bp, Artificial Sequence
  ENSG00000157110_53 (sequence is synthesized)
tgcagcaggcttggctcccacgcagcactaaggaatcactgggagagtgtgcagggccctcctcagagacctttctctgttttcccagtgaggagacgcaagcctggttctgcaattctt

SEQ ID NO: 458592 - DNA, 120 bp, Artificial Sequence
  ENSG00000157110_54 (sequence is synthesized)
tccagctctggagtctgttatggttcccatctgagctctaaaggtaggggtgggcctgaagaccctccacactgtcagtcctgtggacgtggtgggtgcccctctagccaccactgtcct

SEQ ID NO: 458593 - DNA, 120 bp, Artificial Sequence
  ENSG00000157110_55 (sequence is synthesized)
ccggactgtgccacatcacaagcacttaccgagctcctctacaaaccacgtgacaaccaaatgcagtgaaaactgcagccccccaacctgctcctgcccattgtgttttctgtggatctg

SEQ ID NO: 458594 - DNA, 120 bp, Artificial Sequence
  ENSG00000157110_56 (sequence is synthesized)
tctggagtccttggagactcctgagcatgtgcactggcagagctgcctgactcttccctggaagaagttcaaagagggtagccacgtgttcagaccaggccatggggtctgggggctccg

SEQ ID NO: 458595 - DNA, 120 bp, Artificial Sequence
  ENSG00000157110_57 (sequence is synthesized)
cgactcctgagagcaattcctggccggactctggctcatgttactgcccccacctccccccgcccaggtaaacccgggggtgcagacaactgttgttgaggtcccaggagcgggttgtcc

SEQ ID NO: 458596 - DNA, 120 bp, Artificial Sequence
  ENSG00000157110_58 (sequence is synthesized)
cctatgctcctggggacatggaggagagggagggtcccaggatcccagtacttgtatgagtcgcactgattagctgaagcccagaggcttcttaatcatcctagaaatacagcctcccgg

SEQ ID NO: 458597 - DNA, 120 bp, Artificial Sequence
  ENSG00000157110_59 (sequence is synthesized)
gaaatgtggcctggctctgcagctctgggtggctcgtgctctccctcctgtgtggaggggtcctggagaggttgggtgagctgattgataggtttcatgtgcaaagatgattattttcct

SEQ ID NO: 458598 - DNA, 120 bp, Artificial Sequence
  ENSG00000157110_60 (sequence is synthesized)
gttctcaagtaacccaacttttgctaggaaactagaatcatctaatgttgcatagtgaagttctggggaaaatgttttcttccttaaatctgaggagagagatgtcctaggaaggtagtc

SEQ ID NO: 458599 - DNA, 120 bp, Artificial Sequence
  ENSG00000157110_61 (sequence is synthesized)
ttcaggctcactcttgattccagagctgggtttcagcacacgcagtcccctctccctgaagagtcctggtgggaccactcggaggtgccagctgagccagtgccacctttctggggaacc

SEQ ID NO: 458600 - DNA, 120 bp, Artificial Sequence
  ENSG00000157110_62 (sequence is synthesized)
tccagttctcataagcctcgcatactggacacggcctgtctgcagggagggagatctgagaaatgttagtgggaaataggaccgctggtgtccacatgcagggagttgggcttccttccc

SEQ ID NO: 458601 - DNA, 120 bp, Artificial Sequence
  ENSG00000157110_63 (sequence is synthesized)
tggcactggaatccttgctgtaaccagccggctcagaggcagccgtgcctgcagggggagtattagaaactgattctttgctaggtctttgcaccttcgtatttcaaaattctcagaccc

SEQ ID NO: 458602 - DNA, 120 bp, Artificial Sequence
  ENSG00000157110_64 (sequence is synthesized)
tagggtacaagtagccagatatcttcacaaatgtgcatccttttagtttttgttttccaggagatgcttggagcaaagtttagtccttggtgcctgtgacagacagggatttcctatggc

SEQ ID NO: 458603 - DNA, 120 bp, Artificial Sequence
  ENSG00000157110_65 (sequence is synthesized)
cttgggctgaccaaagctgctcagctcctggaggtggctgtttctggatcttgctgtgtgggggcctcaggtcccatgcctttcctctgcagggcctttggacagtcctccgggtctagg

SEQ ID NO: 458604 - DNA, 120 bp, Artificial Sequence
  ENSG00000157110_66 (sequence is synthesized)
ccacagcccttgggatgcaaccacagggacgtgggtgtagagtcctgcttgctgggcctgcagcctcctaatgcgccctcagcgaagagttcacatgcttttcttggaatgtccttcctc

SEQ ID NO: 458605 - DNA, 120 bp, Artificial Sequence
  ENSG00000157110_67 (sequence is synthesized)
gctggcccccagaagcctcctcttacttgctccgccaagtcctcagtgcgttttcctggctgagagcttttcatgtcgcatatccaaggccattctgcagcagcctctggtcctcagctc

SEQ ID NO: 458606 - DNA, 120 bp, Artificial Sequence
  ENSG00000157110_68 (sequence is synthesized)
agcagcagaggcctttgatctctttcggcgttgcctctcttggctctctgccctcagaacaggccggtcttcaagaccgaggcagccccaggtggaggttactgtgcaccgttaacgggt

SEQ ID NO: 458607 - DNA, 120 bp, Artificial Sequence
  ENSG00000157111_0 (sequence is synthesized)
gggtagggtgcagggcggccggcgcagccgaggccgcgtgcggaggcggacgccgcgcccagccagtgcccacagcagcgcggtcagccaggcgccggacccagcttcagagctgctgaa

SEQ ID NO: 458608 - DNA, 120 bp, Artificial Sequence
  ENSG00000157111_1 (sequence is synthesized)
agagctgctgaaatcttggagggaagaaaacacatcccaccctgcctccgggaaggggcctctcctggacatgtctcctgcagctgctgctgagccagatggggaccagcaggacagaca

SEQ ID NO: 458609 - DNA, 120 bp, Artificial Sequence
  ENSG00000157111_2 (sequence is synthesized)
cgtcagcaaactcatcttctgcttctttgtcttcggcgccgtcttgttgtgtgtgggagtcctgctctccatctttgggttccaggcatgccaatataagcccctcccagactgccccat

SEQ ID NO: 458610 - DNA, 120 bp, Artificial Sequence
  ENSG00000157111_3 (sequence is synthesized)
ggtgctcaaggtggcggggcctgcatgtgccgtggttgggcttggggctgtgatcctggcccgctcccgggcgcaacttcagctccgtgcagggctgcagagaggtcagcagatggaccc

SEQ ID NO: 458611 - DNA, 120 bp, Artificial Sequence
  ENSG00000157111_4 (sequence is synthesized)
cgaccgagccttcatctgtggagagagccgccagtttgcccagtgccttatctttgggtttctgttcttgacaagcggcatgctcatcagcgtcctgggcatttgggtccctggatgtgg

SEQ ID NO: 458612 - DNA, 120 bp, Artificial Sequence
  ENSG00000157111_5 (sequence is synthesized)
actcagagccccggatgtgtgggttcctttctctgcagatcatggggcccttgattgtgcttgtgggattgtgtttcttcgtggttgcccatgttaagaagagaaacacgctgaatgctg

SEQ ID NO: 458613 - DNA, 120 bp, Artificial Sequence
  ENSG00000157111_6 (sequence is synthesized)
gccaggatgcctctgagagagaagagggacagatccagattatggagcctgtccaggtcactgtaggtgactcggtaataatatttccaccccctccaccaccttactttcctgaatctt

SEQ ID NO: 458614 - DNA, 120 bp, Artificial Sequence
  ENSG00000157111_7 (sequence is synthesized)
cagcttctgcggtcgctgagagtcctggaactaacagtctgcttccgaatgaaaaccccccttcatattacagtattttcaactatggcaggaccccaacttcagagggtgcagcctctg

SEQ ID NO: 458615 - DNA, 120 bp, Artificial Sequence
  ENSG00000157111_8 (sequence is synthesized)
aaagagactgtgaatctatatataccatttctgggacgaattcatcttctgaggcctcacacactccacatcttccatctgaattgcctcctagatatgaagaaaaagaaaatgctgcag

SEQ ID NO: 458616 - DNA, 120 bp, Artificial Sequence
  ENSG00000157111_9 (sequence is synthesized)
ctacattcttgcctctatcttctgagccttccccaccgtaaactatggactctagttcagttttatatgcaatggatcactattttatttaattttttttaaataaaaaatacaatagca

SEQ ID NO: 458617 - DNA, 120 bp, Artificial Sequence
  ENSG00000157119_0 (sequence is synthesized)
agtctaagcaaaccccagcaggaaagcaggggtacagagaggagcccccttggcaccgccaccgcaccctaggccacccaccatggcgctgggcttggagcaggcggaggagcagcggtt

SEQ ID NO: 458618 - DNA, 120 bp, Artificial Sequence
  ENSG00000157119_1 (sequence is synthesized)
gtaccagcagacgctcctgcaagacgggctcaaagacatgctggaccatggcaagttcctcgactgtgtggtgcgggcgggcgagcgcgagttcccgtgccatcgcctggtgctggccgc

SEQ ID NO: 458619 - DNA, 120 bp, Artificial Sequence
  ENSG00000157119_2 (sequence is synthesized)
ctgcagcccctacttccgggcgcgctttctagccgagccggagcgcgcgggcgagctgcacctggaggaggtgtccccggacgtggtggcccaggtgctgcactacctgtacacatcaga

SEQ ID NO: 458620 - DNA, 120 bp, Artificial Sequence
  ENSG00000157119_3 (sequence is synthesized)
gatcgcgctggatgaggcgagcgtgcaggatttgttcgccgcggcacaccgcttccagatcccttccatcttcaccatctgcgtgtccttcctgcagaagcgcctgtgcctctccaactg

SEQ ID NO: 458621 - DNA, 120 bp, Artificial Sequence
  ENSG00000157119_4 (sequence is synthesized)
cttggccgtcttccgtctcggcctcctgctcgactgcgcgcgtctcgccgtggctgcccgcgacttcatctgcgctcacttcacgctggtggcgcgcgacgctgacttcctcggactctc

SEQ ID NO: 458622 - DNA, 120 bp, Artificial Sequence
  ENSG00000157119_5 (sequence is synthesized)
ggccgacgagctcatcgccatcatctccagcgacggccttaacgtggagaaggaggaggcagtgttcgaggcggtgatgcggtgggcgggtagcggcgacgccgaggcgcaggctgagcg

SEQ ID NO: 458623 - DNA, 120 bp, Artificial Sequence
  ENSG00000157119_6 (sequence is synthesized)
ccagcgcgcgctgcccaccgtcttcgagagcgtgcgctgccgcttgctgccgcgcgcctttctggaaagccgcgtggagcgccaccctctcgtgcgtgcccagcccgagttgctgcgcaa

SEQ ID NO: 458624 - DNA, 120 bp, Artificial Sequence
  ENSG00000157119_7 (sequence is synthesized)
ggtgcagatggtgaaggatgcacacgagggccgcatcaccacgctgcggaagaaaaagaaggggaaggatggagccggggccaaggaggctgataagggcacaagcaaagccaaagcaga

SEQ ID NO: 458625 - DNA, 120 bp, Artificial Sequence
  ENSG00000157119_8 (sequence is synthesized)
ggaggatgaggaggccgaacgtatccttcctgggatcctcaatgacaccctgcgcttcggcatgttcctgcaggatctcatcttcatgatcagtgaggagggcgctgtggcctacgatcc

SEQ ID NO: 458626 - DNA, 120 bp, Artificial Sequence
  ENSG00000157119_9 (sequence is synthesized)
agcagccaacgagtgctactgtgcttccctctccaaccaggtccccaagaaccacgtcagcctggttaccaaggagaaccaggtcttcgtggctggaggcctcttctacaacgaagacaa

SEQ ID NO: 458627 - DNA, 120 bp, Artificial Sequence
  ENSG00000157119_10 (sequence is synthesized)
cctgggagaagctctcaactccatctacgtggtcggtggcagagagatcaaggacggcgagcgctgcctggactcggtcatgtgctacgacaggctgtcattcaaatggggtgaatcgga

SEQ ID NO: 458628 - DNA, 120 bp, Artificial Sequence
  ENSG00000157119_11 (sequence is synthesized)
cccgctgccttacgtggtgtatggccacacagtgctctcccacatggaccttgtctacgtaattggcggcaaaggcagtgacaggaagtgcctgaacaagatgtgcgtctatgaccccaa

SEQ ID NO: 458629 - DNA, 120 bp, Artificial Sequence
  ENSG00000157119_12 (sequence is synthesized)
gaagtttgagtggaaggagctggcacccatgcagaccgcccgctcactctttggggccactgtccatgatggccgcattatcgtggcagctggggtcaccgacacagggctgaccagttc

SEQ ID NO: 458630 - DNA, 120 bp, Artificial Sequence
  ENSG00000157119_13 (sequence is synthesized)
tgccgaagtgtacagcatcacagacaacaagtgggcacccttcgaggccttcccacaggagcgtagctcactcagcctggtcagcctggtgggtaccctctatgccattggtggctttgc

SEQ ID NO: 458631 - DNA, 120 bp, Artificial Sequence
  ENSG00000157119_14 (sequence is synthesized)
cacactggagacggagtctggagagctggttcccacagagctcaatgacatctggaggtataacgaggaggagaagaaatgggagggtgtcctgcgggagatcgcctatgcagcaggtgc

SEQ ID NO: 458632 - DNA, 120 bp, Artificial Sequence
  ENSG00000157119_15 (sequence is synthesized)
caccttcctaccagtgcggctcaatgtgctgtgcctgactaagatgtgaccagctcaggcagactgaactaagcacccctcccatcctgcgaccctcactggcctggccttgtgggggct

SEQ ID NO: 458633 - DNA, 120 bp, Artificial Sequence
  ENSG00000157119_16 (sequence is synthesized)
ccagaaaagaggctaggagaggccagagtctacctggatccagttatggtgcctcaggggctgcgtcagccaaggaaagggaagtgctgcttagtcctggacttttgggcaagggtgaga

SEQ ID NO: 458634 - DNA, 120 bp, Artificial Sequence
  ENSG00000157119_17 (sequence is synthesized)
aactagaggcttctccagtgttgccatatccccctaggttgtcttgatccatgaaccagaaccacagggcggtatcccaggccgtgtgctggccctgccccagcctagctgagtgtgctg

SEQ ID NO: 458635 - DNA, 120 bp, Artificial Sequence
  ENSG00000157119_18 (sequence is synthesized)
gcaaagttccccacaggactcagccttctcgtctgtccgatgggagcatccccatcaagtgcagtgtacagtgcagatatgtctccttctttaggaagaataaagtgccttctgagcaag

SEQ ID NO: 458636 - DNA, 120 bp, Artificial Sequence
  ENSG00000157119_19 (sequence is synthesized)
cagctcagggtctgcatcagtgctccaagagtcagtgagcaggtgtgttgaagacttggggcttcagtgttctgctgttgggctgccaaggtcgatggtctctgctctccatctggtgtc

SEQ ID NO: 458637 - DNA, 120 bp, Artificial Sequence
  ENSG00000157131_0 (sequence is synthesized)
ttacaggtcccagcctgtagacatcttttactccaatttcctgaatagatagctttattccttcaaggtaatatagtgcggtggcttctggctgagatgtttgctgttgttttcttcatc

SEQ ID NO: 458638 - DNA, 120 bp, Artificial Sequence
  ENSG00000157131_1 (sequence is synthesized)
ttgtctttgatgacttgtcagcctggggtaactgcacaggagaaggtgaaccagagagtaagacgggcagctacacccgcagcagttacctgccagctgagcaactggtcagagtggaca

SEQ ID NO: 458639 - DNA, 120 bp, Artificial Sequence
  ENSG00000157131_2 (sequence is synthesized)
gattgctttccgtgccaggacaaaaagtaccgacaccggagcctcttgcagccaaacaagtttgggggaaccatctgcagtggtgacatctgggatcaagccagctgctccagttctaca

SEQ ID NO: 458640 - DNA, 120 bp, Artificial Sequence
  ENSG00000157131_3 (sequence is synthesized)
acttgtgtaaggcaagcacagtgtggacaggatttccagtgtaaggagacaggtcgctgcctgaaacgccaccttgtgtgtaatggagaccaggactgccttgatggctctgatgaggac

SEQ ID NO: 458641 - DNA, 120 bp, Artificial Sequence
  ENSG00000157131_4 (sequence is synthesized)
gactgtgaagatgtcagggccattgacgaagactgcagccagtatgaaccaattccaggatcacagaaggcagccttggggtacaatatcctgacccaggaagatgctcagagtgtgtac

SEQ ID NO: 458642 - DNA, 120 bp, Artificial Sequence
  ENSG00000157131_5 (sequence is synthesized)
gatgccagttattatgggggccagtgtgagacggtatacaatggggaatggagggagcttcgatatgactccacctgtgaacgtctctactatggagatgatgagaaatactttcggaaa

SEQ ID NO: 458643 - DNA, 120 bp, Artificial Sequence
  ENSG00000157131_6 (sequence is synthesized)
ccctacaactttctgaagtaccactttgaagccctggcagatactggaatctcctcagagttttatgataatgcaaatgaccttctttccaaagttaaaaaagacaagtctgactcattt

SEQ ID NO: 458644 - DNA, 120 bp, Artificial Sequence
  ENSG00000157131_7 (sequence is synthesized)
ggagtgaccatcggcataggcccagccggcagccctttattggtgggtgtaggtgtatcccactcacaagacacttcattcttgaacgaattaaacaagtataatgagaagaaattcatt

SEQ ID NO: 458645 - DNA, 120 bp, Artificial Sequence
  ENSG00000157131_8 (sequence is synthesized)
ttcacaagaatcttcacaaaggtgcagactgcacattttaagatgaggaaggatgacattatgctggatgaaggaatgctgcagtcattaatggagcttccagatcagtacaattatggc

SEQ ID NO: 458646 - DNA, 120 bp, Artificial Sequence
  ENSG00000157131_9 (sequence is synthesized)
tcctggtgattgacaaagcaaaaatggaatcccttggtattaccagcagagatatcacgacatgttttggaggctccttgggcattcaatatgaagacaaaataaatgttggtggaggtt

SEQ ID NO: 458647 - DNA, 120 bp, Artificial Sequence
  ENSG00000157131_10 (sequence is synthesized)
tatcaggagaccattgtaaaaaatttggaggtggcaaaactgaaagggccaggaaggccatggctgtggaagacattatttctcgggtgcgaggtggcagttctggctggagcggtggct

SEQ ID NO: 458648 - DNA, 120 bp, Artificial Sequence
  ENSG00000157131_11 (sequence is synthesized)
tggcacagaacaggagcaccattacataccgttcctgggggaggtcattaaagtataatcctgttgttatcgattttgagatgcagcctatccacgaggtgctgcggcacacaagcctgg

SEQ ID NO: 458649 - DNA, 120 bp, Artificial Sequence
  ENSG00000157131_12 (sequence is synthesized)
ggcctctggaggccaagcgccagaacctgcgccgcgccttggaccagtatctgatggaattcaatgcctgccgatgtgggccttgcttcaacaatggggtgcccatcctcgagggcacca

SEQ ID NO: 458650 - DNA, 120 bp, Artificial Sequence
  ENSG00000157131_13 (sequence is synthesized)
gctgcaggtgccagtgccgcctgggtagcttgggtgctgcctgtgagcaaacacagacagaaggagccaaagcagatgggagctggagttgctggagctcctggtctgtatgcagagcag

SEQ ID NO: 458651 - DNA, 120 bp, Artificial Sequence
  ENSG00000157131_14 (sequence is synthesized)
gcatccaggaaaggagaagagagtgtgacaatccagcacctcagaatggaggggcctcgtgtccagggcggaaagtacagacgcaggcttgctgagggcctctggacacaggctggacca

SEQ ID NO: 458652 - DNA, 120 bp, Artificial Sequence
  ENSG00000157131_15 (sequence is synthesized)
gatgctgtggatgtcgacccctgcactgactattggataaagacttctttcaactaagagaagatgcaaatcagcacacttttttctttgttctgccagcttccaggcctaagactaggt

SEQ ID NO: 458653 - DNA, 120 bp, Artificial Sequence
  ENSG00000157131_16 (sequence is synthesized)
tttgctgtctacagccaactattctattagttacaaaactcaatcattttattcagcaactggatgttgactgttaactagaagctctgtcctacttacagcactttggatcatcaaaaa

SEQ ID NO: 458654 - DNA, 120 bp, Artificial Sequence
  ENSG00000157131_17 (sequence is synthesized)
aataaagtaaaatagaaaactgagaaaactcaatccatgaccagggagaacttacaggatgttagagacaaaacaagcagacacctgaaacaatcaacgcccaataaaacaaagtaggat

SEQ ID NO: 458655 - DNA, 120 bp, Artificial Sequence
  ENSG00000157131_18 (sequence is synthesized)
gaaaattctcttagttctttgataacaatttgttcactcatagaaacattattaattggtagggtaagcagacactctgaaacaatgagaaaaatactaaaaattgacttgagttatttc

SEQ ID NO: 458656 - DNA, 120 bp, Artificial Sequence
  ENSG00000157150_0 (sequence is synthesized)
cttgggaaggagccctgctggggccgtccagtcccccagacctcacaggctcagtcgcggatctgcagtgtcatgcctgggagccctcggcccgcgccaagctgggtgctgttgctgcgg

SEQ ID NO: 458657 - DNA, 120 bp, Artificial Sequence
  ENSG00000157150_1 (sequence is synthesized)
ctgctggcgttgctgcggcccccggggctgggtgaggcatgcagctgcgccccggcgcaccctcagcagcacatctgccactcggcacttgtgattcgggccaaaatctccagtgagaag

SEQ ID NO: 458658 - DNA, 120 bp, Artificial Sequence
  ENSG00000157150_2 (sequence is synthesized)
gtagttccggccagtgcagaccctgctgacactgaaaaaatgctccggtatgaaatcaaacagataaagatgttcaaagggtttgagaaagtcaaggatgttcagtatatctatacgcct

SEQ ID NO: 458659 - DNA, 120 bp, Artificial Sequence
  ENSG00000157150_3 (sequence is synthesized)
tttgactcttccctctgtggtgtgaaactagaagccaacagccagaagcagtatctcttgactggtcaggtcctcagtgatggaaaagtcttcatccatctgtgcaactacatcgagccc

SEQ ID NO: 458660 - DNA, 120 bp, Artificial Sequence
  ENSG00000157150_4 (sequence is synthesized)
gagtgcctctggacagactggctgttggaacgaaagctctatggttaccaggctcagcattatgtctgtatgaagcatgttgacggcacctgcagctggtaccggggccacctgcctctc

SEQ ID NO: 458661 - DNA, 120 bp, Artificial Sequence
  ENSG00000157150_5 (sequence is synthesized)
aggaaggagtttgttgacatcgttcagccctagtagggaccagtgaccatcacatcccttcaagagtcctgaagatcaagccagttctccttccctgcagagctttggccattaccacct

SEQ ID NO: 458662 - DNA, 120 bp, Artificial Sequence
  ENSG00000157150_6 (sequence is synthesized)
gacctcttgctgccagctaataagaagtgccaagtggacagtctggccactgtcaaggcagggaaggggccatgacttttctgccctgccctcagcctgttgcccctgcctcccaaaccc

SEQ ID NO: 458663 - DNA, 120 bp, Artificial Sequence
  ENSG00000157150_7 (sequence is synthesized)
cattagtctagccttgtagctgttactgcaagtgtttcttctggcttagtctgttttctaaagccaggactattccctttcctccccaggaatatgtgttttcctttgtcttaatcgatc

SEQ ID NO: 458664 - DNA, 120 bp, Artificial Sequence
  ENSG00000157150_8 (sequence is synthesized)
tggtaggggagaaatggcgaatgtcatacacatgagatggtatatccttgcgatgtacagtatcagaaggtggtttgacagcatcataaacaggctgactggcaggaatgaaaacaagaa

SEQ ID NO: 458665 - DNA, 120 bp, Artificial Sequence
  ENSG00000157152_0 (sequence is synthesized)
agaccgccgctgctgtctgcggggtctggtgccggggcctgagtctctgctggctaagccgccgcctcagccgcctcagtcgcctcaatctcgccttccgccctcgctctccctccgcgc

SEQ ID NO: 458666 - DNA, 120 bp, Artificial Sequence
  ENSG00000157152_1 (sequence is synthesized)
caccagaccccgtagccccgcgcgcccccagccctttaagccagatgatgaacttcctgcggcgccggctgtcggacagcagcttcatcgccaacctgcccaacggctacatgaccgacc

SEQ ID NO: 458667 - DNA, 80 bp, Artificial Sequence
  ENSG00000157152_2 (sequence is synthesized)
aacctgcccaacggctacatgaccgacctgcagcggcccgagccccagcagccgccgccgccgccgccccccggtccggg

SEQ ID NO: 458668 - DNA, 120 bp, Artificial Sequence
  ENSG00000157152_3 (sequence is synthesized)
cggcgcccgcgccgcagcccgcgccgacgccgtcggtgggcagcagcttcttcagctcgctgtcccaagccgtgaagcagacggccgcctcggctggcctggtggacgcgcccgctcccg

SEQ ID NO: 458669 - DNA, 120 bp, Artificial Sequence
  ENSG00000157152_4 (sequence is synthesized)
cgcccgcagccgccaggaaggccaaggtgctgctggtggtcgacgagccgcacgccgactgggccaagtgctttcggggcaaaaaagtccttggagattatgatatcaaggtggaacagg

SEQ ID NO: 458670 - DNA, 120 bp, Artificial Sequence
  ENSG00000157152_5 (sequence is synthesized)
cagaattttcagagctcaacctggtggcccatgcagatggcacctatgctgtggatatgcaggttctccggaatggcacaaaggttgtccggtccttccggccagacttcgtgctcatcc

SEQ ID NO: 458671 - DNA, 120 bp, Artificial Sequence
  ENSG00000157152_6 (sequence is synthesized)
ggcagcatgcatttggcatggcggagaatgaggacttccgccacctgatcattggtatgcagtatgcaggcctccccagcatcaactcactggaatccatatacaacttctgtgacaagc

SEQ ID NO: 458672 - DNA, 120 bp, Artificial Sequence
  ENSG00000157152_7 (sequence is synthesized)
catgggtgtttgcccagctggtcgctatctataagacactgggaggagaaaagttccctctcattgaacagacatactaccccaaccacaaagagatgctgacactgcccacgttccctg

SEQ ID NO: 458673 - DNA, 120 bp, Artificial Sequence
  ENSG00000157152_8 (sequence is synthesized)
tggtggtgaagattggccacgctcactcaggcatgggcaaggtcaaagtggaaaaccactacgacttccaggacattgccagcgtggtggctctcacccagacctatgccactgcagagc

SEQ ID NO: 458674 - DNA, 120 bp, Artificial Sequence
  ENSG00000157152_9 (sequence is synthesized)
ctttcattgactccaagtatgacatccgggtccagaagattggcaacaactacaaggcttacatgaggacatcgatctcagggaactggaagacgaacactggctctgcgatgctggagc

SEQ ID NO: 458675 - DNA, 120 bp, Artificial Sequence
  ENSG00000157152_10 (sequence is synthesized)
agattgccatgtcagacaggtacaaactgtgggtggacacctgctctgagatgtttggcggcctggacatctgtgctgtcaaagctgtacatggcaaagatgggaaagactacatttttg

SEQ ID NO: 458676 - DNA, 120 bp, Artificial Sequence
  ENSG00000157152_11 (sequence is synthesized)
aggtcatggactgtagcatgccactgattggggaacatcaggtggaggacaggcaactcatcaccgaactagtcatcagcaagatgaaccagctgctgtccaggactcctgccctgtctc

SEQ ID NO: 458677 - DNA, 120 bp, Artificial Sequence
  ENSG00000157152_12 (sequence is synthesized)
ctcagagacccctaacaacccagcagccacagagcggaacacttaaggatccggactcaagcaagaccccacctcagcggccaccccctcaagggggccctgggcaaccccaaggaatgc

SEQ ID NO: 458678 - DNA, 120 bp, Artificial Sequence
  ENSG00000157152_13 (sequence is synthesized)
tcctcctcctcggctcctcagcggccgggcggccccaccacccacggagatgcaccctccagcagcagctccctggcagaggcccagccacccctggctgctccaccacagaagccccag

SEQ ID NO: 458679 - DNA, 120 bp, Artificial Sequence
  ENSG00000157152_14 (sequence is synthesized)
cctcacccacagctcaacaagtcgcagtccctgacaaatgccttcagcttctctgagtcctccttcttccggtcttcagccaatgaggatgaagccaaagcagagaccatccggagcttg

SEQ ID NO: 458680 - DNA, 120 bp, Artificial Sequence
  ENSG00000157152_15 (sequence is synthesized)
aggaagtcctttgccagcctcttttcagattagctcttcagacacacggggcacccagcccaaccgggaaaggcatctaagacattcaccaacaacagtcagccagcttggtggttatgt

SEQ ID NO: 458681 - DNA, 120 bp, Artificial Sequence
  ENSG00000157152_16 (sequence is synthesized)
cccatgaccttgacgtgtgtggtcccttcctctgctctgttgtactaagtgatgttgtgcagcccagaaaggaccatttgacagtctcagggcaggtgcctacccagcaaggggtacctg

SEQ ID NO: 458682 - DNA, 120 bp, Artificial Sequence
  ENSG00000157152_17 (sequence is synthesized)
gcatcagagaggaaagagctgcttccctgtagtcatgagagcttccttctgaagtcatcgttcgctgtgagtttagtggccttattgtgacagtgccatcatgtcttattcttccctgtg

SEQ ID NO: 458683 - DNA, 120 bp, Artificial Sequence
  ENSG00000157152_18 (sequence is synthesized)
aaaccaggattaatcgtggactcctggcagcttaacctagctcagttgcagtgctaagcatgccccgcccccattcagtgatacctgtttgggaagtatatacttccccaaaagtactct

SEQ ID NO: 458684 - DNA, 120 bp, Artificial Sequence
  ENSG00000157152_19 (sequence is synthesized)
tggccctaagttttaggaactttccccgacctggatcccttgtcatacctgtgttactgtttaaagcacacccacccaacttacaagatcttaggctgctgtggtggtgaagcaccttga

SEQ ID NO: 458685 - DNA, 120 bp, Artificial Sequence
  ENSG00000157152_20 (sequence is synthesized)
gtctgctgatattcgggagaacaaggatctgcagtttccccttttctcccctctgaagagtggttcttatgtgcaatctgcagtaaccttgaactccagagctgcactatagaggagaat

SEQ ID NO: 458686 - DNA, 120 bp, Artificial Sequence
  ENSG00000157152_21 (sequence is synthesized)
gcatgccactatgacagcagtatgccaagctttgtgttcatctcctaataaacgttaagacctttggtgtaataaaagcagcagcattcaccaacatttgattcagccatgaggtcttga

SEQ ID NO: 458687 - DNA, 120 bp, Artificial Sequence
  ENSG00000157152_22 (sequence is synthesized)
ccccttggccaccctttaggctgagagagtgtccatgaggggtgtgtgtgtgtgtgtgcttgagtgtagggagtgaaaaatctaggtgtgtgaagctgtttgtgtcagtttgtgtgtgtg

SEQ ID NO: 458688 - DNA, 120 bp, Artificial Sequence
  ENSG00000157152_23 (sequence is synthesized)
actgcaggtgtacatgtgtttgcaagtgtttgagaatgtgtctgtcctttacataccacttctgggcctcctcgcacctccccagtgaatctgtctcctccaagacacctagccttcctt

SEQ ID NO: 458689 - DNA, 120 bp, Artificial Sequence
  ENSG00000157152_24 (sequence is synthesized)
cagcaactcagcgtttctacctatattacggactttgtaacctttcaaataagcacagaacccttgctcccggaggagtcaatttagactcacttgcctggtctatcatcaagctcctca

SEQ ID NO: 458690 - DNA, 120 bp, Artificial Sequence
  ENSG00000157152_25 (sequence is synthesized)
gctgaggcccacatggtggtgccaatgaggctggaccaacctgctctgacaaccaggctcccacagatctcaacgaaggcatcctaaagaggcctgcaattgagggtgggctctgaggga

SEQ ID NO: 458691 - DNA, 120 bp, Artificial Sequence
  ENSG00000157152_26 (sequence is synthesized)
tttcactctggctgcttcatgactccctgatactcaagtatattttcccaaagaccacggatgctgtgaagataaacactacatctgcaccaataaaaaatccatatattaaaatgttaa

SEQ ID NO: 458692 - DNA, 120 bp, Artificial Sequence
  ENSG00000157152_27 (sequence is synthesized)
caaaacaagtccaagcttcttaaaatgattggtggttaatttttcaaagcagaaattttaagccaaaaacaaacgaaaggaaagcggggaggggaaaacagaccctcccactggtgccgt

SEQ ID NO: 458693 - DNA, 120 bp, Artificial Sequence
  ENSG00000157152_28 (sequence is synthesized)
tgctgcgttctttcaatgctgactggactgtgtttttcctatgcagtgtcagctcctctgtctggttgtttacctgttcctgttcgtgcttgtaatgctcacttatgttttctctgtata

SEQ ID NO: 458694 - DNA, 120 bp, Artificial Sequence
  ENSG00000157152_29 (sequence is synthesized)
acttgtgattccagggctgtttgtcaacagtatacaaaagaattgtgcctctcccaagtccagtgtgactttatcttctgggtggtttgatagtgtttttaaaagtaatatataatgtgg

SEQ ID NO: 458695 - DNA, 120 bp, Artificial Sequence
  ENSG00000157152_30 (sequence is synthesized)
agaaacgaaaaccacaaaaagaaaacccaactcctctcctccccccaagctcagttaaatcccccacctccaactttccctccaccagtgtgcttgggatcttcaatgaactgtgctttt

SEQ ID NO: 458696 - DNA, 120 bp, Artificial Sequence
  ENSG00000157152_31 (sequence is synthesized)
cgctttctttctgcatgactattgtaactagatagaacattaagagattttcaagatcaaacttccatagcttcatccactgaatttgaaggcatccacctttttctccatttgctaaaa

SEQ ID NO: 458697 - DNA, 120 bp, Artificial Sequence
  ENSG00000157152_32 (sequence is synthesized)
tttggtgcagtttgagtttatgtgaataggctggctgtgcctgtagagctcttgtgtttttagtgatgacatgaaatacaaagaacaagctatttccaggaatgtgttctgtattttaca

SEQ ID NO: 458698 - DNA, 120 bp, Artificial Sequence
  ENSG00000157152_33 (sequence is synthesized)
tcccagtgtaccctttattttattattaactaattaactatgagatttttaaaaaatggggccgctgatgtgcaatatcaaagtgaacttgtgagtattttgtgtgtgttgatctcagtt

SEQ ID NO: 458699 - DNA, 120 bp, Artificial Sequence
  ENSG00000157152_34 (sequence is synthesized)
gtttcttcattgttgctgtttctggatccagccatgtgtgcgcttgtgtggacctgaggctgctttctgttcccaaagcttgacctgtgtacagagataattccttggcaatgttggaca

SEQ ID NO: 458700 - DNA, 120 bp, Artificial Sequence
  ENSG00000157152_35 (sequence is synthesized)
tagaatgcagggagctactgaaggtctgtcagggatttgtccattctgctcttggcctctcctgaggcctcataatgggagaccaaatcaaaaatgtcccatgtcacttgagtgggtaca

SEQ ID NO: 458701 - DNA, 120 bp, Artificial Sequence
  ENSG00000157152_36 (sequence is synthesized)
ctgcctacagaaccttgaggttgactcctgcttcagttctcagctgtttaccacagccctccagggtccaaagattgaggagctttctctttcctgggaggaactgtctcagatttagct

SEQ ID NO: 458702 - DNA, 120 bp, Artificial Sequence
  ENSG00000157152_37 (sequence is synthesized)
tgtgtgtgttttggacagaggctccacagcggtggctcttgaggaatcctcaccagtttgttctcttccctctgacaagcagcacctgagcagatgctgaggcagttcattaaaccaggc

SEQ ID NO: 458703 - DNA, 120 bp, Artificial Sequence
  ENSG00000157152_38 (sequence is synthesized)
ctcagcttcagtgcctcatcttgccatctcccggccaggctgggaacgggcaccaagcagccgcctctaacaaacaccatggtccgtggaagttcatgccagcagcttgcctttgagaag

SEQ ID NO: 458704 - DNA, 120 bp, Artificial Sequence
  ENSG00000157152_39 (sequence is synthesized)
aaatgctgctggctctatttttacattcccttccacctctatactgtcatgtcaccgttctgaactcccagatctgagaaggaactagtgttggtggtatgtaacaagagttacgtatcc

SEQ ID NO: 458705 - DNA, 120 bp, Artificial Sequence
  ENSG00000157152_40 (sequence is synthesized)
aggggcttgtgccttggtttctcctttgattgctggtaaattctgaggccacagagaaatgcattgagtgtgaatgttgtcatctgtaatccctccctcagctgataatggtagttgatc

SEQ ID NO: 458706 - DNA, 120 bp, Artificial Sequence
  ENSG00000157152_41 (sequence is synthesized)
tgttgtaaatatatacatatatgcatatttgcacttccagatgggttgcataagaatcaggtccttaaatacctcccaatctgatgaaacgatagaataaagtaacatttcccagaatgg

SEQ ID NO: 458707 - DNA, 120 bp, Artificial Sequence
  ENSG00000157152_42 (sequence is synthesized)
aggaatacattattttatcgtatatttttgtccaagcgatgagctgacggtggtattgcttctctgcatgttatcagtgtgtacatctggtgcttttcatgtgtcatttgtgagccacaa

SEQ ID NO: 458708 - DNA, 120 bp, Artificial Sequence
  ENSG00000157152_43 (sequence is synthesized)
atgcaaagttgccatttgaattcagtcaggctacagggtggtgtcagtcaaggtctttcaggtgggggagaaattggttagggctcccactgccaaatgcaagcagatagcataacctga

SEQ ID NO: 458709 - DNA, 120 bp, Artificial Sequence
  ENSG00000157152_44 (sequence is synthesized)
ctgttatgtgccctcaggcagcatgcttagggacaactctgtggcctgggggacatctgtgtcacagtataggattgccattcaggtgttttgtacctatttctttcctgacgttgtccc

SEQ ID NO: 458710 - DNA, 120 bp, Artificial Sequence
  ENSG00000157152_45 (sequence is synthesized)
ctttttttgtactgatccaactgggagaacctcagccaatgctggaagtatgattgaagtacctctcttttgtgactcttgtacagcttaatgtgcaataaaggaaaagttatatctgtc

SEQ ID NO: 458711 - DNA, 120 bp, Artificial Sequence
  ENSG00000157152_46 (sequence is synthesized)
attgctgtctctgaagttggtcagggcaagccactgggatttggggagcagaagtggacctgtcaatgaaagcagcattccagacaaagcaagaatggcaccaccgtttattgctgccag

SEQ ID NO: 458712 - DNA, 120 bp, Artificial Sequence
  ENSG00000157152_47 (sequence is synthesized)
ctgctattctccctctgtcactgatgaattctttccaaagagaagatgatttgccacctctaaagccatgagtgtcacccaaccagacctctttcagtcaaagtggaaaaccactacgac

SEQ ID NO: 458713 - DNA, 120 bp, Artificial Sequence
  ENSG00000157152_48 (sequence is synthesized)
actaatcccccacaaccaccccctgctgtggacctcgcggacctcggactcaccaagtgccgagtggcagatgtgctgctgagggtgcgccggggcgcagctgcatgcctcacccagccc

SEQ ID NO: 458714 - DNA, 120 bp, Artificial Sequence
  ENSG00000157152_49 (sequence is synthesized)
cgggggccgcagcaacgccagcagccgcagcaacagcacccagcttggcgcgggccgagggctcccaggcatgacactgcagatccgcgactgagcctgtgagctgacactgcccacgtt

SEQ ID NO: 458715 - DNA, 120 bp, Artificial Sequence
  ENSG00000157152_50 (sequence is synthesized)
aagttaacttttaccccttggtatttgtagaatgcctatacatatctttgatttcttagtacaagtggcttggtcactttgtggctgttgtaagaacgtgcttgtggaagacaagtctgt

SEQ ID NO: 458716 - DNA, 120 bp, Artificial Sequence
  ENSG00000157168_0 (sequence is synthesized)
gggacaaacttttcccaaacccgatccgagcccttggaccaaactcgcctgcgccgagagccgtccgcgtagagcgctccgtctccggcgagatgtccgagcgcaaagaaggcagaggca

SEQ ID NO: 458717 - DNA, 120 bp, Artificial Sequence
  ENSG00000157168_1 (sequence is synthesized)
aagggaagggcaagaagaaggagcgaggctccggcaagaagccggagtccgcggcgggcagccagagcccagccttgcctccccgattgaaagagatgaaaagccaggaatcggctgcag

SEQ ID NO: 458718 - DNA, 120 bp, Artificial Sequence
  ENSG00000157168_2 (sequence is synthesized)
gttccaaactagtccttcggtgtgaaaccagttctgaatactcctctctcagattcaagtggttcaagaatgggaatgaattgaatcgaaaaaacaaaccacaaaatatcaagatacaaa

SEQ ID NO: 458719 - DNA, 120 bp, Artificial Sequence
  ENSG00000157168_3 (sequence is synthesized)
aaaagccagggaagtcagaacttcgcattaacaaagcatcactggctgattctggagagtatatgtgcaaagtgatcagcaaattaggaaatgacagtgcctctgccaatatcaccatcg

SEQ ID NO: 458720 - DNA, 120 bp, Artificial Sequence
  ENSG00000157168_4 (sequence is synthesized)
tggaatcaaacgagatcatcactggtatgccagcctcaactgaaggagcatatgtgtcttcagagtctcccattagaatatcagtatccacagaaggagcaaatacttcttcatctacat

SEQ ID NO: 458721 - DNA, 120 bp, Artificial Sequence
  ENSG00000157168_5 (sequence is synthesized)
ctacatccaccactgggacaagccatcttgtaaaatgtgcggagaaggagaaaactttctgtgtgaatggaggggagtgcttcatggtgaaagacctttcaaacccctcgagatacttgt

SEQ ID NO: 458722 - DNA, 120 bp, Artificial Sequence
  ENSG00000157168_6 (sequence is synthesized)
gcaagtgcccaaatgagtttactggtgatcgctgccaaaactacgtaatggccagcttctacaagcatcttgggattgaatttatggaggcggaggagctgtaccagaagagagtgctga

SEQ ID NO: 458723 - DNA, 120 bp, Artificial Sequence
  ENSG00000157168_7 (sequence is synthesized)
ccataaccggcatctgcatcgccctccttgtggtcggcatcatgtgtgtggtggcctactgcaaaaccaagaaacagcggaaaaagctgcatgaccgtcttcggcagagccttcggtctg

SEQ ID NO: 458724 - DNA, 120 bp, Artificial Sequence
  ENSG00000157168_8 (sequence is synthesized)
tgttgagagagaagcagagacatccttttccaccagtcactatacttccacagcccatcactccactactgtcacccagactcctagccacagctggagcaacggacacactgaaagcat

SEQ ID NO: 458725 - DNA, 120 bp, Artificial Sequence
  ENSG00000157168_9 (sequence is synthesized)
cctttccgaaagccactctgtaatcgtgatgtcatccgtagaaaacagtaggcacagcagcccaactgggggcccaagaggacgtcttaatggcacaggaggccctcgtgaatgtaacag

SEQ ID NO: 458726 - DNA, 120 bp, Artificial Sequence
  ENSG00000157168_10 (sequence is synthesized)
cttcctcaggcatgccagagaaacccctgattcctaccgagactctcctcatagtgaaaggtatgtgtcagccatgaccaccccggctcgtatgtcacctgtagatttccacacgccaag

SEQ ID NO: 458727 - DNA, 120 bp, Artificial Sequence
  ENSG00000157168_11 (sequence is synthesized)
ctcccccaaatcgcccccttcggaaatgtctccacccgtgtccagcatgacggtgtccatgccttccatggcggtcagccccttcatggaagaagagagacctctacttctcgtgacacc

SEQ ID NO: 458728 - DNA, 120 bp, Artificial Sequence
  ENSG00000157168_12 (sequence is synthesized)
accaaggctgcgggagaagaagtttgaccatcaccctcagcagttcagctccttccaccacaaccccgcgcatgacagtaacagcctccctgctagccccttgaggatagtggaggatga

SEQ ID NO: 458729 - DNA, 120 bp, Artificial Sequence
  ENSG00000157168_13 (sequence is synthesized)
ggagtatgaaacgacccaagagtacgagccagcccaagagcctgttaagaaactcgccaatagccggcgggccaaaagaaccaagcccaatggccacattgctaacagattggaagtgga

SEQ ID NO: 458730 - DNA, 120 bp, Artificial Sequence
  ENSG00000157168_14 (sequence is synthesized)
cagcaacacaagctcccagagcagtaactcagagagtgaaacagaagatgaaagagtaggtgaagatacgcctttcctgggcatacagaaccccctggcagccagtcttgaggcaacacc

SEQ ID NO: 458731 - DNA, 120 bp, Artificial Sequence
  ENSG00000157168_15 (sequence is synthesized)
tgccttccgcctggctgacagcaggactaacccagcaggccgcttctcgacacaggaagaaatccaggccaggctgtctagtgtaattgctaaccaagaccctattgctgtataaaacct

SEQ ID NO: 458732 - DNA, 120 bp, Artificial Sequence
  ENSG00000157168_16 (sequence is synthesized)
gtggctgcggggcaattgaaaaagagccggcgaggagttccccgaaacttgttggaactccgggctcgcgcggaggccaggagctgagcggcggcggctgccggacgatgggagcgtgag

SEQ ID NO: 458733 - DNA, 120 bp, Artificial Sequence
  ENSG00000157168_17 (sequence is synthesized)
caggacggtgataacctctccccgatcgggttgcgagggcgccgggcagaggccaggacgcgagccgccagcggtgggacccatcgacgacttcccggggcgacaggagcagccccgaga

SEQ ID NO: 458734 - DNA, 120 bp, Artificial Sequence
  ENSG00000157168_18 (sequence is synthesized)
caggtggccggaccgcccgccgcgtccgcgccgcgctccctgcaggcaacgggagacgcccccgcgcagcgcgagcgcctcagcgcggccgctcgctctccccctcgagggacaaacttt

SEQ ID NO: 458735 - DNA, 120 bp, Artificial Sequence
  ENSG00000157168_19 (sequence is synthesized)
aacacatagattcacctgtaaaactttattttatataataaagtattccaccttaaattaaacaatttattttattttagcagttctgcaaatagaaaacaggaaaaaaacttttataaa

SEQ ID NO: 458736 - DNA, 120 bp, Artificial Sequence
  ENSG00000157168_20 (sequence is synthesized)
aaaaatgtgttatgtgccatatgtagcaattttttacagtatttcaaaacgagaaagatatcaatggtgcctttatgttatgttatgtcgagagcaagttttgtacagttacagtgattg

SEQ ID NO: 458737 - DNA, 120 bp, Artificial Sequence
  ENSG00000157168_21 (sequence is synthesized)
cttttccacagtatttctgcaaaacctctcatagattcagtttttgctggcttcttgtgcattgcattatgatgttgactggatgtatgatttgcaagacttgcaactgtccctctgttt

SEQ ID NO: 458738 - DNA, 120 bp, Artificial Sequence
  ENSG00000157168_22 (sequence is synthesized)
gcttgtagtagcacccgatcagtatgtcttgtaatggcacatccatccagatatgcctctcttgtgtatgaagttttctttgctttcagaatatgaaatgagttgtgtctactctgccag

SEQ ID NO: 458739 - DNA, 120 bp, Artificial Sequence
  ENSG00000157168_23 (sequence is synthesized)
ctactattaaatacagcaagaaactgcattaagtaatgttaaatattaggaagaaagtaatactgtgatttaaaaaaaactatattattaatcagaagacagcttgctcttactaaaagg

SEQ ID NO: 458740 - DNA, 120 bp, Artificial Sequence
  ENSG00000157168_24 (sequence is synthesized)
agctctcatttactttatttgattttatttttcttgacaaaaagcaacagttttagggatagcttagaaaatgggttctggcttgctatcagggtaaatctaacaccttacaagaggact

SEQ ID NO: 458741 - DNA, 120 bp, Artificial Sequence
  ENSG00000157168_25 (sequence is synthesized)
gagtgtcactttctctctgggggaatgatccagcagcttatctagttgacaatcaaaacacggctgataaaggtgcaatcatttctgacatgtatttttcactgattttgaagctagtga

SEQ ID NO: 458742 - DNA, 120 bp, Artificial Sequence
  ENSG00000157168_26 (sequence is synthesized)
ttggttgtgtcttcttggctcaaaaagaagcatattacggcacaaaaagcccagcccagacagcacatgcagcattttgtctgaaatacttctagagtcaaacgtgcctgctgtacatag

SEQ ID NO: 458743 - DNA, 120 bp, Artificial Sequence
  ENSG00000157168_27 (sequence is synthesized)
cgatgacttgtcatcatagggaagtatttccatcgtagagtgttcagaaggagtgactgtataggtggagagaagcttagtgactccgttgaaattttaaaatgtggatgaccacccctt

SEQ ID NO: 458744 - DNA, 120 bp, Artificial Sequence
  ENSG00000157168_28 (sequence is synthesized)
tctcccccttatttttcttttatctttccatgttgccttgatcaggtcataactatgcatgaacattttttatcaggaatggccgatgtgtatgtgatttgtaatcacaagtaatgattc

SEQ ID NO: 458745 - DNA, 120 bp, Artificial Sequence
  ENSG00000157168_29 (sequence is synthesized)
atcaggaaatgtcaatcctgttggaaagattgcacctttacttgcagaagtgacccccacctgtgtcctgacctctccatttacaggctctctcacccatttcccccacctcctttaatt

SEQ ID NO: 458746 - DNA, 120 bp, Artificial Sequence
  ENSG00000157168_30 (sequence is synthesized)
tttgctttactgtcataaagtaggactaagattggtctaagcattgcatgttcttttgtgatggtaaatccaaaggaaggcctataagtattaacatttgaaataactgctaattcagga

SEQ ID NO: 458747 - DNA, 120 bp, Artificial Sequence
  ENSG00000157168_31 (sequence is synthesized)
aaatggaagaaaaaaaattatttgaaacacagaacccatttcatggcctgcctgatatctgtgaaatcagggctggagctttacttaggattcacatggcctcctaggaaccatgggaca

SEQ ID NO: 458748 - DNA, 120 bp, Artificial Sequence
  ENSG00000157168_32 (sequence is synthesized)
aatgggaaacaggttatcgggggattcatgaagtcagtgagagtaattgcttcttttttgcgggtgaactgaatgtatttcttcaccaaatcttgatgttaacaattaaaaagaagaaat

SEQ ID NO: 458749 - DNA, 120 bp, Artificial Sequence
  ENSG00000157168_33 (sequence is synthesized)
gacatgcaagtaggtcttagcagaaaaatgcaggctgggcatgagtcatgttgttaccctcccacatgctcctacaatccacagagatgcctgtctgcaggttcttgaagttattgttag

SEQ ID NO: 458750 - DNA, 120 bp, Artificial Sequence
  ENSG00000157168_34 (sequence is synthesized)
tatttggtatctcaaatttttcgtcactgttcacatgccactttctctgtgcacagtggtatcctcatttgctttttaacctacactgaggagtctttgtcaggttgcactgattttcca

SEQ ID NO: 458751 - DNA, 120 bp, Artificial Sequence
  ENSG00000157168_35 (sequence is synthesized)
attctgcagtaatgagtaagctcacggcatggggaagaagacagtcagtccaatgaagttctctaaattattttaacattgcctttgaaggccttgactcatccttagctatttcaatga

SEQ ID NO: 458752 - DNA, 120 bp, Artificial Sequence
  ENSG00000157168_36 (sequence is synthesized)
agaaattcctaccatgaatttaaaaccctaaaaattctgtttcaaattctttgggcattggggtactcagatatcccattgtggaagaattttaagaataaatagaagtttctgttgaga

SEQ ID NO: 458753 - DNA, 120 bp, Artificial Sequence
  ENSG00000157168_37 (sequence is synthesized)
accatgagcaacatgtttcttacaatgagaattgctatgcattttaaaattgcaaatatatatgaaaattgaagacaagaggaaattgtatttctaacttgattctgatcactcacagag

SEQ ID NO: 458754 - DNA, 120 bp, Artificial Sequence
  ENSG00000157168_38 (sequence is synthesized)
gtggcatattattatagttgggacatcctttgcacccttcataaaaaaggccagctgactgctcagcatcacctgccaaggccactagatttgtgtttacaggggtatctctgtgatgct

SEQ ID NO: 458755 - DNA, 120 bp, Artificial Sequence
  ENSG00000157168_39 (sequence is synthesized)
tgtcacatcactcttgaccacctctgttaataaattccgacagtgcagtggcgatcggagtgtgaacttatgttcccagcatatggaaagctatcttaggttttaaggtagtagaaattg

SEQ ID NO: 458756 - DNA, 120 bp, Artificial Sequence
  ENSG00000157168_40 (sequence is synthesized)
cccaggagtttgacagcaactttgtttcccgggtctaaaatcgtatcccactgaggtgtatgcagtggagcataatacatgcaaatacatgcaaaactccttttgtttcacctaagattc

SEQ ID NO: 458757 - DNA, 120 bp, Artificial Sequence
  ENSG00000157168_41 (sequence is synthesized)
actttctatcttactttcccttcctgcctagtgtgacttttgcccccaagagtgcctggacagcattctagtttctacaaaatggtcctctgtgtaggtgaatgtgtcccaaacctgcta

SEQ ID NO: 458758 - DNA, 120 bp, Artificial Sequence
  ENSG00000157168_42 (sequence is synthesized)
tcactttcttgtttcagtgtgactgtcttgttagaggtgaagtttatccagggtaacttgctcactaactattcctttttatggcctggggttaaagggcgcatggctcacactggtgaa

SEQ ID NO: 458759 - DNA, 120 bp, Artificial Sequence
  ENSG00000157168_43 (sequence is synthesized)
aataaggaaggcctggtcttatcttgtattaataatactggctgcattccaccagccagagatttctatctgcgaagacctatgaaacactgaagagaaatgtaggcagaaggaaatggc

SEQ ID NO: 458760 - DNA, 120 bp, Artificial Sequence
  ENSG00000157168_44 (sequence is synthesized)
cacatatcacaagttctattatatattcttttgtaaatacatattgtatattacttggatgttttcttatatcatttactgtctttttgagttaatgtcagtttttactctctcaactta

SEQ ID NO: 458761 - DNA, 120 bp, Artificial Sequence
  ENSG00000157168_45 (sequence is synthesized)
gtcagtttttactctctcaacttactatgtaacattgtaaataacataatgtcctttattatttatatttaagcatctaacatatagagttgttttcatataagtttaagataaatgtca

SEQ ID NO: 458762 - DNA, 120 bp, Artificial Sequence
  ENSG00000157168_46 (sequence is synthesized)
tttgctttaaaattatgtatcttttccttttcttttttttaagaataatttattgttcaggagaaagaatgtatatgtaactgaaactatctgaagaatgcacattgaaggccgtgaggt

SEQ ID NO: 458763 - DNA, 120 bp, Artificial Sequence
  ENSG00000157168_47 (sequence is synthesized)
actgataaactaaagaatttattattcaaaatactaagcaataagtaattgtgatttatttaaagttttgtccattttccatgaaagacatactgcaataaaaatgctactctgtggaga

SEQ ID NO: 458764 - DNA, 120 bp, Artificial Sequence
  ENSG00000157168_48 (sequence is synthesized)
tgaagcgtcacctctcactccccagtaagcctccgcagcccactcggactgcagcctgtttgccgcccgtcctcccattgcagcactcggggcgacagagagggaggaggcgcgcgggga

SEQ ID NO: 458765 - DNA, 120 bp, Artificial Sequence
  ENSG00000157168_49 (sequence is synthesized)
cgacagagagggaggaggcgcgcggggacggggacgcccaggaggacccactcgcgggtcccgctccgctccggcagcagcatggggaaaggacgcgcgggccgagttggcaccacagcc

SEQ ID NO: 458766 - DNA, 120 bp, Artificial Sequence
  ENSG00000157168_50 (sequence is synthesized)
caccttgtctatacgttgcttcttgtctgtccattgcttttgccacaccacctgttctcaaatcatctcctccctaccaatgctgtttatcactttcttccttgttgaagaggccacaca

SEQ ID NO: 458767 - DNA, 120 bp, Artificial Sequence
  ENSG00000157168_51 (sequence is synthesized)
gtagtggcagtaagaaactccttcagactaatgaaaatgtcaacgtgccattcaatcacgaaaggtaacgaaaaatgctctcatggttcaaatagtccaatggcccatagtggcctaaaa

SEQ ID NO: 458768 - DNA, 120 bp, Artificial Sequence
  ENSG00000157168_52 (sequence is synthesized)
ggcagccagttgacacctggccatgctaagcttccttataccatccgctaatgactttccattgggcccacaatttacggattcataattttaaaagaggagaaggccaagttaggttca

SEQ ID NO: 458769 - DNA, 120 bp, Artificial Sequence
  ENSG00000157168_53 (sequence is synthesized)
ttccccttattctgtcaataaaacaaatcaaactcatgtctatctaactgctcagggaggagcctttgcatgagaaaattctcatattctaagactgagtcatagaaatgagggtattac

SEQ ID NO: 458770 - DNA, 120 bp, Artificial Sequence
  ENSG00000157168_54 (sequence is synthesized)
ttttcttactgcaattaacctaaacaaaagccatattttaacaaatagatatttgcatggtacccttcatatattccaagcatttcactcattattccaggtaggttaagagcttctgaa

SEQ ID NO: 458771 - DNA, 120 bp, Artificial Sequence
  ENSG00000157168_55 (sequence is synthesized)
gtgtatgaagtaaaggtcagcaatcctttggggtgaacagtggcctcctttggagtttgggggtaacctgagacttcccaccaatgtccacctccatctgtgtacctaattcctattacc

SEQ ID NO: 458772 - DNA, 120 bp, Artificial Sequence
  ENSG00000157168_56 (sequence is synthesized)
tagttatggctcctctaggatcatttccaaacactctggatgtccaggaaatttaaattgtagcttttgactgagctagtttttcctatttatattaataaattttcaaaaatgcttgaa

SEQ ID NO: 458773 - DNA, 120 bp, Artificial Sequence
  ENSG00000157168_57 (sequence is synthesized)
atcttcacatttgcaacaactttagttttcatgcacatacaaacacagagagacaaaaattccaaacagacactctccaaaagccaccacactctttcacttgctctatagtcatttagc

SEQ ID NO: 458774 - DNA, 120 bp, Artificial Sequence
  ENSG00000157168_58 (sequence is synthesized)
caaccagccatgcagagaatatttaaaacttaaagattgagacattattctcagtttttgctgaggctttgtaacgaaattgaacactataagcagctattgtagtaattttggttaaaa

SEQ ID NO: 458775 - DNA, 120 bp, Artificial Sequence
  ENSG00000157168_59 (sequence is synthesized)
ttgtttgcctgggatatagtatttgaggcagaagcacgtgtgtgaaggaggtgaggtggtttggaaagagtgaagactcgcagccagattgaatgtctggataattactataattctccc

SEQ ID NO: 458776 - DNA, 120 bp, Artificial Sequence
  ENSG00000157168_60 (sequence is synthesized)
ttcttggttgaaaccatgttctctcttgatttttaaacccaggctgcctctggaaacaagcaaacctgagtctttctaacctgagtcttcccaatcattagatttcttttctgtcctaac

SEQ ID NO: 458777 - DNA, 120 bp, Artificial Sequence
  ENSG00000157168_61 (sequence is synthesized)
gatgaatgataaaaggacttgatgttcacaatttggggttataaggcaggtctgaaatctggagactcaagatgctggaaggagtggaaagtttcgatgactttatatgaatcactttgc

SEQ ID NO: 458778 - DNA, 120 bp, Artificial Sequence
  ENSG00000157168_62 (sequence is synthesized)
actctatgtttggcttgtcctctttgaaactgatttactaaaataaatgtaagggaactattactccaaaagattaacttggcaggaaataccaatactttcagtttatgaaagacaaaa

SEQ ID NO: 458779 - DNA, 120 bp, Artificial Sequence
  ENSG00000157168_63 (sequence is synthesized)
ctgtcttgttgctacaggaagctgcaatgttcctaacctttaaggttggtgttgaatagggtggtcatgccctcccctgcaggtatctttaggctcctgttgacctcctggtactataac

SEQ ID NO: 458780 - DNA, 120 bp, Artificial Sequence
  ENSG00000157168_64 (sequence is synthesized)
tgttcgtcttctctgggtagctattgattttgaactttaacatgcttcaaaactttattcatcagggaaataggaaaagagttttgttacctggaggaaatctattgtgatctacctgag

SEQ ID NO: 458781 - DNA, 120 bp, Artificial Sequence
  ENSG00000157168_65 (sequence is synthesized)
ctttttaaaaacagaccaggagaaggaaaccagtaatttttaaagaagagacagagaatgggataatagtttcacccaggatctctttctaaccctttcccttcaaatgaacttattgga

SEQ ID NO: 458782 - DNA, 120 bp, Artificial Sequence
  ENSG00000157168_66 (sequence is synthesized)
acagaattggaaagaagaaaggacatctctgcccaccccacaggatgccaaaaaggctaaagaattacctctgtagatttaaacatctttaatggcttatgtatagatttgctaatacag

SEQ ID NO: 458783 - DNA, 120 bp, Artificial Sequence
  ENSG00000157168_67 (sequence is synthesized)
agagaaatgaactattaaataaaaatcacattttataatatttttatggcttaaaacatcctttatctcctttttgttctctctacatgatatggtaagtgatgaggaaaatttaggctc

SEQ ID NO: 458784 - DNA, 120 bp, Artificial Sequence
  ENSG00000157168_68 (sequence is synthesized)
aggaaggttaaaatctttcttggagttacacatctaagagagctgcagagctgacacttgtacccaggttttctgactgcaaatccagtttctttctattgcgttcttcccctttccctg

SEQ ID NO: 458785 - DNA, 120 bp, Artificial Sequence
  ENSG00000157168_69 (sequence is synthesized)
cctcaagcagaaacaggttttttattttcaacctttatgtatacagtatgttatgttacatctacagctaagtttctttttagaagaatgtgagcccttctagctttggtttagagtgat

SEQ ID NO: 458786 - DNA, 120 bp, Artificial Sequence
  ENSG00000157168_70 (sequence is synthesized)
tctagaagccaatttccttggcttagtgattctatgcacctttcctaaacttagctttctaaggaaatgaagtgtacgagtgagaatgaattcacaatttcgacatgtaggtagcatcct

SEQ ID NO: 458787 - DNA, 120 bp, Artificial Sequence
  ENSG00000157168_71 (sequence is synthesized)
aaagtgaaaagaggaggaaatttgtggtcaaagcactctccccaccacttagaaacttactgactgtgggcagcttcctcctccaagtttccttcctgatttacaagaccgtggtgtggt

SEQ ID NO: 458788 - DNA, 120 bp, Artificial Sequence
  ENSG00000157168_72 (sequence is synthesized)
caggattaaacttgaatacatgtaaggaagcctgaaagtgtctaacacatagcgagtattcaaatgccaccttctatttgatccttcccctccagttccttaagttttggaatctaggtt

SEQ ID NO: 458789 - DNA, 120 bp, Artificial Sequence
  ENSG00000157168_73 (sequence is synthesized)
tctcagttccaaatggattgacatttgcatatccccattgcacaatggatcaaataaactttatgttatcatttctccaacatagtgccagtaagcaaatcctttttaataacaacagta

SEQ ID NO: 458790 - DNA, 120 bp, Artificial Sequence
  ENSG00000157168_74 (sequence is synthesized)
tgttgagaaacatatcaccaaataatatttaactttgtagctttgataagttctttaggttttggttttggttttgttttctgagacagggtcttgatctgtcacccagactggagtgca

SEQ ID NO: 458791 - DNA, 70 bp, Artificial Sequence
  ENSG00000157168_75 (sequence is synthesized)
ctgagacagggtcttgatctgtcacccagactggagtgcaatggttcaattttagctcactgcaacctgt

SEQ ID NO: 458792 - DNA, 80 bp, Artificial Sequence
  ENSG00000157168_76 (sequence is synthesized)
tgcccgacaaggtctcgctatgttgcccaggctggtcttcaattcctggccttaagtgatcctcctgcctcggcctccca

SEQ ID NO: 458793 - DNA, 120 bp, Artificial Sequence
  ENSG00000157168_77 (sequence is synthesized)
tgagccaccacccataactttatgtttgtttttttgatgcagtataagttcagcttgcttcttatgcagccataccatttcatgttaactctgatttttagcagcttattacattagtgt

SEQ ID NO: 458794 - DNA, 120 bp, Artificial Sequence
  ENSG00000157168_78 (sequence is synthesized)
tttattattaatataattttacagaaatttactaaaccatgactctgtagagttttaataatactacctccaaacatcattgcaaacatctagaagaatgaacaaaaatgatcttagatc

SEQ ID NO: 458795 - DNA, 120 bp, Artificial Sequence
  ENSG00000157168_79 (sequence is synthesized)
tctagaagaatgaacaaaaatgatcttagatcgacagtatatctgtttgtcttagtttctacacaggatgttcagacatattccatttctttaaaaaaaaaatatatatatatatatata

SEQ ID NO: 458796 - DNA, 80 bp, Artificial Sequence
  ENSG00000157168_80 (sequence is synthesized)
atatatatatatatatatatataaaatcccaccaaaagtctgcagagtgaccaaattagacggctctggtttcagattaa

SEQ ID NO: 458797 - DNA, 120 bp, Artificial Sequence
  ENSG00000157168_81 (sequence is synthesized)
cggctctggtttcagattaaattctaaatgtgagaaaccacatagctcccatgatccatccaataattcctcacgtcctcttcactctttactccatgcataaaacagaatttttttttc

SEQ ID NO: 458798 - DNA, 120 bp, Artificial Sequence
  ENSG00000157168_82 (sequence is synthesized)
tcatcctgggtatgaagcaattaataatttacggatttagcctatttggattcaatcccttcaaactccatactacatccaaggtggaagtgacttaaactctgatatcaatcatcaggc

SEQ ID NO: 458799 - DNA, 120 bp, Artificial Sequence
  ENSG00000157168_83 (sequence is synthesized)
ttgtaatataggctttgttaatggcaggagagtctaataaaactttctgttccttatccttcatttaaatgaaaaactttttattgaaaacaatcataactctagctcatcataaatata

SEQ ID NO: 458800 - DNA, 120 bp, Artificial Sequence
  ENSG00000157168_84 (sequence is synthesized)
attcatgaggacattttattatttttatattaaagaaataatattatagatgtaaactttgcacctttctaattattatcatgagttaagctaatacttgtcttctggtccctagatgat

SEQ ID NO: 458801 - DNA, 120 bp, Artificial Sequence
  ENSG00000157168_85 (sequence is synthesized)
gattcttttttgccttactggaggagcccttgtcttgaagtgagttgcttcaacagcagaggacttctagtttctcccagttgagcctaaagtgaacttttcatcttcttcagaggaagg

SEQ ID NO: 458802 - DNA, 120 bp, Artificial Sequence
  ENSG00000157168_86 (sequence is synthesized)
ggcttccttgatttgtacttttgtggctcctcagataacacagacaattttatcttggatcccaggttctcttcaccattaagaataagaaagagagaaaatgctgtgcatgacagccac

SEQ ID NO: 458803 - DNA, 120 bp, Artificial Sequence
  ENSG00000157168_87 (sequence is synthesized)
ctactccaaactacccaaccccctgtaaccaggtaccttccaacaacgagatgattctgccctcactcaagagtctcccccacaaagattccattctccctttactttttattttttatt

SEQ ID NO: 458804 - DNA, 120 bp, Artificial Sequence
  ENSG00000157168_88 (sequence is synthesized)
tttttgcaaaacaaaggcctcctttagtacctccttagtttataacccttatcttcccagctcttcccttcactgatacctctgatttcaaaagttctgaagtcggaagaccacacaatt

SEQ ID NO: 458805 - DNA, 120 bp, Artificial Sequence
  ENSG00000157168_89 (sequence is synthesized)
tcagactgtgaacagaaattcagtcagaaattattggagttagaaagaatttagagaaattgtattgaactagaaagtcctctttgattagtggtggccctttagaaagttctagggcag

SEQ ID NO: 458806 - DNA, 120 bp, Artificial Sequence
  ENSG00000157168_90 (sequence is synthesized)
agtcccatggtgtttcatcttttccatgatttgcttgaccaaaaacttttctttcacaacatgaaaatatgctaatccaccacacattttggattctgctctgtttgcctgaggtgttag

SEQ ID NO: 458807 - DNA, 120 bp, Artificial Sequence
  ENSG00000157168_91 (sequence is synthesized)
atctctagccaggactgtgaagggaaggaacttgaatccttcctattgagctattaatgcagagtcagtgagatgaagggttccactcggggtcaaaatcatgtcagttaccaagcaaag

SEQ ID NO: 458808 - DNA, 120 bp, Artificial Sequence
  ENSG00000157168_92 (sequence is synthesized)
gagcaagtaaggggaaacatctcctcatctggttagtggagccacatttcacccactgatcaagccagacctgagcaatagtctagatttctccctccacatctaattggtgacaatggt

SEQ ID NO: 458809 - DNA, 120 bp, Artificial Sequence
  ENSG00000157168_93 (sequence is synthesized)
gattgtaccactgacaggtcacacaagtccacaccctccttcacagcctcactgcttcggctcttgtttatgctcttatcagcatctgtcactaggatccatttgtctcctgactcatct

SEQ ID NO: 458810 - DNA, 120 bp, Artificial Sequence
  ENSG00000157168_94 (sequence is synthesized)
acttcctttcactcccctgggccatccttcacatcatgctagaagactgtgtctaacttgcagaacttattgtgtcaatctcctggttacggcccctccatggctccccacctgacatag

SEQ ID NO: 458811 - DNA, 120 bp, Artificial Sequence
  ENSG00000157168_95 (sequence is synthesized)
gaggcccttcacaatctggcttctgtcactcataacttgtctccagccttcattcttcagtctgattttatggttttctagttccccaatacaccacaccagtgtttatgaaaccctagt

SEQ ID NO: 458812 - DNA, 120 bp, Artificial Sequence
  ENSG00000157168_96 (sequence is synthesized)
cattggcctacgaactttatgattattgacatattcatgtaccacctgtattattttttgcatagtgtttatttttaattgactacatttttaactacaataaagtaatttcaactaaaa

SEQ ID NO: 458813 - DNA, 120 bp, Artificial Sequence
  ENSG00000157168_97 (sequence is synthesized)
attaggtggcacagctctttctgctcagcttctgctccagagcttcatcttcaggaaccacctaagcatttttttccccagtaggagttcagtctgctcattatacctaattgcaaagga

SEQ ID NO: 458814 - DNA, 120 bp, Artificial Sequence
  ENSG00000157168_98 (sequence is synthesized)
ccctttctgtctctgcctgaataggagcatgctcagttggtgctgctttcttgttgctgcatctcccctcagattccacctagagctagatgtgtcttaccagatctaatattgactgcc

SEQ ID NO: 458815 - DNA, 120 bp, Artificial Sequence
  ENSG00000157168_99 (sequence is synthesized)
tctgcctgtcgcatgagaacattaacaaaagcaattgtattacttcctctgttcgcgactagttggctctgagatactaataggtgtgtgaggctccggatgtttctggaattgatattg

SEQ ID NO: 458816 - DNA, 120 bp, Artificial Sequence
  ENSG00000157168_100 (sequence is synthesized)
aatgatgtgatacaaattgatagtcaatatcaagcagtgaaatatgataataaaggcatttcaaagtctcacttttattgataaaataaaaatcattctactgaacagtccatcttcttt

SEQ ID NO: 458817 - DNA, 120 bp, Artificial Sequence
  ENSG00000157168_101 (sequence is synthesized)
atacaatgaccacatcctgaaaagggtgttgctaagctgtaaccgatatgcacttgaaatgatggtaagttaattttgattcagaatgtgttatttgtcacaaataaacataataaaagg

SEQ ID NO: 458818 - DNA, 120 bp, Artificial Sequence
  ENSG00000157168_102 (sequence is synthesized)
ggttaaagcctggacttttctcactcccttgcaatacttccttcctttacacttaacttttagttccaaggcaggctgtggtacctgctcccggcctcctgtttatatatcataatgtcc

SEQ ID NO: 458819 - DNA, 120 bp, Artificial Sequence
  ENSG00000157168_103 (sequence is synthesized)
agccctctgatcctgtttgcagtgatgctccgagggcaggcacctgctgctctgtaatgattcagcccctttcagccgtcgtcgcgttaacacaacaggatgctgttgctattgtcacta

SEQ ID NO: 458820 - DNA, 120 bp, Artificial Sequence
  ENSG00000157168_104 (sequence is synthesized)
ctgcctctcctgccgccgctgctgctgccgccgccgccaccgccgctggtcctccttctgcttttacttctcctgcatgacagttgttttcttcatctgagcagacaccagcttcagatg

SEQ ID NO: 458821 - DNA, 120 bp, Artificial Sequence
  ENSG00000157168_105 (sequence is synthesized)
ctcgaggtgagaaacatgcctttcagtttgggctactggtttacttaattaatcagccggcagctccgtcgatctattttcgtccctgtcctcttgacgagcccgggatggtttggagta

SEQ ID NO: 458822 - DNA, 120 bp, Artificial Sequence
  ENSG00000157168_106 (sequence is synthesized)
gcatttaaaagaactagaaaagtggcccagaaacagcagcttaaagaattattacgatatactttgattttgtagttgctaggagcttttcttccccccttgcatctttctgaactcttc

SEQ ID NO: 458823 - DNA, 120 bp, Artificial Sequence
  ENSG00000157168_107 (sequence is synthesized)
ttgattttaataatggccttggacttggacgatttatcgatttccccctgtaagatgctgtatcatttggttgggggggcctctgcgtggtaatggaccgtgagagcggccaggccttct

SEQ ID NO: 458824 - DNA, 120 bp, Artificial Sequence
  ENSG00000157168_108 (sequence is synthesized)
tctggaggtgagccgatggagatttattccccagacatgtctgaggtcgccgccgagaggtcctccagcccctccactcagctgagtgcagacccatctcttgatgggcttccggcagca

SEQ ID NO: 458825 - DNA, 120 bp, Artificial Sequence
  ENSG00000157168_109 (sequence is synthesized)
gaagacatgccagagccccagactgaagatgggagaacccctggactcgtgggcctggccgtgccctgctgtgcgtgcctagaagctgagcgcctgagaggttgcctcaactcagagaaa

SEQ ID NO: 458826 - DNA, 120 bp, Artificial Sequence
  ENSG00000157168_110 (sequence is synthesized)
ggtcagcctctgcctctgcatcgccggcctcaagtgggtatttgtggacaagatctttgaatatgactctcctactcaccttgaccctggggggttaggccaggaccctattatttctct

SEQ ID NO: 458827 - DNA, 120 bp, Artificial Sequence
  ENSG00000157168_111 (sequence is synthesized)
ggacgcaactgctgcctcagctgtgtgggtgtcgtctgaggcatacacttcacctgtctctagggctcaatctgaaagtgaggttcaagttacagtgcaaggtgacaaggctgttgtctc

SEQ ID NO: 458828 - DNA, 120 bp, Artificial Sequence
  ENSG00000157168_112 (sequence is synthesized)
ctttgaaccatcagcggcaccgacaccgaagaatcgtatttttgccttttctttcttgccgtccactgcgccatccttcccttcacccacccggaaccctgaggtgagaacgcccaagtc

SEQ ID NO: 458829 - DNA, 120 bp, Artificial Sequence
  ENSG00000157168_113 (sequence is synthesized)
agcaactcagccacaaacaacagaaactaatctccaaactgctcctaaactttgtgcccaaatgagtttactggtgatcgctgccaaaactacgtaatggccagcttctacagtacgtcc

SEQ ID NO: 458830 - DNA, 79 bp, Artificial Sequence
  ENSG00000157168_114 (sequence is synthesized)
ttcttcataacaacgcaaatgaactaagacaacaagtctctgtgttctccttcatctatcatactacccgaggtttgtt

SEQ ID NO: 458831 - DNA, 120 bp, Artificial Sequence
  ENSG00000157168_115 (sequence is synthesized)
ctgtgttctccttcatctatcatactacccgaggtttgtttacgtggtaaagacaaggttcggagagaaatggttgaaaccagcatagcttcttgagacacaatgacacttatgccacat

SEQ ID NO: 458832 - DNA, 120 bp, Artificial Sequence
  ENSG00000157168_116 (sequence is synthesized)
ttgatggaggagatgcaaagtcatatcacttgggacatggatacagggaggggtgcaatttgggatgtttttgcaattaacctaccacaggcttaaggaggcttttaggatttaccttct

SEQ ID NO: 458833 - DNA, 120 bp, Artificial Sequence
  ENSG00000157168_117 (sequence is synthesized)
gctctaatgagtttcaaccaccatggcttagagaacatttcttaaaactcagtcatctttcatgtatccattgttctccaaagggactaagttttgttccatggtcagtcttttccatgt

SEQ ID NO: 458834 - DNA, 120 bp, Artificial Sequence
  ENSG00000157168_118 (sequence is synthesized)
ctcctcatagtgaaagacataaccttatagctgagctaaggagaaacaaggcacacagatccaaatgcatgcagatccagctatcagcaactcatcttagatcttcttccattccccatt

SEQ ID NO: 458835 - DNA, 120 bp, Artificial Sequence
  ENSG00000157168_119 (sequence is synthesized)
ttttttttgcccttatacctcttcgcctttctgtggttccatccacttcttccccctcctcctcccataaacaactctcctacccctgcacccccaataaataaataaaaggaggagggc

SEQ ID NO: 458836 - DNA, 120 bp, Artificial Sequence
  ENSG00000157168_120 (sequence is synthesized)
aaggggggaggaggaggagtggtgctgcgaggggaaggaaaagggaggcagcgcgagagagccgggcagagtccgaaccgacagccagaagcccgcacgcacctcgcaccatgagatggc

SEQ ID NO: 458837 - DNA, 80 bp, Artificial Sequence
  ENSG00000157168_121 (sequence is synthesized)
ccagcgccccggctccgccgcccgctcgtcgccgccgctgccgctgctgccactactgctgctgctggggaccgcggccc

SEQ ID NO: 458838 - DNA, 120 bp, Artificial Sequence
  ENSG00000157168_122 (sequence is synthesized)
tggcgccgggggcggcggccggcaacgaggcggctcccgcgggggcctcggtgtgctactcgtccccgcccagcgtgggatcggtgcaggagctagctcagcgcgccgcggtggtgatcg

SEQ ID NO: 458839 - DNA, 120 bp, Artificial Sequence
  ENSG00000157168_123 (sequence is synthesized)
ctagctcagcgcgccgcggtggtgatcgagggaaaggtgcacccgcagcggcggcagcagggggcactcgacaggaaggcggcggcggcggcgggcgaggcaggggcgtggggcggcgat

SEQ ID NO: 458840 - DNA, 120 bp, Artificial Sequence
  ENSG00000157168_124 (sequence is synthesized)
ccgcccgccgaggagccgctgctcgccgccaacgggaccgtgccctcttggcccaccgccccggtgcccagcgccggcgagcccggggaggaggcgccctatctggtgaaggtgcaccag

SEQ ID NO: 458841 - DNA, 120 bp, Artificial Sequence
  ENSG00000157168_125 (sequence is synthesized)
tgcaccaggtgtgggcggtgaaagccgggggcttgaagaaggactcgctgctcaccgtgcgcctggggacctggggccaccccgccttcccctcctgcgggaggctcaaggaggacagca

SEQ ID NO: 458842 - DNA, 120 bp, Artificial Sequence
  ENSG00000157168_126 (sequence is synthesized)
ggtacatcttcttcatggagcccgacgccaacagcaccagccgcgcgccggccgccttccgagcctctttcccccctctggagacgggccggaacctcaagaaggaggtcagccgggtgc

SEQ ID NO: 458843 - DNA, 120 bp, Artificial Sequence
  ENSG00000157168_127 (sequence is synthesized)
agaacttatatgagaaaaactagaaggagtctccagtgtcccaagcccctgtttggggttttggggcagaagcatttgttgctttctgtgaatgaaacagacaagtgatgaggaaagtgg

SEQ ID NO: 458844 - DNA, 120 bp, Artificial Sequence
  ENSG00000157168_128 (sequence is synthesized)
aagattagaagaagtaaaagagatacagctaagaaaataattagataaccaatgagcaagaagtatttgaggccagctacccacaatcaaaaatccaagtccaacctgataacattttca

SEQ ID NO: 458845 - DNA, 120 bp, Artificial Sequence
  ENSG00000157168_129 (sequence is synthesized)
gaccaaattaccatcctcttggcttctgctcctgcctctgccaatgggtgtctttgggtaaaaattaattaattaattaatttaattaaataaaattcacctccttggaactttgcttct

SEQ ID NO: 458846 - DNA, 120 bp, Artificial Sequence
  ENSG00000157168_130 (sequence is synthesized)
gccttttaaaaaaaggaatgaaatagtatcaaatgccttttctgattataaagataatctttccattcccacacaaggaaataatttaggggatagttcagcgacagaacttctccctca

SEQ ID NO: 458847 - DNA, 120 bp, Artificial Sequence
  ENSG00000157168_131 (sequence is synthesized)
tacctgagcactgcttcttaaccacacaccatttgtctggttcaatgtgcatgcacagagagccataatagtcatgtgtaatgtgttttggagtgcagtgtattgctcttttctgaaact

SEQ ID NO: 458848 - DNA, 120 bp, Artificial Sequence
  ENSG00000157168_132 (sequence is synthesized)
ttttccctttctttcttttttttgtcaactttctgcattggcagagcatcttgggattgaatttatgggtatggaccaatcatcattccttttagcctgcagaatttagagcctatgagc

SEQ ID NO: 458849 - DNA, 120 bp, Artificial Sequence
  ENSG00000157168_133 (sequence is synthesized)
tgaaatctttttcccttcctactcttacctttcagttcctaactaatttcctttttctttagaagggatcatacagctataacaatgatttctctgccttcaatctatgattagtttact

SEQ ID NO: 458850 - DNA, 120 bp, Artificial Sequence
  ENSG00000157168_134 (sequence is synthesized)
gaaatgttactgagtgcagcaggttttagattcctaagcatccttcacttagagtttaaaagtaccctacctgctgcaaattcacatatatcccacgctgcttaacccactgattggatc

SEQ ID NO: 458851 - DNA, 120 bp, Artificial Sequence
  ENSG00000157168_135 (sequence is synthesized)
tagctctgctgttatataaaagctgggtaaagtgaaagacagttgagatatataacttccccctcagtaagatcttctatgggttagaaaagacacagggggctgctatccgcatgcttc

SEQ ID NO: 458852 - DNA, 120 bp, Artificial Sequence
  ENSG00000157168_136 (sequence is synthesized)
actgaagcagagaagagccgcagaggaagaaagtgaatgagcactcaagaaggacaaagaggagtagtcgggggtggggtggaggcagggcggggaagggagtgaccgcccctcctggct

SEQ ID NO: 458853 - DNA, 120 bp, Artificial Sequence
  ENSG00000157168_137 (sequence is synthesized)
tgagcacctgcggtctcacctcaggaaatctactctaatcagaataaggggcggcagttacctgttctaggagtgctcctagttgatgaagtcatctctttgtttgacggaacttatttc

SEQ ID NO: 458854 - DNA, 120 bp, Artificial Sequence
  ENSG00000157168_138 (sequence is synthesized)
ttctgagcttctctcgtcgtcccagtgactgacaggcaacagactcttaaagagctgggatgctttgatgcggaaggtgcagcacatggagtttccagctctggccatgggctcagaccc

SEQ ID NO: 458855 - DNA, 120 bp, Artificial Sequence
  ENSG00000157168_139 (sequence is synthesized)
actcggggtctcagtgtcctcagttgtaacattagagagatggcatcaatgcttgataaggacccttctataattccaattgccagttatccaaactctgattcggtggtcgagctggcc

SEQ ID NO: 458856 - DNA, 120 bp, Artificial Sequence
  ENSG00000157168_140 (sequence is synthesized)
tcgtgttcttatctgctaaccctgtcttaccttccagcctcagttaagtcaaatcaagggctatgtcattgctgaatgtcatggggggcaactgcttgccctccaccctatagtatctat

SEQ ID NO: 458857 - DNA, 120 bp, Artificial Sequence
  ENSG00000157168_141 (sequence is synthesized)
tttatgaaattccaagaagggatgaataaataaatctcttggatgctgcgtctggcagtcttcacgggtggttttcaaagcagatactgccttcaagatggccctttattccagaatgtt

SEQ ID NO: 458858 - DNA, 120 bp, Artificial Sequence
  ENSG00000157168_142 (sequence is synthesized)
ttggctttcctttggggagattgggttgggttgggggagttatagcaaaggtaaaatgaagaatggaggaaagtaaacaaagagatattaaatagtaatattgaattcatagattctctt

SEQ ID NO: 458859 - DNA, 120 bp, Artificial Sequence
  ENSG00000157168_143 (sequence is synthesized)
tctccattttcacctgagctggaagatgaccagtatttctagcccatcagtaagctgttacctgttcctatttgtttgcaagtctgctgggttttactttattttattgtcatctcaggc

SEQ ID NO: 458860 - DNA, 120 bp, Artificial Sequence
  ENSG00000157168_144 (sequence is synthesized)
taatctttgaccatttactaaaaggtttacataatgtcaaatccatacttatgtggtagttacatgggaggagatgactttgatagagtctttccactcttggactgggaagttacttcc

SEQ ID NO: 458861 - DNA, 120 bp, Artificial Sequence
  ENSG00000157168_145 (sequence is synthesized)
aataaaataacacattctgggcttgaaggcctgttgcttacttttgcaagggcctttccttcaaaatgatattttagaactttgtggaatttatgaaatcagaggtaagctattacctgt

SEQ ID NO: 458862 - DNA, 86 bp, Artificial Sequence
  ENSG00000157168_146 (sequence is synthesized)
catcttagtctaatccttgaccatttactaaaaggtttacataatgtcaaattcatacttgtgtggtagttccatgggtagggatg

SEQ ID NO: 458863 - DNA, 120 bp, Artificial Sequence
  ENSG00000157168_147 (sequence is synthesized)
tcaaattcatacttgtgtggtagttccatgggtagggatgactttcatagactcttcccactcatggactggggagtacttacaataaaaaatgacaggctgggcacggtggctcacgcc

SEQ ID NO: 458864 - DNA, 120 bp, Artificial Sequence
  ENSG00000157168_148 (sequence is synthesized)
catgatgtattgttgctttttttccaattttgttgcatcatgttgaataatgctgttttatatgtagagtgttttaaaacattcacaccattcgtcatcactcctctgtcatatgcagaa

SEQ ID NO: 458865 - DNA, 120 bp, Artificial Sequence
  ENSG00000157168_149 (sequence is synthesized)
ttgttttttgctcttttcaatgtgtgtgaggtgttttttgtttttgtttttgttttttgccatgttatttatagtgttgctttccttgtggtttttcttgttgttattcagaaaagatgt

SEQ ID NO: 458866 - DNA, 120 bp, Artificial Sequence
  ENSG00000157168_150 (sequence is synthesized)
gcagatatcacagaggcctataacttttggtatctacttctacatccaatgtatgaattaagctgtaagataatgttgctttcttatcccagtgatcacctgccaaatgaataagacaac

SEQ ID NO: 458867 - DNA, 120 bp, Artificial Sequence
  ENSG00000157168_151 (sequence is synthesized)
aaagagaagcagaagggcagaagattatttactgacatatatctattacacttgggattgtcttactgttgcataactattttttaaacggagtttagttttatattgctagtaaaaaaa

SEQ ID NO: 458868 - DNA, 120 bp, Artificial Sequence
  ENSG00000157168_152 (sequence is synthesized)
tgtcaattcttctacggagttttaacctacactcaatggatgcatgaaaaaaagaaatgaaatgatttttttagctactttaaaaaataaagccttgcctccccgattgaaagagatgaa

SEQ ID NO: 458869 - DNA, 120 bp, Artificial Sequence
  ENSG00000157168_153 (sequence is synthesized)
acagcaaattctcatagaactggctgaaaaggatctgtatttttttcttgctgtccacttattttccaacaagaaccctggctgtctttgtgatgactcaggaagaggaggatttgtgca

SEQ ID NO: 458870 - DNA, 120 bp, Artificial Sequence
  ENSG00000157168_154 (sequence is synthesized)
agccaagaggaaataggacctccatatttgccatttggatgcagagaatatgaacagacttctctgagacccaagaactgaagaaattgttgggtcctctcagtaaagtgggtctaagaa

SEQ ID NO: 458871 - DNA, 120 bp, Artificial Sequence
  ENSG00000157168_155 (sequence is synthesized)
gcatgtgtgaatgagtgttggttgggcatgcaggtgttgttaattgtgtttttgctcttttttatacatatctttgtgttatctacttacagttatagactcagatatggaagaaatctg

SEQ ID NO: 458872 - DNA, 120 bp, Artificial Sequence
  ENSG00000157168_156 (sequence is synthesized)
agtctcactcagacaatttggggtttcattcttttttatatgtaaaatctaagaaataccctagtagttaagtgactcgtctgcaccgcccagttttctctctgtggcagcagctccaag

SEQ ID NO: 458873 - DNA, 120 bp, Artificial Sequence
  ENSG00000157168_157 (sequence is synthesized)
ggtaatctagtagcaaaatctagaaccatggcaaaaatgcagagagagaaatatatattttcatggaatcagtatacaacactaaatgtaactggccttttgggaaaaaaaaaaaggagg

SEQ ID NO: 458874 - DNA, 120 bp, Artificial Sequence
  ENSG00000157168_158 (sequence is synthesized)
gggcggtggaaacctggtctaacaatcgtctcagccctgtctggattgtggaaaagggcccatagcccaggcgctcttccatgattacatattaacatacatgcatgttggaaacctact

SEQ ID NO: 458875 - DNA, 120 bp, Artificial Sequence
  ENSG00000157168_159 (sequence is synthesized)
atatatataattgctttatgtccacagtagattttaaattctttttttttccctagcaaacattcttctagagactctcaactttaatttgaaaaaaaggtaaaatctcatttgtcttga

SEQ ID NO: 458876 - DNA, 120 bp, Artificial Sequence
  ENSG00000157168_160 (sequence is synthesized)
tgagggctacagtgtacccctagtgaccagatattccatactgaaatcattgctgtttctaactccagggccagtgaatctaggactagtgttgaaggggagagtgcagaatgaagaact

SEQ ID NO: 458877 - DNA, 120 bp, Artificial Sequence
  ENSG00000157168_161 (sequence is synthesized)
attttccactcagttttgcctgtttacattttactactagaacctctcctttattgcttcgtttagaatctggattagcaaagcgtcaggagctttcatgtttatcacacaatttaaaat

SEQ ID NO: 458878 - DNA, 120 bp, Artificial Sequence
  ENSG00000157168_162 (sequence is synthesized)
ggaatgaaacacacaccatcacaaagcccaggtgttggattagaatttttttttttttgctttaaaaatggtttttatttctatttttattttatttattttttcttcaactttcatttt

SEQ ID NO: 458879 - DNA, 74 bp, Artificial Sequence
  ENSG00000157168_163 (sequence is synthesized)
aagtcggtgccatggtggtttgctccacagatcacctaggtactaagccaagcatccattaactatttttcctg

SEQ ID NO: 458880 - DNA, 120 bp, Artificial Sequence
  ENSG00000157168_164 (sequence is synthesized)
ctgcagtattctgggcaatctactggaagaacagagtcccgattccatacatgttagctgcctcaactggagtttgttttccagctggaccacatagccctaattcattaaccttgcctc

SEQ ID NO: 458881 - DNA, 120 bp, Artificial Sequence
  ENSG00000157168_165 (sequence is synthesized)
atgcaattcatcacagtccacaaagcacagttcctaacagattctgaaaacgtgattttaaaaaaaatgagatttatccgtaaacgagggctaggctacagttggtagggcggctgtcaa

SEQ ID NO: 458882 - DNA, 120 bp, Artificial Sequence
  ENSG00000157168_166 (sequence is synthesized)
ttcttctacggagttttaacctacactcaatggatgcatgaaaaaaagaaatgaaatgatttttttagctactttaaaaaataaaggtatttcttcataacaacgcaaatgaactaagac

SEQ ID NO: 458883 - DNA, 120 bp, Artificial Sequence
  ENSG00000157181_0 (sequence is synthesized)
gatgaattcagtggcagtgaattgagaccggagggaatctggcccctagaggctggtacttgggcccgaaacccccatctccggcggagagaccgtccgaggtaattgtctgccacgagt

SEQ ID NO: 458884 - DNA, 120 bp, Artificial Sequence
  ENSG00000157181_1 (sequence is synthesized)
gcacattctgaaaacaggagattttagttcctaaaaatgggaagaacctacattgtagaagagactgttggccagtatctttcaaacataaatctccaaggaaaggcttttgtctctggc

SEQ ID NO: 458885 - DNA, 120 bp, Artificial Sequence
  ENSG00000157181_2 (sequence is synthesized)
cttttaataggacagtgttcgtcacaaaaggattatgtgattcttgccactagaacgccacccaaagaggagcaaagtgagaacctcaaacatcccaaagctaagttggataacttggat

SEQ ID NO: 458886 - DNA, 120 bp, Artificial Sequence
  ENSG00000157181_3 (sequence is synthesized)
gaagaatgggccacagaacatgcctgccaggtatccagaatgctaccagggggacttttagttcttggagtatttattattactactttagaactggcaaatgattttcaaaatgccctg

SEQ ID NO: 458887 - DNA, 120 bp, Artificial Sequence
  ENSG00000157181_4 (sequence is synthesized)
cgtagactaatgtttgctgtggaaaagtctataaatagaaagagattgtggaatttcacagaggaggaagtctcagaacgagtgacacttcacatttgtgcttctacaaaaaaaatattt

SEQ ID NO: 458888 - DNA, 120 bp, Artificial Sequence
  ENSG00000157181_5 (sequence is synthesized)
tgtcgaacttatgatatccatgatccaaagagttcagcaagaccagcagattggaagtatcaaagtggattatcatcctcatggctttctttagagtgtacagttcacattaatattcac

SEQ ID NO: 458889 - DNA, 120 bp, Artificial Sequence
  ENSG00000157181_6 (sequence is synthesized)
atcccactttctgctacttctgtcagctatactctggagaaaaatacaaagaatggacttacacgctgggccaaggaaatagaaaatggtgtttatttgattaatggacaagttaaagat

SEQ ID NO: 458890 - DNA, 120 bp, Artificial Sequence
  ENSG00000157181_7 (sequence is synthesized)
gaagattgtgacctattagaaggacagaaaaaatcttctagaggaaatactcaagcaactagtcattcttttgatgtcagagtgctaacgcagttgctcctgaattcagaccacagatcc

SEQ ID NO: 458891 - DNA, 120 bp, Artificial Sequence
  ENSG00000157181_8 (sequence is synthesized)
acagccacagtccagatatgtagcggttctgtaaaccttaagggtgctgtgaaatgcagagcttatatccacagcagtaaacccaaagttaaagatgctgtgcaggcagtaaagagggat

SEQ ID NO: 458892 - DNA, 120 bp, Artificial Sequence
  ENSG00000157181_9 (sequence is synthesized)
atattgaacacagttgctgatcgttgtgaaatgctatttgaggatctgcttttgaatgaaattccagaaaaaaaagattctgaaaaagagttccacgtcctcccttatcgagtctttgtt

SEQ ID NO: 458893 - DNA, 120 bp, Artificial Sequence
  ENSG00000157181_10 (sequence is synthesized)
ccccttcctggatccactgtaatgttgtgtgattataaatttgacgatgagtcagctgaagaaatcagggaccattttatggagatgttggatcacacaattcaaatagaagatttggaa

SEQ ID NO: 458894 - DNA, 120 bp, Artificial Sequence
  ENSG00000157181_11 (sequence is synthesized)
attgcagaggaaacaaacacagcttgtatgagttcttctatgaatagtcaagcttcattggacaacacagatgatgaacaaccaaaacaaccaattaaaactacaatgttattgaaaatt

SEQ ID NO: 458895 - DNA, 120 bp, Artificial Sequence
  ENSG00000157181_12 (sequence is synthesized)
cagcaaaacataggtgtgattgcagcatttacagttgcagtccttgctgcgggtatctcctttcattacttcagtgattagggtgaggcacaaagagtttcttgatcatccagagaacat

SEQ ID NO: 458896 - DNA, 120 bp, Artificial Sequence
  ENSG00000157181_13 (sequence is synthesized)
tgacagacaattatgaataataaagatgttaacaatccatctgtatttaaaacactagcagccagatctgctgccatgatgcctatttggtgtgtttctgattaaaatgaaatcacaagc

SEQ ID NO: 458897 - DNA, 120 bp, Artificial Sequence
  ENSG00000157181_14 (sequence is synthesized)
tgccttgtttagcctgctttacattgtaggtggcccgcatttccagaaataacgttatgcatctagatggaagctgcatgtaacaaatcattattatctatttttaaaagcttcaaaatg

SEQ ID NO: 458898 - DNA, 120 bp, Artificial Sequence
  ENSG00000157181_15 (sequence is synthesized)
ctaatgctttgagaggctgaggtaggagcatcacctggggctgggagggagttggagaccagcctggatgacataatgagattctgtctctactggaaaaaaaaaaaattagctggacat

SEQ ID NO: 458899 - DNA, 120 bp, Artificial Sequence
  ENSG00000157181_16 (sequence is synthesized)
ggtggcaatcagctctagtcccaactacttggaggctgaagcaggaagatcacgtgagcccaggagtttgaggctgcagcgagctatgatcacatcactgtactccagcctgggtgacaa

SEQ ID NO: 458900 - DNA, 120 bp, Artificial Sequence
  ENSG00000157181_17 (sequence is synthesized)
aatgagacattgtctctaaaatacataagtaaatttaaaaaaaaaagaataataatttgaacagtgaatgttgatgtaacatcttaataatagagcaccagaaaaatttctaccaaatga

SEQ ID NO: 458901 - DNA, 120 bp, Artificial Sequence
  ENSG00000157181_18 (sequence is synthesized)
gacaacaactttaggataagttcatcctctaggagctttctaatgtgcactcagttcctgtatactgtgtgttttgttctgatcaaggggtagggaacctttccagagaagtcccattag

SEQ ID NO: 458902 - DNA, 120 bp, Artificial Sequence
  ENSG00000157181_19 (sequence is synthesized)
taagaaatgacataaaatacgtgctttctcaggttactgtataactgttataatatatttaatatataaaattaagacttttgcttccagcaagtatgttagactagatattataaaaca

SEQ ID NO: 458903 - DNA, 120 bp, Artificial Sequence
  ENSG00000157181_20 (sequence is synthesized)
actagatcctgaataaaatctgcttttaataggttcactggaagtaggagaattttcaagaaccatacttcgacatttcctctgccacaaaaaatgaacgcattttaagttaggagtcat

SEQ ID NO: 458904 - DNA, 120 bp, Artificial Sequence
  ENSG00000157181_21 (sequence is synthesized)
gaatactgtattgaccatacaagtggattatggttgtctggatggcagataccaatagcaacattgtcatatgcagtttgcctcaaatcagaaacaagaagacatcggaatctgagatgc

SEQ ID NO: 458905 - DNA, 120 bp, Artificial Sequence
  ENSG00000157181_22 (sequence is synthesized)
tgccctagagaggacagttaaagaaggttcagtggtcctcagtttgcagtgctctagctcctggcagaagcaagagggaaacattcctaatttagttccaagattcctacagattattat

SEQ ID NO: 458906 - DNA, 120 bp, Artificial Sequence
  ENSG00000157181_23 (sequence is synthesized)
caagtagtagtattttatgactagagatcacaggcacaagttgaaacaaactaacatgacaagaaagctatagaaaaaataaacattgaactcagttcttcaaggtttcatcaccaacat

SEQ ID NO: 458907 - DNA, 120 bp, Artificial Sequence
  ENSG00000157181_24 (sequence is synthesized)
aaggaatgaagttggaaccacaggcagatctgaaaaagaaccaaatagagctcctaaaaatgagaaatatttattgaaataagaaaaaagccctcagacatgttgaatattttattagac

SEQ ID NO: 458908 - DNA, 120 bp, Artificial Sequence
  ENSG00000157181_25 (sequence is synthesized)
tcagctgaagagacaagtgaactaaactataagctggatctaaagaaattacccagtgagcagtgaggagaaacaaggagctagaaaacattggaaagttaagagagttcgagggaagaa

SEQ ID NO: 458909 - DNA, 120 bp, Artificial Sequence
  ENSG00000157181_26 (sequence is synthesized)
ttataaagactaggagtcctagaaagagaaaatttagagaataaaggagaggcagtacttgaaagataacacaattttacaaatttgttggaaaaacatgaattcataaattcaggaagc

SEQ ID NO: 458910 - DNA, 120 bp, Artificial Sequence
  ENSG00000157181_27 (sequence is synthesized)
acaatatataccaaacatatatttaaataaaatccaggcctagactcaaggtattgtaaatgacaagataccaaatacaagattttaaaagcaaccatggggagaaaaagatcagtgaaa

SEQ ID NO: 458911 - DNA, 120 bp, Artificial Sequence
  ENSG00000157181_28 (sequence is synthesized)
gcaagacagtcaaatacttagtaggcttcctaacagcaacaatgtacccaaaagagggtagaattctgagaaaaactattagcttagaatttgcaacaagcgaaactgaaacaaacagat

SEQ ID NO: 458912 - DNA, 120 bp, Artificial Sequence
  ENSG00000157181_29 (sequence is synthesized)
gctcagatgaaaaacagatgttatcctcagcacaaattcagtaaagagactacaaaaggatgatcttcaagaagggaaatgattctaaaaggattatctgaaattgaaaaactagtaagc

SEQ ID NO: 458913 - DNA, 120 bp, Artificial Sequence
  ENSG00000157181_30 (sequence is synthesized)
atttaattcacctacaattgataatgaacaaattcagtatgttatataaaaaacaagtagaaagaaaatggtgatgatcgtatagttttttataatgttctttaaagctcagtttcatgt

SEQ ID NO: 458914 - DNA, 120 bp, Artificial Sequence
  ENSG00000157184_0 (sequence is synthesized)
ggagaagtgcctcaggagtcctgacgcagtgtcttgggcgctaacggcggcggcggccttgtgtttagactccagaactccccacttgccgcgttctcgccgccgcaggctcccgggacg

SEQ ID NO: 458915 - DNA, 120 bp, Artificial Sequence
  ENSG00000157184_1 (sequence is synthesized)
gcctggccccggggccccgcggttggtccgggagcccccagtcggcccctcagcgccggctccgggcccggccagtacctgcagcgcagcatcgtgcccaccatgcactaccaggacagc

SEQ ID NO: 458916 - DNA, 120 bp, Artificial Sequence
  ENSG00000157184_2 (sequence is synthesized)
cccaccatgcactaccaggacagcctgcccaggctgcctattcccaaacttgaagacaccattaggagatacctcagtgcacagaagcctctcttgaatgatggccagttcaggaaaaca

SEQ ID NO: 458917 - DNA, 120 bp, Artificial Sequence
  ENSG00000157184_3 (sequence is synthesized)
gaacaattttgcaagagttttgaaaatgggattggaaaagaactgcatgagcagctggttgctctggacaaacagaataaacatacaagctacatttcgggaccctggtttgatatgtac

SEQ ID NO: 458918 - DNA, 120 bp, Artificial Sequence
  ENSG00000157184_4 (sequence is synthesized)
ctatctgctcgagactccgttgttctgaactttaatccatttatggctttcaatcctgacccaaaatctgagtataatgaccagctcacccgggcaaccaacatgactgtttctgccatc

SEQ ID NO: 458919 - DNA, 120 bp, Artificial Sequence
  ENSG00000157184_5 (sequence is synthesized)
cggtttctgaagacactccgggctggccttctggagccagaagtgttccacttgaaccctgcaaaaagtgacactatcaccttcaagagactcatacgctttgtgccttcctctctgtcc

SEQ ID NO: 458920 - DNA, 120 bp, Artificial Sequence
  ENSG00000157184_6 (sequence is synthesized)
tggtatggggcctacctggtcaatgcgtatcccctggatatgtcccagtattttcggcttttcaactcaactcgtttacccaaacccagtcgggatgaactcttcactgatgacaaggcc

SEQ ID NO: 458921 - DNA, 120 bp, Artificial Sequence
  ENSG00000157184_7 (sequence is synthesized)
agacacctcctggtcctaaggaaaggaaatttttatatctttgatgtcctggatcaagatgggaacattgtgagcccctcggaaatccaggcacatctgaagtacattctctcagacagc

SEQ ID NO: 458922 - DNA, 120 bp, Artificial Sequence
  ENSG00000157184_8 (sequence is synthesized)
agccccgcccccgagtttcccctggcatacctgaccagtgagaaccgagacatctgggcagagctcaggcagaagctgatgagtagtggcaatgaggagagcctgaggaaagtggactcg

SEQ ID NO: 458923 - DNA, 120 bp, Artificial Sequence
  ENSG00000157184_9 (sequence is synthesized)
gcagtgttctgtctctgcctagatgacttccccattaaggaccttgtccacttgtcccacaatatgctgcatggggatggcacaaaccgctggtttgataaatcctttaacctcattatc

SEQ ID NO: 458924 - DNA, 120 bp, Artificial Sequence
  ENSG00000157184_10 (sequence is synthesized)
gccaaggatggctctactgccgtccactttgagcactcttggggtgatggtgtggcagtgctcagattttttaatgaagtatttaaagacagcactcagacccctgccgtcactccacag

SEQ ID NO: 458925 - DNA, 120 bp, Artificial Sequence
  ENSG00000157184_11 (sequence is synthesized)
tgatgccttaaagactggcatcacagctgctaaggaaaagtttgatgccaccatgaaaaccctcactattgactgcgtccagtttcagagaggaggcaaagaattcctgaagaagcaaaa

SEQ ID NO: 458926 - DNA, 120 bp, Artificial Sequence
  ENSG00000157184_12 (sequence is synthesized)
gctgagccctgacgcagttgcccagctggcattccagatggccttcctgcggcagtacgggcagacagtggccacctacgagtcctgtagcactgccgcattcaagcacggccgcactga

SEQ ID NO: 458927 - DNA, 120 bp, Artificial Sequence
  ENSG00000157184_13 (sequence is synthesized)
gaccatccgcccggcctccgtctatacaaagaggtgctctgaggcctttgtcagggagccctccaggcacagtgctggtgagcttcagcagatgatggttgagtgctccaagtaccatgg

SEQ ID NO: 458928 - DNA, 120 bp, Artificial Sequence
  ENSG00000157184_14 (sequence is synthesized)
ccagctgaccaaagaagcagcaatgggccagggctttgaccgacacttgtttgctctgcggcatctggcagcagccaaagggatcatcttgcctgagctctacctggaccctgcatacgg

SEQ ID NO: 458929 - DNA, 120 bp, Artificial Sequence
  ENSG00000157184_15 (sequence is synthesized)
gcagataaaccacaatgtcctgtccacgagcacactgagcagcccagcagtgaaccttgggggctttgcccctgtggtctctgatggctttggtgttgggtatgctgttcatgacaactg

SEQ ID NO: 458930 - DNA, 120 bp, Artificial Sequence
  ENSG00000157184_16 (sequence is synthesized)
gataggctgcaatgtctcttcctacccaggccgcaatgcccgggagtttctccaatgtgtggagaaggccttagaagacatgtttgatgccttagaaggcaaatccatcaaaagttaact

SEQ ID NO: 458931 - DNA, 85 bp, Artificial Sequence
  ENSG00000157184_17 (sequence is synthesized)
tgtttgatgccttagaaggcaaatccatcaaaagttaacttctgggcagatgaaaagctaccatcacttcctcatcatgaaaact

SEQ ID NO: 458932 - DNA, 73 bp, Artificial Sequence
  ENSG00000157184_18 (sequence is synthesized)
atcacacaaaaaagaaaaaaaaactggggcctgtgtagccagtgggtgctattctgtgaaactaatcataagc

SEQ ID NO: 458933 - DNA, 120 bp, Artificial Sequence
  ENSG00000157184_19 (sequence is synthesized)
tgtagccagtgggtgctattctgtgaaactaatcataagctgcctaggcagccagctacaggcttgagctttaaattcatggttttaaagctaaacgtaatttccacttgggactagatc

SEQ ID NO: 458934 - DNA, 120 bp, Artificial Sequence
  ENSG00000157184_20 (sequence is synthesized)
acaactgaagataacaagagatttaagttttaagggcatttaatcaggaggaaaggtttggaaaactaactcaggtgtatttattgtttaagcagaaataaagtttaatttttgcttgaa

SEQ ID NO: 458935 - DNA, 64 bp, Artificial Sequence
  ENSG00000157184_21 (sequence is synthesized)
agctgggactacaggcacgtgccacgacacctggctaattttttgtatttttagcgcacccacc

SEQ ID NO: 458936 - DNA, 120 bp, Artificial Sequence
  ENSG00000157184_22 (sequence is synthesized)
cctcccaaattgctgggattaccagcataagccactgcacccagcccccagttttattatctccagagagtaaaacttaagtcttctacaggagtgaggagggaatctcaggttgtggta

SEQ ID NO: 458937 - DNA, 120 bp, Artificial Sequence
  ENSG00000157184_23 (sequence is synthesized)
gtggtgatataattgaatagtccttcaaccagatgtatctaggttgccaattactgagccctctgggggttctgctgtgcaaatcatatgatttcttggctttctctcctgccaatttag

SEQ ID NO: 458938 - DNA, 120 bp, Artificial Sequence
  ENSG00000157184_24 (sequence is synthesized)
gattggctttcttgagtctgctttagtcattaccagttgcataagtgctttccagcttccagtatttgttttctcgtctcccattctcttggcctgactggtttatgtctctttgaaatt

SEQ ID NO: 458939 - DNA, 120 bp, Artificial Sequence
  ENSG00000157184_25 (sequence is synthesized)
cttttgctaaaggggggtcagaggcatgaatttatgtcttctttcatcaaatatatcttatccaccagtacttttctctcaccattttagtgcattgcgttatgttttaattatttgcct

SEQ ID NO: 458940 - DNA, 120 bp, Artificial Sequence
  ENSG00000157184_26 (sequence is synthesized)
ccttcaccagagtttttcagaatcaaagaccatgtcctattcctctctaaatcccctggaccaaggcctggcacagcactgattctcaagggatggaatgagtggatggaccaacaaatg

SEQ ID NO: 458941 - DNA, 120 bp, Artificial Sequence
  ENSG00000157184_27 (sequence is synthesized)
agtaacagagaaatctgcatctattaatccttttcccagtgctatacatatgaacattatttgcctgaatgatagtccttatttatagagtttattcatgtttactaatcccagcaggaa

SEQ ID NO: 458942 - DNA, 120 bp, Artificial Sequence
  ENSG00000157184_28 (sequence is synthesized)
ctttccctgacatattttctgataaaatattgcttctggaatttttacaggtaaaacatctataggaactcagagggctagtctgagtgatccatgcactgatatttataatagcttttt

SEQ ID NO: 458943 - DNA, 120 bp, Artificial Sequence
  ENSG00000157184_29 (sequence is synthesized)
tagtactttctaaacagggagtgtacaaatgtacactgtacatagaaggacaatgaagacgttccccccttatcggggagcaatcaagtatgattgttgcccctgaaaggagatgaagca

SEQ ID NO: 458944 - DNA, 120 bp, Artificial Sequence
  ENSG00000157184_30 (sequence is synthesized)
agagaaacctaaagagatggggtgggaattaactattctgttccagcatgaatgcaagtggagtgttaccatattttattcctttaaaccaagaaaggaaacagaagaggaagaaaaagc

SEQ ID NO: 458945 - DNA, 120 bp, Artificial Sequence
  ENSG00000157184_31 (sequence is synthesized)
aattaataaacattaggaaaatgcaaaccaaatctgcaatgctatactactttacacctaccagaatatctccacgccacaagacatgtaacaagtgctgctgaggatgtggaaaaattg

SEQ ID NO: 458946 - DNA, 120 bp, Artificial Sequence
  ENSG00000157184_32 (sequence is synthesized)
gaaccctcacagacagctcgtgggaatggtgcagccactttggaaaacatcctggcagttcctcaaaggttaaacagagacttaccatgtgatagtagttccactcctagctatgtccat

SEQ ID NO: 458947 - DNA, 84 bp, Artificial Sequence
  ENSG00000157184_33 (sequence is synthesized)
cttaccatgtgatagtagttccactcctagctatgtccatacaaaaacatgtataagaatgttcataacaacataattcttaat

SEQ ID NO: 458948 - DNA, 120 bp, Artificial Sequence
  ENSG00000157184_34 (sequence is synthesized)
ttacttgaggccaggagcttgaaaccagcctgagcaacataataagaccccatctctaccaaaaataaaaaaattagccaggctggtggtgtgcatctgtagtcctagctacttgggagg

SEQ ID NO: 458949 - DNA, 120 bp, Artificial Sequence
  ENSG00000157184_35 (sequence is synthesized)
cagtgagccatgatcataccactgcaatccagcctggatgatagaaatcctgtgtctcttaaaaaaaaaaaaggcaatgtaattcataataaagagtggaaacagttcaaatgtccatta

SEQ ID NO: 458950 - DNA, 65 bp, Artificial Sequence
  ENSG00000157184_36 (sequence is synthesized)
ttgttcagcgctaagaagaaatgaagaacttaaatgctacaacatggatgaaccttaaaaacatt

SEQ ID NO: 458951 - DNA, 66 bp, Artificial Sequence
  ENSG00000157184_37 (sequence is synthesized)
cctgtctctactaaaaatccaaaaattatctgggcatggtggtccgggaggcggaggttgcagtga

SEQ ID NO: 458952 - DNA, 120 bp, Artificial Sequence
  ENSG00000157184_38 (sequence is synthesized)
agcctgggcgacaggagcgagcctccgtcccaaaaaaacaaaacaaaaacattattgtaagtgatagaagctaaatgcaaaacaccatatattgtatgaccccatttgtatgtcttgaat

SEQ ID NO: 458953 - DNA, 120 bp, Artificial Sequence
  ENSG00000157184_39 (sequence is synthesized)
tattgcagagcaaaaacattcagggaattcttctctctggaggttgatgccatttcctttgtctatgcttgaattttttttcttcttcaaattttatttttagggacagcattaacattt

SEQ ID NO: 458954 - DNA, 120 bp, Artificial Sequence
  ENSG00000157184_40 (sequence is synthesized)
agaagcagcaatgggtgaggcaggggtggggagcatgcccttgggtcttgtcctcagtgcttgggtaagcaagcctaaatcattctactccaaatctgatttctacccgttcactaggtt

SEQ ID NO: 458955 - DNA, 120 bp, Artificial Sequence
  ENSG00000157184_41 (sequence is synthesized)
taatccatcgccaactccccaaatttttcttttctaccctagcagtctgaacagccacactagccactagggatcagaatgttcttgcctcctaagcaggggtggggaaatgcatgtgtc

SEQ ID NO: 458956 - DNA, 120 bp, Artificial Sequence
  ENSG00000157184_42 (sequence is synthesized)
tgagtcctcttctccctgaaaaatgccagacctgcatatttccagcgccgctgtaatccctcgactatggtgtctcctgaagtactttaatgactgcctcacattcctacccggaatatg

SEQ ID NO: 458957 - DNA, 120 bp, Artificial Sequence
  ENSG00000157184_43 (sequence is synthesized)
tgtcatattatggataaacatgcattacaaataaactgatgaaccacagtatatcttatattaggcttttaaactgctttatgtatcatgtttcagttttcctaaatgactgatacattt

SEQ ID NO: 458958 - DNA, 120 bp, Artificial Sequence
  ENSG00000157184_44 (sequence is synthesized)
cagtattttgcatatcagtgttaattttgagttggtagaggcagcctaacaaactctgattgttttgctattaggggatatttccttcaataaaaccaatgaattgaaagagaaaataca

SEQ ID NO: 458959 - DNA, 120 bp, Artificial Sequence
  ENSG00000157184_45 (sequence is synthesized)
cctcactttactgtccatgtgttttcatttcacaataagccagtaacttcatcaccatagccatctttgggaatcactagtagacagaatgataagtaggcaaattgctgttcctgttat

SEQ ID NO: 458960 - DNA, 120 bp, Artificial Sequence
  ENSG00000157184_46 (sequence is synthesized)
ttaagcacagggactatttggttcttcctaatggcgttcctggtatctgggcatggctcactggtcgattcctaccttttagtgactgtagcccccatatatggctggcccttggacaga

SEQ ID NO: 458961 - DNA, 120 bp, Artificial Sequence
  ENSG00000157184_47 (sequence is synthesized)
tctgtgtttcactcttatataattatttgttgtaaaatgcagaagaaaatttaaaaaatagaaccttttcattttatcctaggggagaaaaatgcagttgttcaaactaagggtagaatt

SEQ ID NO: 458962 - DNA, 120 bp, Artificial Sequence
  ENSG00000157184_48 (sequence is synthesized)
aaatcagggccaatacagtgttagcacaggtgttatcattgtgaccagaaaacaggaattcttggggcagcttctgcttccccattttgaatctattattgttatttaaaataattatat

SEQ ID NO: 458963 - DNA, 120 bp, Artificial Sequence
  ENSG00000157184_49 (sequence is synthesized)
ttgtattttacttaaagatttagttgttattttacttaaaagtagagttaccattgatatacttggcattagtaaacccattgattctgatttgtcagtcgcttctgattattggttttg

SEQ ID NO: 458964 - DNA, 120 bp, Artificial Sequence
  ENSG00000157184_50 (sequence is synthesized)
ggggaggaaattaatgatctagtaatcagttcattagcttgtaaagctaattaacctcttccatatactgtcagccttacactgaccctgctttctccccaggctgcctattcccaaact

SEQ ID NO: 458965 - DNA, 120 bp, Artificial Sequence
  ENSG00000157184_51 (sequence is synthesized)
tgaagacaccattaggagatacctcagtgcacagaagcctctcttgaatgatggccagttcaggtaaacactgagaaccttgggtgagcatagttggggtggttcaagacaggctggcaa

SEQ ID NO: 458966 - DNA, 120 bp, Artificial Sequence
  ENSG00000157184_52 (sequence is synthesized)
gtagtggtggaccaagcttcagggaatgtctgtgacgtggctgggtctccaggaacccagaacctagttgtacatctgcaagttcaggaaatagattttcattcatgaaggactgaccaa

SEQ ID NO: 458967 - DNA, 120 bp, Artificial Sequence
  ENSG00000157184_53 (sequence is synthesized)
gccccgagagttcctctaaacaggctcaacaggagatagtttataagccagaatgccaaatgtgtactttcccttagcaggtgtacctgggaggctcgctggtcctggtcatttatagag

SEQ ID NO: 458968 - DNA, 120 bp, Artificial Sequence
  ENSG00000157184_54 (sequence is synthesized)
agcatgtacccttggaagggaggtccattgaggagaccatacggcagaccagaagtctgcatcgtgagcatgtttattgagttggatagcatgcctccaaaatttatgccctttttcatg

SEQ ID NO: 458969 - DNA, 120 bp, Artificial Sequence
  ENSG00000157184_55 (sequence is synthesized)
aaatttagtatatgatcttatttggaattagggttgtggcagatgtaattagttaagatgaggtcctactggagtattgtgggtccttaattaaatatgactggtgtccttgtaagaaga

SEQ ID NO: 458970 - DNA, 120 bp, Artificial Sequence
  ENSG00000157184_56 (sequence is synthesized)
cacagagacagcggtgtgaggacacaggcagagattgtgtcctctgcctgtgtcaacaagccaaggcatgccagggattgctggcaacaccagaatctaagagaaagccatgcaacagat

SEQ ID NO: 458971 - DNA, 120 bp, Artificial Sequence
  ENSG00000157184_57 (sequence is synthesized)
accagaatctaagagaaagccatgcaacagattcttccccagtcttcagagaagatatagtcctactgacacctggattttgtccttaaagcttccagaactgtgagagaataaatttct

SEQ ID NO: 458972 - DNA, 120 bp, Artificial Sequence
  ENSG00000157184_58 (sequence is synthesized)
gttatagcagtcctaggaagcaaatacagcatggaattggaaaataatatcaaatattgtcaaaaagtggattgcattaagctcttatagcctagtgtagtactctttttccataatgga

SEQ ID NO: 458973 - DNA, 120 bp, Artificial Sequence
  ENSG00000157184_59 (sequence is synthesized)
aatttttctgtacaggtaactggcattgttgttggaatcacagaactcttcactggacagtgatggagaagcagatgaattatccataatctaggcctctgttttcaaatatttgttatt

SEQ ID NO: 458974 - DNA, 120 bp, Artificial Sequence
  ENSG00000157184_60 (sequence is synthesized)
agtcatttaaagtttctcttgatatggtaatagctaccagttattgagtattatgttttaggatattctaaatccttagctttataaatatttttaatcttgtaaagtggtattattatc

SEQ ID NO: 458975 - DNA, 120 bp, Artificial Sequence
  ENSG00000157184_61 (sequence is synthesized)
tgactccagagcttgtgtccttttctccatgccaaactgcctcctaggatatggattattttgtgagatgttgattgattttcctaatcattcattttaagaaggtagtctagattatca

SEQ ID NO: 458976 - DNA, 120 bp, Artificial Sequence
  ENSG00000157184_62 (sequence is synthesized)
attttagattgattcctgttctggttagaggtactttctgatctcattccaggttttagggctatgctgttggggacccaaaactctattatgagttcctcgccatgaacctaaaaatca

SEQ ID NO: 458977 - DNA, 120 bp, Artificial Sequence
  ENSG00000157184_63 (sequence is synthesized)
agatatttttggtgagaccagcaaatgaagtaacgtctcatcctcccttcctgaggtaaattaaggctgagtgtgttcctcctctactgaggtgttgacttgagcccatgctcaagaatg

SEQ ID NO: 458978 - DNA, 120 bp, Artificial Sequence
  ENSG00000157184_64 (sequence is synthesized)
atggccagccttctctgtagatgggattgaggcagaacctaatcaatggtcctgtctgaaaaggatgcaggattaagtcctatgtcctatatcattctgggtccttcactgtcagacaga

SEQ ID NO: 458979 - DNA, 120 bp, Artificial Sequence
  ENSG00000157184_65 (sequence is synthesized)
actgtcctctccagcctcttctctcaccacccaccctgacatacttcctgctaaactcctcattgctccctgaacccttagtctttcattcttttgtgcctttatccatgctgttcccac

SEQ ID NO: 458980 - DNA, 120 bp, Artificial Sequence
  ENSG00000157184_66 (sequence is synthesized)
taccatttttttgcctggcaaattcttcttttaagatccaaggaggatggttttctgtgaaaccttctcagtcctttttcctttccattcagagttggttgcttccacctctgttcctac

SEQ ID NO: 458981 - DNA, 120 bp, Artificial Sequence
  ENSG00000157184_67 (sequence is synthesized)
agcacttcttttaatttagtttatatatttaccaaggttatacatgcatatagtttaaagaatcagacagttctataaggcttgttaggaaaaacagcaacttcctcatcatcttatttc

SEQ ID NO: 458982 - DNA, 120 bp, Artificial Sequence
  ENSG00000157184_68 (sequence is synthesized)
ccacttctcactttcagctcctaaatcttttgttatatacccccgtatctctaaattagatacttaccttactgcatcttgatttttttgctttagtcattagctattgacatctcactg

SEQ ID NO: 458983 - DNA, 120 bp, Artificial Sequence
  ENSG00000157184_69 (sequence is synthesized)
tagaagattagaattcagcagtactttacatcccaccacatatgtgggatgtgtatacacatacttcctatccccttattttcacagcatagggatttgtaattttgggtaactcagtat

SEQ ID NO: 458984 - DNA, 120 bp, Artificial Sequence
  ENSG00000157184_70 (sequence is synthesized)
ctagttttatgctattatgatcatagaaacactattgtcagctgactcatgtagcatattgggattgtttttcctttccagtacaaactttttgttttctctgaagttaataattgttcc

SEQ ID NO: 458985 - DNA, 120 bp, Artificial Sequence
  ENSG00000157184_71 (sequence is synthesized)
atcttttctcttgtttagttttctatgtgcttactaatttacccccagactcttcccaagctgtctgaatctcctctcaatacatgaaagcagattggacattctatcccttttggtctt

SEQ ID NO: 458986 - DNA, 120 bp, Artificial Sequence
  ENSG00000157184_72 (sequence is synthesized)
cttgacgaaacttcttccagaacttgcgacatgctgtagtctggatttgtgaacctcttggcctactgtgaagctgctctcctgtgctctttcaccatcagctggggcatctgtcatctc

SEQ ID NO: 458987 - DNA, 89 bp, Artificial Sequence
  ENSG00000157184_73 (sequence is synthesized)
cctgtgctctttcaccatcagctggggcatctgtcatctctctctcatgttgggactcgtgtttcttgtctttcatattttcttatttc

SEQ ID NO: 458988 - DNA, 120 bp, Artificial Sequence
  ENSG00000157184_74 (sequence is synthesized)
atatgggaagcaaaaattttaaaatggcccttatacttcattgataatttgtttggctgggtttgaaattattttcccacagaattttggaggctttgctccattgtcttttagcatcca

SEQ ID NO: 458989 - DNA, 120 bp, Artificial Sequence
  ENSG00000157184_75 (sequence is synthesized)
gtgttgctgttggtaaatctaatgttattctgagacttaatcttttgactacttcttctctctgcctttggaagctttttagaattttctctttgtccccagtgttttgaaatttcaggt

SEQ ID NO: 458990 - DNA, 120 bp, Artificial Sequence
  ENSG00000157184_76 (sequence is synthesized)
aatgtgttttagtatgtgttgggccactctgtgagtcctttgaatctggaatctcatccttcaggtctgggatatttccttgttttatttctttggctttcttcctctccattttttttc

SEQ ID NO: 458991 - DNA, 120 bp, Artificial Sequence
  ENSG00000157184_77 (sequence is synthesized)
tctgttttttctttgtggaactctattattattcaggtgtagaatttctgggtctcatcctctaattttcttttctctcacatttttcatctcttactctttttgttacattttcttggg

SEQ ID NO: 458992 - DNA, 120 bp, Artificial Sequence
  ENSG00000157191_0 (sequence is synthesized)
ggaagtcgccggaagttcggtgggctccaggcgtcgcgatggaggagagcgggtacgagtcggtgctctgtgtcaagcctgacgtccacgtctaccgcatccctccgcgggctaccaacc

SEQ ID NO: 458993 - DNA, 120 bp, Artificial Sequence
  ENSG00000157191_1 (sequence is synthesized)
gtggctacagggctgcggagtggcagctggaccagccatcatggagtggccggctgaggatcactgcaaagggacagatggcctacatcaagctggaggacaggacgtcaggggagctct

SEQ ID NO: 458994 - DNA, 120 bp, Artificial Sequence
  ENSG00000157191_2 (sequence is synthesized)
ttgctcaggccccggtggatcagtttcctggcacagctgtggagagtgtgacggattccagcaggtacttcgtgatccgcatcgaagatggaaatgggcgacgggcgtttattggaattg

SEQ ID NO: 458995 - DNA, 120 bp, Artificial Sequence
  ENSG00000157191_3 (sequence is synthesized)
gcttcggggaccgaggtgatgcctttgacttcaatgttgcattgcaggaccatttcaagtgggtgaaacagcagtgtgaatttgcaaaacaagcccagaacccagaccaaggccctaaac

SEQ ID NO: 458996 - DNA, 120 bp, Artificial Sequence
  ENSG00000157191_4 (sequence is synthesized)
tggacctgggcttcaaggagggccagaccatcaagctcaacatcgcaaacatgaagaagaaggaaggagcagctgggaatccccgagtccggcctgccagcacaggagggctgagcctgc

SEQ ID NO: 458997 - DNA, 120 bp, Artificial Sequence
  ENSG00000157191_5 (sequence is synthesized)
ttccccctcccccaggggggaaaacctccaccctgatccctccccctggggagcagttggctgtggggggatccctcgtccagccagcagttgctcccagttcaggaggtgctcctgtac

SEQ ID NO: 458998 - DNA, 120 bp, Artificial Sequence
  ENSG00000157191_6 (sequence is synthesized)
cctggccacagcccaatcctgccactgctgacatctggggagactttaccaaatctacaggatcaacttccagccagacccagccaggcacaggctgggtccagttctgacctgagcacg

SEQ ID NO: 458999 - DNA, 120 bp, Artificial Sequence
  ENSG00000157191_7 (sequence is synthesized)
gtttttcctcatgtgacttctgggaaggcgctccctcatctgggccaaaggaaggaggacgaagccctcctcagctggcctgtgtttggggcatgaatctctcctctcctccttgtctgg

SEQ ID NO: 459000 - DNA, 120 bp, Artificial Sequence
  ENSG00000157191_8 (sequence is synthesized)
ctccaggatccctgtccccatctgtcctcttgatgtgagagagactctgagacttcttccatcgcaatgacctgtattaaacacaagccccccaagcaaaagaagaggttgagtttgctg

SEQ ID NO: 459001 - DNA, 120 bp, Artificial Sequence
  ENSG00000157191_9 (sequence is synthesized)
ccaggattcagatcagcccttcccagggtctgcaggtgtcacatgatcacagttcagcgggaggctttccgtacccacactggctgtagccacttcagtccatctgccctccagaggagg

SEQ ID NO: 459002 - DNA, 120 bp, Artificial Sequence
  ENSG00000157191_10 (sequence is synthesized)
ggtttcttcctgatttttagcaggtttagaggctgcagcttgagctacaatcaggagggaaattggaaggattagcagcttttaaaaatgtttaaatattttgctttgctaatgtgctga

SEQ ID NO: 459003 - DNA, 120 bp, Artificial Sequence
  ENSG00000157191_11 (sequence is synthesized)
tccgcactaactcatctttgcaaaaggaactgctccctcggcgtgccccagctggggcctctgaagggattcctcactgtgggcagctgccctgagcttcaggcagcagtgtttatctct

SEQ ID NO: 459004 - DNA, 120 bp, Artificial Sequence
  ENSG00000157191_12 (sequence is synthesized)
ggccagttgtctggtttccatgtattctaggccaggtaggcaacacagagccaaggcgggtgctggaagccagacggaacagtgttggggcaggaaggtggatgctgttgtcatggagct

SEQ ID NO: 459005 - DNA, 120 bp, Artificial Sequence
  ENSG00000157191_13 (sequence is synthesized)
gtgggagttggcactctgtctgctggtggccctctcggctcacatgttcacagtgcagctcctggcagacttgggttttctctttggtggtttctaaagtgccttatctgcaaacaactt

SEQ ID NO: 459006 - DNA, 120 bp, Artificial Sequence
  ENSG00000157191_14 (sequence is synthesized)
cttttctccttcaggaactgtgaatggctagaagaaggagctcagtaaactagaagtccagggttgcttggtttactggtttataagaaatctgaaagcacctctgacattccttttatt

SEQ ID NO: 459007 - DNA, 120 bp, Artificial Sequence
  ENSG00000157191_15 (sequence is synthesized)
aactcacctctcagttgaaagatttcttctttgaaaggtcaagaccgtgaactgaaaaaagtgttggcctttttgcgggaccagatttttaagataaaataaatatttttacttctgtca

SEQ ID NO: 459008 - DNA, 120 bp, Artificial Sequence
  ENSG00000157191_16 (sequence is synthesized)
gctcaacatcgcagtgagttctacccttgcttggctgtggtgacgtgatacttgtggccacccagccccagagcccattgctcttcttacagttcagctccttcagttcagcagatgttt

SEQ ID NO: 459009 - DNA, 120 bp, Artificial Sequence
  ENSG00000157191_17 (sequence is synthesized)
agtgagcatctgccttgtgccaggtcctgcatcggggtgaacaagagacctctgttctcatggagctcagagttgagctgagacaggcaggtaaaaatgtgataacaacatggcaggaaa

SEQ ID NO: 459010 - DNA, 120 bp, Artificial Sequence
  ENSG00000157191_18 (sequence is synthesized)
ggttccatgactaagggatgccctgggtgccgtgggctcctagaggaagggtgtgcagcccatagttgtgggaaccaaggaaggcttcctggaagaagggacctgtaggcaagggaagag

SEQ ID NO: 459011 - DNA, 120 bp, Artificial Sequence
  ENSG00000157191_19 (sequence is synthesized)
tgatcaaagagtggttcacacagaggaacagcaggtgcaaagcctctgaactgagaaggagcatcagtcatttgctgccagaggtggtgtttctgtcctagctattagagtgcatcagga

SEQ ID NO: 459012 - DNA, 120 bp, Artificial Sequence
  ENSG00000157191_20 (sequence is synthesized)
gggacctgtgtgctcatcccaggctgtgtcttgaataaggaagatttgggagagttctggcaggagggcgttgaggtgggcgctgggagtcctgggcagcttgtgctgatggtgttgtcc

SEQ ID NO: 459013 - DNA, 120 bp, Artificial Sequence
  ENSG00000157191_21 (sequence is synthesized)
tggctcctgtgtcttcgttctgagctgctctgcctctggcttccctcccgtcagctcctgttcataggaacaggttgggctgggctgggctgggctgggttgcctaaagttggcctttac

SEQ ID NO: 459014 - DNA, 120 bp, Artificial Sequence
  ENSG00000157191_22 (sequence is synthesized)
ctggctgcaagggtggagaggggagatgaggtcagagtcatgattgcggggacccaaggaccaagtggattggtttttgtttttgctaggaatactgtgttgagatggatttgttttttc

SEQ ID NO: 459015 - DNA, 120 bp, Artificial Sequence
  ENSG00000157191_23 (sequence is synthesized)
aagaagctttgtaactctaaaataatgcttttcctctttacttactctttctcctcttttctgcttcgtgctggtgatgatttgggatccttgaagttggccagctggcccttaagagag

SEQ ID NO: 459016 - DNA, 120 bp, Artificial Sequence
  ENSG00000157191_24 (sequence is synthesized)
aaatgcaagtccaatccagtggactggttgggatgtgattctttctctcgcttggaggaaactaacatttaatgagcatcagctgagggccaggtagtggtttttttttgttttgttttg

SEQ ID NO: 459017 - DNA, 120 bp, Artificial Sequence
  ENSG00000157191_25 (sequence is synthesized)
ttgttttgttttgttgttttttttttttaggcatttctcatgtgaattaaacatcctctccctttcctccatgagatgaggaaatggaggcttagggagggttggggacttgcccagggt

SEQ ID NO: 459018 - DNA, 120 bp, Artificial Sequence
  ENSG00000157191_26 (sequence is synthesized)
gggtcacagagctagaaataactggcacagctgtgctcacactgaggtctttgaggtcttttgacttcagggctggacttacgattttattaagctgctgctttccttacaagtagggaa

SEQ ID NO: 459019 - DNA, 120 bp, Artificial Sequence
  ENSG00000157191_27 (sequence is synthesized)
cacattatcttcatctgtgtaacttgtgctgctttctggctcatgcttggtgctcagttttttttttaaagcattttcttgaagtataatgtgcatgtaaaaaagtgtacaaatcataaa

SEQ ID NO: 459020 - DNA, 73 bp, Artificial Sequence
  ENSG00000157191_28 (sequence is synthesized)
ccatggctgtaatcccagctactccgggggctgaggcaggagaattggcttgaacctgggaggtggaggttgc

SEQ ID NO: 459021 - DNA, 82 bp, Artificial Sequence
  ENSG00000157191_29 (sequence is synthesized)
ttgctcaaaaaacaaaacaaaacaaaacacccaatttataaacttgcaccttgctcaagatgcaaaagattgtcagcactct

SEQ ID NO: 459022 - DNA, 120 bp, Artificial Sequence
  ENSG00000157191_30 (sequence is synthesized)
cctcccagtaactgccctgagtaaccccatcctgacttcacataccctagattttgtttgttcttaactttcatgaattgaatcatacacctaatcttgatttggaatgatttctttctt

SEQ ID NO: 459023 - DNA, 120 bp, Artificial Sequence
  ENSG00000157191_31 (sequence is synthesized)
ttactcaatgtaatttttgtgagagtcatccatggtgttgcgtgtagtttgttcattctcattgttgtggcatgtaccattgtgagaattcacccgatttatttatgttttactgatgat

SEQ ID NO: 459024 - DNA, 120 bp, Artificial Sequence
  ENSG00000157191_32 (sequence is synthesized)
ggacatttgggtagtttccagtttggggcgattacaaataatgctgctgtagatgtttgagttcatgtttttggtgcatatatgtatgatttctgttggtttatatctaggagtggaact

SEQ ID NO: 459025 - DNA, 120 bp, Artificial Sequence
  ENSG00000157191_33 (sequence is synthesized)
gcggagtcataagtttaagttcctatgttgagctttataatcctttcaaataatttttcaaagtagttttaccagtttacacttaagccagcagcgcgtgaatggttacttcatatcgta

SEQ ID NO: 459026 - DNA, 120 bp, Artificial Sequence
  ENSG00000157191_34 (sequence is synthesized)
gtcaatacttgataatctacattttagccattctggtgagcgtgtaatggtatatcattatagctttgatctgcatttccctgatgaatgaagtgggggtgctgggttttaaaatggacc

SEQ ID NO: 459027 - DNA, 120 bp, Artificial Sequence
  ENSG00000157191_35 (sequence is synthesized)
ttatttgtgagagattcagaatgatgatgcactaagtatagctcatagcaatggaggtgctaggtaggaccatcttttggttacacagatgttgggggtctggggtcaccttggccctcc

SEQ ID NO: 459028 - DNA, 120 bp, Artificial Sequence
  ENSG00000157191_36 (sequence is synthesized)
attgcaggaccatttcaacagagactcaggagaacccaggacaagccacctctcttctctgccaatgttcatctctgctgtaaagccttctcttttacctgaggctcatctctaccatcc

SEQ ID NO: 459029 - DNA, 120 bp, Artificial Sequence
  ENSG00000157191_37 (sequence is synthesized)
agctggcccttaagagagaaatgcaagtccaatccagtggactggttgggatgtgattctttctctcgcttggaggaaactaacatttaatgagcatcagctgagggccagaacatgaag

SEQ ID NO: 459030 - DNA, 120 bp, Artificial Sequence
  ENSG00000157191_38 (sequence is synthesized)
aagttcggtgggctccaggcgtcgcgatggaggagagcgggtacgagtcggtgctctgtgtcaagcctgacgtccacgtctaccgcatccctccgcgggctaccaaccgtggctacagcg

SEQ ID NO: 459031 - DNA, 120 bp, Artificial Sequence
  ENSG00000157191_39 (sequence is synthesized)
ctaaccggtggccttgaagggatcctcgaaaagccttaagcggggaggtgccctatcacagacggaaatccccgagaggaggggagggagcccagagccggctgaaaggaccggtcccgg

SEQ ID NO: 459032 - DNA, 120 bp, Artificial Sequence
  ENSG00000157191_40 (sequence is synthesized)
gggaggaccccttctatatttctctggtctctacctgagacgaataaacacacacgcttgtaaacatactgagtatctctgcaaaggaacacaggaaactgccctaggggaggggaaccg

SEQ ID NO: 459033 - DNA, 120 bp, Artificial Sequence
  ENSG00000157191_41 (sequence is synthesized)
cccttggaaggaaacttcctttcccttttgtgctgtttgcgttttactactctttgtatgcgttatctatcaaaacgacgaaaaatattaaaagaaaaaagatacacttcatacagacaa

SEQ ID NO: 459034 - DNA, 120 bp, Artificial Sequence
  ENSG00000157191_42 (sequence is synthesized)
gcatgttagatgacgtgagactaaccacccatcccgcgggcacccctcgttccaccttgtatgtggctttctgcgttttctccagagcgcacaagggctggtgagaagatgctggaagtg

SEQ ID NO: 459035 - DNA, 120 bp, Artificial Sequence
  ENSG00000157191_43 (sequence is synthesized)
tggcaactcagggtgtttggttgcccaaaagcatgtctggtgtggctttcccagctacctggtgtcatgagactgatcactgagtctcatgatttggtcattgaaacaaccagaaaggtc

SEQ ID NO: 459036 - DNA, 80 bp, Artificial Sequence
  ENSG00000157193_0 (sequence is synthesized)
gccccgggcccgccatgggcctccccgagccgggccctctccggcttctggcgctgctgctgctgctgctgctgctgctg

SEQ ID NO: 459037 - DNA, 120 bp, Artificial Sequence
  ENSG00000157193_1 (sequence is synthesized)
atcttgcggcggcagcggctgatccgctgctcggcggccaagggccggccaaggattgcgaaaaggaccaattccagtgccggaacgagcgctgcatcccctctgtgtggagatgcgacg

SEQ ID NO: 459038 - DNA, 120 bp, Artificial Sequence
  ENSG00000157193_2 (sequence is synthesized)
aggacgatgactgcttagaccacagcgacgaggacgactgccccaagaagacctgtgcagacagtgacttcacctgtgacaacggccactgcatccacgaacggtggaagtgtgacggcg

SEQ ID NO: 459039 - DNA, 120 bp, Artificial Sequence
  ENSG00000157193_3 (sequence is synthesized)
aggaggagtgtcctgatggctccgatgagtccgaggccacttgcaccaagcaggtgtgtcctgcagagaagctgagctgtggacccaccagccacaagtgtgtacctgcctcgtggcgct

SEQ ID NO: 459040 - DNA, 120 bp, Artificial Sequence
  ENSG00000157193_4 (sequence is synthesized)
gcgacggggagaaggactgcgagggtggagcggatgaggccggctgtgctaccttgtgcgccccgcacgagttccagtgcggcaaccgctcgtgcctggccgccgtgttcgtgtgcgacg

SEQ ID NO: 459041 - DNA, 120 bp, Artificial Sequence
  ENSG00000157193_5 (sequence is synthesized)
gcgacgacgactgtggtgacggcagcgatgagcgcggctgtgcagacccggcctgcgggccccgcgagttccgctgcggcggcgatggcggcggcgcctgcatcccggagcgctgggtct

SEQ ID NO: 459042 - DNA, 120 bp, Artificial Sequence
  ENSG00000157193_6 (sequence is synthesized)
gcgaccgccagtttgactgcgaggaccgctcggacgaggcagccgagctctgcggccgtccgggccccggggccacgtccgcgcccgccgcctgcgccaccgcctcccagttcgcctgcc

SEQ ID NO: 459043 - DNA, 120 bp, Artificial Sequence
  ENSG00000157193_7 (sequence is synthesized)
gcagcggcgagtgcgtgcacctgggctggcgctgcgacggcgaccgcgactgcaaagacaaatcggacgaggccgactgcccactgggcacctgccgtggggacgagttccagtgtgggg

SEQ ID NO: 459044 - DNA, 120 bp, Artificial Sequence
  ENSG00000157193_8 (sequence is synthesized)
atgggacatgtgtccttgcaatcaagcactgcaaccaggagcaggactgtccagatgggagtgatgaagctggctgcctacaggggctgaacgagtgtctgcacaacaatggcggctgct

SEQ ID NO: 459045 - DNA, 120 bp, Artificial Sequence
  ENSG00000157193_9 (sequence is synthesized)
cacacatctgcactgacctcaagattggctttgaatgcacgtgcccagcaggcttccagctcctggaccagaagacctgtggcgacattgatgagtgcaaggacccagatgcctgcagcc

SEQ ID NO: 459046 - DNA, 120 bp, Artificial Sequence
  ENSG00000157193_10 (sequence is synthesized)
agatctgtgtcaattacaagggctattttaagtgtgagtgctaccctggctacgagatggacctactgaccaagaactgcaaggctgctgctggcaagagcccatccctaatcttcacca

SEQ ID NO: 459047 - DNA, 120 bp, Artificial Sequence
  ENSG00000157193_11 (sequence is synthesized)
accggcacgaggtgcggaggatcgacctggtgaagcggaactattcacgcctcatccccatgctcaagaatgtcgtggcactagatgtggaagttgccaccaatcgcatctactggtgtg

SEQ ID NO: 459048 - DNA, 120 bp, Artificial Sequence
  ENSG00000157193_12 (sequence is synthesized)
acctctcctaccgtaagatctatagcgcctacatggacaaggccagtgacccgaaagagcaggaggtcctcattgacgagcagttgcactctccagagggcctggcagtggactgggtcc

SEQ ID NO: 459049 - DNA, 120 bp, Artificial Sequence
  ENSG00000157193_13 (sequence is synthesized)
acaagcacatctactggactgactcgggcaataagaccatctcagtggccacagttgatggtggccgccgacgcactctcttcagccgtaacctcagtgaaccccgggccatcgctgttg

SEQ ID NO: 459050 - DNA, 120 bp, Artificial Sequence
  ENSG00000157193_14 (sequence is synthesized)
accccctgcgagggttcatgtattggtctgactggggggaccaggccaagattgagaaatctgggctcaacggtgtggaccggcaaacactggtgtcagacaatattgaatggcccaacg

SEQ ID NO: 459051 - DNA, 120 bp, Artificial Sequence
  ENSG00000157193_15 (sequence is synthesized)
gaatcaccctggatctgctgagccagcgcttgtactgggtagactccaagctacaccaactgtccagcattgacttcagtggaggcaacagaaagacgctgatctcctccactgacttcc

SEQ ID NO: 459052 - DNA, 120 bp, Artificial Sequence
  ENSG00000157193_16 (sequence is synthesized)
tgagccacccttttgggatagctgtgtttgaggacaaggtgttctggacagacctggagaacgaggccattttcagtgcaaatcggctcaatggcctggaaatctccatcctggctgaga

SEQ ID NO: 459053 - DNA, 120 bp, Artificial Sequence
  ENSG00000157193_17 (sequence is synthesized)
acctcaacaacccacatgacattgtcatcttccatgagctgaagcagccaagagctccagatgcctgtgagctgagtgtccagcctaatggaggctgtgaatacctgtgccttcctgctc

SEQ ID NO: 459054 - DNA, 120 bp, Artificial Sequence
  ENSG00000157193_18 (sequence is synthesized)
ctcagatctccagccactctcccaagtacacatgtgcctgtcctgacacaatgtggctgggtccagacatgaagaggtgctaccgagcacctcaatctacctcaactacgacgttagctt

SEQ ID NO: 459055 - DNA, 120 bp, Artificial Sequence
  ENSG00000157193_19 (sequence is synthesized)
ctaccatgacgaggacagtacctgccaccacaagagcccccgggaccaccgtccacagatccacctaccagaaccacagcacagagacaccaagcctgacagctgcagtcccaagctcag

SEQ ID NO: 459056 - DNA, 120 bp, Artificial Sequence
  ENSG00000157193_20 (sequence is synthesized)
ttagtgtccccagggctcccagcatcagcccgtctaccctaagccctgcaaccagcaaccactcccagcactatgcaaatgaagacagtaagatgggctcaacagtcactgccgctgtta

SEQ ID NO: 459057 - DNA, 120 bp, Artificial Sequence
  ENSG00000157193_21 (sequence is synthesized)
tcgggatcatcgtgcccatagtggtgatagccctcctgtgcatgagtggatacctgatctggagaaactggaagcggaagaacaccaaaagcatgaattttgacaacccagtctacagga

SEQ ID NO: 459058 - DNA, 120 bp, Artificial Sequence
  ENSG00000157193_22 (sequence is synthesized)
aaacaacagaagaagaagacgaagatgagctccatatagggagaactgctcagattggccatgtctatcctgcagcaatcagcagctttgatcgcccactgtgggcagagccctgtcttg

SEQ ID NO: 459059 - DNA, 120 bp, Artificial Sequence
  ENSG00000157193_23 (sequence is synthesized)
gggagaccagagaaccggaagacccagcccctgccctcaaggagctttttgtcttgccgggggaaccaaggtcacagctgcaccaactcccgaagaaccctctttccgagctgcctgtcg

SEQ ID NO: 459060 - DNA, 120 bp, Artificial Sequence
  ENSG00000157193_24 (sequence is synthesized)
tcaaatccaagcgagtggcattaagccttgaagatgatggactaccctgaggatgggatcacccccttcgtgcctcatggaattcagtcccatgcactacactctggatggtgtatgact

SEQ ID NO: 459061 - DNA, 120 bp, Artificial Sequence
  ENSG00000157193_25 (sequence is synthesized)
ggatgaatgggtttctatatatgggtctgtgtgagtgtatgtgtgtgtgtgattttttttttaaatttatgttgcggaaaggtaaccacaaagttatgatgaactgcaaacatccaaagg

SEQ ID NO: 459062 - DNA, 120 bp, Artificial Sequence
  ENSG00000157193_26 (sequence is synthesized)
atgtgagagtttttctatgtataatgttttatacactttttaactggttgcactacccatgaggaattcgtggaatggctactgctgactaacatgatgcacataaccaaatgggggcca

SEQ ID NO: 459063 - DNA, 120 bp, Artificial Sequence
  ENSG00000157193_27 (sequence is synthesized)
atggcacagtaccttactcatcatttaaaaactatatttacagaagatgtttggttgctgggggggcttttttaggttttggggcatttgttttttgtaaataagatgattatgctttgt

SEQ ID NO: 459064 - DNA, 120 bp, Artificial Sequence
  ENSG00000157193_28 (sequence is synthesized)
ggctatccatcaacataagtaaaaaaaaaaaaaaaacacttcaactccctcccccatttagattatttattaacatattttaaaaatcagatgagttctataaataatttagagaagtga

SEQ ID NO: 459065 - DNA, 120 bp, Artificial Sequence
  ENSG00000157193_29 (sequence is synthesized)
gagtatttatttttggcatgtttggcccaccacacagactctgtgtgtgtatgtgtgtgtttatatgtgtatgtgtgtgacagaaaaatctgtagagaagaggcacatctatggctactg

SEQ ID NO: 459066 - DNA, 120 bp, Artificial Sequence
  ENSG00000157193_30 (sequence is synthesized)
ttcaaatacataaagataaatttattttcacacagtccacaaggggtatatcttgtagttttcagaaaagcctttggaaatctggatcagaaaatagataccatggtttgtgcaattatg

SEQ ID NO: 459067 - DNA, 120 bp, Artificial Sequence
  ENSG00000157193_31 (sequence is synthesized)
cctctggctattcctgagaccccaggaagtcaggaaaagcctttcagctcacccatggctgctgtgactcctaccagggctttcttggctttggcgaaggtcagtgtacagacattccat

SEQ ID NO: 459068 - DNA, 120 bp, Artificial Sequence
  ENSG00000157193_32 (sequence is synthesized)
ggtaccagagtgctcagaaactcaagataggatatgcctcaccctcagctactccttgttttaaagttcagctctttgagtaacttcttcaatttctttcaggacacttgggttgaattc

SEQ ID NO: 459069 - DNA, 120 bp, Artificial Sequence
  ENSG00000157193_33 (sequence is synthesized)
agtaagtttcctctgaagcaccctgaagggtgccatccttacagagctaagtggagacgtttccagatcagcccaagtttactatagagactggcccaggcactgaatgtctaggacatg

SEQ ID NO: 459070 - DNA, 120 bp, Artificial Sequence
  ENSG00000157193_34 (sequence is synthesized)
ctgtggatgaagataaagatggtggaataggttttatcacatctcttatttctcttttccccttactctctaccatttcctttatgtggggaaacattttaaggtaataaataggttact

SEQ ID NO: 459071 - DNA, 120 bp, Artificial Sequence
  ENSG00000157193_35 (sequence is synthesized)
taccatcatatgttcatatagatgaaactaatttttggcttaagtcagaacaactggccaaaattgaagtcatatttgaggggggaaatggcatacgcaatattatattatattggatat

SEQ ID NO: 459072 - DNA, 120 bp, Artificial Sequence
  ENSG00000157193_36 (sequence is synthesized)
ttatgttcacacaggaatttggtttactgctttgtaaataaaaggaaaaactccgggtatatgtatagatgttcttcattatagacatcttctttgcttttcttggccttgggggaggaa

SEQ ID NO: 459073 - DNA, 120 bp, Artificial Sequence
  ENSG00000157193_37 (sequence is synthesized)
gggagaagtgctcttttctacttgtggggtctcccattggaaacataatcctatagtcccagaaggattcagtccccagtggctttcccatccaaagagaaagagtttgagtttcttaac

SEQ ID NO: 459074 - DNA, 120 bp, Artificial Sequence
  ENSG00000157193_38 (sequence is synthesized)
tctgctgttctgccacttactcccactagacaaccagggacaaggtgcaacatggaagtgtttgacttaagtaggagcagaggagctgcatctaatctcatcatacctggaacttgacac

SEQ ID NO: 459075 - DNA, 120 bp, Artificial Sequence
  ENSG00000157193_39 (sequence is synthesized)
acttaagcaaatgccttcccatccctacctgccagatgcccccaactcaatgaagttggatgtctcaccagcttgataccctttgaattttcagtcagacattctggagttctagcatcc

SEQ ID NO: 459076 - DNA, 120 bp, Artificial Sequence
  ENSG00000157193_40 (sequence is synthesized)
tgtacctaggaccttcctctgtgtcactcttggcctcctaaactctaagaaaataactatattctggagcttgggcagtgtgttttgcataatccagcaatctcctcatgacatgcatgt

SEQ ID NO: 459077 - DNA, 120 bp, Artificial Sequence
  ENSG00000157193_41 (sequence is synthesized)
gttgatagtcctgaaacattcattgagagggtaaatgcagttgacctagaatgaccaataccaaacagaattttaagaacaggtggccaactcctatggagcttactcacatattactat

SEQ ID NO: 459078 - DNA, 120 bp, Artificial Sequence
  ENSG00000157193_42 (sequence is synthesized)
tcttttaagaacggaaagtaaaattatttttgactgaagaaaaatgatgacagtgaaaaacatggaaatgtactcaaaacaagtgactttttctgtaaccttccaaagaaactgaatttt

SEQ ID NO: 459079 - DNA, 120 bp, Artificial Sequence
  ENSG00000157193_43 (sequence is synthesized)
ccaaggaattaaatgataacagtggctaaggcatagtttctaaactttcagtaagatcctggcattcacagaaaaaaatgatgaatggggtctggacatacagcctgagatctcaaaatg

SEQ ID NO: 459080 - DNA, 120 bp, Artificial Sequence
  ENSG00000157193_44 (sequence is synthesized)
acaatgaaattcacaactttttctcagagacattcatgtttcctgcatatgctacaactgcagtttgaaagaggcagcaatgggagcaaccctttacaagaaacaaattgtgatatattc

SEQ ID NO: 459081 - DNA, 120 bp, Artificial Sequence
  ENSG00000157193_45 (sequence is synthesized)
atgtgttggacggcagtaaataagatgaaacctgaggagtcagatccaccttcccccattcatagaggcttttcagcctcattttgaggtacagttacatatcttttgccttttgccccc

SEQ ID NO: 459082 - DNA, 120 bp, Artificial Sequence
  ENSG00000157193_46 (sequence is synthesized)
gtgcatagctatctacagccaatcacagatcacagagtcactggactatagagctggaaggaagctcagagacaatgccaagggggcagaaaatttatcagaagccagtcccagtgcgtt

SEQ ID NO: 459083 - DNA, 120 bp, Artificial Sequence
  ENSG00000157193_47 (sequence is synthesized)
tcctccatttccttctgcaggaagactattttgggctgcctgaacattgtatcaaacctgctacctatactatggtctacctttcctccagtggaattacaaaggcactaactgaaatgc

SEQ ID NO: 459084 - DNA, 120 bp, Artificial Sequence
  ENSG00000157193_48 (sequence is synthesized)
cttctagaaacagagaaaacgaaactgtacttatttactcttgatacacagattatttataaaacagattgaagtaacctgttaactggcaaaaagagaatgagatcggatttaaatgta

SEQ ID NO: 459085 - DNA, 120 bp, Artificial Sequence
  ENSG00000157193_49 (sequence is synthesized)
tggcagtaagtcctattgatccctccagttatctcagtatgactgcagtatattcattcactaaaaccactcactagataccaactacacacctggcactgcagatgtaaaggtcagtca

SEQ ID NO: 459086 - DNA, 120 bp, Artificial Sequence
  ENSG00000157193_50 (sequence is synthesized)
cacatgttctgactttacagagttcacagtagcagtggaggatgatatatgtggaaacaaaaaaggcattgattctattcagagcactgttagggctcaaaggagagaggggtctttcca

SEQ ID NO: 459087 - DNA, 120 bp, Artificial Sequence
  ENSG00000157193_51 (sequence is synthesized)
cctaagaaatgaggaatagggtcatcatagaagtgaccttaagtcttaaaaattaagaaggggattccaagctgcttcagacagagacacatcgagctaaaacacagaggtatgaaagag

SEQ ID NO: 459088 - DNA, 120 bp, Artificial Sequence
  ENSG00000157193_52 (sequence is synthesized)
cacagggactttaggaattgcacagttcattctaacaggaacaaaaggctcaaggggggcaagaaatgaggctgtatggaaagagattcaatgtaagcactttataaaatagattaattt

SEQ ID NO: 459089 - DNA, 120 bp, Artificial Sequence
  ENSG00000157193_53 (sequence is synthesized)
ctgattcaatgaagcatttcttgatcattgtgtacaaggcactacatgcatcatggaaaattcattaggatgcattgccagcactttgcagaactgatattattcagcctcaagctttcc

SEQ ID NO: 459090 - DNA, 120 bp, Artificial Sequence
  ENSG00000157193_54 (sequence is synthesized)
agtggccaaagggaaatgctgactgcttttcatatatttgagtcaaagattttttatatggtcaatgaagactaatataagggcagtgggattttcacagatgcatgccatgttgtcgag

SEQ ID NO: 459091 - DNA, 120 bp, Artificial Sequence
  ENSG00000157193_55 (sequence is synthesized)
agcctcttagattttctcaactgtgagaaagaaaaacgaaaatgttgaagacgttgagtctggagaggggatactaatcactgtccagttgggcactggtgggaatggggaaatggcaca

SEQ ID NO: 459092 - DNA, 120 bp, Artificial Sequence
  ENSG00000157193_56 (sequence is synthesized)
ggaatgcaagcctctccaccctaccccccgaactccagccatacactcatcgtttcacaaaatataaatgagttagcattaaatgtttcagagtaaataattccttttcccgaaatgcat

SEQ ID NO: 459093 - DNA, 120 bp, Artificial Sequence
  ENSG00000157193_57 (sequence is synthesized)
gaagatagagtaacagacttctcacactgtatttttagggtatggagaatttagaaggttaaagaattactgcttcaatttttcagttaaaaaaaaatcaggaagctctgttcattcagg

SEQ ID NO: 459094 - DNA, 120 bp, Artificial Sequence
  ENSG00000157193_58 (sequence is synthesized)
caggctatgcaccatgtgcacagtcaagaattagcagaaaccctctgcatttacaaacactttgtgctataaaaaagtaatttttaaaaagccacgtgtgtgtgtgtgtatatatatata

SEQ ID NO: 459095 - DNA, 120 bp, Artificial Sequence
  ENSG00000157193_59 (sequence is synthesized)
tatatatttaaagccaaggttttgatacttttttacaaaaactacaagagaaaacaaatatacctgtccaaaccatatacttttaaaagagcatttttttttccatacaagctgttgtta

SEQ ID NO: 459096 - DNA, 120 bp, Artificial Sequence
  ENSG00000157193_60 (sequence is synthesized)
atttgggggtaaagtgctgatttgcaaacttcatcaaattgttcccaagtggattctccttgtttgtctccccctaccaaccccaaagttaccatatttgatgtaagaatcaggcatgtt

SEQ ID NO: 459097 - DNA, 120 bp, Artificial Sequence
  ENSG00000157193_61 (sequence is synthesized)
agaatgttgtgtcacactaactgattctgctctttttgtcttgtcattcaagttccgttagcttctgtacgcggtgccctttgcagtctggtgtctcttccagaggcgagggggctgagg

SEQ ID NO: 459098 - DNA, 120 bp, Artificial Sequence
  ENSG00000157193_62 (sequence is synthesized)
atggggtgctgcatctcactagctatactggcatcatcttggtaaactgaaaaccaaatgtggacatttgtaaaatcagtgcactgtttctagagagagattaaattcatttaaaaaaaa

SEQ ID NO: 459099 - DNA, 120 bp, Artificial Sequence
  ENSG00000157193_63 (sequence is synthesized)
gaagaaagcaaaccatgttggactcgcaatcagtgatgatctagagcagaggtcatcaaaatacaggccacaggcctggcctgtcaccagttttttgtaaataaagttttattgaaacat

SEQ ID NO: 459100 - DNA, 120 bp, Artificial Sequence
  ENSG00000157193_64 (sequence is synthesized)
ttgcagtgagtcctgcccctcagtctgggtgggggtgggcctcagtttcctcctcagatcttccttgagaggctgtgaggctcaggagaggtaaccagttgaacattctgtgccacgcac

SEQ ID NO: 459101 - DNA, 120 bp, Artificial Sequence
  ENSG00000157193_65 (sequence is synthesized)
tcagggcgctcctggtaaacagatatatttagttgctggtttctactgacctgtttctggactttcttcacagccctcttgtaggttggaccctgtttctgtggcagcaggagctagaaa

SEQ ID NO: 459102 - DNA, 120 bp, Artificial Sequence
  ENSG00000157193_66 (sequence is synthesized)
cccttttgggatagctgtgtttgagcacccagcactgtaacccatatacaaaaggcacccagtaaagggaggaaaggaagaaggaacatacatatccttagaatcatttactggaggaaa

SEQ ID NO: 459103 - DNA, 120 bp, Artificial Sequence
  ENSG00000157193_67 (sequence is synthesized)
tggcctgagagatgctgttcaattctgcacacttttattgacctctgccagaccctggggtcatagaagtgaatcagacactatcctagtctcaagaagctcccagcaaagtgaggagcg

SEQ ID NO: 459104 - DNA, 120 bp, Artificial Sequence
  ENSG00000157193_68 (sequence is synthesized)
aagaccctcctgtgccctgaccctaatgacttttcttctccgggaatgaagaagccagaaccaaccaaggtctcacaccttcacctcttcccgaaaactaactccaccaccaaggggagg

SEQ ID NO: 459105 - DNA, 120 bp, Artificial Sequence
  ENSG00000157193_69 (sequence is synthesized)
gaaagcaaagggatgatggtctgtggtgggcattggcaggatttgcttgcagcaaagttactcagcactgctctgaagttgtgggcaaagctccacctctaagtccagcccctgctttaa

SEQ ID NO: 459106 - DNA, 120 bp, Artificial Sequence
  ENSG00000157193_70 (sequence is synthesized)
aggacaggtgtgttggtacacaagtgtttgtgcttgtttatatacatggcatgtacatgtaaagtatgtgtatgtgcatgggtaaatataaatgcatcagaataaaagtgtgcattcctc

SEQ ID NO: 459107 - DNA, 120 bp, Artificial Sequence
  ENSG00000157193_71 (sequence is synthesized)
tctgggctccatgctctgtgaacactttgttctattttttatggcctagtggggctggcccagagacagacggctaagtacaactaccaggctgctgtgtcaacacgggctagtccctcc

SEQ ID NO: 459108 - DNA, 120 bp, Artificial Sequence
  ENSG00000157193_72 (sequence is synthesized)
cttctctgcacctcatctaatcatctgtaggatgagaggcttgtgccccagcagtgttttcctaggtgtggttcattggaccacttgtttcttgggaaataaacagatgtggcatctgaa

SEQ ID NO: 459109 - DNA, 120 bp, Artificial Sequence
  ENSG00000157193_73 (sequence is synthesized)
cgcgcgctccgcggcggtaatgagcagagccgggcggcttctccgcttgacaatgcgtttccgcagacccctgcgcgcggcggagagagagggggctgcctgccagggtgatgtgcctgc

SEQ ID NO: 459110 - DNA, 120 bp, Artificial Sequence
  ENSG00000157193_74 (sequence is synthesized)
ggctcccactgcgcctggcgcgcgggcgcggggactccctatgggctgtatctgagcagatctctgactatgggtcgcgtgtgcggggccggccaaggattgcgaaaaggaccaattcca

SEQ ID NO: 459111 - DNA, 120 bp, Artificial Sequence
  ENSG00000157193_75 (sequence is synthesized)
ctaagcaaagtgtgaagaaaactcatcttagaatgcagatgtactgcaaagattccactgagaaggacagacatggaacagattcagagacacagtctctctcaccaaatccttgccagg

SEQ ID NO: 459112 - DNA, 120 bp, Artificial Sequence
  ENSG00000157193_76 (sequence is synthesized)
ctccccagaggagggggagcaggcctgcagccccagaagcacccagagggcctgtgggtagatttgaataaaggtggtccatgggagtggcttcccagggagaaggcaagccccagaact

SEQ ID NO: 459113 - DNA, 120 bp, Artificial Sequence
  ENSG00000157193_77 (sequence is synthesized)
ggcagagttgggaggagtttccccttggtccccaagatgcattttcccccagagcatcacttgcccctaaatcacctggctccctttccatggggtcctagtagcaccagaactggattt

SEQ ID NO: 459114 - DNA, 120 bp, Artificial Sequence
  ENSG00000157193_78 (sequence is synthesized)
gtaaggactttgccaaagctgaaagacacctagggggacatgacagagcacttgggaagtccagcccccaccacttgtccaggtcccagctggtgagtggcttccctcactagttcccag

SEQ ID NO: 459115 - DNA, 120 bp, Artificial Sequence
  ENSG00000157193_79 (sequence is synthesized)
gctgagcagaggctgagtcttgctccccagggagcccctttagttctcagatggttcttctggtcaccacctgccctctgcaggagcagggaccctcattcactagtcatcttggggaat

SEQ ID NO: 459116 - DNA, 120 bp, Artificial Sequence
  ENSG00000157193_80 (sequence is synthesized)
ggataacaggctgggcagtgtagcaacttcccctatccggggtccatggggcaaagtccccccaggagatgatcagtccagcctctaaggtctctctagagctgctgcctggtcctccta

SEQ ID NO: 459117 - DNA, 120 bp, Artificial Sequence
  ENSG00000157193_81 (sequence is synthesized)
ggacctgagtcctgcaagatgagacgcagatccccacagccctgcccagctacatgaggcttagcctcctaatcatccctgggatcctgtcctgtgagcagagcttcctcagttcctgga

SEQ ID NO: 459118 - DNA, 120 bp, Artificial Sequence
  ENSG00000157193_82 (sequence is synthesized)
tttacctgtctgtcctgggccaccctccagggacctgtgagggactggaactggagctctgcttgcctcctgtgggccccagcccagcccttcttgtccaaggtctcacaggcactgtcc

SEQ ID NO: 459119 - DNA, 120 bp, Artificial Sequence
  ENSG00000157193_83 (sequence is synthesized)
actctcttgtccggcccaacagagtcaccctgtgagggtccccgcagatttcagtgtaagagtggcaagcgcgtggacggcgggaaagtgtgtgatgtgcagagggactgccgggactgg

SEQ ID NO: 459120 - DNA, 120 bp, Artificial Sequence
  ENSG00000157193_84 (sequence is synthesized)
tcggatgagcttctgaaagtgtggtgcggtgcctgtctacgcccactggctggactcagtctcctaccatccccctcctggtatctaggctcaaggccctccagtgccccctgccctgac

SEQ ID NO: 459121 - DNA, 120 bp, Artificial Sequence
  ENSG00000157193_85 (sequence is synthesized)
actttctgctctgaccctctctttggattcatgtgccgtcctatggcttcacatggggcttttcgcccccaggcctctggtctacatctctacaaagtgctaagagcttgtccatcccag

SEQ ID NO: 459122 - DNA, 120 bp, Artificial Sequence
  ENSG00000157193_86 (sequence is synthesized)
gtactaaaaaattatgttttctctcacaaacttggcctttcctcattccttccccgttcagacctctgagaccttctggaactttctctcttcctcggtgttcctcccctgctgacccag

SEQ ID NO: 459123 - DNA, 120 bp, Artificial Sequence
  ENSG00000157193_87 (sequence is synthesized)
ccaaggccctgggctctgaggtcttctagccccttgcagaagacccagcagagggagaagtgggcacagcaggcaggcagccaggtgaagcacatcccagggccactgctcaggccatac

SEQ ID NO: 459124 - DNA, 120 bp, Artificial Sequence
  ENSG00000157193_88 (sequence is synthesized)
ctgtgtgggagtaaggcaggccttgcagcaggaggtggcaccatcctaagccctgaggagttcggacctgatggggagaccagacttggaggccagactaaagcgagacctggatggaag

SEQ ID NO: 459125 - DNA, 120 bp, Artificial Sequence
  ENSG00000157193_89 (sequence is synthesized)
tggctgccctgatgtcggctacagctgtcagggtgggttccaggctagaaagaacagaggctccaggctgtaggtagggtgggcatcccagagaacatgctagaaacccagtgtggactc

SEQ ID NO: 459126 - DNA, 120 bp, Artificial Sequence
  ENSG00000157193_90 (sequence is synthesized)
caggaaggttcatgagtttttttttgttttttgtttttactgttcccaggttagggcttgagggagatttgacagagaagccctgggaggacagaggctaggtcagtccctccctttcct

SEQ ID NO: 459127 - DNA, 120 bp, Artificial Sequence
  ENSG00000157193_91 (sequence is synthesized)
gccttctggcagactgtttccccagcacctacctcctgggtgcttagaggaggttcatcctcctgagcttcccaggaagagcatatttccttccccttttgaagattaaaaaactgattg

SEQ ID NO: 459128 - DNA, 120 bp, Artificial Sequence
  ENSG00000157193_92 (sequence is synthesized)
tgaaaggaagagtagttgagtgaaagtgactcagcttctacctgagctggcaggagatagacactccctctgcctccaggccctgccaagagaagtcccagaagaaggaacttgtggaaa

SEQ ID NO: 459129 - DNA, 120 bp, Artificial Sequence
  ENSG00000157193_93 (sequence is synthesized)
aagagacagggaagccagaactactgagcctagctcccccaacacccagatttggagtagccagggactactgtcctactaatccctctcttctctctcgtcgtttgcatgacacaccaa

SEQ ID NO: 459130 - DNA, 120 bp, Artificial Sequence
  ENSG00000157193_94 (sequence is synthesized)
agaggagtacgtacacacgtgcttgtgtctgtgtgtggcctctgtctctgtgttggtgagaggccggtgtctgtatccatgtcttcttctctgagtaaagcaggggaactgcattcatgc

SEQ ID NO: 459131 - DNA, 120 bp, Artificial Sequence
  ENSG00000157193_95 (sequence is synthesized)
atctatgtgtgtgaccccatgtatgtgtgaatgtatctatggagtccatgggactgtttgtgctctgcacataagctggtatgtgtgcatgtagttgtgggcatgctggtgtgtgcatgt

SEQ ID NO: 459132 - DNA, 120 bp, Artificial Sequence
  ENSG00000157193_96 (sequence is synthesized)
aggtgtgtgcagtgacaccacttcttccttccatggaaggaagccgcaaatactactctggcctctctgcaccactctaccccatccccctcctctcctggctccccagcggaatcacac

SEQ ID NO: 459133 - DNA, 120 bp, Artificial Sequence
  ENSG00000157193_97 (sequence is synthesized)
ccaggctaggtagaattaagaaggactgaagacttccctgcaggcatttggggaaaggttacagggacagacaggtgcagacctgctctcctttctcttcccctcacccacctgagccct

SEQ ID NO: 459134 - DNA, 120 bp, Artificial Sequence
  ENSG00000157193_98 (sequence is synthesized)
ggaggactctgtgccttccttcatcagaagccagtcactttgagttctctcctttccccttccccctttcagggccatcccacctacacatgccacttcatcaagtgctcagtaaataga

SEQ ID NO: 459135 - DNA, 120 bp, Artificial Sequence
  ENSG00000157193_99 (sequence is synthesized)
attgttgagttgttgctagctgcaaaaggagaggaaggaggcgagtggatgcatgatgggggcagtgggtgagtgggaggacagatgaatgaacggtgctcagggaataacacaggaaag

SEQ ID NO: 459136 - DNA, 120 bp, Artificial Sequence
  ENSG00000157193_100 (sequence is synthesized)
gagaggtcagggagggctccgagcgactgaaagattcctagaggtgggagctgccgtggctcagcccacctccaagggtctgaggcttcccagggctgggcctggctgagtcatccctgg

SEQ ID NO: 459137 - DNA, 120 bp, Artificial Sequence
  ENSG00000157193_101 (sequence is synthesized)
gtcccccagtcatggagttgctgtggtcttgttctttcagttccgccaacattcctgggaaacaggaggaggcccaggggtaaaggggttattccctaagcatggctcaggctggaagtg

SEQ ID NO: 459138 - DNA, 120 bp, Artificial Sequence
  ENSG00000157193_102 (sequence is synthesized)
ggggcaccccatagctgtgcatggcctggggtgggcagctcagaccagctatatgcatggccatggctggctcagctcagcactgcttggcttggctggagtggcagtgcatgagcctgg

SEQ ID NO: 459139 - DNA, 120 bp, Artificial Sequence
  ENSG00000157193_103 (sequence is synthesized)
ggggcagagggggagaggggcgcggcacctctccttggcttgtggaattaaccttctgtgactctaaagctcaggagaggctgtaagagcattggtcctggattccctgacctcccctaa

SEQ ID NO: 459140 - DNA, 120 bp, Artificial Sequence
  ENSG00000157193_104 (sequence is synthesized)
gaccctgccagaaggtagtgagggagtggaggatggggaaccagaaccagatgacctctgggcatcccttcacctcttgcagcaggtggtaatcctggaaccgggcccatgacaagatag

SEQ ID NO: 459141 - DNA, 120 bp, Artificial Sequence
  ENSG00000157193_105 (sequence is synthesized)
gaggaacagggacaggtgctgagaggagaggagttaaaaaacccatcatattagttcatgataggagagaattgatttagcaatggctccatgttaaaaaaggcccaggagtcttaaata

SEQ ID NO: 459142 - DNA, 120 bp, Artificial Sequence
  ENSG00000157193_106 (sequence is synthesized)
accacaagcacattagggggggcatcctgtgttgttcaggttccttctgggtggcaaactagctctgggccctgtccagacagggacatggacagatggagtgagtccagagaaaggcac

SEQ ID NO: 459143 - DNA, 120 bp, Artificial Sequence
  ENSG00000157193_107 (sequence is synthesized)
ccaaatggcaggagaccagatatcagtgctttaagggagcctgtgcaccctggccaaccccacacagcagagctgggagcacaagcagaagcctcagcaggcagtgctggtccacagtgg

SEQ ID NO: 459144 - DNA, 120 bp, Artificial Sequence
  ENSG00000157193_108 (sequence is synthesized)
agccagctgccccaggagggaagtgggctccctgaggctggagatatttaagcaggggcattttggaagggattcttagggtatcctgagggttggatgtgacacacacaggacccttca

SEQ ID NO: 459145 - DNA, 120 bp, Artificial Sequence
  ENSG00000157193_109 (sequence is synthesized)
actctgaggtcacgaggaaggaggcgctgtgagaaacatgtttgtgaaaggaaagaccttgggccactggggaaggcctagctgcctccagcttggtggtggacagagccccagccggga

SEQ ID NO: 459146 - DNA, 120 bp, Artificial Sequence
  ENSG00000157193_110 (sequence is synthesized)
ggccggggacctaagttctggttccactctaccctgtctctgtgtctggcctggagtaggaacctgccctctctgtgccgcctgctgcccagaacacctggtagatgaggctgaggctca

SEQ ID NO: 459147 - DNA, 120 bp, Artificial Sequence
  ENSG00000157193_111 (sequence is synthesized)
atgtgataagacagaacctaccagagctgaatactgcatatctttgaggaggttactgcatatctgagagggaggtagagtaccagcctgcgatttaggactcataggtgcccctacctt

SEQ ID NO: 459148 - DNA, 120 bp, Artificial Sequence
  ENSG00000157193_112 (sequence is synthesized)
acagagggtcttgtaggaagctgagaccctgtgagcctcagttgcttctcttacaaagtggaaataaccacccttccacaacctgcttcacaagattgccatgatagacaaaggtgtaac

SEQ ID NO: 459149 - DNA, 120 bp, Artificial Sequence
  ENSG00000157193_113 (sequence is synthesized)
cggtataactggaggtgctcacgcacacagccgttgctgactctgcgagggtgtgtgtgtctatgtttcacaaagttctgatgtgtatatgaggaggtgtcccttgtgtttggaaagctc

SEQ ID NO: 459150 - DNA, 120 bp, Artificial Sequence
  ENSG00000157193_114 (sequence is synthesized)
tgatctcagttcacagcaggtccccagatagtaatatctacaaccatggtctccttatacctctttccaaccctgggatgaaaataattaagttcaccacttattaaatcattgggagca

SEQ ID NO: 459151 - DNA, 120 bp, Artificial Sequence
  ENSG00000157193_115 (sequence is synthesized)
gtaattgtcactgctagaaatgttctatctcattaatcagcaaatacctttttaattgagttacctgccagagggagttcatttaaaaggataaactatctttttaattttttcccctac

SEQ ID NO: 459152 - DNA, 120 bp, Artificial Sequence
  ENSG00000157193_116 (sequence is synthesized)
atggacagcccagaaaccaagctgcttggcaacatcttcctaactggtcctatttgccagcagaagctggctttttggagtggagcacttactccgaagtttgcagaggcagatggagca

SEQ ID NO: 459153 - DNA, 120 bp, Artificial Sequence
  ENSG00000157193_117 (sequence is synthesized)
tgtgtgaattccagttcctctcatctgagggcagagcctctcaccagcttctcctcactggcttcctcatgctctaggttttaatatcactgtccagtgttcgctgtggcccagagcagg

SEQ ID NO: 459154 - DNA, 120 bp, Artificial Sequence
  ENSG00000157193_118 (sequence is synthesized)
gaggacagcagggaggacacagttagctctggaagcaagcagtgcagctttttctccccttaactgttagattctcttggagtaacatggataaacagtcacattgagagaggatgggcc

SEQ ID NO: 459155 - DNA, 120 bp, Artificial Sequence
  ENSG00000157193_119 (sequence is synthesized)
ttgggccattgccgggacagtcatctcacctgcagcaagtgtagatgatagctccttttcacaccacagggagctgtcaggaggatctaagggaaaaatgctttctgaactataaagtgc

SEQ ID NO: 459156 - DNA, 120 bp, Artificial Sequence
  ENSG00000157193_120 (sequence is synthesized)
ttcacaaatgttacaatgaagatggttataagagtgagaaagatggcatggcatagtttttcaaaaagacagtaaattttccaagcacttttcagtttaaaatgtgcttttacatatctt

SEQ ID NO: 459157 - DNA, 120 bp, Artificial Sequence
  ENSG00000157193_121 (sequence is synthesized)
tttaaaatttagaccctattcaacaaccccatcccactctccaccctcttagaactaggcaaagttgtgccaagcattttatattcattttagataaattatttcatttaatccttacca

SEQ ID NO: 459158 - DNA, 120 bp, Artificial Sequence
  ENSG00000157193_122 (sequence is synthesized)
tatccctaggaggtaggtaatatcaccattttaaagatataaaagtataataccatgtgctgtatttataatatataataatttgcccaaggtcacatgggtagtgagtagtagagctgg

SEQ ID NO: 459159 - DNA, 120 bp, Artificial Sequence
  ENSG00000157193_123 (sequence is synthesized)
gacttgaacccagaagtctgacacagaagtctgcgcttttgattcctctacactatactatgtcccatttcaattacttatgaaaaataatctgataatgcagatggacagacagttcac

SEQ ID NO: 459160 - DNA, 120 bp, Artificial Sequence
  ENSG00000157193_124 (sequence is synthesized)
aaaaaacaatactggcaaagcaacagatactgatggaaaaaggcaaatgacctagtccatcagcaacataaagacctaagtgctcactttgccatgcacagcccccagcttcctactacc

SEQ ID NO: 459161 - DNA, 120 bp, Artificial Sequence
  ENSG00000157193_125 (sequence is synthesized)
atgatgctatggaaagggtatgggacttgggacatgagtcctgggttcaagtcccagctctgccacttttctgaaacccctcagttaagactcagtttccttgcctgtaaaatggagata

SEQ ID NO: 459162 - DNA, 120 bp, Artificial Sequence
  ENSG00000157193_126 (sequence is synthesized)
acctctgtcctgcttgcctcacaggagttgtgataggatctggaaagactgaattattaggcaacagccaggatcatcattttagaatgaggatgagcagcagttgggtagttcttacca

SEQ ID NO: 459163 - DNA, 120 bp, Artificial Sequence
  ENSG00000157193_127 (sequence is synthesized)
caagagaagcctcaggcccttttgcatgcaggcccctagcctggaaggctccatctctgcttgtccggcctcacctgacctctggagtcaccatttccagggtgcttcctcccctagctt

SEQ ID NO: 459164 - DNA, 120 bp, Artificial Sequence
  ENSG00000157193_128 (sequence is synthesized)
cctctgctgtgaaggggatgaggacccaagacccttccctgttaccttgggtacatctatgctgtggctgggatcagacatggccccgcatgaccctgaggctgcagctagaccagaact

SEQ ID NO: 459165 - DNA, 81 bp, Artificial Sequence
  ENSG00000157193_129 (sequence is synthesized)
ccatagagacaagaagatcttgttcactgcatcctcgaactcctgggctcaagggattctcctgcctcagcatcccgagta

SEQ ID NO: 459166 - DNA, 84 bp, Artificial Sequence
  ENSG00000157193_130 (sequence is synthesized)
aattaatttttttgtaaagaccagggctcaccatcttgcccgggctggtcttgaactccagggttcaagcaatcctcctgcctc

SEQ ID NO: 459167 - DNA, 120 bp, Artificial Sequence
  ENSG00000157193_131 (sequence is synthesized)
ttacatatgtgagccactgtgcctggcctccgttaaattttctaattggttgttgctgattaaaaagacggctaatgatcttttatgttgattcttgattaactaaaattatttctgata

SEQ ID NO: 459168 - DNA, 120 bp, Artificial Sequence
  ENSG00000157193_132 (sequence is synthesized)
ttatttctgatagtttttcaccagcttctcttaagagtttctaaaaatacaaatagctgttaataacagtttggtttcctcctttctcatatgtatttatttatttactttttttttttt

SEQ ID NO: 459169 - DNA, 88 bp, Artificial Sequence
  ENSG00000157193_133 (sequence is synthesized)
gctcctttcccatatttatacccttaaatttttttctggccttactgcatagctagatctctaagacaataaatattagcaatgataa

SEQ ID NO: 459170 - DNA, 120 bp, Artificial Sequence
  ENSG00000157193_134 (sequence is synthesized)
gacgaggccgactgcccactgggcacctgccgtggggacgagttccagtgtggggatgggacatgtgtccttgcaatcaagcactgcaaccaggagcaggactgtccagatgggactggc

SEQ ID NO: 459171 - DNA, 120 bp, Artificial Sequence
  ENSG00000157193_135 (sequence is synthesized)
gcacactgcacaggcctgttcgtcctgtaacatcatttcccctcccgcccaggctcactcctagacatccctcagcctctgatccgcctgtcacctcctccaggaagcctctgctgcttc

SEQ ID NO: 459172 - DNA, 120 bp, Artificial Sequence
  ENSG00000157193_136 (sequence is synthesized)
ctctggacctgctacctccgtggtgaggggctcgcctggcccatccctgcgtctgcagagcccagcactcaggcgagcccagagcagggccgtggagcgcccgctgagagaagagtggac

SEQ ID NO: 459173 - DNA, 120 bp, Artificial Sequence
  ENSG00000157193_137 (sequence is synthesized)
tgagagaagagtggacgaaagacaggagggaggagggcgaggaggcggcggcagggggagcgtggggcggaggcggcagcgggagggagcgcgcgcgctggcggcggccgcccagggccg

SEQ ID NO: 459174 - DNA, 80 bp, Artificial Sequence
  ENSG00000157193_138 (sequence is synthesized)
ctgagcccgccccgccgccgagcgtcaccgaacctgcttgaaatgcagccgaggagccggggcgggcggcagcggcggcg

SEQ ID NO: 459175 - DNA, 120 bp, Artificial Sequence
  ENSG00000157193_139 (sequence is synthesized)
aagttaaatacaatatacaacagataaattataacaatacagcagccataatactgacatgtagcccataaacccaaaaactgtaacacccaaactgtacaatatgtaactcatacatta

SEQ ID NO: 459176 - DNA, 120 bp, Artificial Sequence
  ENSG00000157193_140 (sequence is synthesized)
gtatatcacatataacgtgtaacctgttcttgcccccatatagaacacatgtaatacatgacacagattatgtacatgcactggagacaacatgcaactacccatgcatatacaaaatcc

SEQ ID NO: 459177 - DNA, 120 bp, Artificial Sequence
  ENSG00000157193_141 (sequence is synthesized)
acacacatgaatatttcaagtgcagttacataaaatctcaaatcataaacacagggggttcctgtcacagtcacagctgtcatttaagatcactccaacatgcccctttaacctggctcc

SEQ ID NO: 459178 - DNA, 120 bp, Artificial Sequence
  ENSG00000157193_142 (sequence is synthesized)
tgccttcagggaggtgaagtgtcattactgtcattttggggtgagggaaatcacagcttgtcagtggcagagctggcctgtaactcagctttcatccttgccccttcctgcaccttgagc

SEQ ID NO: 459179 - DNA, 120 bp, Artificial Sequence
  ENSG00000157193_143 (sequence is synthesized)
ccattctccatgctatttgtaccacacttctgtctcactcccaccctgctttgaattagtctccatcactacacacaggtcacacacccagccccaggccctacctgactctgtgctggt

SEQ ID NO: 459180 - DNA, 120 bp, Artificial Sequence
  ENSG00000157193_144 (sequence is synthesized)
cccatcctccagggagcacattagcttggcaaagatgcacagtgacagggactggtggctggcagaagtgtcagctggaaaacaagagaaggaggcacagggagcttgaggggcaggtgt

SEQ ID NO: 459181 - DNA, 120 bp, Artificial Sequence
  ENSG00000157193_145 (sequence is synthesized)
tactaggagcagcccctcagacagtgttggtgcctgagagtggcccaatacatctagaaacagcctgtgggagctggtgctaggccctcagaggcccatgggacagtgtcctcccatatg

SEQ ID NO: 459182 - DNA, 120 bp, Artificial Sequence
  ENSG00000157193_146 (sequence is synthesized)
gagtagccaggaaagtctaggtcacttatttatcatcttaaaatctaaccctaaatctaagaaaaatacaggttttgtgtatacatgagcagtttatgttgtctctactgcatatatata

SEQ ID NO: 459183 - DNA, 120 bp, Artificial Sequence
  ENSG00000157193_147 (sequence is synthesized)
atctgtgttgtatatcatatatgtcccatctctgccattggctcaggatagagaacaaactcacccagctcataggaccttttgtgatctggcccctgccaatctctgaagctcatctct

SEQ ID NO: 459184 - DNA, 120 bp, Artificial Sequence
  ENSG00000157193_148 (sequence is synthesized)
ctggcccctgccaatctctgaagctcatctcttgctatgtccccaatactttctatcctgaatcatctttttttttttcctttgagacagagtctctgtcactcaggctggagtgcagtg

SEQ ID NO: 459185 - DNA, 62 bp, Artificial Sequence
  ENSG00000157193_149 (sequence is synthesized)
atttttatttttagagatgggattttgccatattacccaggctagtctcaaactcctggcct

SEQ ID NO: 459186 - DNA, 62 bp, Artificial Sequence
  ENSG00000157193_150 (sequence is synthesized)
agttatctttctaagacacttacttgctcaggtagttccttcttgaaccacagcagtagggc

SEQ ID NO: 459187 - DNA, 120 bp, Artificial Sequence
  ENSG00000157193_151 (sequence is synthesized)
cttgctcaggtagttccttcttgaaccacagcagtagggcccaagcagagaagatgatagttgctggaaagaaatacatagtaggtggaagggacaacctgagcaaaggctctgaggcag

SEQ ID NO: 459188 - DNA, 120 bp, Artificial Sequence
  ENSG00000157193_152 (sequence is synthesized)
gcgagtaatgaggctggacagggaacttggggtcacactgtggaaggctttcagtgcaggcctaaggagaaaatggggagccataaaagattttggagaagtttgtatctaataaaaaga

SEQ ID NO: 459189 - DNA, 120 bp, Artificial Sequence
  ENSG00000157193_153 (sequence is synthesized)
ataagaatcttcctgctatgcgtggtgctctgcatcttctgctttctgtactcattatttcatctgctcctgcaacctgtaaagtaggaattgtcactactattttaaggaaaatggatg

SEQ ID NO: 459190 - DNA, 120 bp, Artificial Sequence
  ENSG00000157193_154 (sequence is synthesized)
tgtcagccagcaagccagtggcagagtcttggtctccaggctccctgcctcttgcactgactctttctctttcaacctccctgcatgacagctggcaagagcccatccctaatcttcacc

SEQ ID NO: 459191 - DNA, 120 bp, Artificial Sequence
  ENSG00000157193_155 (sequence is synthesized)
ggagtcccactgccctgaggctctgcttctgctctaggtcctacccctgccctgcccccactcctcctgggctcctggaccttcaggagcccatgtccctccccagggctgaacgagtgt

SEQ ID NO: 459192 - DNA, 120 bp, Artificial Sequence
  ENSG00000157211_0 (sequence is synthesized)
ttcctgttggacacaaagtccccggggcatttctgcagcgccagctccttgtgcggggcctggcacatacgatgttcaagcaaggcttgggatcaataaaggagcgggcattccatattc

SEQ ID NO: 459193 - DNA, 120 bp, Artificial Sequence
  ENSG00000157211_1 (sequence is synthesized)
tcggccggaagttacactggctcccagacctattattgcattaagagttgcacaatacgattttccaattctgttattcctgctgcattcttgcgtgaaaaagacttttccctcaactgt

SEQ ID NO: 459194 - DNA, 120 bp, Artificial Sequence
  ENSG00000157211_2 (sequence is synthesized)
ctgcagcaacctccttccctcctctgagctaaatccgcatgtctgaaggaagttgtcctgcgtgtcccactaaatacaggctcctttcagctccctcggagtggggatgggaagaacctg

SEQ ID NO: 459195 - DNA, 120 bp, Artificial Sequence
  ENSG00000157211_3 (sequence is synthesized)
tagcgagcacctactctgtgctttagcaagtgagatctcctttcatttgcacaacagcccctgggtcggagctgaacagccccactggatggatgagaagacccagaccaggggagttaa

SEQ ID NO: 459196 - DNA, 120 bp, Artificial Sequence
  ENSG00000157211_4 (sequence is synthesized)
atgacttgtccaaggtgacctggcaagttacaggctgaactgggattgatcccagatctacccggccctaaaagttatgccctttctcctccactcactttccttccaggcctgagttcc

SEQ ID NO: 459197 - DNA, 120 bp, Artificial Sequence
  ENSG00000157211_5 (sequence is synthesized)
ttcccttcctgatagtgtggtcggtgcagatctcagaacgtgtaaacctggtgacaccagatccgtcactttacagtgagtaaaggaagtacccagggatcggcttactaattctagggg

SEQ ID NO: 459198 - DNA, 120 bp, Artificial Sequence
  ENSG00000157211_6 (sequence is synthesized)
ccggtgaattattcatgccaccattaacttggaggccctttcagcctcacctctctttcccttgctccggaccctgagatcctggcctacctgagctcggcagacctgtgggggcccctg

SEQ ID NO: 459199 - DNA, 120 bp, Artificial Sequence
  ENSG00000157211_7 (sequence is synthesized)
gtgaggagatgctggcagagtggggggcttgcctgctgctggcagtggcactgctgggcccagggctccaggcccaagccatggaaggtgtcaaatgtgggggtgtgctctcagcacctt

SEQ ID NO: 459200 - DNA, 120 bp, Artificial Sequence
  ENSG00000157211_8 (sequence is synthesized)
ctggaaacttctccagccccaacttccctagactgtacccctacaacacagagtgcagctggctgatcgtggtggccgagggatcctcggtgctgctcaccttccatgcctttgacctag

SEQ ID NO: 459201 - DNA, 120 bp, Artificial Sequence
  ENSG00000157211_9 (sequence is synthesized)
agtaccacgacacctgcagcttcgactttctggagatctacaatggggcctcaccagacaagggcaacctgctggggaggttctgcggcaaggtgcccccgccgcccttcacctcctcct

SEQ ID NO: 459202 - DNA, 120 bp, Artificial Sequence
  ENSG00000157211_10 (sequence is synthesized)
ggcatgtcatgtctgtcatcttccactcggacaagcatgtggccagccatggcttttctgcgggctaccagaaagatgtgtgtggcggcgtcctgactggcctgtcaggggtcctcacca

SEQ ID NO: 459203 - DNA, 120 bp, Artificial Sequence
  ENSG00000157211_11 (sequence is synthesized)
gtgttcgtggacttccaggtggagggcaatgaagagtgcacctatgactacgtggctgtgcttggggggcctggccccacccgtgggcaccactactgtggcagcaccaggccccccacc

SEQ ID NO: 459204 - DNA, 120 bp, Artificial Sequence
  ENSG00000157211_12 (sequence is synthesized)
ctcgtgtctctgggccacgaactgcaggtggtcttcaagtccgacttcaacatcggaggccgtggcttcaaggcctactacttctcaggagaatgccaggaggtatacatggccatgcgg

SEQ ID NO: 459205 - DNA, 120 bp, Artificial Sequence
  ENSG00000157211_13 (sequence is synthesized)
ggcaacttctccagcccacagtaccccagctcctaccccaacaacatccgctgccactggaccatccgcctgcccccgggctaccaggtcaaggtgttcttcctggacctggacctggag

SEQ ID NO: 459206 - DNA, 120 bp, Artificial Sequence
  ENSG00000157211_14 (sequence is synthesized)
gagcccaacagcctgaccaagacctgtgactttgaccatctggcggccttcgatggggccagcgaggaggcacccctgctggggaattggtgtggacaccacctgccaccacccgtgacc

SEQ ID NO: 459207 - DNA, 120 bp, Artificial Sequence
  ENSG00000157211_15 (sequence is synthesized)
tcaagccacaaccagcttctgcttctgctgcacacagaccgcagcaccacccgcaggggcttctctgtggcctacatcggaggtcagctgggctgtgggagtgggtccactgagggcgaa

SEQ ID NO: 459208 - DNA, 120 bp, Artificial Sequence
  ENSG00000157211_16 (sequence is synthesized)
ggggaggctttgcagcctcagtctttgcagtctccttcctccatcccaccagtttgtcctgccccccccatgaatggtcttctccagctccttctccattggctacacccttgcccactc

SEQ ID NO: 459209 - DNA, 120 bp, Artificial Sequence
  ENSG00000157211_17 (sequence is synthesized)
tcgggacccctaagactggacggtacggctcccgcttgtttccactattgcagagcctccttccccagcttctaacttcgtgagtcctcacccctccccatctggttccttccccctggg

SEQ ID NO: 459210 - DNA, 120 bp, Artificial Sequence
  ENSG00000157211_18 (sequence is synthesized)
cccctggcccctcttgtgttgttattggtcccctgtatccaggggaaatagacaaaatatggtaatattgtttatggcaaaaaaattggtataactgtggggatgtctaccagccctgct

SEQ ID NO: 459211 - DNA, 120 bp, Artificial Sequence
  ENSG00000157211_19 (sequence is synthesized)
tgtatcattcagaactactcattgaaaacatggtgcttgtttttcctcactcaacaggaagcctggagctaggcagctgctgtattggtccaggggctcaacactgttccaaatgttatc

SEQ ID NO: 459212 - DNA, 120 bp, Artificial Sequence
  ENSG00000157211_20 (sequence is synthesized)
tctgggactctctgagcctcacagctgcaagatggctgccatagctccaggcatcgcatccatgttcaagactggaggggacaggggaagtgccagctgcaaatggctctttatcaagaa

SEQ ID NO: 459213 - DNA, 120 bp, Artificial Sequence
  ENSG00000157211_21 (sequence is synthesized)
agcaaaagcatctctagaacctctcataagacttttacaaaatgtcccatcagtttgaactcagtcagatggccatgcctggctgcagaggaagctggggagctggtatttggctttctc

SEQ ID NO: 459214 - DNA, 120 bp, Artificial Sequence
  ENSG00000157211_22 (sequence is synthesized)
cgcacggacttccagatcctgatctccacgcaggcgctggccccgctggagcggaccaaggtctacctgggcagccggagctgtgccgcccaggaggtcggcggcaacctcaggatccag

SEQ ID NO: 459215 - DNA, 120 bp, Artificial Sequence
  ENSG00000157211_23 (sequence is synthesized)
gcccgctttgatacctgcggcactgagtctcagagaagaaacaacacttcagtgattgtcagcgtgctgtacatcgacttctcagccgcggggcgggaggacatccatgagtacgaggtc

SEQ ID NO: 459216 - DNA, 120 bp, Artificial Sequence
  ENSG00000157211_24 (sequence is synthesized)
cgctgtgagccacggcgcaaggaggcttctgtccacctgctgtctggctctcactggctggggccctatgctgccactgcggagcaccttcaggaagcaccacccatggatgaggcggag

SEQ ID NO: 459217 - DNA, 120 bp, Artificial Sequence
  ENSG00000157211_25 (sequence is synthesized)
gcactggagggcccagtgagcatggtggcccaggataccagtgacatcgtcttcctgggcctttgcatcctggctggaatcctcatggttattgccatcgtggtcttgatgctgctttga

SEQ ID NO: 459218 - DNA, 120 bp, Artificial Sequence
  ENSG00000157212_0 (sequence is synthesized)
cggggccgggcgccgccgcggagcctcccgggccgccgcgatcatgtcggaccaggcgcccaaagttcctgaggagatgttcagggaggtcaagtattacgcggtgggcgacatcgaccc

SEQ ID NO: 459219 - DNA, 120 bp, Artificial Sequence
  ENSG00000157212_1 (sequence is synthesized)
gcaggttattcagcttctcaaggctggaaaagcgaaggaagtttcctacaatgcactagcctcacacataatctcagaggatggggacaatccagaggtgggagaagctcgggaagtctt

SEQ ID NO: 459220 - DNA, 120 bp, Artificial Sequence
  ENSG00000157212_2 (sequence is synthesized)
tgacttacctgttgtaaagccttcttgggtgattctgtccgttcagtgtggaactcttctgccagtaaatggtttttctccagaatcatgtcagattttttttggaatcactgcctgcct

SEQ ID NO: 459221 - DNA, 120 bp, Artificial Sequence
  ENSG00000157212_3 (sequence is synthesized)
ttctcaggtgtcatctgaagacagaagtgccctgtgggctttggttacgttctatgggggagattgccagctaaccctcaataagaaatgcacgcatttgattgttccagagccaaaggg

SEQ ID NO: 459222 - DNA, 120 bp, Artificial Sequence
  ENSG00000157212_4 (sequence is synthesized)
ggagaaatacgaatgtgctttaaagcgagcaagtattaaaattgtgactcctgactgggttctggattgcgtatcagagaaaaccaaaaaggacgaagcattttatcatcctcgtctgat

SEQ ID NO: 459223 - DNA, 120 bp, Artificial Sequence
  ENSG00000157212_5 (sequence is synthesized)
tatttatgaagaggaagaagaggaagaggaagaggaggaggaagtagaaaatgaggaacaagattctcagaatgagggtagtacagatgagaagtcaagccctgccagctctcaagaagg

SEQ ID NO: 459224 - DNA, 120 bp, Artificial Sequence
  ENSG00000157212_6 (sequence is synthesized)
gtctccttcaggtgaccagcagttttcacctaaatccaacactgaaaaatctaaaggggaattaatgtttgatgattcttcagattcatcaccggaaaaacaggagagaaatttaaactg

SEQ ID NO: 459225 - DNA, 120 bp, Artificial Sequence
  ENSG00000157212_7 (sequence is synthesized)
gaccccggccgaagtcccacagttagctgcagcaaaacgcaggctgcctcagggaaaggagcctgggttgattaacttgtgtgccaatgtcccacccgtcccaggtaacattttgccccc

SEQ ID NO: 459226 - DNA, 120 bp, Artificial Sequence
  ENSG00000157212_8 (sequence is synthesized)
tgaggtccggggtaatttaatggctgctggacaaaacctccaaagttctgaaagatcagaaatgatagctacctggagtccagctgtacggacactgaggaatattactaataatgctga

SEQ ID NO: 459227 - DNA, 120 bp, Artificial Sequence
  ENSG00000157212_9 (sequence is synthesized)
cattcagcagatgaaccggccatcaaatgtagcacatatcttacagactctttcagcacctacgaaaaatttagaacagcaggtgaatcacagccagcagggacatacaaatgccaatgc

SEQ ID NO: 459228 - DNA, 120 bp, Artificial Sequence
  ENSG00000157212_10 (sequence is synthesized)
agtgctgtttagccaagtgaaagtgactccagagacacacatgctacagcagcagcagcaggcccagcagcagcagcagcagcacccggttttacaccttcagccccagcagataatgca

SEQ ID NO: 459229 - DNA, 120 bp, Artificial Sequence
  ENSG00000157212_11 (sequence is synthesized)
gctccagcagcagcagcagcagcagatctctcagcaaccttacccccagcagccgccgcatccattttcacagcaacagcagcagcagcagcaagcccatccgcatcagttttcacagca

SEQ ID NO: 459230 - DNA, 120 bp, Artificial Sequence
  ENSG00000157212_12 (sequence is synthesized)
acagctacagtttccacagcaacagttgcatcctccacagcagctgcatcgccctcagcagcagctccagccctttcagcagcagcatgccctgcagcagcagttccatcagctgcagca

SEQ ID NO: 459231 - DNA, 120 bp, Artificial Sequence
  ENSG00000157212_13 (sequence is synthesized)
gcaccagctccagcagcagcagcttgcccagctccagcagcagcacagcctgctccagcagcagcagcaacagcagattcagcagcagcagctccagcgcatgcaccagcagcagcagca

SEQ ID NO: 459232 - DNA, 120 bp, Artificial Sequence
  ENSG00000157212_14 (sequence is synthesized)
gcagcagatgcaaagtcagacagcgccacacttgagtcagacgtcacaggcgctgcagcatcaggttccacctcagcagcccccgcagcagcagcagcaacagcagccaccaccatcgcc

SEQ ID NO: 459233 - DNA, 120 bp, Artificial Sequence
  ENSG00000157212_15 (sequence is synthesized)
gcaactgctggccacctggaaaaggataatccaggcacatggcggcactgttgaccccaccttcacgagtcgatgcacgcaccttctctgtgagagtcaagtcagcagcgcgtatgcaca

SEQ ID NO: 459234 - DNA, 120 bp, Artificial Sequence
  ENSG00000157212_16 (sequence is synthesized)
ggcaataagagaaagaaagagatgtgttactgcacactggttaaacacagtcttaaagaagaagaaaatggtaccgccgcaccgagcccttcacttcccagtggccttcccaccaggagg

SEQ ID NO: 459235 - DNA, 120 bp, Artificial Sequence
  ENSG00000157212_17 (sequence is synthesized)
aaagccatgttcacagcatattatttctgtgactggatttgttgatagtgacagagatgacctaaaattaatggcttatttggcaggtgccaaatatacgggttatctatgccgcagcaa

SEQ ID NO: 459236 - DNA, 120 bp, Artificial Sequence
  ENSG00000157212_18 (sequence is synthesized)
cacagtcctcatctgtaaagaaccaactggtttaaagtatgaaaaagccaaagagtggaggataccctgtgtcaacgcccagtggcttggcgacattcttctgggaaactttgaggcact

SEQ ID NO: 459237 - DNA, 120 bp, Artificial Sequence
  ENSG00000157212_19 (sequence is synthesized)
gaggcagattcagtatagtcgctacacggcattcagtctgcaggatccatttgcccctacccagcatttagttttaaatcttttagatgcttggagagttcccttaaaagtgtctgcaga

SEQ ID NO: 459238 - DNA, 120 bp, Artificial Sequence
  ENSG00000157212_20 (sequence is synthesized)
gttgttgatgagtataagactacctcccaaactgaaacagaatgaagtagctaatgtccagccttcttccaaaagagccagaattgaagacgtaccacctcccactaaaaagctaactcc

SEQ ID NO: 459239 - DNA, 120 bp, Artificial Sequence
  ENSG00000157212_21 (sequence is synthesized)
agaattgaccccttttgtgcttttcactggattcgagcctgtccaggttcaacagtatattaagaagctctacattcttggtggagaggttgcggagtctgcacagaagtgcacacacct

SEQ ID NO: 459240 - DNA, 120 bp, Artificial Sequence
  ENSG00000157212_22 (sequence is synthesized)
cattgccagcaaagtgactcgcaccgtgaagttcctgacggcgatttctgtcgtgaagcacatagtgacgccagagtggctggaagaatgcttcaggtgtcagaagttcattgatgagca

SEQ ID NO: 459241 - DNA, 120 bp, Artificial Sequence
  ENSG00000157212_23 (sequence is synthesized)
gaactacattctccgagatgctgaggcagaagtacttttctctttcagcttggaagaatccttaaaacgggcacacgtttctccactctttaaggcaaaatatttttacatcacacctgg

SEQ ID NO: 459242 - DNA, 120 bp, Artificial Sequence
  ENSG00000157212_24 (sequence is synthesized)
aatctgcccaagtctttccactatgaaggcaatcgtagagtgtgcaggaggaaaggtgttatccaagcagccatctttccggaagctcatggagcacaagcagaactcgagtttgtcgga

SEQ ID NO: 459243 - DNA, 120 bp, Artificial Sequence
  ENSG00000157212_25 (sequence is synthesized)
aataattttaatatcctgtgaaaatgaccttcatttatgccgagaatattttgccagaggcatagatgttcacaatgcagagttcgttctgactggagtgctcactcaaacgctggacta

SEQ ID NO: 459244 - DNA, 120 bp, Artificial Sequence
  ENSG00000157212_26 (sequence is synthesized)
tgaatcatataagtttaactgatggcgtctaggctgccgtgcatgtcgactcctgcggtgcggggctggctgtctggctggcgaggagctgctgcgcttccttcacatgctcttgttttc

SEQ ID NO: 459245 - DNA, 120 bp, Artificial Sequence
  ENSG00000157212_27 (sequence is synthesized)
cagctgctttcctgggggatcagactgtgaagcaggaagacagatataataaatatactgcatctttttaagatgtgcaattttattctgaggaaacataaattatgttttgtattatat

SEQ ID NO: 459246 - DNA, 120 bp, Artificial Sequence
  ENSG00000157212_28 (sequence is synthesized)
gactttaagagcccacattaggttttatgattcatttgccaggtttttaaatgttttcacaaaactgttacgggacttcaactagaaataaaatggtgtaaataaagaccttgctatctc

SEQ ID NO: 459247 - DNA, 120 bp, Artificial Sequence
  ENSG00000157212_29 (sequence is synthesized)
taaattatggatgttaaagatttgaaatgttttgtactttgattatttttatttcttatactctgttttcttttatattgatatcttgcccacattttaaataaatgtacttttgaactt

SEQ ID NO: 459248 - DNA, 120 bp, Artificial Sequence
  ENSG00000157212_30 (sequence is synthesized)
agaatttgttgcttttgtagactcttgtttgcagatggatagtaacatttttaggttgtatttcaagtaaccagctacacggttttaattcgttactttaatcaagtgctagatgtcatg

SEQ ID NO: 459249 - DNA, 120 bp, Artificial Sequence
  ENSG00000157212_31 (sequence is synthesized)
ttttagacgagatggtcaagaaggacctcgggcaggaggtgacttagatcagggttgaatgacaaggagaggccatgtgaagaactgagggcacagagttcccaggcaaaaggaagaccc

SEQ ID NO: 459250 - DNA, 120 bp, Artificial Sequence
  ENSG00000157212_32 (sequence is synthesized)
aaatggcatgaatttgctgagttctaagaaaagaaagttaatgaaatttgaacttcataaggtgaatgagttctaggaaggatttaaaaggggccttgccatatagggccatagtgagga

SEQ ID NO: 459251 - DNA, 120 bp, Artificial Sequence
  ENSG00000157212_33 (sequence is synthesized)
tggatctttgaggggcaagagtgaagcagagaggccccttaagaggacatagagttggagtttgagacagaaaaaaatgaatgggaggatccagctttctggcttgagcgagtgaaggaa

SEQ ID NO: 459252 - DNA, 120 bp, Artificial Sequence
  ENSG00000157212_34 (sequence is synthesized)
gatgatgctgtttcagagataaggaacactggaaagctgcagatcttacagactctttcagcacctacgaaaaatttagaacagcaggtgaatcacagccagcagggacatacaaatgcc

SEQ ID NO: 459253 - DNA, 120 bp, Artificial Sequence
  ENSG00000157212_35 (sequence is synthesized)
gaaaatcataaggaagagaaaatatatgtactattcattaaggggaagtatatcatcataaaggtcttcatcctcgtcgttttcacgatgagtgggcctaggaggaggagggacaggagg

SEQ ID NO: 459254 - DNA, 120 bp, Artificial Sequence
  ENSG00000157212_36 (sequence is synthesized)
acgatgagtgggcctaggaggaggagggacaggaggggctggtcttactccctcaggggtggcagaggtggaagaaaatccagctatcagtggacccacacagttcacacctgtgttgct

SEQ ID NO: 459255 - DNA, 120 bp, Artificial Sequence
  ENSG00000157212_37 (sequence is synthesized)
taagtataggtgatactacattcattttctcttgctgtgtaacagattatctcaaaacccagtggcttaaaacaataaacattacctctcagtttggtcgtgggtcagaaatcctgcaac

SEQ ID NO: 459256 - DNA, 120 bp, Artificial Sequence
  ENSG00000157212_38 (sequence is synthesized)
agcttggcagggcggttgtggctcagctatctcctgaggttgcagtcaggatgccagcggaggctgcaggagccccttccaggatggttccgtcacatggctgtgggctggaggcctcag

SEQ ID NO: 459257 - DNA, 120 bp, Artificial Sequence
  ENSG00000157212_39 (sequence is synthesized)
ctcctcaccacagaggctctccagagggctggttgtgtgtcttcacagcatgacagctggctcccttccccagggggtgtgacccaagatagagggaaaacccgcagcgttatggtgtct

SEQ ID NO: 459258 - DNA, 120 bp, Artificial Sequence
  ENSG00000157212_40 (sequence is synthesized)
tttgtgactgagttatgggagactcccactgtcaattccaccatattaagtgactaagtctagaccatatttaaggctaggggagtaaagctccaactcttagagggaggagtatacagt

SEQ ID NO: 459259 - DNA, 120 bp, Artificial Sequence
  ENSG00000157212_41 (sequence is synthesized)
aatttgcagacatattatagaaccaccatatgtacatttttcatagagtttgggaatgaaatagtaaaaggtatatagaaaactaagaaaagggaaaattctggggggctgggatgagga

SEQ ID NO: 459260 - DNA, 120 bp, Artificial Sequence
  ENSG00000157212_42 (sequence is synthesized)
agtgattagcaccagggaaaaccaaagtttataccagaaaggaactctaatcttaggctgccatattaagccatgtggctgggctacattgtgttaagtcactgatgaatgatctaaaca

SEQ ID NO: 459261 - DNA, 120 bp, Artificial Sequence
  ENSG00000157212_43 (sequence is synthesized)
agagtctggatataaccaaatcaggaaggcttgaagaatgtgtgtgttattggggggaacggtgtccacagtaggaggtagatggttatgtaaaactagagaaaaggaactaatataaag

SEQ ID NO: 459262 - DNA, 120 bp, Artificial Sequence
  ENSG00000157212_44 (sequence is synthesized)
tgttagttggaatatattaataattgtcagtggaaacagcttaaagtgctaaatgtgcttcaggggagtgaaaagcagggatgggtgaggaacctgtggttttgtcctgtgcctcattaa

SEQ ID NO: 459263 - DNA, 120 bp, Artificial Sequence
  ENSG00000157212_45 (sequence is synthesized)
actatatttatgcttagccataggaaaaataaacattcacatcttaaaagtagtaagtgaaagaatcggttttcttagggggcaggtctttttaaagtttatatttcacctaataggccg

SEQ ID NO: 459264 - DNA, 120 bp, Artificial Sequence
  ENSG00000157212_46 (sequence is synthesized)
tcagattctcctttttccatgtacaatattttgagttctgaagaatgtccagggtcgtgcagctgtcacagcccggacacagagcaattccttcccccagaaaaccagatgtgttttgag

SEQ ID NO: 459265 - DNA, 120 bp, Artificial Sequence
  ENSG00000157212_47 (sequence is synthesized)
aagaaactgttgggatttactaatttcattctgatttgctttttatttccctttttaagggaggtggatctgcccaccatagacctttggcagtatctgaagatctttagtagtcgcggc

SEQ ID NO: 459266 - DNA, 120 bp, Artificial Sequence
  ENSG00000157212_48 (sequence is synthesized)
tagggggctgctgctggcatagggtgggtagaagttggggacactgccaaacatcctcctctgtacaggacagcccccacttcccagaactccctggtccagagtggcagttacattgag

SEQ ID NO: 459267 - DNA, 120 bp, Artificial Sequence
  ENSG00000157212_49 (sequence is synthesized)
cttgagaagccctggagtgcattccattgttcttctcttgtatcctgggaattcagattaaatttagagtattggagttcattttcattgtatggtgctgggtagaaaagtccgtaaata

SEQ ID NO: 459268 - DNA, 120 bp, Artificial Sequence
  ENSG00000157212_50 (sequence is synthesized)
gtccgtggtaggaatgcatcttagttgaatatcctcttcaggttaatcttcaaaatatttccttcttaaaagtttagctgtacagttgtgttgccttgggtgtgacatcagtggccccca

SEQ ID NO: 459269 - DNA, 120 bp, Artificial Sequence
  ENSG00000157212_51 (sequence is synthesized)
ccttggaggatggggatccccagtgatcagagttaggcctggaagggcggagactcatatttcgcagatgaacttggatggtgtagaaggaattgtagaaggctgagtgatcttggcctt

SEQ ID NO: 459270 - DNA, 120 bp, Artificial Sequence
  ENSG00000157212_52 (sequence is synthesized)
gatcttggccttcttgaggttcgtccttgtaacaactttttggaccctttttgccctgtaactttagggtaaagagacttcaaggccgggtttacccctgtaatcccagcactttgggag

SEQ ID NO: 459271 - DNA, 120 bp, Artificial Sequence
  ENSG00000157212_53 (sequence is synthesized)
agccttctatctttgaatttacagagtaaaacagttgctgaacacggagcgatgaagatgagtgcctgtaacagtgttagctttttccagtattgatgattcccccgcccctcttttttt

SEQ ID NO: 459272 - DNA, 120 bp, Artificial Sequence
  ENSG00000157212_54 (sequence is synthesized)
tgtttgtttttttgtttttgttttttgctatccaccatttttctcttccccctccttcctagccttcgtgtttcattttaggactttggctcttataggggacttgaaccaaatgttact

SEQ ID NO: 459273 - DNA, 120 bp, Artificial Sequence
  ENSG00000157212_55 (sequence is synthesized)
taaaacctggaacaagttgaactggaaccatatttactcgactttgaatcaaatctaagtgcttaaaaatgtccttggcaaaccactttcatctgaaacagtatattttctgaaaagttt

SEQ ID NO: 459274 - DNA, 120 bp, Artificial Sequence
  ENSG00000157212_56 (sequence is synthesized)
tgagcctggacatctgattctctgactcttatgactgtggattataagttcacatgttgaccatctaatatgaggcaggcatggactaggtgccaggtataatacagaggtgaagaggac

SEQ ID NO: 459275 - DNA, 120 bp, Artificial Sequence
  ENSG00000157212_57 (sequence is synthesized)
atggtacctgccctttagcgcccctcattggtgggggagggagcacacctggacatatcacagtacaaggtgtagcagatttctccactggggtgcaaagtagacaccactgaaatgtca

SEQ ID NO: 459276 - DNA, 120 bp, Artificial Sequence
  ENSG00000157212_58 (sequence is synthesized)
ctcagtagatgtcatttcagttgggttttgagataagcagaagttaagaacatgaaggaatattttcatgtggagcgtatgtgctgaggaatgaaggcattcatgcgtttgggatacatc

SEQ ID NO: 459277 - DNA, 120 bp, Artificial Sequence
  ENSG00000157212_59 (sequence is synthesized)
aggatgatcactatatctggaacagagtgatatgagataaatctattaagatactcagtagtgtggagattgaagagaagctattggttttggcatcctcaaagttcgtgaaaaccgagt

SEQ ID NO: 459278 - DNA, 120 bp, Artificial Sequence
  ENSG00000157212_60 (sequence is synthesized)
aaagtgtttttggtagagtgttggtggaaggggctggattgcagggagttgaagagtgaatggaaactgagaacagaaaggttagactcttcaggaagtttgtcctgagaaggaaataga

SEQ ID NO: 459279 - DNA, 120 bp, Artificial Sequence
  ENSG00000157212_61 (sequence is synthesized)
gaaggtgcctgaggaagagagggctggggagggatctgtgttgcatcacaagcgcgtggaaggatgtgggtgactttactgtttacaggtggagggaacatagctatggacagggaaact

SEQ ID NO: 459280 - DNA, 120 bp, Artificial Sequence
  ENSG00000157212_62 (sequence is synthesized)
catgaagaagggagtaggatcagaaacagactggaggataggaaaaggaggggtgccttttctgaagaccagtcgaatggatgcgtgaagctaaaaatgcttagaggtcaagggaaggaa

SEQ ID NO: 459281 - DNA, 120 bp, Artificial Sequence
  ENSG00000157212_63 (sequence is synthesized)
gaaaggtaaagtggcccatggccagtgaccgctgttttttcacttactaaatattgagcctctgctctagttcatatctattagtggtcggtaaagtattctgaaaaggttgtctagctt

SEQ ID NO: 459282 - DNA, 120 bp, Artificial Sequence
  ENSG00000157212_64 (sequence is synthesized)
cctaaaatacgattttgatattgctgttgtatttaaacattttcaaaagtgacacaaatggaaactggaatggcatactagttcttcctgctttttttcccctgactatttttgttatag

SEQ ID NO: 459283 - DNA, 120 bp, Artificial Sequence
  ENSG00000157212_65 (sequence is synthesized)
actgaaataatcctccatttcactttttggaatgtggatataaatatttttaaattcatttggtgacaaggcaaaaataagtaattcatatatgtaaaactattatgataggagtgaagt

SEQ ID NO: 459284 - DNA, 120 bp, Artificial Sequence
  ENSG00000157212_66 (sequence is synthesized)
ttttgttataataagcagatagctaaaagcttctctattttttctacaaatattcttaggttaattttattaagggagaaacagaattgttgcagtatattactaaagtgaaaatatagc

SEQ ID NO: 459285 - DNA, 120 bp, Artificial Sequence
  ENSG00000157212_67 (sequence is synthesized)
aggaaggatgactgtgtctgaagatgcttctttcttatgtagatgtaactgtgttcacttagctgcattcactgagctgcacctgcacgtgttctgaatgtgtgacgggcattttgatta

SEQ ID NO: 459286 - DNA, 120 bp, Artificial Sequence
  ENSG00000157212_68 (sequence is synthesized)
acattctgtgtgacctgaggcacagcacttttctgggcatcagttttctcagctgttagatgaagatggtggactttttatttttttcagcttggaaattccagggggcactaattatat

SEQ ID NO: 459287 - DNA, 120 bp, Artificial Sequence
  ENSG00000157212_69 (sequence is synthesized)
gtgtataattggggcaatggaaataagttcagggttttggtgtcctgggagagggactattaatttgtatgcatctcagtcatttctctttctccaaaggtaactgttagaaaatcctgg

SEQ ID NO: 459288 - DNA, 120 bp, Artificial Sequence
  ENSG00000157212_70 (sequence is synthesized)
aatctctagaacctcaaattcttccagcccaattgtgaaactggagttaatttaattatgtattatcatgcatggtggcctttaaagaaaagaaatactttttcttgcattccccaaaac

SEQ ID NO: 459289 - DNA, 120 bp, Artificial Sequence
  ENSG00000157212_71 (sequence is synthesized)
gtgttgatacaagctggagctctttgttggagtcttccagagctctcccagggagaggtagggaagggagcttgtccagcagaagttgggaagcacagagatcatctgccttcttctgac

SEQ ID NO: 459290 - DNA, 120 bp, Artificial Sequence
  ENSG00000157214_0 (sequence is synthesized)
gccccctccgagctccccgactcctccccgcgctccacggctcttcccgactccagtcagcgttcctcgggccctcggcgccacgagctgtccgggcacgcagcccctagcggcgcgtcg

SEQ ID NO: 459291 - DNA, 120 bp, Artificial Sequence
  ENSG00000157214_1 (sequence is synthesized)
ctgccaagccggcctccgcgcgcctccctccttccttctcccctggctgttcgcgatccagcttgggtaggcggggaagcagctggagtgcgaccgccgcggcagccaccctgcaaccgc

SEQ ID NO: 459292 - DNA, 120 bp, Artificial Sequence
  ENSG00000157214_2 (sequence is synthesized)
cagtccgtaggccctggcccccgggtgggcccttggggagtcggcgccgctcccggggagctgcaaggctcgcccctgcccggcgtggagggcgcggggggcgcggaggatattcttggt

SEQ ID NO: 459293 - DNA, 120 bp, Artificial Sequence
  ENSG00000157214_3 (sequence is synthesized)
gatattcttggtgatcttggaagtgtccgtatcatggaatcaatctctatgatgggaagccctaagagccttagtgaaacttttttacctaatggcataaatggtatcaaagatgcaagg

SEQ ID NO: 459294 - DNA, 120 bp, Artificial Sequence
  ENSG00000157214_4 (sequence is synthesized)
aaggtcactgtaggtgtgattggaagtggagattttgccaaatccttgaccattcgacttattagatgcggctatcatgtggtcataggaagtagaaatcctaagtttgcttctgaattt

SEQ ID NO: 459295 - DNA, 120 bp, Artificial Sequence
  ENSG00000157214_5 (sequence is synthesized)
tttcctcatgtggtagatgtcactcatcatgaagatgctctcacaaaaacaaatataatatttgttgctatacacagagaacattatacctccctgtgggacctgagacatctgcttgtg

SEQ ID NO: 459296 - DNA, 120 bp, Artificial Sequence
  ENSG00000157214_6 (sequence is synthesized)
ggtaaaatcctgattgatgtgagcaataacatgaggataaaccagtacccagaatccaatgctgaatatttggcttcattattcccagattctttgattgtcaaaggatttaatgttgtc

SEQ ID NO: 459297 - DNA, 120 bp, Artificial Sequence
  ENSG00000157214_7 (sequence is synthesized)
tcagcttgggcacttcagttaggacctaaggatgccagccggcaggtttatatatgcagcaacaatattcaagcgcgacaacaggttattgaacttgcccgccagttgaatttcattccc

SEQ ID NO: 459298 - DNA, 120 bp, Artificial Sequence
  ENSG00000157214_8 (sequence is synthesized)
attgacttgggatccttatcatcagccagagagattgaaaatttacccctacgactctttactctctggagagggccagtggtggtagctataagcttggccacattttttttcctttat

SEQ ID NO: 459299 - DNA, 120 bp, Artificial Sequence
  ENSG00000157214_9 (sequence is synthesized)
tcctttgtcagagatgtgattcatccatatgctagaaaccaacagagtgacttttacaaaattcctatagagattgtgaataaaaccttacctatagttgccattactttgctctcccta

SEQ ID NO: 459300 - DNA, 120 bp, Artificial Sequence
  ENSG00000157214_10 (sequence is synthesized)
gtatacctcgcaggtcttctggcagctgcttatcaactttattacggcaccaagtataggagatttccaccttggttggaaacctggttacagtgtagaaaacagcttggattactaagt

SEQ ID NO: 459301 - DNA, 120 bp, Artificial Sequence
  ENSG00000157214_11 (sequence is synthesized)
tttttcttcgctatggtccatgttgcctacagcctctgcttaccgatgagaaggtcagagagatatttgtttctcaacatggcttatcagcaggttcatgcaaatattgaaaactcttgg

SEQ ID NO: 459302 - DNA, 120 bp, Artificial Sequence
  ENSG00000157214_12 (sequence is synthesized)
aatgaggaagaagtttggagaattgaaatgtatatctcctttggcataatgagccttggcttactttccctcctggcagtcacttctatcccttcagtgagcaatgctttaaactggaga

SEQ ID NO: 459303 - DNA, 120 bp, Artificial Sequence
  ENSG00000157214_13 (sequence is synthesized)
gaattcagttttattcagtctacacttggatatgtcgctctgctcataagtactttccatgttttaatttatggatggaaacgagcttttgaggaagagtactacagattttatacacca

SEQ ID NO: 459304 - DNA, 120 bp, Artificial Sequence
  ENSG00000157214_14 (sequence is synthesized)
ccaaactttgttcttgctcttgttttgccctcaattgtaattctgggtaagattattttattccttccatgtataagccgaaagctaaaacgaattaaaaaaggctgggaaaagagccaa

SEQ ID NO: 459305 - DNA, 120 bp, Artificial Sequence
  ENSG00000157214_15 (sequence is synthesized)
tttctggaagaaggtatgggaggaacaattcctcatgtctccccggagagggtcacagtaatgtgatgacaaatggtgttcacagctgccatataaagttctactcatgccattattttt

SEQ ID NO: 459306 - DNA, 120 bp, Artificial Sequence
  ENSG00000157214_16 (sequence is synthesized)
atgacttctacgttcagttacaagtatgctgtcaaattatcgtgggttgaaacttgttaaatgagatttcaactgacttagtgatagagttttcttcaagttaattttcacaaatgtcat

SEQ ID NO: 459307 - DNA, 120 bp, Artificial Sequence
  ENSG00000157214_17 (sequence is synthesized)
gtttgccaatatgaatttttctagtcaacatattattgtaatttaggtatgttttgttttgttttgcacaactgtaaccctgttgttactttatatttcataatcaggcaaaaatactta

SEQ ID NO: 459308 - DNA, 120 bp, Artificial Sequence
  ENSG00000157214_18 (sequence is synthesized)
tagatataatgttaaaaacaatttgcaaaccagcagaattttaagcttttaaaataattcaatggatatacatttttttctgaagattaagattttaattattcaacttaaaaagtagaa

SEQ ID NO: 459309 - DNA, 120 bp, Artificial Sequence
  ENSG00000157214_19 (sequence is synthesized)
taaaaagtagaaatgcattattatacatttttttaagaaaggacacgttatgttagcatctaggtaaggctgcatgatagcattcctatatttctctcataaaataggatttgaaggatg

SEQ ID NO: 459310 - DNA, 120 bp, Artificial Sequence
  ENSG00000157214_20 (sequence is synthesized)
taattgtatgaagcaatgtgattatatgaagagacacaaattaaaaagacaaattaaacctgaaattatatttaaaatatatttgagacatgaaatacatactgataatacatacctcat

SEQ ID NO: 459311 - DNA, 120 bp, Artificial Sequence
  ENSG00000157214_21 (sequence is synthesized)
tcatgaaagattttattctttattgtgttacagagcagtttcattttcatattaatatactgatcaggaagaggattcagtaacatttggcttccaaaactgctatctctaatacggtac

SEQ ID NO: 459312 - DNA, 120 bp, Artificial Sequence
  ENSG00000157214_22 (sequence is synthesized)
caatcctaggaactgtatactagttcctacttagaacaaaagtatcaagtttgcacacaagtaatctgccagctgacctttgtcgcaccttaaccagtcaccacttgctatggtatagga

SEQ ID NO: 459313 - DNA, 120 bp, Artificial Sequence
  ENSG00000157214_23 (sequence is synthesized)
ttatactgatgttctttgagggattctgatgtgctaggcatggttctaagtactttacttgtattatcccatttaatacttagaacaaccccgtgagataagtagttattatcctcattt

SEQ ID NO: 459314 - DNA, 120 bp, Artificial Sequence
  ENSG00000157214_24 (sequence is synthesized)
tacacatgagggaccgaaggatagaaaagttatttttcaaaggtcttgcagttaataaatggcagagtgagcattcaagtccaggtagtcatattccagaggccacggttttaaccacta

SEQ ID NO: 459315 - DNA, 120 bp, Artificial Sequence
  ENSG00000157214_25 (sequence is synthesized)
ggctctagagctcccgccgcgcccctatgcattatgttcacaatgccaatctagatgcttcctcttttgtataaagtcactgacattctttagagtgggttgggtgcatccaaaaatgta

SEQ ID NO: 459316 - DNA, 120 bp, Artificial Sequence
  ENSG00000157214_26 (sequence is synthesized)
taaaaatattattataataaacttattactgcttgtagggtaattcacagttacttaccctattcttgcttggaacatgagcctggagacccatggcagtccatatgcctccctatgcag

SEQ ID NO: 459317 - DNA, 120 bp, Artificial Sequence
  ENSG00000157214_27 (sequence is synthesized)
tgaagggccctagcagtgttaacaaattgctgagatcccacggagtctttcaaaaatctctgtagagttagtcttctccttttctcttcctgagaagttctcctgcctgcataaccattc

SEQ ID NO: 459318 - DNA, 120 bp, Artificial Sequence
  ENSG00000157214_28 (sequence is synthesized)
agggtaagtggctaattataaatctactctagagacatataatcatacagattattcataaaatttttcagtgctgtccttccacatttaattgcattttgctcaaactgtagaatgccc

SEQ ID NO: 459319 - DNA, 120 bp, Artificial Sequence
  ENSG00000157214_29 (sequence is synthesized)
tacattccccccaccccaatttgctatttccttattaaaatagaaaattataggcaagatacaattatatgcgttcctcttcctgaaattataacatttctaaacttacccacgtaggta

SEQ ID NO: 459320 - DNA, 120 bp, Artificial Sequence
  ENSG00000157214_30 (sequence is synthesized)
ctactgaatccaactgccaacaataaaaagacttttatttagtagaggctacctttcccaccagtgactctttttctacaactgccttgtcagtttggtaattcacttatgattttctaa

SEQ ID NO: 459321 - DNA, 74 bp, Artificial Sequence
  ENSG00000157214_31 (sequence is synthesized)
actgccttgtcagtttggtaattcacttatgattttctaatgttctcttggtgaattttattatcttgtaccct

SEQ ID NO: 459322 - DNA, 120 bp, Artificial Sequence
  ENSG00000157214_32 (sequence is synthesized)
ctgagccctctattttctttattttaataatatttctccccacttgagaatcacttgttagttcttggtaggaattcagttgggcaatgataacttttatgggcaaaaacattctattat

SEQ ID NO: 459323 - DNA, 120 bp, Artificial Sequence
  ENSG00000157214_33 (sequence is synthesized)
agtgaactaatgaaaataacagcgtattttcaatattttcttattccttaaattccactcttttaacactatgcttaaccacttaatgtgatgaaatattcctaaaagttaaatgactat

SEQ ID NO: 459324 - DNA, 120 bp, Artificial Sequence
  ENSG00000157214_34 (sequence is synthesized)
taaagcatatattgttgcatgtatatattaagtagccgatactctaaataaaaataccactgttacagataaatggggcctttaaaaatatgaaaaacaaacttgtgaaaatgtataaaa

SEQ ID NO: 459325 - DNA, 120 bp, Artificial Sequence
  ENSG00000157214_35 (sequence is synthesized)
gatgcatctgttgtttcaaatggcactatcttcttttcagtactacaaaaacagaataattttgaagttttagaataaatgtaatatatttactataattctaaatgtttaaatgctttt

SEQ ID NO: 459326 - DNA, 120 bp, Artificial Sequence
  ENSG00000157214_36 (sequence is synthesized)
ctaaaaatgcaaaactatgatgtttagttgctttattttacctctatgtgattatttttcttaattgttattttttataatcattatttttctgaaccattcttctggcctcagaagtag

SEQ ID NO: 459327 - DNA, 120 bp, Artificial Sequence
  ENSG00000157214_37 (sequence is synthesized)
gactgaattctactattgctaggtgtgagaaagtggtggtgagaaccttagagcagtggagatttgctacctggtctgtgttttgagaagtgccccttagaaagttaaaagaatgtagaa

SEQ ID NO: 459328 - DNA, 120 bp, Artificial Sequence
  ENSG00000157214_38 (sequence is synthesized)
aagatactcagtcttaatcctatgcaaaaaaaaaaatcaagtaattgttttcctatgaggaaaataaccatgagctgtatcatgctacttagcttttatgtaaatatttcttatgtctcc

SEQ ID NO: 459329 - DNA, 120 bp, Artificial Sequence
  ENSG00000157214_39 (sequence is synthesized)
tctattaagagtatttaaaatcatatttaaatatgaatctattcatgctaacattatttttcaaaacatacatggaaatttagcccagattgtctacatataaggtttttatttgaattg

SEQ ID NO: 459330 - DNA, 120 bp, Artificial Sequence
  ENSG00000157214_40 (sequence is synthesized)
taaaatatttaaaagtatgaataaaatatatttataggtatttatcagagatgattattttgtgctacatacaggttggctaatgagctctagtgttaaactacctgattaatttcttat

SEQ ID NO: 459331 - DNA, 120 bp, Artificial Sequence
  ENSG00000157214_41 (sequence is synthesized)
aaagcagcataaccttggcttgattaaggaattctactttcaaaaattaatctgataatagtaacaaggtatattatactttcattacaatcaaattatagaaattacttgtgtaaaagg

SEQ ID NO: 459332 - DNA, 120 bp, Artificial Sequence
  ENSG00000157214_42 (sequence is synthesized)
gcttcaagaatatatccaatttttaaatattttaatatatctcctatctgataacttaattcttctaaattaccacttgccattaagctatttcataataaattctgtacagtttccccc

SEQ ID NO: 459333 - DNA, 120 bp, Artificial Sequence
  ENSG00000157214_43 (sequence is synthesized)
tttccccccaaaaaagagatttatttatgaaatatttaaagtttctaatgtggtattttaaataaagtatcataaatgtaataagtaaatatttatttaggaatactgtgaacactgaac

SEQ ID NO: 459334 - DNA, 120 bp, Artificial Sequence
  ENSG00000157214_44 (sequence is synthesized)
cctgtgtcagtctatgaaatccctgttttgaaatacgtaaacagcctaaaatgtgttgaaattattttgtaaatccatgacttaaaacaagatacatacatagtataacacacctcacag

SEQ ID NO: 459335 - DNA, 120 bp, Artificial Sequence
  ENSG00000157214_45 (sequence is synthesized)
tgttaagatttatattgtgaaatgagacaccctaccttcaattgttcatcagtgggtaaaacaaattctgatgtacattcaggacaaatgattagccctaaatgaaactgtaataatttc

SEQ ID NO: 459336 - DNA, 120 bp, Artificial Sequence
  ENSG00000157214_46 (sequence is synthesized)
agtggaaactcaatctgtttttacctttaaacagtgaattttacatgaatgaatgggttcttcactttttttttagtatgagaaaattatacagtgcttaattttcagagattctttcca

SEQ ID NO: 459337 - DNA, 120 bp, Artificial Sequence
  ENSG00000157214_47 (sequence is synthesized)
tatgttactaaaaaatgttttgttcagcctaacatactgagttttttttaactttctaaattattgaatttccatcatgcattcatccaaaattaaggcagactgtttggattcttccag

SEQ ID NO: 459338 - DNA, 120 bp, Artificial Sequence
  ENSG00000157214_48 (sequence is synthesized)
tggccagatgagctaaattaaatcacaaaagcagatgcttttgtatgatctccaaattgccaactttaaggaaatattctcttgaaattgtctttaaagatcttttgcagctttgcagat

SEQ ID NO: 459339 - DNA, 120 bp, Artificial Sequence
  ENSG00000157214_49 (sequence is synthesized)
acccagactgagctggaactggaatttgtcttcctattgactctacttctttaaaagcggctgcccattacattcctcagctgtccttgcagttaggtgtacatgtgactgagtgttggc

SEQ ID NO: 459340 - DNA, 120 bp, Artificial Sequence
  ENSG00000157214_50 (sequence is synthesized)
cagtgagatgaagtctcctcaaaggaaggcagcatgtgtcctttttcatcccttcatcttgctgctgggattgtggatataacaggagccctggcagctgtctccagaggatcaaagcca

SEQ ID NO: 459341 - DNA, 120 bp, Artificial Sequence
  ENSG00000157214_51 (sequence is synthesized)
cacccaaagagtaaggcagattagagaccagaaagaccttgactacttccctacttccactgctttttcctgcatttaagccattgtaaatctgggtgtgttacatgaagtgaaaattaa

SEQ ID NO: 459342 - DNA, 120 bp, Artificial Sequence
  ENSG00000157214_52 (sequence is synthesized)
ttctttctgcccttcagttctttatcctgataccatttaacactgtctgaattaactagactgcaataattctttcttttgaaagcttttaaaggataatgtgcaattcacattaaaatt

SEQ ID NO: 459343 - DNA, 120 bp, Artificial Sequence
  ENSG00000157214_53 (sequence is synthesized)
gattttccattgtcaattagttatactcattttcctgccttgatctttcattagatattttgtatctgcttggaatatattatcttctttttaactgtgtaattggtaattactaaaact

SEQ ID NO: 459344 - DNA, 120 bp, Artificial Sequence
  ENSG00000157214_54 (sequence is synthesized)
ctgtaatctccaaaatattgctatcaaattacacaccatgttttctatcattctcatagatctgccttataaacatttaaataaaaagtactatttaatgatttaacttctgttttgaaa

SEQ ID NO: 459345 - DNA, 120 bp, Artificial Sequence
  ENSG00000157214_55 (sequence is synthesized)
gatccagcttgggtaggcggggaagcagctggagtgcgaccgccgcggcagccaccctgcaaccgccagtcggagagctaagggcaagtcctgaggttgggcccaggagaaagaaggcaa

SEQ ID NO: 459346 - DNA, 120 bp, Artificial Sequence
  ENSG00000157214_56 (sequence is synthesized)
caagcagagctctccttcctgaacaaaatgagtccacctggggtttattttctttaaagatttgctcaatagagattttattatctttggtttaaaataaaagttaaaatgatatattta

SEQ ID NO: 459347 - DNA, 120 bp, Artificial Sequence
  ENSG00000157214_57 (sequence is synthesized)
ctattttaatgagttacatttaatgttttatggcaacaaaaaagaaatatctgattctgatgtgatttttcagatcatagactacatgtctaaagaagcctataagaaattatggcctat

SEQ ID NO: 459348 - DNA, 120 bp, Artificial Sequence
  ENSG00000157214_58 (sequence is synthesized)
ttctgctatagagatggaacagtatatggaaagctcccaagaaagtgaagagaggaaattggaaaattgtgagtggaccttctgatactgctcctccttgcgtggaaaaggggaaagaac

SEQ ID NO: 459349 - DNA, 120 bp, Artificial Sequence
  ENSG00000157214_59 (sequence is synthesized)
gccctttcagagttgctgtcatccaataataaatgccctatttatgtgtgaaacaaattaggttctatttttcaaaagtaacatagcacaacaggtgccattcagcttcaggaatgttca

SEQ ID NO: 459350 - DNA, 120 bp, Artificial Sequence
  ENSG00000157214_60 (sequence is synthesized)
ggaaatccttctaaactgaaaaccttaagaggctgtccagctgaatgtaactgaattccctatcaaaataatacattctcaagtattaaatgtgtacagcaagtcaaatgcccattcaag

SEQ ID NO: 459351 - DNA, 120 bp, Artificial Sequence
  ENSG00000157214_61 (sequence is synthesized)
aaaacgatgtcattgacacagacttttagattgagctcccgaagttgaagtgttaaatatagggtggtgatattaccattattacacagcttcaagacttatttagtgttggaaactacc

SEQ ID NO: 459352 - DNA, 120 bp, Artificial Sequence
  ENSG00000157214_62 (sequence is synthesized)
accagagtcaagtataacctatttgtttgctgtttaacaaaggaaattgagactcagagaatcaaagtgattgcagaagcttaggcctgctctttcacccctacactatgaagacaaaac

SEQ ID NO: 459353 - DNA, 84 bp, Artificial Sequence
  ENSG00000157214_63 (sequence is synthesized)
ttaggcctgctctttcacccctacactatgaagacaaaactttctataaatgacataggaggctgagtctcactctgttgccca

SEQ ID NO: 459354 - DNA, 81 bp, Artificial Sequence
  ENSG00000157214_64 (sequence is synthesized)
tgcctaatttttgtgcctttttagtaaagatggggtttaatcatgttggccagtctgatcttgaactcctgacctcaagtg

SEQ ID NO: 459355 - DNA, 120 bp, Artificial Sequence
  ENSG00000157214_65 (sequence is synthesized)
aaagaggtccccaggtgatcatatttgcattaaagtttgacaagtgcctttctagtgagtcattcccttggaaacagtggtctgctcaggtcagcaggatcatgatgcctggagaactgg

SEQ ID NO: 459356 - DNA, 120 bp, Artificial Sequence
  ENSG00000157214_66 (sequence is synthesized)
ggaggggatccccttgtagaacagaaagaagagatacagtcatggaaatattccgaattttgaatattatgaaacaacaggaacaaagtatgttgtgcaaggagtgacgcattttaagga

SEQ ID NO: 459357 - DNA, 80 bp, Artificial Sequence
  ENSG00000157216_0 (sequence is synthesized)
agccacgttcggttgagctccaagtagaccagcggcggcggcggcggcggcggcggcagcggtgctggaggcgcagaggg

SEQ ID NO: 459358 - DNA, 120 bp, Artificial Sequence
  ENSG00000157216_1 (sequence is synthesized)
cggcggcacccccaggccgagccggcgcggaaggagttccagggcgatggggccgcggccggggctgacgctttgacagctggaaagagcgcggagccagcgcctgggggggagggaggg

SEQ ID NO: 459359 - DNA, 120 bp, Artificial Sequence
  ENSG00000157216_2 (sequence is synthesized)
ccagcgcctgggggggagggaggggagcgcggcgaggagagcgccagcgagcgagagagcgagcgagcgccggggagggggccgggagcgaggggcagctcgggagagccggagcggtag

SEQ ID NO: 459360 - DNA, 120 bp, Artificial Sequence
  ENSG00000157216_3 (sequence is synthesized)
cggcggcggcggcggcggcggcgaggctcggcgccctcttccctgcaaaccatgtttgccaaaggcaaaggctcggcggtgccctcggatgggcaggctcgggaaaagttagctttatac

SEQ ID NO: 459361 - DNA, 120 bp, Artificial Sequence
  ENSG00000157216_4 (sequence is synthesized)
gtctacgaatatttactgcacgtaggagcacagaaatctgcacagaccttcttatcggagattcgatgggaaaaaaacatcacgttgggagaaccgcctgggtttttgcactcgtggtgg

SEQ ID NO: 459362 - DNA, 120 bp, Artificial Sequence
  ENSG00000157216_5 (sequence is synthesized)
tgtgtattttgggacctttactgtgcagctcctgaaaggagagacacttgtgaacattcaagtgaagcaaaagcctttcatgattatagtgcagcagctgccccgagccccgtgcttggc

SEQ ID NO: 459363 - DNA, 120 bp, Artificial Sequence
  ENSG00000157216_6 (sequence is synthesized)
aacattccccccaacgatgggatgccgggaggccccatcccgccaggtttctttcagggtcctccggggtcacagccctcgccgcacgcacagcctccacctcacaatcctagcagcatg

SEQ ID NO: 459364 - DNA, 120 bp, Artificial Sequence
  ENSG00000157216_7 (sequence is synthesized)
atgggaccccacagtcagccttttatgtcaccgcgatacgcaggcggccccaggcccccgatcagaatgggaaaccagcctccgggaggagttcctgggacacagccattgctgcccaat

SEQ ID NO: 459365 - DNA, 120 bp, Artificial Sequence
  ENSG00000157216_8 (sequence is synthesized)
tgggaggatcaatgcagagaatgaaccctccccgaggcatggggcccatgggtcccggcccacagaattacggcagcggcatgagaccaccacccaactccctcggccccgccatgcccg

SEQ ID NO: 459366 - DNA, 120 bp, Artificial Sequence
  ENSG00000157216_9 (sequence is synthesized)
ggattaacatgggcccgggagctggcagaccctggcccaatcctaacagtgctaactcaattccatactcctcctcatcacctggtacctatgtgggaccccctggtggtggcggtcctc

SEQ ID NO: 459367 - DNA, 120 bp, Artificial Sequence
  ENSG00000157216_10 (sequence is synthesized)
caggaacacccattatgcccagtcccgcagattcaacaaattccagtgacaacatctacacaatgattaatccagtgccgcctggaggcagccggtccaacttcccgatgggtcccggct

SEQ ID NO: 459368 - DNA, 120 bp, Artificial Sequence
  ENSG00000157216_11 (sequence is synthesized)
cggacggtccgatgggcggcatgggtggcatggagccacaccacatgaatggatcattagggtcaggcgacatagacggacttccaaaaaattctcctaacaacataagtggcattagca

SEQ ID NO: 459369 - DNA, 120 bp, Artificial Sequence
  ENSG00000157216_12 (sequence is synthesized)
atcctccaggcacccctcgagatgacggcgagctaggagggaacttcctccactcctttcagaacgacaattattctccaagcatgacgatgagtgtgtgatccccccttctccgagacg

SEQ ID NO: 459370 - DNA, 120 bp, Artificial Sequence
  ENSG00000157216_13 (sequence is synthesized)
ctgagagagcaggcattgcaggcgggaagatgccagaaattatgcaagaagtgaggtgtcattatccaggagctggtggggagggcatctccctgctcccctcaaccccctcccacccca

SEQ ID NO: 459371 - DNA, 120 bp, Artificial Sequence
  ENSG00000157216_14 (sequence is synthesized)
tccacgccccctacctttcccaattttagtttcatgcaataaaaaggccaaactttttattccataaaacaagaaggacaaaactctcaaaaatgtatttcaagtcagtgaccagaaaaa

SEQ ID NO: 459372 - DNA, 120 bp, Artificial Sequence
  ENSG00000157216_15 (sequence is synthesized)
tcccaccccttgccctttccccaaaggaccttttctgtacatgacacttttttgttgttttttgtttggggttttaccattgttgggatttttttatttgttttcaggggggttttttgg

SEQ ID NO: 459373 - DNA, 120 bp, Artificial Sequence
  ENSG00000157216_16 (sequence is synthesized)
tttgttttcaggggggttttttgggggaaaatttttttaaatggaagcttctagcaagccccccaccccaatcaacctctatgctttcttcttaaaaaaaaaaaaaaaggaaaaaggaaa

SEQ ID NO: 459374 - DNA, 120 bp, Artificial Sequence
  ENSG00000157216_17 (sequence is synthesized)
tttacatatcagacaccataacaaatcataattaacttcatcagctgaggggaaagcaagtttaattgatttcagccatttgttaccaaagatgaataaaataaaccgtcagaaaagtga

SEQ ID NO: 459375 - DNA, 120 bp, Artificial Sequence
  ENSG00000157216_18 (sequence is synthesized)
aattagagacccagctttttgagcaaaagaagggatccctggatacatcacagatgaggaaacaaaagcctccgggaggagttcctgggacacagccattgctgcccaattctatggatc

SEQ ID NO: 459376 - DNA, 120 bp, Artificial Sequence
  ENSG00000157216_19 (sequence is synthesized)
aagaacatgacagacatcctctgcccttcagcctgtgccccagaatgagagacccatgggacagactcaagctgtaccctgaagcagagctgcccagttgactgcagacctaggaggctg

SEQ ID NO: 459377 - DNA, 120 bp, Artificial Sequence
  ENSG00000157216_20 (sequence is synthesized)
tggagccctgaagctgtgtgaggagagggtttcaggagcatgggaacctctgatgctcagacaggggtgtgctgcgccattctgcaccatgtccctgggcgtggtggcgtgcacctgtaa

SEQ ID NO: 459378 - DNA, 120 bp, Artificial Sequence
  ENSG00000157216_21 (sequence is synthesized)
tcttcattcattcagccacgtctgtagatccagaagagctggtgaatcccatgatgcttgggcctagagaaagtgcagcagctgccccgagccccgtgcttggcaacattccccccaacg

SEQ ID NO: 459379 - DNA, 120 bp, Artificial Sequence
  ENSG00000157216_22 (sequence is synthesized)
caatgcagagaatgaaccctccccgaggcatggggcccatgggtcccggcccacagactgacccttggttatcgttgcagaattacggcagcggcatgagaccaccacccaactccctcg

SEQ ID NO: 459380 - DNA, 120 bp, Artificial Sequence
  ENSG00000157216_23 (sequence is synthesized)
gccccgccatgcccgggattaacatgtaaggcaaaaacgacccggcccgtggctcagagtccaggtcttcccccaccctctgccagcaccctgggagactcatgataaggggtcattgct

SEQ ID NO: 459381 - DNA, 120 bp, Artificial Sequence
  ENSG00000157216_24 (sequence is synthesized)
attgatgatcctggtgatgagagctcagcctcatagagtgcctctgtgtgccgggcacggttcaggcatgctgcgtgcatcagctcacctcatcttcatgattaccctatgacgcgatga

SEQ ID NO: 459382 - DNA, 120 bp, Artificial Sequence
  ENSG00000157216_25 (sequence is synthesized)
ttctttcaaaaggccttttttggaaagaagaaaaggcagtcaccgttttccacttggggttttggtttgtgcaacaggcaggggaggagtggggacgcgtttgttctagcttgatttcca

SEQ ID NO: 459383 - DNA, 120 bp, Artificial Sequence
  ENSG00000157216_26 (sequence is synthesized)
tggcaacagcagcggcacgcttggaccccagaacccagcaccctcatcctgtggccagaggggccggaccactgacccctttcaggattccaccacagcccagaccgtcaccgtgacccg

SEQ ID NO: 459384 - DNA, 120 bp, Artificial Sequence
  ENSG00000157216_27 (sequence is synthesized)
gtggcatgcactgttcccaggacaccctcctcctctcctggacctcccttccgtcctggcctccctgcctctccagcccctcctctgcccccaccccagtcttcccagtgagaatcctgc

SEQ ID NO: 459385 - DNA, 120 bp, Artificial Sequence
  ENSG00000157216_28 (sequence is synthesized)
cagctgggtggtggcctggcgcagagtgggagaggctgccactgacaggatggctatgacctgggacatggaaacagtgacctccgcgttctggtcccgagatcctcgcatcagcgtcat

SEQ ID NO: 459386 - DNA, 120 bp, Artificial Sequence
  ENSG00000157216_29 (sequence is synthesized)
cgtgtgcaccggcttggggggctggagttccggttttctttgttttttctctttattcgtcctttctcaaagatgggatactgatcagaattgctctgtatatgcttgggactggatgga

SEQ ID NO: 459387 - DNA, 120 bp, Artificial Sequence
  ENSG00000157216_30 (sequence is synthesized)
aagactttggagcagctgtggggggtggggggacaccgacaaccaaacagacgtgctggctccagtcctgtttttactttcaaaaaccaacaagcccgacagtggagcctgtcccctccc

SEQ ID NO: 459388 - DNA, 120 bp, Artificial Sequence
  ENSG00000157216_31 (sequence is synthesized)
gggagggtgctcatggccccactcacctcatcaccccacggaaacctttgtgtcttgccctggaagacacccgaattctttgtacattgacatgcccttctccttcctccctcccctgta

SEQ ID NO: 459389 - DNA, 120 bp, Artificial Sequence
  ENSG00000157216_32 (sequence is synthesized)
gctggtctttgttttactccctccctttctgatccatgtatatcatattatgtgagatatcatctgcctgaaaaaagactttgtgcggattattgggaacattgtagctgtttctgtgtt

SEQ ID NO: 459390 - DNA, 120 bp, Artificial Sequence
  ENSG00000157216_33 (sequence is synthesized)
ttttcttaccttgtagtctggttctgaattaagagaggaaaaaaaagtaattatgatacattgtagtttgtgtacgatatatgttgataacgttttattaaagggacatcttttttccgc

SEQ ID NO: 459391 - DNA, 120 bp, Artificial Sequence
  ENSG00000157216_34 (sequence is synthesized)
tggcaggacctttctgcacagaggagctggtatctgcagagttggaggagataccaaaccaggcttggaaggaaaaggaggctgacctggctgcaaagaggaagggatgcgggagggtat

SEQ ID NO: 459392 - DNA, 120 bp, Artificial Sequence
  ENSG00000157216_35 (sequence is synthesized)
acttcctgaaatggagagaaggcgagtggacacccgatgacttgtagatatgtgggtagaatgctggagggagaagcggctcctggggcacccgtgcttggccccctttggatgtcggct

SEQ ID NO: 459393 - DNA, 120 bp, Artificial Sequence
  ENSG00000157216_36 (sequence is synthesized)
ccctttgcagctcctaagctctgtgtttggggtgggagcggctgcgaggcggtggggggcttgtttggcagacggcgcccatcagacaactggaaagtgccagtgcctgcgtggccatct

SEQ ID NO: 459394 - DNA, 120 bp, Artificial Sequence
  ENSG00000157216_37 (sequence is synthesized)
gtccccgccgcctagctcccggccgccttctgcttcccacagaagggcccgcgctgttctgtagcacaagggcacggggcctggccgggaggggcaggcacagttccattttgccattgt

SEQ ID NO: 459395 - DNA, 120 bp, Artificial Sequence
  ENSG00000157216_38 (sequence is synthesized)
cttttactctggaaagaacatgacagacatcctctgcccttcagcctgtgccccagaatgagagacccatgggacagactcaagctgtaccctgaagcagagctgcccagttgactgcag

SEQ ID NO: 459396 - DNA, 120 bp, Artificial Sequence
  ENSG00000157219_0 (sequence is synthesized)
agcattcgctctccggagctgcagcctccgaaggggtggcgggggcaacagggacagaaggcaggtcccagaaagcaggttcccccaaaactggcttccctagcacggagttaaggctgc

SEQ ID NO: 459397 - DNA, 120 bp, Artificial Sequence
  ENSG00000157219_1 (sequence is synthesized)
agccggctgcctagagagaagggtgggcagggagacaacgcggtgagagcgactgctctgacgcaccagcccctctcctgcacccacacgctgctggccgcccagcttctccccgatctg

SEQ ID NO: 459398 - DNA, 120 bp, Artificial Sequence
  ENSG00000157219_2 (sequence is synthesized)
ggagatgctcggctctgggcggccaaacagcctttccaccaaggcgaggagccctgggctcctgacagcttaggcgggccctggctgcgacacgcagcccctcgcctctgcttccttagc

SEQ ID NO: 459399 - DNA, 120 bp, Artificial Sequence
  ENSG00000157219_3 (sequence is synthesized)
ctctgagggcttcagacctgccgcgcttgcagccacaccatctccaacggatgctcactagcaggaaattggggccaaattcacaggcactttccagaaactcccccactggccagaggt

SEQ ID NO: 459400 - DNA, 120 bp, Artificial Sequence
  ENSG00000157219_4 (sequence is synthesized)
tgcaaacatccggattggctctgggcacagtggccgccttaagtcctcctgaacaccccttctgcaagtaccccagggcggtctcctgacccagagatggatttacctgtgaacctaacc

SEQ ID NO: 459401 - DNA, 120 bp, Artificial Sequence
  ENSG00000157219_5 (sequence is synthesized)
tccttttccctctccaccccctcccctttggagaccaaccacagcctcggcaaagacgacctgcgccccagctcgcccctgctctcggtcttcggagtgcttattctcaccttgctgggc

SEQ ID NO: 459402 - DNA, 120 bp, Artificial Sequence
  ENSG00000157219_6 (sequence is synthesized)
tttctggtggcggcgacgttcgcctggaacctgctggtgctggcgaccatcctccgtgtacgcaccttccaccgcgtgccccacaacctggtggcatccatggccgtctcggatgtcctg

SEQ ID NO: 459403 - DNA, 120 bp, Artificial Sequence
  ENSG00000157219_7 (sequence is synthesized)
gtggccgcgctggtcatgccgctgagcctggtgcacgagctgtccgggcgccgctggcagctaggtcggaggctgtgccagctttggatcgcgtgcgacgtgctttgctgcacggccagc

SEQ ID NO: 459404 - DNA, 120 bp, Artificial Sequence
  ENSG00000157219_8 (sequence is synthesized)
atctggaacgtgacggccatagccctggaccgctactggtccatcacgcgccacatggaatacacgctccgcacccgcaagtgcgtctccaacgtcatgatcgcgctcacctgggcactc

SEQ ID NO: 459405 - DNA, 120 bp, Artificial Sequence
  ENSG00000157219_9 (sequence is synthesized)
tccgctgtcatctctctggccccgctgctttttggctggggagagacgtactctgagggcagcgaggagtgccaggtaagccgcgagccttcctacgccgtgttctccaccgtaggcgcc

SEQ ID NO: 459406 - DNA, 120 bp, Artificial Sequence
  ENSG00000157219_10 (sequence is synthesized)
ttctacctgccgctctgtgtggtgctcttcgtgtactggaagatctacaaggctgccaagttccgcgtgggctccaggaagaccaatagcgtctcacccatatccgaagctgtggaggtg

SEQ ID NO: 459407 - DNA, 120 bp, Artificial Sequence
  ENSG00000157219_11 (sequence is synthesized)
aaggactctgccaaacagccccagatggtgttcacggtccgccacgccaccgtcaccttccagccagaaggggacacgtggcgggagcagaaggagcagcgggccgccctcatggtgggc

SEQ ID NO: 459408 - DNA, 120 bp, Artificial Sequence
  ENSG00000157219_12 (sequence is synthesized)
atcctcattggcgtgttcgtgctctgctggatccccttctttctcaccgagctcatcagtcccctctgctcctgtgacatccccgccatctggaaaagcatcttcctgtggcttggctac

SEQ ID NO: 459409 - DNA, 120 bp, Artificial Sequence
  ENSG00000157219_13 (sequence is synthesized)
tccaactccttctttaaccccctgatctatacggctttcaacaagaactacaacagcgccttcaagaacttcttttctaggcaacactgagggagaggaccaggattgaaaaaagtttct

SEQ ID NO: 459410 - DNA, 120 bp, Artificial Sequence
  ENSG00000157219_14 (sequence is synthesized)
tcccataattcagtggaattcccagttcatccatttcccatccccacccaacagccatgtggacgggatgaatcctcaccattctccagggtcatcttcagaactgcactggcctctttt

SEQ ID NO: 459411 - DNA, 120 bp, Artificial Sequence
  ENSG00000157219_15 (sequence is synthesized)
ccacctcctcagtaggaatatgactcctcatagagttacggtgacatgatgtatctaacttatctactatccctttctctgtgctgacagtcatggtctttgcccgcaaagtgtcctttc

SEQ ID NO: 459412 - DNA, 120 bp, Artificial Sequence
  ENSG00000157219_16 (sequence is synthesized)
ctccccaaattcactctggcatggtgatcgacattgtcttaaagaagtcaaggcaaataagaaggaggaggtaaaacaatatgggcaggttgagattgaatagaaaagaatgaacaagtc

SEQ ID NO: 459413 - DNA, 120 bp, Artificial Sequence
  ENSG00000157219_17 (sequence is synthesized)
atgatgtagacctctgagggtaggagaccatagttccaggctttctggcacagtccccatttcaaatattctctgtggtcctagtacatatatcctaatactgatggggtatgacccaag

SEQ ID NO: 459414 - DNA, 120 bp, Artificial Sequence
  ENSG00000157219_18 (sequence is synthesized)
acacacacacacaactatgaaagaggcaggtgttctagctagctagtttactccaaaatgcaatccgttgacatgaaacaggcactgagggtaactacttcctttcattttgaagcaaca

SEQ ID NO: 459415 - DNA, 120 bp, Artificial Sequence
  ENSG00000157219_19 (sequence is synthesized)
gtttataaacaggaaagtctactggtttcatagaatctgtcagatttgtttatttgctactggtttcacgcgcgtggactatattccagtgtttctagtcaaagacctttatcctcaaat

SEQ ID NO: 459416 - DNA, 120 bp, Artificial Sequence
  ENSG00000157219_20 (sequence is synthesized)
catgagattagagtaaaacaactgctgtaaggttgagcatttcatgaccaatgactatgaaggcacattcaccaaacacaggcactttaagggcatccttgattaatttgctaattgcta

SEQ ID NO: 459417 - DNA, 120 bp, Artificial Sequence
  ENSG00000157219_21 (sequence is synthesized)
ttttttgttggtatgtgaattcctgctaggaggccgaggctagtaggcaatgaaaaagacagaacaatggtaaaatgcagccccagtcctctacaaattgacagtataatttatgaggtg

SEQ ID NO: 459418 - DNA, 120 bp, Artificial Sequence
  ENSG00000157219_22 (sequence is synthesized)
aggcagttaagtgatgatgcagcatttggatgatcatgtaaaaccagtgtcattacacaaaacttaaaaaaaaatcctaggcaataaaactgcctgtggtctgctatgtctctgactctt

SEQ ID NO: 459419 - DNA, 120 bp, Artificial Sequence
  ENSG00000157219_23 (sequence is synthesized)
ctgctatgtctctgactcttcaaatgcatgaattaaagaatgatataataatctctgaattattgtaattcatgtagtatattgtatataataaattatatcaattaagagttcaaacat

SEQ ID NO: 459420 - DNA, 120 bp, Artificial Sequence
  ENSG00000157219_24 (sequence is synthesized)
tatgtggtcttggcttgaagtttagtcttgtctttattgcaaagactagctttatcaaaagaatgtgagcagataaagaaatgttagacacctgtgaagtcacaattaatatgctaaatg

SEQ ID NO: 459421 - DNA, 120 bp, Artificial Sequence
  ENSG00000157219_25 (sequence is synthesized)
cagatctttatgcattcaagcagattcattgagaaatttagtgataagaattgaagaatttatttagaaacgtccttagatttttcatctgtatatatcacttgaagtgctaaacccaca

SEQ ID NO: 459422 - DNA, 120 bp, Artificial Sequence
  ENSG00000157219_26 (sequence is synthesized)
agtatttaaaatacagactcttcacttactcaagttacttttccccattattactcgaaatcagagagaataacaaatgctattgttttctagtgttttgaataagggaagtgtttgaat

SEQ ID NO: 459423 - DNA, 120 bp, Artificial Sequence
  ENSG00000157219_27 (sequence is synthesized)
aagggaagggaagtgtttgaaaaaccttattaagtaccccatggcagagaagaaaaattcagacatgaggagtctggagaggtaacactagaatcaagggtaaacgcttaagtctattct

SEQ ID NO: 459424 - DNA, 120 bp, Artificial Sequence
  ENSG00000157219_28 (sequence is synthesized)
acctgaaaatccatgtgaaaacttttaatccataaatcgtgagtgtcttactgtttaaaaaagttcatactcttcagtaaagcgaagcttgaggaagatgtgccacatttttctggtggc

SEQ ID NO: 459425 - DNA, 120 bp, Artificial Sequence
  ENSG00000157219_29 (sequence is synthesized)
ttcaaacactccccaactctccaaggattctgtataccccagttggagaacgatgttattataatattaattcaatctccagctgagggttttattaatgttttcataagatggataagc

SEQ ID NO: 459426 - DNA, 120 bp, Artificial Sequence
  ENSG00000157219_30 (sequence is synthesized)
ctcattattcttatcactcaatatgtatttaacacctctcaggtgtcacttaaattatacattatatacaacatactccacatacactatctagagcaagaaacattccacataagagaa

SEQ ID NO: 459427 - DNA, 120 bp, Artificial Sequence
  ENSG00000157219_31 (sequence is synthesized)
ggaagaagtggcaattaatgaattattttgcttccatttcaatagtaaaagttgtttataccctggtaagaaatgtagacattcattgactttgagtctctactatgcaaatcaaatatt

SEQ ID NO: 459428 - DNA, 120 bp, Artificial Sequence
  ENSG00000157219_32 (sequence is synthesized)
tgtgaaacactctcatttatgcttgactgctaatattttatcaggttagaaatttatatgaatcataaacagaagtaattgctcaaaataactaattgtgttcccgtgccagattgcaac

SEQ ID NO: 459429 - DNA, 120 bp, Artificial Sequence
  ENSG00000157219_33 (sequence is synthesized)
aaccacctttattagatggtgcacctagagaaggctggagggtttcctgcaagccctctctgtagggtgactgaggtgaaccaatccaaagccctcctttcagctcttgtagaatatgtc

SEQ ID NO: 459430 - DNA, 120 bp, Artificial Sequence
  ENSG00000157219_34 (sequence is synthesized)
gaacaaaacgcacagttctgccctcctgcctaaagacaaagtacaaaggagataatcctctccttatgagtgatcttagccctcttgaggtcactatcagttttatattttcattgtgcg

SEQ ID NO: 459431 - DNA, 120 bp, Artificial Sequence
  ENSG00000157219_35 (sequence is synthesized)
gtagtgaaagacaagtggaagatgtccctgagtctgtattgacatcagaccatattgtagggattaattcttgataaaaaaaaagcttgttatttctctcttcttttcatgaggagcatt

SEQ ID NO: 459432 - DNA, 120 bp, Artificial Sequence
  ENSG00000157219_36 (sequence is synthesized)
tttgcttccgtgtttgtctgttggatttgcagttccctgctcacagccaaagaggctgtagagacaacactttgccatatttctattaaagagaaaataaagattgagtccacagctcaa

SEQ ID NO: 459433 - DNA, 120 bp, Artificial Sequence
  ENSG00000157219_37 (sequence is synthesized)
cgtcctgacgtaagactgaagatgttgactgcactagtcccggagcctgcatttgttatctgcttccactgccttagggtgttactttatgggtctatcccccacagccctattaggttg

SEQ ID NO: 459434 - DNA, 120 bp, Artificial Sequence
  ENSG00000157224_0 (sequence is synthesized)
gccatccagggcattgccgttcagggccacgggaaaacctgactgcgctcccagaagcctccggtgtacctcgctgggaacgcacttcctgggacgctgagagggagacgctccaagagg

SEQ ID NO: 459435 - DNA, 120 bp, Artificial Sequence
  ENSG00000157224_1 (sequence is synthesized)
ctcctcagtgtgggcgagtaaaatgccctgcgtgtgagaagcaggctcagattattgctactctgtattcagatcttcatgtgtctcttctaagctgaataaagctgttttggaactgtc

SEQ ID NO: 459436 - DNA, 120 bp, Artificial Sequence
  ENSG00000157224_2 (sequence is synthesized)
aggtacctcaaagctctgactgacagtactccacaagcttgcctgccatgggctgtcgggatgtccacgcagccacagtcctttccttcctgtgtggaatcgcctcagtagcaggcctct

SEQ ID NO: 459437 - DNA, 120 bp, Artificial Sequence
  ENSG00000157224_3 (sequence is synthesized)
ttgcagggactctgcttcccaactggagaaaattacgattgatcacattcaacagaaacgagaagaacctgactgtttacacaggcctgtgggtgaaatgtgcccggtatgacgggagca

SEQ ID NO: 459438 - DNA, 120 bp, Artificial Sequence
  ENSG00000157224_4 (sequence is synthesized)
gtgactgcctgatgtacgacactacttggtactcatcagttgaccagctggacctgcgtgtcctccagtttgccctacccctcagcatgctgatcgccatgggtgccctgctgctctgcc

SEQ ID NO: 459439 - DNA, 120 bp, Artificial Sequence
  ENSG00000157224_5 (sequence is synthesized)
tgattggaatgtgcaacactgccttcaggtcctcggtgcccaacatcaaactggccaagtgtctggtcaatagtgcaggttgccacctggtggctgggctgctatttttcctggcaggta

SEQ ID NO: 459440 - DNA, 120 bp, Artificial Sequence
  ENSG00000157224_6 (sequence is synthesized)
ctgtgagcctctccccatctatctgggtcatcttttataacatccatctgaacaagaagtttgagccagtcttttcatttgactatgcagtgtatgtcactattgctagtgctgggggcc

SEQ ID NO: 459441 - DNA, 120 bp, Artificial Sequence
  ENSG00000157224_7 (sequence is synthesized)
tgtttatgacttcccttatactatttatttggtattgtacatgcaaatctttgccttctcctttctggcaaccattgtactcccatccacccagtatgcatacttactcacagccctatt

SEQ ID NO: 459442 - DNA, 120 bp, Artificial Sequence
  ENSG00000157224_8 (sequence is synthesized)
cagcacgctctcgcctctctgccattgaaattgacattccagtagtttcacacaccacttaatggggaaatagttaattgttaaagaaaacttcttgtagcctcacattccccttgtgca

SEQ ID NO: 459443 - DNA, 120 bp, Artificial Sequence
  ENSG00000157224_9 (sequence is synthesized)
aagagctcttttggacctacatacattttcctttgtttttgaccaatcaatgaagccaaatttatatgtcctagtagaatgaagtgctgctagtttttatgagaagtatattatattaaa

SEQ ID NO: 459444 - DNA, 120 bp, Artificial Sequence
  ENSG00000157224_10 (sequence is synthesized)
tgtgaattttttaaattttgcttcttatactggaaggaattttagccttcatattgatatctaattaattatttaagtggaagaggcctgcatcacaattgaggtaatgtagagcaacat

SEQ ID NO: 459445 - DNA, 120 bp, Artificial Sequence
  ENSG00000157224_11 (sequence is synthesized)
gttaaagaatgatggttagcagaagctgttgtatacaatcttcatgaaaatttcagtgtgtatttttctttttctataatacctttaactgcaaagaaaaggcagtttcaaatataagaa

SEQ ID NO: 459446 - DNA, 120 bp, Artificial Sequence
  ENSG00000157224_12 (sequence is synthesized)
atttatttcaggtaagggtaatattttaatagtagtcaataatctagcttaaggctgtaactcttctatcggggctaattgtatgaataggtgtcagtatgttgaagattactttctttt

SEQ ID NO: 459447 - DNA, 120 bp, Artificial Sequence
  ENSG00000157224_13 (sequence is synthesized)
gtgactttcttctacctcatgccactgtttaaaagtaaaacgtattttaacgatgttagaataagactaccattctaaatatcacctacttatgaataacatgtaataatttttaacatt

SEQ ID NO: 459448 - DNA, 120 bp, Artificial Sequence
  ENSG00000157224_14 (sequence is synthesized)
gagatatcttccatcaagcagtactcgtgcccatatacaatctcttagtggctaggagaaataaataaaagggccataatggtttgttctctttcagacataatttagtaggggacaaga

SEQ ID NO: 459449 - DNA, 120 bp, Artificial Sequence
  ENSG00000157224_15 (sequence is synthesized)
agtctgttcttcagtgagtacactagagatttactctggtgactgccttttgagttatgggtgaagtaaggtatggctttaccataaccttgattcattcacccttgattcatttctcgc

SEQ ID NO: 459450 - DNA, 120 bp, Artificial Sequence
  ENSG00000157224_16 (sequence is synthesized)
ccccgtcactgattatttccttgagcatatatctctgcctaacactttagtaggtgctatagaggatacatgaaaagtatgagatctggttccatccagtaagacattttaatagagaag

SEQ ID NO: 459451 - DNA, 120 bp, Artificial Sequence
  ENSG00000157224_17 (sequence is synthesized)
atcaaaatgttacctggcagttggggaataatctgacttcgttggcagttggccttaacttcttaatcattgatccaggaatatttcaaccagagacacaactttctggcagacagacaa

SEQ ID NO: 459452 - DNA, 120 bp, Artificial Sequence
  ENSG00000157224_18 (sequence is synthesized)
attgtacaacaccaacaatatcctggaccttgaaattctgtttacttcagtccattgtatcctttaaggcacctgtgctagcctagattttgtaataacactgatttatgagaatggaca

SEQ ID NO: 459453 - DNA, 120 bp, Artificial Sequence
  ENSG00000157224_19 (sequence is synthesized)
aaagtggtagggaaattgttccctctccacttctgaaagtatgatgatgtattaaggatggaggagttattaaaaatgtctcttctgatgaggtaacaattagatgaaaccatgttaaag

SEQ ID NO: 459454 - DNA, 120 bp, Artificial Sequence
  ENSG00000157224_20 (sequence is synthesized)
ctgagatgaacacttagaaattcagggatattgggtctttagccttatgaatttgagctgcttatttaattggtgtaatttactacatattagtactatattcgtaaggattttttatta

SEQ ID NO: 459455 - DNA, 120 bp, Artificial Sequence
  ENSG00000157224_21 (sequence is synthesized)
accattacagattttacaaacagctagttatatggtaaacagattattatgcctttttgcaattctgaatatgattctagtatttgtgtagatgtatttggtactttttcccctaattcc

SEQ ID NO: 459456 - DNA, 120 bp, Artificial Sequence
  ENSG00000157224_22 (sequence is synthesized)
aacactagtttatatatatagcgaataaatctagttgtataaatttttaaatgccgtcagtagaaagcacacaaggttatgatttttttaattactggcttctgatttctttcacttctg

SEQ ID NO: 459457 - DNA, 120 bp, Artificial Sequence
  ENSG00000157224_23 (sequence is synthesized)
atccttttcctttttctcagatgtagctgagtcttgatcattttaagacaacgatgggtagaattttgagattaatgttaattttccctttttgttaatttcagtcccctctcactatgc

SEQ ID NO: 459458 - DNA, 120 bp, Artificial Sequence
  ENSG00000157224_24 (sequence is synthesized)
ttttgtccagaaggatcaagaattctaccatcccttgggtctttgtgtataaacaatgttaaataaaggtagactcagtctttaagatattagacagtttttttagtccatgggattgta

SEQ ID NO: 459459 - DNA, 120 bp, Artificial Sequence
  ENSG00000157224_25 (sequence is synthesized)
aatataaacattaactttcctataagaatattttggctttgtaatctatagcctcaaattggtatttattatggattcactagacaaacagctgtttccttattgtcttttttctttagt

SEQ ID NO: 459460 - DNA, 120 bp, Artificial Sequence
  ENSG00000157224_26 (sequence is synthesized)
gtttctgatttgctatcagtagctgtttttaaagccgtccaaggaaaataattatttacagtttttgaagtcacttttgagccctcatcaagctctcattgtgatgggagggataccttt

SEQ ID NO: 459461 - DNA, 120 bp, Artificial Sequence
  ENSG00000157224_27 (sequence is synthesized)
ttgttgttaaaagcctattattgttaaaggccttttatggaaaccaacttggaaaacaaccttaaatgtggatgtatcagatttggtttatccagccatgggagagaaaacaaacctaag

SEQ ID NO: 459462 - DNA, 120 bp, Artificial Sequence
  ENSG00000157224_28 (sequence is synthesized)
tttactttacttgtacatatacactacaatggatagtatatttgctgtaaactacaatgtaaaacctcaataaaagtgcgctgtacttcttaatgtttattaaaagatgtatttttacaa

SEQ ID NO: 459463 - DNA, 120 bp, Artificial Sequence
  ENSG00000157224_29 (sequence is synthesized)
gttccgatttctgggtcttttgcataagtaactgaggattttatgtaaaatggctaaatccaggagaatcaggagcgttggaaaacgctgaccacatctgtggatgtgaaaattgagctc

SEQ ID NO: 459464 - DNA, 120 bp, Artificial Sequence
  ENSG00000157224_30 (sequence is synthesized)
gctgttctcatgatagtgagtaagttattacaagatctgatggttttataaagggttattccttctttgctcagcacttcttcctgctgccatgtgaagaagaacatatttgcttcccct

SEQ ID NO: 459465 - DNA, 120 bp, Artificial Sequence
  ENSG00000157224_31 (sequence is synthesized)
tctgccataactcggaaaggtcagccccccgctgcaagttcttagattcctggaggatctgcagagtcaacattaggagtatccatccattcaccaaggccatcaggaatgtgctgcccc

SEQ ID NO: 459466 - DNA, 120 bp, Artificial Sequence
  ENSG00000157224_32 (sequence is synthesized)
ttttaatggtgccatcctggtgcactggaattttcatctcaaaagttgtcatttggtgttggtgggaagacattttaaaggttctagatggttttggtgaaactcagttaaattggactc

SEQ ID NO: 459467 - DNA, 120 bp, Artificial Sequence
  ENSG00000157224_33 (sequence is synthesized)
agattaatttggtttatctgaaatatgaaaggtagattcaaagttttaaatttgaggaaaagcatggtttctcccccatcactttctgcatgacctatgacatataagctttttgttgtg

SEQ ID NO: 459468 - DNA, 120 bp, Artificial Sequence
  ENSG00000157224_34 (sequence is synthesized)
aataagccattgggttttgttctaatcagacccactcaatggtcatagttcctctttcttaagttttttaaggtcttagttaataaaatgctttatttgttctttttcataaaaaaatta

SEQ ID NO: 459469 - DNA, 120 bp, Artificial Sequence
  ENSG00000157224_35 (sequence is synthesized)
ggtgagtgatctggagtcctgagaatgtgctgtaaagaagagttgtcaattgtgcacagaagataagaaatatatgatgaatagataattgaaaagagatcctccagaaagagcagaagg

SEQ ID NO: 459470 - DNA, 120 bp, Artificial Sequence
  ENSG00000157224_36 (sequence is synthesized)
ctttttgtcaattacatgttgatagtaccttaagtcacttgagccctaaatattaaaatagcaacagtattaaaatctcagaaatctttttattattcatgaatgtttcatgtttaacat

SEQ ID NO: 459471 - DNA, 120 bp, Artificial Sequence
  ENSG00000157224_37 (sequence is synthesized)
gtaagtttttattgacttttcctagatagaatttgaaaagataaatttattttctcttctcatagtatatgatgaatagataattgaaaagagatcctccagaaagagcagaaggaagtt

SEQ ID NO: 459472 - DNA, 120 bp, Artificial Sequence
  ENSG00000157224_38 (sequence is synthesized)
tcttcaatggcttccttcaggattttaatcatccttacagcctctttgagaatgattgaacttccaaattccctgaagttaaaattttaaattctattaaacattttttcgagtatttca

SEQ ID NO: 459473 - DNA, 120 bp, Artificial Sequence
  ENSG00000157224_39 (sequence is synthesized)
caatggtggtttcattcagagtctagtagagaacctcatgcacaaatgaggaaaagtagggtgtatgattttctgcatttatttgaaaaaaacatgattccagagaggactgtagagttc

SEQ ID NO: 459474 - DNA, 120 bp, Artificial Sequence
  ENSG00000157224_40 (sequence is synthesized)
caacatatcatccccatatctgcagttactggagaaggaatcgaagaattaaagaattgtataagaaagtcactggatgaacaggccaaccaggaaaatgatgcacttcataagaaacag

SEQ ID NO: 459475 - DNA, 120 bp, Artificial Sequence
  ENSG00000157224_41 (sequence is synthesized)
ttgcttaatttgtggatttctgatacaatgtcttctactgagccaccatcaaagcatgctgttactacttccaaaatggatataatttaaatatattaaaaatggtattgatggaacagt

SEQ ID NO: 459476 - DNA, 120 bp, Artificial Sequence
  ENSG00000157224_42 (sequence is synthesized)
atttaatgcttaaaaacaaggaaatcctttcatctgtgacaacctggaggacatgctcagattattgctactctgtattcagatcttcatgtgtctcttctaagctgaataaagctgttt

SEQ ID NO: 459477 - DNA, 120 bp, Artificial Sequence
  ENSG00000157224_43 (sequence is synthesized)
ctcttgtgagtacaatgactgatgacttacagtttctaagaaaacccaaattataggtagaaggaactctcaatgttaccatcaagaattaagttagggctgggcatggtggctcagccc

SEQ ID NO: 459478 - DNA, 81 bp, Artificial Sequence
  ENSG00000157224_44 (sequence is synthesized)
cgagatcctgactgtatgagaaaattttaaaaaattagccagttgtggtggtacatgcctatagtcccagctactctggaa

SEQ ID NO: 459479 - DNA, 74 bp, Artificial Sequence
  ENSG00000157224_45 (sequence is synthesized)
gagatcctgactgtatgagaaaattttaaaaaattagccagttgtggtggtacatgcctatcggaggtcgaggc

SEQ ID NO: 459480 - DNA, 120 bp, Artificial Sequence
  ENSG00000157224_46 (sequence is synthesized)
cgtgtgagaagcaggctcagattattgctactctgtattcagatcttcatgtgtctcttctaagctgaataaagctgttttggaactgtcaggtacctcaaagcagatggggtctcgcta

SEQ ID NO: 459481 - DNA, 120 bp, Artificial Sequence
  ENSG00000157224_47 (sequence is synthesized)
aatttattaataatggagttatacatcctgatcttgtttctcactccatttacatttcaggaatcagtgttacagggcagtttgattggagaaatctcaattacattgaaattccaatta

SEQ ID NO: 459482 - DNA, 120 bp, Artificial Sequence
  ENSG00000157224_48 (sequence is synthesized)
cggaaaggtcagccccccgctgcaagttcttagattcctggaggatctgcagagtcaacattaggagtatccatccattcaccaaggccatcaggaatgtgctgaatgtgctgtaaagaa

SEQ ID NO: 459483 - DNA, 120 bp, Artificial Sequence
  ENSG00000157224_49 (sequence is synthesized)
gttttggaactgtcaggtacctcaaagcgtaaaatgtgctgtaaagaagagttgtcaattgtgcacagaagataagaaatgtgtttggtgtagtgaagaaaaagcatgcaaaaaatactg

SEQ ID NO: 459484 - DNA, 120 bp, Artificial Sequence
  ENSG00000157224_50 (sequence is synthesized)
ttttccctatttcggttgtcgattcagttctatatattggttaaactgtaaagttgacatgtttggaatcatgatgcttctactcattgcagtattaattacaggattcgtttggtactg

SEQ ID NO: 459485 - DNA, 120 bp, Artificial Sequence
  ENSG00000157224_51 (sequence is synthesized)
acctcaaagcatgaagaaaacgaggcacagggaagttctgaatctggcccaaggtcagtgagctagtaagtgaggagatggggattagaattcaagcaaccttgctaagagttgactctc

SEQ ID NO: 459486 - DNA, 120 bp, Artificial Sequence
  ENSG00000157224_52 (sequence is synthesized)
attcccctgtcctgtactgcttctttccctacacctttgctttttatgagccaccttcacccctgctgcatgagcatttgaggctgaatttgtggtgtttgtagctaactgatgattgat

SEQ ID NO: 459487 - DNA, 120 bp, Artificial Sequence
  ENSG00000157224_53 (sequence is synthesized)
gagtgggcccttgctgtgtgagtgcctgacacatacagagtgcttgatgtatatgtgttgaaagaacgattattgacaaaaagaagattgaaggtgtgattgtaagagactttaacatta

SEQ ID NO: 459488 - DNA, 120 bp, Artificial Sequence
  ENSG00000157224_54 (sequence is synthesized)
tcttggttgtttttttaattgtgaagaaaaataccgatggctaaagattttagttgctctatgacccagtcagtaataaccaaatgtgtgtgcacctgtgctctgaggtcacacacacct

SEQ ID NO: 459489 - DNA, 120 bp, Artificial Sequence
  ENSG00000157227_0 (sequence is synthesized)
agaccccagttcgccgactaagcagaagaaagatcaaaaaccggaaaagaggagaagagcaaacaggcactttgaggaacaatcccctttaactccaagccgacagcggtctaggaattc

SEQ ID NO: 459490 - DNA, 120 bp, Artificial Sequence
  ENSG00000157227_1 (sequence is synthesized)
aagttcagtgcctaccgaagacaaaggcgccccgagggagtggcggtgcgaccccagggcgtgggcccggccgcggagcccacactgcccggctgacccggtggtctcggaccatgtctc

SEQ ID NO: 459491 - DNA, 120 bp, Artificial Sequence
  ENSG00000157227_2 (sequence is synthesized)
ccgccccaagacccccccgttgtctcctgctccccctgctcacgctcggcaccgcgctcgcctccctcggctcggcccaaagcagcagcttcagccccgaagcctggctacagcaatatg

SEQ ID NO: 459492 - DNA, 120 bp, Artificial Sequence
  ENSG00000157227_3 (sequence is synthesized)
gctacctgcctcccggggacctacgtacccacacacagcgctcaccccagtcactctcagcggccatcgctgccatgcagaagttttacggcttgcaagtaacaggcaaagctgatgcag

SEQ ID NO: 459493 - DNA, 120 bp, Artificial Sequence
  ENSG00000157227_4 (sequence is synthesized)
acaccatgaaggccatgaggcgcccccgatgtggtgttccagacaagtttggggctgagatcaaggccaatgttcgaaggaagcgctacgccatccagggtctcaaatggcaacataatg

SEQ ID NO: 459494 - DNA, 120 bp, Artificial Sequence
  ENSG00000157227_5 (sequence is synthesized)
aaatcactttctgcatccagaattacacccccaaggtgggcgagtatgccacatacgaggccattcgcaaggcgttccgcgtgtgggagagtgccacaccactgcgcttccgcgaggtgc

SEQ ID NO: 459495 - DNA, 120 bp, Artificial Sequence
  ENSG00000157227_6 (sequence is synthesized)
cctatgcctacatccgtgagggccatgagaagcaggccgacatcatgatcttctttgccgagggcttccatggcgacagcacgcccttcgatggtgagggcggcttcctggcccatgcct

SEQ ID NO: 459496 - DNA, 120 bp, Artificial Sequence
  ENSG00000157227_7 (sequence is synthesized)
acttcccaggccccaacattggaggagacacccactttgactctgccgagccttggactgtcaggaatgaggatctgaatggaaatgacatcttcctggtggctgtgcacgagctgggcc

SEQ ID NO: 459497 - DNA, 120 bp, Artificial Sequence
  ENSG00000157227_8 (sequence is synthesized)
atgccctggggctcgagcattccagtgacccctcggccatcatggcacccttttaccagtggatggacacggagaattttgtgctgcccgatgatgaccgccggggcatccagcaacttt

SEQ ID NO: 459498 - DNA, 120 bp, Artificial Sequence
  ENSG00000157227_9 (sequence is synthesized)
atgggggtgagtcagggttccccaccaagatgccccctcaacccaggactacctcccggccttctgttcctgataaacccaaaaaccccacctatgggcccaacatctgtgacgggaact

SEQ ID NO: 459499 - DNA, 120 bp, Artificial Sequence
  ENSG00000157227_10 (sequence is synthesized)
ttgacaccgtggccatgctccgaggggagatgtttgtcttcaaggagcgctggttctggcgggtgaggaataaccaagtgatggatggatacccaatgcccattggccagttctggcggg

SEQ ID NO: 459500 - DNA, 120 bp, Artificial Sequence
  ENSG00000157227_11 (sequence is synthesized)
gcctgcctgcgtccatcaacactgcctacgagaggaaggatggcaaattcgtcttcttcaaaggagacaagcattgggtgtttgatgaggcgtccctggaacctggctaccccaagcaca

SEQ ID NO: 459501 - DNA, 120 bp, Artificial Sequence
  ENSG00000157227_12 (sequence is synthesized)
ttaaggagctgggccgagggctgcctaccgacaagattgatgctgctctcttctggatgcccaatggaaagacctacttcttccgtggaaacaagtactaccgtttcaacgaagagctca

SEQ ID NO: 459502 - DNA, 120 bp, Artificial Sequence
  ENSG00000157227_13 (sequence is synthesized)
gggcagtggatagcgagtaccccaagaacatcaaagtctgggaagggatccctgagtctcccagagggtcattcatgggcagcgatgaagtcttcacttacttctacaaggggaacaaat

SEQ ID NO: 459503 - DNA, 120 bp, Artificial Sequence
  ENSG00000157227_14 (sequence is synthesized)
actggaaattcaacaaccagaagctgaaggtagaaccgggctaccccaagtcagccctgagggactggatgggctgcccatcgggaggccggccggatgaggggactgaggaggagacgg

SEQ ID NO: 459504 - DNA, 120 bp, Artificial Sequence
  ENSG00000157227_15 (sequence is synthesized)
cttgcagtcttcttcttcagacgccatgggacccccaggcgactgctctactgccagcgttccctgctggacaaggtctgacgcccaccgccggcccgcccactcctaccacaaggactt

SEQ ID NO: 459505 - DNA, 120 bp, Artificial Sequence
  ENSG00000157227_16 (sequence is synthesized)
tgcctctgaaggccagtggcagcaggtggtggtgggtgggctgttcccatcgtcccgagccccctccccgcagcctccttgcttctctctgtcccctggctggcctccttcaccctgacc

SEQ ID NO: 459506 - DNA, 120 bp, Artificial Sequence
  ENSG00000157227_17 (sequence is synthesized)
gcctccctccctcctgccccggcattgcatcttccctagataggtcccctgagggctgagtgggagggcggccctttccagcctctgcccctcaggggaaccctgtagctttgtgtctgt

SEQ ID NO: 459507 - DNA, 120 bp, Artificial Sequence
  ENSG00000157227_18 (sequence is synthesized)
ccagccccatctgaatgtgttgggggctctgcacttgaaggcaggaccctcagacctcgctggtaaaggtcaaatggggtcatctgctccttttccatcccctgacataccttaacctct

SEQ ID NO: 459508 - DNA, 120 bp, Artificial Sequence
  ENSG00000157227_19 (sequence is synthesized)
gaactctgacctcaggaggctctgggcactccagccctgaaagccccaggtgtacccaattggcagcctctcactactctttctggctaaaaggaatctaatcttgttgagggtagagac

SEQ ID NO: 459509 - DNA, 120 bp, Artificial Sequence
  ENSG00000157227_20 (sequence is synthesized)
cctgagacagtgtgagggggtggggactgccaagccaccctaagaccttgggaggaaaactcagagagggtcttcgttgctcagtcagtcaagttcctcggagatctgcctctgcctcac

SEQ ID NO: 459510 - DNA, 120 bp, Artificial Sequence
  ENSG00000157227_21 (sequence is synthesized)
ctaccccagggaacttccaaggaaggagcctgagccactggggactaagtgggcagaagaaacccttggcagccctgtgcctctcgaatgttagccttggatggggctttcacagttaga

SEQ ID NO: 459511 - DNA, 120 bp, Artificial Sequence
  ENSG00000157227_22 (sequence is synthesized)
agagctgaaaccaggggtgcagctgtcaggtagggtggggccggtgggagaggcccgggtcagagccctgggggtgagcctgaaggccacagagaaagaaccttgcccaaactcaggcag

SEQ ID NO: 459512 - DNA, 120 bp, Artificial Sequence
  ENSG00000157227_23 (sequence is synthesized)
ctggggctgaggcccaaaggcagaacagccagagggggcaggaggggaccaaaaaggaaaatgaggacgtgcagcagcattggaaggctggggccgggcaggccaggccaagccaagcag

SEQ ID NO: 459513 - DNA, 120 bp, Artificial Sequence
  ENSG00000157227_24 (sequence is synthesized)
ggggccacagggtgggctgtggagctctcaggaagggccctgaggaaggcacacttgctcctgttggtccctgtccttgctgcccaggcagcgtggaggggaagggtagggcagccagag

SEQ ID NO: 459514 - DNA, 120 bp, Artificial Sequence
  ENSG00000157227_25 (sequence is synthesized)
aaaggagcagagaaggcacacaaacgaggaatgaggggcttcacgagaggccacagggcctggctggccacgctgtcccggcctgctcaccatctcagtgaggggcaggagctggggctc

SEQ ID NO: 459515 - DNA, 120 bp, Artificial Sequence
  ENSG00000157227_26 (sequence is synthesized)
gcttaggctgggtccacgcttccctggtgccagcacccctcaagcctgtctcaccagtggcctgccctctcgctcccccacccagcccacccattgaagtctccttgggccaccaaaggt

SEQ ID NO: 459516 - DNA, 120 bp, Artificial Sequence
  ENSG00000157227_27 (sequence is synthesized)
ggtggccatggtaccggggacttgggagagtgagacccagtggagggagcaagaggagagggatgtcgggggggtggggcacggggtaggggaaatggggtgaacggtgctggcagttcg

SEQ ID NO: 459517 - DNA, 120 bp, Artificial Sequence
  ENSG00000157227_28 (sequence is synthesized)
gctagatttctgtcttgtttgtttttttgttttgtttaatgtatatttttattataattattatatatgaattccattcaaatcgttcctttttgttaacaaggggcatggggaggggtg

SEQ ID NO: 459518 - DNA, 120 bp, Artificial Sequence
  ENSG00000157227_29 (sequence is synthesized)
ggggtgggggggcagaggcgtctgaccccaggaacctgcagggcggggctgggtcggtgccctctaaggacaattttgaccttgttcaacctttccacaaagaataaattgtgtttcaca

SEQ ID NO: 459519 - DNA, 120 bp, Artificial Sequence
  ENSG00000157227_30 (sequence is synthesized)
gcttcagccccgaatccttggaagaactttacaactggggcgaactcccccttccccgattcccttgggctctgctctcagctctggaaccgcctgataaacatttggactccgctcaaa

SEQ ID NO: 459520 - DNA, 120 bp, Artificial Sequence
  ENSG00000157227_31 (sequence is synthesized)
ccagagcctgaggatcccttgttcttgagacagaggcgttgcgcatgaggtagcaggaagagctgggtcaggcagaggtggctgggccgcgcagtcagacctgggagagtgcagggaagg

SEQ ID NO: 459521 - DNA, 120 bp, Artificial Sequence
  ENSG00000157227_32 (sequence is synthesized)
agaatgttgcccctctttatcctaacacaccccatcctctccccacgtggctggacctcagcatccagaattacacccccaaggtgggcgagtatgccacatacgaggccattcgcaagg

SEQ ID NO: 459522 - DNA, 120 bp, Artificial Sequence
  ENSG00000157227_33 (sequence is synthesized)
atgcgcgagagtttgttgtttcttcgacttcccagctctccagcgctctcccgccggcgcgccctccgatgggcgcttcggcctccccgggtggcccaggccttcagcggacgagtctgc

SEQ ID NO: 459523 - DNA, 120 bp, Artificial Sequence
  ENSG00000157240_0 (sequence is synthesized)
ggtccgagggcgcgcgaggcagaggagagggagcgagttgagggattgacacaaatggtcaggcggcggcggcggagaaggaggcggaggcgcaggggggagccgagcccgctgggctgc

SEQ ID NO: 459524 - DNA, 120 bp, Artificial Sequence
  ENSG00000157240_1 (sequence is synthesized)
ggagagttgcgctctctacggggccgcggccactagcgcggcgccgccagccgggagccagcgagccgagggccaggaaggcgggacacgaccccggcgcgccctagccacccgggttct

SEQ ID NO: 459525 - DNA, 120 bp, Artificial Sequence
  ENSG00000157240_2 (sequence is synthesized)
ccccgccgcccgcgcttcatgaatcgcaagtttccgcggcggcggcggctgcggtacgcagaacaggagccgggggagcgggccgaaagcggcttgggctcgacggagggcacccgcgca

SEQ ID NO: 459526 - DNA, 120 bp, Artificial Sequence
  ENSG00000157240_3 (sequence is synthesized)
gaggtctccctggccgcagggggagccgccgccggccgtgcccctggcagccccagcggagcggcgccaagagaggagccgagaaagtatggctgaggaggaggcgcctaagaagtcccg

SEQ ID NO: 459527 - DNA, 120 bp, Artificial Sequence
  ENSG00000157240_4 (sequence is synthesized)
ctgaggaggaggcgcctaagaagtcccgggccgccggcggtggcgcgagctgggaactttgtgccggggcgctctcggcccggctggcggaggagggcagcggggacgccggtggccgcc

SEQ ID NO: 459528 - DNA, 80 bp, Artificial Sequence
  ENSG00000157240_5 (sequence is synthesized)
ggcgcgccagctgctgctgctgctttggctgctggaggctccgctgctgctgggggtccgggcccaggcggcgggccagg

SEQ ID NO: 459529 - DNA, 120 bp, Artificial Sequence
  ENSG00000157240_6 (sequence is synthesized)
gccgcctcagcagcaacagagcgggcagcagtacaacggcgagcggggcatctccgtcccggaccacggctattgccagcccatctccatcccgctgtgcacggacatcgcgtacaacca

SEQ ID NO: 459530 - DNA, 120 bp, Artificial Sequence
  ENSG00000157240_7 (sequence is synthesized)
gaccatcatgcccaacctgctgggccacacgaaccaggaggacgcgggcctggaggtgcaccagttctaccctctagtgaaagtgcagtgttccgctgagctcaagttcttcctgtgctc

SEQ ID NO: 459531 - DNA, 120 bp, Artificial Sequence
  ENSG00000157240_8 (sequence is synthesized)
catgtacgcgcccgtgtgcaccgtgctagagcaggcgctgccgccctgccgctccctgtgcgagcgcgcgcgccagggctgcgaggcgctcatgaacaagttcggcttccagtggccaga

SEQ ID NO: 459532 - DNA, 120 bp, Artificial Sequence
  ENSG00000157240_9 (sequence is synthesized)
cacgctcaagtgtgagaagttcccggtgcacggcgccggcgagctgtgcgtgggccagaacacgtccgacaagggcaccccgacgccctcgctgcttccagagttctggaccagcaaccc

SEQ ID NO: 459533 - DNA, 120 bp, Artificial Sequence
  ENSG00000157240_10 (sequence is synthesized)
tcagcacggcggcggagggcaccgtggcggcttcccggggggcgccggcgcgtcggagcgaggcaagttctcctgcccgcgcgccctcaaggtgccctcctacctcaactaccacttcct

SEQ ID NO: 459534 - DNA, 120 bp, Artificial Sequence
  ENSG00000157240_11 (sequence is synthesized)
gggggagaaggactgcggcgcaccttgtgagccgaccaaggtgtatgggctcatgtacttcgggcccgaggagctgcgcttctcgcgcacctggattggcatttggtcagtgctgtgctg

SEQ ID NO: 459535 - DNA, 120 bp, Artificial Sequence
  ENSG00000157240_12 (sequence is synthesized)
cgcctccacgctcttcacggtgcttacgtacctggtggacatgcggcgcttcagctacccggagcggcccatcatcttcttgtccggctgttacacggccgtggccgtggcctacatcgc

SEQ ID NO: 459536 - DNA, 120 bp, Artificial Sequence
  ENSG00000157240_13 (sequence is synthesized)
cggcttcctcctggaagaccgagtggtgtgtaatgacaagttcgccgaggacggggcacgcactgtggcgcagggcaccaagaaggagggctgcaccatcctcttcatgatgctctactt

SEQ ID NO: 459537 - DNA, 120 bp, Artificial Sequence
  ENSG00000157240_14 (sequence is synthesized)
cttcagcatggccagctccatctggtgggtgatcctgtcgctcacctggttcctggcggctggcatgaagtggggccacgaggccatcgaagccaactcacagtattttcacctggccgc

SEQ ID NO: 459538 - DNA, 120 bp, Artificial Sequence
  ENSG00000157240_15 (sequence is synthesized)
ctgggctgtgccggccatcaagaccatcaccatcctggcgctgggccaggtggacggcgatgtgctgagcggagtgtgcttcgtggggcttaacaacgtggacgcgctgcgtggcttcgt

SEQ ID NO: 459539 - DNA, 120 bp, Artificial Sequence
  ENSG00000157240_16 (sequence is synthesized)
gctggcgcccctcttcgtgtacctgtttatcggcacgtcctttctgctggccggctttgtgtcgctcttccgcatccgcaccatcatgaagcacgatggcaccaagaccgagaagctgga

SEQ ID NO: 459540 - DNA, 120 bp, Artificial Sequence
  ENSG00000157240_17 (sequence is synthesized)
gaagctcatggtgcgcattggcgtcttcagcgtgctgtacactgtgccagccaccatcgtcatcgcctgctacttctacgagcaggccttccgggaccagtgggaacgcagctgggtggc

SEQ ID NO: 459541 - DNA, 120 bp, Artificial Sequence
  ENSG00000157240_18 (sequence is synthesized)
ccagagctgcaagagctacgctatcccctgccctcacctccaggcgggcggaggcgccccgccgcacccgcccatgagcccggacttcacggtcttcatgattaagtaccttatgacgct

SEQ ID NO: 459542 - DNA, 120 bp, Artificial Sequence
  ENSG00000157240_19 (sequence is synthesized)
gatcgtgggcatcacgtcgggcttctggatctggtccggcaagaccctcaactcctggaggaagttctacacgaggctcaccaacagcaaacaaggggagactacagtctgagacccggg

SEQ ID NO: 459543 - DNA, 120 bp, Artificial Sequence
  ENSG00000157240_20 (sequence is synthesized)
gctcagcccatgcccaggcctcggccggggcgcagcgatcccccaaagccagcgccgtggagttcgtgccaatcctgacatctcgaggtttcctcactagacaactctctttcgcaggct

SEQ ID NO: 459544 - DNA, 120 bp, Artificial Sequence
  ENSG00000157240_21 (sequence is synthesized)
cctttgaacaactcagctcctgcaaaagcttccgtccctgaggcaaaaggacacgagggcccgactgccagagggaggatggacagacctcttgccctcacactctggtaccaggactgt

SEQ ID NO: 459545 - DNA, 120 bp, Artificial Sequence
  ENSG00000157240_22 (sequence is synthesized)
tcgcttttatgattgtaaatagcctgtgtaagatttttgtaagtatatttgtatttaaatgacgaccgatcacgcgtttttctttttcaaaagtttttaattatttagggcggtttaacc

SEQ ID NO: 459546 - DNA, 120 bp, Artificial Sequence
  ENSG00000157240_23 (sequence is synthesized)
atttgaggcttttccttcttgcccttttcggagtattgcaaaggagctaaaactggtgtgcaaccgcacagcgctcctggtcgtcctcgcgcgcctctccctaccacgggtgctcgggac

SEQ ID NO: 459547 - DNA, 120 bp, Artificial Sequence
  ENSG00000157240_24 (sequence is synthesized)
ggctgggcgccagctccggggcgagttcagcactgcggggtgcgactagggctgcgctgccagggtcacttcccgcctcctccttttgccccctccccctccttctgtcccctccctttc

SEQ ID NO: 459548 - DNA, 120 bp, Artificial Sequence
  ENSG00000157240_25 (sequence is synthesized)
tttcctggcttgaggtaggggctcttaaggtacagaactccacaaaccttccaaatctggaggagggcccccatacattacaattcctcccttgctcggcggtggattgcgaaggcccgt

SEQ ID NO: 459549 - DNA, 120 bp, Artificial Sequence
  ENSG00000157240_26 (sequence is synthesized)
cccttcgacttcctgaagctggatttttaactgtccagaactttcctccaacttcatgggggcccacgggtgtgggcgctggcagtctcagcctccctccacggtcaccttcaacgccca

SEQ ID NO: 459550 - DNA, 120 bp, Artificial Sequence
  ENSG00000157240_27 (sequence is synthesized)
gacactcccttctcccaccttagttggttacagggtgagtgagataaccaatgccaaactttttgaagtctaatttttgaggggtgagctcatttcattctctagtgtctaaaacctggt

SEQ ID NO: 459551 - DNA, 120 bp, Artificial Sequence
  ENSG00000157240_28 (sequence is synthesized)
atgaagctttgtgtgggttggaagagactgaagatatgggttataaaatgttaattctaattgcatacggatgcctggcaaccttgcctttgagaatgagacagcctgcgcttagatttt

SEQ ID NO: 459552 - DNA, 120 bp, Artificial Sequence
  ENSG00000157240_29 (sequence is synthesized)
accggtctgtaaaatggaaatgttgaggtcacctggaaagctttgttaaggagttgatgtttgctttccttaacaagacagcaaaacgtaaacagaaattgaaaacttgaaggatatttc

SEQ ID NO: 459553 - DNA, 120 bp, Artificial Sequence
  ENSG00000157240_30 (sequence is synthesized)
agtgtcatggacttcctcaaaatgaagtgctattttcttatttttaatcaaataactagacatatatcagaaactttaaaatgtaaaagttgtacactttcaacattttattacgattat

SEQ ID NO: 459554 - DNA, 120 bp, Artificial Sequence
  ENSG00000157240_31 (sequence is synthesized)
tattcagcagcacattctgaggggggaacaattcacaccaccaataataacctggtaagatttcaggaggtaaagaaggtggaataattgacggggagatagcgcctgaaataaacaaaa

SEQ ID NO: 459555 - DNA, 120 bp, Artificial Sequence
  ENSG00000157240_32 (sequence is synthesized)
tatgggcatgcatgctaaagggaaaatgtgtgcaggtctactgcattaaatcctgtgtgctcctcttttggatttacagaaatgtgtcaaatgtaaatctttcaaagccatttaaaaata

SEQ ID NO: 459556 - DNA, 120 bp, Artificial Sequence
  ENSG00000157240_33 (sequence is synthesized)
ttcactttagttctctgtgaagaagaggagaaaagcaatcctcctgattgtattgttttaaactttaagaatttatcaaaatgccggtacttaggacctaaatttatctatgtctgtcat

SEQ ID NO: 459557 - DNA, 120 bp, Artificial Sequence
  ENSG00000157240_34 (sequence is synthesized)
tctgtcatacgctaaaatgatattggtctttgaatttggtatacatttattctgttcactatcacaaaatcatctatatttatagaggaatagaagtttatatatatataataccatatt

SEQ ID NO: 459558 - DNA, 120 bp, Artificial Sequence
  ENSG00000157240_35 (sequence is synthesized)
cacaaataaaaaattcaaagttttgtacaaaattatatggattttgtgcctgaaaataatagagcttgagctgtctgaactattttacattttatggtgtctcatagccaatcccacagt

SEQ ID NO: 459559 - DNA, 120 bp, Artificial Sequence
  ENSG00000157240_36 (sequence is synthesized)
gtaaaaattcaggaattcaatgaaaaaagtctacccttaaaccctcagatcagtctttccaaagaattactctgtttgcattgttgtgattgacatttgtgaagtcccaagaaaagatct

SEQ ID NO: 459560 - DNA, 120 bp, Artificial Sequence
  ENSG00000157240_37 (sequence is synthesized)
gttttcatgacagtagaaaatagaagtttgcaaattatttctttactcaaagaggattaaaagagaactctaattttaatattaaagctttcttttctttcagggaataaatttacatga

SEQ ID NO: 459561 - DNA, 120 bp, Artificial Sequence
  ENSG00000157240_38 (sequence is synthesized)
ctttttatattatggaggtttatttttaaatcatcacctttctcatattttttagaggtattgtcttatctcttccataatcttggatattacaaaaccctaaataggcaatcaataaat

SEQ ID NO: 459562 - DNA, 120 bp, Artificial Sequence
  ENSG00000157240_39 (sequence is synthesized)
ggttaactggctatgtgttcataaacattttaaacagcaattgggtttgtaaggctgttttgttgtttgcttctgaagacccctttttttaatcgttcaaggaaccttctccagataaat

SEQ ID NO: 459563 - DNA, 120 bp, Artificial Sequence
  ENSG00000157240_40 (sequence is synthesized)
tggtctactcttagtcagaatttatgcatgggtgtatatatgtgtatatatagataagtatacacataagtatatatgcattaatttttataaaatagagatgtaaagtttacttacatt

SEQ ID NO: 459564 - DNA, 120 bp, Artificial Sequence
  ENSG00000157240_41 (sequence is synthesized)
cttacatttcataatatggaaatatggttatgagaaatggaaaatgctagatggaaaacctcaaatacctttacaggttaaaaatatctttactaaattttcccatgaaaacattttgtg

SEQ ID NO: 459565 - DNA, 120 bp, Artificial Sequence
  ENSG00000157240_42 (sequence is synthesized)
ataaaatgacaagggactaaaatgaagatcattgatacaatagagttactttccttgttacaatgcaattgtcttataagtcattattcattttaaggaaaatcaaaaaaattagatctt

SEQ ID NO: 459566 - DNA, 120 bp, Artificial Sequence
  ENSG00000157240_43 (sequence is synthesized)
actaaaaatgtagcatttgattttaagtagcaagatgcaattttgtgttccctttttctttgttacattaacataatatagtagatagagggtttattgtatagacatacacaaaaaaat

SEQ ID NO: 459567 - DNA, 120 bp, Artificial Sequence
  ENSG00000157240_44 (sequence is synthesized)
agtattcttaggccaaattcacacatatctcctcactaagtagttcaattagataatttctggaaaaacatgtttttgacattaattgctatccaaaactatattttaaagcagtcttat

SEQ ID NO: 459568 - DNA, 120 bp, Artificial Sequence
  ENSG00000157240_45 (sequence is synthesized)
tggaggtgtccttaacatgatgtaactataaatttgatgcagaaaggttttacatgctgtggttaaatagctttagaagacatttttaagtcaccaccagcctttattcttagaaaacaa

SEQ ID NO: 459569 - DNA, 120 bp, Artificial Sequence
  ENSG00000157240_46 (sequence is synthesized)
tttattctaaatgatgatgcatatagaaaaccagtgtattcttttatttcttttaatactggtggcaaaataggacgtgtctggaaaaccataaggctacttgggatactgtcccattag

SEQ ID NO: 459570 - DNA, 120 bp, Artificial Sequence
  ENSG00000157240_47 (sequence is synthesized)
cattgctgtttccatgacaaaccctattttcagatggtttgatttgcctattttttttttaaaccagctataaattggggtcaatttcccccctcacagtgtacttaatttagcttttgg

SEQ ID NO: 459571 - DNA, 120 bp, Artificial Sequence
  ENSG00000157240_48 (sequence is synthesized)
agtaaatatataagtagtatgaaagacttctgaagctcttctttctaaaaaagcagttttccacttaagctttgtggggacagagagtcatatttttaatttcagagccagccagtgtca

SEQ ID NO: 459572 - DNA, 120 bp, Artificial Sequence
  ENSG00000157240_49 (sequence is synthesized)
aacacgtgcaaaagagccgggccggattttttcagcttgtcctatggtagtcacttgtcagcctgagtttactggcctggtccttttgtctccactgtaagtactgaagccttctggtgt

SEQ ID NO: 459573 - DNA, 120 bp, Artificial Sequence
  ENSG00000157240_50 (sequence is synthesized)
agttgtatcaccttaatgtccagcatttaactaggaaaggagactacaatgaagagttggtggccaattaagaaaaataatagactacatcataaatcatttcaggacttgagtggccgc

SEQ ID NO: 459574 - DNA, 120 bp, Artificial Sequence
  ENSG00000157240_51 (sequence is synthesized)
agatcactgtccctgatagcatgtttcaaccttggtatacattttttttaagatgcatatttactgtgtgtgcttttgctttctaatccatctattgactattggccacaatttatataa

SEQ ID NO: 459575 - DNA, 120 bp, Artificial Sequence
  ENSG00000157240_52 (sequence is synthesized)
tgcacatgcaattaattgaaacctgtgtcatggcattggatatctctgattcatttcttattataatagtctgtgtaactggggcctgagagattagaagcaaaatgtagtcgtacgtat

SEQ ID NO: 459576 - DNA, 120 bp, Artificial Sequence
  ENSG00000157240_53 (sequence is synthesized)
gtctagaggtggacgctggtgatattgtcattgaatactttgcagaatacactaatgtcaaaggcttgcaggattaatgtgtaggaaccaacataagacatggaatatatataagaatta

SEQ ID NO: 459577 - DNA, 120 bp, Artificial Sequence
  ENSG00000157240_54 (sequence is synthesized)
tctagttacatgactaaaaaggaattgcaatactatcttaaattgaaggcttttatttcaatgtccttacatttaaaatgggatcttacaagggaagtaccaaaaaagtaaagtttattt

SEQ ID NO: 459578 - DNA, 120 bp, Artificial Sequence
  ENSG00000157240_55 (sequence is synthesized)
tgatgactctcaagatatatatgtttgttttgaatgttggcagatgccaatagcccttaacatttgaaaaatggtacttgaacatcaattatgtctcagagttcccttaaactttttggg

SEQ ID NO: 459579 - DNA, 120 bp, Artificial Sequence
  ENSG00000157240_56 (sequence is synthesized)
cttaaatatttttattcattttggtcatacctttgacaatggatatgttaaactttaacaattatagtgacaaaacagcttgcttagaacctggaaattaaaacacaatttctagagtaa

SEQ ID NO: 459580 - DNA, 120 bp, Artificial Sequence
  ENSG00000157259_0 (sequence is synthesized)
ctttcccagtcctgcttcccagtgcctcgggccagggaatcctggcctccgcctgcggagccggcggaacccgcttcccgcctccacggggcagcgccagcggcctggtcctttcaccgg

SEQ ID NO: 459581 - DNA, 120 bp, Artificial Sequence
  ENSG00000157259_1 (sequence is synthesized)
cagctccgtgccgacgctctcaccgctcttcctatcgccgggagtggcgggccgaccagggggcggccgggctaccgtccgccattcccgtgtctctgcgcccgcgggggccgcccgagc

SEQ ID NO: 459582 - DNA, 120 bp, Artificial Sequence
  ENSG00000157259_2 (sequence is synthesized)
cggccaccatgccgctgggcctgaagcccacctgcagcgtatgcaagaccacgtcgtcctccatgtggaagaagggagcgcagggggagatcctctgccatcattgcactggccggggcg

SEQ ID NO: 459583 - DNA, 120 bp, Artificial Sequence
  ENSG00000157259_3 (sequence is synthesized)
ggcggctggagggactgggggcagcggcggcggcggcttcggcgcggcgaccttcgccagcacctccgccacccctccgcagagcaacgggggcgggggcggcaagcagagtaagcagga

SEQ ID NO: 459584 - DNA, 120 bp, Artificial Sequence
  ENSG00000157259_4 (sequence is synthesized)
gcgggggcggcaagcagagtaagcaggaaattcacaggaggtctgctcggctcagaaacactaaatacaaatctgctccggctgctgaaaagaaagtctccaccaaaggaaaagggagaa

SEQ ID NO: 459585 - DNA, 120 bp, Artificial Sequence
  ENSG00000157259_5 (sequence is synthesized)
gacatatatttaaattgaaaaatcccatcaaagctcctgagtcagtttccactataatcactgcagaatcaatcttctacaagggagtatattaccaaattggtgatgttgtttctgtga

SEQ ID NO: 459586 - DNA, 120 bp, Artificial Sequence
  ENSG00000157259_6 (sequence is synthesized)
ttgatgaacaagatggaaagccctactatgctcaaatcagaggttttatccaggaccagtattgcgagaagagtgcagcactgacgtggctcattcctaccctctctagccccagagacc

SEQ ID NO: 459587 - DNA, 120 bp, Artificial Sequence
  ENSG00000157259_7 (sequence is synthesized)
aatttgatcccgcctcctatatcatagggccagaggaagatcttccaaggaagatggaatacttggaatttgtttgtcatgcaccttctgagtatttcaagtcacggtcatcaccatttc

SEQ ID NO: 459588 - DNA, 120 bp, Artificial Sequence
  ENSG00000157259_8 (sequence is synthesized)
ccacagttcccaccagaccagagaagggctacatatggactcatgttgggcctactcctgcaataacaattaaggaatcagttgccaaccatttgtagttcacaaattaaaactgggttt

SEQ ID NO: 459589 - DNA, 120 bp, Artificial Sequence
  ENSG00000157259_9 (sequence is synthesized)
ccaggcctggtgtggtggctcacgcctgtagccccagctattgcaccactgctctccaagctgggcaatggagtcagattctctttcttaaaaaaccacaaaaaaactggatttccagtt

SEQ ID NO: 459590 - DNA, 120 bp, Artificial Sequence
  ENSG00000157259_10 (sequence is synthesized)
ctctaatattcttagtaccacaagatatgtcataggtatctttaaatgaaattcttagctggaaaagtgactaaaaagtttttctcctgctacctagtaataaacaaatcattgtttatt

SEQ ID NO: 459591 - DNA, 120 bp, Artificial Sequence
  ENSG00000157259_11 (sequence is synthesized)
taaacaaatcattgtttattactggtcacttagaaaattaaaagggatagggccaggcacagtggcttatgcctgtaattgcagcacttttagaggccgaggcaggcggatcacctgagg

SEQ ID NO: 459592 - DNA, 120 bp, Artificial Sequence
  ENSG00000157259_12 (sequence is synthesized)
ctgcactccagcctgggtggacagagcaagactccgtctcaaagaaacaaacaaaaaattaaaagggatagaatataatgaaatatattttgaacttaaattatattctatatgtgtatc

SEQ ID NO: 459593 - DNA, 120 bp, Artificial Sequence
  ENSG00000157259_13 (sequence is synthesized)
ttcctaggcaaaagctgtaatttccagagagaccattaggaacaggtagtatctatttttctccattatttatttctagaaactcataaaatggattgtatttttctataagaacaaaat

SEQ ID NO: 459594 - DNA, 120 bp, Artificial Sequence
  ENSG00000157259_14 (sequence is synthesized)
attaattaaggtatagatgactgaccaagggcttaatcaaataaaatgactaacagcatctatcataaagccacacaagccttatgttctcatctcaaaaatgctgtgacagctttttgg

SEQ ID NO: 459595 - DNA, 120 bp, Artificial Sequence
  ENSG00000157259_15 (sequence is synthesized)
ctgtgacagctttttggctgctttaaccataagaaaaatgattggtggatgattttattagcccaggcttttaaaaactttcatctaggccacgtgcggtggctcatgcctgtaatcccg

SEQ ID NO: 459596 - DNA, 120 bp, Artificial Sequence
  ENSG00000157259_16 (sequence is synthesized)
attttaatttaatccttctgtagaaacaggcattcagaaccattccattgatcttaataaagctgctctttactgtttctagtcaaaaatgagacttcgatcaaaccataagattttata

SEQ ID NO: 459597 - DNA, 120 bp, Artificial Sequence
  ENSG00000157259_17 (sequence is synthesized)
ctgcagatagtcagcttcaccaaagccgcagaggaaacatgtcgagatcaggcttcctgcttgatagtctcttgactaccattaaaacgaatattgggaggtcatgaaagtcattggtag

SEQ ID NO: 459598 - DNA, 120 bp, Artificial Sequence
  ENSG00000157259_18 (sequence is synthesized)
gccattagcattgatatctttaaaacatctaccctaaaccatctgctatggacccataataagaggcctgttgtatatgaaattgtctagaattcaggtgcaggtctttgccggttaagt

SEQ ID NO: 459599 - DNA, 120 bp, Artificial Sequence
  ENSG00000157259_19 (sequence is synthesized)
aagggagcaacacgtaaaatgggagaggagtggggtgtactcacttgcctcctcttttgtcctgatttaaccagcatttttcaaccctgggaaaatttgcagaatctaagttgattgtaa

SEQ ID NO: 459600 - DNA, 120 bp, Artificial Sequence
  ENSG00000157259_20 (sequence is synthesized)
tgattttgagctgcagcagctttaactcttaccctttttccacatagttatggtgtttgagttggaaagaaacaactataggtagctacacgtacataattatctctttattcacaaagg

SEQ ID NO: 459601 - DNA, 120 bp, Artificial Sequence
  ENSG00000157259_21 (sequence is synthesized)
gtatagtaaaattgattgtaaataactttctaagtgccaatattcaaaacttttggattaaaatgtatttttcaccgtgcatttactttggatgtatttatttcatttaaacaatttaaa

SEQ ID NO: 459602 - DNA, 120 bp, Artificial Sequence
  ENSG00000157259_22 (sequence is synthesized)
tggatgtatttatttcatttaaacaatttaaatggggctctttaaccaaaaatggtatttaaaaccaaaacagtatcgtacttagaatttggagtagaggccgggcacagtggctcacgc

SEQ ID NO: 459603 - DNA, 60 bp, Artificial Sequence
  ENSG00000157259_23 (sequence is synthesized)
tcgagaccagcctggtcaataatcccagctagtctactcgggaggctgaggcaggagaat

SEQ ID NO: 459604 - DNA, 70 bp, Artificial Sequence
  ENSG00000157259_24 (sequence is synthesized)
gcggcatgactccatctccaaaaaaaaaaaaaaaagattttggagtagattcatcattaataagtaacag

SEQ ID NO: 459605 - DNA, 120 bp, Artificial Sequence
  ENSG00000157259_25 (sequence is synthesized)
aaaaagattttggagtagattcatcattaataagtaacagattttaggaaaatcaaaaaatggctaataaaatgaacacaatgtaaaacatttattaaaatgtagacttttaaaaatcta

SEQ ID NO: 459606 - DNA, 120 bp, Artificial Sequence
  ENSG00000157259_26 (sequence is synthesized)
taaattgatcatctgtttataaattggcagatggttgtgtaccatcttttaaaataaagattgaatttcacccagtgtgatggttcccattgcttatatttctcctgctgaggccggacc

SEQ ID NO: 459607 - DNA, 120 bp, Artificial Sequence
  ENSG00000157259_27 (sequence is synthesized)
tgatatggccctggtctgtgttcccagccttgtttcctcattaccactaaaatctttcccctgtatgcccgcccaatttttctggctctgagtccttgttcatactgttctctccaattc

SEQ ID NO: 459608 - DNA, 120 bp, Artificial Sequence
  ENSG00000157259_28 (sequence is synthesized)
taccttccaaaggcctttcttaacaccttcggattctttctttgagaactttccagattcccatgcctttttggaatcaatctctatcctattgtcatcacatttaagtttctacttcca

SEQ ID NO: 459609 - DNA, 120 bp, Artificial Sequence
  ENSG00000157259_29 (sequence is synthesized)
tcatcctcactcctatccctttggtcctgggatgacagggatgctgtgttttatttactcatctttgtaacttccacataacctaaccccggttcttgcttatgggagatgctgattgta

SEQ ID NO: 459610 - DNA, 120 bp, Artificial Sequence
  ENSG00000157259_30 (sequence is synthesized)
gggtctgagttagatactgttaactaaaatgcttgttgatattttagttattaattcatattaactttggctgaaacttttaaattctattgtgaatagtcaagtaaaatttagattgtt

SEQ ID NO: 459611 - DNA, 120 bp, Artificial Sequence
  ENSG00000157259_31 (sequence is synthesized)
acattctgggttagtattagattgtttttaagattgttttaaacaagatgtttttaagatgagttttaaatagttctcttaacacaaataaagcttaatatgagtatttgaaggaaatta

SEQ ID NO: 459612 - DNA, 89 bp, Artificial Sequence
  ENSG00000157259_32 (sequence is synthesized)
caaagtattttcttattcagactagttgcttctaatttatttaagatttttatagttaagtgaggcatttgttgattacacaaaacatg

SEQ ID NO: 459613 - DNA, 120 bp, Artificial Sequence
  ENSG00000157259_33 (sequence is synthesized)
ttatagttaagtgaggcatttgttgattacacaaaacatgttattgatatttgtatcacatatgcacatttttttccttttaagtatggtataccgtgttctcagcaattatttcattat

SEQ ID NO: 459614 - DNA, 120 bp, Artificial Sequence
  ENSG00000157259_34 (sequence is synthesized)
cgtttctctgcaacctttcttcaatggtactaagcaagacacatctggggaggcctactttctatgttgtggcataaaagtatgtattgaagctttagtagagatctcaaaaatggttgg

SEQ ID NO: 459615 - DNA, 120 bp, Artificial Sequence
  ENSG00000157259_35 (sequence is synthesized)
atggtagcaaattactaagaactctcaaagtttctaaagccttagtttcagcttgctagaaaacctatgttgagtattatggctagttccatagttgagttgggaaatgtctttgaggag

SEQ ID NO: 459616 - DNA, 120 bp, Artificial Sequence
  ENSG00000157259_36 (sequence is synthesized)
acactttttcactttgtattcatctgtacattttctgttacttgcattctgtcatgctcaggctattagagcaggtacatttttataactggaatgtttatgtgtagtgaagctctgaga

SEQ ID NO: 459617 - DNA, 120 bp, Artificial Sequence
  ENSG00000157259_37 (sequence is synthesized)
ggactttgcattagatctcagcagcataatcagaaggttgtcctttgtctcagcaatttttaagctaatagtagcagaaattgcagtggaaatagactgctttgccacaacattcagaaa

SEQ ID NO: 459618 - DNA, 120 bp, Artificial Sequence
  ENSG00000157259_38 (sequence is synthesized)
atcatttatctttttattgcagttcttgtcaccaaacaatacattttagtacttctcaaattgcagaactctcatagggctgggaaaatgcctgtagacacatacatactatgaatgtgc

SEQ ID NO: 459619 - DNA, 120 bp, Artificial Sequence
  ENSG00000157259_39 (sequence is synthesized)
tccgtgtaacaagtgtaccactctagtggtgggaggggttattgataataggggaggatgtgcatgtgtgggggcaggaagtatatgggaaatctctctacttctgctcaattttgctgt

SEQ ID NO: 459620 - DNA, 120 bp, Artificial Sequence
  ENSG00000157259_40 (sequence is synthesized)
aaacctaaaacctctgtaaaaaataaagtctattttttaaaaagtggggatggtattacggcaatataaaatcaaaatactttatgaacaaatcttttctccagatgtaaactgtcatat

SEQ ID NO: 459621 - DNA, 120 bp, Artificial Sequence
  ENSG00000157259_41 (sequence is synthesized)
atgcaccctcgtatgtgtatgtataattttcattcaaacgtgaaacaactttagaattggcaccaaacatataaacactgatacattagactatctcgaacaccttttactgaccacttt

SEQ ID NO: 459622 - DNA, 120 bp, Artificial Sequence
  ENSG00000157259_42 (sequence is synthesized)
atcttttattttttcccctggaaaatataaaatatgggtttaaaagaaacatcaaccttgagcccattttttggggttctctatggaaaggaagaggagagattatggttcttgatatgg

SEQ ID NO: 459623 - DNA, 120 bp, Artificial Sequence
  ENSG00000157259_43 (sequence is synthesized)
gacatatatttaaattgaaaaatgtaagatatttgtggacagtgccttttactgtaatgacgttgtgtgtatcctgccactgccttcatttctcaccattgaacttggactctgcccttg

SEQ ID NO: 459624 - DNA, 120 bp, Artificial Sequence
  ENSG00000157259_44 (sequence is synthesized)
gtagcccttccttagtattctggggaatggtccagattccccaaaagggaatgagctctgttgcaggaggctcactgtttataaagttaataatactctttcctttttgttttttagctt

SEQ ID NO: 459625 - DNA, 80 bp, Artificial Sequence
  ENSG00000157303_0 (sequence is synthesized)
actcccctggcagaccccgccaagcgcctcggagcgcgcaggatgcgctgggcggccgccaccctccgtggcaaggcgag

SEQ ID NO: 459626 - DNA, 120 bp, Artificial Sequence
  ENSG00000157303_1 (sequence is synthesized)
aaccgcacaggcacgtgcgctaagctgcggctacccccgcaagcaaccttccaagtccttcgtggcaatggtgcttccgtggggaccgtgctcatgttccgctgcccctccaaccaccag

SEQ ID NO: 459627 - DNA, 120 bp, Artificial Sequence
  ENSG00000157303_2 (sequence is synthesized)
atggtggggtctgggctcctcacctgcacctggaaggggagcatcgctgagtggtcttcagggtccccagtgtgcaaactggtgccaccacacgagacctttggcttcaaggtggccgtg

SEQ ID NO: 459628 - DNA, 120 bp, Artificial Sequence
  ENSG00000157303_3 (sequence is synthesized)
atcgcctccattgtgagctgtgccatcatcctgctcatgtccatggccttcctcacctgctgcctcctcaagtgcgtgaagaagagcaagcggcggcgctccaacaggtcagcccagctg

SEQ ID NO: 459629 - DNA, 120 bp, Artificial Sequence
  ENSG00000157303_4 (sequence is synthesized)
cacagaccatggtgagagcaccagcaagctggccagtgtgacccgcagcgtggacaaggaccctgggatccccagagctctaagcctcagtggctcctccagctcaccccaagcccaggt

SEQ ID NO: 459630 - DNA, 120 bp, Artificial Sequence
  ENSG00000157303_5 (sequence is synthesized)
gatggtgcacatggcaaaccccagacagcccctgcctgcctctgggctggccacaggaatgccacaacagcccgcagcatatgccctagggtgaccacgcagtgaggctggtgcccatgc

SEQ ID NO: 459631 - DNA, 120 bp, Artificial Sequence
  ENSG00000157303_6 (sequence is synthesized)
tccacactgggaggccaggctgaccccaccagccagtcagctacaactccacatcaactccacatgcgcccagctcgagactgatgagtggaatcagcttccaggtgtagggaccccttg

SEQ ID NO: 459632 - DNA, 120 bp, Artificial Sequence
  ENSG00000157303_7 (sequence is synthesized)
aggggccgagctgacatccaaggctgaggaccccagtggggagtgttctgttccggcatatcctggccgtaacgatttttatagttatggactacttgaaaccactactgagggtaattt

SEQ ID NO: 459633 - DNA, 120 bp, Artificial Sequence
  ENSG00000157303_8 (sequence is synthesized)
actagctgtggcctcccactaactagcattcctttaaagagactgggaaatgttttaagcaaatctagttttgtataataaaataagaaaatagcaataaacttcttttcagcaactaca

SEQ ID NO: 459634 - DNA, 120 bp, Artificial Sequence
  ENSG00000157315_0 (sequence is synthesized)
agttcacctgcagaggaggctccagaaagcggcatgtcccctttgctctttggggctgggctggtcgttctgaatctagtgacgtctgccaggagccagaagacagaacctctaagtggc

SEQ ID NO: 459635 - DNA, 120 bp, Artificial Sequence
  ENSG00000157315_1 (sequence is synthesized)
tctggggaccagccactcttccgtggagctgatcgatatgactttgccatcatgatacctccaggaggcacggaatgcttttggcaatttgcccaccagactggatacttctatttcagt

SEQ ID NO: 459636 - DNA, 120 bp, Artificial Sequence
  ENSG00000157315_2 (sequence is synthesized)
tacgaggttcagcggacagtggggatgtcacatgaccggcatgttgctgccacggcacataacccacagggatttctcatagacacctcccagggtgttcggggccagattaacttctct

SEQ ID NO: 459637 - DNA, 120 bp, Artificial Sequence
  ENSG00000157315_3 (sequence is synthesized)
tcaactttggggtcttctatgaggggcctgagactgatcacaaacagaaggaaagaaaacaactgaatgatactctggatgcaattgaggacggcacacaaaaggtgcagaacaatatct

SEQ ID NO: 459638 - DNA, 120 bp, Artificial Sequence
  ENSG00000157315_4 (sequence is synthesized)
ttcacatgtggcgatactacaactttgcccggatgaggaaaatggctgactttttccttatccaatcaaactataactacgtgaactggtggtcgacagcccagagccttgttattattc

SEQ ID NO: 459639 - DNA, 120 bp, Artificial Sequence
  ENSG00000157315_5 (sequence is synthesized)
tttctgggatcctgcaactgtatttcttgaagcgtctcttcaatgttccaacaactacagatacaaagaagccaagatgctaagctaaggtgactatagcaccctggctgttttcttctg

SEQ ID NO: 459640 - DNA, 120 bp, Artificial Sequence
  ENSG00000157315_6 (sequence is synthesized)
gggcttagtcgaatcagctttgtaatgttatgggacaaaaatcaattatctcattaatgttttagtctgctgcacacatctaaaaaagcaaaatggcaataaaatcataacagtgaaaaa

SEQ ID NO: 459641 - DNA, 120 bp, Artificial Sequence
  ENSG00000157315_7 (sequence is synthesized)
gtcactgtacacaccgccttggaggcaatcactccaggagagctgctttcatgcactatgcatctattttttttttttgtctttcctaatttcaagttcaagatggtgtccctagcttta

SEQ ID NO: 459642 - DNA, 120 bp, Artificial Sequence
  ENSG00000157315_8 (sequence is synthesized)
attgtatacaaggaccaggcaaacaccatgctcttaacttcaactcaatctgttgagcaggagttccttaatacaagatgtgggaattatatgttaaagagaaaacattgtttgccacta

SEQ ID NO: 459643 - DNA, 120 bp, Artificial Sequence
  ENSG00000157315_9 (sequence is synthesized)
cccagtatggaaagaacgagttactaaaatttggccaaatataataagtaatatttagtataagtttaacataaggtccgtgtcttccatgtcaaaaacgggatctttgtactttctaag

SEQ ID NO: 459644 - DNA, 120 bp, Artificial Sequence
  ENSG00000157322_0 (sequence is synthesized)
ctcttttcatgccagcgccaacaggaggctgtctggacacactgattactcactcaccagcctccctcttttgtccaccagcccagcctgactcctggagattgtgaatagctccatcca

SEQ ID NO: 459645 - DNA, 120 bp, Artificial Sequence
  ENSG00000157322_1 (sequence is synthesized)
gcctgagaaacaagccgggtggctgagccaggctgtgcacggagcgcctgacgggcccaacagacccatgctgcatccagagacctcccctggccgggggcatctcctggctgtgctcct

SEQ ID NO: 459646 - DNA, 120 bp, Artificial Sequence
  ENSG00000157322_2 (sequence is synthesized)
ggccctccttggcaccgcctgggcagaggtgtggccaccccagctgcaggagcaggctccgatggccggagccctgaacaggaaggagagtttcttgctcctctccctgcacaaccgcct

SEQ ID NO: 459647 - DNA, 120 bp, Artificial Sequence
  ENSG00000157322_3 (sequence is synthesized)
gcgcagctgggtccagccccctgcggctgacatgcggaggctggactggagtgacagcctggcccagctggctcaagccagggcagccctctgtggaaccccaaccccgagcctggcgtc

SEQ ID NO: 459648 - DNA, 120 bp, Artificial Sequence
  ENSG00000157322_4 (sequence is synthesized)
cggcctgtggcgcaccctgcaagtgggctggaacatgcagctgctacccgcgggcttggtgtcctttgtcgaagtggtcagcctatggtttgcagaggggcagcggtacagccacgcggc

SEQ ID NO: 459649 - DNA, 120 bp, Artificial Sequence
  ENSG00000157322_5 (sequence is synthesized)
aggagagtgtgctcgcaacgccacctgcacccactacacgcagctcgtgtgggccacctcaagccagctgggctgtgggcggcacctgtgctctgcaggccaggcagcgatagaagcctt

SEQ ID NO: 459650 - DNA, 120 bp, Artificial Sequence
  ENSG00000157322_6 (sequence is synthesized)
tgtctgtgcctactcccccagaggcaactgggaggtcaacgggaagacaatcgtcccctataagaagggtgcctggtgttcgctctgcacagccagtgtctcaggctgcttcaaagcctg

SEQ ID NO: 459651 - DNA, 120 bp, Artificial Sequence
  ENSG00000157322_7 (sequence is synthesized)
ggaccatgcaggggggctctgtgaggtccccaggaatccttgtcgcatgagctgccagaaccatggacgtctcaacatcagcacctgccactgccactgtccccctggctacacgggcag

SEQ ID NO: 459652 - DNA, 120 bp, Artificial Sequence
  ENSG00000157322_8 (sequence is synthesized)
tttcccttccacacctgtgacctgaggatcgacggagactgcttcatggtgtcttcagaggcagacacctattacagagccaggatgaaatgtcagaggaaaggcggggtgctggcccag

SEQ ID NO: 459653 - DNA, 120 bp, Artificial Sequence
  ENSG00000157322_9 (sequence is synthesized)
atcaagagccagaaagtgcaggacatcctcgccttctatctgggccgcctggagaccaccaacgaggtgattgacagtgacttcgagaccaggaacttctggatcgggctcacctacaag

SEQ ID NO: 459654 - DNA, 120 bp, Artificial Sequence
  ENSG00000157322_10 (sequence is synthesized)
accgccaaggactccttccgctgggccacaggggagcaccaggccttcaccagttttgcctttgggcagcctgacaaccacgggtttggcaactgcgtggagctgcaggcttcagctgcc

SEQ ID NO: 459655 - DNA, 120 bp, Artificial Sequence
  ENSG00000157322_11 (sequence is synthesized)
ttcaactggaacgaccagcgctgcaaaacccgaaaccgttacatctgccagtttgcccaggagcacatctcccggtggggcccagggtcctgaggcctgaccacatggctccctcgcctg

SEQ ID NO: 459656 - DNA, 120 bp, Artificial Sequence
  ENSG00000157322_12 (sequence is synthesized)
ccctgggagcaccggctctgcttacctgtctgcccacctgtctggaacaagggccaggttaagatcacatgcctcatgtccaaagaggtctcagaccttgcacaatgccagaagttgggc

SEQ ID NO: 459657 - DNA, 120 bp, Artificial Sequence
  ENSG00000157322_13 (sequence is synthesized)
agagagaggcagggaggccagtgagggccagggagtgagtgttagaagaagctggggcccttcgcctgcttttgattgggaagatgggcttcaattagatggcgaaggagaggacaccgc

SEQ ID NO: 459658 - DNA, 120 bp, Artificial Sequence
  ENSG00000157322_14 (sequence is synthesized)
cagtggtccaaaaaggctgctctcttccacctggcccagaccctgtggggcagcggagcttccctgtggcatgaaccccacagggtattaaattatgaatcagctgaacctgtgcatgct

SEQ ID NO: 459659 - DNA, 120 bp, Artificial Sequence
  ENSG00000157322_15 (sequence is synthesized)
catttcaaagggaaattcagatgatccaggatgaccctggagagaccagagggggcctgaggcttcactgcagcggcctccacccacctattccctttcctggtcaccttcatggtccag

SEQ ID NO: 459660 - DNA, 120 bp, Artificial Sequence
  ENSG00000157322_16 (sequence is synthesized)
gacactctctggaagttctgggtctccccaagaagaggaagaccagactctgcctcagtgaggagctgttctcatggctggggcccaggcaggcagggtattaatagaagttgctctgaa

SEQ ID NO: 459661 - DNA, 120 bp, Artificial Sequence
  ENSG00000157322_17 (sequence is synthesized)
cgaggtcctcctcccagggcccggggctggggagcggaagccatcagtgggctcggaggacactgtcccagccaggacacggccatcggtcactaatctgcagcactggaatgtccgcgg

SEQ ID NO: 459662 - DNA, 120 bp, Artificial Sequence
  ENSG00000157322_18 (sequence is synthesized)
cggccatcggtcactaatctgcagcactggaatgtccgcgggccaatcagcggggtctctgggggctccccaagggtgctaataatcccacaatgattagcaggggccgcggcccagcct

SEQ ID NO: 459663 - DNA, 120 bp, Artificial Sequence
  ENSG00000157322_19 (sequence is synthesized)
ccccagggcccccaaagagccagctcctctcaagaccccccttcaatggggcatcagctcccaggagcccgctgtgtgcctctctttccaactcattcagtgacaacacgttgagatctt

SEQ ID NO: 459664 - DNA, 120 bp, Artificial Sequence
  ENSG00000157322_20 (sequence is synthesized)
gaaactggccacagcatggatatttacaccaaagaaattggcaaatgctataaaccatggatttttttttttcttttgagagagagcaagctcaatattccaacttaccagctcgctcct

SEQ ID NO: 459665 - DNA, 120 bp, Artificial Sequence
  ENSG00000157322_21 (sequence is synthesized)
gaccctcaccacccactcttttggagcaggtggccagaggaaggggcaccctgagcttagctccccggcagggcaggaaagggcagggattctgaagtccacacacaaactcaggctccc

SEQ ID NO: 459666 - DNA, 120 bp, Artificial Sequence
  ENSG00000157322_22 (sequence is synthesized)
cagtcacccctagcttcctaggaaccccctagggcctcaagtgagggtcttaatgcagggaccctggagtgagaggtggttccttccacgtctctgacctcaccctattcatcagcataa

SEQ ID NO: 459667 - DNA, 120 bp, Artificial Sequence
  ENSG00000157322_23 (sequence is synthesized)
agcaggggtcgtggactccaaggctcatagaagccaggaggtcacttattgacctgaggggccaaggtcaagaccaacctccatctaagggagttccagccactggttgccttgcaggaa

SEQ ID NO: 459668 - DNA, 120 bp, Artificial Sequence
  ENSG00000157322_24 (sequence is synthesized)
actggcaactctcgaaaccacaattaattactggggttggcaatcaacttggatatatttaagacactgtgcaggtgaaacagaacctcctcaggggccagaccttgcctgggcttgtgg

SEQ ID NO: 459669 - DNA, 120 bp, Artificial Sequence
  ENSG00000157322_25 (sequence is synthesized)
gctgctggtcgcgcccccgtgcacagggagaagagaagcagacgggagcagaagggacccctgctcttggaagggaggctgtgcgggctgggggtgatgatagcccggccagcacacaca

SEQ ID NO: 459670 - DNA, 120 bp, Artificial Sequence
  ENSG00000157322_26 (sequence is synthesized)
gggtatggcgagtaaggggttgtgatgccccaccctgctgcaggaaccctgggccatggcggctgccagcagatggcaagggtgtgttgagggcctggagcccagagcggggccagctgc

SEQ ID NO: 459671 - DNA, 120 bp, Artificial Sequence
  ENSG00000157322_27 (sequence is synthesized)
tcaccccctttcccgggaagggcccaggtagggagcacatgggggctgccagcgctgggaagaggggccagaaaggcagctggcagcagactccagggtctgagtgggccaaccttgact

SEQ ID NO: 459672 - DNA, 120 bp, Artificial Sequence
  ENSG00000157322_28 (sequence is synthesized)
cacccagctcctcagacatcacccacaaggggttatcactatcccagtttacagcagaagaaatgaaggcagagagattgagtaacttgcataagatcatacagctgggagtcaaaccca

SEQ ID NO: 459673 - DNA, 120 bp, Artificial Sequence
  ENSG00000157322_29 (sequence is synthesized)
aggctccgatggccggaggtaagggacacctggtgaggaggtaggtggaggcaccattacgagctctgaggagtgggtgctaggagacttctggaagcccggtcccaggcctgagcccca

SEQ ID NO: 459674 - DNA, 120 bp, Artificial Sequence
  ENSG00000157322_30 (sequence is synthesized)
ggccgtgcgggtggtttaatgaggaagccctgggacagcccgggggcggtgaggggtggatgctggactggggaggaaggaggaggaaggaggaccagggctggggtcaaggaggaacgc

SEQ ID NO: 459675 - DNA, 120 bp, Artificial Sequence
  ENSG00000157322_31 (sequence is synthesized)
cgaggggcgctgtggctggggcctggagaaatccgtggcccggaggagccccagacaggggcctgcgggagccagggctggcccctacacccagcccgcaccgctgttccctcccgccac

SEQ ID NO: 459676 - DNA, 120 bp, Artificial Sequence
  ENSG00000157322_32 (sequence is synthesized)
cccaaccccagcactcagcccacgcctgctgtacctggtctctctctcagcctcgctccattgctatgccccacgtcccctgcacccaccacactcctctcccatcttgttttccaaggg

SEQ ID NO: 459677 - DNA, 120 bp, Artificial Sequence
  ENSG00000157322_33 (sequence is synthesized)
cagggacacatgcttattctgccgtgtgttgggttcaggtccccccatcctcgggctgcctgaccttctctccccaccccagccctgaacaggaaggagagtttcttgctcctctccctg

SEQ ID NO: 459678 - DNA, 120 bp, Artificial Sequence
  ENSG00000157322_34 (sequence is synthesized)
cacaaccgcctgcgcagctgggtccagccccctgcggctgacatgcggaggctggtgagtacccgacccagctgggctctgccaggggggtggccggaggcgcggaccccagagggcggc

SEQ ID NO: 459679 - DNA, 120 bp, Artificial Sequence
  ENSG00000157322_35 (sequence is synthesized)
tcaggaggccacgcctgtccaggtgcccttccacttgaccagggtgggcaggcacagccagccaccttgtccctgagggacggaggccctggttgctgggggtctctgcaatttcttaac

SEQ ID NO: 459680 - DNA, 120 bp, Artificial Sequence
  ENSG00000157322_36 (sequence is synthesized)
cccccaccctcagttcaggaggtcgggccccttggctcccactcgcctgaagggcaggaccttgggccttccctggcatcttgttgtcacagagaccaggagccacaggaggagccggat

SEQ ID NO: 459681 - DNA, 120 bp, Artificial Sequence
  ENSG00000157322_37 (sequence is synthesized)
cccctcctccagggaaggggagcttcacgaggagccctgcaggatgggcggccgggccagggagggagaaggtcgtgctgggctggggaggggcttctgtgcggcaaggacccagcgcct

SEQ ID NO: 459682 - DNA, 120 bp, Artificial Sequence
  ENSG00000157322_38 (sequence is synthesized)
cgtccacattttccacattttcagcaggggccgggggtcgggggtatagaattccccaccagcccggctggggctgcggggttgggactgtcatctggaggctcagaaacgctgcccccc

SEQ ID NO: 459683 - DNA, 120 bp, Artificial Sequence
  ENSG00000157322_39 (sequence is synthesized)
cttgtctgggaccccagcagccccagcccatgttagcaggccagggagccagggcagggtggtgggggcgggagggttccccatggctgcttcccatgaactcctccaaggcaggcggcc

SEQ ID NO: 459684 - DNA, 120 bp, Artificial Sequence
  ENSG00000157322_40 (sequence is synthesized)
acagtggcgaccttgagcactctagggtcagtttcccaggaggtgggggtggggtggctaaatgcggggggtcgcttctccccgattcccagccctgagtggctctgcctctcctcaggc

SEQ ID NO: 459685 - DNA, 120 bp, Artificial Sequence
  ENSG00000157322_41 (sequence is synthesized)
tcagaccctgggcaaccaggggtgctcccagctgtgacctccgtggttgggtactcctgcctgggaccccaggaggggctgcggtggtcgttggctggcagctggcaccctttccagggc

SEQ ID NO: 459686 - DNA, 120 bp, Artificial Sequence
  ENSG00000157322_42 (sequence is synthesized)
ccttttgtcaaagtcctagaaaacttcatttccgtaaaggtgcaaatggagctccatggctcagcctccctcgtggcccggccccgagcaccctccgggcctctagggctccagggcacc

SEQ ID NO: 459687 - DNA, 120 bp, Artificial Sequence
  ENSG00000157322_43 (sequence is synthesized)
ccctctttggacacagtggagactgaaggtcttgtgggggtggagggctgctgagggaccccggggagcccccagctcctggccccagccttcatcagaggtaaaaccccgatggacatt

SEQ ID NO: 459688 - DNA, 120 bp, Artificial Sequence
  ENSG00000157322_44 (sequence is synthesized)
agtgcaggatgaagttggcttggggtgcagccccgaggggcccccctccctgcatccactcagtgcttgtgagtcctatcctgcaggcacctccctgctccgtttacagatgagctcagg

SEQ ID NO: 459689 - DNA, 120 bp, Artificial Sequence
  ENSG00000157322_45 (sequence is synthesized)
tacagatgagctcagggagtctcgggagatcaggggactgcaccaagtcacccaggggtggtgattgccaggcccacttgtttaagaagagggagggggctgggcacggtggctcacacc

SEQ ID NO: 459690 - DNA, 73 bp, Artificial Sequence
  ENSG00000157322_46 (sequence is synthesized)
tgtaatcccagcactctgggaggctgacacaagcagatcacctaaggtcagcagtttgagaccagcaatggcc

SEQ ID NO: 459691 - DNA, 120 bp, Artificial Sequence
  ENSG00000157326_0 (sequence is synthesized)
atacttgctggtctgatccatgcacaaggcggggctgctaggcctctgtgcccgggcttggaattcggtgcggatggccagctccgggatgacccgccgggacccgctcgcaaataaggt

SEQ ID NO: 459692 - DNA, 120 bp, Artificial Sequence
  ENSG00000157326_1 (sequence is synthesized)
ggccctggtaacggcctccaccgacgggatcggcttcgccatcgcccggcgtttggcccaggacggggcccatgtggtcgtcagcagccggaagcagcagaatgtggaccaggcggtggc

SEQ ID NO: 459693 - DNA, 120 bp, Artificial Sequence
  ENSG00000157326_2 (sequence is synthesized)
cacgctgcagggggaggggctgagcgtgacgggcaccgtgtgccatgtggggaaggcggaggaccgggagcggctggtggccacggctgtgaagcttcatggaggtatcgatatcctagt

SEQ ID NO: 459694 - DNA, 120 bp, Artificial Sequence
  ENSG00000157326_3 (sequence is synthesized)
ctccaatgctgctgtcaaccctttctttggaagcataatggatgtcactgaggaggtgtgggacaagactctggacattaatgtgaaggccccagccctgatgacaaaggcagtggtgcc

SEQ ID NO: 459695 - DNA, 120 bp, Artificial Sequence
  ENSG00000157326_4 (sequence is synthesized)
agaaatggagaaacgaggaggcggctcagtggtgatcgtgtcttccatagcagccttcagtccatctcctggcttcagtccttacaatgtcagtaaaacagccttgctgggcctgaccaa

SEQ ID NO: 459696 - DNA, 120 bp, Artificial Sequence
  ENSG00000157326_5 (sequence is synthesized)
aagactagcttcagcaggatgctctggatggacaaggaaaaagaggaaagcatgaaagaaaccctgcggataagaaggttaggcgagccagaggattgtgctggcatcgtgtctttcctg

SEQ ID NO: 459697 - DNA, 120 bp, Artificial Sequence
  ENSG00000157326_6 (sequence is synthesized)
tgctctgaagatgccagctacatcactggggaaacagtggtggtgggtggaggaaccccgtcccgcctctgaggaccgggagacagcccacaggccagagttgggctctagctcctggtg

SEQ ID NO: 459698 - DNA, 120 bp, Artificial Sequence
  ENSG00000157326_7 (sequence is synthesized)
ctgttcccgcattcacccactggcctttcccacctctgctcaccttactgttcacctcatcaaatcagttctgccctgtgaaaagatccagccttccctgccgtcaaggtggcgtcttac

SEQ ID NO: 459699 - DNA, 120 bp, Artificial Sequence
  ENSG00000157326_8 (sequence is synthesized)
tcgggatttctgctgttgttgtggccttgggtaaaggcctcccctgagaacacaggacaggcctgctgacaaggctgagtctaccttggcaaagaccaagatattttttcccgggccact

SEQ ID NO: 459700 - DNA, 120 bp, Artificial Sequence
  ENSG00000157326_9 (sequence is synthesized)
ggggaatctgaggggtgatgggagagaaggaacctggagtggaaggagcagagttgcaaattaacaacttgcaaatgaggtgcaaataaaatgcagatgattgcgcggctttgaatccaa

SEQ ID NO: 459701 - DNA, 120 bp, Artificial Sequence
  ENSG00000157326_10 (sequence is synthesized)
aggaacattagggtgaactgcctagcacctggacttatcaagactagcttcagcaggatgctctggatggacaaggaaaaagaggaaagcatgaaagaaaccctgcggataagaagacca

SEQ ID NO: 459702 - DNA, 120 bp, Artificial Sequence
  ENSG00000157326_11 (sequence is synthesized)
aaggtaaactgtcatgagggcaagggcactaagagacatgaagatgggaaggtctggtccctagcagcccacagcccgctgtctcagtcccacagataacacaggcaggctctcttctgc

SEQ ID NO: 459703 - DNA, 120 bp, Artificial Sequence
  ENSG00000157326_12 (sequence is synthesized)
aaacactatcactacagtgacctgagcaagaagtcagcttccctttcaaaaggtaaacacagagacatcggggtttcagcagtgcagagctctgggagaagccctgagtcctctctccac

SEQ ID NO: 459704 - DNA, 120 bp, Artificial Sequence
  ENSG00000157326_13 (sequence is synthesized)
ctgggggattgcctccacctctgagcatccatggagaccagggaccataaccaaaaccatgctttgttagtccccttgaataatgacacatgtttacaaaactcaggttgatgatctaca

SEQ ID NO: 459705 - DNA, 120 bp, Artificial Sequence
  ENSG00000157326_14 (sequence is synthesized)
atccaaatgaaaagaatgaagagttttactaagccccaaactccccttgcctaaggagttactttcttccccagtgagctgggtgaactgttcaagcacctttgtcgggctccctttcct

SEQ ID NO: 459706 - DNA, 120 bp, Artificial Sequence
  ENSG00000157326_15 (sequence is synthesized)
ctaagttccctgcctctctctaccttctggcttcaaggacaaatgccagtaatgcctaactctgtactcgtccagacatcccaaatcttcccaaagccattctgatgtgagacatgagct

SEQ ID NO: 459707 - DNA, 120 bp, Artificial Sequence
  ENSG00000157326_16 (sequence is synthesized)
gcaggcctggttcataactcattaataagtgaggggattgtcaacctagagcaccaatgaatgatctagcccatgtagctcaatactggattcacattagaatcacctggggagcttttt

SEQ ID NO: 459708 - DNA, 120 bp, Artificial Sequence
  ENSG00000157326_17 (sequence is synthesized)
aaactgcaggtgctcaggccccacccactcccagagattctttttaattggtccaaggtaggacttgaccatctgggcttttgtttttctttgtcttttcttttcttttcttttttggtt

SEQ ID NO: 459709 - DNA, 120 bp, Artificial Sequence
  ENSG00000157330_0 (sequence is synthesized)
agtcaacagtagagaatccaagatagatcaactctccctaaaggctgacagtgaactcttggggccgttttattctctgaggttagcaaggagtcatctactagccattcaggaggccag

SEQ ID NO: 459710 - DNA, 120 bp, Artificial Sequence
  ENSG00000157330_1 (sequence is synthesized)
ctgggaagacaaaataggcaccccaaactcagcaacttcataacaccttcctctccccgcctgaagccttaaactgcatcaagtcaaagaaacctggggcaaatccttaacatgtttttg

SEQ ID NO: 459711 - DNA, 120 bp, Artificial Sequence
  ENSG00000157330_2 (sequence is synthesized)
actgcagtaaatccacagccactctctactccgagctggcagattgagaccaagtattcaacgaaagtgctcactggaaattggatggaagagaggagaaagttcaccagagacactgac

SEQ ID NO: 459712 - DNA, 120 bp, Artificial Sequence
  ENSG00000157330_3 (sequence is synthesized)
aagacaccccaatccatttacagaaaagaatacatccccttcccagaccacagaccagaccagatctccaggtggtatgggaagaggaaagttgaggggctaccttacaaacacctgatc

SEQ ID NO: 459713 - DNA, 120 bp, Artificial Sequence
  ENSG00000157330_4 (sequence is synthesized)
acccaccaccaggagcccccacatcgctacctgatcagcacctatgacgaccattacaaccggcatggttacaacccggggctgcctccactccgcacttggaatggacagaagttgctg

SEQ ID NO: 459714 - DNA, 120 bp, Artificial Sequence
  ENSG00000157330_5 (sequence is synthesized)
tggctgccagagaagtctgactttccccttcttgctccccctacaaactatggactctatgagcagctcaagcagagacagctcacacccaaggctggcctgaagcagagcacttatact

SEQ ID NO: 459715 - DNA, 120 bp, Artificial Sequence
  ENSG00000157330_6 (sequence is synthesized)
tcatcctaccccagaccaccgttgtgcgctatgtcctggagggagcatgcggtcccggtccctccccatcgcctgcatcctctcccacacttctgagagctgccaccccaggagcagctc

SEQ ID NO: 459716 - DNA, 120 bp, Artificial Sequence
  ENSG00000157330_7 (sequence is synthesized)
agatagaatcagctggagaccacagcatcactggacttgccagacaacaagtggcgcagataaactcagagtacgagatctggcccgtcaaaggtgctctcagaatcatcatctgcattt

SEQ ID NO: 459717 - DNA, 120 bp, Artificial Sequence
  ENSG00000157330_8 (sequence is synthesized)
ggcggtacctgtcccccctcaaaacccacaggttcctttcttttccatccaacaattaaagatctttgacactattgcagggctatgtacgtgcacaagacagattcagactgtcagaga

SEQ ID NO: 459718 - DNA, 120 bp, Artificial Sequence
  ENSG00000157330_9 (sequence is synthesized)
aaacaggaagggcccttaagttctaccctgttgtttcacaagaggggaaactgaggcccggagaggtaatgtgacttgctgaagagtctactcccatggaggaaatgaatctgatgatga

SEQ ID NO: 459719 - DNA, 120 bp, Artificial Sequence
  ENSG00000157330_10 (sequence is synthesized)
aacccatcatgaaaactccacagaatgactgaatgtggttcccaggagggcagtgctgcagagctggcaatggggaaggaccccagcttgtctgtcattgccaaggcagaggaaggcgtg

SEQ ID NO: 459720 - DNA, 120 bp, Artificial Sequence
  ENSG00000157330_11 (sequence is synthesized)
attgccaaggcagaggaaggcgtgctctggccccacggggctcagaagaaggggaaaacacatggcatttcctttgtctctgagctcgcaaatctttgtgtttttttttttgtttttttt

SEQ ID NO: 459721 - DNA, 120 bp, Artificial Sequence
  ENSG00000157330_12 (sequence is synthesized)
gggtggatctcctagcagaagaactcaggcatggtcctcgcccaggacaggggtccacaagtgtgcatgctcagtgctcgcacagagctgcctctttgaagaaattccagcagacacctt

SEQ ID NO: 459722 - DNA, 120 bp, Artificial Sequence
  ENSG00000157330_13 (sequence is synthesized)
tggccctttgcatgcttggctcatgggcacaggtgtgttttgtcagtgattttgtactgcacaccaataatatgactcccagtatgggagcctgagtctctgccattgttttcacaggat

SEQ ID NO: 459723 - DNA, 120 bp, Artificial Sequence
  ENSG00000157330_14 (sequence is synthesized)
acctgctggcctcaggccacctaccttagggtcactttggcacctactaagttccttccttagtcatccaagtgtccatgtaaggacgctgtcttccatcccaactgaaagtcagagcct

SEQ ID NO: 459724 - DNA, 120 bp, Artificial Sequence
  ENSG00000157330_15 (sequence is synthesized)
gacacaggctaagtcctctatgtttgttggatgagtgaatgacaggagttgaacaaatgagttgaatgaatgaatgacaggaggaggagccagggggtgcagaaaggttgcacctacctt

SEQ ID NO: 459725 - DNA, 120 bp, Artificial Sequence
  ENSG00000157330_16 (sequence is synthesized)
agggtcactttggcacctactaagttccttccttagtcatccaagtgtccatgtaaggacgctgtcttccatcccaactgaaagtcagagcctgacacaggctaagtcctctatgtttgt

SEQ ID NO: 459726 - DNA, 120 bp, Artificial Sequence
  ENSG00000157330_17 (sequence is synthesized)
tggatgagtggatgacaggagttgaacaaatgagttgaatgaatgaatgacaggaggaggagccagggggtgcagaaaggttgctgcaggagacagctgtgggatggagtggagctggct

SEQ ID NO: 459727 - DNA, 120 bp, Artificial Sequence
  ENSG00000157330_18 (sequence is synthesized)
gtcctcacacctccaacatccagcctttctattgagcatccattgagccatgtctgggccaggccctgacctcacagagcctcagtccagcagtcagggaggagcatgaggtaaatggct

SEQ ID NO: 459728 - DNA, 120 bp, Artificial Sequence
  ENSG00000157330_19 (sequence is synthesized)
gcaggacagagaggtgctgcagctggaggccctgggggacagcgatggattgcgaggagtgagggagacccaggatatgctaagcaggggcgtctaatcttttggcttccctgggctaca

SEQ ID NO: 459729 - DNA, 120 bp, Artificial Sequence
  ENSG00000157330_20 (sequence is synthesized)
agtttgtgactagcctgtctagcacagtgaaacactgtctctattaaaaatacaaaaatgagctggcatagtggttcatgcctggaatcccagctactccagaggctgaggcagcagaat

SEQ ID NO: 459730 - DNA, 79 bp, Artificial Sequence
  ENSG00000157330_21 (sequence is synthesized)
ggtccaaaaacaacaacaacaacaacaaacttacactaacggtagctgatgagctaaaaaaaaaatcgcgtaaaaaaac

SEQ ID NO: 459731 - DNA, 120 bp, Artificial Sequence
  ENSG00000157330_22 (sequence is synthesized)
cggtagctgatgagctaaaaaaaaaatcgcgtaaaaaaaccccataatgttttaagtaagtttacaaatttatgttgggccacattcagcctgcaggcggagggttggacaagcttgtgc

SEQ ID NO: 459732 - DNA, 120 bp, Artificial Sequence
  ENSG00000157330_23 (sequence is synthesized)
gaaagtaaaggatgtcatgagagcaacgggcaggggttgacggatgatgaatgaagacctggcctgcctaggtagggccagggagaatcaggtaggtcaaggccagaaagctgagggaga

SEQ ID NO: 459733 - DNA, 120 bp, Artificial Sequence
  ENSG00000157330_24 (sequence is synthesized)
ttacccagctgaagggacaggttgggagggaagagagggtggcttgggccatgggggcaacacgtttgaagtctctgacttgggaagaagctgagcaaattccttaaaagtccagaaaga

SEQ ID NO: 459734 - DNA, 120 bp, Artificial Sequence
  ENSG00000157330_25 (sequence is synthesized)
ccatgcattggtctcctattgctgctggaacaaaataccacaaactcagtgccctaaagcaacacatgtttatttgacagttcttattataaatgtgaataaatgcacatttattcagaa

SEQ ID NO: 459735 - DNA, 120 bp, Artificial Sequence
  ENSG00000157330_26 (sequence is synthesized)
cttaacatgtttttgactgcagtaaatccacagccactctctactccgagctggcagattgagaccaagtattcaacgaaagtgctcactggaaattggatggaagagaggagaaagggg

SEQ ID NO: 459736 - DNA, 120 bp, Artificial Sequence
  ENSG00000157330_27 (sequence is synthesized)
agactcacatgtctcagtttcaaaacttactaaaagctacagtaatcaagacagtgtgatactggcatacagatagatacatagacctatagaacaaaagagagagcctagaaataaaca

SEQ ID NO: 459737 - DNA, 120 bp, Artificial Sequence
  ENSG00000157330_28 (sequence is synthesized)
tatatacggtcaaatgactcttgacgaggatgctaaacctgttcaatgggggaaaggacaatttcttcaataaatggtgttcagtaaagtggatatctaggtgcgaaaaaataaagttag

SEQ ID NO: 459738 - DNA, 120 bp, Artificial Sequence
  ENSG00000157330_29 (sequence is synthesized)
acccttccctaattccatatacaaaactgaactcaaagtggatcagagacctggatgagacctaaaactacaaaactcttagaagaaaacatagggggctgggtgtggtgactcatgcca

SEQ ID NO: 459739 - DNA, 120 bp, Artificial Sequence
  ENSG00000157330_30 (sequence is synthesized)
gtaatcccagcactttgagagtctgaggcaggaggactgcttgaggaaaggagttcaagaccagcctaggcgacacagcaagaacttatctctctctttttttttaattaaataaaaaaa

SEQ ID NO: 459740 - DNA, 120 bp, Artificial Sequence
  ENSG00000157335_0 (sequence is synthesized)
cggccatcggtcactaatctgcagcactggaatgtccgcaggccaatcagcggggtctctgggggctccccaagggtgctaataatcccacaatgattagcaggggccgcggcccagcct

SEQ ID NO: 459741 - DNA, 120 bp, Artificial Sequence
  ENSG00000157335_1 (sequence is synthesized)
gactcctggagattgtgaatagctccatccagcctgagaaacaagccgggtggctgagccaggctgtgcacggagtgcctgacgggcccaacagacccatgctgcatccagagacctccc

SEQ ID NO: 459742 - DNA, 120 bp, Artificial Sequence
  ENSG00000157335_2 (sequence is synthesized)
ctggccgggggcatctcctggctgtgctcctggccctccttggcaccgcctgggcagaggtgtggccaccccagctgcaggagcaggctccgatggccggagccctgaacaggaaggaga

SEQ ID NO: 459743 - DNA, 120 bp, Artificial Sequence
  ENSG00000157335_3 (sequence is synthesized)
gtttcttgctcctctccctgcacaaccgcctgcgcagctgggtccagccccctgcggctgacatgcggaggctggactggagtgacagcctggcccaactggctcaagccagggcagccc

SEQ ID NO: 459744 - DNA, 120 bp, Artificial Sequence
  ENSG00000157335_4 (sequence is synthesized)
tctgtggaatcccaaccccgagcctggcgtccggcctgtggcgcaccctgcaagtgggctggaacatgcagctgctgcccgcgggcttggcgtcctttgttgaagtggtcagcctatggt

SEQ ID NO: 459745 - DNA, 120 bp, Artificial Sequence
  ENSG00000157335_5 (sequence is synthesized)
ttgcagaggggcagcggtacagccacgcggcaggagagtgtgctcgcaacgccacctgcacccactacacgcagctcgtgtgggccacctcaagccagctgggctgtgggcggcacctgt

SEQ ID NO: 459746 - DNA, 120 bp, Artificial Sequence
  ENSG00000157335_6 (sequence is synthesized)
gctctgcaggccaggcagcgatagaagcctttgtctgtgcctactcccccagaggcaactgggaggtcaacgggaagacaatcgtcccctataagaagggtgcctggtgttcgctctgca

SEQ ID NO: 459747 - DNA, 120 bp, Artificial Sequence
  ENSG00000157335_7 (sequence is synthesized)
cagccagtgtctcaggctgcttcaaagcctgggaccatgcaggggggctctgtgaggtccccaggaatccttgtcgcatgagctgccagaaccatggacgtctcaacatcagcacctgcc

SEQ ID NO: 459748 - DNA, 120 bp, Artificial Sequence
  ENSG00000157335_8 (sequence is synthesized)
cctggctacacgggcagatactgccaagtgaggtgcagcctgcagtgtgtgcacggccggttccgggaggaggagtgctcgtgcgtctgtgacatcggctacgggggagcccagtgtgcc

SEQ ID NO: 459749 - DNA, 120 bp, Artificial Sequence
  ENSG00000157335_9 (sequence is synthesized)
accaaggtgcattttcccttccacacctgtgacctgaggatcgacggagactgcttcatggtgtcttcagaggcagacacctattacagagccaggatgaaatgtcagaggaaaggcggg

SEQ ID NO: 459750 - DNA, 120 bp, Artificial Sequence
  ENSG00000157335_10 (sequence is synthesized)
gtgctggcccagatcaagagccagaaagtgcaggacatcctcgccttctatctgggccgcctggagaccaccaacgaggtgattgacagtgacttcgagaccaggaacttctggatcggg

SEQ ID NO: 459751 - DNA, 120 bp, Artificial Sequence
  ENSG00000157335_11 (sequence is synthesized)
ctcacctacaagaccgccaaggactccttccgctgggccacaggggagcaccaggccttcaccagttttgcctttgggcagcctgacaaccacgggtttggcaactgcgtggagctgcag

SEQ ID NO: 459752 - DNA, 120 bp, Artificial Sequence
  ENSG00000157335_12 (sequence is synthesized)
gcttcagctgccttcaactggaacaaccagcgctgcaaaacccgaaaccgttacatctgccagtttgcccaggagcacatctcccggtggggcccagggtcctgaggcctgaccacatgg

SEQ ID NO: 459753 - DNA, 120 bp, Artificial Sequence
  ENSG00000157335_13 (sequence is synthesized)
ctccctcgcctgccctgggagcaccggctctgcttacctgtccgcccacctgtctggaacaagggccaggttaagaccacatgcctcatgtccaaagaggtctcagaccttgcacaatgc

SEQ ID NO: 459754 - DNA, 120 bp, Artificial Sequence
  ENSG00000157335_14 (sequence is synthesized)
cagaagttgggcagagagaggcagggaggccagtgagggccagggagtgagtgttagaagaagctggggcccttcgcctgcttttgattgggaagatgggcttcaattagatggcaaagg

SEQ ID NO: 459755 - DNA, 120 bp, Artificial Sequence
  ENSG00000157335_15 (sequence is synthesized)
agaggacaccgccagtggtccaaaaaggctgctctcttccacctggcccagaccctgtggggcagcggagcttccctgtggcatgaaccccacagggtattaaattatgaatcagctgaa

SEQ ID NO: 459756 - DNA, 120 bp, Artificial Sequence
  ENSG00000157335_16 (sequence is synthesized)
cgaggtcctcctcccagggcccggggctggggagcggaagccatcagtgggctcggaggacactgtcccagccaggacacggccatcggtcactaatctgcagcactggaatgtccgcag

SEQ ID NO: 459757 - DNA, 120 bp, Artificial Sequence
  ENSG00000157335_17 (sequence is synthesized)
tctgcctgctgtcgggggcgggctggccaggccgaggccggagcaggcaggcatcccccggagttgtctcttttcatgccagcgccaacaggaggctgtctggacacactgattactcac

SEQ ID NO: 459758 - DNA, 120 bp, Artificial Sequence; identical to SEQ ID NO: 363462
  ENSG00000157335_18 (sequence is synthesized)

SEQ ID NO: 459759 - DNA, 120 bp, Artificial Sequence; identical to SEQ ID NO: 363463
  ENSG00000157335_19 (sequence is synthesized)

SEQ ID NO: 459760 - DNA, 120 bp, Artificial Sequence; identical to SEQ ID NO: 363464
  ENSG00000157335_20 (sequence is synthesized)

SEQ ID NO: 459761 - DNA, 120 bp, Artificial Sequence
  ENSG00000157335_21 (sequence is synthesized)
caacctccatctaagggagttccagccactggttgccttgcaggaatgcaaggtcagggtggccagagctcggggttgttcaagaaaaccagcaacccagacttccactggcaactctcg

SEQ ID NO: 459762 - DNA, 120 bp, Artificial Sequence
  ENSG00000157335_22 (sequence is synthesized)
aaaccacaattaattactggggttggcaatcaacttggatatatttaagacactgtgcaggtgaaacagaacctcctcaggggccagaccttgcctgggcttgtgggctgctggtcgcgc

SEQ ID NO: 459763 - DNA, 120 bp, Artificial Sequence
  ENSG00000157335_23 (sequence is synthesized)
ccccgtgcacagggagaagagaagcagacgggagcagaagggacccctgctcttggaagggaggctgtgcgggctgggggtgatgatagcccggccagcacacacacgtggcatcttagg

SEQ ID NO: 459764 - DNA, 120 bp, Artificial Sequence
  ENSG00000157335_24 (sequence is synthesized)
aggggttgtgatgccccaccctgctgcaggaaccctgggccatggcggctgccagcagatggcaagggtgtgttgagggcctggagcccagagcggggccagctgctcaccccctttccc

SEQ ID NO: 459765 - DNA, 120 bp, Artificial Sequence
  ENSG00000157335_25 (sequence is synthesized)
gggaagggcccaggtagggagcacatgggggctgccagcgctgggaagaggggccagaaaggcagctggcagcagactccagggtctgagtgggccaaccttgactaccccggcccaggg

SEQ ID NO: 459766 - DNA, 120 bp, Artificial Sequence; identical to SEQ ID NO: 459663
  ENSG00000157335_26 (sequence is synthesized)

SEQ ID NO: 459767 - DNA, 120 bp, Artificial Sequence; identical to SEQ ID NO: 459664
  ENSG00000157335_27 (sequence is synthesized)

SEQ ID NO: 459768 - DNA, 120 bp, Artificial Sequence; identical to SEQ ID NO: 459665
  ENSG00000157335_28 (sequence is synthesized)

SEQ ID NO: 459769 - DNA, 120 bp, Artificial Sequence; identical to SEQ ID NO: 459666
  ENSG00000157335_29 (sequence is synthesized)

SEQ ID NO: 459770 - DNA, 120 bp, Artificial Sequence
  ENSG00000157335_30 (sequence is synthesized)
aggctccgatggccggaggtaagggacacctggtgaggaggtaggtggaggcaccattatgagctctgaggagtgggtgctaggagacttctggaagcccggtcccaggcctgagcccca

SEQ ID NO: 459771 - DNA, 120 bp, Artificial Sequence; identical to SEQ ID NO: 459674
  ENSG00000157335_31 (sequence is synthesized)

SEQ ID NO: 459772 - DNA, 120 bp, Artificial Sequence
  ENSG00000157335_32 (sequence is synthesized)
cgaggagcgctgtggctggggcctggagaaatccgtggcccggaggagccccagacaggggcctgcgggagccagggctggcccctacacccagcccgcaccgctgttccctcccgccac

SEQ ID NO: 459773 - DNA, 120 bp, Artificial Sequence
  ENSG00000157335_33 (sequence is synthesized)
caaccccagcactcagcccacgcctgctgtacctggtctctctctcagcctcgctccattgctatgccccacgtcccctgcacccaccacactcctctcccatcttgttttccaagggca

SEQ ID NO: 459774 - DNA, 120 bp, Artificial Sequence
  ENSG00000157335_34 (sequence is synthesized)
gggacacatgcttattctgccgtgtgttgggttcaggtccccccatcctcgggctgcctgaccttctctctccaccccagccctgaacaggaaggagagtttcttgctcctctccctgca

SEQ ID NO: 459775 - DNA, 120 bp, Artificial Sequence
  ENSG00000157335_35 (sequence is synthesized)
ctgtccccctggctacacgggcagatactgccaaggtcacctcccaaactccaatatgcctcactctgcaatggggaccaaaccaaagacaccaggcgtgccagcaatcggaagccttgt

SEQ ID NO: 459776 - DNA, 120 bp, Artificial Sequence
  ENSG00000157335_36 (sequence is synthesized)
attttctgagaaacttggcccatggtgcagatctgctccagctcactctggtgggatcacgccagccacggccgggccacggcacatcatggcaacgtgctgcccacctgctacgccacc

SEQ ID NO: 459777 - DNA, 120 bp, Artificial Sequence
  ENSG00000157335_37 (sequence is synthesized)
tgtttttctagaggcggacgtgatcccagcaggactggagtcagcccagggcatcacgtgctctggtccccgcctgctttgactcctcctgcctcactccccccctggcctgtagtcacg

SEQ ID NO: 459778 - DNA, 120 bp, Artificial Sequence
  ENSG00000157343_0 (sequence is synthesized)
acctgggcccagggcaacactgaagacatgggcaagagcatcccccaatacctggggcaactggacatccgcaaaagcgtagtcagcctggccacaggcgccggggcgatctacctgctc

SEQ ID NO: 459779 - DNA, 120 bp, Artificial Sequence
  ENSG00000157343_1 (sequence is synthesized)
tacaaggccatcaaggctggcataaaatgcaaaccacccctctgtagcaactcacccatctgcatcgcccgtgagtgtccgggccctggggagagggctctgccccaggaggcacctgct

SEQ ID NO: 459780 - DNA, 120 bp, Artificial Sequence
  ENSG00000157343_2 (sequence is synthesized)
cccgaggcctctgctgtgggagggcccaaaggcctggcagtcgagcgagagcggcacgggcgggactcaggtgagctccggaggctcctcaactctttggagtgcaaacaggatgagtat

SEQ ID NO: 459781 - DNA, 120 bp, Artificial Sequence
  ENSG00000157343_3 (sequence is synthesized)
gccaagagcatgatcctgcacagtatcactcgctgtgtgtacttgctggaggctgaggcctctgcttgtactacggatgacatcgtgttgctgggctacatgctggatgacaaggacaac

SEQ ID NO: 459782 - DNA, 120 bp, Artificial Sequence
  ENSG00000157343_4 (sequence is synthesized)
actcgaactgatctccaccatctgggacacggaactgcacattgcgggcctcagactcctcaacaaccttccactgcccgactatgtgcatccacagctgcgacgggtgatgcctgcctt

SEQ ID NO: 459783 - DNA, 120 bp, Artificial Sequence
  ENSG00000157343_5 (sequence is synthesized)
gatggagatcctgcagtcagactacatcctggcacaggtgcaagccgtacgactgctgagctacctggcacagaagaatgaccttctctatgacattctcaactgccaggttcactccaa

SEQ ID NO: 459784 - DNA, 120 bp, Artificial Sequence
  ENSG00000157343_6 (sequence is synthesized)
cttcctaaacctgttccagcccacacagtcagggagtctcctgtatgaggtactggtgtttgctgagcggctgagtgagggccggaacgcaccccactaccacgtggtgaaatggcatta

SEQ ID NO: 459785 - DNA, 120 bp, Artificial Sequence
  ENSG00000157343_7 (sequence is synthesized)
caacgaacagtccctgcatgaatccctctttggggaagagtcccgactggcagaccgactacttgccctggtcatccaccctgaggaagatgttcagatccaggcctgcaaggtcattgt

SEQ ID NO: 459786 - DNA, 120 bp, Artificial Sequence
  ENSG00000157343_8 (sequence is synthesized)
cagcctgcagtatccccaggacttgagagcccggccctcctcctgccagcccagtcgttcctactttaaaaacacggaataaaattaaggagagccaataaatgagtataggagagaaac

SEQ ID NO: 459787 - DNA, 120 bp, Artificial Sequence
  ENSG00000157343_9 (sequence is synthesized)
ggagatttcattcagcataacctctgctccagagtgtggtacagcatgggcttatctctcaaaacacatccccacttctatgtttgggggactagctcccctcttctcttgctgcttttc

SEQ ID NO: 459788 - DNA, 120 bp, Artificial Sequence
  ENSG00000157349_0 (sequence is synthesized)
gataggaaagcttgctctgcccggggttgaggggtacgggtctgagggcaacagaatcgacagcctcaagtgggcaaagggtggccaaacaggagtggcctccgacgtcactgtggcgcg

SEQ ID NO: 459789 - DNA, 120 bp, Artificial Sequence
  ENSG00000157349_1 (sequence is synthesized)
ccgcttccggtctgcagccttgtagtggggctggagcagagcctgccgcgaacccccggagcccacgatccctcgtgccatccctcgaatccaccagcacgagcgtcccacccgcgcctg

SEQ ID NO: 459790 - DNA, 120 bp, Artificial Sequence
  ENSG00000157349_2 (sequence is synthesized)
ggaccatggccactgactcatgggccctggcggtggacgagcaggaagctgcggctgagtcgttgagcaacttgcatcttaaggaagagaaaatcaaaccagataccaatggtgctgttg

SEQ ID NO: 459791 - DNA, 120 bp, Artificial Sequence
  ENSG00000157349_3 (sequence is synthesized)
tcaagaccaatgccaatgcagagaagacagatgaagaagagaaagaggacagagctgcccagtccttactcaacaagctgatcagaagcaaccttgttgataacacaaaccaagtggaag

SEQ ID NO: 459792 - DNA, 120 bp, Artificial Sequence
  ENSG00000157349_4 (sequence is synthesized)
tcctgcagcgggatccaaactcccctctgtactcggtgaagtcttttgaagagcttcggctgaaaccacagcttctccaaggagtctatgccatgggtttcaatcgtccatccaagatac

SEQ ID NO: 459793 - DNA, 120 bp, Artificial Sequence
  ENSG00000157349_5 (sequence is synthesized)
aagagaacgcattgccactgatgcttgctgagcccccacagaacttaattgcccaatctcagtctggtactggtaaaacagctgccttcgtgctggccatgcttagccaagtagaacctg

SEQ ID NO: 459794 - DNA, 120 bp, Artificial Sequence
  ENSG00000157349_6 (sequence is synthesized)
caaacaaatacccccagtgtctatgtctctccccaacgtatgagctcgccctccaaacaggaaaagtgattgaacaaatgggcaaattttaccctgaactgaagctagcttatgctgttc

SEQ ID NO: 459795 - DNA, 120 bp, Artificial Sequence
  ENSG00000157349_7 (sequence is synthesized)
gaggcaataaattggaaagaggccagaagatcagtgagcagattgtcattggcacccctgggactgtgctggactggtgctccaagctcaagttcattgatcccaagaaaatcaaggtgt

SEQ ID NO: 459796 - DNA, 120 bp, Artificial Sequence
  ENSG00000157349_8 (sequence is synthesized)
ttgttctggatgaggctgatgtcatgatagccactcagggccaccaagatcagagcatccgcatccagaggatgctgcccaggaactgccagatgctgcttttctccgccacctttgaag

SEQ ID NO: 459797 - DNA, 120 bp, Artificial Sequence
  ENSG00000157349_9 (sequence is synthesized)
actctgtgtggaagtttgcccagaaagtggtcccagacccaaacgttatcaaactgaagcgtgaggaagagaccctggacaccatcaagcagtactatgtcctgtgcagcagcagagacg

SEQ ID NO: 459798 - DNA, 120 bp, Artificial Sequence
  ENSG00000157349_10 (sequence is synthesized)
agaagttccaggccttgtgtaacctctacggggccatcaccattgctcaagccatgatcttctgccatactcgcaaaacagctagttggctggcagcagagctctcaaaagaaggccacc

SEQ ID NO: 459799 - DNA, 120 bp, Artificial Sequence
  ENSG00000157349_11 (sequence is synthesized)
aggtggctctgctgagtggggagatgatggtggaacagagggctgcagtgattgagcgcttccgagagggcaaagagaaggttttggtgaccaccaacgtgtgtgcccgcggcattgatg

SEQ ID NO: 459800 - DNA, 120 bp, Artificial Sequence
  ENSG00000157349_12 (sequence is synthesized)
ttgaacaagtgtctgtcgtcatcaactttgatcttcccgtggacaaggacgggaatcctgacaatgagacctacctgcaccggatcgggcgcacgggccgctttggcaagaggggcctgg

SEQ ID NO: 459801 - DNA, 120 bp, Artificial Sequence
  ENSG00000157349_13 (sequence is synthesized)
cagtgaacatggtggacagcaagcacagcatgaacatcctgaacagaatccaggagcattttaataagaagatagaaagattggacacagatgatttggacgagattgagaaaatagcca

SEQ ID NO: 459802 - DNA, 120 bp, Artificial Sequence
  ENSG00000157349_14 (sequence is synthesized)
gccagccctggcactgcccctgcacaggagacaagtgcgttcagggcacaggccccgacatcaccccaaggacaacggcacaagtagagagaaactacctacctcacttcaaattatgtt

SEQ ID NO: 459803 - DNA, 120 bp, Artificial Sequence
  ENSG00000157349_15 (sequence is synthesized)
tggacttgacaaaaatgtatgcaaatgatgggggatggtagaaaaaaattatttacacaaccttggaagattaggcatgaatacacagagatttaccttttggaagtttcatcttttaat

SEQ ID NO: 459804 - DNA, 120 bp, Artificial Sequence
  ENSG00000157349_16 (sequence is synthesized)
ttggccagtgtttccttcatgctaatctagatgctgtggctgattacttgcccaggatctcctgtggcagcctctgcttgttctctggcttggagtggatggggcagcctccagctcctg

SEQ ID NO: 459805 - DNA, 120 bp, Artificial Sequence
  ENSG00000157349_17 (sequence is synthesized)
tggaagtaatggaatagtggtggaaagggaacacagagagggaggcttccagtaagataggtgtgtaagcccagccatcatgtttggaatggcatgaggcagcagaggaggcctgagagc

SEQ ID NO: 459806 - DNA, 120 bp, Artificial Sequence
  ENSG00000157349_18 (sequence is synthesized)
tgctgctttggacttgggggtgggacagctcatctgagtattgccagccccctgtcctagtgcccacagcagaagggaatttgttaaataagcatggaccaaaatgccaacctctcggtt

SEQ ID NO: 459807 - DNA, 120 bp, Artificial Sequence
  ENSG00000157349_19 (sequence is synthesized)
gtgtatatgggtttgtgtcacaggactgtgacctgttctcggtgggtgcagtctgtgtagagtgcacatctgattattggtgggtcctgtgcctgtgcttaagcaagtcctgtggagaag

SEQ ID NO: 459808 - DNA, 120 bp, Artificial Sequence
  ENSG00000157349_20 (sequence is synthesized)
tcatcatggagaattagtggtggccctagcgtgccacaaaacctggtctcatgagcatttgcaacatcccttttacatccttaatatccccttaccccacagtagccccaaacaaatgtg

SEQ ID NO: 459809 - DNA, 120 bp, Artificial Sequence
  ENSG00000157349_21 (sequence is synthesized)
atctgaggtttagatcctcagtgaaaattgtggtttcaagtcttcatggccagcctcaaggcagttctagatgtgatcagcagtagtcacaaattcttgttttgtctccacacccagaag

SEQ ID NO: 459810 - DNA, 120 bp, Artificial Sequence
  ENSG00000157349_22 (sequence is synthesized)
gcaagttttgtcagagctggggaataatttcagatatttgacatcttgattataaagggcttctgaacatctgtgtttactgcctttggaatacaaacaggtgcaactgagggactagct

SEQ ID NO: 459811 - DNA, 120 bp, Artificial Sequence
  ENSG00000157349_23 (sequence is synthesized)
acactaccaccatttatctgtccaaggcaagagtatcaccaaggcctttgctccagccttacttggcatctttgcgcaagatagtcagagcaaacaatagtaatggacacttctcacacc

SEQ ID NO: 459812 - DNA, 120 bp, Artificial Sequence
  ENSG00000157349_24 (sequence is synthesized)
tggccaaggctgttggtacccacgaaatgacagcaaagatgagaggaaactgaattgcaagagcaatatgaaaccccaaccaagaggagtactctgcagttctttggctttggtatagag

SEQ ID NO: 459813 - DNA, 120 bp, Artificial Sequence
  ENSG00000157349_25 (sequence is synthesized)
tggccactttctctaggacctggaagaagagtttgatggctaagaacgattgtgatcctaggtcttctttgtacgcatctccgtatttaggccagatctgcctcctgggaagggaagggg

SEQ ID NO: 459814 - DNA, 120 bp, Artificial Sequence
  ENSG00000157349_26 (sequence is synthesized)
ccaatgtcagcctccaggtgatttctttaatctgacattacaaagagaccaacagactgccaattctaccacattcccctggtgggtactcgactatgtagttttctctatgcttctggt

SEQ ID NO: 459815 - DNA, 120 bp, Artificial Sequence
  ENSG00000157349_27 (sequence is synthesized)
caactctgacacatcttggaattcttgtaataagaaaagaaatttttatacttttttctccttccctgagtcctgtggaccaaccctgaaatactaaaaacaagggcaataattaaagaa

SEQ ID NO: 459816 - DNA, 120 bp, Artificial Sequence
  ENSG00000157349_28 (sequence is synthesized)
aatgaggctccggcttggccagtgccaagagcagcggttgttggagtgtaactgccatgctcagccgcgatggctggggctgccgggcgcgtccaagatcgcgccctgcggcggtttccc

SEQ ID NO: 459817 - DNA, 120 bp, Artificial Sequence
  ENSG00000157349_29 (sequence is synthesized)
atgctcagccgcgatggctggggctgccgggcgcgtccaagatcgcgccctgcggcggtttcccatcaccctgcctgtgggcgacgtgagtatctgcgagggtagaagccagaccctttc

SEQ ID NO: 459818 - DNA, 120 bp, Artificial Sequence
  ENSG00000157349_30 (sequence is synthesized)
ctcccacgtttaggtgccttcctcgcccctactcctgggtagaggaataacaatatttctcgaggcttcggcccaaggtcttagccttgtgatctagaatccgccatctgtgaggtgctg

SEQ ID NO: 459819 - DNA, 120 bp, Artificial Sequence
  ENSG00000157349_31 (sequence is synthesized)
tgagccgtatgtgtcctattacaactccatttcattttagattttctatttttgaaaactattattattttcacaggccagcaaggtggcttatgcctataatcccagcaacctgagagg

SEQ ID NO: 459820 - DNA, 120 bp, Artificial Sequence
  ENSG00000157349_32 (sequence is synthesized)
caaggcaggaggatcgtttcaggccaggagttcaagaccagcctgggcgatgtagcaagaccctgtctcaacaaaaaaaaaaacgttataaacttggccaggcatggtggcatgcagctg

SEQ ID NO: 459821 - DNA, 82 bp, Artificial Sequence
  ENSG00000157349_33 (sequence is synthesized)
tcgtccatccaagatacaagagaacgcattgccactgatgcttgctgagccatattttagggagaggccgaggcaggcagat

SEQ ID NO: 459822 - DNA, 120 bp, Artificial Sequence
  ENSG00000157349_34 (sequence is synthesized)
gcccccggctcccggaggtcgacattttggtttccataggcaaagtcctaacaccacaattgacatagttaaaaaggggagacggtaacgtgtttggtagaggttacatatcttgctata

SEQ ID NO: 459823 - DNA, 120 bp, Artificial Sequence
  ENSG00000157349_35 (sequence is synthesized)
gttgtttattttagttgctgagtgatacacagccctcaaagagtctgacattgtgcccatggttacacttgtccgggggagaccttgaatttggtgtggaagaaataacatcagtagttc

SEQ ID NO: 459824 - DNA, 80 bp, Artificial Sequence
  ENSG00000157350_0 (sequence is synthesized)
actagcccacggcgggcggacgagagagctgcgagctaacgggtccggacgacggcggcggcggcggcggcggcggcgac

SEQ ID NO: 459825 - DNA, 120 bp, Artificial Sequence
  ENSG00000157350_1 (sequence is synthesized)
catggcccgcgcggcgccgggcgctgactgagggtcgtgctgcggcagcctggcgcccgacatgtgaaggggaacctgccaggggattactgtgagctcacagcaggataggctggcccc

SEQ ID NO: 459826 - DNA, 120 bp, Artificial Sequence
  ENSG00000157350_2 (sequence is synthesized)
gggggagtggggatgggcagaacctgggccaggagtattaggaaggagacctggaccctggtagggagctcagcacaagctcgcctgacccagatggtattggacacagtgccccgctga

SEQ ID NO: 459827 - DNA, 120 bp, Artificial Sequence
  ENSG00000157350_3 (sequence is synthesized)
acagcagctgttcccagcgccagaggaccccacagccacagtaggagctttgcgacccctacgcaactgcagctggggctggggccaccaggagaagggaccagcacctcagatgggaag

SEQ ID NO: 459828 - DNA, 120 bp, Artificial Sequence
  ENSG00000157350_4 (sequence is synthesized)
cagaagggcaagacctactgcggaaaggatctcgatctctgcagcggagttttcccacactcacagagcttcctgtttttgtcctctcagggttggggtctggctcccctcctctggcag

SEQ ID NO: 459829 - DNA, 120 bp, Artificial Sequence
  ENSG00000157350_5 (sequence is synthesized)
aggttttgggccaggaggtgggacaacacttgcatggaacccaagtcccctgaagcccctgtgctctctgttgtgattggagttctagggcttccccgctgccgggaacgaggggccgcc

SEQ ID NO: 459830 - DNA, 120 bp, Artificial Sequence
  ENSG00000157350_6 (sequence is synthesized)
tcattgtctgctcatgaaccacaaggaccccgactgctccagactggattatttcaagccgccaaagagggggacccctagagctggcagccagcaatcccaagggactagagggctgca

SEQ ID NO: 459831 - DNA, 120 bp, Artificial Sequence
  ENSG00000157350_7 (sequence is synthesized)
atggactgacctccccctcaccagggtggcaggagaggcagagcctctgtggcctagctagtgacggagagacccgatgaagccctaagcaggggccccgcctgactcagggacaggaca

SEQ ID NO: 459832 - DNA, 120 bp, Artificial Sequence
  ENSG00000157350_8 (sequence is synthesized)
gccactcctgccaacgtgtgttctccctacatgagggagggcgtggcaagggacccctgccactgtcccctgctgcagcacgtgcccctatgccctttgcatgtggtgccagaataggca

SEQ ID NO: 459833 - DNA, 120 bp, Artificial Sequence
  ENSG00000157350_9 (sequence is synthesized)
ggctacgccgtggctggcccctcagcgggctgggaaaagagtggccacggtgaccgtcacccgcctgccggcaccatgaagtgctccctgcgggtgtggttcctctccgtggccttcctg

SEQ ID NO: 459834 - DNA, 120 bp, Artificial Sequence
  ENSG00000157350_10 (sequence is synthesized)
ctggtgttcatcatgtccctgctcttcacctactcgcaccacagcatggccacgctcccctacctggactcaggggccctggatgggacgcaccgggtgaagctggtgcccggctatgcc

SEQ ID NO: 459835 - DNA, 120 bp, Artificial Sequence
  ENSG00000157350_11 (sequence is synthesized)
ggcctgcagcgcctcagcaaggagaggctctcgggcaagagctgtgcctgtcgccgctgcatgggcgatgccggtgcctccgactggtttgacagccactttgacggtaacatttccccc

SEQ ID NO: 459836 - DNA, 120 bp, Artificial Sequence
  ENSG00000157350_12 (sequence is synthesized)
gtctggacccgagagaacatggatcttccaccggacgtccagaggtggtggatgatgctgcagccccagttcaagtcacacaacaccaatgaggtgctggagaagctgttccagatagtg

SEQ ID NO: 459837 - DNA, 120 bp, Artificial Sequence
  ENSG00000157350_13 (sequence is synthesized)
cctggcgagaacccctaccgcttccgggacccccaccagtgccggcgctgtgccgtggtggggaactcgggcaacctgcggggctctggctatgggcaggacgtggacgggcacaacttc

SEQ ID NO: 459838 - DNA, 120 bp, Artificial Sequence
  ENSG00000157350_14 (sequence is synthesized)
atcatgaggatgaatcaggcgccaaccgtgggctttgagcaggatgttggcagccgaaccacccaccatttcatgtaccctgagagtgccaagaacctgcccgccaacgtcagcttcgtg

SEQ ID NO: 459839 - DNA, 120 bp, Artificial Sequence
  ENSG00000157350_15 (sequence is synthesized)
ctggtgcccttcaaggtcctggaccttctgtggatcgccagcgccttgtccacggggcagatccgattcacctacgccccagtgaagtccttccttcgagtggataaagaaaaggtccag

SEQ ID NO: 459840 - DNA, 120 bp, Artificial Sequence
  ENSG00000157350_16 (sequence is synthesized)
atctacaacccagccttcttcaagtatatccacgacaggtggacagagcatcacgggcggtacccttccacggggatgctggtgcttttctttgccctgcatgtgtgtgatgaggtgaac

SEQ ID NO: 459841 - DNA, 120 bp, Artificial Sequence
  ENSG00000157350_17 (sequence is synthesized)
gtgtacgggttcggggccgacagccggggcaactggcaccactactgggagaacaaccggtacgcgggcgagttccggaagactggcgtgcacgacgcggacttcgaggcccacatcatc

SEQ ID NO: 459842 - DNA, 120 bp, Artificial Sequence
  ENSG00000157350_18 (sequence is synthesized)
gacatgctggccaaggccagcaagatcgaagtctaccggggcaactgagccgggcctcgccgcgacccttccggcccatctatcgggcaccggggctccggcccgggacccaggaccagc

SEQ ID NO: 459843 - DNA, 120 bp, Artificial Sequence
  ENSG00000157350_19 (sequence is synthesized)
aacccgcgaccaatcatgctgcagcccaggggcgtctgctgtgccccgccaatcacgagactgggggaccggccgggcctggcaccaatctgcgctgcggtcgggcggagcttctgtttc

SEQ ID NO: 459844 - DNA, 120 bp, Artificial Sequence
  ENSG00000157350_20 (sequence is synthesized)
tcccagccaatcatgtgactcaaggaaaacttccggcgctgtgtccagtctcctccaatcaatggccttcgggggcgggccagcggccgctcaatccccactccctcatgctttgggtta

SEQ ID NO: 459845 - DNA, 120 bp, Artificial Sequence
  ENSG00000157350_21 (sequence is synthesized)
gggttttctttcacgctttctgaggaggagagcatggcgcgggcctcggcgaagcacttccgtcagcctcgggcggaggatcgtcttagtagctggccagacctggaggagagcgggcgg

SEQ ID NO: 459846 - DNA, 120 bp, Artificial Sequence
  ENSG00000157350_22 (sequence is synthesized)
tctttgcgggcctcaggagataggtggccgcccggcccctttccccgcctgcccggataggtgcgtgcagacccaccaaagaaaagcggtcgctgcgggacccccagtcccacctcggcc

SEQ ID NO: 459847 - DNA, 120 bp, Artificial Sequence
  ENSG00000157350_23 (sequence is synthesized)
gcgctgtgggatggctgcgcccccagggcttcctgcgtctccaggaagccgggagtggcgccctctgcggggtggggtgctcccgggccgaactccggacaggtggaggggacagggcag

SEQ ID NO: 459848 - DNA, 120 bp, Artificial Sequence
  ENSG00000157350_24 (sequence is synthesized)
agctcgaggaagccctgtccccttcagtgcaaggtgctgtcactcacgtgtgccctcgaccctcccgttcacccgcagccttctcagcgcctctccctgggccggaggcctcctcaccag

SEQ ID NO: 459849 - DNA, 120 bp, Artificial Sequence
  ENSG00000157350_25 (sequence is synthesized)
cctacctgttgctctggaaaaaaatcccgtcccccgactccgtccctacccccagtcttcggccggctctggcccctggggagggggctgcacggcggaaggaggctggctatgggcccg

SEQ ID NO: 459850 - DNA, 120 bp, Artificial Sequence
  ENSG00000157350_26 (sequence is synthesized)
gctgcccgctgcatgtacctcctcctccacccatcgcctcttgcctgggggtaactttgcctggggctcattctttggttaagctgaagctgccgtgggtggccaaaccgcagattcttt

SEQ ID NO: 459851 - DNA, 120 bp, Artificial Sequence
  ENSG00000157350_27 (sequence is synthesized)
gcaaattctgagctggcagagctcgcagccgggagccggccggggaagaggagacttgcgcgccgcaagccgcctgcctccaccctgctctccatctcccgctctagaagggctgggaag

SEQ ID NO: 459852 - DNA, 120 bp, Artificial Sequence
  ENSG00000157350_28 (sequence is synthesized)
ctcgcggccggggttccacctggaagctgcttgcatggctgaacccagcttaggtccctgacggggctgctggtggaattctcccccttcgaagctggggaggtttaggagggggaaggc

SEQ ID NO: 459853 - DNA, 120 bp, Artificial Sequence
  ENSG00000157350_29 (sequence is synthesized)
ttctgtgaagctctcaaaccactaatagagccccctccccaacagtgacggcgcagatgctcccccttttcttagttgacaccaccaggcagcttcctggccgttggtaggttcctgcag

SEQ ID NO: 459854 - DNA, 120 bp, Artificial Sequence
  ENSG00000157350_30 (sequence is synthesized)
ctggctgagggaacagggaccggcaggggactttgttaggggagggttgggatgggcagtgggcccctgaaagttaatatattggaacctagctcgagtgtcgttctttccaattccgaa

SEQ ID NO: 459855 - DNA, 120 bp, Artificial Sequence
  ENSG00000157350_31 (sequence is synthesized)
agtagaaagagtaaaaataggggtgattggggtggggttagtagaatgcctctctcagggcgctcccccctcccccaccgttttagagagctaggcctcagccagtcttgccactcccat

SEQ ID NO: 459856 - DNA, 120 bp, Artificial Sequence
  ENSG00000157350_32 (sequence is synthesized)
ctcagtgcttcctgaagaggctgttttgagtgttgatgaaaagcaatgcaattatgccaaacagtattgagcagaataatttatttcttttttttcttttgctttaaatcatgaatcccg

SEQ ID NO: 459857 - DNA, 64 bp, Artificial Sequence
  ENSG00000157350_33 (sequence is synthesized)
ttatttcttttttttcttttgctttaaatcatgaatcccgccaggcttaatacttaaggtcagg

SEQ ID NO: 459858 - DNA, 120 bp, Artificial Sequence
  ENSG00000157350_34 (sequence is synthesized)
gacagagcaagaccctgtctcaaaaaaattaaatcatgaatccccatcctggaagaggtaggtcccagcatccagccagattttctgcaatagtaatttaaacacacttttttatttcct

SEQ ID NO: 459859 - DNA, 120 bp, Artificial Sequence
  ENSG00000157350_35 (sequence is synthesized)
ctgcaatagtaatttaaacacacttttttatttccttccctttctgaattaaaaggaacaaaaaactgtctagtccttcattgttctgaaatgggcatgatggaagaaggcgggtctggt

SEQ ID NO: 459860 - DNA, 120 bp, Artificial Sequence
  ENSG00000157350_36 (sequence is synthesized)
aggatagctgtgactgataatggctgagaacgttgggggatatgggaggggcgagatgactcccagataccctcccccacctatacaggaggcacctcattcctggactctgcgctccaa

SEQ ID NO: 459861 - DNA, 120 bp, Artificial Sequence
  ENSG00000157350_37 (sequence is synthesized)
gacactgaaatctgagcgggtacaagcattttggttaaaaatcagctcgttgtcgcctcttgagtttcctccaggagaggagttcattggagaggattcctggtagcagctcctcgcagt

SEQ ID NO: 459862 - DNA, 120 bp, Artificial Sequence
  ENSG00000157350_38 (sequence is synthesized)
ggctgtcctgtaaccactttggcctctgtcaacatgatgtctccaggtatccatcaggctccgatacatttgggtggccacaggctgggctgtccccacctctcagggaagtgcatctaa

SEQ ID NO: 459863 - DNA, 120 bp, Artificial Sequence
  ENSG00000157350_39 (sequence is synthesized)
gtcaggttttcccctctggcacagccctgcctccacagcccaatttccaccatgccacaggcaacccgcatttttatttatttaatttatttatttattgagacagagtcttgttctgtt

SEQ ID NO: 459864 - DNA, 78 bp, Artificial Sequence
  ENSG00000157350_40 (sequence is synthesized)
tttaatttatttatttattgagacagagtcttgttctgttacccaggctggagtgcaatggcccgatgtcggctcatc

SEQ ID NO: 459865 - DNA, 62 bp, Artificial Sequence
  ENSG00000157350_41 (sequence is synthesized)
cactgcaacctccgcctcccaagttcacccacctcaacctcccgagtagctggaattacagg

SEQ ID NO: 459866 - DNA, 120 bp, Artificial Sequence
  ENSG00000157350_42 (sequence is synthesized)
ggctggtctcgaactcctgaccacaggtcatccaccccctttggcctcccaatgtttgaccacacccagcccataatagatttttaaaactcctataaatatcattctacttccctttat

SEQ ID NO: 459867 - DNA, 120 bp, Artificial Sequence
  ENSG00000157350_43 (sequence is synthesized)
taaaactcctataaatatcattctacttccctttattgctaaaatgggagctttttcatccagttttttgggtgtgttccaaatattttgttaaatttcccgtctattgctgttattgtt

SEQ ID NO: 459868 - DNA, 120 bp, Artificial Sequence
  ENSG00000157350_44 (sequence is synthesized)
tccatttatttgcccatgtgagttgatacctttttcattcctttcccatagctttagtgacgttgtgggaagggaagttaggtaagtgatgtttcatcttgtacttactagacacctttt

SEQ ID NO: 459869 - DNA, 120 bp, Artificial Sequence
  ENSG00000157350_45 (sequence is synthesized)
cacctttttcttccttgatttcctgagttccctgcctccacaggtgtgtttcactcctggttgcttatatttttttatttttgagatggagttttgctctgttgaccaggctggagtgca

SEQ ID NO: 459870 - DNA, 120 bp, Artificial Sequence
  ENSG00000157350_46 (sequence is synthesized)
tgcttatttaacccctttgtcacgatggaggcttttctcttttttttttttttttttcagatggagtctctctccattgcccaggctggaatgcagtggtgctatgtccgctcactgcaa

SEQ ID NO: 459871 - DNA, 75 bp, Artificial Sequence
  ENSG00000157350_47 (sequence is synthesized)
gatccgcctgccttggcctcccaaatggtaggattacaggcgtgagccaccactgtcgcccagactggtgcagag

SEQ ID NO: 459872 - DNA, 88 bp, Artificial Sequence
  ENSG00000157350_48 (sequence is synthesized)
ttttttttttttttaagagacagggtctcctgtcgcccagactggtgcagagctcactgcagcctcaaaaactcctggacagctagag

SEQ ID NO: 459873 - DNA, 62 bp, Artificial Sequence
  ENSG00000157350_49 (sequence is synthesized)
cctcagcctccagagcagctagagcctagctaaaaaattttttaaaaacattttataatcac

SEQ ID NO: 459874 - DNA, 82 bp, Artificial Sequence
  ENSG00000157350_50 (sequence is synthesized)
ctaaaaatacaaaaaattggccaggcttagtggcagacggctgtgatcccagctactcgggagacctggtgagccgagattg

SEQ ID NO: 459875 - DNA, 120 bp, Artificial Sequence
  ENSG00000157350_51 (sequence is synthesized)
agtaagactccgtctcaaaaaaaaaaaagtattttacccatccacaggcagcagacaaggaagtaccttctgtgactgtctggcaaggtcagaggcatcagggaaggtaaaatactgaaa

SEQ ID NO: 459876 - DNA, 120 bp, Artificial Sequence
  ENSG00000157350_52 (sequence is synthesized)
tggcaaggtcagaggcatcagggaaggtaaaatactgaaactatatttttaaaaataaaagtattcccttttgagtgtgaattaggaatcaatgccccttctcactacttttgtgaaaaa

SEQ ID NO: 459877 - DNA, 120 bp, Artificial Sequence
  ENSG00000157350_53 (sequence is synthesized)
aatcacagctcctgcagcaagtctatgcctgggtaacaaccaacccacaaaatccaagaggaggtccccctctcccgcctctgtgaggcttgaggagcagtatgtatctgggccagcctg

SEQ ID NO: 459878 - DNA, 120 bp, Artificial Sequence
  ENSG00000157350_54 (sequence is synthesized)
gtcctcagagtgtggaattaacacctttcctctagcaactgtttgtgctgctgagaacagcacagactctctggcagcctggttctctccagagggaagcctgtgaagcagaagaaacat

SEQ ID NO: 459879 - DNA, 120 bp, Artificial Sequence
  ENSG00000157350_55 (sequence is synthesized)
atggcatctgcactcagggcgcccagttccatccggccttgctataaaatgactttgcctttccttttttaaaattacaaaaataattcaaccaatacataaacatatgaagtgaatcac

SEQ ID NO: 459880 - DNA, 120 bp, Artificial Sequence
  ENSG00000157350_56 (sequence is synthesized)
ggagggccttcctgcgatatctttttttgcctaccatttgtcatggaatgggtaaaggggaccacagagggaagagacgctgccccttcgcagggccatggcagtcccctgggctgcgtc

SEQ ID NO: 459881 - DNA, 120 bp, Artificial Sequence
  ENSG00000157350_57 (sequence is synthesized)
tccacggtgcttcctgtgaaacgctgttaccacgggcaccgcactggagaccatgaaagggaagagtttgacatctcagctgtctttgctataaatagaaataaataaaccttaactaag

SEQ ID NO: 459882 - DNA, 120 bp, Artificial Sequence
  ENSG00000157350_58 (sequence is synthesized)
aatatgctcgttccattccctgctggctttgtggccacaaatggaggggcagctacgtttcttgaacacagagcctgagaggccttgtatgcagctgctggaagcagccaggagacccca

SEQ ID NO: 459883 - DNA, 120 bp, Artificial Sequence
  ENSG00000157350_59 (sequence is synthesized)
aaagtgggctggagacttcaacaaggacagggaacagggctgcactgagaggcccaggggctaggtcagcagcaccgctaggcagatttggaggggagctggggagaggcgaggcagcca

SEQ ID NO: 459884 - DNA, 120 bp, Artificial Sequence
  ENSG00000157350_60 (sequence is synthesized)
gctttgcaagattcccacggcacacagccagtgctcaggggttcccttctcagcgttcctctcacctggtgtggctccctcacgcttggcatggatctgagctcctttccttatggctga

SEQ ID NO: 459885 - DNA, 120 bp, Artificial Sequence
  ENSG00000157350_61 (sequence is synthesized)
gacccaaactgcctacaagtggccttttctccctgttcttgcctgcaagggcagcatggggcctcaggctgtcagtgctaccagggacgctggcattcactttgtccataatgtacagat

SEQ ID NO: 459886 - DNA, 120 bp, Artificial Sequence
  ENSG00000157350_62 (sequence is synthesized)
ggatgtagacaactgccctcagggctgtccgggggcaggaccaagcccagcaaccacacctcctgacacagccaggttctcccccaacggcggagctgacaggactgttcatggttcatt

SEQ ID NO: 459887 - DNA, 120 bp, Artificial Sequence
  ENSG00000157350_63 (sequence is synthesized)
gagtggacccagcaatacctcatcgataatccacagtcgagagaagaggggcggtcagagaccggccagccctcccttctgattgggagaggcctctgcaggcactgacaggctccagag

SEQ ID NO: 459888 - DNA, 120 bp, Artificial Sequence
  ENSG00000157350_64 (sequence is synthesized)
agtgctgtggggggcagtcagtgtccatagtcccctggaatcttctctgggctgttttctctgacttttcacctgaaattaactgtacatagctgggctaggaactctctaaatctgaaa

SEQ ID NO: 459889 - DNA, 120 bp, Artificial Sequence
  ENSG00000157350_65 (sequence is synthesized)
gcatgtggcttagggaaaatcacttgactcgtttaccttctggctaagaagtgaagactctgggctaatctagtcctccaggccctggagtcccacacagtgatgctatctgtgcagcta

SEQ ID NO: 459890 - DNA, 120 bp, Artificial Sequence
  ENSG00000157350_66 (sequence is synthesized)
gagggcagagcccttggtcatgtccaccctctgattaagtgggcatctcctctcctgctagctttggggcttggggtggggctgggacaaagcctggtgcccgtgtgattcatccgcaca

SEQ ID NO: 459891 - DNA, 120 bp, Artificial Sequence
  ENSG00000157350_67 (sequence is synthesized)
actgggatgaggacatggctctggtgtggctgtgttttctcaattctgttgagggatttggggtgagtcgtgctccccctctgtctcctcctttggaagagaatgcccaggacagtggtg

SEQ ID NO: 459892 - DNA, 120 bp, Artificial Sequence
  ENSG00000157350_68 (sequence is synthesized)
acggctttctgcgcgggcggcggcggcggccggagcggcgagcatggcccgcgcggcgccgggcgctgactgaggtcacaggaagctgggagcgggaccctgaaagaactcgagttctgt

SEQ ID NO: 459893 - DNA, 120 bp, Artificial Sequence
  ENSG00000157350_69 (sequence is synthesized)
ccttagatgttgggcatgcagcaggcaaagggagaatgagaggagacaaggacctggcttcccatctacagactgttcagccaaggccatgcctagagtgggatctgctaaatgggcaca

SEQ ID NO: 459894 - DNA, 120 bp, Artificial Sequence
  ENSG00000157350_70 (sequence is synthesized)
cctgtgggcggggcttcactttcgaccctgagaagccaactccacatctccttccctctcacccttgagccgtgggtagttcagggaggccacagccttctttctgtgccatggcctatc

SEQ ID NO: 459895 - DNA, 120 bp, Artificial Sequence
  ENSG00000157350_71 (sequence is synthesized)
ccaaagtcacctccactcacaacgtcgtgaccttagggtcgtgctgcggcagcctggcgcccgacatgtgaaggggaacctgccaggggattactgtgagctcacagcaggataggctgg

SEQ ID NO: 459896 - DNA, 120 bp, Artificial Sequence
  ENSG00000157350_72 (sequence is synthesized)
gaggatgtgaatggggtgggggcagtcgcccctgtcccccacccttcccttcaagccgggcaggggtggggggaggggccgggctgaggcggcggcggcggcggcgctcggggagggttg

SEQ ID NO: 459897 - DNA, 120 bp, Artificial Sequence
  ENSG00000157353_0 (sequence is synthesized)
aaagagcccgctccgccgagcgccgggcgacggcaggaagcccctccgcttggccagaatggagcagccgaagggagttgattggacagtcatcatcctgacctgccagtacaaggacag

SEQ ID NO: 459898 - DNA, 120 bp, Artificial Sequence
  ENSG00000157353_1 (sequence is synthesized)
tgtccaggtctttcagagagaactggaagtgcggcagaagcgggagcagatccctgctgggacgctgttactggccgtggaggacccagagaagcgtgtgggcagcggaggagccaccct

SEQ ID NO: 459899 - DNA, 120 bp, Artificial Sequence
  ENSG00000157353_2 (sequence is synthesized)
caacgccctgctggtggctgctgaacacctgagtgcccgggcaggcttcactgtggtcacatccgatgtcctgcactcggcctggatcctcattctgcacatgggtcgagacttcccctt

SEQ ID NO: 459900 - DNA, 120 bp, Artificial Sequence
  ENSG00000157353_3 (sequence is synthesized)
tgatgactgtggcagggctttcacctgcctccccgtggagaaccccgaggcccccgtggaagccttggtctgcaacctggactgcctgctggacatcatgacctatcggctgggcccggg

SEQ ID NO: 459901 - DNA, 120 bp, Artificial Sequence
  ENSG00000157353_4 (sequence is synthesized)
ctccccgccaggcgtgtgggtctgcagcaccgacatgctgctgtctgttcctgcaaatcctggtatcagctgggacagcttccggggagccagagtgatcgccctcccagggagcccggc

SEQ ID NO: 459902 - DNA, 120 bp, Artificial Sequence
  ENSG00000157353_5 (sequence is synthesized)
ctacgctcagaatcatggcgtctacctaactgacccccagggccttgttttggacatttactaccagggcactgaggcagagattcagcggtgtgtcaggcctgatgggcgggtgccact

SEQ ID NO: 459903 - DNA, 120 bp, Artificial Sequence
  ENSG00000157353_6 (sequence is synthesized)
ggtctctggggttgtcttcttctctgtggagactgccgagcgcctcctagccacccacgtgagcccgcccctggatgcctgcacctacctaggcttggactccggagcccggcctgtcca

SEQ ID NO: 459904 - DNA, 120 bp, Artificial Sequence
  ENSG00000157353_7 (sequence is synthesized)
gctgtctctgttttttgacattctccactgcatggctgagaacgtgaccagggaggacttcctggtggggaggcccccagagttggggcaaggcgatgcagatgtagcgggttatctgca

SEQ ID NO: 459905 - DNA, 120 bp, Artificial Sequence
  ENSG00000157353_8 (sequence is synthesized)
gagcgcccgggcccagctgtggagggagcttcgcgatcagccccttaccatggcctatgtctccagcggcagctacagctacatgacctcctcagccagtgagttcctgctcagcctcac

SEQ ID NO: 459906 - DNA, 120 bp, Artificial Sequence
  ENSG00000157353_9 (sequence is synthesized)
actccccggggctcctggggcccagattgtgcactcccaggtggaggagcagcagcttctggcggccgggagctctgtggtcagctgcctgctggagggccctgtccagctgggtcctgg

SEQ ID NO: 459907 - DNA, 120 bp, Artificial Sequence
  ENSG00000157353_10 (sequence is synthesized)
gagcgtcctgcagcactgccacctgcagggccccattcacataggcgctggctgcttggtgactggcctggatacagcccactccaaggccctgcatggccgggagctgcgtgaccttgt

SEQ ID NO: 459908 - DNA, 120 bp, Artificial Sequence
  ENSG00000157353_11 (sequence is synthesized)
cctgcagggacaccacacgcggctacacggctccccgggccacgccttcaccctcgttggccgtctggacagctgggagagacagggggcaggcacatatctcaacgtgccctggagtga

SEQ ID NO: 459909 - DNA, 120 bp, Artificial Sequence
  ENSG00000157353_12 (sequence is synthesized)
attcttcaagaggacaggtgttcgagcctgggacctgtgggaccctgagacgctgcccgcagagtactgccttcccagcgcccgcctctttcctgtgctccacccctcgagggagctggg

SEQ ID NO: 459910 - DNA, 120 bp, Artificial Sequence
  ENSG00000157353_13 (sequence is synthesized)
accccaggacctgctgtggatgctggaccaccaggaggatgggggcgaggccctgcgagcctggcgggcctcctggcgcctgtcctgggagcagctgcagccgtgcctggatcgggctgc

SEQ ID NO: 459911 - DNA, 120 bp, Artificial Sequence
  ENSG00000157353_14 (sequence is synthesized)
cacgctggcctctcgccgggacctgttcttccgccaggccctgcataaggcgcggcacgtgctggaggcccggcaggacctcagcctgcgcccgctgatctgggctgctgtccgcgaggg

SEQ ID NO: 459912 - DNA, 120 bp, Artificial Sequence
  ENSG00000157353_15 (sequence is synthesized)
ctgccccgggcccctgctggccacgctggaccaggttgcagctggggcaggagaccctggtgtggcggcacgggcactggcctgtgtggcggacgtcctgggctgcatggcagagggccg

SEQ ID NO: 459913 - DNA, 120 bp, Artificial Sequence
  ENSG00000157353_16 (sequence is synthesized)
ggagacctggcagcgggcgtggaggcgcttgcccaggagagggacaagtggctaagcaggccagccttgctggtgcgagcggcccgccactatgagggggctggtcagatcctgatccgc

SEQ ID NO: 459914 - DNA, 120 bp, Artificial Sequence
  ENSG00000157353_17 (sequence is synthesized)
caggctgtgatgtcagcccagcactttgtctccacagagcaggtggaactgccgggacctgggcagtgggtggtggctgagtgcccggcccgtgtggatttctctgggggctggagtgac

SEQ ID NO: 459915 - DNA, 120 bp, Artificial Sequence
  ENSG00000157353_18 (sequence is synthesized)
acgccaccccttgcctatgagcttggcggggctgtgctgggcctggctgtgcgagtggacggccgccggcccatcggagccagggcacgccgcatcccggagcctgagctgtggctggcg

SEQ ID NO: 459916 - DNA, 120 bp, Artificial Sequence
  ENSG00000157353_19 (sequence is synthesized)
gtggggcctcggcaggatgagatgactgtgaagatagtgtgccggtgcctggctgacctgcgggactactgccagcctcatgccccaggggccctgctgaaggcggccttcatctgtgca

SEQ ID NO: 459917 - DNA, 120 bp, Artificial Sequence
  ENSG00000157353_20 (sequence is synthesized)
gggatcgtgcatgtccactcggaactccagctgagtgagcagctgctccgcaccttcgggggcggctttgagctgcacacctggtctgagctgccccacggctctggcctgggcaccagc

SEQ ID NO: 459918 - DNA, 120 bp, Artificial Sequence
  ENSG00000157353_21 (sequence is synthesized)
agcatcctggcaggcactgccctggctgccttgcagcgagccgcaggccgggtggtgggcacggaagccctgatccacgcagtgctgcacctggagcaggtgctcaccactggaggtggc

SEQ ID NO: 459919 - DNA, 120 bp, Artificial Sequence
  ENSG00000157353_22 (sequence is synthesized)
tggcaggaccaagtaggtggcctaatgcctggcatcaaggtggggcgctcccgggctcagctgccactgaaggtggaggtagaagaggtcacggtgcctgagggctttgtccagaagctc

SEQ ID NO: 459920 - DNA, 120 bp, Artificial Sequence
  ENSG00000157353_23 (sequence is synthesized)
aatgaccacctgctcttggtgtacactggcaagacccgcctggctcggaacctgctgcaggatgtgctgaggagctggtatgcccgacttcctgctgtggtgcagaatgcccacagcctg

SEQ ID NO: 459921 - DNA, 120 bp, Artificial Sequence
  ENSG00000157353_24 (sequence is synthesized)
gtacggcaaactgaggagtgtgctgaaggcttccgccaaggaagcctgcctctgctgggccagtgcctgacctcgtactgggagcagaagaagctcatggctccaggctgtgagcccctg

SEQ ID NO: 459922 - DNA, 120 bp, Artificial Sequence
  ENSG00000157353_25 (sequence is synthesized)
actgtgcggcgtatgatggatgtcctggccccccacgtgcatggccagagcctggctggggcaggcggtggaggctttctctatctgttgaccaaggagccacagcaaaaggaggccttg

SEQ ID NO: 459923 - DNA, 120 bp, Artificial Sequence
  ENSG00000157353_26 (sequence is synthesized)
gaggcggtgctggccaagaccgagggccttgggaattacagcatccacctggttgaagtggacactcagggcctgagcctgaagctgctggggaccgaggcctcaacctgttgccctttc

SEQ ID NO: 459924 - DNA, 120 bp, Artificial Sequence
  ENSG00000157353_27 (sequence is synthesized)
ccatgaagctggcttctctctgcaacaggagaaaacctggagctacagtgtcccccaccttccttgccccatgggaacctccacctcctactccccacccacctctgcgaatctgctccc

SEQ ID NO: 459925 - DNA, 120 bp, Artificial Sequence
  ENSG00000157353_28 (sequence is synthesized)
aaaggaagctgaccagagcaagatctgggcaagcagagagtgcctgggacaggactgtgacctggtggacaggggcctagatgtagcctctgttcctcctggacataggaaggtcccaag

SEQ ID NO: 459926 - DNA, 120 bp, Artificial Sequence
  ENSG00000157353_29 (sequence is synthesized)
cttagtatcccacgtggcctttacaaatcctatggctggccttctcattccacaagggccctggaaagggttgacagccagccttggcatatggctgggagtcccttagcaaggccaacc

SEQ ID NO: 459927 - DNA, 120 bp, Artificial Sequence
  ENSG00000157353_30 (sequence is synthesized)
ctgaagaggccctttgaggcattccctatggcttagagttgtagacttacactcaaccctcatgtgagcgtgggagtgagggtggcggtcccttgccaagttggtagcagtgacccagtg

SEQ ID NO: 459928 - DNA, 120 bp, Artificial Sequence
  ENSG00000157353_31 (sequence is synthesized)
attcactgccatcccaggccttaactagcaaaactacggagcgtgccaagtgacctggtgcctgtgggaagtgggttctcaggactggcattcttggaataaattcactctgtccttgca

SEQ ID NO: 459929 - DNA, 120 bp, Artificial Sequence
  ENSG00000157353_32 (sequence is synthesized)
ctctgcccttcttgcccaccctgcctctgggcctgccccgctgccctattagacgggaagctggagggtgtggagaatgaagcctggtggaggcagggcttctcctgctgtgcctcagtc

SEQ ID NO: 459930 - DNA, 120 bp, Artificial Sequence
  ENSG00000157353_33 (sequence is synthesized)
tgtctgtctataggatggacagaagcagccctgccccttctgtcccacagggctctgcggaagaactttgggagaggagggttgtcattctcccaggcgaatgtccatttggcttggaaa

SEQ ID NO: 459931 - DNA, 120 bp, Artificial Sequence
  ENSG00000157353_34 (sequence is synthesized)
ccgtatttcccttttagaggtgcccaggtgccgcagccctgggctcttgcttccacctggtggggaaatccgtgccttgggtggaggcccctgggagcctcctgactgccccaccccaca

SEQ ID NO: 459932 - DNA, 120 bp, Artificial Sequence
  ENSG00000157353_35 (sequence is synthesized)
tgaaggcttccgccaagggtctcacatttaggggagagctacatctgaggacaaaattttcatcatgggaaaggccctccagccctaacaggaagcagagaggggaagggactcaaccca

SEQ ID NO: 459933 - DNA, 120 bp, Artificial Sequence
  ENSG00000157353_36 (sequence is synthesized)
tggctgagttccaaggaagtctgagctgggcagggtccccagtgtgtggcttcacagctccctagatgccgactatgctgggtgtggtgttggttgcttcctgcacattggtcctcaggc

SEQ ID NO: 459934 - DNA, 120 bp, Artificial Sequence
  ENSG00000157353_37 (sequence is synthesized)
agtcctgggaagtgggttactcctggctccagccggcactggaatccggcttctttaccatgacactggctcagcagcacgtcttggcacttcatgcaatctccagatgggtgctgagta

SEQ ID NO: 459935 - DNA, 120 bp, Artificial Sequence
  ENSG00000157353_38 (sequence is synthesized)
ggactagttttgttatttttatgcagctacaaggaggaaaatgatacatacctttcattactgaagatggaaagatgtgtaagttagataagagaaaaacagatcctgatgaccttcctt

SEQ ID NO: 459936 - DNA, 120 bp, Artificial Sequence
  ENSG00000157353_39 (sequence is synthesized)
ccaacataaaccacctgtcagaagacggtgcagggagactcaggccaaagggaaggtatctgtcagcctctcctctgactaaaactcccctaggaggggcagaggtcagtgtaaaatatg

SEQ ID NO: 459937 - DNA, 63 bp, Artificial Sequence
  ENSG00000157353_40 (sequence is synthesized)
aaaactcccctaggaggggcagaggtcagtgtaaaatatgtattttttgagacagagtctcac

SEQ ID NO: 459938 - DNA, 120 bp, Artificial Sequence
  ENSG00000157353_41 (sequence is synthesized)
caggcgtgtgccaccgtgcccggccatagtgtaaaatctttattcttcagtgtggtttatcccaattccaattatacattaggtctaaaacaaaactcaggccttgggaattccaagctt

SEQ ID NO: 459939 - DNA, 120 bp, Artificial Sequence
  ENSG00000157353_42 (sequence is synthesized)
tgccctagagtgaagcccattcccttgctgggattgttctggggacagaagctgcatagctcactgtcctgtggagttgagggaagctatctttccacactggtcccagcaaggggtgca

SEQ ID NO: 459940 - DNA, 120 bp, Artificial Sequence
  ENSG00000157353_43 (sequence is synthesized)
aggtgaggggcttcctctgggggggtcagggcactgggagcgagtattctgtcacttgtgggtttgaggccagggtcatctgcaggcttggcacaagctccagatattcggcctctggga

SEQ ID NO: 459941 - DNA, 120 bp, Artificial Sequence
  ENSG00000157353_44 (sequence is synthesized)
ttccctcccactgttcccccaggtatgatctatgctggctcagctgggagaaggaatggttttgagggtgcctaatgttagttaagagcttcaagaagttagttgtgtctgggggcagtg

SEQ ID NO: 459942 - DNA, 120 bp, Artificial Sequence
  ENSG00000157353_45 (sequence is synthesized)
agttagttgtgtctgggggcagtggctcatgcctataatttcagcactttgagaagccaaagtgggaggatcgcttgaggccaagagttcatgaccagcctgggcaacacagcaagaccc

SEQ ID NO: 459943 - DNA, 120 bp, Artificial Sequence
  ENSG00000157353_46 (sequence is synthesized)
accgagtcgacccgcgggccgcccgggtcctgacagggaagagtccccgggagctctgcggtgccccgggagcccacaggtgtttctacgctcccgcgtccatttggcctgggtcttcca

SEQ ID NO: 459944 - DNA, 120 bp, Artificial Sequence
  ENSG00000157353_47 (sequence is synthesized)
aggggagccccgcgacccggctggtgcggccggacctgctggcagctgggaccgggagggatgcgggcctcagaggatcctcaccctgaggcaggaagcccctccgcttggccagaatgg

SEQ ID NO: 459945 - DNA, 120 bp, Artificial Sequence
  ENSG00000157353_48 (sequence is synthesized)
aaagagcccgctccgccgagcgccgggcgacggcagtgcctttgcttgggaccagatatcattatcactatcacctgaataaggatccaaaagacccaggaagcccctccgcttggccag

SEQ ID NO: 459946 - DNA, 120 bp, Artificial Sequence
  ENSG00000157353_49 (sequence is synthesized)
caacgccctgctggtggctgctgaacacctgagtgcccgggcaggcttcacttggatttgtgttggagtctctctctggattcgagggtgccatcctccagggcgtctgcctgaggcctc

SEQ ID NO: 459947 - DNA, 120 bp, Artificial Sequence
  ENSG00000157353_50 (sequence is synthesized)
gagccggctggggcagccttcctcctgtcagtgggcagcctcctccctgtcagtgggcagcctctcatcctggatttcctcgcatgttcctgaatccaaggagtttcctccgtggcagtg

SEQ ID NO: 459948 - DNA, 120 bp, Artificial Sequence
  ENSG00000157353_51 (sequence is synthesized)
gcaccagtgctcccttactctcgccaaaaatacatttcacaccgaccgcctgtccagtctctgtgcccaggctcagggctgcaaagacctttaaagcctgccctctgccatcatggagta

SEQ ID NO: 459949 - DNA, 120 bp, Artificial Sequence
  ENSG00000157353_52 (sequence is synthesized)
gaaatctcaggccccccctgagaatgccagcaactgccagccttgcgtcctcagctttcctttggagaatgcccttgctgccacctgtggctgtggcctccttccagatcccttcctgct

SEQ ID NO: 459950 - DNA, 120 bp, Artificial Sequence
  ENSG00000157368_0 (sequence is synthesized)
agcagctgcagtcggagaaatcagagaaagcgtcacccagccccagattccgaggggcctgccagggactctctcctcctgctccttggaaaggaagaccccgaaagacccccaagccac

SEQ ID NO: 459951 - DNA, 120 bp, Artificial Sequence
  ENSG00000157368_1 (sequence is synthesized)
cggctcagacctgcttctgggctgccatgggacttgcggccaccgccccccggctgtcctccacgctgccgggcagataagggcagctgctgcccttggggcacctgctcactcccgcag

SEQ ID NO: 459952 - DNA, 120 bp, Artificial Sequence
  ENSG00000157368_2 (sequence is synthesized)
cccagccactcctccagggccagcccttccctgactgagtgaccacctctgctgccccgaggccatgtaggccgtgcttaggcctctgtggacacactgctggggacggcgcctgagctc

SEQ ID NO: 459953 - DNA, 120 bp, Artificial Sequence
  ENSG00000157368_3 (sequence is synthesized)
tcagggggacgaggaacaccaccatgccccggggcttcacctggctgcgctatcttgggatcttccttggcgtggccttggggaatgagcctttggagatgtggcccttgacgcagaatg

SEQ ID NO: 459954 - DNA, 120 bp, Artificial Sequence
  ENSG00000157368_4 (sequence is synthesized)
aggagtgcactgtcacgggttttctgcgggacaagctgcagtacaggagccgacttcagtacatgaaacactacttccccatcaactacaagatcagtgtgccttacgagggggtgttca

SEQ ID NO: 459955 - DNA, 120 bp, Artificial Sequence
  ENSG00000157368_5 (sequence is synthesized)
gaatcgccaacgtcaccaggctgcagagggcccaggtgagcgagcgggagctgcggtatctgtgggtcttggtgagcctcagtgccactgagtcggtgcaggacgtgctgctcgagggcc

SEQ ID NO: 459956 - DNA, 120 bp, Artificial Sequence
  ENSG00000157368_6 (sequence is synthesized)
gtccagcagggcctcacggatgtggaggtcagccccaaggtggaatccgtgttgtccctcttgaatgccccagggccaaacctgaagctggtgcggcccaaagccctgctggacaactgc

SEQ ID NO: 459957 - DNA, 120 bp, Artificial Sequence
  ENSG00000157368_7 (sequence is synthesized)
ttccgggtcatggagctgctgtactgctcctgctgtaaacaaagctccgtcctaaactggcaggactgtgaggtgccaagtcctcagtcttgcagcccagagccctcattgcagtatgcg

SEQ ID NO: 459958 - DNA, 120 bp, Artificial Sequence
  ENSG00000157368_8 (sequence is synthesized)
gccacccagctgtaccctccgcccccgtggtcccccagctccccgcctcactccacgggctcggtgaggccggtcagggcacagggcgagggcctcttgccctgagcaccctggatggtg

SEQ ID NO: 459959 - DNA, 120 bp, Artificial Sequence
  ENSG00000157368_9 (sequence is synthesized)
actgcggataggggcagccagaccagctcccacaggagttcaactgggtctgagacttcaaggggtggtggtgggagccccccttgggagaggacccctgggaagggtgtttttcctttg

SEQ ID NO: 459960 - DNA, 120 bp, Artificial Sequence
  ENSG00000157368_10 (sequence is synthesized)
agggggattctgtgccacagcagggctcagcttcctgccttccatagctgtcatggcctcacctggagcggaggggacctggggacctgaaggtggatggggacacagctcctggcttct

SEQ ID NO: 459961 - DNA, 120 bp, Artificial Sequence
  ENSG00000157368_11 (sequence is synthesized)
cctggtgctgccctcactgtccccccgcctaaagggggtactgagcctcctgtggcccgcagcagtgagggcacagctgtgggttgcaggggagacagccagcacggcgtggccattcta

SEQ ID NO: 459962 - DNA, 120 bp, Artificial Sequence
  ENSG00000157368_12 (sequence is synthesized)
tgaccccccagcctggcagactggggagctgggggcagagggcggtgccaagtgccacatcttgccatagtggatgctcttccagtttcttttttctattaaacaccccacttcctttgg

SEQ ID NO: 459963 - DNA, 120 bp, Artificial Sequence
  ENSG00000157368_13 (sequence is synthesized)
catcagacgggaagcctggactgtgggttgggggcagcctcagcctctccaacctggcacccactgcccgtggcccttaggcacctgcttggggtcctggagccccttaaggccaccagc

SEQ ID NO: 459964 - DNA, 120 bp, Artificial Sequence
  ENSG00000157368_14 (sequence is synthesized)
attttatcaagttgaaaccagaatccaggatgattcgatctcctgaatgccgggctggaaaacccagcaacgagctttgaaaacatatcacccggacaccaggggcagaggctgttctgg

SEQ ID NO: 459965 - DNA, 120 bp, Artificial Sequence
  ENSG00000157368_15 (sequence is synthesized)
gcgggaggttgtgcctgccccacggagcgacagaagcggggagaccagacgtcgaccctgaggcgtgcctcctggggggctccagtggccggcatgggatcttgggatcttccttggcgt

SEQ ID NO: 459966 - DNA, 120 bp, Artificial Sequence
  ENSG00000157368_16 (sequence is synthesized)
cagggggacgaggaacaccaccatgccccggggcttcacctggctgcgctaaacactacttccccatcaactacaagatcagtgtgccttacgagggggtgttcagaatcgccaacgtca

SEQ ID NO: 459967 - DNA, 120 bp, Artificial Sequence
  ENSG00000157368_17 (sequence is synthesized)
cacggtgagttgtgtggaggagtggcaggtggggtgtgtgtgtgtgcacacgtgtgtacatgtgtgtgaggtgtggccaaaggctagtgagggaaagggtgaatacacggaaagatgggc

SEQ ID NO: 459968 - DNA, 120 bp, Artificial Sequence
  ENSG00000157368_18 (sequence is synthesized)
acaagcagagggacgtgggagaagtgggggaggggtgcaggaaaagaggcctgtggaaggaagaggcagccgtggtggtcatgagagccgggctcggggtgcaggcgatgcctctgagac

SEQ ID NO: 459969 - DNA, 120 bp, Artificial Sequence
  ENSG00000157379_0 (sequence is synthesized)
agatcgctccgcccccatccgcaggttctaactttggcctgggactctgcccctctacctcagcacagaatcgccccgggtcctactacagaatcaatccttgaacactgcctccacgtc

SEQ ID NO: 459970 - DNA, 120 bp, Artificial Sequence
  ENSG00000157379_1 (sequence is synthesized)
gccggctcaatctgggcgagaacccagacttccaccgcagccccgcaatctgcagacctcagcggcagcgcaggtggcagacctgcctcctttgcctgtgagtcatggcagctcccatga

SEQ ID NO: 459971 - DNA, 120 bp, Artificial Sequence
  ENSG00000157379_2 (sequence is synthesized)
atggccaagtgtgtgtggtgactggtgcctccaggggtattggccgtggcattgccttgcagctctgcaaagcaggcgccacagtttacatcactggccgccatctggacacccttcgcg

SEQ ID NO: 459972 - DNA, 120 bp, Artificial Sequence
  ENSG00000157379_3 (sequence is synthesized)
ttgttgctcaggaggcacaatccctcgggggccaatgtgtgcctgtggtgtgcgattcaagccaggagagtgaagtgcgaagcctgtttgagcaagtggatcgggaacagcaagggcgtc

SEQ ID NO: 459973 - DNA, 120 bp, Artificial Sequence
  ENSG00000157379_4 (sequence is synthesized)
tagatgtgctggtcaacaatgcttatgcaggggtccagacgatcctgaacaccaggaataaggcattctgggaaacccctgcctccatgtgggatgatatcaacaacgtcggactcagag

SEQ ID NO: 459974 - DNA, 120 bp, Artificial Sequence
  ENSG00000157379_5 (sequence is synthesized)
ccctatggtgtgggcaaagctgcgtgtgacaagctggctgctgactgtgcccacgagctgcggcgccatggggtcagctgtgtgtctctgtggccggggattgtgcagacagaactgctg

SEQ ID NO: 459975 - DNA, 120 bp, Artificial Sequence
  ENSG00000157379_6 (sequence is synthesized)
aaggagcatatggcaaaggaggaggtcctgcaggatcctgtgttgaagcagttcaaatcagccttctcatctgcggaaaccacagaattgagtggcaaatgtgtggtggctttggcaaca

SEQ ID NO: 459976 - DNA, 120 bp, Artificial Sequence
  ENSG00000157379_7 (sequence is synthesized)
gatcccaatatcctgagcctgagtggtaaggtgctgccatcctgtgaccttgctcgacgctatggccttcgggatgtggacggccgccccgtccaagactatttgtctttgagctctgtt

SEQ ID NO: 459977 - DNA, 120 bp, Artificial Sequence
  ENSG00000157379_8 (sequence is synthesized)
ctctcacacgtgtccggcctgggctggctggcctcctacctgccctccttcctccgtgtgcccaagtggattattgccctctacactagcaagttctaaccctcctggtctgacactacg

SEQ ID NO: 459978 - DNA, 120 bp, Artificial Sequence
  ENSG00000157379_9 (sequence is synthesized)
tctctgcttgtcttctcatttggacttggtggttcgtcctgtctcagtgaaacagcagcctttcttgtttacccatacccttgatatgaagagaagccctctgctgtgtgtccgtggtga

SEQ ID NO: 459979 - DNA, 120 bp, Artificial Sequence
  ENSG00000157379_10 (sequence is synthesized)
gttctggggtgcgcctaggtcccttctttgtgccttggttttccttgtccttctttttactttttgccttagtattgaaaaatgctcttggagctaataaaagtctcatttctctttcaa

SEQ ID NO: 459980 - DNA, 120 bp, Artificial Sequence
  ENSG00000157379_11 (sequence is synthesized)
agatagcccaggactctgcgtggacgcgccccgaggggctgccgcgccagattcccatatccaggcagccacactcagagggttgtagtagttgtccacctctggacagtcccactcagc

SEQ ID NO: 459981 - DNA, 120 bp, Artificial Sequence
  ENSG00000157379_12 (sequence is synthesized)
cccttcttcactctctgggcctcccaaaagacagtcagccttgtcctcaggcccgcacccagttgtcagcctctgactcctctcccctcaaaggattcttaccttggctcctcctcttag

SEQ ID NO: 459982 - DNA, 120 bp, Artificial Sequence
  ENSG00000157379_13 (sequence is synthesized)
ccagtggcataggagctgaggaggtaaaagacagtgatgttacctatagctcaggaggtacaatccccagtggtcagaatggtaaggctggctcctctcagctcctcctctgcctcatcc

SEQ ID NO: 459983 - DNA, 120 bp, Artificial Sequence
  ENSG00000157379_14 (sequence is synthesized)
atggacagttcctttgcttgtgctcctcttggttggctagagtaggcatcacactggggagcgtgggcagctgagaccttggggctcctgggaaggacagggtgggtggagcattcacag

SEQ ID NO: 459984 - DNA, 120 bp, Artificial Sequence
  ENSG00000157379_15 (sequence is synthesized)
gcatccagtgcccagatctggctcgggagttggttgaggaacatgtcattcttttctctgctttttgaggcccaaggggtcagcattcccagtttgaggtctgagagccttaggagcagg

SEQ ID NO: 459985 - DNA, 120 bp, Artificial Sequence
  ENSG00000157379_16 (sequence is synthesized)
ctcctgggaagtgtggaaaaagtccaaggcccaagagaaagagctctccagggatcctgagctccagggctctcagcagtgccctgtccaactgggcccaaaccttgtcactctgcatac

SEQ ID NO: 459986 - DNA, 120 bp, Artificial Sequence
  ENSG00000157379_17 (sequence is synthesized)
cacagcagtcagccttgactgctgttccctctgttccctgcccactcctccctcggtctctccagccaaggtgagggtatctgaggagtgggaaatgagaatctaatcctcctcctcctg

SEQ ID NO: 459987 - DNA, 120 bp, Artificial Sequence
  ENSG00000157379_18 (sequence is synthesized)
catgcacttgacccccacaccagctagcttagaaggtccaaacactatttggcactaccagatccttccacttagcaaagacagcagatcctggtgccagggcacagggctcacctggat

SEQ ID NO: 459988 - DNA, 120 bp, Artificial Sequence
  ENSG00000157379_19 (sequence is synthesized)
gtggggaggagtggctctggcacctgccaatactttgggtcctacaggccctgcttgaggtctttggcctctttggtctttggtctttttctcctggaacagaagttgaaatggggagga

SEQ ID NO: 459989 - DNA, 120 bp, Artificial Sequence
  ENSG00000157379_20 (sequence is synthesized)
tctttatatacacagaaatatacatgtatctttgtatttgtgtgtgtatgtgtgtgtatcttaattttacgtcaaatctgtcagtcttttatagtttctgtcttggtgtgacgctaataa

SEQ ID NO: 459990 - DNA, 120 bp, Artificial Sequence
  ENSG00000157379_21 (sequence is synthesized)
aagccttttccctcaagtttataaacacatttgatcatgttttctttcagtacttctgtgctttcgttttttatatttaaatatttgatccttttaggcttaattttaaaataataaacg

SEQ ID NO: 459991 - DNA, 120 bp, Artificial Sequence
  ENSG00000157379_22 (sequence is synthesized)
aggcagagacccaattcccctaactcaaataactggtcggttgtcccaaatgatccaactttcccccactgatttgacaggttcctttcgtaatacattgcgttctcacatacacttgta

SEQ ID NO: 459992 - DNA, 120 bp, Artificial Sequence
  ENSG00000157379_23 (sequence is synthesized)
tctaattattctctgttttgtttcattgacttatcagtctactgttaacacctgtattgcattcttttaactattatgtcttgtacattttaatttattttattttattttttagagacg

SEQ ID NO: 459993 - DNA, 120 bp, Artificial Sequence
  ENSG00000157379_24 (sequence is synthesized)
ttaatatgggtgacagcaggggtagggaaagcaatccccctcacccacaagacattagtctttttagtccttttttcggaattttcctggctgttctctttctttttatttatttattta

SEQ ID NO: 459994 - DNA, 66 bp, Artificial Sequence
  ENSG00000157379_25 (sequence is synthesized)
attttcctggctgttctctttctttttatttatttatttatttttgagacaatctcactctgtcag

SEQ ID NO: 459995 - DNA, 120 bp, Artificial Sequence
  ENSG00000157379_26 (sequence is synthesized)
aggcgtgagccaccgtgcccagcttttctggctgttctcacgtttattcttctcattgagctttagattattttatcaattcctccaaaaggtcttattgagctataatccaatttgact

SEQ ID NO: 459996 - DNA, 120 bp, Artificial Sequence
  ENSG00000157379_27 (sequence is synthesized)
gaatctatggattgatttacatagaaatgatgatttacatgtcagttcttagctttgaaagattttgtctgtacttattgtcatggttttatagtttttctatgtagacactatacattt

SEQ ID NO: 459997 - DNA, 120 bp, Artificial Sequence
  ENSG00000157379_28 (sequence is synthesized)
cttaagttttctccccctgaacaattttgtttgtaattgttattgtgacagggctcttgcgttccatttcttcttccaaagattgctgtttctcatctgtcagtggttattttgaccagt

SEQ ID NO: 459998 - DNA, 120 bp, Artificial Sequence
  ENSG00000157379_29 (sequence is synthesized)
tttcctctcagaatatggcctcaagcccctaattcctcaggtcgctaacccaccctgtgtagccttcctagtggacaacaaccaccagaaggcaggggaagccgccagaggctgtggcac

SEQ ID NO: 459999 - DNA, 120 bp, Artificial Sequence
  ENSG00000157379_30 (sequence is synthesized)
ccaggccagcactaacacggttcattccttcttcccttgccccaccttctagaggccactacttttgctcagtgtatggggcacggctgatggtaccagctggccaggggctcatcgtgg

SEQ ID NO: 460000 - DNA, 120 bp, Artificial Sequence
  ENSG00000157379_31 (sequence is synthesized)
gcttcctctgggaccacagttgcagaaaccacccgagagagcccttccacttaacagctcctttcctaatcccttacctgaaactataatactactcaacaagatgtgaatatttattca

SEQ ID NO: 460001 - DNA, 120 bp, Artificial Sequence
  ENSG00000157379_32 (sequence is synthesized)
aagtggaaattaaaaaccccgtaaataacttcaggtaaggtagaattttgccgccaagtgagttttatgaaaaaactttgtgtttgagccaggcatggtggcacgttcctgcagtcccag

SEQ ID NO: 460002 - DNA, 80 bp, Artificial Sequence
  ENSG00000157388_0 (sequence is synthesized)
gcgggcgcggagcgagcgggcgggcgagcgcctccgtccccggatgtgagctccggctgcccgcggtcccgagccagcgg

SEQ ID NO: 460003 - DNA, 120 bp, Artificial Sequence
  ENSG00000157388_1 (sequence is synthesized)
gcaccgcggcgggcgggcagacgggcgggcatggggggagcgccgagcggccccggcggccgggccggcatcaccgcggcgtctctccgctagaggaggggacaagccagttctcctttg

SEQ ID NO: 460004 - DNA, 120 bp, Artificial Sequence
  ENSG00000157388_2 (sequence is synthesized)
agttctcctttgcagcaaaaaattacatgtatatattattaagataatatatacattggattttatttttttaaaaagtttattttgctccatttttgaaaaagagagagcttgggtggc

SEQ ID NO: 460005 - DNA, 120 bp, Artificial Sequence
  ENSG00000157388_3 (sequence is synthesized)
gagcggttttttttttaaatcaattatccttattttctgttatttgtccccgtccctccccacccccctgctgaagcgagaataagggcagggaccgcggctcctacctcttggtgatcc

SEQ ID NO: 460006 - DNA, 120 bp, Artificial Sequence
  ENSG00000157388_4 (sequence is synthesized)
ccttccccattccgcccccgcctcaacgcccagcacagtgccctgcacacagtagtcgctcaataaatgttcgtggatgatgatgatgatgatgatgaaaaaaatgcagcatcaacggca

SEQ ID NO: 460007 - DNA, 120 bp, Artificial Sequence
  ENSG00000157388_5 (sequence is synthesized)
gcagcaagcggaccacgcgaacgaggcaaactatgcaagaggcaccagacttcctctttctggtgaaggaccaacttctcagccgaatagctccaagcaaactgtcctgtcttggcaagc

SEQ ID NO: 460008 - DNA, 120 bp, Artificial Sequence
  ENSG00000157388_6 (sequence is synthesized)
tgcaatcgatgctgctagacaggccaaggctgcccaaactatgagcacctctgcacccccacctgtaggatctctctcccaaagaaaacgtcagcaatacgccaagagcaaaaaacaggg

SEQ ID NO: 460009 - DNA, 120 bp, Artificial Sequence
  ENSG00000157388_7 (sequence is synthesized)
taactcgtccaacagccgacctgcccgcgcccttttctgtttatcactcaataaccccatccgaagagcctgcattagtatagtggaatggaaaccatttgacatatttatattattggc

SEQ ID NO: 460010 - DNA, 120 bp, Artificial Sequence
  ENSG00000157388_8 (sequence is synthesized)
tatttttgccaattgtgtggccttagctatttacatcccattccctgaagatgattctaattcaacaaatcataacttggaaaaagtagaatatgccttcctgattatttttacagtcga

SEQ ID NO: 460011 - DNA, 120 bp, Artificial Sequence
  ENSG00000157388_9 (sequence is synthesized)
gacatttttgaagattatagcgtatggattattgctacatcctaatgcttatgttaggaatggatggaatttactggattttgttatagtaatagtaggattgtttagtgtaattttgga

SEQ ID NO: 460012 - DNA, 120 bp, Artificial Sequence
  ENSG00000157388_10 (sequence is synthesized)
acaattaaccaaagaaacagaaggcgggaaccactcaagcggcaaatctggaggctttgatgtcaaagccctccgtgcctttcgagtgttgcgaccacttcgactagtgtcaggagtgcc

SEQ ID NO: 460013 - DNA, 120 bp, Artificial Sequence
  ENSG00000157388_11 (sequence is synthesized)
cagtttacaagttgtcctgaactccattataaaagccatggttcccctccttcacatagcccttttggtattatttgtaatcataatctatgctattataggattggaactttttattgg

SEQ ID NO: 460014 - DNA, 120 bp, Artificial Sequence
  ENSG00000157388_12 (sequence is synthesized)
aaaaatgcacaaaacatgtttttttgctgactcagatatcgtagctgaagaggacccagctccatgtgcgttctcagggaatggacgccagtgtactgccaatggcacggaatgtaggag

SEQ ID NO: 460015 - DNA, 120 bp, Artificial Sequence
  ENSG00000157388_13 (sequence is synthesized)
tggctgggttggcccgaacggaggcatcaccaactttgataactttgcctttgccatgcttactgtgtttcagtgcatcaccatggagggctggacagatgtgctctactgggtaaatga

SEQ ID NO: 460016 - DNA, 120 bp, Artificial Sequence
  ENSG00000157388_14 (sequence is synthesized)
tgcgataggatgggaatggccatgggtgtattttgttagtctgatcatccttggctcatttttcgtccttaacctggttcttggtgtccttagtggagaattctcaaaggaaagagagaa

SEQ ID NO: 460017 - DNA, 120 bp, Artificial Sequence
  ENSG00000157388_15 (sequence is synthesized)
ggcaaaagcacggggagatttccagaagctccgggagaagcagcagctggaggaggatctaaagggctacttggattggatcacccaagctgaggacatcgatccggagaatgaggaaga

SEQ ID NO: 460018 - DNA, 120 bp, Artificial Sequence
  ENSG00000157388_16 (sequence is synthesized)
aggaggagaggaaggcaaacgaaatactagcatgcccaccagcgagactgagtctgtgaacacagagaacgtcagcggtgaaggcgagaaccgaggctgctgtggaagtctctggtgctg

SEQ ID NO: 460019 - DNA, 120 bp, Artificial Sequence
  ENSG00000157388_17 (sequence is synthesized)
gtggagacggagaggcgcggccaaggcggggccctctgggtgtcggcggtggggtcaagccatctcaaaatccaaactcagccgacgctggcgtcgctggaaccgattcaatcgcagaag

SEQ ID NO: 460020 - DNA, 120 bp, Artificial Sequence
  ENSG00000157388_18 (sequence is synthesized)
atgtagggccgccgtgaagtctgtcacgttttactggctggttatcgtcctggtgtttctgaacaccttaaccatttcctctgagcactacaatcagccagattggttgacacagattca

SEQ ID NO: 460021 - DNA, 120 bp, Artificial Sequence
  ENSG00000157388_19 (sequence is synthesized)
agatattgccaacaaagtcctcttggctctgttcacctgcgagatgctggtaaaaatgtacagcttgggcctccaagcatatttcgtctctcttttcaaccggtttgattgcttcgtggt

SEQ ID NO: 460022 - DNA, 120 bp, Artificial Sequence
  ENSG00000157388_20 (sequence is synthesized)
gtgtggtggaatcactgagacgatcttggtggaactggaaatcatgtctcccctggggatctctgtgtttcggtgtgtgcgcctcttaagaatcttcaaagtgaccaggcactggacttc

SEQ ID NO: 460023 - DNA, 120 bp, Artificial Sequence
  ENSG00000157388_21 (sequence is synthesized)
cctgagcaacttagtggcatccttattaaactccatgaagtccatcgcttcgctgttgcttctgctttttctcttcattatcatcttttccttgcttgggatgcagctgtttggcggcaa

SEQ ID NO: 460024 - DNA, 120 bp, Artificial Sequence
  ENSG00000157388_22 (sequence is synthesized)
gtttaattttgatgaaacgcaaaccaagcggagcacctttgacaatttccctcaagcacttctcacagtgttccagatcctgacaggcgaagactggaatgctgtgatgtacgatggcat

SEQ ID NO: 460025 - DNA, 120 bp, Artificial Sequence
  ENSG00000157388_23 (sequence is synthesized)
catggcttacgggggcccatcctcttcaggaatgatcgtctgcatctacttcatcatcctcttcatttgtggtaactatattctactgaatgtcttcttggccatcgctgtagacaattt

SEQ ID NO: 460026 - DNA, 120 bp, Artificial Sequence
  ENSG00000157388_24 (sequence is synthesized)
ggctgatgctgaaagtctgaacactgctcagaaagaagaagcggaagaaaaggagaggaaaaagattgccagaaaagagagcctagaaaataaaaagaacaacaaaccagaagtcaacca

SEQ ID NO: 460027 - DNA, 120 bp, Artificial Sequence
  ENSG00000157388_25 (sequence is synthesized)
gatagccaacagtgacaacaaggttacaattgatgactatagagaagaggatgaagacaaggacccctatccgccttgcgatgtgccagtaggggaagaggaagaggaagaggaggagga

SEQ ID NO: 460028 - DNA, 120 bp, Artificial Sequence
  ENSG00000157388_26 (sequence is synthesized)
tgaacctgaggttcctgccggaccccgtcctcgaaggatctcggagttgaacatgaaggaaaaaattgcccccatccctgaagggagcgctttcttcattcttagcaagaccaacccgat

SEQ ID NO: 460029 - DNA, 120 bp, Artificial Sequence
  ENSG00000157388_27 (sequence is synthesized)
ccgcgtaggctgccacaagctcatcaaccaccacatcttcaccaacctcatccttgtcttcatcatgctgagcagcgctgccctggccgcagaggaccccatccgcagccactccttccg

SEQ ID NO: 460030 - DNA, 120 bp, Artificial Sequence
  ENSG00000157388_28 (sequence is synthesized)
gaacacgatactgggttactttgactatgccttcacagccatctttactgttgagatcctgttgaagatgacaacttttggagctttcctccacaaaggggccttctgcaggaactactt

SEQ ID NO: 460031 - DNA, 120 bp, Artificial Sequence
  ENSG00000157388_29 (sequence is synthesized)
caatttgctggatatgctggtggttggggtgtctctggtgtcatttgggattcaatccagtgccatctccgttgtgaagattctgagggtcttaagggtcctgcgtcccctcagggccat

SEQ ID NO: 460032 - DNA, 120 bp, Artificial Sequence
  ENSG00000157388_30 (sequence is synthesized)
caacagagcaaaaggacttaagcacgtggtccagtgcgtcttcgtggccatccggaccatcggcaacatcatgatcgtcaccaccctcctgcagttcatgtttgcctgtatcggggtcca

SEQ ID NO: 460033 - DNA, 120 bp, Artificial Sequence
  ENSG00000157388_31 (sequence is synthesized)
gttgttcaaggggaagttctatcgctgtacggatgaagccaaaagtaaccctgaagaatgcaggggacttttcatcctctacaaggatggggatgttgacagtcctgtggtccgtgaacg

SEQ ID NO: 460034 - DNA, 120 bp, Artificial Sequence
  ENSG00000157388_32 (sequence is synthesized)
gatctggcaaaacagtgatttcaacttcgacaacgtcctctctgctatgatggcgctcttcacagtctccacgtttgagggctggcctgcgttgctgtataaagccatcgactcgaatgg

SEQ ID NO: 460035 - DNA, 120 bp, Artificial Sequence
  ENSG00000157388_33 (sequence is synthesized)
agagaacatcggcccaatctacaaccaccgcgtggagatctccatcttcttcatcatctacatcatcattgtagctttcttcatgatgaacatctttgtgggctttgtcatcgttacatt

SEQ ID NO: 460036 - DNA, 120 bp, Artificial Sequence
  ENSG00000157388_34 (sequence is synthesized)
tcaggaacaaggagaaaaagagtataagaactgtgagctggacaaaaatcagcgtcagtgtgttgaatacgccttgaaagcacgtcccttgcggagatacatccccaaaaacccctacca

SEQ ID NO: 460037 - DNA, 120 bp, Artificial Sequence
  ENSG00000157388_35 (sequence is synthesized)
gtacaagttctggtacgtggtgaactcttcgcctttcgaatacatgatgtttgtcctcatcatgctcaacacactctgcttggccatgcagcactacgagcagtccaagatgttcaatga

SEQ ID NO: 460038 - DNA, 120 bp, Artificial Sequence
  ENSG00000157388_36 (sequence is synthesized)
tgccatggacattctgaacatggtcttcaccggggtgttcaccgtcgagatggttttgaaagtcatcgcatttaagcctaaggggtattttagtgacgcctggaacacgtttgactccct

SEQ ID NO: 460039 - DNA, 120 bp, Artificial Sequence
  ENSG00000157388_37 (sequence is synthesized)
catcgtaatcggcagcattatagacgtggccctcagcgaagcagacccaactgaaagtgaaaatgtccctgtcccaactgctacacctgggaactctgaagagagcaatagaatctccat

SEQ ID NO: 460040 - DNA, 120 bp, Artificial Sequence
  ENSG00000157388_38 (sequence is synthesized)
cacctttttccgtcttttccgagtgatgcgattggtgaagcttctcagcaggggggaaggcatccggacattgctgtggacttttattaagtcctttcaggcgctcccgtatgtggccct

SEQ ID NO: 460041 - DNA, 120 bp, Artificial Sequence
  ENSG00000157388_39 (sequence is synthesized)
agataacaaccagatcaataggaacaataacttccagacgtttccccaggcggtgctgctgctcttcaggtgtgcaacaggtgaggcctggcaggagatcatgctggcctgtctcccagg

SEQ ID NO: 460042 - DNA, 120 bp, Artificial Sequence
  ENSG00000157388_40 (sequence is synthesized)
gaagctctgtgaccctgagtcagattacaaccccggggaggagtatacatgtgggagcaactttgccattgtctatttcatcagtttttacatgctctgtgcatttctgatcatcaatct

SEQ ID NO: 460043 - DNA, 120 bp, Artificial Sequence
  ENSG00000157388_41 (sequence is synthesized)
gtttgtggctgtcatcatggataatttcgactatctgacccgggactggtctattttggggcctcaccatttagatgaattcaaaagaatatggtcagaatatgaccctgaggcaaaggg

SEQ ID NO: 460044 - DNA, 120 bp, Artificial Sequence
  ENSG00000157388_42 (sequence is synthesized)
aaggataaaacaccttgatgtggtcactctgcttcgacgcatccagcctcccctggggtttgggaagttatgtccacacagggtagcgtgcaagagattagttgccatgaacatgcctct

SEQ ID NO: 460045 - DNA, 120 bp, Artificial Sequence
  ENSG00000157388_43 (sequence is synthesized)
caacagtgacgggacagtcatgtttaatgcaaccctgtttgctttggttcgaacggctcttaagatcaagaccgaagggaacctggagcaagctaatgaagaacttcgggctgtgataaa

SEQ ID NO: 460046 - DNA, 120 bp, Artificial Sequence
  ENSG00000157388_44 (sequence is synthesized)
gaaaatttggaagaaaaccagcatgaaattacttgaccaagttgtccctccagctggtgatgatgaggtaaccgtggggaagttctatgccactttcctgatacaggactactttaggaa

SEQ ID NO: 460047 - DNA, 120 bp, Artificial Sequence
  ENSG00000157388_45 (sequence is synthesized)
attcaagaaacggaaagaacaaggactggtgggaaagtaccctgcgaagaacaccacaattgccctacaggcgggattaaggacactgcatgacattgggccagaaatccggcgtgctat

SEQ ID NO: 460048 - DNA, 120 bp, Artificial Sequence
  ENSG00000157388_46 (sequence is synthesized)
atcgtgtgatttgcaagatgacgagcctgaggaaacaaaacgagaagaagaagatgatgtgttcaaaagaaatggtgccctgcttggaaaccatgtcaatcatgttaatagtgataggag

SEQ ID NO: 460049 - DNA, 120 bp, Artificial Sequence
  ENSG00000157388_47 (sequence is synthesized)
agattcccttcagcagaccaataccacccaccgtcccctgcatgtccaaaggccttcaattccacctgcaagtgatactgagaaaccgctgtttcctccagcaggaaattcggtgtgtca

SEQ ID NO: 460050 - DNA, 120 bp, Artificial Sequence
  ENSG00000157388_48 (sequence is synthesized)
taaccatcataaccataattccataggaaagcaagttcccacctcaacaaatgccaatctcaataatgccaatatgtccaaagctgcccatggaaagcggcccagcattgggaaccttga

SEQ ID NO: 460051 - DNA, 120 bp, Artificial Sequence
  ENSG00000157388_49 (sequence is synthesized)
gcatgtgtctgaaaatgggcatcattcttcccacaagcatgaccgggagcctcagagaaggtccagtgtgaaaagaacccgctattatgaaacttacattaggtccgactcaggagatga

SEQ ID NO: 460052 - DNA, 120 bp, Artificial Sequence
  ENSG00000157388_50 (sequence is synthesized)
acagctcccaactatttgccgggaagacccagagatacatggctatttcagggacccccactgcttgggggagcaggagtatttcagtagtgaggaatgctacgaggatgacagctcgcc

SEQ ID NO: 460053 - DNA, 120 bp, Artificial Sequence
  ENSG00000157388_51 (sequence is synthesized)
cacctggagcaggcaaaactatggctactacagcagatacccaggcagaaacatcgactctgagaggccccgaggctaccatcatccccaaggattcttggaggacgatgactcgcccgt

SEQ ID NO: 460054 - DNA, 120 bp, Artificial Sequence
  ENSG00000157388_52 (sequence is synthesized)
ttgctatgattcacggagatctccaaggagacgcctactacctcccaccccagcatcccaccggagatcctccttcaactttgagtgcctgcgccggcagagcagccaggaagaggtccc

SEQ ID NO: 460055 - DNA, 120 bp, Artificial Sequence
  ENSG00000157388_53 (sequence is synthesized)
gtcgtctcccatcttcccccatcgcacggccctgcctctgcatctaatgcagcaacagatcatggcagttgccggcctagattcaagtaaagcccagaagtactcaccgagtcactcgac

SEQ ID NO: 460056 - DNA, 120 bp, Artificial Sequence
  ENSG00000157388_54 (sequence is synthesized)
ccggtcgtgggccacccctccagcaacccctccctaccgggactggacaccgtgctacacccccctgatccaagtggagcagtcagaggccctggaccaggtgaacggcagcctgccgtc

SEQ ID NO: 460057 - DNA, 120 bp, Artificial Sequence
  ENSG00000157388_55 (sequence is synthesized)
cctgcaccgcagctcctggtacacagacgagcccgacatctcctaccggactttcacaccagccagcctgactgtccccagcagcttccggaacaaaaacagcgacaagcagaggagtgc

SEQ ID NO: 460058 - DNA, 120 bp, Artificial Sequence
  ENSG00000157388_56 (sequence is synthesized)
ggacagcttggtggaggcagtcctgatatccgaaggcttgggacgctatgcaagggacccaaaatttgtgtcagcaacaaaacacgaaatcgctgatgcctgtgacctcaccatcgacga

SEQ ID NO: 460059 - DNA, 120 bp, Artificial Sequence
  ENSG00000157388_57 (sequence is synthesized)
gatggagagtgcagccagcaccctgcttaatgggaacgtgcgtccccgagccaacggggatgtgggccccctctcacaccggcaggactatgagctacaggactttggtcctggctacag

SEQ ID NO: 460060 - DNA, 120 bp, Artificial Sequence
  ENSG00000157388_58 (sequence is synthesized)
cgacgaagagccagaccctgggagggatgaggaggacctggcggatgaaatgatatgcatcaccaccttgtagcccccagcgaggggcagactggctctggcctcaggtggggcgcagga

SEQ ID NO: 460061 - DNA, 120 bp, Artificial Sequence
  ENSG00000157388_59 (sequence is synthesized)
gagccaggggaaaagtgcctcatagttaggaaagtttaggcactagttgggagtaatattcaattaattagacttttgtataagagatgtcatgcctcaagaaagccataaacctggtag

SEQ ID NO: 460062 - DNA, 120 bp, Artificial Sequence
  ENSG00000157388_60 (sequence is synthesized)
gaacaggtcccaagcggttgagcctggcagagtaccatgcgctcggccccagctgcaggaaacagcaggccccgccctctcacagaggatgggtgaggaggccagacctgccctgcccca

SEQ ID NO: 460063 - DNA, 120 bp, Artificial Sequence
  ENSG00000157388_61 (sequence is synthesized)
ttgtccagatgggcactgctgtggagtctgcttctcccatgtaccagggcaccaggcccacccaactgaaggcatggcggcggggtgcaggggaaagttaaaggtgatgacgatcatcac

SEQ ID NO: 460064 - DNA, 120 bp, Artificial Sequence
  ENSG00000157388_62 (sequence is synthesized)
acctgtgtcgttacctcagccatcggtctagcatatcagtcactgggcccaacatatccatttttaaaccctttcccccaaatacactgcgtcctggttcctgtttagctgttctgaaat

SEQ ID NO: 460065 - DNA, 120 bp, Artificial Sequence
  ENSG00000157388_63 (sequence is synthesized)
acggtgtgtaagtaagtcagaacccagctaccagtgattattgcgagggcaatgggacctcataaataaggttttctgtgatgtgacgccagtttacataagagaatatcactccgatgg

SEQ ID NO: 460066 - DNA, 120 bp, Artificial Sequence
  ENSG00000157388_64 (sequence is synthesized)
tcggtttctgactgtcacgctaagggcaactgtaaactggaataataatgcactcgcaaccaggtaaacttagatacactagtttgtttaaaattatagatttactgtacatgacttgta

SEQ ID NO: 460067 - DNA, 120 bp, Artificial Sequence
  ENSG00000157388_65 (sequence is synthesized)
atatactataatttgtatttgtaaagagatggtctatattttgtaattactgtattgtatttgaactgcagcaatatccatgggtcctaataattgtagttccccactaaaatctagaaa

SEQ ID NO: 460068 - DNA, 120 bp, Artificial Sequence
  ENSG00000157388_66 (sequence is synthesized)
ttattagtatttttactcgggctatccagaagtagaagaaatagagccaattctcatttattcagcgaaaatcctctggggttaaaattttaagtttgaaagaacttgacactacagaaa

SEQ ID NO: 460069 - DNA, 120 bp, Artificial Sequence
  ENSG00000157388_67 (sequence is synthesized)
tttttctaaaatattttgagtcactataaacctatcatctttccacaagatataccagatgactatttgcagtcttttctttgggcaagagttccatgattttgatactgtacctttgga

SEQ ID NO: 460070 - DNA, 120 bp, Artificial Sequence
  ENSG00000157388_68 (sequence is synthesized)
tccaccatgggttgcaactgtctttggttttgtttgtttgacttgaaccaccctctggtaagtaagtaagtgaattacagagcaggtccagctggctgctctgccccttgggtatccata

SEQ ID NO: 460071 - DNA, 120 bp, Artificial Sequence
  ENSG00000157388_69 (sequence is synthesized)
gttacggttttctctgtggcccacccagggtgttttttgcatcgctggtgcagaaatgcataggtggatgagatatagctgctcttgtcctctggggactggtggtgctgcttaagaaat

SEQ ID NO: 460072 - DNA, 120 bp, Artificial Sequence
  ENSG00000157388_70 (sequence is synthesized)
aaggggtgctggggacagaggagcaacgtggtgatctataggattggagtgtcggggtctgtacaaatcgtattgttgccttttacaaaactgctgtactgtatgttctctttgagggct

SEQ ID NO: 460073 - DNA, 120 bp, Artificial Sequence
  ENSG00000157388_71 (sequence is synthesized)
tttatatgcaattgaatgagggctgaagttttcattagaatgcactcacactctgactgtacgtcctgatgaaaacccacttttggataattagaaccgtcaaggcttcattttctgtca

SEQ ID NO: 460074 - DNA, 120 bp, Artificial Sequence
  ENSG00000157388_72 (sequence is synthesized)
acagaattaggccgactgtcaggttaccttggcagggattccctgcaatcaaaaagatagatgataggtagcaattttggtccaaaatttttaatagtatacagacaacctgttaatttt

SEQ ID NO: 460075 - DNA, 120 bp, Artificial Sequence
  ENSG00000157388_73 (sequence is synthesized)
tttttttttttttttttttgtaaataacaaacaccactttgttatgaagaccttacaaacctcttcttaagacattcttactctgatccaggcaaaaacacttcaaggtttgtaaatgac

SEQ ID NO: 460076 - DNA, 120 bp, Artificial Sequence
  ENSG00000157388_74 (sequence is synthesized)
tctttcctgacataaatccttttttattaaaatgcaaaatgttcttcagaataaaactgtgtaataatttttatacttgggagtgctccttgcacagagctgtcatttgccagtgagagc

SEQ ID NO: 460077 - DNA, 120 bp, Artificial Sequence
  ENSG00000157388_75 (sequence is synthesized)
ctccgacagggcaggtactgtgccagggcagctctgaaattatggatattcttatcctcctggttccttcggtgccaatggtaacctaataccagccgcagggagcgccatttctcctaa

SEQ ID NO: 460078 - DNA, 120 bp, Artificial Sequence
  ENSG00000157388_76 (sequence is synthesized)
agggctacaccactgtcaacattatcctggactctgtgtctctctctgttgggtcttgtggcatcacatcaggccaaaattgccagaccaggaccctaagtgtctgatagaggcgatgat

SEQ ID NO: 460079 - DNA, 120 bp, Artificial Sequence
  ENSG00000157388_77 (sequence is synthesized)
cttttccaaagtcagtacttacaaactggcattcttacaggctgcaccatttcctagtatgtctgctttaagcctggttcaacctctcatcgaatattaaatttttctttgtaagaaaaa

SEQ ID NO: 460080 - DNA, 120 bp, Artificial Sequence
  ENSG00000157388_78 (sequence is synthesized)
catttaagcctaagcactatttcactgatgcatggaacacttttgatgccttaattgttgttggtagcgtcgttgatattgctataactgaagtgaatccaactgaaagtgaaaatgtcc

SEQ ID NO: 460081 - DNA, 120 bp, Artificial Sequence
  ENSG00000157388_79 (sequence is synthesized)
gcttgaacggatgctttagaattttctgcctgagctacggcaccaagctggttagtcggaaggcgtttgtggctaaggccttgaaagggaaaagtctcaagtgggcttatttctactgaa

SEQ ID NO: 460082 - DNA, 120 bp, Artificial Sequence
  ENSG00000157388_80 (sequence is synthesized)
acagcatttcagaagaaatgcaggaaaaagcagacccaaggccccagggagaccccttccaagcaaagcactcctccggaaggtggaagcggggccgtggctcatctgcggagccagggc

SEQ ID NO: 460083 - DNA, 120 bp, Artificial Sequence
  ENSG00000157388_81 (sequence is synthesized)
tgcctgtcgcggacgttgctcacggtggttctttttcgtgaaagggaacgtacaaagcttaacagttttcccttccaagcagagactcagagaaagggaaagagtgagagagagcaaagg

SEQ ID NO: 460084 - DNA, 120 bp, Artificial Sequence
  ENSG00000157388_82 (sequence is synthesized)
agagaaagggaaagagtgagagagagcaaaggaggggggcagctgccccacagagaaatgaaatgaacacaacttcctgatgctggccagtaaaacaaaaaattaaaaataaaaataaaa

SEQ ID NO: 460085 - DNA, 120 bp, Artificial Sequence
  ENSG00000157388_83 (sequence is synthesized)
gactccattccaaagtcctgcatccctagtttgcccgaactcccaaagactgacaggcccctcggcgctgagctgacagagttccttttgtatgccagtccgccatgacctcctgagcgt

SEQ ID NO: 460086 - DNA, 120 bp, Artificial Sequence
  ENSG00000157388_84 (sequence is synthesized)
ccggccctgctctctgcagagacccagtccagaatacagtgagaagtggacaggccaggaagctcagatacacccattgaaactaacacatacacccgcatgccaaaaccaatccaggca

SEQ ID NO: 460087 - DNA, 120 bp, Artificial Sequence
  ENSG00000157388_85 (sequence is synthesized)
acacctcaggttccatcttaacgtgtccacaggaaacaccaccacacccaaacctcatctaacattgtccgtctttaattcgtgctcagagccagtctggggatgcctctttggaagcag

SEQ ID NO: 460088 - DNA, 120 bp, Artificial Sequence
  ENSG00000157388_86 (sequence is synthesized)
tgtggtctagtttcaaggacactgggagtcagggaacctgggttctagtcccagtttcagcattcacttgctgcgtgaccttgggcaagacacttaacctctctgtgcctcagtttcccc

SEQ ID NO: 460089 - DNA, 120 bp, Artificial Sequence
  ENSG00000157388_87 (sequence is synthesized)
catctgtaaaatggggttaataatgtcgacctacctcacagggctgttgtgaggaatagctaagtgattgtaaagcactttgaacgtataattgcttattaagactacaacaataataat

SEQ ID NO: 460090 - DNA, 120 bp, Artificial Sequence
  ENSG00000157388_88 (sequence is synthesized)
tgctatgggatttgaattgccctgggtgtattttgtcagtctcgtcatctttgggtcatttttcgtactaaatcttgtacttggtgtattgagcggagaattctcaaaggaaagagagaa

SEQ ID NO: 460091 - DNA, 120 bp, Artificial Sequence
  ENSG00000157388_89 (sequence is synthesized)
ctgcctttcttcaggctaagaaagaagtactgcactgaattcaaagatatcaaagaatgaatcacggaaattttcttgttgtttatgaattcctctttcagtgtggagggagaactcaca

SEQ ID NO: 460092 - DNA, 120 bp, Artificial Sequence
  ENSG00000157388_90 (sequence is synthesized)
tttttggattggacaaattgtaaacttatcttgtaaggaaatttcttgcgctgtgctttaaaagtctgaagatttgctccaaatgccaacagccacctaccatctctactgttctgagac

SEQ ID NO: 460093 - DNA, 120 bp, Artificial Sequence
  ENSG00000157388_91 (sequence is synthesized)
ttgcccttgaactgagaaaggacaagcagagagacaaaaaaagcacacactacagcatttcttctactaaaactttccatttggcagtggcattttcaacactatggaaatgaacctccc

SEQ ID NO: 460094 - DNA, 120 bp, Artificial Sequence
  ENSG00000157388_92 (sequence is synthesized)
tactttttctagtgatctaattttcattaaaagcactatgtatcaagagatcgatgcccgatataaaggaaaagtgataagtgaagcagaaacgaaggggtacttctctctggcttttgg

SEQ ID NO: 460095 - DNA, 120 bp, Artificial Sequence
  ENSG00000157388_93 (sequence is synthesized)
gtacattagtgaaggatgatggttctccatgtcccccagcccatcaagcttcaggatccatgtcaatggatgccaccgtcagcacattttaaaataagggtgactctgagggctcatgat

SEQ ID NO: 460096 - DNA, 120 bp, Artificial Sequence
  ENSG00000157388_94 (sequence is synthesized)
caacatcaagtgcccagcacttaagacagcctgagccaggtggctgagtgctttacctgcttcctcccacatcatcctcacggctcctctgagaggcttatccccactttacagatgaga

SEQ ID NO: 460097 - DNA, 120 bp, Artificial Sequence
  ENSG00000157388_95 (sequence is synthesized)
atacaagctcagagaggttgagccccttgcccccacatcagcatgtagatcttgcaagggtggcctggcctaaaagccagctgctctgtagcctttggaccagcaaccattcctccttcc

SEQ ID NO: 460098 - DNA, 120 bp, Artificial Sequence
  ENSG00000157388_96 (sequence is synthesized)
agcctctgcaagttgtggtcagtggcccccagggccccacatggccccacacacatgggacggagtactaaagtggtcacaagctttacccccaagagacacagcacactgaagatttgg

SEQ ID NO: 460099 - DNA, 120 bp, Artificial Sequence
  ENSG00000157388_97 (sequence is synthesized)
tagcaagcagccgtgggagagccatggggcacatttacacgtccaaagtggtttaccatgagacagccagagcctctattctgcctcatgcatcacctttaaagtcatcagcagagttct

SEQ ID NO: 460100 - DNA, 120 bp, Artificial Sequence
  ENSG00000157388_98 (sequence is synthesized)
gattccccaaccatacacgttggaggttgtttctgaacaaagcaaaaataagcccagctcaactatgaggttggttggagctgtcactacagtgcagaaaatgagctgttcagaattaca

SEQ ID NO: 460101 - DNA, 120 bp, Artificial Sequence
  ENSG00000157388_99 (sequence is synthesized)
accttcctctccttctgagcatgtatgtcacctttctaggtctctatcttgagacatcgggatttggacggttaattgcccttgataagtttatggtagttatacatgcaaatccctatg

SEQ ID NO: 460102 - DNA, 120 bp, Artificial Sequence
  ENSG00000157388_100 (sequence is synthesized)
cacaggggtgaaatgtggcccgtgaagcctctttttgttttgtaatttttattttaagtaaataaccaagacagcatttcatagtgttactaatatgctgctctattaaactcataacaa

SEQ ID NO: 460103 - DNA, 120 bp, Artificial Sequence
  ENSG00000157388_101 (sequence is synthesized)
atatattattttctgcaacctagagtatcagttcatttaactgacactaattttgagccttagttgctttgcaaaaccttgctttttgctggtttgagacccctgtgttatatgctgaga

SEQ ID NO: 460104 - DNA, 120 bp, Artificial Sequence
  ENSG00000157388_102 (sequence is synthesized)
cctcggtgccttctgcgccggaccgcccacccgccccactctgcccctgcccctgccccagccagaagcaagtgtttaggctcttggtctaatgtgctgattcgggagagctctgtctgg

SEQ ID NO: 460105 - DNA, 120 bp, Artificial Sequence
  ENSG00000157388_103 (sequence is synthesized)
cacatatgttctcataaaaaaaagccatctcagaactgcaagctgcatggcacacacaaccccagattcacccagcaggcgtttgtaagcatctgcaggtttctctagaatgtcagtctg

SEQ ID NO: 460106 - DNA, 120 bp, Artificial Sequence
  ENSG00000157388_104 (sequence is synthesized)
ctccctaaatctcacaagtaaaactctttagtaccttcccattgccctgaagataaagcccactcttctgcccggggctcacagcccctgcctgttgcctcctgcccttgtctccagcct

SEQ ID NO: 460107 - DNA, 120 bp, Artificial Sequence
  ENSG00000157388_105 (sequence is synthesized)
ggtcttttatctgtctgctcatcacacgttattttcattccctcggtatctatgctgtcaccctgctcctatgcacatggtgctccctccacccgaaacactcttcgcctttcctatcac

SEQ ID NO: 460108 - DNA, 120 bp, Artificial Sequence
  ENSG00000157388_106 (sequence is synthesized)
ctgatgtatctttcagttctgagtttacatgtcacttccccctagaggccttccctgacccagccccccagccttcagtagatgagcctgtctcacgcttccctgtgtgtctggaccacc

SEQ ID NO: 460109 - DNA, 120 bp, Artificial Sequence
  ENSG00000157388_107 (sequence is synthesized)
ccagcatcatcactggggtttgatgttgcctggctacctttgtgtctcccccaggggagatccgcgaatgtgagaccgtgcccctctggagcaccacgttcccagtgtgtaacctgctgc

SEQ ID NO: 460110 - DNA, 120 bp, Artificial Sequence
  ENSG00000157388_108 (sequence is synthesized)
ctggcacatggttgtgcctggcagatcttttttgaatgagtgaagtgccaggtaccatgagaaaaccctagctggtaaagatcaaacctgagttagttctaaattcacatacggattttt

SEQ ID NO: 460111 - DNA, 120 bp, Artificial Sequence
  ENSG00000157388_109 (sequence is synthesized)
agaagatgatgtgttcaaagtaattattccacgcctagctacacactggccatctggaaatagcagggcaggactccagtttgggcagttaatcatccacagaagagtctggagaatgca

SEQ ID NO: 460112 - DNA, 120 bp, Artificial Sequence
  ENSG00000157388_110 (sequence is synthesized)
gcccatccccagggcctagaggggctttcagaccacaccctccccctcttacagaccctccccaggcatcagcacctcttctagggccaggccagctctttccctgagcttacccagctt

SEQ ID NO: 460113 - DNA, 120 bp, Artificial Sequence
  ENSG00000157388_111 (sequence is synthesized)
cccctcactgcctgcttctgaggagctcggccacagccgctggccctgtggatgagcatcctgagtccttccggcagctgcctttgctaccctcctccttcccgggccagctctttgatc

SEQ ID NO: 460114 - DNA, 120 bp, Artificial Sequence
  ENSG00000157388_112 (sequence is synthesized)
tgccagctggctgtcagtcccccagcccagagagcatgcccaaccttggggccaccagccagcccagctgggtataagtcaccccaacttggagcaactggaagagcacactcgagtgac

SEQ ID NO: 460115 - DNA, 120 bp, Artificial Sequence
  ENSG00000157388_113 (sequence is synthesized)
ggcatgggaaagggactgggcctgcctaacagaggagccctaacatcaagtgggcagtgggatgggttgtgggtggagggaggcagcctagtctaagaatggaggcagtcgaagagccca

SEQ ID NO: 460116 - DNA, 120 bp, Artificial Sequence
  ENSG00000157388_114 (sequence is synthesized)
caggatctgttcacccagtgccaccacaccagcattctagcatccttgggccgggcacgtgatgagcctttggtgtgtttcgtgaccagcgaacttttatagcgtcgctgccgccacggc

SEQ ID NO: 460117 - DNA, 120 bp, Artificial Sequence
  ENSG00000157388_115 (sequence is synthesized)
tttcgagactggtctggctcaggtctggtagctgacttcaggacccaggccaggacggtgaccgaggccctgcccctgagaaggtgatgagctctggctcttggggcgcagacagagcag

SEQ ID NO: 460118 - DNA, 120 bp, Artificial Sequence
  ENSG00000157388_116 (sequence is synthesized)
catgccagccagctctgctccttagcatgaagcgagaagcaacgtgagcttttgttgctgaaggggttacccgtagctggcacagccacaggctcaaagctggggaagatggcccagaaa

SEQ ID NO: 460119 - DNA, 120 bp, Artificial Sequence
  ENSG00000157388_117 (sequence is synthesized)
gaaatgataaaaggaagacaaaccaacaacaacaacaaaacaaaacaaaagtcctcccacctggagggccctggcttcccacaggagaaccgatactgcacatttaaaacaactccttgg

SEQ ID NO: 460120 - DNA, 120 bp, Artificial Sequence
  ENSG00000157388_118 (sequence is synthesized)
ttttcattcttttctttttagctgcacacctaagagcttgcatggcttacatgaaatgctttggaaaaattgtaacaatgtgcttgagcttttcctgcagcctccattcctttcacctct

SEQ ID NO: 460121 - DNA, 120 bp, Artificial Sequence
  ENSG00000157388_119 (sequence is synthesized)
cagtctttcagaatattctgaagcaattctgttttagggtggtggcatggaatcagagttatctcttgccaactgtattcccctacgttgtttctttaaatacagatgcatgcttcagaa

SEQ ID NO: 460122 - DNA, 120 bp, Artificial Sequence
  ENSG00000157388_120 (sequence is synthesized)
ttgtaggcgagcctactgaagactgtcactgagacaggggcataagctcttggcctggcagatcctagcactagtaaccaggcagtgttccttggaagtgggggttttgcaaaggaggtt

SEQ ID NO: 460123 - DNA, 120 bp, Artificial Sequence
  ENSG00000157388_121 (sequence is synthesized)
acggggttgcaggcctcaggcatcctacctaggaccttcttgaccctctggatgcctgaccataccaacaacccttagactgccttcagtgacatcagtcagtgccctggattggctttt

SEQ ID NO: 460124 - DNA, 120 bp, Artificial Sequence
  ENSG00000157388_122 (sequence is synthesized)
ggggaagccttcctccccaccgctgaatcaggaaggagcaaagccaggacccaggctggccccagggcccatgtgtggtctaacctgttctgccattttcattgatctaggcgggattaa

SEQ ID NO: 460125 - DNA, 120 bp, Artificial Sequence
  ENSG00000157388_123 (sequence is synthesized)
gaaggcaaacgaaatagggtcacagtggccgacttgcttaaagaggataagaagaaaaagaagttttgctgctttcggcaacgcagggctaaagatcatgctagcatgcccaccagcgag

SEQ ID NO: 460126 - DNA, 120 bp, Artificial Sequence
  ENSG00000157388_124 (sequence is synthesized)
attcacggagatctccaaggagacgcctactacctcccaccccagcatgtgaggccagattttttgttttgggtggaacctcccggggaacagtgtacctctcccccaacccccgctctg

SEQ ID NO: 460127 - DNA, 120 bp, Artificial Sequence
  ENSG00000157388_125 (sequence is synthesized)
tgtttactaccagaactttaagaaattcttgttttcctttgatctcttttctgttctgtaccatacttacccattgagaaggaaaattccccccttttaaagaaatctaggcaatgcaca

SEQ ID NO: 460128 - DNA, 120 bp, Artificial Sequence
  ENSG00000157388_126 (sequence is synthesized)
aagatgtcaacagaggtaaccctgcaggttgcattttcacatcttaagaatagcagatttttgcccaagatgttggtcgataagggtgtctgatcttgaattctcagctgattccaagtg

SEQ ID NO: 460129 - DNA, 120 bp, Artificial Sequence
  ENSG00000157388_127 (sequence is synthesized)
gtggttggagtctgtacatctgatgctgagcccaagacacccaaagtggccagtttgggttttaagatcaacattcaaagtagccatagtgcagaggtaatgcagaagaatctaaaaaaa

SEQ ID NO: 460130 - DNA, 68 bp, Artificial Sequence
  ENSG00000157388_128 (sequence is synthesized)
ttttgtcagtctcgtcatctttgggtcatttttcgtactaaatcttgtacttggtgtattgagctgga

SEQ ID NO: 460131 - DNA, 70 bp, Artificial Sequence
  ENSG00000157388_129 (sequence is synthesized)
tcccagcactttcggaggccgaggcagctggaccacccgagatcaggagtttgagaccagcctgactaag

SEQ ID NO: 460132 - DNA, 120 bp, Artificial Sequence
  ENSG00000157388_130 (sequence is synthesized)
aaagagtagtgtaattgcttacaacattgaaaaggttgttattggggtcctggggtagccaggatatcggcatgatttgtcaccatattcagaataaaactgtactgcaatagtgagtta

SEQ ID NO: 460133 - DNA, 120 bp, Artificial Sequence
  ENSG00000157388_131 (sequence is synthesized)
attccatatcttggccaacagagaatttttggccagtggctactaaggcacacggaagtccagtctaaaagggacaggggaggactctttgtagatagttcttatgattaaaaaataact

SEQ ID NO: 460134 - DNA, 120 bp, Artificial Sequence
  ENSG00000157388_132 (sequence is synthesized)
tcctatgtgttgtagtgatgattaagctgacagaatgctaaagacacccttaatgattacttgtagcaaagtacttccccacatttagctggatttgtctttggtttgaagaggctaata

SEQ ID NO: 460135 - DNA, 120 bp, Artificial Sequence
  ENSG00000157388_133 (sequence is synthesized)
ccttagtgggtaagcagtcggatccgtgttgcaccttctcctgctgccacgtgtgaggcaactctgcgtgtctcctagctgctccctgacagcttctctgcatgtgtttggactctgatg

SEQ ID NO: 460136 - DNA, 120 bp, Artificial Sequence
  ENSG00000157388_134 (sequence is synthesized)
tcctctcagtgtgttgcttttggattgaactgtgattctttctgcctgtatctgtctgtgagattccgtgtttccaatgcttgccaaacactgttaatttaatgaaaacgttcccccaaa

SEQ ID NO: 460137 - DNA, 120 bp, Artificial Sequence
  ENSG00000157388_135 (sequence is synthesized)
cctaagtagtccttggccagtgctttggttttaatgctagtgtctccagaaagtccagagagtgtttgcaaaatgctttatgtatcatttagagcattaaggccaactgataaagaaagc

SEQ ID NO: 460138 - DNA, 120 bp, Artificial Sequence
  ENSG00000157388_136 (sequence is synthesized)
cctttggccatttggtgtgattattttgggggtgatatgaagaacattccagacaaaggagaggcttcagtgaaaaaccaaaactcacatggctggagcagggattttctttttggtgga

SEQ ID NO: 460139 - DNA, 120 bp, Artificial Sequence
  ENSG00000157388_137 (sequence is synthesized)
aatgaggggcatgtggagttttgccagggctgagaaaggaggccctgtgatccgagaaaagcagcggtcaagataggagccatagaaatgccttgtaaacgataggtgtgctctcgacag

SEQ ID NO: 460140 - DNA, 120 bp, Artificial Sequence
  ENSG00000157388_138 (sequence is synthesized)
aggcccctgcaaggggtaggaggtttctgggaggaggctgctggctgtgtcttagggccccagaattcagactgatctcccgggcctggtgccctgtgaagctgggagctgtggattgtc

SEQ ID NO: 460141 - DNA, 120 bp, Artificial Sequence
  ENSG00000157388_139 (sequence is synthesized)
ttgttaacctctgtgtgagcctctgttggaagagctgttagcaggacaagcattttcttaaaattagaggtgtcctttgtttgtattcagtgctagagaagctgaatctttcccaacaaa

SEQ ID NO: 460142 - DNA, 120 bp, Artificial Sequence
  ENSG00000157388_140 (sequence is synthesized)
aataatttgcttattacctggtcaagctgatcagtgcaggtaaagtccctccctttaaaacaggtgtaaacacaggagccccagcaagatatgtcagctgctggggacacttagggtatc

SEQ ID NO: 460143 - DNA, 120 bp, Artificial Sequence
  ENSG00000157388_141 (sequence is synthesized)
tggaaggtgacagtgggaagtgtcgtggggttctggcaggacttgtgttcttgcactgaagtgctgtgcgctccccacagtatgcagcgccagggcttctgactcggatcagttgcccta

SEQ ID NO: 460144 - DNA, 120 bp, Artificial Sequence
  ENSG00000157388_142 (sequence is synthesized)
cagcgccagggcttctgactcggatcagttgccctatgggctgccttcactcctcctcctgagaacaggcgaacgtttaaaagtagtaagttctctttgggaggctgaggcgggtggatc

SEQ ID NO: 460145 - DNA, 81 bp, Artificial Sequence
  ENSG00000157388_143 (sequence is synthesized)
tagtaagtttgtactttaaaaaacatccctcactggggcttctgccttcatcctctcctactaaagtttggagacctcact

SEQ ID NO: 460146 - DNA, 120 bp, Artificial Sequence
  ENSG00000157388_144 (sequence is synthesized)
ctgccttcatcctctcctactaaagtttggagacctcactacctaatctttctcttggacaaaccgcatgcttcttcctgggctcgttgctgagcatccggggccaccctgactctgaaa

SEQ ID NO: 460147 - DNA, 120 bp, Artificial Sequence
  ENSG00000157388_145 (sequence is synthesized)
aatctcattctgttttctaatggaactagtctaaaaaggtcccctctcattgggtatagactgaatcctgctaaagggttaaccagaacttgtcaccagcgagacgactgtgtgcagggc

SEQ ID NO: 460148 - DNA, 120 bp, Artificial Sequence
  ENSG00000157388_146 (sequence is synthesized)
cagcctaggctgagtgcagcctgcctgtgatggggaacaggctctgccaggcagggttctttggctggagtctcaaagcctggcgcttgtatcctgaagatgaatggcctggcccagtcc

SEQ ID NO: 460149 - DNA, 120 bp, Artificial Sequence
  ENSG00000157388_147 (sequence is synthesized)
ggttttgaaagtcatcgcatttaagcctaaggggtattttagtgacgcctggaacacgtttgactccctcatcgtaatcggcagcattatagacgtggccctcagcgaagcagacaaaat

SEQ ID NO: 460150 - DNA, 120 bp, Artificial Sequence
  ENSG00000157388_148 (sequence is synthesized)
tgtagcggcaagtatatataagcatatatacggtgaagtccttaaagcaaagcacttctaaagaatgtgtgcttgtttttggcctctccacctttggttttcactgcgctccacaggacg

SEQ ID NO: 460151 - DNA, 120 bp, Artificial Sequence
  ENSG00000157388_149 (sequence is synthesized)
tgctaaggattggttgcaatcatctaaattgttccccatcccatagattgtcatctccagcctggggccatcttggtcagtcacacttggctctgtgacttgccaacatagtcttccaga

SEQ ID NO: 460152 - DNA, 120 bp, Artificial Sequence
  ENSG00000157388_150 (sequence is synthesized)
tggctgagaaatgattgaattcagcctgcgtttgtattctttgcaaaaacgttttgggtagtcctttgcatggtcctgcctgcgcacgcaccagcctgcttcatcctactgtccccctcc

SEQ ID NO: 460153 - DNA, 120 bp, Artificial Sequence
  ENSG00000157388_151 (sequence is synthesized)
catgtccccacaccccgctcagttcctggtttggcagcactcatggacttatctccatcacatttggtcctaacctcaccaggctgctaaaatgacacactgtgactgctgggctccctc

SEQ ID NO: 460154 - DNA, 120 bp, Artificial Sequence
  ENSG00000157388_152 (sequence is synthesized)
ttgctccgtccctctttgatgcctgtttgttccttgaatgatgaaatgacccagcaacatactgtccctaacccatggatggctgtcactgacatttgtctcttctcattatcattagtg

SEQ ID NO: 460155 - DNA, 120 bp, Artificial Sequence
  ENSG00000157388_153 (sequence is synthesized)
tctgggaggcaaaacacttgtttagaagctgtatctgccttattattacttactttgaaggagcaggtaaaaagtcattagggagctcactctcagagatccaggaatggtccctgcctt

SEQ ID NO: 460156 - DNA, 120 bp, Artificial Sequence
  ENSG00000157399_0 (sequence is synthesized)
gttaatcattcccagctcaaagccttgtgcaagtgctctctgccttcacgcttgcttcctttgggagagaaccttcctcttcttgatcggggattcaggaaggagcccaggagcagagga

SEQ ID NO: 460157 - DNA, 120 bp, Artificial Sequence
  ENSG00000157399_1 (sequence is synthesized)
agtagagagagagacaacatgttacatctgcaccattcttgtttgtgtttcaggagctggctgccagcgatgctcgctgtactgctaagtttggcaccatcagcttccagcgacatttcc

SEQ ID NO: 460158 - DNA, 120 bp, Artificial Sequence
  ENSG00000157399_2 (sequence is synthesized)
gcctcccgaccgaacatccttcttctgatggcggacgaccttggcattggggacattggctgctatggcaacaacaccatgaggactccgaatattgaccgccttgcagaggacggcgtg

SEQ ID NO: 460159 - DNA, 120 bp, Artificial Sequence
  ENSG00000157399_3 (sequence is synthesized)
aagctgacccaacacatctctgccgcatctttgtgcaccccaagcagagccgccttcctcacgggcagataccctgtgcgatcagggatggtttccagcattggttaccgtgttcttcag

SEQ ID NO: 460160 - DNA, 120 bp, Artificial Sequence
  ENSG00000157399_4 (sequence is synthesized)
tggaccggagcatctggaggtcttccaacaaatgagacaacttttgcaaaaatactgaaagagaaaggctatgccactggactcattggaaaatggcatctgggtctcaactgtgagtca

SEQ ID NO: 460161 - DNA, 120 bp, Artificial Sequence
  ENSG00000157399_5 (sequence is synthesized)
gccagtgatcattgccaccaccctctccatcatggctttgaccatttctacggaatgcctttctccttgatgggtgattgcgcccgctgggaactctcagagaagcgtgtcaacctggaa

SEQ ID NO: 460162 - DNA, 120 bp, Artificial Sequence
  ENSG00000157399_6 (sequence is synthesized)
caaaaactcaacttcctcttccaagtcctggccttggttgccctcacactggtagcagggaagctcacacacctgatacccgtctcgtggatgccggtcatctggtcagccctttcggcc

SEQ ID NO: 460163 - DNA, 120 bp, Artificial Sequence
  ENSG00000157399_7 (sequence is synthesized)
gtcctcctcctcgcaagctcctattttgtgggtgctctgattgtccatgccgattgctttctgatgagaaaccacaccatcacggagcagcccatgtgcttccaaagaacgacacccctt

SEQ ID NO: 460164 - DNA, 120 bp, Artificial Sequence
  ENSG00000157399_8 (sequence is synthesized)
gaggttgcgtcctttctcaaaaggaataagcatgggcctttcctcctctttgtttcctttctacacgttcacatccctcttatcactatggagaacttcctcgggaagagtctccacggg

SEQ ID NO: 460165 - DNA, 120 bp, Artificial Sequence
  ENSG00000157399_9 (sequence is synthesized)
ctgtatggggacaacgtagaggagatggactggatggtaggacggatccttgacactttggacgtggagggtttgagcaacagcaccctcatttattttacgtcggatcacggcggttcc

SEQ ID NO: 460166 - DNA, 120 bp, Artificial Sequence
  ENSG00000157399_10 (sequence is synthesized)
ctagagaatcaacttggaaacacccagtatggtggctggaatggaatttataaaggtgggaagggcatgggaggatgggaaggtgggatccgcgtgcccgggatcttccgctggcccggg

SEQ ID NO: 460167 - DNA, 120 bp, Artificial Sequence
  ENSG00000157399_11 (sequence is synthesized)
gtgctcccggccggccgagtgattggcgagcccacgagtctgatggacgtgttccccaccgtggtccggctggcgggcggcgaggtgccccaggacagagtgattgacggccaagacctt

SEQ ID NO: 460168 - DNA, 120 bp, Artificial Sequence
  ENSG00000157399_12 (sequence is synthesized)
ctgcccttgctcctggggacagcccaacactcagaccacgagttcctgatgcattattgtgagaggtttctgcacgcagccaggtggcatcaacgggacagaggaacaatgtggaaagtc

SEQ ID NO: 460169 - DNA, 120 bp, Artificial Sequence
  ENSG00000157399_13 (sequence is synthesized)
cactttgtgacgcctgtgttccagccagagggagccggtgcctgctatggaagaaaggtctgcccgtgctttggggaaaaagtagtccaccacgatccacctttgctctttgacctctca

SEQ ID NO: 460170 - DNA, 120 bp, Artificial Sequence
  ENSG00000157399_14 (sequence is synthesized)
agagacccttctgagacccacatcctcacaccagcctcagagcccgtgttctatcaggtgatggaacgagtccagcaggcggtgtgggaacaccagcggacactcagcccagttcctctg

SEQ ID NO: 460171 - DNA, 120 bp, Artificial Sequence
  ENSG00000157399_15 (sequence is synthesized)
cagctggacaggctgggcaacatctggagaccgtggctgcagccctgctgtggcccgttccccctctgctggtgccttagggaagatgacccacaataaatgtctgcagtgaaaagctgg

SEQ ID NO: 460172 - DNA, 120 bp, Artificial Sequence
  ENSG00000157399_16 (sequence is synthesized)
tgcttttcagagtgaatcagctacgcacatgcgtgagccagccgttcagtgccgccgagacagccagtgcgtgtctgttttggcaggaagaagacgtttcttccaaggagcagcctcccc

SEQ ID NO: 460173 - DNA, 120 bp, Artificial Sequence
  ENSG00000157399_17 (sequence is synthesized)
gtcatcccagcactttaggaggccaccacaggaggatcactcccgtgatcaaaaccaacctgggcaacatgatgaaactctagctctacaaaacaaaaataaaaaaaaaattagcctgca

SEQ ID NO: 460174 - DNA, 120 bp, Artificial Sequence
  ENSG00000157399_18 (sequence is synthesized)
cctttgggagagaaccttcctcttcttgatcggggattcaggaaggagcccaggagcagaggaagtagagagagagacaacatgttacatctgcaccattcttgagacagggtctcacca

SEQ ID NO: 460175 - DNA, 120 bp, Artificial Sequence
  ENSG00000157399_19 (sequence is synthesized)
tgttgctcaagctggtcttaaacacctgggctcaggcaatgctcccaccttggcctcccaacgtgctcagataatgggcatgagccaccacgcctgaccgcttctggatctcttgatggt

SEQ ID NO: 460176 - DNA, 120 bp, Artificial Sequence
  ENSG00000157399_20 (sequence is synthesized)
gctttctcagaatgcactgatagtgatttatcctgcatctggagaatgaagcatgagacccgtgattaatagatgtgctccaggctcccttgatttgatgttgccccaggcagcctcaga

SEQ ID NO: 460177 - DNA, 120 bp, Artificial Sequence
  ENSG00000157399_21 (sequence is synthesized)
gaccggagcatctggaggtcttccaacaaatgagacaacttttgcaaaaatactgaaagagaaaggctatgccactggactcattggttgttttctgcaaagtagatactcaagaaatac

SEQ ID NO: 460178 - DNA, 89 bp, Artificial Sequence
  ENSG00000157399_22 (sequence is synthesized)
gcaaagaggccgaggcggaaggattgcttgagcccagaagtttgaaacccgcctgggcaacatagcaagaccccacgtctacaaaaaaa

SEQ ID NO: 460179 - DNA, 120 bp, Artificial Sequence
  ENSG00000157399_23 (sequence is synthesized)
gcgttcagcaccagatgtctgggctccttccgcgagagtgaggttctgcaaatagaacagaaggtcttttgtggacgcctgaaagacccagcagtacattccttggggacttgcctgatc

SEQ ID NO: 460180 - DNA, 120 bp, Artificial Sequence
  ENSG00000157404_0 (sequence is synthesized)
cgctcgcggctctgggggctcggctttgccgcgctcgctgcacttgggcgagagctggaacgtggaccagagctcggatcccatcgcagctaccgcgatgagaggcgctcgcggcgcctg

SEQ ID NO: 460181 - DNA, 120 bp, Artificial Sequence
  ENSG00000157404_1 (sequence is synthesized)
ggattttctctgcgttctgctcctactgcttcgcgtccagacaggctcttctcaaccatctgtgagtccaggggaaccgtctccaccatccatccatccaggaaaatcagacttaatagt

SEQ ID NO: 460182 - DNA, 120 bp, Artificial Sequence
  ENSG00000157404_2 (sequence is synthesized)
ccgcgtgggcgacgagattaggctgttatgcactgatccgggctttgtcaaatggacttttgagatcctggatgaaacgaatgagaataagcagaatgaatggatcacggaaaaggcaga

SEQ ID NO: 460183 - DNA, 120 bp, Artificial Sequence
  ENSG00000157404_3 (sequence is synthesized)
agccaccaacaccggcaaatacacgtgcaccaacaaacacggcttaagcaattccatttatgtgtttgttagagatcctgccaagcttttccttgttgaccgctccttgtatgggaaaga

SEQ ID NO: 460184 - DNA, 120 bp, Artificial Sequence
  ENSG00000157404_4 (sequence is synthesized)
agacaacgacacgctggtccgctgtcctctcacagacccagaagtgaccaattattccctcaaggggtgccaggggaagcctcttcccaaggacttgaggtttattcctgaccccaaggc

SEQ ID NO: 460185 - DNA, 120 bp, Artificial Sequence
  ENSG00000157404_5 (sequence is synthesized)
gggcatcatgatcaaaagtgtgaaacgcgcctaccatcggctctgtctgcattgttctgtggaccaggagggcaagtcagtgctgtcggaaaaattcatcctgaaagtgaggccagcctt

SEQ ID NO: 460186 - DNA, 120 bp, Artificial Sequence
  ENSG00000157404_6 (sequence is synthesized)
caaagctgtgcctgttgtgtctgtgtccaaagcaagctatcttcttagggaaggggaagaattcacagtgacgtgcacaataaaagatgtgtctagttctgtgtactcaacgtggaaaag

SEQ ID NO: 460187 - DNA, 120 bp, Artificial Sequence
  ENSG00000157404_7 (sequence is synthesized)
agaaaacagtcagactaaactacaggagaaatataatagctggcatcacggtgacttcaattatgaacgtcaggcaacgttgactatcagttcagcgagagttaatgattctggagtgtt

SEQ ID NO: 460188 - DNA, 120 bp, Artificial Sequence
  ENSG00000157404_8 (sequence is synthesized)
catgtgttatgccaataatacttttggatcagcaaatgtcacaacaaccttggaagtagtagataaaggattcattaatatcttccccatgataaacactacagtatttgtaaacgatgg

SEQ ID NO: 460189 - DNA, 120 bp, Artificial Sequence
  ENSG00000157404_9 (sequence is synthesized)
agaaaatgtagatttgattgttgaatatgaagcattccccaaacctgaacaccagcagtggatctatatgaacagaaccttcactgataaatgggaagattatcccaagtctgagaatga

SEQ ID NO: 460190 - DNA, 120 bp, Artificial Sequence
  ENSG00000157404_10 (sequence is synthesized)
aagtaatatcagatacgtaagtgaacttcatctaacgagattaaaaggcaccgaaggaggcacttacacattcctagtgtccaattctgacgtcaatgctgccatagcatttaatgttta

SEQ ID NO: 460191 - DNA, 120 bp, Artificial Sequence
  ENSG00000157404_11 (sequence is synthesized)
tgtgaatacaaaaccagaaatcctgacttacgacaggctcgtgaatggcatgctccaatgtgtggcagcaggattcccagagcccacaatagattggtatttttgtccaggaactgagca

SEQ ID NO: 460192 - DNA, 120 bp, Artificial Sequence
  ENSG00000157404_12 (sequence is synthesized)
gagatgctctgcttctgtactgccagtggatgtgcagacactaaactcatctgggccaccgtttggaaagctagtggttcagagttctatagattctagtgcattcaagcacaatggcac

SEQ ID NO: 460193 - DNA, 120 bp, Artificial Sequence
  ENSG00000157404_13 (sequence is synthesized)
ggttgaatgtaaggcttacaacgatgtgggcaagacttctgcctattttaactttgcatttaaaggtaacaacaaagagcaaatccatccccacaccctgttcactcctttgctgattgg

SEQ ID NO: 460194 - DNA, 120 bp, Artificial Sequence
  ENSG00000157404_14 (sequence is synthesized)
tttcgtaatcgtagctggcatgatgtgcattattgtgatgattctgacctacaaatatttacagaaacccatgtatgaagtacagtggaaggttgttgaggagataaatggaaacaatta

SEQ ID NO: 460195 - DNA, 120 bp, Artificial Sequence
  ENSG00000157404_15 (sequence is synthesized)
tgtttacatagacccaacacaacttccttatgatcacaaatgggagtttcccagaaacaggctgagttttgggaaaaccctgggtgctggagctttcgggaaggttgttgaggcaactgc

SEQ ID NO: 460196 - DNA, 120 bp, Artificial Sequence
  ENSG00000157404_16 (sequence is synthesized)
ttatggcttaattaagtcagatgcggccatgactgtcgctgtaaagatgctcaagccgagtgcccatttgacagaacgggaagccctcatgtctgaactcaaagtcctgagttaccttgg

SEQ ID NO: 460197 - DNA, 120 bp, Artificial Sequence
  ENSG00000157404_17 (sequence is synthesized)
taatcacatgaatattgtgaatctacttggagcctgcaccattggagggcccaccctggtcattacagaatattgttgctatggtgatcttttgaattttttgagaagaaaacgtgattc

SEQ ID NO: 460198 - DNA, 120 bp, Artificial Sequence
  ENSG00000157404_18 (sequence is synthesized)
atttatttgttcaaagcaggaagatcatgcagaagctgcactttataagaatcttctgcattcaaaggagtcttcctgcagcgatagtactaatgagtacatggacatgaaacctggagt

SEQ ID NO: 460199 - DNA, 120 bp, Artificial Sequence
  ENSG00000157404_19 (sequence is synthesized)
ttcttatgttgtcccaaccaaggccgacaaaaggagatctgtgagaataggctcatacatagaaagagatgtgactcccgccatcatggaggatgacgagttggccctagacttagaaga

SEQ ID NO: 460200 - DNA, 120 bp, Artificial Sequence
  ENSG00000157404_20 (sequence is synthesized)
cttgctgagcttttcttaccaggtggcaaagggcatggctttcctcgcctccaagaattgtattcacagagacttggcagccagaaatatcctccttactcatggtcggatcacaaagat

SEQ ID NO: 460201 - DNA, 120 bp, Artificial Sequence
  ENSG00000157404_21 (sequence is synthesized)
tcaagaatgattctaattatgtggttaaaggaaacgctcgactacctgtgaagtggatggcacctgaaagcattttcaactgtgtatacacgtttgaaagtgacgtctggtcctatggga

SEQ ID NO: 460202 - DNA, 120 bp, Artificial Sequence
  ENSG00000157404_22 (sequence is synthesized)
tttttctttgggagctgttctctttaggaagcagcccctatcctggaatgccggtcgattctaagttctacaagatgatcaaggaaggcttccggatgctcagccctgaacacgcacctg

SEQ ID NO: 460203 - DNA, 120 bp, Artificial Sequence
  ENSG00000157404_23 (sequence is synthesized)
ctgaaatgtatgacataatgaagacttgctgggatgcagatcccctaaaaagaccaacattcaagcaaattgttcagctaattgagaagcagatttcagagagcaccaatcatatttact

SEQ ID NO: 460204 - DNA, 120 bp, Artificial Sequence
  ENSG00000157404_24 (sequence is synthesized)
ccaacttagcaaactgcagccccaaccgacagaagcccgtggtagaccattctgtgcggatcaattctgtcggcagcaccgcttcctcctcccagcctctgcttgtgcacgacgatgtct

SEQ ID NO: 460205 - DNA, 120 bp, Artificial Sequence
  ENSG00000157404_25 (sequence is synthesized)
gagcagaatcagtgtttgggtcacccctccaggaatgatctcttcttttggcttccatgatggttattttcttttctttcaacttgcatccaactccaggatagtgggcaccccactgca

SEQ ID NO: 460206 - DNA, 120 bp, Artificial Sequence
  ENSG00000157404_26 (sequence is synthesized)
atcctgtctttctgagcacactttagtggccgatgatttttgtcatcagccaccatcctattgcaaaggttccaactgtatatattcccaatagcaacgtagcttctaccatgaacagaa

SEQ ID NO: 460207 - DNA, 120 bp, Artificial Sequence
  ENSG00000157404_27 (sequence is synthesized)
aacattctgatttggaaaaagagagggaggtatggactgggggccagagtcctttccaaggcttctccaattctgcccaaaaatatggttgatagtttacctgaataaatggtagtaatc

SEQ ID NO: 460208 - DNA, 120 bp, Artificial Sequence
  ENSG00000157404_28 (sequence is synthesized)
acagttggccttcagaaccatccatagtagtatgatgatacaagattagaagctgaaaacctaagtcctttatgtggaaaacagaacatcattagaacaaaggacagagtatgaacacct

SEQ ID NO: 460209 - DNA, 120 bp, Artificial Sequence
  ENSG00000157404_29 (sequence is synthesized)
gggcttaagaaatctagtatttcatgctgggaatgagacataggccatgaaaaaaatgatccccaagtgtgaacaaaagatgctcttctgtggaccactgcatgagcttttatactaccg

SEQ ID NO: 460210 - DNA, 120 bp, Artificial Sequence
  ENSG00000157404_30 (sequence is synthesized)
acctggtttttaaatagagtttgctattagagcattgaattggagagaaggcctccctagccagcacttgtatatacgcatctataaattgtccgtgttcatacatttgaggggaaaaca

SEQ ID NO: 460211 - DNA, 120 bp, Artificial Sequence
  ENSG00000157404_31 (sequence is synthesized)
ccataaggtttcgtttctgtatacaaccctggcattatgtccactgtgtatagaagtagattaagagccatataagtttgaaggaaacagttaataccattttttaaggaaacaatataa

SEQ ID NO: 460212 - DNA, 120 bp, Artificial Sequence
  ENSG00000157404_32 (sequence is synthesized)
ccacaaagcacagtttgaacaaaatctcctcttttagctgatgaacttattctgtagattctgtggaacaagcctatcagcttcagaatggcattgtactcaatggatttgatgctgttt

SEQ ID NO: 460213 - DNA, 120 bp, Artificial Sequence
  ENSG00000157404_33 (sequence is synthesized)
gacaaagttactgattcactgcatggctcccacaggagtgggaaaacactgccatcttagtttggattcttatgtagcaggaaataaagtataggtttagcctccttcgcaggcatgtcc

SEQ ID NO: 460214 - DNA, 120 bp, Artificial Sequence
  ENSG00000157404_34 (sequence is synthesized)
tggacaccgggccagtatctatatatgtgtatgtacgtttgtatgtgtgtagacaaatatttggaggggtatttttgccctgagtccaagagggtcctttagtacctgaaaagtaacttg

SEQ ID NO: 460215 - DNA, 120 bp, Artificial Sequence
  ENSG00000157404_35 (sequence is synthesized)
gctttcattattagtactgctcttgtttcttttcacatagctgtctagagtagcttaccagaagcttccatagtggtgcagaggaagtggaaggcatcagtccctatgtatttgcagttc

SEQ ID NO: 460216 - DNA, 120 bp, Artificial Sequence
  ENSG00000157404_36 (sequence is synthesized)
acctgcacttaaggcactctgttatttagactcatcttactgtacctgttccttagaccttccataatgctactgtctcactgaaacatttaaattttaccctttagactgtagcctgga

SEQ ID NO: 460217 - DNA, 120 bp, Artificial Sequence
  ENSG00000157404_37 (sequence is synthesized)
tattattcttgtagtttacctctttaaaaacaaaacaaaacaaaacaaaaaactccccttcctcactgcccaatataaaaggcaaatgtgtacatggcagagtttgtgtgttgtcttgaa

SEQ ID NO: 460218 - DNA, 120 bp, Artificial Sequence
  ENSG00000157404_38 (sequence is synthesized)
agattcaggtatgttgcctttatggtttcccccttctacatttcttagactacatttagagaactgtggccgttatctggaagtaaccatttgcactggagttctatgctctcgcacctt

SEQ ID NO: 460219 - DNA, 120 bp, Artificial Sequence
  ENSG00000157404_39 (sequence is synthesized)
tccaaagttaacagattttggggttgtgttgtcacccaagagattgttgtttgccatactttgtctgaaaaattcctttgtgtttctattgacttcaatgatagtaagaaaagtggttgt

SEQ ID NO: 460220 - DNA, 120 bp, Artificial Sequence
  ENSG00000157404_40 (sequence is synthesized)
tagttatagatgtctaggtacttcaggggcacttcattgagagttttgtcttggatattcttgaaagtttatatttttataattttttcttacatcagatgtttctttgcagtggcttaa

SEQ ID NO: 460221 - DNA, 120 bp, Artificial Sequence
  ENSG00000157404_41 (sequence is synthesized)
tgtttgaaattattttgtggctttttttgtaaatattgaaatgtagcaataatgtcttttgaatattcccaagcccatgagtccttgaaaatattttttatatatacagtaactttatgt

SEQ ID NO: 460222 - DNA, 120 bp, Artificial Sequence
  ENSG00000157404_42 (sequence is synthesized)
gtaaatacataagcggcgtaagtttaaaggatgttggtgttccacgtgttttattcctgtatgttgtccaattgttgacagttctgaagaattctaataaaatgtacatatataaatcaa

SEQ ID NO: 460223 - DNA, 120 bp, Artificial Sequence
  ENSG00000157404_43 (sequence is synthesized)
gaatgattctaattatgtggttaaaggaaacgtgagtacccattctctgcttgacagtcctgcaaaggatttttagtttcaactttcgataaaaattgtttcctgtgattttcataatgt

SEQ ID NO: 460224 - DNA, 120 bp, Artificial Sequence
  ENSG00000157404_44 (sequence is synthesized)
aaatcctgtctagggatatcacacattttagcagtcaaattaagtatacttcagcaaaatttgcatggtatgctgaacattactacaactaacattcaataatagaagtcctaattctaa

SEQ ID NO: 460225 - DNA, 120 bp, Artificial Sequence
  ENSG00000157404_45 (sequence is synthesized)
tgcttggctttctgcagtgctgtgctttcaagaatttaatatcctgctcttaattttggatgacatatggatgactgagccatagataaaatatttctggctgggtctagaaggcctaaa

SEQ ID NO: 460226 - DNA, 120 bp, Artificial Sequence
  ENSG00000157423_0 (sequence is synthesized)
accgtggcaacggacggcaacagctcgggcggcgcatggagagtgcgggcggcttcaagctgggtatggagcccctcagcggcggcggggtctgtgagttggacgcggggtcttggcggg

SEQ ID NO: 460227 - DNA, 120 bp, Artificial Sequence
  ENSG00000157423_1 (sequence is synthesized)
gaatggaggtagaataaacgtgggacccggagtgcaccaaggtgagaaaaaaaaattactaaaaatgacaagtagaagacttgaggagtccatgggggctgttcagatgggattggtcaa

SEQ ID NO: 460228 - DNA, 120 bp, Artificial Sequence
  ENSG00000157423_2 (sequence is synthesized)
tatgttcaaaggatttcaaagcaaggttttgccacccctgagtccaaaggtggttacagaagaagaagtaaaccgaatgcttacaccctcagagttcctgaaggaaatgtccctgaccac

SEQ ID NO: 460229 - DNA, 120 bp, Artificial Sequence
  ENSG00000157423_3 (sequence is synthesized)
cgagcagagactggcaaaaacacgtttgatgtgccgaccacagatcatcgaactcttagatatgggggaaacaacacatcagaagttttcaggaattgacctggatcaggcattattcca

SEQ ID NO: 460230 - DNA, 120 bp, Artificial Sequence
  ENSG00000157423_4 (sequence is synthesized)
gccctttccatcagaaattatatttcagaactacactccctgtgaagtctatgaagttccactgattttgaggaacaatgacaaaattccaaggttggtgaaagttgtggaagaaagttc

SEQ ID NO: 460231 - DNA, 120 bp, Artificial Sequence
  ENSG00000157423_5 (sequence is synthesized)
gccttactttaaagtaatcagccccaaagatattggccacaaagtggctcctggagtgccttccatattccgaatcctctttactccagaggagaacaaggattacgcccatacgttgac

SEQ ID NO: 460232 - DNA, 120 bp, Artificial Sequence
  ENSG00000157423_6 (sequence is synthesized)
ctgtgttactgaaagagaaaagtttattgtacccatcaaagctagaggggcacgagccattctcgattttcctgacaagctgaatttttccacttgtcctgtcaaatacagcacccagaa

SEQ ID NO: 460233 - DNA, 120 bp, Artificial Sequence
  ENSG00000157423_7 (sequence is synthesized)
gattctgctggtacgaaacattggcaacaaaaatgctgtatttcacatcaaaacttgtaggcctttctctatagaaccagctattggaactcttaatgtgggagagtccatgcaactgga

SEQ ID NO: 460234 - DNA, 120 bp, Artificial Sequence
  ENSG00000157423_8 (sequence is synthesized)
agtggagtttgagccacagagtgtgggcgatcacagtggaagacttatcgtgtgttatgacacaggtgaaaaggtgtttgtatctctctatggagctgccatagacatgaatataaggct

SEQ ID NO: 460235 - DNA, 120 bp, Artificial Sequence
  ENSG00000157423_9 (sequence is synthesized)
ggataagaattccttgaccatcgagaaaacctacatatctctggccaatcagcgaactataaccattcacaatcgcagtaatatcattgcccatttcctgtggaaggtatttgctaccca

SEQ ID NO: 460236 - DNA, 120 bp, Artificial Sequence
  ENSG00000157423_10 (sequence is synthesized)
gcaagaagaggacagagaaaaatatagggcctgtgatgatctgatcaaagaggagaaggatgagactgatgagttttttgaagagtgcattactgatcctttactccgagaacatctttc

SEQ ID NO: 460237 - DNA, 120 bp, Artificial Sequence
  ENSG00000157423_11 (sequence is synthesized)
tgttctgtcccgaacctttgcgaatcagaggaggctggtgcagggagacagcaagctgttcttcaataacgttttcactgtggagcccctggaaggtgatgtctggcccaactcatcagc

SEQ ID NO: 460238 - DNA, 120 bp, Artificial Sequence
  ENSG00000157423_12 (sequence is synthesized)
tgaaatcaccgtgtactttaacccactagaagccaagctctatcaacagaccatttactgcgacattttaggccgagaaatccgtctgcccctccgaatcaaaggggaaggcatgggacc

SEQ ID NO: 460239 - DNA, 120 bp, Artificial Sequence
  ENSG00000157423_13 (sequence is synthesized)
taagattcacttcaactttgaattgctggatattgggaaagttttcactggatctgcacattgttatgaggcgatactgtacaacaaaggcagcatcgatgctctcttcaacatgacccc

SEQ ID NO: 460240 - DNA, 120 bp, Artificial Sequence
  ENSG00000157423_14 (sequence is synthesized)
tccaacttcagctttgggggcctgctttgttttcagtcccaaggaaggcatcattgaaccaagtggagtccaagctatccagatctccttcagctctaccatcctgggaaactttgaaga

SEQ ID NO: 460241 - DNA, 120 bp, Artificial Sequence
  ENSG00000157423_15 (sequence is synthesized)
agagttcctggtcaatgtcaatgggtcacctgagcctgtgaaactgaccattagaggctgtgtcattggacctaccttccattttaatgttccagctctgcactttggtgatgtttcctt

SEQ ID NO: 460242 - DNA, 120 bp, Artificial Sequence
  ENSG00000157423_16 (sequence is synthesized)
tgggtttcctcataccttgatatgttccctcaataatacctctttgatccccatgacttacaaactgcgtatccctggggatggccttggccataaaagcatttcatattgtgagcagca

SEQ ID NO: 460243 - DNA, 120 bp, Artificial Sequence
  ENSG00000157423_17 (sequence is synthesized)
tgtggactacaaaagaccatcttggaccaaggaagaaatatcctcaatgaaaccaaaagaattcaccatctctcctgactgtggcaccattcgcccccagggatttgctgctatcagggt

SEQ ID NO: 460244 - DNA, 120 bp, Artificial Sequence
  ENSG00000157423_18 (sequence is synthesized)
gacattatgctccaacactgtgcagaaatacgagctggcactcgtggtggacgtggagggcatcggagaagaggtgctggcgctcttaattacagcaaggtgtgttgtacctgccctcca

SEQ ID NO: 460245 - DNA, 120 bp, Artificial Sequence
  ENSG00000157423_19 (sequence is synthesized)
cctggtcaatacagaggtggactttgggcactgcttcctgaagtacccgtatgagaaaacactccagcttgccaatcaagatgacctcccaggattctatgaggtccagcctcaggtgtg

SEQ ID NO: 460246 - DNA, 120 bp, Artificial Sequence
  ENSG00000157423_20 (sequence is synthesized)
tgaggaggtgcctactgtgctgttttccagccccacccccagcggggtcatctccccaagcagcaccatccacataccactggtcctggagacccaggtcactggagaacacagatccac

SEQ ID NO: 460247 - DNA, 120 bp, Artificial Sequence
  ENSG00000157423_21 (sequence is synthesized)
ggtttacatctcaatctttgggagccaggacccccctttggtatgtcacttaaagagcgctggagaaggcccagttatctacgtccatcccaatcaagtggacttcgggaatatctacgt

SEQ ID NO: 460248 - DNA, 120 bp, Artificial Sequence
  ENSG00000157423_22 (sequence is synthesized)
cctaaaagactcttccaggattctcaacctatgcaaccagtccttcattcccgcatttttccaggcacacatggcacacaaaaaatccctttggacgattgaacccaatgaaggcatggt

SEQ ID NO: 460249 - DNA, 120 bp, Artificial Sequence
  ENSG00000157423_23 (sequence is synthesized)
tcctccagaaactgatgttcaactggcactgaccgccaacctgaatgacacactgacattcaaggactgtgttattttggacattgaaaatagcagtacctatcggattcctgttcaggc

SEQ ID NO: 460250 - DNA, 120 bp, Artificial Sequence
  ENSG00000157423_24 (sequence is synthesized)
ttccggaactggttccactattgtttcagataagccctttgctccagaactcaatttgggggcacattttagcctggatacccactattaccactttaagttgatcaacaagggacgtcg

SEQ ID NO: 460251 - DNA, 120 bp, Artificial Sequence
  ENSG00000157423_25 (sequence is synthesized)
gatccaacagttgttctggatgaatgatagcttccgaccccaggccaagctgagtaagaagggccgggttaagaagggacatgctcatgtccaaccccagcccagtggctctcaggagcc

SEQ ID NO: 460252 - DNA, 120 bp, Artificial Sequence
  ENSG00000157423_26 (sequence is synthesized)
cagggatccacagagccccgtgtttcatctccaccccgccagcatggagctgtacccaggccaggcaattgatgtgatactcgaaggctattctgctactcccaggatagtgaaagagaa

SEQ ID NO: 460253 - DNA, 120 bp, Artificial Sequence
  ENSG00000157423_27 (sequence is synthesized)
gctggtgtgccacgccatcatcggggcacagaaggggaagagcttggtgatggctgtgaacatcacctgtgagttcgtcgcacctctcatccagctctccaccaagcagctcatctaccg

SEQ ID NO: 460254 - DNA, 120 bp, Artificial Sequence
  ENSG00000157423_28 (sequence is synthesized)
actggagaagaaacctaacagtatcctgaaacctgattaccagcccttggccataaagaacatttccaccctgcccgtgaacttgttgctgtcaacatctggacccttctttatatgtga

SEQ ID NO: 460255 - DNA, 120 bp, Artificial Sequence
  ENSG00000157423_29 (sequence is synthesized)
gactgataaatccctgctgccggcaactcctgagcctattaaactggaaattgatgaagaaaaaaacctgctgatcaagtttgacccttcctacagaaacgatctgaacaactgggtggc

SEQ ID NO: 460256 - DNA, 120 bp, Artificial Sequence
  ENSG00000157423_30 (sequence is synthesized)
agaagaaattctagcaattaagtatgtggaacaccctcagatagacagcctggacctgcgcggagaagtgcattaccccaacctcagctttgagacaaaggagctggattttggctgcat

SEQ ID NO: 460257 - DNA, 120 bp, Artificial Sequence
  ENSG00000157423_31 (sequence is synthesized)
cctgaacgatactgagctcattcgctacgttaccatcaccaactgcagtccgttggttgtgaagtttcgctggttcttcttggtgaatgatgaggaaaatcagataaggtttgtgacatt

SEQ ID NO: 460258 - DNA, 120 bp, Artificial Sequence
  ENSG00000157423_32 (sequence is synthesized)
gccgaagaagccctacagtgccccagtgtcccagatggagtccatcccagcaacctcagaggctgccagcccaccagcaatcctagttacagtagagtcccccgagatggatttaaatga

SEQ ID NO: 460259 - DNA, 120 bp, Artificial Sequence
  ENSG00000157423_33 (sequence is synthesized)
ttttgttaagactgtccttgtggatgaagatgccaggcctgaagaaaaagaactaagaaaaacgaaagcttccagtgtgatctcagatgaaataaaaattagctctactgaaatagaaag

SEQ ID NO: 460260 - DNA, 120 bp, Artificial Sequence
  ENSG00000157423_34 (sequence is synthesized)
aatatactcaagccagagccaggtggaggatcaggaatccctacagacctgtgaacagaatgagatgctttccattgggatagaagaagtgtttgatattttgcccctgtttggagtgtt

SEQ ID NO: 460261 - DNA, 120 bp, Artificial Sequence
  ENSG00000157423_35 (sequence is synthesized)
gcagccacacagtagccaccaaatatcgttcaccttctatggacacgctaacatcattgcacaagctaaagctctgtgtgaagtggaagaaggacccacctacgaaataacactgaaggg

SEQ ID NO: 460262 - DNA, 120 bp, Artificial Sequence
  ENSG00000157423_36 (sequence is synthesized)
agaggcgtccctggtcaactattcctttgacaccaaggatattcactacggattacagctgtttgaccatgtcacagagagggaaatcacgctgacgaacatggggaaagttggctttga

SEQ ID NO: 460263 - DNA, 120 bp, Artificial Sequence
  ENSG00000157423_37 (sequence is synthesized)
gttcaaggttctgactgaccaccagtcttctccagacaaccttctccctggagtgccactaatcctgcctgtgtctggctttatcagttcacatcaagagcaggtattaaaagtttacta

SEQ ID NO: 460264 - DNA, 120 bp, Artificial Sequence
  ENSG00000157423_38 (sequence is synthesized)
cctacctggagtacctgaggtctttaaaaggagtttccagatacagatcgcccacctggacccagaaaatatcactctgagcggagagggaatctttccccaaatctgcctcgatctccc

SEQ ID NO: 460265 - DNA, 120 bp, Artificial Sequence
  ENSG00000157423_39 (sequence is synthesized)
caggaacctcacagcaaatgaaaagtatgaaatgttcttgaatcaagccaggaaaaacacagacaaagagtataacaaatgtgaaatgctcgatcactttgacataataactgaggaagt

SEQ ID NO: 460266 - DNA, 120 bp, Artificial Sequence
  ENSG00000157423_40 (sequence is synthesized)
gccagaagacgagcctgctgaggtaagtgctcatctccagatggaggtagaaagacttatagtccaaagctatgtcctagaacatcagaaaacaaccacccctgatcctatggatgaccc

SEQ ID NO: 460267 - DNA, 120 bp, Artificial Sequence
  ENSG00000157423_41 (sequence is synthesized)
ctgcttcagccatcggagtcgccgcaaactggccaaaatccagctaccagagtacatcctggactttggctacatcatccttggcgaagtccgaacccacatcatcaagatcatcaacac

SEQ ID NO: 460268 - DNA, 120 bp, Artificial Sequence
  ENSG00000157423_42 (sequence is synthesized)
cagtcactttccagtgtcattccatgcagacaagcgtgtccttcatgagacaggattcagtactgagctagatcgtgtaaagaatctacctcattgtgaaacggaaatatttgaagtgag

SEQ ID NO: 460269 - DNA, 120 bp, Artificial Sequence
  ENSG00000157423_43 (sequence is synthesized)
atttgacccacagggggccaatcttcctgttggaagcaaagaagtcattctgcccatcaaggtggttggagggccaacagttcacatctgtctccaagccaaggtgaccattccaaccat

SEQ ID NO: 460270 - DNA, 120 bp, Artificial Sequence
  ENSG00000157423_44 (sequence is synthesized)
gactctctctcgtggaaaagtggactttgccacaattcagtgtggacagtgcctggtggaaactattcagctttccaatcatctccaagtcccttgtgaatggttcgtccagagccaaaa

SEQ ID NO: 460271 - DNA, 120 bp, Artificial Sequence
  ENSG00000157423_45 (sequence is synthesized)
gcctgttgacaagctggagaaacacatgccgaagtacttaagacagaaactacgcgctgaattaaagccaaagacacggatcttcgaaatccagcccatttctggagtcttggatcctgg

SEQ ID NO: 460272 - DNA, 120 bp, Artificial Sequence
  ENSG00000157423_46 (sequence is synthesized)
tgagaagtccaacgtgcaagtgaaattcatgccaaaagaagagaaattctacagccaaaccctggtgtttcagattgcccagagtgctcaaaagcttaccctcctggcacgtgggcaagg

SEQ ID NO: 460273 - DNA, 120 bp, Artificial Sequence
  ENSG00000157423_47 (sequence is synthesized)
tctagagccacgcctggaatttagtccttcagtcctggatctggggccactgctactttgtgcacctggagacgaggccgaggtgatagtgaagaatccctgcaacttccccattgagtt

SEQ ID NO: 460274 - DNA, 120 bp, Artificial Sequence
  ENSG00000157423_48 (sequence is synthesized)
ttattccttagaatttgatcagcagtatctcatagaagaaaagatcttgcggaagctgaagggctatgattcctacaacaccctgctgctgcctccccgcaaccctggggagaagctgcc

SEQ ID NO: 460275 - DNA, 120 bp, Artificial Sequence
  ENSG00000157423_49 (sequence is synthesized)
cccagaactgtacgagtacttcaaagagataaagaagtcaaaagaggagcagatgagggcgaaatatctggagaatctggcacaggagaatgaagaggaagatataacctcatcagatca

SEQ ID NO: 460276 - DNA, 120 bp, Artificial Sequence
  ENSG00000157423_50 (sequence is synthesized)
gggaacctccaatagcacaaagaggacatcgctgagccgagggatctctgtcacatccaacctggaagaatggcacgccctgttggtcgagtccaaaacctacctagaggaagaggagga

SEQ ID NO: 460277 - DNA, 120 bp, Artificial Sequence
  ENSG00000157423_51 (sequence is synthesized)
tgaggaaagcctggaaaaaatcattttccaaactgacaagcttcagagcattgacagccactccatggaggaagttggagaggtggaaaacaacccagtgagcaaagcaatcgctcgcca

SEQ ID NO: 460278 - DNA, 120 bp, Artificial Sequence
  ENSG00000157423_52 (sequence is synthesized)
cctgggcattgacatttctgcagaaggccgcctggccaagaaccggaaaggcatcgccattatcattcatgggacacccttgtcaggaaagtcagccaatgccgttagcgtggccaagta

SEQ ID NO: 460279 - DNA, 120 bp, Artificial Sequence
  ENSG00000157423_53 (sequence is synthesized)
ctacaacgcagcctgcctgagcatcgactccattgtgctggaagctgtggccaacagcaacaacatcccagggatccgggcccgtgagctctgcatcagggctgccatagagcagtccgt

SEQ ID NO: 460280 - DNA, 120 bp, Artificial Sequence
  ENSG00000157423_54 (sequence is synthesized)
gaaggaaggagaggaggctgcccaggaggcagctgtgggtcaaaacgtcatagggcaaggacgactgagcactgacaccttgggcaagttagcctccgagatgactctggtggccccaga

SEQ ID NO: 460281 - DNA, 120 bp, Artificial Sequence
  ENSG00000157423_55 (sequence is synthesized)
aattaaacctggaaagagtgttcgtgggagcgtggtgatcaccaaaagcaaggcagacagccatggctccgggtcacagaagcagcatcactcacaccagtctgaaacaccacagatttc

SEQ ID NO: 460282 - DNA, 120 bp, Artificial Sequence
  ENSG00000157423_56 (sequence is synthesized)
ctccagccctctccccccggggcccatccaccgctggctcagtgttagtcccagtgtcggaggcgagaccgggctgatgagctgtgtgctcccggatgaacttctcgtgcagatcctggc

SEQ ID NO: 460283 - DNA, 120 bp, Artificial Sequence
  ENSG00000157423_57 (sequence is synthesized)
agagcggatacagctgagtgactgctaccgaggagtggtgtttgatggcctcgacactctctttgctcagaatgctgcagccgccctcctctgcctgctgaaggccattggcagccggga

SEQ ID NO: 460284 - DNA, 120 bp, Artificial Sequence
  ENSG00000157423_58 (sequence is synthesized)
gcatatatacattctcaacatggcccaggattacgcagccatgaaggcccaggagaaagccaaaaaggagcaagaagaacgcaagcacaagggagctcttgagaaagagaaggagcgtct

SEQ ID NO: 460285 - DNA, 120 bp, Artificial Sequence
  ENSG00000157423_59 (sequence is synthesized)
ccaaaacatggatgaggaagaatatgatgccctgactgaggaggagaaactcacattcgatcgggggattcagcaggcgctccgcgagcggaagaagagggagcaggagaggctggcaaa

SEQ ID NO: 460286 - DNA, 120 bp, Artificial Sequence
  ENSG00000157423_60 (sequence is synthesized)
ggaaatgcaagaaaagaagctacagcaggagctggagcgacaaaaggaagaggatgagctgaaacggagggtcaaaaaaggaaagcagggacccattaaggaggagccccccatgaagaa

SEQ ID NO: 460287 - DNA, 120 bp, Artificial Sequence
  ENSG00000157423_61 (sequence is synthesized)
atctcaagcagcaaacaagcaggttcctccgctcaccaaagtggatgtcaagatggagacaatcgaaaggaaaatatctgttagggaacaaacaatgtctgagaaggaagagctaaataa

SEQ ID NO: 460288 - DNA, 120 bp, Artificial Sequence
  ENSG00000157423_62 (sequence is synthesized)
gaagaaaaggaacatgggcgatgtcagcatgcatgggcttcctcttgtccaggaccaagaggacagtgaaggggacaactcaaaggaccccgacaagcaactggccccgaagtttaagac

SEQ ID NO: 460289 - DNA, 120 bp, Artificial Sequence
  ENSG00000157423_63 (sequence is synthesized)
ctatgaattgacactgaaggatgtccagaacatcctcatgtactgggaccggaagcaaggagtccagctgcctcctgcagggatggaggaagcgccccatgagcccgacgaccagcgcca

SEQ ID NO: 460290 - DNA, 120 bp, Artificial Sequence
  ENSG00000157423_64 (sequence is synthesized)
ggtccccttgggtgggcgcaggggccgcaaggaccgggagagagagcgcctggagaaggagcgcacggagaaggagcgcctggagagggagaaggcggagcgggagcgcctggagaagct

SEQ ID NO: 460291 - DNA, 120 bp, Artificial Sequence
  ENSG00000157423_65 (sequence is synthesized)
gcgagccctggaggagcggagcgactgggagggggaaggggaggaggaccacgaagggaagaaggagaaggacctgggcgtacccttcctagacatccagacaccagactttgaaggctt

SEQ ID NO: 460292 - DNA, 120 bp, Artificial Sequence
  ENSG00000157423_66 (sequence is synthesized)
gagctggaagcaggccctagagagcgacaagcttcccaaaggagagcagatcctagacatcttgggtctgggtgcctccggaccacccatcccgcctcccgccttattctcaatcgtctc

SEQ ID NO: 460293 - DNA, 120 bp, Artificial Sequence
  ENSG00000157423_67 (sequence is synthesized)
ctacccggtgaagcggccacctttgaccatgacagacgacctggagcattttgtatttgtgatcccaccatccgaagatatatctctggatgaaaaaaaagaaatggaaatagaatcaga

SEQ ID NO: 460294 - DNA, 120 bp, Artificial Sequence
  ENSG00000157423_68 (sequence is synthesized)
ctttttggccaccacaaacactacaaaggctcaagaggagcagaccagctcatctaaggggggcaaacagaaaatgaaagaaaagatagaccaagtcttcgagattcagaaagacaagcg

SEQ ID NO: 460295 - DNA, 120 bp, Artificial Sequence
  ENSG00000157423_69 (sequence is synthesized)
tcacatggccttaaacaggaaggtcctttctggggaacctgctggaaccatttcccagctgtcagatacagacctggacaacttcaacgggcagcactcccaggagaaattcaccagact

SEQ ID NO: 460296 - DNA, 120 bp, Artificial Sequence
  ENSG00000157423_70 (sequence is synthesized)
gaatcacttccggtggatcgtgccagccaatggcgaggtaacgttgcaggtgcacttctcttctgatgagttcgggaactttgaccaaacctttaactttgagatcctaggaacttgctg

SEQ ID NO: 460297 - DNA, 120 bp, Artificial Sequence
  ENSG00000157423_71 (sequence is synthesized)
ccagtaccagctctactgccgaggcatctgcacttacccatacatttgccaagacccaaaagtggtatttcctcagcggaagatggacatgaagacaaatgaggtcatctttaagaagta

SEQ ID NO: 460298 - DNA, 120 bp, Artificial Sequence
  ENSG00000157423_72 (sequence is synthesized)
tgttatgagcacggagacgtactactttgggccactactttgtggaaaatcaagagataagtacaagtcatccttattcccaggcaacatggagacgctaacaatcctgaacacttcctt

SEQ ID NO: 460299 - DNA, 120 bp, Artificial Sequence
  ENSG00000157423_73 (sequence is synthesized)
aatggtggtggaggcatccttctattttcagaatgatgtcaaagcaaacacgtacttcctggaacccaacaccatggtcctgaaacccaatgagaagcagatattaaacgtatgggccta

SEQ ID NO: 460300 - DNA, 120 bp, Artificial Sequence
  ENSG00000157423_74 (sequence is synthesized)
ccctacttcagttggtgtctttgaagacagcattgtctgctgcatcaatgacaacccagagccagccatcttccaattaagctgccaggggatccgcccggaactagagctggaacccag

SEQ ID NO: 460301 - DNA, 120 bp, Artificial Sequence
  ENSG00000157423_75 (sequence is synthesized)
gcaattacattttgaccggctcttgctgcacagacaggaatccagggtagttcttctccgcaatgtcacgctcctgcctgtggcctggcggatcaccagcctggagcacttgggtgatga

SEQ ID NO: 460302 - DNA, 120 bp, Artificial Sequence
  ENSG00000157423_76 (sequence is synthesized)
tttcactgtatccctgatgcaggggaccatcccccctgaggctgagtacggcctgcacctgtactttcagcccaccaagcctgtcaacatcaagaaggctattcggttggaggttttaga

SEQ ID NO: 460303 - DNA, 120 bp, Artificial Sequence
  ENSG00000157423_77 (sequence is synthesized)
tgcagaaaatcttcttggtgttgttcagattgaaaatatcatggtctttgcagaggcatacgacatcgccttggacatcaccttccccaaaggagctgaagggggactggattttgggat

SEQ ID NO: 460304 - DNA, 120 bp, Artificial Sequence
  ENSG00000157423_78 (sequence is synthesized)
tgtcagggtcacagaggaggcgaagcagcccctgcaattgaagaaccgtgggaaatatgagatcgcgttcagcttttccgtggactctgtagggatttcaacacctaatataaattccat

SEQ ID NO: 460305 - DNA, 120 bp, Artificial Sequence
  ENSG00000157423_79 (sequence is synthesized)
gatctcagtccaacccaaaaagggttcactgaccccaacagaaaaacccacaaatgtccaagttttcttccatgcaaaaaaggaagtgaagattgagcaccagcctgttctgcgctgtca

SEQ ID NO: 460306 - DNA, 120 bp, Artificial Sequence
  ENSG00000157423_80 (sequence is synthesized)
gattattgagcccaatatttcagaaggaggtgagatcattgccagcatcccaattaagttttccgcgaatgcagtatattccaaatacaacatcaccccctcctctgtcatcaactttgg

SEQ ID NO: 460307 - DNA, 120 bp, Artificial Sequence
  ENSG00000157423_81 (sequence is synthesized)
agctttgatctgtggcactcgtaaaagcaccaccttcaccatagaaaatcaaggtgttactgacttcaagttcgccctttataagctgacaggggagagccccattcatcaaaagaaagc

SEQ ID NO: 460308 - DNA, 120 bp, Artificial Sequence
  ENSG00000157423_82 (sequence is synthesized)
agccagccacgtcagacatgcaagatcccgagaaagtgagagcttctacaaaactggctcttccagagcagccaagttctctgacacgattcagaaagaagtaaccaccacaggccaggc

SEQ ID NO: 460309 - DNA, 120 bp, Artificial Sequence
  ENSG00000157423_83 (sequence is synthesized)
ccgcttcgcccatggcatgttcaccgtgtaccctgggtttggctccattccttccggaggacagcaggtcatcaacgttgactgtgtggctgacgccatgggaaagtgtgaggagtttat

SEQ ID NO: 460310 - DNA, 120 bp, Artificial Sequence
  ENSG00000157423_84 (sequence is synthesized)
agccatcgatatctccggccgagaccctgcagtccaccctgccggcattctttacactttgctagctgaagcctgtctaccagccttcgtgaccgaaaacaatgccttgatatttgaaga

SEQ ID NO: 460311 - DNA, 120 bp, Artificial Sequence
  ENSG00000157423_85 (sequence is synthesized)
gcaccagatatgtaccagtgccaacctgcaccacatcctgcagaccatagagagcggggggctgttcgtcgaggatgagaacaagttcatcttctgcaatgtcctggtgggccgccaagc

SEQ ID NO: 460312 - DNA, 120 bp, Artificial Sequence
  ENSG00000157423_86 (sequence is synthesized)
caaggctcgtttcaagatcagcaacgtgggaaagatcacctgtgatgtcaacattgtagtcaggcctatctccaataagccctttgcccgcatcgtcgacatttttgaagtggaacccag

SEQ ID NO: 460313 - DNA, 120 bp, Artificial Sequence
  ENSG00000157423_87 (sequence is synthesized)
ttcaccccgcagatcatgcagaactaccagtgcatctttgaggctaccttggatggcttgcccagcaccctggccaagagccgaggcctcgtgtttgacatcgctggtgaggggaacctc

SEQ ID NO: 460314 - DNA, 120 bp, Artificial Sequence
  ENSG00000157423_88 (sequence is synthesized)
cctcgagtgacggttgtgcggccagttcttcataaccaatatggaaaccccttgctcctctttaagaggcttctccttggtcattcagagaagctgcctctcatcctcaagaacaatggt

SEQ ID NO: 460315 - DNA, 120 bp, Artificial Sequence
  ENSG00000157423_89 (sequence is synthesized)
gtcctccctgcccagctgcatgttgacctgcaggatgagctaggagtcttctccctgaaagggaggcccaccaccgcgtatatctacatcacagaggaaaataaaccacatgtaaaagca

SEQ ID NO: 460316 - DNA, 120 bp, Artificial Sequence
  ENSG00000157423_90 (sequence is synthesized)
aagaaagctcacacagcctccttggttgtttctcctggagatacagctgaatttgatgtcgttttccactcccagaaggttgggaggatgagaggtatcatccacttgtcagtgatcaac

SEQ ID NO: 460317 - DNA, 120 bp, Artificial Sequence
  ENSG00000157423_91 (sequence is synthesized)
aaccaatatgaggagacctccatccacatggtgggagagggctatgaggatgacatcaccttggacaacatccatggactggtggcccccaccagccaggaagacataagtatctctgag

SEQ ID NO: 460318 - DNA, 120 bp, Artificial Sequence
  ENSG00000157423_92 (sequence is synthesized)
ttcacagagatcatcgaggacaatgatatggaagacttggtggcagctgctctggtggaccacatccaatttggggactgccacattggacacagctataatgcgagcttcacagtcaca

SEQ ID NO: 460319 - DNA, 120 bp, Artificial Sequence
  ENSG00000157423_93 (sequence is synthesized)
aatcacagccaagtgaacttgatacggtttgaatggcctgtttcagctacaattgctttctccccacagatgggccacctccaccctgggtgtgccaaggacatagtggtgaccatgaag

SEQ ID NO: 460320 - DNA, 120 bp, Artificial Sequence
  ENSG00000157423_94 (sequence is synthesized)
tcagatgtacccatcaacctaaagaatatgcggatcaggtgcaagctctccaggattatgtttcagctccctgcagaccaggtccccgactgggatgaccgcatgcacacagtcaagtgg

SEQ ID NO: 460321 - DNA, 120 bp, Artificial Sequence
  ENSG00000157423_95 (sequence is synthesized)
gtggacgtacccagaaacatgcctgggactttcactacaaaacgaaaagtgatagagacggatccggaacctgctcactcagtactagaagaaaactaccaagaactgcagcttcaaatc

SEQ ID NO: 460322 - DNA, 120 bp, Artificial Sequence
  ENSG00000157423_96 (sequence is synthesized)
agtgccaatgtggatttcgcttcataccattgccaagcaagagatgtgcgctttaaggaaaccttggtttaccagacccgagtgtttgagttcgatgtgattaattcaggacgtgtccag

SEQ ID NO: 460323 - DNA, 120 bp, Artificial Sequence
  ENSG00000157423_97 (sequence is synthesized)
ctggaattcagctgggtctcagaagatacctcaaaggcagtcagctttgcaaaaccagatcaccaaggttcagctcaaaaagatcagcttagtcagggcacgatgcatacaggcagcacc

SEQ ID NO: 460324 - DNA, 120 bp, Artificial Sequence
  ENSG00000157423_98 (sequence is synthesized)
ctggacagcaccatggaccactgggccgagggttccccacagcccttctctgtggagccctcttcgggaatcgtgccggtggggaagattcagaagttcaaagtaaaattctccccgttg

SEQ ID NO: 460325 - DNA, 120 bp, Artificial Sequence
  ENSG00000157423_99 (sequence is synthesized)
gacattggagacttcgagagcaaccttttctgccagattcccaacctgccacctggagagcaaggtccggtcctggtagcaaaagggcggagcaccttgcccatctgccattttgatctg

SEQ ID NO: 460326 - DNA, 120 bp, Artificial Sequence
  ENSG00000157423_100 (sequence is synthesized)
aaagactcggactacataagtggccatcagcgcaacccagagctccgagggtccagtgggggagctctggatccaaacacccgggtgattgagttcaccactgtgggcataggagggaag

SEQ ID NO: 460327 - DNA, 120 bp, Artificial Sequence
  ENSG00000157423_101 (sequence is synthesized)
aatctccggacctttaccatcctaaacccaaccaatagcacctactccttctgctggatctctgaagaaattgaaagtctccagaaccctgcagcattcacatgccttacagaaaagggc

SEQ ID NO: 460328 - DNA, 120 bp, Artificial Sequence
  ENSG00000157423_102 (sequence is synthesized)
ttcatccaccctgaaaagaaagccgagatcgtgttccagttcacacctttccatctgggcatcactgagtcatcatggaccttcctaattcccgagcacaacatcacagtccctttcctg

SEQ ID NO: 460329 - DNA, 120 bp, Artificial Sequence
  ENSG00000157423_103 (sequence is synthesized)
ctggtaggcaaaactaccgaacctctcatctctctgaacaagtcacacctcaacttcagctctctcctcattggcagagaagccagggagactgtgcagatcattaacaaggaggagcag

SEQ ID NO: 460330 - DNA, 120 bp, Artificial Sequence
  ENSG00000157423_104 (sequence is synthesized)
gggttcgatttttccttccaggacaactcccgctattctgaaggtttcagcaacagcctgcttgtatgtcccatggaaggctggatcccaccactgtccaggttcccaattgatattttc

SEQ ID NO: 460331 - DNA, 120 bp, Artificial Sequence
  ENSG00000157423_105 (sequence is synthesized)
ttcacaccaaagcaggaaggagatgtgaactttaatttgatctgcaatgtggaaaagaaagtccaccctgtgacattaaatgtcaaggccgagggctacactatgaatgtggagatcaag

SEQ ID NO: 460332 - DNA, 120 bp, Artificial Sequence
  ENSG00000157423_106 (sequence is synthesized)
tgcaaggacaggacaggctccatcactctgttgactcccaaccagactaacatcatcaacttctatgaggtggagttaaatgaatgtgtccagtgtgaattcaactttatcaacactgga

SEQ ID NO: 460333 - DNA, 120 bp, Artificial Sequence
  ENSG00000157423_107 (sequence is synthesized)
aagttcaccttcagcttccaggcacagctgtgtggctccaaaaccttgctgcagtacttggaattttcacccatcgacagcactgtggatgtaggacagagtgtacatgccaccctgtct

SEQ ID NO: 460334 - DNA, 120 bp, Artificial Sequence
  ENSG00000157423_108 (sequence is synthesized)
tttcaaccattaaagaagtgtgtcttgacagacctggaactcataatcaagatcagccatggtccaacatttatgtgcaacatctcaggctgtgctgtgagcccggctatccatttctcc

SEQ ID NO: 460335 - DNA, 120 bp, Artificial Sequence
  ENSG00000157423_109 (sequence is synthesized)
ttcaccagctacaactttgggacctgctttatctatcaagctgggatgcccccatacaaacaaaccctggtaattaccaacaaggaagaaacacctatgagcatagattgtctgtacacc

SEQ ID NO: 460336 - DNA, 120 bp, Artificial Sequence
  ENSG00000157423_110 (sequence is synthesized)
aacaccactcacctcgaggtgaactcccgtgttgatgtggtaaagccaggaaacacattggagattccaataactttttatcctcgagaaagtatcaactatcaagaactcattcccttt

SEQ ID NO: 460337 - DNA, 120 bp, Artificial Sequence
  ENSG00000157423_111 (sequence is synthesized)
gaaatcaatgggctctcacaacaaacagtcgaaatcaaagggaagggtaccaaaatgaagattttagtcctagatccagccaacaggattgtgaagttgggagctgtcctaccagggcag

SEQ ID NO: 460338 - DNA, 120 bp, Artificial Sequence
  ENSG00000157423_112 (sequence is synthesized)
gttgtgaaaagaacagtttccatcatgaacaacagcctggcccagctcacatttaatcagtccattctgttcacaattccagaactccaggaacccaaggtccttaccctggcgcccttc

SEQ ID NO: 460339 - DNA, 120 bp, Artificial Sequence
  ENSG00000157423_113 (sequence is synthesized)
cacaacatcacactgaagcccaaagaagtctgtaaactggaagtcatctttgccccgaagaagcgtgtccctcccttctctgaggaagtgttcatggaatgcatggggctcctgcgcccc

SEQ ID NO: 460340 - DNA, 120 bp, Artificial Sequence
  ENSG00000157423_114 (sequence is synthesized)
ctcttcctccttagcggctgctgccaggccctggagatctcactggaccaggaacatattccctttggacccgtggtgtatcagacgcaagccacacgtcgcatcctcatgatgaacaca

SEQ ID NO: 460341 - DNA, 120 bp, Artificial Sequence
  ENSG00000157423_115 (sequence is synthesized)
ggcgatgtgggtgcaaggtttaaatgggacatcaaaaaatttgagcctcatttctccattagcccagaagaaggctatattacctcaggcatggaggtttcttttgaagtgacctaccat

SEQ ID NO: 460342 - DNA, 120 bp, Artificial Sequence
  ENSG00000157423_116 (sequence is synthesized)
cccaccgaggtgggaaaggagagcctttgtaaaaacattctctgctacatccagggaggcagtcctctgagtctaaccctgtctggagtctgcgtgggaccacctgcggtaaaagaggta

SEQ ID NO: 460343 - DNA, 120 bp, Artificial Sequence
  ENSG00000157423_117 (sequence is synthesized)
gtgaatttcacgtgccaggtgcgctccaagcacacgcagaccatcctgctgtcaaaccgcaccaaccagacctggaatctgcaccccatctttgagggcgagcactgggaggggcctgag

SEQ ID NO: 460344 - DNA, 120 bp, Artificial Sequence
  ENSG00000157423_118 (sequence is synthesized)
ttcatcaccctggaggcccaccagcaaaacaagccctatgagatcacctacaggccccgcaccatgaacttggagaaccgcaagcaccagggcaccctcttcttccccctcccagatggg

SEQ ID NO: 460345 - DNA, 120 bp, Artificial Sequence
  ENSG00000157423_119 (sequence is synthesized)
accggctggctgtatgctctgcatgggacttctgagctccccaaagctgtagccaatatctatcgtgaagtgccatgtaagaccccctacactgagcttctgccaatcaccaactggctg

SEQ ID NO: 460346 - DNA, 120 bp, Artificial Sequence
  ENSG00000157423_120 (sequence is synthesized)
aacaagccccagagattccgggtcatcgtggaaatactgaaaccagagaagccggacctaagcatcactatgaagggccttgattacattgatgtactgtctggctctaagaaagactac

SEQ ID NO: 460347 - DNA, 120 bp, Artificial Sequence
  ENSG00000157423_121 (sequence is synthesized)
aagctgaacttcttttcccacaaggagggaacgtacgctgcaaaggtgatcttccgaaacgaggtgacaaatgagttcttgtactacaatgtgagtttcagggtcatcccttcaggcatc

SEQ ID NO: 460348 - DNA, 120 bp, Artificial Sequence
  ENSG00000157423_122 (sequence is synthesized)
atcaaaaccatcgagatggtgaccccagtccggcaagttgcgtcagcctccatcaagttggagaaccctctgccctactcggtgaccttctccacggaatgccggatgcccgacatcgcc

SEQ ID NO: 460349 - DNA, 120 bp, Artificial Sequence
  ENSG00000157423_123 (sequence is synthesized)
ctgccctcccagtttgtggtgcctgccaactccgagggcacgttctcatttgaatttcagcccctgaaagctggagaaaccttcggaagactaactttgcacaacactgacttgggttac

SEQ ID NO: 460350 - DNA, 120 bp, Artificial Sequence
  ENSG00000157423_124 (sequence is synthesized)
taccaatatgagctctatctgaaagccacgccagcacttccggaaaagcctgttcacttccagactgtccttggcagcagccaaatcatccttgtgaagttcatcaattacacacggcag

SEQ ID NO: 460351 - DNA, 120 bp, Artificial Sequence
  ENSG00000157423_125 (sequence is synthesized)
aggacagaatactactgcaggaccgactgtacagacttccacgcagaaaaactcattaatgcagccccaggaggccagggaggcactgaagccagtgtggaagtcttattcgagcccagc

SEQ ID NO: 460352 - DNA, 120 bp, Artificial Sequence
  ENSG00000157423_126 (sequence is synthesized)
cacctgggtgagaccaagggcatcctgatcctatcatcgctcgcaggtggagagtatatcatccccctctttggaatggctctgcctcccaagccccaaggtcccttctcgatccgagcc

SEQ ID NO: 460353 - DNA, 120 bp, Artificial Sequence
  ENSG00000157423_127 (sequence is synthesized)
gggtacagcataatcatccccttcaagaatgtcttctatcacatggtgaccttctccatcatcgtggataacccagccttcaccattcgcgctggagagtctgtgcggcccaagaagatc

SEQ ID NO: 460354 - DNA, 120 bp, Artificial Sequence
  ENSG00000157423_128 (sequence is synthesized)
aacaacatcacagtctcctttgaaggaaacccatctggcagcaaaacccccatcaccaccaagctgactgtgagctgccctcctggtgaagggagtgagactggagttaaatgggtttat

SEQ ID NO: 460355 - DNA, 120 bp, Artificial Sequence
  ENSG00000157423_129 (sequence is synthesized)
tatctgaaggggatcaccctttagtggtaaccagggttacctgtatcaaccaaaagctatgcattgtcttagcctgaaaaagaatagagaaaacaataagaattctaaaggaactgtttt

SEQ ID NO: 460356 - DNA, 120 bp, Artificial Sequence
  ENSG00000157423_130 (sequence is synthesized)
tattcttctcatacaattatagggcagttatttccctattatgtgttttccaaatatagatatgaaatatctattccatattaaacattataactacacacaacagctctatattttaga

SEQ ID NO: 460357 - DNA, 120 bp, Artificial Sequence
  ENSG00000157423_131 (sequence is synthesized)
caactgaatccttgtgagtccctaaattgagtttcttgacatagccccaaagctcaagtactttgtaataattcccatttttatcaagaaggcacaggtatcacactagtgaccttctac

SEQ ID NO: 460358 - DNA, 120 bp, Artificial Sequence
  ENSG00000157423_132 (sequence is synthesized)
tctacaacacttagcaatgcgtgacgctgggtactgcagtttctttttaaaatccaaaatggtttaaaaagcccttagacatgactattttgatgtggcattttattctgctttcacata

SEQ ID NO: 460359 - DNA, 120 bp, Artificial Sequence
  ENSG00000157423_133 (sequence is synthesized)
aaagccaaataaatattttcagagggatgagcagataacattagggcaatccagggacactcccatcactttttctcttggcttttataccatcagtgtccgaatcccacatctgcccta

SEQ ID NO: 460360 - DNA, 120 bp, Artificial Sequence
  ENSG00000157423_134 (sequence is synthesized)
cacagaaagttctcactgaagtctaggccctggagaaaggctaatagagatcccagctccccccaccacacatacacaccccgccttggatagcattcagcaggagagcagggattctca

SEQ ID NO: 460361 - DNA, 120 bp, Artificial Sequence
  ENSG00000157423_135 (sequence is synthesized)
acccatctgcacatcaggaccacctaactctcactctgaacgtgcccagtccccatctgatgtaattggtctggagaggggtgtgggcatctttattatatacatttaacttgtatagca

SEQ ID NO: 460362 - DNA, 120 bp, Artificial Sequence
  ENSG00000157423_136 (sequence is synthesized)
gatggttaaagtctggccctggcatgggtttgcttctgcagacatacacctctgacggagggtccccctgcctctacctgctccccacactcatcccccacagccctcctacaagagggg

SEQ ID NO: 460363 - DNA, 120 bp, Artificial Sequence
  ENSG00000157423_137 (sequence is synthesized)
caggagactggaagaagatggcctcttgggaatgaatgccgtaaagaagtgggtcttaaaaatggtccctgggccagcagcagtactatcacctgggaatttattaaaagtcaaactctc

SEQ ID NO: 460364 - DNA, 120 bp, Artificial Sequence
  ENSG00000157423_138 (sequence is synthesized)
agtccccatgtcagatcgactgaatcaaaaagtctgtaggtgtggcccggcaatcttttagcaagtccttatacctgtcagaggtggctttcatggagggagactcttctccttcttctg

SEQ ID NO: 460365 - DNA, 120 bp, Artificial Sequence
  ENSG00000157423_139 (sequence is synthesized)
tacctccccacaaccctagcccagtatactctaggaccaaaaaagctttttctagaatgtctgtaaacacagacctttacaatagtcctccctcatcctcaggggatacattccaaggtg

SEQ ID NO: 460366 - DNA, 120 bp, Artificial Sequence
  ENSG00000157423_140 (sequence is synthesized)
cccagtagatgcctgaaaccacagatagtactgaacactccatatactgtggtattttcctttacatacatacctttgattaatttataaattaggcacagtaagacattaacaataata

SEQ ID NO: 460367 - DNA, 120 bp, Artificial Sequence
  ENSG00000157423_141 (sequence is synthesized)
ataataaaatgtaataattataataatatgccagcatcactacccatgtgctttggggccattattaaactaaataaggtttccttgaacacaagcattgcgatcccatgacagttgacc

SEQ ID NO: 460368 - DNA, 120 bp, Artificial Sequence
  ENSG00000157423_142 (sequence is synthesized)
tgctaaccccaagtcatctactcagtgactatcaagtaggttgtgtctacagcatgcatacgctagacgaggggatgattcacatcctgagcaggatggagtgggatggcatgagatttc

SEQ ID NO: 460369 - DNA, 120 bp, Artificial Sequence
  ENSG00000157423_143 (sequence is synthesized)
ctcaagttattcagaacagcatgccatttaaaaagtatgaattttttatttctggaatttttcattaaatattttcattccacagttgaccacaggtaactgaagccatagatgaggagg

SEQ ID NO: 460370 - DNA, 120 bp, Artificial Sequence
  ENSG00000157423_144 (sequence is synthesized)
actgccatactcaatagacaatttatttctataacctctaaagacactactgataggtctaaagacaaccagatgacagattttcacaatggttaagtgagcaaagatcgctctgaccaa

SEQ ID NO: 460371 - DNA, 120 bp, Artificial Sequence
  ENSG00000157423_145 (sequence is synthesized)
taatctgagaggatgctaagatcaatgagcaagagtgatgacttgcaaatatacagcatctgtataaagtcagtgcttctgaaatattagtatacatcagcatcccctggagggcttact

SEQ ID NO: 460372 - DNA, 120 bp, Artificial Sequence
  ENSG00000157423_146 (sequence is synthesized)
gaaacagattgctgagccccaccctcaggaagtccgatctaggagatttgggtggggcttgagaatctgcatttctaaccagttcttggtgatgctcgttggtgagaccaatcagactgt

SEQ ID NO: 460373 - DNA, 120 bp, Artificial Sequence
  ENSG00000157423_147 (sequence is synthesized)
gagaaccacgactctaaagcctcgagcctcctggttattcggagtggcctatggacctgcagcatcagcatcacctgggaatttgttagaaaggcaggccctcaggccccaccctagact

SEQ ID NO: 460374 - DNA, 120 bp, Artificial Sequence
  ENSG00000157423_148 (sequence is synthesized)
tgttgaatcagaatctgcattttcatggacctccaggcgatttgcatgcacattgcagctgagagtgctactttaaggtacctggcaaaacttgacatttgccaaacccacagccataac

SEQ ID NO: 460375 - DNA, 120 bp, Artificial Sequence
  ENSG00000157423_149 (sequence is synthesized)
tctttcattacagtcctgagaagtcttaccaaatctgcataggacctagttgatgaaattaaccctccccaaaatgtgcctccttccacctattcaccagaggtataggttaggagaagg

SEQ ID NO: 460376 - DNA, 120 bp, Artificial Sequence
  ENSG00000157423_150 (sequence is synthesized)
gaagcaattggtccctcaccctactcttcaaaagggtgtactttttcaataatggtcaatgtggtacaccaagtgatccctaagactaaagaaaaggtggaagaagctgtctgaaatctt

SEQ ID NO: 460377 - DNA, 120 bp, Artificial Sequence
  ENSG00000157423_151 (sequence is synthesized)
gtctaacatgccaccagccccagcatggcttatagccagccttggggtggctaggggcaactcccccaacttcagacctgttccagtgcttccccaagccactgaagctgtccatataca

SEQ ID NO: 460378 - DNA, 120 bp, Artificial Sequence
  ENSG00000157423_152 (sequence is synthesized)
ttttataaaagtgatcagggagaagggagggggagaaacaaaaacgaacccaggttgcagcacactcagcattaatcactagatcagcctgcgctcagacctgcttcctcatagctgttt

SEQ ID NO: 460379 - DNA, 120 bp, Artificial Sequence
  ENSG00000157423_153 (sequence is synthesized)
ggtgcctgctgtttcagaatcacgtagaccctgctaaagatcatagttcccctcaatgctctggagataacaacttgaacattaggaaacgttaagttttccgtttgagatatttattct

SEQ ID NO: 460380 - DNA, 120 bp, Artificial Sequence
  ENSG00000157423_154 (sequence is synthesized)
tggtcctgtgtaccagtgaaacaactgacatcagctgatctgaaggacctcacgagaagctgattcaccaaagaatgcggtttccacatcctgatgatttcatccgtcttacccaaccaa

SEQ ID NO: 460381 - DNA, 120 bp, Artificial Sequence
  ENSG00000157423_155 (sequence is synthesized)
tcagtcacctggtttttcagcccttcaccctccaggatccccttaaaaaccccagtccagaactcttccgggagatggatttgagggtctcctcccatctcatcactcagtgacctttga

SEQ ID NO: 460382 - DNA, 120 bp, Artificial Sequence
  ENSG00000157423_156 (sequence is synthesized)
tcatcactttctctgctgcatccccactgtctctgtgcattggtctgttactgcacagtgggcacacaaacgtgttggtcctataacaccactgagtctagggtccaaatcctcctagcc

SEQ ID NO: 460383 - DNA, 120 bp, Artificial Sequence
  ENSG00000157423_157 (sequence is synthesized)
cctgagagaggaggaagttccttctccctgggaccaagagccaagctcagatcctgccccagtgtgaaccctcttccaggctggtttgagattgggtgcatttcttccctttaggttttt

SEQ ID NO: 460384 - DNA, 120 bp, Artificial Sequence
  ENSG00000157423_158 (sequence is synthesized)
ctcgtgcttccttagcctcaaacaataacaaaatagtcttatattagcaaatttggaatggcaaagtagcttaacagcaggcttgatgaaaataacccttccaacacatgcttgtggaag

SEQ ID NO: 460385 - DNA, 120 bp, Artificial Sequence
  ENSG00000157423_159 (sequence is synthesized)
ttacattggagaatccattctcagcaaagcagaccaggagacttctaactgggggatgttcagaaaatgtcagggtagctgtgtggcagaactccaaggagcactgtgcacagaatacca

SEQ ID NO: 460386 - DNA, 120 bp, Artificial Sequence
  ENSG00000157423_160 (sequence is synthesized)
tgggaatggggctccctggcctcgttccacactgggcccccagtgagtgtggcatgctaagtctaaccacttctttaggagcctcaagtcagaggtgacaatactgtaacattggtgagg

SEQ ID NO: 460387 - DNA, 120 bp, Artificial Sequence
  ENSG00000157423_161 (sequence is synthesized)
gcctgctacatttcaagacctctacctaataccttaaaccctgttgccctgaaactccagctacaattacattgctgttggagaaactgctttgcacagttcaagattttggtacaattt

SEQ ID NO: 460388 - DNA, 120 bp, Artificial Sequence
  ENSG00000157423_162 (sequence is synthesized)
cttacaatgtcatcagcagcctcttgctacaagttatgtcataacttttacatacttgtaatagctattatgaatagttgttacagaactattacaagttctagcataacaaccaagcat

SEQ ID NO: 460389 - DNA, 120 bp, Artificial Sequence
  ENSG00000157423_163 (sequence is synthesized)
cacacagatgcagatgaattgtaactgtgaaataatgactagtatgcagtcaggcacatcagttatcccctagtctagaagagtttcaacaggaatggtcacaggtcagagaagaggaac

SEQ ID NO: 460390 - DNA, 120 bp, Artificial Sequence
  ENSG00000157423_164 (sequence is synthesized)
aagggtggaaggcaagggtagcctttgggctttatttttaccaccactgctagctcaattatgcataaataatcttacctagttggcatttttcaagatattagagaaaagaaccacttc

SEQ ID NO: 460391 - DNA, 120 bp, Artificial Sequence
  ENSG00000157423_165 (sequence is synthesized)
tttctaggaacttctgacctaaaggtaggcattggtctgggccttgaataaaaaactggttacttagcaacctgagccagaatataatttcaggagaaaagaatacttctggtaaaaaaa

SEQ ID NO: 460392 - DNA, 120 bp, Artificial Sequence
  ENSG00000157423_166 (sequence is synthesized)
aaattccttattgtttgaattattaaaaactgtatcattacccttgggaaattcagttcacctctaagaaaaagccaaaccaaaaagcaaaagaaacatgaaatatattagatatgcgtc

SEQ ID NO: 460393 - DNA, 120 bp, Artificial Sequence
  ENSG00000157423_167 (sequence is synthesized)
ccgtggaaatgcacacacattggagaaatagaaccaaatcattcccattgatttacattttttcagtgtttttcatcaaccatcatcaaaatcctaaaaccaaactttgcaagacatttg

SEQ ID NO: 460394 - DNA, 120 bp, Artificial Sequence
  ENSG00000157423_168 (sequence is synthesized)
gagatgtccttggcagcactactactacttgttagcgcacctaccttcattcataggattgtgtcagcaaaggttttaacaactatgaaaaccccacctgtataggagaatacatttttt

SEQ ID NO: 460395 - DNA, 120 bp, Artificial Sequence
  ENSG00000157423_169 (sequence is synthesized)
atggatttttctagacatgatatatccatgacttgccgagttttggattagcctttgtattcattttctatggctgcataacaaattaccacaaaactaggagagcaaaacaacacaaat

SEQ ID NO: 460396 - DNA, 120 bp, Artificial Sequence
  ENSG00000157423_170 (sequence is synthesized)
ttattatctcacagtttccatgggttgagagcccagtgtgaactggattctcagctcagggttccacaaggctgaaatcaaggtgctggccagctgcatcctcatcaggaggctcaacta

SEQ ID NO: 460397 - DNA, 120 bp, Artificial Sequence
  ENSG00000157423_171 (sequence is synthesized)
gggaaagatctgcttccaaggaccctcaatgtgttggcaaaattcattcctttgtggccatatgactaaactccttacaggagagtctctcttccagttcaaatttcttctaatctcttt

SEQ ID NO: 460398 - DNA, 120 bp, Artificial Sequence
  ENSG00000157423_172 (sequence is synthesized)
taagtactcacttgattcggtcaggccgactcaagttaatctctctttttattaattcaatgtctgctgattagggaccttaattacatctgcaaaatctcttctgcgatattacataat

SEQ ID NO: 460399 - DNA, 120 bp, Artificial Sequence
  ENSG00000157423_173 (sequence is synthesized)
ataatcatgtgagtgatgcatagcccatcatatttacaagtcttgttcacgctgaaagagggcataatacagggcatgaacacgaaggggtgggaatattggaggtcatcctagaattct

SEQ ID NO: 460400 - DNA, 120 bp, Artificial Sequence
  ENSG00000157423_174 (sequence is synthesized)
gcctacttttgccctttactcattgcgtccctgtttctgttgaggaaaatactccattttcaagactgttataaggcctatatatgcacttttcattcattaaagaaaagtatcaccatg

SEQ ID NO: 460401 - DNA, 120 bp, Artificial Sequence
  ENSG00000157423_175 (sequence is synthesized)
ctgtcagtcctgcagtggaagatccatagagccaagaggtccctgccccgggacactgttgctgtgacttgaatttcaggctaggagtgggcccccaagatgaggctcatctttaacaag

SEQ ID NO: 460402 - DNA, 120 bp, Artificial Sequence
  ENSG00000157423_176 (sequence is synthesized)
atagatatcacatatgttacatatgctgagcatcacctctactttagaaaattattttaagtaattaaaactagccacctcagtccctctcctttcccatcctcactcttccacctcctg

SEQ ID NO: 460403 - DNA, 120 bp, Artificial Sequence
  ENSG00000157423_177 (sequence is synthesized)
atgtgtatgtcagcaacaagaagacattttctagccataacttggttgcattctctaatccgtgtccctctacatccgagaagaatatggtttgtaggaaatgcattcttttctcaaact

SEQ ID NO: 460404 - DNA, 120 bp, Artificial Sequence
  ENSG00000157423_178 (sequence is synthesized)
acactgagtttgtcctgccttcctgggaagggaagttgaatctgacattcaaatgacaaagcagcaaatgtttctaaagcacctttggtggagataagaagaagtgtgtgtgttttgtag

SEQ ID NO: 460405 - DNA, 120 bp, Artificial Sequence
  ENSG00000157423_179 (sequence is synthesized)
agtttaggcagagaatcctaagaatagtgaaaaaacgggtcagaccctctctaacgggtttgactttcaaagtatgtaaccagaaaggttttagcaggaagaggtgaagagctgctcatt

SEQ ID NO: 460406 - DNA, 120 bp, Artificial Sequence
  ENSG00000157423_180 (sequence is synthesized)
ggctcagccatttgttgactgtgtccttttgaccaagctacagtcattgcagtactgctgatgagggtggtggtgtcatcgactaatgatgatgtgatcccaaataaaatcctggggcca

SEQ ID NO: 460407 - DNA, 120 bp, Artificial Sequence
  ENSG00000157423_181 (sequence is synthesized)
cactcttcccaaagcaatcagtgtccagatctgggactttaagttgtatgtatgcaaatgctatgtataggaaatagagaaaatgacttaggaaaactgataatcatgctaatatgtcaa

SEQ ID NO: 460408 - DNA, 120 bp, Artificial Sequence
  ENSG00000157423_182 (sequence is synthesized)
cctcccagtttgtggtgcctgccaactccgagcccacctgacgagttcccctcactccagctccagctgacttccttcttcaggctggtcatttgtgttggtttcaatgtctagttatcc

SEQ ID NO: 460409 - DNA, 120 bp, Artificial Sequence
  ENSG00000157423_183 (sequence is synthesized)
aggcatacgttgttccacagcatatgcctaggagtagaaccacaggtcatagagtgtgcatagctttcactttagtaggtaattgccaattagtgatgagagttcctaatgttcaacgtc

SEQ ID NO: 460410 - DNA, 120 bp, Artificial Sequence
  ENSG00000157423_184 (sequence is synthesized)
ttcaccaacccttggtattgtcgggttttttaaggttactaatctgataaactgctaactcctcgtggacttaatttccctttttacaaacagattgatttcagttgggtaatattatat

SEQ ID NO: 460411 - DNA, 120 bp, Artificial Sequence
  ENSG00000157423_185 (sequence is synthesized)
cagctgtgtggtcatggcaaatactaatgactttatttgaggaactgcatagggtagtgaatatacattaatagctgtgtgcctttgggaaaattaactaaattgtctgtgctcagtttc

SEQ ID NO: 460412 - DNA, 120 bp, Artificial Sequence
  ENSG00000157423_186 (sequence is synthesized)
cctgtccgtaaagtggtattaacgctgtctattttatagggtagtcatgagaatttaatgagaacatttatataaaatgcttatctcaatacttggcacatagtaaatactcaaacgaaa

SEQ ID NO: 460413 - DNA, 120 bp, Artificial Sequence
  ENSG00000157423_187 (sequence is synthesized)
atggtgggaggggcccgaattcaaacctacgagccccactccgaagcaggtgagtattcacgaccaggattacaagtgtgattttttctttttgttaaaactaaagaactctcggaagca

SEQ ID NO: 460414 - DNA, 120 bp, Artificial Sequence
  ENSG00000157423_188 (sequence is synthesized)
agtatttcctctagctctcaagaccatggctcttagtttttaatctcctcagcattcagttggcacctcttgtgggtgctgaagggagcagattacaggccttgagtacctgaagatgag

SEQ ID NO: 460415 - DNA, 120 bp, Artificial Sequence
  ENSG00000157423_189 (sequence is synthesized)
ggactattactcgttcaaccctgctgcactggagacacacatcttccccattgactgttaaaggtgttggtagctactagaccatttgtaaaatgggttaagcccatggttttactgaag

SEQ ID NO: 460416 - DNA, 120 bp, Artificial Sequence
  ENSG00000157423_190 (sequence is synthesized)
agagggctggcctgctgttatgctgtctgatgaaaggtctcctcatctataaaagagaaccacctctgagtgcaagaaaccatgactatcaacaggacgagatggcaaaacactaggact

SEQ ID NO: 460417 - DNA, 120 bp, Artificial Sequence
  ENSG00000157423_191 (sequence is synthesized)
gagatctatggaagcccttgttggagccaggccacatgaagttgtggctatacacctcctccttagactctcagtcctggctccaattctccatcagaggaagaatccagtaccctctct

SEQ ID NO: 460418 - DNA, 120 bp, Artificial Sequence
  ENSG00000157423_192 (sequence is synthesized)
cctccctttgccttctactggctgttttggagtttcaacagcatgggagaagaccagcgttttcgaatttgttttgttctctttgttttctggtacagggattgcatttctcatactcct

SEQ ID NO: 460419 - DNA, 120 bp, Artificial Sequence
  ENSG00000157423_193 (sequence is synthesized)
cctgttaattcccccaaagataccattctaatatgttactgtgtctatctttttacatgaatctgttctttcaaaatgtatattgtcttgggggagagacagagagaagtcatattttgt

SEQ ID NO: 460420 - DNA, 120 bp, Artificial Sequence
  ENSG00000157423_194 (sequence is synthesized)
attccattttctcctttttctcacgaggttgtgtgcttaagatccattcatgttgctatgtgtatatctaatccattgcctccaccttctgcagaccagaccacattgtgtcaccccaca

SEQ ID NO: 460421 - DNA, 120 bp, Artificial Sequence
  ENSG00000157423_195 (sequence is synthesized)
ttccacctgtgcactcttccaggggtggcatccacaggctcatgccaatgcaggcatgttaggcaaaggcaaccaggtcaaaatcttagtgcctcagcctgagaattaattaacatttaa

SEQ ID NO: 460422 - DNA, 120 bp, Artificial Sequence
  ENSG00000157423_196 (sequence is synthesized)
tttcttaaatgacttgttttctggtttaaaaagaaatacattgtgcactaataaaatttagaaaatattaagcacaaagatgagggcaaaaatccattctaatccttccaaccagggaaa

SEQ ID NO: 460423 - DNA, 120 bp, Artificial Sequence
  ENSG00000157423_197 (sequence is synthesized)
ccacagtcaatattttggtatgtctaagtctgtattttttccctaataagtatgtatttttcttttgcttttttattacaaaagtgggattattgtatatgttacattttaccactttgt

SEQ ID NO: 460424 - DNA, 120 bp, Artificial Sequence
  ENSG00000157423_198 (sequence is synthesized)
ttttcaccttaaaacatttcagacatttgaaaatgatgttaagtattccatttaataccactttactggctgcttattattccctaatattccctggattcctgggaggcagtgtgcata

SEQ ID NO: 460425 - DNA, 120 bp, Artificial Sequence
  ENSG00000157423_199 (sequence is synthesized)
ttggttagcaccaggggattcaaacctccaaagaccctgaagtccaggctatctttcagctatgtgatctggggcgagttacttaacctttctaagcctcagtttcatcatctatatagt

SEQ ID NO: 460426 - DNA, 120 bp, Artificial Sequence
  ENSG00000157423_200 (sequence is synthesized)
gggaatgatgcttataatgctaatgacccttctggtagttatgagtgttaaattatatgatgcatgtgcaaagtttgacaggtacccaataaatgtaatgttcatgattcccatttctgt

SEQ ID NO: 460427 - DNA, 120 bp, Artificial Sequence
  ENSG00000157423_201 (sequence is synthesized)
tcaaccagtgcttcattatcttacatcaaatttacccacttgatctggtatcattccagcactttaatggacatctttgtagctgtgtctttgtttatatccatgattgtttttaaggat

SEQ ID NO: 460428 - DNA, 120 bp, Artificial Sequence
  ENSG00000157423_202 (sequence is synthesized)
ttattcctgcaagtggaattttttggtttctaagggtatataatctgtaagttttccagatcagtatcagataacaaaaatatcaaataaaaaagaaatggattcctttctttctgcaaa

SEQ ID NO: 460429 - DNA, 120 bp, Artificial Sequence
  ENSG00000157423_203 (sequence is synthesized)
agtttatatgaaagcatggacagggattactagtatcaatgatagtctttgatgtgtattacatgattagacctataatttttatttcttgacacattaataactttacatgatatgtgt

SEQ ID NO: 460430 - DNA, 120 bp, Artificial Sequence
  ENSG00000157423_204 (sequence is synthesized)
ctcattcaaaataacaacattttgtgcccttgtttggtgatccatctgctctgcctctcacctattcattggtagaaataagataataagttaaccacagcattgtttgtcaaaacccat

SEQ ID NO: 460431 - DNA, 120 bp, Artificial Sequence
  ENSG00000157423_205 (sequence is synthesized)
taattcaggacgtgtccagctggaattcagctgggtctcagaagatacctcaaaggcagtcagctttgcaaaaccagatcaccaaggattcccaacctgccacctggagagcaaggtccg

SEQ ID NO: 460432 - DNA, 120 bp, Artificial Sequence
  ENSG00000157423_206 (sequence is synthesized)
agtgctgggtctgagctgtctgcagaactagaactcctgtctcctttcctccccgtctcacactagtcagaaatatgctctgatgatgtgcctctctgtgtgttgcaggcctttctctat

SEQ ID NO: 460433 - DNA, 90 bp, Artificial Sequence
  ENSG00000157423_207 (sequence is synthesized)
aacagctcgggcggcgcatggagagtgcgggcggcttcaagctgggtatggagcccctcagcggcggcggggtctattggcaagatccca

SEQ ID NO: 460434 - DNA, 120 bp, Artificial Sequence
  ENSG00000157423_208 (sequence is synthesized)
gctcactgcaacctctgcttctcaggctcaagccatcctcccacttcagtctcccaagtagccgggactaaaggtgtgcaccaccatgcacagctaatcttggtattttttgtagagatg

SEQ ID NO: 460435 - DNA, 120 bp, Artificial Sequence
  ENSG00000157423_209 (sequence is synthesized)
tcggcctcccaatgtgctggggaactattttctgttatctgttctggactcacacattctggatgactggaattctttggacccatatgagcctctgcaaagacattggtgagaaaaaaa

SEQ ID NO: 460436 - DNA, 120 bp, Artificial Sequence
  ENSG00000157423_210 (sequence is synthesized)
ttaaaaactgagcatatgctttgggtcagaaagtggtcatgtagagaggagaggcccagctgtaagctaagaagttgtcagcgggagatgcaggtggcatggtgctgtccagtgcatgct

SEQ ID NO: 460437 - DNA, 120 bp, Artificial Sequence
  ENSG00000157423_211 (sequence is synthesized)
gtggaaaaggactgcacaggatgctccctggggacagaggaaaggttcccaccctagggcccttgaggaagagagggagaattcaggatgagtgtgccagatgggttgatgggtatgggc

SEQ ID NO: 460438 - DNA, 120 bp, Artificial Sequence
  ENSG00000157423_212 (sequence is synthesized)
gttctaggaggagtcaccacaagtgcaaaggactggaggtcagaagcagcatcatggattcaggaaacaccagcagcctctattgatggagcacaaagggcaagggagtggggatgatgc

SEQ ID NO: 460439 - DNA, 120 bp, Artificial Sequence
  ENSG00000157423_213 (sequence is synthesized)
gtgagggtgcagagggccaggttaaggaacttggaaagtggaaagtggaccttttccttttcctaaggaaagtggaaagctgttgccctgaacttatttgagttgcggataattctgcat

SEQ ID NO: 460440 - DNA, 120 bp, Artificial Sequence
  ENSG00000157423_214 (sequence is synthesized)
cttgctgtgctgggcactttgaattttgggcctcacgcacatcccacttaaccaaacttccttttggccgaattggggtgctcatccctatttacttgcttgaataataagacatttcta

SEQ ID NO: 460441 - DNA, 120 bp, Artificial Sequence
  ENSG00000157423_215 (sequence is synthesized)
cctacctttccattgggcttaagtgaaactttgacatttgctattccgttggcgcctcacctctgccctgtaaggtggccaggagttgtatttctgctttgctaggagggaactgggacg

SEQ ID NO: 460442 - DNA, 120 bp, Artificial Sequence
  ENSG00000157423_216 (sequence is synthesized)
cgagtggccggctgggaagttctatgatgaacgctttgctgacagcaggtgcattcctgcttccctcccatcacactgtacccctccatcctttctgcaattacagccattacgggtccc

SEQ ID NO: 460443 - DNA, 120 bp, Artificial Sequence
  ENSG00000157423_217 (sequence is synthesized)
actgtgtgctgaattcctgctatgtgacactccctgctgggaactgtgaatagatcccatcaccatctacctccagtctccacaacacccgctgagggagatatgatcatcaccatcatt

SEQ ID NO: 460444 - DNA, 120 bp, Artificial Sequence
  ENSG00000157423_218 (sequence is synthesized)
cagcccctgcaattgaagaaccgtgggaaatatgagatcgcgttcaggtaactggaatcccatcagatgtaaggccatcaagtccgccgtggggaggaatgtggggaaatatgagatcgt

SEQ ID NO: 460445 - DNA, 120 bp, Artificial Sequence
  ENSG00000157423_219 (sequence is synthesized)
gttcaggtaacctgaatccgatagggtttgcggccgtcaagtccaccgtggggaatagcgtgtctgggaaacttatcagtcagtcaaggaaatcataagaaccgtctctgcttttttgcc

SEQ ID NO: 460446 - DNA, 120 bp, Artificial Sequence
  ENSG00000157423_220 (sequence is synthesized)
tcccttggcttcaaaagaatggaattccacctgctaagggagcagagattctcacactgctctcaactctgcagcttaacaggggcctttaagtggcccggatgtacctggccagttgga

SEQ ID NO: 460447 - DNA, 120 bp, Artificial Sequence
  ENSG00000157423_221 (sequence is synthesized)
accataggtgtctgggaatggaggaagagacttaggggaagaggccgggagggggagattctaggggtgagaagaggtcccagggtggagggagagactggagatgggcgacctggcctc

SEQ ID NO: 460448 - DNA, 120 bp, Artificial Sequence
  ENSG00000157423_222 (sequence is synthesized)
aagctgtcctgccttctgccagctcttatctgctttacaaggagaccttcttcagcagatttcatgtgaagaaagggctttcctttttcattacattctaagaatcatgatattgtacaa

SEQ ID NO: 460449 - DNA, 120 bp, Artificial Sequence
  ENSG00000157423_223 (sequence is synthesized)
tctaagaatcatgatattgtacaatccaaatagtagcttggtagaatagagctctggcttgtgctcatcccctgagataaaaaatgaaacacagaggctgggtgtgatggctcatgcctg

SEQ ID NO: 460450 - DNA, 120 bp, Artificial Sequence
  ENSG00000157423_224 (sequence is synthesized)
cccaggagttggagaccagcctgagcaaagtggcaagacccccctgcctctacaaaatacaaaaaaagttagctaggcgtggtggtcatatcacttgtagtcccatctacttgggagact

SEQ ID NO: 460451 - DNA, 120 bp, Artificial Sequence
  ENSG00000157423_225 (sequence is synthesized)
aaaaaaagttagctaggcgtggtggtcatatcacttgtagtcccatctacttgggagactggaatggaaggatcgcttgagcccagagaggtcaaggctgcagtgagccgtgatcgtgcc

SEQ ID NO: 460452 - DNA, 120 bp, Artificial Sequence
  ENSG00000157423_226 (sequence is synthesized)
agtgtttgacataatgtcatgtgcatgaagcaaaggggtatttaaagcagatcaagagagtcaaggaaggcttcctggacaaggtagttccccagctgaactttagaggacagataggag

SEQ ID NO: 460453 - DNA, 120 bp, Artificial Sequence
  ENSG00000157423_227 (sequence is synthesized)
gtaaccaagtaaagaagtgagaacaaagtgagagtgaaagaagtgagaatgggggtagccaagtgaagaagcgagaatgaagggctctctctaggcagagagagcaacatgtgcaacaca

SEQ ID NO: 460454 - DNA, 120 bp, Artificial Sequence
  ENSG00000157423_228 (sequence is synthesized)
cacatttggaagctattgttttttcctaaataaatctctactgtatctatttcttaggaaagtcccttgacatttatctgaggaaggatatggtttctcaaggattgtgtacaatcctga

SEQ ID NO: 460455 - DNA, 120 bp, Artificial Sequence
  ENSG00000157423_229 (sequence is synthesized)
gttaccatagtagcatccgttgctttcggggtgcagctctgctcagtcttcaatttgtttctgtagctactgtgaacccaatcttaaaggaggttctcatgcccagggtccacagtgacc

SEQ ID NO: 460456 - DNA, 120 bp, Artificial Sequence
  ENSG00000157423_230 (sequence is synthesized)
agccagcaagtctctggtagaaaaacacccagtttttagccaaagcaaattctcctattaacacttagcaggatgaatttaatattcattcaaaaagggtgtttatatcgacactctggg

SEQ ID NO: 460457 - DNA, 120 bp, Artificial Sequence
  ENSG00000157423_231 (sequence is synthesized)
ctgcctctcctattcaggtattgggacatccctgttcctttctttccagcctgactgcaactcacatttcaaaacatcttctttttatgcattaataaaagagccacatttatcttcagc

SEQ ID NO: 460458 - DNA, 120 bp, Artificial Sequence
  ENSG00000157423_232 (sequence is synthesized)
accgtggcaacggacggcaacagctcgggcggcgcatggagagtgcgggcggcttcaagctgggtatggagcccctcagcggcggcggggtctgtgagaaaaaaaaattactaaaaatga

SEQ ID NO: 460459 - DNA, 120 bp, Artificial Sequence
  ENSG00000157423_233 (sequence is synthesized)
caggcattattccagccctttccatcagaaattatatttcagaactacactccctgtgaagtctatgaagttccactgattttgaggaacaatgacaaattgagaagactgaagttcaga

SEQ ID NO: 460460 - DNA, 120 bp, Artificial Sequence
  ENSG00000157423_234 (sequence is synthesized)
cctgaccaaggtcacacgtctagtaagtagttgatggatttcagtctgtgtttaactctgctttttcacatgcacgatgttcatcatcatgtgtttccctgcagattccaaggttggtga

SEQ ID NO: 460461 - DNA, 120 bp, Artificial Sequence
  ENSG00000157426_0 (sequence is synthesized)
acgtatggtgcctcgctctgggatagctttacggcttctgggagctgctgcttcgctgtgagaagtatccgcgacgagctatccgggaaagggccgaatgcgatcaaacctaatccgcga

SEQ ID NO: 460462 - DNA, 120 bp, Artificial Sequence
  ENSG00000157426_1 (sequence is synthesized)
gacttgctaaggttctgtgctacaaattgatgtttagataaacttcagtgaaatgactcttcaggaattggtgcataaggctgcctcctgttatatggacagagtagctgtatgttttga

SEQ ID NO: 460463 - DNA, 120 bp, Artificial Sequence
  ENSG00000157426_2 (sequence is synthesized)
tgaatgcaacaaccagcttccagtttactacacctacaagactgtggttaatgctgcttctgaattatcaaattttctgctgttacactgtgactttcaaggaattcgggaaattggtct

SEQ ID NO: 460464 - DNA, 120 bp, Artificial Sequence
  ENSG00000157426_3 (sequence is synthesized)
ctactgccaacctgggatagacttaccctcttggattttaggaattctccaagtcccggctgcttatgtacctatcgagccagattcaccaccgtcattatcaactcattttatgaaaaa

SEQ ID NO: 460465 - DNA, 120 bp, Artificial Sequence
  ENSG00000157426_4 (sequence is synthesized)
atgtaatctaaagtatatccttgttgaaaaaaaacaaattaataaatttaaatcttttcatgaaacattattgaactatgatacatttacagtggaacataatgacctagtgctcttcag

SEQ ID NO: 460466 - DNA, 120 bp, Artificial Sequence
  ENSG00000157426_5 (sequence is synthesized)
acttcactggaaaaatactgaggtgaacttgatgctaaatgatggaaaagagaaatatgaaaaagaaaaaataaaaagcataagttctgagcatgtcaatgaagaaaaagcagaagaaca

SEQ ID NO: 460467 - DNA, 120 bp, Artificial Sequence
  ENSG00000157426_6 (sequence is synthesized)
catggatctgaggctaaagcattgcttagcctatgttctacatacatcagggactacagggataccgaagattgtcagagtgcctcataagtgtatagtaccaaatatccagcattttcg

SEQ ID NO: 460468 - DNA, 120 bp, Artificial Sequence
  ENSG00000157426_7 (sequence is synthesized)
ggtactttttgacatcacacaagaagatgttttgtttctggcttcacctctgaccttcgatccttctgttgtggaaatatttcttgctctatcaagtggtgcctctctgcttattgtacc

SEQ ID NO: 460469 - DNA, 120 bp, Artificial Sequence
  ENSG00000157426_8 (sequence is synthesized)
aacttccgtcaagttgctcccatcaaaattagccagcgttctcttttcccatcatagagtgactgttttgcaggcaacaccaacattgcttagaagatttggatctcagcttatcaagtc

SEQ ID NO: 460470 - DNA, 120 bp, Artificial Sequence
  ENSG00000157426_9 (sequence is synthesized)
aactgttttgtcagccactacttctcttcgagtattagcccttggtggtgaagcgtttccatcattgacagttctcagaagctggagaggagaaggcaataaaacacaaatatttaatgt

SEQ ID NO: 460471 - DNA, 120 bp, Artificial Sequence
  ENSG00000157426_10 (sequence is synthesized)
ttatggtatcacagaggtatcaagttgggcgaccatttataggattccagagaagactcttaactctactctcaaatgtgaattgcctgtacaactgggatttccacttcttggaacagt

SEQ ID NO: 460472 - DNA, 120 bp, Artificial Sequence
  ENSG00000157426_11 (sequence is synthesized)
agttgaagtcagagatactaatggcttcacaattcaggaaggcagtggccaagtatttttaggtggcagaaacagagtgtgttttcttgatgatgaagtgacagtaccacttggcacaat

SEQ ID NO: 460473 - DNA, 120 bp, Artificial Sequence
  ENSG00000157426_12 (sequence is synthesized)
gcgagctacaggagactttgtgactgtgaaagatggagagattttttttttgggacgaaaagacagtcagatcaaacgtcatggcaaacgtcttaacattgaacttgtgcaacaggttgc

SEQ ID NO: 460474 - DNA, 120 bp, Artificial Sequence
  ENSG00000157426_13 (sequence is synthesized)
tgaagagcttcagcaagtggagtcttgtgcagttacatggtataatcaggaaaaattaattctcttcatggtgtctaaagatgcttcagtaaaagaatacatctttaaagaactgcagaa

SEQ ID NO: 460475 - DNA, 120 bp, Artificial Sequence
  ENSG00000157426_14 (sequence is synthesized)
atttaaactacataaacttgaagtctgagaataagctcagtgggaaagaggacctttgggaaaaattacagtatttgtggaagtctactctgaatctcccagaagatcttttgagggttc

SEQ ID NO: 460476 - DNA, 120 bp, Artificial Sequence
  ENSG00000157426_15 (sequence is synthesized)
ctgatgagtcactcttcttaaatagtggtggagattccttaaagtccatccggctcctcagtgagattgaaaaacttgttggtacatcagtacctgggcttctggaaattattctcagca

SEQ ID NO: 460477 - DNA, 120 bp, Artificial Sequence
  ENSG00000157426_16 (sequence is synthesized)
gttccattttagagatttataatcacatccttcaaacagtggttccagatgaagatgtgacattcaggaagagttgtgccacaaaaaggaaactcagcgacattaatcaagaggaagcca

SEQ ID NO: 460478 - DNA, 120 bp, Artificial Sequence
  ENSG00000157426_17 (sequence is synthesized)
gtggaacatctttacatcagaaagccatcatgactttcacttgccacaatgagattaatgcttttgttgtactgagcagagggagtcaaattttgtctctgaattccactaggtttttaa

SEQ ID NO: 460479 - DNA, 120 bp, Artificial Sequence
  ENSG00000157426_18 (sequence is synthesized)
caaagttaggacattgctcttcagcctgtccttctgactcagtttcacagaccaacattcaaaatttgaaaggcttaaattctccagttcttattgggaagtcaaaagatccatcctgtg

SEQ ID NO: 460480 - DNA, 120 bp, Artificial Sequence
  ENSG00000157426_19 (sequence is synthesized)
ttgcaaaagtttctgaagaggggaaacctgcgatagggactcagaaaatggagttacatgtgaggtggaggtcagacacaggcaaatgtgtagatgcttcaccgctggttgtaataccca

SEQ ID NO: 460481 - DNA, 120 bp, Artificial Sequence
  ENSG00000157426_20 (sequence is synthesized)
cttttgataagtcatctacaactgtgtacattggttcccattctcatagaatgaaggcagttgacttttactctgggaaggtaaaatgggaacagattttgggagatcgaattgaatcct

SEQ ID NO: 460482 - DNA, 120 bp, Artificial Sequence
  ENSG00000157426_21 (sequence is synthesized)
cagcatgtgtatctaagtgtggaaactttattgtggtgggctgttataatggattagtttatgttctgaaaagtaatagtggagaaaaatactggatgtttactactgaagatgctgtca

SEQ ID NO: 460483 - DNA, 120 bp, Artificial Sequence
  ENSG00000157426_22 (sequence is synthesized)
aaagctcggcaaccatggatccaaccacaggactcatttacattggatctcatgaccagcacgcatatgctttagatatttatagaaagaagtgtgtttggaagtcaaaatgtggaggaa

SEQ ID NO: 460484 - DNA, 120 bp, Artificial Sequence
  ENSG00000157426_23 (sequence is synthesized)
ctgtcttttcctctccgtgtttgaacctgattccacatcatttgtattttgctacattgggaggacttttactggctgtaaatcctgctactgggaacgttatttggaaacattcctgtg

SEQ ID NO: 460485 - DNA, 120 bp, Artificial Sequence
  ENSG00000157426_24 (sequence is synthesized)
gaaaaccactcttctcttccccacaatgttgctcacagtatatttgtattggctgtgtagatgggaatttactctgctttactcactttggagaacaggtttggcagttctctaccagtg

SEQ ID NO: 460486 - DNA, 120 bp, Artificial Sequence
  ENSG00000157426_25 (sequence is synthesized)
gaccaatcttttcatccccgtgtacctcaccatcagagcaaaaaatattttttggttcccatgattgctttatctactgttgtaacatgaaaggtcacctgcagtggaaatttgaaacta

SEQ ID NO: 460487 - DNA, 120 bp, Artificial Sequence
  ENSG00000157426_26 (sequence is synthesized)
cttcaagggtctatgcaacaccgtttgctttccataactacaatggcagcaatgaaatgttgctggcagcagcatctactgatgggaaagtgtggatcttggaatctcagagtggacaat

SEQ ID NO: 460488 - DNA, 120 bp, Artificial Sequence
  ENSG00000157426_27 (sequence is synthesized)
tgcaaagtgtttatgaacttcctggagaagtcttctcttctcctgtggtcctggaatcaatgctcattattgggtgtagagataattatgtttattgtctggatttattgggtggcaatc

SEQ ID NO: 460489 - DNA, 120 bp, Artificial Sequence
  ENSG00000157426_28 (sequence is synthesized)
tggcaatcaaaaataatcaaatacagtccttatttgtataacaaatgtgagatatttgaaaatattttaccattatacatcatgtggacttattttatattaaagaagattatattttgg

SEQ ID NO: 460490 - DNA, 120 bp, Artificial Sequence
  ENSG00000157426_29 (sequence is synthesized)
aagtgtggaaactttattgtggtgggtaagtttttgaatttgaggtttgtggagttaaattgaattaccatacaataatcttcataggcccaagttaaattttttaaaaatctaaatatg

SEQ ID NO: 460491 - DNA, 120 bp, Artificial Sequence
  ENSG00000157426_30 (sequence is synthesized)
atgggtttggttgctgtccaaaaattatagttaaccctgtgctgattaatattgtgggccttggggtcaagagtccctggatttgaacctacctgtatagctattatgaactctgtgacc

SEQ ID NO: 460492 - DNA, 120 bp, Artificial Sequence
  ENSG00000157426_31 (sequence is synthesized)
tttggcaagttactgaacctcttagaatttcactttccttgtgggtaaaatgggaataataataaaatgtgttgctgtatcacaaataccccaaaactcaacaacctagaacaacacaaa

SEQ ID NO: 460493 - DNA, 120 bp, Artificial Sequence
  ENSG00000157426_32 (sequence is synthesized)
gcttctgggagctgctgcttcgctgtgagaagtatccgcgacgagctatccgggaaagggccgaatgcgatcaaacctaatccgcgagacttgctaaaaatttaaatcttttcatgaaac

SEQ ID NO: 460494 - DNA, 120 bp, Artificial Sequence
  ENSG00000157426_33 (sequence is synthesized)
cttgttgaaaaaaaacaaattaatgtaagtctggatgtttcaattgttttttgcctgtattacatttatttcaattgaaacattccttccttctcccatctggattcctaagtctgctaa

SEQ ID NO: 460495 - DNA, 120 bp, Artificial Sequence
  ENSG00000157426_34 (sequence is synthesized)
ttgcactatgacatttttagggttgagtaattgttgtgaggagtgttccgtatattataggatatttagcaatatatttgacctccactcgctagacctcagtagcacctcccagtcata

SEQ ID NO: 460496 - DNA, 120 bp, Artificial Sequence
  ENSG00000157426_35 (sequence is synthesized)
acaaccaaaaatctccagacattgccaattgtcccccagaggggctctccacccctcacactccattgtgagccactattctgtagtatgaacagatctgttagccttataataatatat

SEQ ID NO: 460497 - DNA, 120 bp, Artificial Sequence
  ENSG00000157426_36 (sequence is synthesized)
tatgcattgttttgaatttctctttccaaagtatttcctatactgcaaaattttataatacttggaactttcatatttatggcaattacattggtcagcaacactgaagaattataacta

SEQ ID NO: 460498 - DNA, 120 bp, Artificial Sequence
  ENSG00000157426_37 (sequence is synthesized)
agcttgcattttgaaaaagagactggtacttagaggagatctttccagaaaagtaaatttattgtttttttatttttaaatgattgccaaccaaagatataaccaagaaactctgttttt

SEQ ID NO: 460499 - DNA, 120 bp, Artificial Sequence
  ENSG00000157426_38 (sequence is synthesized)
ggggcaagaattggtgttatatcttcagcaagatgcagcccatgcttcattgtttatttattatttataaaatattgttttactaaaggggaagaacattataaaaatatattcaattta

SEQ ID NO: 460500 - DNA, 120 bp, Artificial Sequence
  ENSG00000157429_0 (sequence is synthesized)
aaccgttctcgctagcggtgcgcttctggcctgttttgagtccgcgctcaaaggtctctgaggatccccgggtggaaactcctcccgggagtaaaaccacacaaccactgagaagaccgc

SEQ ID NO: 460501 - DNA, 120 bp, Artificial Sequence
  ENSG00000157429_1 (sequence is synthesized)
tccggcatcctagagagtacgcgtgtgagcctgggtgcaaggccaaagtagtgacgcacttccgttcacgcaccgctttctgtttttcctgagcctttgcctgctaagagggagaccagg

SEQ ID NO: 460502 - DNA, 120 bp, Artificial Sequence
  ENSG00000157429_2 (sequence is synthesized)
tcatggcagccatgcctctgaaagctcaataccaggagatggtgaccttcgaggatgtggctgtgcacttcaccaagacagaatggactggcctttctcctgcccagagggccctgtaca

SEQ ID NO: 460503 - DNA, 120 bp, Artificial Sequence
  ENSG00000157429_3 (sequence is synthesized)
gaagtgtgatgttggagaattttgggaacctgactgctttggggtacccagttcccaaacctgcactgatctcacttttggagagaggggacatggcttggggcctggaagcacaggatg

SEQ ID NO: 460504 - DNA, 120 bp, Artificial Sequence
  ENSG00000157429_4 (sequence is synthesized)
atcccccagcagagaggaccaaaaacgtctgtaaagatgttgagaccaacattgacagtgagtccacattaatccagggaatttctgaagaaagagatgggatgatgtcacatggtcagc

SEQ ID NO: 460505 - DNA, 120 bp, Artificial Sequence
  ENSG00000157429_5 (sequence is synthesized)
tgaagagtgtccctcagagaactgacttcccagaaacacgtaatgtggaaaagcaccaggacatccccacagtgaaaaatatccaaggaaaggttccaagaatcccctgtgcaaggaaac

SEQ ID NO: 460506 - DNA, 120 bp, Artificial Sequence
  ENSG00000157429_6 (sequence is synthesized)
ctttcatatgtgaggagtgtgggaaatccttcagctacttttcttactatgctagacaccagagaatccacactggggagaaaccttttgagtgtagtgagtgtggaaaagcctttaatg

SEQ ID NO: 460507 - DNA, 120 bp, Artificial Sequence
  ENSG00000157429_7 (sequence is synthesized)
gtaattcttcgttaattcggcaccagaggattcacactggagagagaccctatcagtgtgaggagtgtgggcgagcctttaatgataatgcaaatctgatcaggcatcagagaatccaca

SEQ ID NO: 460508 - DNA, 120 bp, Artificial Sequence
  ENSG00000157429_8 (sequence is synthesized)
gtggggacagaccctattactgtacagagtgtgggaatagtttcacgagtagttccgagtttgttatacatcagagaatccacactggggagaaaccctatgagtgtaatgagtgtggca

SEQ ID NO: 460509 - DNA, 120 bp, Artificial Sequence
  ENSG00000157429_9 (sequence is synthesized)
aagcttttgttggtaattcacccctacttcggcatcagaaaatccacactggagagaaaccctatgagtgtaatgagtgtggcaaaagctttggaaggacttcccatctaagccaacatc

SEQ ID NO: 460510 - DNA, 120 bp, Artificial Sequence
  ENSG00000157429_10 (sequence is synthesized)
agcgtattcacacaggggaaaagccttattcttgtaaagtatgtggacaagccttcaattttcatacaaaactaactcggcaccagagaattcacagtgaggagaaaccctttgactgtg

SEQ ID NO: 460511 - DNA, 120 bp, Artificial Sequence
  ENSG00000157429_11 (sequence is synthesized)
tagattgtggaaaagccttcagtgctcaggaacaattaaaaaggcatctgagaattcatactcaggagtcttcctatgtatgtgatgagtgtggaaaagccttgactagcaaaagaaatc

SEQ ID NO: 460512 - DNA, 120 bp, Artificial Sequence
  ENSG00000157429_12 (sequence is synthesized)
ttcatcagcatcaaagaatccatactggagagaaaccctatgagtgtagcaagtatgagaaggcctttgggacttcttcccagctaggtcaccttgagcatgtctactctggagagaagc

SEQ ID NO: 460513 - DNA, 120 bp, Artificial Sequence
  ENSG00000157429_13 (sequence is synthesized)
tggattccgtcttctactcaggaatggaatgtgtgacacaggcctgactcagcctctgatccatccctcaagccacagttaatgattcagatgtcagtagatgaccaaagatggttcaat

SEQ ID NO: 460514 - DNA, 120 bp, Artificial Sequence
  ENSG00000157429_14 (sequence is synthesized)
tagagtcccaggattgcaagagctaataggaacaaatactctccccccgcccacccccattggttttaatgctgagaagaagaactagactcttacagaggtgagaatgaagtccacaca

SEQ ID NO: 460515 - DNA, 120 bp, Artificial Sequence
  ENSG00000157429_15 (sequence is synthesized)
gcaaaaatgcatctgagaattggagagcagtaaaagactgaagataatgtttgaacagccacatacaccatgcctgaagctaaaaatatatacgggtttttgaattgcagcagccaataa

SEQ ID NO: 460516 - DNA, 120 bp, Artificial Sequence
  ENSG00000157429_16 (sequence is synthesized)
attccatttttgtttggttggttttggctttggcacacctgagttaggttttcttgccttggaacagaattttgacttaaacagtgttgtcattgtagcagttgtttgaagttttcaggg

SEQ ID NO: 460517 - DNA, 120 bp, Artificial Sequence
  ENSG00000157429_17 (sequence is synthesized)
ataacatacctgatggagaaatgttttgtgtgtatgatatatgggaaagtctttagttatagtcatggcagctcctcaaccccatgattgtgatgagattgggaagcccactgtaacact

SEQ ID NO: 460518 - DNA, 120 bp, Artificial Sequence
  ENSG00000157429_18 (sequence is synthesized)
ggagagcccaggttatatcagacaccactagtagatagaagttctaacaacttgagctctgtaacaaaaatctcattgtactacaaaattatgtctgcaccagtgaatccattctcaaga

SEQ ID NO: 460519 - DNA, 120 bp, Artificial Sequence
  ENSG00000157429_19 (sequence is synthesized)
aaagtcttaactaggaaactaaaagctttcactcttaaagctttcattttctgtttattcagttttttatttggaatggatgctactctaggccttaaactgagaaatgccaggctattg

SEQ ID NO: 460520 - DNA, 120 bp, Artificial Sequence
  ENSG00000157429_20 (sequence is synthesized)
tagctattatatcttggtatttgccattttaattcctaggacagcacgcccgctttgcccttgacctggctagggagccaaggaaatgccatggttcttggtcataagacacactgcaga

SEQ ID NO: 460521 - DNA, 120 bp, Artificial Sequence
  ENSG00000157429_21 (sequence is synthesized)
gatctctcagtaggaaaacagggctggcccttttctttggtgatgaacacaaactgcaccctttttttctcccacgtgtccttccgctgccagccagtgttggaatctccctacccaatt

SEQ ID NO: 460522 - DNA, 120 bp, Artificial Sequence
  ENSG00000157429_22 (sequence is synthesized)
ccagacttaattgcttactgcgtctagcacctgggtggcttcaccacctcttccttacttgtcagcagatgaatgagcagttgtatcatgtgcttgggttgaccaatgaatgatagactt

SEQ ID NO: 460523 - DNA, 120 bp, Artificial Sequence
  ENSG00000157429_23 (sequence is synthesized)
tgtgcttgggttgaccaatgaatgatagacttggggaattgagtaaacaccttttaattgaagtataacacaaacataaaaatgcatgagtcagccaggcgcggtggctcacacttgtaa

SEQ ID NO: 460524 - DNA, 120 bp, Artificial Sequence
  ENSG00000157429_24 (sequence is synthesized)
caaaggtgccaaagtgcaaggacccacagttgggcggagcttgggttgggagtgagacagcatagcagtccaggctggtcctttgagcgcagctcaaagaaggggacggggagggcgtca

SEQ ID NO: 460525 - DNA, 120 bp, Artificial Sequence
  ENSG00000157429_25 (sequence is synthesized)
ctatacaattgtggccgggtgggacctgggctgtttgctcttggaggctgtacagctgcaagctttgccgctcacgaactggagctggagaaagagccccccaaggatgggaggatgaca

SEQ ID NO: 460526 - DNA, 120 bp, Artificial Sequence
  ENSG00000157429_26 (sequence is synthesized)
cgcaccgctttctgtttttcctgagcctttgcctgctaagagggagaccaggtcatggcagccatgcctctgaaagctcaataccaggactttccctcaagtccctacctgtcccctctg

SEQ ID NO: 460527 - DNA, 120 bp, Artificial Sequence
  ENSG00000157429_27 (sequence is synthesized)
aactggagagtatcaggactgggtgctaccaagcgcctcacagcagcccccagccgacaccaacatcccaaccctgggcgacccgcggctgcgcaggcgcggatgcatgtttagggggct

SEQ ID NO: 460528 - DNA, 120 bp, Artificial Sequence
  ENSG00000157429_28 (sequence is synthesized)
gcgctagtcagtgcgcatgcgccgtcgctaggcaacaggacacagctccgggcgccggcgtagaatctgagctgcaggaaggaggagaagaaatgtggtcggaagatgaggaatgaggtg

SEQ ID NO: 460529 - DNA, 120 bp, Artificial Sequence
  ENSG00000157429_29 (sequence is synthesized)
gcaacaggacacagctccgggcgccggcgtagaatctgagctgcaggtgagggttagttcctttattcggcctctgcgttctcttaggatgttacattttgtttcctttttcagcctgtc

SEQ ID NO: 460530 - DNA, 120 bp, Artificial Sequence
  ENSG00000157429_30 (sequence is synthesized)
taccctggtcacaccctgcttcgagtttctcttcctcctttgcccccggtttgggctctgactggtggaattgttccaggaagttgacaaaacatcctaggcttttgtaatcacctgtta

SEQ ID NO: 460531 - DNA, 120 bp, Artificial Sequence
  ENSG00000157429_31 (sequence is synthesized)
acctttcccagctctggatcagaagcagcaacttccatgagttgtgacgcagagcagacaattctattagctggtgttagtttccaatggtatagccccttggaacttttctccaaagaa

SEQ ID NO: 460532 - DNA, 120 bp, Artificial Sequence
  ENSG00000157429_32 (sequence is synthesized)
tcgtggccctcaccgtccgcagtgcctgacattaggatctctactcagccagaaaaataaatccacccccgtgcctttgtcaaagacaaagcaggacagtaaagcggttgagacaggttt

SEQ ID NO: 460533 - DNA, 120 bp, Artificial Sequence
  ENSG00000157429_33 (sequence is synthesized)
taaccagtaatatactaatggaataaggaggagtccagcacgaactgaactcaactttgatttgtacaaatgttactcagactttaaaggaaaaatggggaaatagggaaggggagagga

SEQ ID NO: 460534 - DNA, 120 bp, Artificial Sequence
  ENSG00000157429_34 (sequence is synthesized)
ttgttaaagggtgtttctggaagttaggcttttatcctcctacagatgctgggagataggagccatatcttaaggtgttggctggaacagtaaattcctttggcagcctgagttttttta

SEQ ID NO: 460535 - DNA, 120 bp, Artificial Sequence
  ENSG00000157429_35 (sequence is synthesized)
ggcaggccctttaaagcggggctggagtcatcctagagatgctaccttgaactgttagagactgtgttagagttttgttcaagtctgttgaggcctagtccacaaatggctcagaggaac

SEQ ID NO: 460536 - DNA, 120 bp, Artificial Sequence
  ENSG00000157429_36 (sequence is synthesized)
ctggctagagtttggtcaaggagagaatttttgttactccgcatattctgcacattattctgtgtgaggtgttgtattttacgtaccctgaagtttgaattattgcatatatgttggaaa

SEQ ID NO: 460537 - DNA, 120 bp, Artificial Sequence
  ENSG00000157429_37 (sequence is synthesized)
agaactgaattctcagtacatattatttatatccttatttattttaaacaatttaggtttatttacaaacaagtttcatataatgttatagaacctgcaaatacagatgctctctatagg

SEQ ID NO: 460538 - DNA, 120 bp, Artificial Sequence
  ENSG00000157429_38 (sequence is synthesized)
ccaaattgtttcacagcaccttccaaagaggcagtcagtcatttgctaaggttaaggttgaagctgtataggaggtgatgcccaattcctcaaagaaaacaataaacagaagaactagca

SEQ ID NO: 460539 - DNA, 83 bp, Artificial Sequence
  ENSG00000157429_39 (sequence is synthesized)
acaagcgtgacgcacttccggcctcctaaccgttctcgctagcggtgcgcttctggcctgttttgagtccgcgctcaatactt

SEQ ID NO: 460540 - DNA, 120 bp, Artificial Sequence
  ENSG00000157429_40 (sequence is synthesized)
acaatcatggtggaaagcaaaggggaagcaggcacaatcttcacatggccagcaggagagagacagcaaaggaggaagcgcaacacacttcgaaacaaccagatcacatgagaactcact

SEQ ID NO: 460541 - DNA, 120 bp, Artificial Sequence
  ENSG00000157429_41 (sequence is synthesized)
atccgcccccatgatccaatcaccttccaccatgttcctcccccaacactgaagatcataattcaacatgagatttgcctggggacacagagccaaaacatatcaagtatacatttcctt

SEQ ID NO: 460542 - DNA, 120 bp, Artificial Sequence
  ENSG00000157429_42 (sequence is synthesized)
accgctttctgtttttcctgagcctttgcctgctaagagggagaccaggtcatggcagccatgcctctgaaagctcaataccagggtacccagttcccaaacctgcactgatctcacttt

SEQ ID NO: 460543 - DNA, 120 bp, Artificial Sequence
  ENSG00000157429_43 (sequence is synthesized)
acctaataggtaaaatatgaaacgtttctcaccaatcttaactcttaccaacatgtaatcactcagtacgtctcatctgcaatccttgaatccattgttcctttctgagtttcaacattg

SEQ ID NO: 460544 - DNA, 120 bp, Artificial Sequence
  ENSG00000157429_44 (sequence is synthesized)
cctaccttagttgtcctccttggttgggatggatttattcaggagcagtttttgagcaacttgccatgtgctgaacgttgtttaagaagttctggcaggtacaagttatggagacagatg

SEQ ID NO: 460545 - DNA, 120 bp, Artificial Sequence
  ENSG00000157429_45 (sequence is synthesized)
cagatctgtacttttccagtttccttccttcttttacagcctggggggaggagtgtggagtggagaggagaggttgtctcttgtgtcctccactgagtgactgcagagctgaggctcagt

SEQ ID NO: 460546 - DNA, 120 bp, Artificial Sequence
  ENSG00000157429_46 (sequence is synthesized)
cttgggtcactttggtctcccaatgaagggaattactgtcccctggtaagagtatgttccatcttccaagaggctctgcacagtaaggaataagtagtagttgttgtctggggaagggca

SEQ ID NO: 460547 - DNA, 120 bp, Artificial Sequence
  ENSG00000157429_47 (sequence is synthesized)
tgtccccttccctgtgtttgctcatgccttgtggatctcactgacttacttatccttgagtgttttttttaggaagaagtcacaaatgctcagtttcctgttgatcggaatctctttggc

SEQ ID NO: 460548 - DNA, 120 bp, Artificial Sequence
  ENSG00000157429_48 (sequence is synthesized)
cttctccagtcgagaaccctcttctgtgggtcttattcttactgagactcctggggttttccttcttttgacacagcagatacagggctgaaaagtaccattttcttcctgttttcaggg

SEQ ID NO: 460549 - DNA, 120 bp, Artificial Sequence
  ENSG00000157429_49 (sequence is synthesized)
aggaaggaggagaagaaatgtggtcggaagatgaggaatgaggtggtccataaagtgagagaaacacagtgaagtactgacagtagaaatgatatgatgtctgagttcaactccagcaaa

SEQ ID NO: 460550 - DNA, 120 bp, Artificial Sequence
  ENSG00000157429_50 (sequence is synthesized)
aggcaacaggacacagctccgggcgccggcgtagaatctgagctgcaggaaggaggagaagaaatgtggtcggaagatgaggaatgaggtggtccataaagtgagtctgcagatcagctt

SEQ ID NO: 460551 - DNA, 120 bp, Artificial Sequence
  ENSG00000157429_51 (sequence is synthesized)
aaatcaggacttctcagtcctgtacatttatttttaattttcttttctctgtgtttgtttttgaatagtttctgttgctatgtcttcaaattcactcatcttttttctgtaatgtctaat

SEQ ID NO: 460552 - DNA, 120 bp, Artificial Sequence
  ENSG00000157429_52 (sequence is synthesized)
ctgccgttaatcccatccaatgtatttttattgcacattataggtttttatctttagaagtttgatttgggtcttttttatatgtttcatttctccaccaaacttttagatgtatcagat

SEQ ID NO: 460553 - DNA, 120 bp, Artificial Sequence
  ENSG00000157429_53 (sequence is synthesized)
atggttgtaataacttttaaatgtcattgcctactaattctgttgtgactatttcagaagtctatcaggattagtttttaatgtaatttcttggattatgaattactggtccaagtagat

SEQ ID NO: 460554 - DNA, 120 bp, Artificial Sequence
  ENSG00000157429_54 (sequence is synthesized)
agtattaatttaaactctatacttaatgatgcaaactatgattataaatttttagaagacatttctactaccacttcaaagcttaggcaaggaccataagattctttgttatctctcttt

SEQ ID NO: 460555 - DNA, 120 bp, Artificial Sequence
  ENSG00000157429_55 (sequence is synthesized)
gttcatgagatttttaaaaaatttatcctttcatgattggatgagtgtatgtgtgtgagaaaagtctctgttcctattccttgttcctgtaatatgcctcctgcatattataattctgct

SEQ ID NO: 460556 - DNA, 120 bp, Artificial Sequence
  ENSG00000157429_56 (sequence is synthesized)
ttctcagatatcaagacttacaactcttcaccattcccacccctgttggccaaagcatcagctgaggtcctcagtccaaaccaatgcctctggttttagtttcttgtttggttttggtac

SEQ ID NO: 460557 - DNA, 120 bp, Artificial Sequence
  ENSG00000157429_57 (sequence is synthesized)
gtgggtacactttcctgtgagttaagtatttaaaatgatgtcgaatattatatcttattctaaatttctagattctagtttatattatttgctacattgccctcaactgaattctgcgta

SEQ ID NO: 460558 - DNA, 120 bp, Artificial Sequence
  ENSG00000157429_58 (sequence is synthesized)
atatttattgtcttaaacttattgttgtgagatattaatatagctgtgccattttccctttcccttaatacttgtctgatatatctattttccattctttgactttcaatacttgtgctt

SEQ ID NO: 460559 - DNA, 120 bp, Artificial Sequence
  ENSG00000157429_59 (sequence is synthesized)
ttctttccttccttccttcctttctttctctttctttctctttctctctctctttctttctttctctctccttctctctctctttttttttttgacggagtctcattctgtcacccaggc

SEQ ID NO: 460560 - DNA, 80 bp, Artificial Sequence
  ENSG00000157429_60 (sequence is synthesized)
acggtccagtcacttctaacattttttctgcgtaaattttagaatcattttcacaagttttaaaacaaatcctatagggg

SEQ ID NO: 460561 - DNA, 120 bp, Artificial Sequence
  ENSG00000157429_61 (sequence is synthesized)
agaatcattttcacaagttttaaaacaaatcctataggggttttatttggtatgacgttggacttatggattaaataaagaaaactacccttcctactgaaggattacctgtgcctttcc

SEQ ID NO: 460562 - DNA, 120 bp, Artificial Sequence
  ENSG00000157429_62 (sequence is synthesized)
atttacacaaggggttttcattggtttagtccccaaatgtttaaaattttcttgatatatgtcttatacatttattagtaaacttattcctatatatgtttggttgctttgagaataaga

SEQ ID NO: 460563 - DNA, 120 bp, Artificial Sequence
  ENSG00000157429_63 (sequence is synthesized)
ccttgccctaccctagtacatttctccacatagattaaatgatttattcacagaactcacaacatcaataagtaggtaaaaattttgtagcctgaaaacagccttgaactcctggaatga

SEQ ID NO: 460564 - DNA, 120 bp, Artificial Sequence
  ENSG00000157429_64 (sequence is synthesized)
acatcaaccagacagttgttttgccacagttttcatgagaagaagcaggcaaagccatctttactctgtcctattaaaactggaaacaacaagaaatattttttcttttttgagacggag

SEQ ID NO: 460565 - DNA, 66 bp, Artificial Sequence
  ENSG00000157429_65 (sequence is synthesized)
ctggagtgcaatggcgctatctcagcccaccacaacttccgcctcctgggttcaggcgcctggcta

SEQ ID NO: 460566 - DNA, 120 bp, Artificial Sequence
  ENSG00000157429_66 (sequence is synthesized)
ctgggattccaggtgtgagccaccacgcctggccaacaaaaaagattttttttaacatgagaagattgtcagctttccctggtggtcagagaggaagggctttagagaggtcttggggct

SEQ ID NO: 460567 - DNA, 120 bp, Artificial Sequence
  ENSG00000157429_67 (sequence is synthesized)
gcagggacaaagggtgcaggagaagaagccttagagctgagcaggaggaaactgacactacatggctgcaggcccagcatggaaatgaacttctagaatgctgtagtcgaagagccagct

SEQ ID NO: 460568 - DNA, 120 bp, Artificial Sequence
  ENSG00000157429_68 (sequence is synthesized)
taattttttaactcttgtgttgtgtgatttttccatccttcctcatttctaggggtattagttaggctatgggcttggaaattaatttgaagaacccaaataaatgtggtttaaatttga

SEQ ID NO: 460569 - DNA, 120 bp, Artificial Sequence
  ENSG00000157445_0 (sequence is synthesized)
agcccagcatggccgggccgggctcgccgcgccgcgcgtcccggggggcctcggcgcttctcgctgccgcgcttctctacgccgcgctgggggacgtggtgcgctcggagcagcagatac

SEQ ID NO: 460570 - DNA, 120 bp, Artificial Sequence
  ENSG00000157445_1 (sequence is synthesized)
gccgcgctgggggacgtggtgcgctcggagcagcagataccgctctccgtggtgaagctctgggcctcggcttttggtggggagataaaatccattgctgctaagtactccggttcccag

SEQ ID NO: 460571 - DNA, 120 bp, Artificial Sequence
  ENSG00000157445_2 (sequence is synthesized)
cttctgcaaaagaaatacaaagagtatgagaaagacgttgccatagaagaaattgatggcctccaactggtaaagaagctggcaaagaacatggaagagatgtttcacaagaagtctgag

SEQ ID NO: 460572 - DNA, 120 bp, Artificial Sequence
  ENSG00000157445_3 (sequence is synthesized)
gccgtcaggcgtctggtggaggctgcagaagaagcacacctgaaacatgaatttgatgcagacttacagtatgaatacttcaatgctgtgctgataaatgaaagggacaaagacgggaat

SEQ ID NO: 460573 - DNA, 120 bp, Artificial Sequence
  ENSG00000157445_4 (sequence is synthesized)
tttttggagctgggaaaggaattcatcttagccccaaatgaccattttaataatttgcctgtgaacatcagtctaagtgacgtccaagtaccaacgaacatgtacaacaaagaccctgca

SEQ ID NO: 460574 - DNA, 120 bp, Artificial Sequence
  ENSG00000157445_5 (sequence is synthesized)
attgtcaatggggtttattggtctgaatctctaaacaaagtttttgtagataactttgaccgtgacccatctctcatatggcagtactttggaagtgcaaagggcttttttaggcagtat

SEQ ID NO: 460575 - DNA, 120 bp, Artificial Sequence
  ENSG00000157445_6 (sequence is synthesized)
ccggggattaaatgggaaccagatgagaatggagtcattgccttcgactgcaggaaccgaaaatggtacatccaggcagcaacttctccgaaagacgtggtcattttagttgacgtcagt

SEQ ID NO: 460576 - DNA, 120 bp, Artificial Sequence
  ENSG00000157445_7 (sequence is synthesized)
ggcagcatgaaaggactccgtctgactatcgcgaagcaaacagtctcatccattttggatacacttggggatgatgacttcttcaacataattgcttataatgaggagcttcactatgtg

SEQ ID NO: 460577 - DNA, 120 bp, Artificial Sequence
  ENSG00000157445_8 (sequence is synthesized)
gaaccttgcctgaatggaactttggtgcaagccgacaggacaaacaaagagcacttcagggagcatctggacaaacttttcgccaaaggaattggaatgttggatatagctctgaatgag

SEQ ID NO: 460578 - DNA, 120 bp, Artificial Sequence
  ENSG00000157445_9 (sequence is synthesized)
gccttcaacattctgagtgatttcaaccacacgggacaaggaagtatctgcagtcaggccatcatgctcataactgatggggcggtggacacctatgatacaatctttgcaaaatacaat

SEQ ID NO: 460579 - DNA, 120 bp, Artificial Sequence
  ENSG00000157445_10 (sequence is synthesized)
tggccagatcgaaaggttcgcatcttcacatacctcattggacgagaggctgcgtttgcagacaatctaaagtggatggcctgtgccaacaaaggattttttacccagatctccaccttg

SEQ ID NO: 460580 - DNA, 120 bp, Artificial Sequence
  ENSG00000157445_11 (sequence is synthesized)
gctgatgtgcaggagaatgtcatggaataccttcacgtgcttagccggcccaaagtcatcgaccaggagcatgatgtggtgtggaccgaagcttacattgacagcactctccctcaggca

SEQ ID NO: 460581 - DNA, 120 bp, Artificial Sequence
  ENSG00000157445_12 (sequence is synthesized)
caaaagctgactgatgatcagggccccgtcctgatgaccactgtagccatgcctgtgtttagtaagcagaacgaaaccagatcgaagggcattcttctgggagtggttggcacagatgtc

SEQ ID NO: 460582 - DNA, 120 bp, Artificial Sequence
  ENSG00000157445_13 (sequence is synthesized)
ccagtgaaagaacttctgaagaccatccccaaatacaagttagggattcacggttatgcctttgcaatcacaaataatggatatatcctgacgcatccggaactcaggctgctgtacgaa

SEQ ID NO: 460583 - DNA, 120 bp, Artificial Sequence
  ENSG00000157445_14 (sequence is synthesized)
gaaggaaaaaagcgaaggaaacctaactatagtagcgttgacctctctgaggtggagtgggaagaccgagatgacgtgttgagaaatgctatggtgaatcgaaagacggggaagttttcc

SEQ ID NO: 460584 - DNA, 120 bp, Artificial Sequence
  ENSG00000157445_15 (sequence is synthesized)
catcaagggtactcctttcagtttaggtgtggcgctttccagaggtcatgggaaatatttcttccgagggaatgtaaccatcgaagaaggcctgcatgacttagaacatcccgatgtgtc

SEQ ID NO: 460585 - DNA, 120 bp, Artificial Sequence
  ENSG00000157445_16 (sequence is synthesized)
cttggcagatgaatggtcctactgcaacactgacctacaccctgagcaccgccatctgtctcagttagaagcgattaagctctacctaaaaggcaaagaacctctgctccagtgtgataa

SEQ ID NO: 460586 - DNA, 120 bp, Artificial Sequence
  ENSG00000157445_17 (sequence is synthesized)
agaattgatccaagaagtcctttttgacgcggtggtgagtgcccccattgaagcgtattggaccagcctggccctcaacaaatctgaaaattctgacaagggcgtggaggttgccttcct

SEQ ID NO: 460587 - DNA, 120 bp, Artificial Sequence
  ENSG00000157445_18 (sequence is synthesized)
cggcactcgcacgggcctctccagaatcaacctgtttgtcggggctgagcagctcaccaatcaggacttcctgaaagctggcgacaaggagaacatttttaacgcagaccatttccctct

SEQ ID NO: 460588 - DNA, 120 bp, Artificial Sequence
  ENSG00000157445_19 (sequence is synthesized)
ctggtaccgaagagccgctgagcagattccagggagcttcgtctactcgatcccattcagcactggaccagtcaataaaagcaatgtggtgacagcaagtacatccatccagctcctgga

SEQ ID NO: 460589 - DNA, 120 bp, Artificial Sequence
  ENSG00000157445_20 (sequence is synthesized)
tgaacggaaatctcctgtggtggcagctgtaggcattcagatgaaacttgaatttttccaaaggaagttctggactgccagcagacagtgtgcttccctggatggcaaatgctccatcag

SEQ ID NO: 460590 - DNA, 120 bp, Artificial Sequence
  ENSG00000157445_21 (sequence is synthesized)
ctgtgatgatgagactgtgaattgttacctcatagacaataatggatttattttggtgtctgaagactacacacagactggagacttttttggtgagatcgagggagctgtgatgaacaa

SEQ ID NO: 460591 - DNA, 120 bp, Artificial Sequence
  ENSG00000157445_22 (sequence is synthesized)
attgctaacaatgggctcctttaaaagaattaccctttatgactaccaagccatgtgtagagccaacaaggaaagcagcgatggcgcccatggcctcctggatccttataatgccttcct

SEQ ID NO: 460592 - DNA, 120 bp, Artificial Sequence
  ENSG00000157445_23 (sequence is synthesized)
ctctgcagtaaaatggatcatgacagaacttgtcttgttcctggtggaatttaacctctgcagttggtggcactccgatatgacagctaaagcccagaaattgaaacagaccctggagcc

SEQ ID NO: 460593 - DNA, 120 bp, Artificial Sequence
  ENSG00000157445_24 (sequence is synthesized)
ttgtgatactgaatatccagcattcgtctctgagcgcaccatcaaggagactacagggaatattgcttgtgaagactgctccaagtcctttgtcatccagcaaatcccaagcagcaacct

SEQ ID NO: 460594 - DNA, 120 bp, Artificial Sequence
  ENSG00000157445_25 (sequence is synthesized)
gttcatggtggtggtggacagcagctgcctctgtgaatctgtggcccccatcaccatggcacccattgaaatcaggtataatgaatcccttaagtgtgaacgtctaaaggcccagaagat

SEQ ID NO: 460595 - DNA, 120 bp, Artificial Sequence
  ENSG00000157445_26 (sequence is synthesized)
cagaaggcgcccagaatcttgtcatggcttccatcctgaggagaatgcaagggagtgtgggggtgcgccgagtctccaagcccagacagtcctccttctgctccctctgcttttgatgct

SEQ ID NO: 460596 - DNA, 120 bp, Artificial Sequence
  ENSG00000157445_27 (sequence is synthesized)
cttctcaaggtgacactgactgagatgttctcttactgactgagatgttctcttggcatgctaaatcatggataaactgtgaaccaaaatatggtgcaacatacgagacatgaatatagt

SEQ ID NO: 460597 - DNA, 120 bp, Artificial Sequence
  ENSG00000157445_28 (sequence is synthesized)
ccaaccatcagcatctcatcatgattttaaactgtgcgtgatataaactcttaaagatatgttgacaaaaagttatctatcatctttttactttgccagtcatgcaaatgtgagtttgcc

SEQ ID NO: 460598 - DNA, 120 bp, Artificial Sequence
  ENSG00000157445_29 (sequence is synthesized)
acatgataatcacccttcatcagaaatgggaccgcaagtggtaggcagtgtcccttctgcttgaaacctattgaaaccaatttaaaactgtgtactttttaaataaagtatattaaaatc

SEQ ID NO: 460599 - DNA, 120 bp, Artificial Sequence
  ENSG00000157445_30 (sequence is synthesized)
tatttaagcatctgtaggaacatgctgacagcctacttcaagtcctcctctcctttcagttttcaggaaactgtgtactgcctgacttcagtgtgggtccacctctggcatctttatagt

SEQ ID NO: 460600 - DNA, 120 bp, Artificial Sequence
  ENSG00000157445_31 (sequence is synthesized)
cacactcctgaaaaggggattgcacagaggcacaaagacctctggtgtttccagtccgggtagactggctgtcaccactggggcactggtgggtacctgtgagctgatgagtgggaccaa

SEQ ID NO: 460601 - DNA, 120 bp, Artificial Sequence
  ENSG00000157445_32 (sequence is synthesized)
acggctctggccaccttggaccccattcctcccaggctttgtctctccctgagccctgcgcttgagaacattaaaagccatgccttggacccccttgttctgagtcctgccatgggccgt

SEQ ID NO: 460602 - DNA, 120 bp, Artificial Sequence
  ENSG00000157445_33 (sequence is synthesized)
ctcttcctggtgagcagattgtcactcggctccagctgcacgtccagctcttccgctgttttgctcacggtaaatgcgtcactggagaagggaaggtggatttttgcagttccacgtgcc

SEQ ID NO: 460603 - DNA, 120 bp, Artificial Sequence
  ENSG00000157445_34 (sequence is synthesized)
tggcacaaggatatcatttgaaatacaaagagtatgagaaagacgttgccatagaagaaattgatggcctccaactggtaaagaagctggcaaagaacatggaagagatgtttcacaaga

SEQ ID NO: 460604 - DNA, 120 bp, Artificial Sequence
  ENSG00000157445_35 (sequence is synthesized)
acggaaaccagtaaggggtatcagtggtaaggaaacctgggggagaaatattagagaaggaaaattacatcctttccactgttggagagagagagtagttaagagagttgtcattgccaa

SEQ ID NO: 460605 - DNA, 120 bp, Artificial Sequence
  ENSG00000157450_0 (sequence is synthesized)
agagccctagtgtcgtgctctcctcggtaggggaggaattggttaggcggcggcggcggcgaagcggcggcggcggctgtaggggagcagcggcagtggcggcgacggcgaggaggtgtt

SEQ ID NO: 460606 - DNA, 120 bp, Artificial Sequence
  ENSG00000157450_1 (sequence is synthesized)
cggtttgcgcagcgtagaaacgcccgcagcttcagagaaggagttcttgtgggaccaaattaggcattctgaacccacgccggcttagctgggccgagtccaggcgctgccgcacgtaca

SEQ ID NO: 460607 - DNA, 120 bp, Artificial Sequence
  ENSG00000157450_2 (sequence is synthesized)
gttttggtggcggtgacagacactgttcttgactctaggggcctattaggccgacgtctgaggcgcagatcgctggctctcgacgcattactctttacgccttacatttctgtcttcctt

SEQ ID NO: 460608 - DNA, 120 bp, Artificial Sequence
  ENSG00000157450_3 (sequence is synthesized)
cctgggtcagtgattcccggaccctggaagagaagagggtggctaatgattaaggctttccttaaagtttcccatgtctcaatggactcctgaatataacgagctctacaccttaaaagt

SEQ ID NO: 460609 - DNA, 120 bp, Artificial Sequence
  ENSG00000157450_4 (sequence is synthesized)
ggatatgaagagtgagattccttctgatgcaccaaagacacaggagagtctgaaagggatccttttgcatccagagcccattggggcagccaaaagttttcctgcaggagttgagatgat

SEQ ID NO: 460610 - DNA, 120 bp, Artificial Sequence
  ENSG00000157450_5 (sequence is synthesized)
taatagtaaagtggggaatgaattctctcacctgtgtgatgattctcaaaagcaagagaaggaaatgaatggtaaccagcaagaacaagaaaaaagtctcgttgtgaggaaaaaacgcaa

SEQ ID NO: 460611 - DNA, 120 bp, Artificial Sequence
  ENSG00000157450_6 (sequence is synthesized)
aagccagcaggctggcccttcgtatgtgcagaattgtgttaaagaaaaccagggaatattaggactgaggcaacacctagggacaccaagtgatgaagataatgattcctcttttagtga

SEQ ID NO: 460612 - DNA, 120 bp, Artificial Sequence
  ENSG00000157450_7 (sequence is synthesized)
ttgtctttcttctccttcatctagtctgcattttggagattctgatactgtgacttcagatgaggataaagaagtctctgtaagacattcccagaccattttgaatgctaaaagtagaag

SEQ ID NO: 460613 - DNA, 120 bp, Artificial Sequence
  ENSG00000157450_8 (sequence is synthesized)
ccatagtgcacggtctcataagtggcctcggactgagacagaatctgtatcgggattgttaatgaaaagaccctgtttacatggcagttcgttacggagacttccatgcagaaagagatt

SEQ ID NO: 460614 - DNA, 120 bp, Artificial Sequence
  ENSG00000157450_9 (sequence is synthesized)
tgtaaaaaataattcctcacagaggacacagaaacaaaaagagaggatattaatgcagaggaagaaacgagaagtgttagctcgaagaaaatatgccttgctacctagttctagtagttc

SEQ ID NO: 460615 - DNA, 120 bp, Artificial Sequence
  ENSG00000157450_10 (sequence is synthesized)
cagtgagaatgacctcagcagtgaatcctcttctagctcatcaactgaaggagaagaagatttgtttgtttctgccagtgaaaaccaccaaaacaatccagctgttccctcaggaagtat

SEQ ID NO: 460616 - DNA, 120 bp, Artificial Sequence
  ENSG00000157450_11 (sequence is synthesized)
tgatgaagatgttgtggtgatagaagcttcctccactccccaggttactgccaatgaagaaattaatgttacctcaactgacagtgaagtggagattgtaacagttggagaaagctatcg

SEQ ID NO: 460617 - DNA, 120 bp, Artificial Sequence
  ENSG00000157450_12 (sequence is synthesized)
gtctcgttcaacccttggacactccagatctcattggagccagggttccagttctcatgcaagtcggccacaggagccacggaaccgcagtaggatttctactgttatacagcccttgag

SEQ ID NO: 460618 - DNA, 120 bp, Artificial Sequence
  ENSG00000157450_13 (sequence is synthesized)
gcagaatgcagcagaagttgtggaccttaccgttgatgaagatgaacctactgtagtaccaaccacttctgcaagaatggaatcacaagctactagcgcttccattaacaattcaaatcc

SEQ ID NO: 460619 - DNA, 120 bp, Artificial Sequence
  ENSG00000157450_14 (sequence is synthesized)
atctacctctgagcaggcctctgatactgcttcagctgtcaccagtagccaaccttccacagtgtcagagacttcagctactcttacaagcaatagtaccactggcacttctataggaga

SEQ ID NO: 460620 - DNA, 120 bp, Artificial Sequence
  ENSG00000157450_15 (sequence is synthesized)
tgactcaaggagaactacatctagtgctgtaacggaaactggccctcctgcaatgccaaggttaccttcctgctgtccccagcactcaccatgtggagggtcgtcacagaaccaccatgc

SEQ ID NO: 460621 - DNA, 120 bp, Artificial Sequence
  ENSG00000157450_16 (sequence is synthesized)
attaggacatcctcatacaagttgctttcagcagcatggtcaccattttcaacatcatcaccaccaccaccatactccccacccagctgtcccagtttctccttcctttagtgatcctgc

SEQ ID NO: 460622 - DNA, 120 bp, Artificial Sequence
  ENSG00000157450_17 (sequence is synthesized)
ttgccctgtggaaagacctccacaagtacaagcaccttgtggagcaaatagtagttctggtaccagctatcatgaacagcaggcattgccagtggacctgagcaacagtggtatcagaag

SEQ ID NO: 460623 - DNA, 120 bp, Artificial Sequence
  ENSG00000157450_18 (sequence is synthesized)
tcatggaagtggcagttttcatggagcatctgcatttgacccctgctgccctgtttcttcctcccgagctgcaatctttggccatcaggccgctgctgctgccccaagtcaacctttatc

SEQ ID NO: 460624 - DNA, 120 bp, Artificial Sequence
  ENSG00000157450_19 (sequence is synthesized)
atcaatagatggctatggatcaagcatggttgcgcagccccagccccagccccctccacagccctctctctcatcatgtcgacattacatgccacccccttatgcctctttgacaaggcc

SEQ ID NO: 460625 - DNA, 120 bp, Artificial Sequence
  ENSG00000157450_20 (sequence is synthesized)
acttcatcatcaagcttctgcctgcccgcattctcatggaaacccccctcctcagactcagcctccgcctcaagtggattatgttattcctcatcctgtacatgctttccattctcaaat

SEQ ID NO: 460626 - DNA, 120 bp, Artificial Sequence
  ENSG00000157450_21 (sequence is synthesized)
atcttctcatgcaacatctcatcctgtggcacccccaccaccaactcacttagccagtacagctgcaccaatccctcagcatcttcctcctacacaccagccaatttcgcaccatattcc

SEQ ID NO: 460627 - DNA, 120 bp, Artificial Sequence
  ENSG00000157450_22 (sequence is synthesized)
agccacagcacctccagcacagagactgcatcctcatgaagtgatgcagaggatggaagttcaaaggaggaggatgatgcagcatccaacgcgggcacatgaacgccccccaccccatcc

SEQ ID NO: 460628 - DNA, 120 bp, Artificial Sequence
  ENSG00000157450_23 (sequence is synthesized)
acataggatgcacccaaactatggtcatgggcatcatattcatgtgcctcagactatgtcctcacatcctcgacaggctccagagaggtctgcctgggaactgggaattgaagctggagt

SEQ ID NO: 460629 - DNA, 120 bp, Artificial Sequence
  ENSG00000157450_24 (sequence is synthesized)
tcctcacttggcccattatcacgcacctcctcgacttcatcacttacaattaggagctcttcctttaatggttcctgatatggcaggctatcctcacatccgttacatttcatcaggatt

SEQ ID NO: 460630 - DNA, 120 bp, Artificial Sequence
  ENSG00000157450_25 (sequence is synthesized)
ggatggaacatcattcagaggtcctttcaggggcaattttgaggaactgattcatttggaagaaagattaggcaatgtcaatcgtggagcatcccaggggacaattgaaagatgtacata

SEQ ID NO: 460631 - DNA, 120 bp, Artificial Sequence
  ENSG00000157450_26 (sequence is synthesized)
tccacataaatacaaaaagaggaaactgcactgcaaacaagatggggaagaagggactgaggaagacacagaggaaaaatgtactatctgtttgtctattttagaggaaggtgaagatgt

SEQ ID NO: 460632 - DNA, 120 bp, Artificial Sequence
  ENSG00000157450_27 (sequence is synthesized)
gagacgtcttccatgtatgcaccttttccaccaagtgtgtgttgaccaatggttgattaccaataagaagtgccccatatgcagagtggacattgaggcccagctgccaagtgaaagttg

SEQ ID NO: 460633 - DNA, 120 bp, Artificial Sequence
  ENSG00000157450_28 (sequence is synthesized)
acaccatgtttcagaactcttgccctccctctcattcccatccttcctggtactgcagtcaaccaaagatggcatgacttacctgcgcagatttggaagcattgaacttagagtgctggc

SEQ ID NO: 460634 - DNA, 120 bp, Artificial Sequence
  ENSG00000157450_29 (sequence is synthesized)
tctgctatatggtacaactaatgctagacctacagtttatgtatacagttgattttgatgtatttataaaagcttttttttctagatttgacatttttctgtatcattttactgtatttt

SEQ ID NO: 460635 - DNA, 120 bp, Artificial Sequence
  ENSG00000157450_30 (sequence is synthesized)
tgcatggttccttgtattgcatttctttgcacatattatgggcttgtgaccctaaacttgcaggcaaggttagctgctttagtaagtagaattttgtggtctttttgttttttacatagt

SEQ ID NO: 460636 - DNA, 120 bp, Artificial Sequence
  ENSG00000157450_31 (sequence is synthesized)
accaagccttgataattatgaattttttatccattactaacctttaatttaatcaatcatgtactttagtttaatgtataaagatcctctagaaaatgataatattgtgtattaagacat

SEQ ID NO: 460637 - DNA, 120 bp, Artificial Sequence
  ENSG00000157450_32 (sequence is synthesized)
tccttaattaggacaaaatggctgctgtatatttactatatggagttctgagttaaataccatccttaatactgggaacagaatacaacccatataaatcagatgcaggtggtagtcaca

SEQ ID NO: 460638 - DNA, 120 bp, Artificial Sequence
  ENSG00000157450_33 (sequence is synthesized)
tcaccagagtgatcagtataaattttcttggtgtatccttttcctttcaacacagtgcagataagagttgaatattgatatcatacatttagactgctgttctgattgcatttatctttt

SEQ ID NO: 460639 - DNA, 120 bp, Artificial Sequence
  ENSG00000157450_34 (sequence is synthesized)
tcctacatcatttagaattttatttccctgattcagtttttgctgctgtgaaacagctctgatgaacactaaatattaatttcaattagctagattgtacatacttgcagatttaacaaa

SEQ ID NO: 460640 - DNA, 120 bp, Artificial Sequence
  ENSG00000157450_35 (sequence is synthesized)
attttagggaaattgaaaaagacatgtagaatttgttgtcttctgctaagcacgaaaagttaagatatctgcttacattgattttgtagacacattaagtcaagatttggaatttaagtc

SEQ ID NO: 460641 - DNA, 120 bp, Artificial Sequence
  ENSG00000157450_36 (sequence is synthesized)
actggcaggtatctgtgcattcatagaacttataaaggtcccaggatcacttttaagggatttttattagtttaaaggtaaataaagtcagctgaatctacatgtctcttgttttatttc

SEQ ID NO: 460642 - DNA, 120 bp, Artificial Sequence
  ENSG00000157450_37 (sequence is synthesized)
tctctaaacttgaaaacagtaaatctgcagatactgtgaggcacaaattatactgtcaacctactgttgctatggttatatactcccacttcatacattaccaagagtcgatcactgatt

SEQ ID NO: 460643 - DNA, 120 bp, Artificial Sequence
  ENSG00000157450_38 (sequence is synthesized)
gatttaaaatttttaatttctatagttaagatttactgcataatatagaatataaagttaagttaacatactaacatttctcctttggaggaagttttaatctacttcaggatgcatatt

SEQ ID NO: 460644 - DNA, 120 bp, Artificial Sequence
  ENSG00000157450_39 (sequence is synthesized)
tcaagatactttcatatacaggatagcctaattttatttgtttaaatatgcttaatatgccccagattgcaaatgcatccagtcagtaatatcactgtctgtatgtggaggacatgttcc

SEQ ID NO: 460645 - DNA, 120 bp, Artificial Sequence
  ENSG00000157450_40 (sequence is synthesized)
catggatcatatgtgaagatgtcaataagcttgcattaagccacctgctttgtaagtggattgattaataaataacttatatttctattgtctttgtgtttcataattagtttttataaa

SEQ ID NO: 460646 - DNA, 120 bp, Artificial Sequence
  ENSG00000157450_41 (sequence is synthesized)
aacagtttacattaaacatcttggaattcaacaatagtgatctcactcaaattgacatttgcataatttgacatttatattcattcagttatgactacttgcccttttcttcatattagt

SEQ ID NO: 460647 - DNA, 120 bp, Artificial Sequence
  ENSG00000157450_42 (sequence is synthesized)
aaatgttacactgtagtagttgtcaatgttaacaggcttcaacatagtatgtgtgcagatggacgatggatttaaagagcataccttatgattaaaccgaggttatagaaggtcagggga

SEQ ID NO: 460648 - DNA, 120 bp, Artificial Sequence
  ENSG00000157450_43 (sequence is synthesized)
gagtgaaggagtcagtgacctatgtctgccatcttactggggaaaagagcaagtagcctgtcttcctttaagtaagtagcctgtaatggatgtactactttgccactggaataccccggg

SEQ ID NO: 460649 - DNA, 120 bp, Artificial Sequence
  ENSG00000157450_44 (sequence is synthesized)
tctgtgccaagggactgaagaagtgtaagatggggagaactgtatgtcatggagtcctcttgacgttcccccagatacaagtaaagcacaggtggatttctctatttttgaatactacat

SEQ ID NO: 460650 - DNA, 120 bp, Artificial Sequence
  ENSG00000157450_45 (sequence is synthesized)
cagatttagatgcacgactacctgttgacttgttttataattgctactgatttttttaatgtaggcaaagctttgttactttgaaatttatttaataaaagtatttgtgacataaacctg

SEQ ID NO: 460651 - DNA, 120 bp, Artificial Sequence
  ENSG00000157450_46 (sequence is synthesized)
aattgttaatataggagcttattaagctactgccattagttatcgaaaaatgtgataagtaatgaagaaagtaaggaagaaaatgactttgaacattttgactttttgtgctttgttttg

SEQ ID NO: 460652 - DNA, 120 bp, Artificial Sequence
  ENSG00000157450_47 (sequence is synthesized)
gtgtcttccatatcctgctgcatcttatatgtcaaaatgaacatttcagtggtagctgtccaaatacataaaaactaaaattcttttgttagcaagtccttatttttattgttgttaaca

SEQ ID NO: 460653 - DNA, 120 bp, Artificial Sequence
  ENSG00000157450_48 (sequence is synthesized)
tgcaagtgataaactgataatttgaaacatttttcttactctggtgactttcttttagctgctagcacacttcagcatttgaaccataacagttgtgataaactgatcgtttgaaacgtt

SEQ ID NO: 460654 - DNA, 120 bp, Artificial Sequence
  ENSG00000157450_49 (sequence is synthesized)
tggaggggagaaagaggaagggctgcggccgcggaaggctggggtcggtgaccggccggttatctctggctcggtggtgacttagggtctgggtctccgcagacgatttgtgtttgggca

SEQ ID NO: 460655 - DNA, 120 bp, Artificial Sequence
  ENSG00000157450_50 (sequence is synthesized)
aggcattcgtctaccgacacacccacagcctacagtgagggagtgtgggtgaggggatttctctcccacttccgactctccctagagtctcaggatgggggctgaggaccgaggcgtggg

SEQ ID NO: 460656 - DNA, 120 bp, Artificial Sequence
  ENSG00000157450_51 (sequence is synthesized)
gggggaggggagactttttgtcattactttcgttaggaaaagtattattgtttttaagtctaagattttagctatgttaataagcgggtattcttacattataataaacttcatatgtta

SEQ ID NO: 460657 - DNA, 120 bp, Artificial Sequence
  ENSG00000157450_52 (sequence is synthesized)
acataactccccatgtctgttgataaaaaagagaccctaaggaggattaaactgttctcatcctttcgttagggaactgggaattgaagctggagtgactgcagctacttatacacctgg

SEQ ID NO: 460658 - DNA, 120 bp, Artificial Sequence
  ENSG00000157450_53 (sequence is synthesized)
agcagatgctggagctgctggtgctggagcagtttctgagcgcgctgccagccgacacgcaggcctgggtgtgcagccgtcagccgctaagctgggaggaggcggtggccctgctggaag

SEQ ID NO: 460659 - DNA, 120 bp, Artificial Sequence
  ENSG00000157450_54 (sequence is synthesized)
ggtctgcctggtcagtatcttctttaatttcaaaacagtgcttcacagcttgtggtaaaactattggaagagatgccttgtgattgattgctttgcagaaggatgatgtggagaaaccta

SEQ ID NO: 460660 - DNA, 120 bp, Artificial Sequence
  ENSG00000157450_55 (sequence is synthesized)
cctatcctgtgtttatcctccttgccgtagctgagttgatctttttgaaaccctcttcccagactcttggatttatttattttattccagtgtgaatgcatgttttttccctcatagatg

SEQ ID NO: 460661 - DNA, 120 bp, Artificial Sequence
  ENSG00000157456_0 (sequence is synthesized)
gaagatccccagcgctgcgggctcggagagcagtcctaacggcgcctcgtacgctagtgtcctcccttttcagtccgcgtccctccctgggccgggctggcactcttgccttccccgtcc

SEQ ID NO: 460662 - DNA, 120 bp, Artificial Sequence
  ENSG00000157456_1 (sequence is synthesized)
ctcatggcgctgctccgacgcccgacggtgtccagtgatttggagaatattgacacaggagttaattctaaagttaagagtcatgtgactattaggcgaactgttttagaagaaattgga

SEQ ID NO: 460663 - DNA, 120 bp, Artificial Sequence
  ENSG00000157456_2 (sequence is synthesized)
aatagagttacaaccagagcagcacaagtagctaagaaagctcagaacaccaaagttccagttcaacccaccaaaacaacaaatgtcaacaaacaactgaaacctactgcttctgtcaaa

SEQ ID NO: 460664 - DNA, 120 bp, Artificial Sequence
  ENSG00000157456_3 (sequence is synthesized)
ccagtacagatggaaaagttggctccaaagggtccttctcccacacctgaggatgtctccatgaaggaagagaatctctgccaagctttttctgatgccttgctctgcaaaatcgaggac

SEQ ID NO: 460665 - DNA, 120 bp, Artificial Sequence
  ENSG00000157456_4 (sequence is synthesized)
attgataacgaagattgggagaaccctcagctctgcagtgactacgttaaggatatctatcagtatctcaggcagctggaggttttgcagtccataaacccacatttcttagatggaaga

SEQ ID NO: 460666 - DNA, 120 bp, Artificial Sequence
  ENSG00000157456_5 (sequence is synthesized)
gatataaatggacgcatgcgtgccatcctagtggattggctggtacaagtccactccaagtttaggcttctgcaggagactctgtacatgtgcgttggcattatggatcgatttttacag

SEQ ID NO: 460667 - DNA, 120 bp, Artificial Sequence
  ENSG00000157456_6 (sequence is synthesized)
ctgctcttggcttccaagtatgaggagatgttttctccaaatattgaagactttgtttacatcacagacaatgcttataccagttcccaaatccgagaaatggaaactctaattttgaaa

SEQ ID NO: 460668 - DNA, 120 bp, Artificial Sequence
  ENSG00000157456_7 (sequence is synthesized)
gaattgaaatttgagttgggtcgacccttgccactacacttcttaaggcgagcatcaaaagccggggaggttgatgttgaacagcacactttagccaagtatttgatggagctgactctc

SEQ ID NO: 460669 - DNA, 120 bp, Artificial Sequence
  ENSG00000157456_8 (sequence is synthesized)
atcgactatgatatggtgcattatcatccttctaaggtagcagcagctgcttcctgcttgtctcagaaggttctaggacaaggaaaatggaacttaaagcagcagtattacacaggatac

SEQ ID NO: 460670 - DNA, 120 bp, Artificial Sequence
  ENSG00000157456_9 (sequence is synthesized)
acagagaatgaagtattggaagtcatgcagcacatggccaagaatgtggtgaaagtaaatgaaaacttaactaaattcatcgccatcaagaataagtatgcaagcagcaaactcctgaag

SEQ ID NO: 460671 - DNA, 120 bp, Artificial Sequence
  ENSG00000157456_10 (sequence is synthesized)
atcagcatgatccctcagctgaactcaaaagccgtcaaagaccttgcctccccactgataggaaggtcctaggctgccgtggcccctggggatgtgtgcttcattgtgccctttttctta

SEQ ID NO: 460672 - DNA, 120 bp, Artificial Sequence
  ENSG00000157456_11 (sequence is synthesized)
ttggtttagaactcttgattttgtacatagtcctctggtctatctcatgaaacctcttctcagaccagttttctaaacatatattgaggaaaaataaagcgattggtttttcttaaggta

SEQ ID NO: 460673 - DNA, 120 bp, Artificial Sequence
  ENSG00000157456_12 (sequence is synthesized)
tgggttttgtgtgtatgttgggcgggggggggcggtgtgtgccgtcatgtaaatatattaataacatgtgggagttttagcacaaatcctttatcctttatatttttctggtacagtatg

SEQ ID NO: 460674 - DNA, 120 bp, Artificial Sequence
  ENSG00000157456_13 (sequence is synthesized)
taggctagccatgtccaggcccagatcccagtcaaccagtcggttactcaatgtattgaattactctgtgcttatactagcatcctggggagggcactttgcaagcagggaaggctggtc

SEQ ID NO: 460675 - DNA, 120 bp, Artificial Sequence
  ENSG00000157456_14 (sequence is synthesized)
tgcatgtgattgggaagagagagggcccacttcaaatggcggtgtattatattgcgtattcaggtgatgttactcagagcctttgtccagggtcttttgaggcaatgatggaaaaacgcc

SEQ ID NO: 460676 - DNA, 120 bp, Artificial Sequence
  ENSG00000157456_15 (sequence is synthesized)
taattagcaagcatggttaagagggaagaggcccattcagggggcatcctgagggcatggtgtctatctctgcatggcccacctatgaggaggagccaaaggagacttagtgctgtcctg

SEQ ID NO: 460677 - DNA, 120 bp, Artificial Sequence
  ENSG00000157456_16 (sequence is synthesized)
tgcttgtgtgacaccaaacatcagagctcaccaagtgtgtggtggcaaagagcaaggtatttgaacctcagaagagtctcaagtgtcctcacaacatgatttgcttcatggaagtgtaat

SEQ ID NO: 460678 - DNA, 120 bp, Artificial Sequence
  ENSG00000157456_17 (sequence is synthesized)
atgtgttcagtcctgagaggactgtctgggatttgttaagcactagttgccaccctcttttattgtcttttattgtcttttaattgttcctattgctgccaggcctggtgaacctgttat

SEQ ID NO: 460679 - DNA, 120 bp, Artificial Sequence
  ENSG00000157456_18 (sequence is synthesized)
gtcctgatggcacttaggtgtcgtaaacacagctccccctcccatccctctggtagcctacaagaggaagcctgctacttggaccttgaaatcatttgttcctatcacctgtgctaccag

SEQ ID NO: 460680 - DNA, 120 bp, Artificial Sequence
  ENSG00000157456_19 (sequence is synthesized)
ctgtgttttattcattaatggggatggaaggaaatggtcaggcacatgttatgagcccagagctttcactggcttcagcgattgggcatcatcaatgtgatcatgattgtagccgtggac

SEQ ID NO: 460681 - DNA, 120 bp, Artificial Sequence
  ENSG00000157456_20 (sequence is synthesized)
ctttgataattgtgagttagactaggaataaggtatcattgggggttcctgacatgtgcttaatcacaaatgacttctgcaggccatcaagaataagtatgcaagcagcaaactcctgaa

SEQ ID NO: 460682 - DNA, 120 bp, Artificial Sequence
  ENSG00000157470_0 (sequence is synthesized)
gcagccgggcgccctgctcagccagcgccagcggccgccgcacccagccgcgccggcgaggacatgggcagccgcggcgcgcccaccccccgcgccgatgtgaattattaaaaagaaaat

SEQ ID NO: 460683 - DNA, 120 bp, Artificial Sequence
  ENSG00000157470_1 (sequence is synthesized)
ggcccaacggagcactgtatttccttctcgtgtcaccaaggaaaggtataatatatggaaaatatgcatctaaggcgagtgagaaccatgccccgacacagccagtccctgaccatggca

SEQ ID NO: 460684 - DNA, 120 bp, Artificial Sequence
  ENSG00000157470_2 (sequence is synthesized)
ccatactcatctgtaagcctcgtggagcagctggaagacaggatcctctgccatgagaaaaccaccgccgccctcgtagagcacgcctttcggattaaagatgacattgtcaacagtttg

SEQ ID NO: 460685 - DNA, 120 bp, Artificial Sequence
  ENSG00000157470_3 (sequence is synthesized)
cagaaaatgcaaaacaaagggggaggtgaccgcttggccaggcttttcttggaggagcatatcagaaacataactgccatagtgaagcaacttaatcgggatatcgaggtactccaggag

SEQ ID NO: 460686 - DNA, 120 bp, Artificial Sequence
  ENSG00000157470_4 (sequence is synthesized)
cagattcgtgcccgggacaacattagctatggaactaattctgccttaaagaccctggagatgcgccagctctccggtttgggagatcttcgaggaagagtggcaagatgtgatgccagc

SEQ ID NO: 460687 - DNA, 120 bp, Artificial Sequence
  ENSG00000157470_5 (sequence is synthesized)
atagctagactttctgcagagcacaaaacgacctatgaggggctccagcacttgaacaaagaacagcaggctgccaaacttatcttggaaacgaaaatcaaagatgcagagggacagatt

SEQ ID NO: 460688 - DNA, 120 bp, Artificial Sequence
  ENSG00000157470_6 (sequence is synthesized)
tctcagcttttgaacagagtggacttgtcaatatcagagcagagcaccaaactgaagatgtctcacagagacagtaaccaccagcttcagcttttggacactaaatttaaaggtacagtt

SEQ ID NO: 460689 - DNA, 120 bp, Artificial Sequence
  ENSG00000157470_7 (sequence is synthesized)
gaggaactcagtaaccagatattatctgcacggagttggttgcaacaggaacaagaacggatagaaaaagagcttttacagaaaattgatcagctttccttgattgttaaggaaaacagt

SEQ ID NO: 460690 - DNA, 120 bp, Artificial Sequence
  ENSG00000157470_8 (sequence is synthesized)
ggagccagtgaaagggatatggagaagaagctcagccagatgtcagccaggcttgacaaaatagaagagggtcaaaagaagacttttgatggtcagagaacaaggcaagaagaggagaag

SEQ ID NO: 460691 - DNA, 120 bp, Artificial Sequence
  ENSG00000157470_9 (sequence is synthesized)
atgcacgggcgaatcaccaagctggagttacagatgaaccagaacatcaaggaaatgaaagcagaagttaatgctgggtttacagccgtctatgaaagcataggatccctcaggcaagtt

SEQ ID NO: 460692 - DNA, 120 bp, Artificial Sequence
  ENSG00000157470_10 (sequence is synthesized)
ctcgaggccaagatgaagctggacagggaccagctacagaagcaaatccagctgatgcagaagccagagacccccatgtgaagggagctgggacaaggtcctaaaagacagttttgccag

SEQ ID NO: 460693 - DNA, 120 bp, Artificial Sequence
  ENSG00000157470_11 (sequence is synthesized)
tggggctaggagccggatacctctgtagccaggccatcgctgcattcaggattgttccatccatggcgtgcatgtgccaagaaatgtgtttttatgggtctaaatgtttaccttgagtct

SEQ ID NO: 460694 - DNA, 120 bp, Artificial Sequence
  ENSG00000157470_12 (sequence is synthesized)
tgaaaatactcttttgttaaaagtatgaaatacagtttttaccagtttatttcacttctctaaattcaatggaaatcccccgccctggattttgaaaggcttttatcttcttcattttac

SEQ ID NO: 460695 - DNA, 120 bp, Artificial Sequence
  ENSG00000157470_13 (sequence is synthesized)
gaatggaaagacgacaatttttcttcaatgcttgatgcactaatgaagactgtttactattttgaaaaatgtcatggggatttttttttaattaagaaactaatgaatcatcacaggaat

SEQ ID NO: 460696 - DNA, 120 bp, Artificial Sequence
  ENSG00000157470_14 (sequence is synthesized)
tatattggttatcttcttgtaaatcttctgtcttttgtaaggggaaaggatttaacatttagaataaaccccaccatttatgtaatggaaatagtttaaaaattgctaactgccatgtgg

SEQ ID NO: 460697 - DNA, 120 bp, Artificial Sequence
  ENSG00000157470_15 (sequence is synthesized)
attgcaaattaaatggaaacttatttagataacgtaaggctcaatatctgcgttgaccacctagatattacaggttttaatatttaaaactatttttgaattatccacaacctgtatagt

SEQ ID NO: 460698 - DNA, 120 bp, Artificial Sequence
  ENSG00000157470_16 (sequence is synthesized)
gatagccatatatttaataatggaatggtggttaacagtctatttactgcacaattaattgttcactaatcaaatagaatgtggtaatttttcagactttatgatctgtttccaaaattg

SEQ ID NO: 460699 - DNA, 120 bp, Artificial Sequence
  ENSG00000157470_17 (sequence is synthesized)
gcacaaagtgctagggtttatatacacttatcgtaactgtatttttgtgccttggttttatcatgtcaatgcactgtactctgtaaaagttttgcagacaaaatagaaagtatgataatc

SEQ ID NO: 460700 - DNA, 120 bp, Artificial Sequence
  ENSG00000157470_18 (sequence is synthesized)
cgtcagaagtatgatgtaaaactggaatcctctgtattttttaaatgttctaaaaattttatcgctgttaaggtattaatcattcagtattactaatggaatagaaattcatacttttgt

SEQ ID NO: 460701 - DNA, 120 bp, Artificial Sequence
  ENSG00000157470_19 (sequence is synthesized)
atggacaacaattcaaattgatattgcatttatagcactgtaagaaactttcatcttgagcaactttgtagatgatgggtgttttattttcaatcgccatatttgatcagtcattgaaaa

SEQ ID NO: 460702 - DNA, 120 bp, Artificial Sequence
  ENSG00000157470_20 (sequence is synthesized)
ttggccccagtgctgtttgttcatctctgtatgtaaaaactgacagtgagacacaacgttctgaactgtgagggtgtcccaggaaaaagaaaaacaggaatactttaacaattaaaaaga

SEQ ID NO: 460703 - DNA, 120 bp, Artificial Sequence
  ENSG00000157470_21 (sequence is synthesized)
aaaaaatgttttttgtttgccaaggactcaggaaaataaaaagcattttctatttttaggacaaatcacaaatgaagtgtctaactggctattactgtttacccatataaaatatgctgc

SEQ ID NO: 460704 - DNA, 120 bp, Artificial Sequence
  ENSG00000157470_22 (sequence is synthesized)
taaagtacatattttgctgtcaatggcttgacaattttttttttcaaatttggacatgagaggttatatagggactatattatccaacacatattttcttattttgccacaaatttccac

SEQ ID NO: 460705 - DNA, 120 bp, Artificial Sequence
  ENSG00000157470_23 (sequence is synthesized)
ttaacaaataaaaaaaggcgaatgctgttttgcaatcagaaagtgaatttcttttgtggtagcgtacacgtggttcatgtggttctccacgtttaagcacaaaccacagcacaggaagcc

SEQ ID NO: 460706 - DNA, 120 bp, Artificial Sequence
  ENSG00000157470_24 (sequence is synthesized)
acaccccctccagcatctctgtcttgtggggtctttgaggagaaggaatcagaacatcgacacctgggaagagggaggcggggaacaccagctggactctggccaaggagtgatgtaagc

SEQ ID NO: 460707 - DNA, 120 bp, Artificial Sequence
  ENSG00000157470_25 (sequence is synthesized)
aggtgacacttggctgtcagctgagcttctcaggtgcttctgacattgccagccccttgagatgagccaccgcaggtgtgctcaccttggctacatgttgaaatcatccagaggagttgg

SEQ ID NO: 460708 - DNA, 120 bp, Artificial Sequence
  ENSG00000157470_26 (sequence is synthesized)
gaaatctactgatgccccgctgtgcctcccagaccgattaagtcagaacctctgggaggtgggtcgcaggcatcagtgcgtgcccgaggcctccgcgtgtttgggtgtgcagccgaggtg

SEQ ID NO: 460709 - DNA, 120 bp, Artificial Sequence
  ENSG00000157470_27 (sequence is synthesized)
gtgagctgtcgagccacagtgcagttctcttctcaccaaagctcaaatgagaatcagcttccatgttctttcctttaccagaaatttgcaataaaaagaaaaataaaattttcacataaa

SEQ ID NO: 460710 - DNA, 120 bp, Artificial Sequence
  ENSG00000157470_28 (sequence is synthesized)
cgtctcaccagagtagggatgctcttccgcttctccttagtgctgcctccaaaccaatgcaccatcaccaaccaagtctcctctcggaagaacgcgtttgtgaagaagacattctctctg

SEQ ID NO: 460711 - DNA, 120 bp, Artificial Sequence
  ENSG00000157470_29 (sequence is synthesized)
gtgtgggggttgctttcgcattatggaattcttaaaattgttgaaccgggaagatgttattcagaaacccctggtggcttcagcttgctttttgtgtatttcaggtttcttttttccccc

SEQ ID NO: 460712 - DNA, 120 bp, Artificial Sequence
  ENSG00000157470_30 (sequence is synthesized)
atttttaattatctctggaaaaactcaagagtcctcccctgctcctaaaatagttataaaattaatgtgctgtactcaagtcgttactccacgtaaaagagtaaaagactcccatattaa

SEQ ID NO: 460713 - DNA, 120 bp, Artificial Sequence
  ENSG00000157470_31 (sequence is synthesized)
gctcagccagcgccagcggccgccgcacccagccgcgccggcgaggacatgggcagccgcggcgcgcccaccccccgcgccggtaaaatcaaaacccaatcgtggcaggcagcagcaaat

SEQ ID NO: 460714 - DNA, 120 bp, Artificial Sequence
  ENSG00000157470_32 (sequence is synthesized)
taactcctacctcccaggcagtactgcatttagaacaaagctgtctgtcttgtctattcttaatgatcgccaaggagacagcttgcagaaatatcctaattaaatttattccagtgtttg

SEQ ID NO: 460715 - DNA, 120 bp, Artificial Sequence
  ENSG00000157470_33 (sequence is synthesized)
ataacagttactgttagtgttatgtttaatctaaatttaccttgctgattattaaatgattttattttgtttggctcttaatgaagagagagaagaactagtcgaatagtttcactctat

SEQ ID NO: 460716 - DNA, 120 bp, Artificial Sequence
  ENSG00000157470_34 (sequence is synthesized)
aatctttcatatctttgaagacagctattaagtcaattactaaggtcagactctgttgcttcagattaaatgtttctaggtcataatgattatatgtaatacagtttattactcaaacaa

SEQ ID NO: 460717 - DNA, 120 bp, Artificial Sequence
  ENSG00000157470_35 (sequence is synthesized)
agatttccgggtggcgagctgctgagcttactgggaacttcagtcttcctccctgaaggtgtctgcgtttgctgactggttgtcaccccctgccccacttcagaacgcgtttgtgaagaa

SEQ ID NO: 460718 - DNA, 120 bp, Artificial Sequence
  ENSG00000157470_36 (sequence is synthesized)
agccagcgccagcggccgccgcacccagccgcgccggcgaggacatgggcagccgcggcgcgcccaccccccgcgccgctgaacccaccttctctcccgagcaccagagcctgagtgaac

SEQ ID NO: 460719 - DNA, 120 bp, Artificial Sequence
  ENSG00000157470_37 (sequence is synthesized)
atcagactcaaatgcctgctcctcaagtgcttttcctgatggcccagttcaaactgatcctgccttctgcccagtggcactgaccagcccctccattcttgcacggtggcttgctagtgt

SEQ ID NO: 460720 - DNA, 120 bp, Artificial Sequence
  ENSG00000157470_38 (sequence is synthesized)
tatttccctgcataatgggagttcctgcagcgcaggggctgtgtcttgttcagcactgtagaggctcaatgaatatttgttgactggactaaattatttgatgaaatcattaagcaagtg

SEQ ID NO: 460721 - DNA, 120 bp, Artificial Sequence
  ENSG00000157470_39 (sequence is synthesized)
ctgactggttgtcaccccctgccccacttcagaacgcgtttgtgaagaagacattctctctggatgaagcaactacagaagtgcagattggccgcctcccttcagttatgcagaaatctc

SEQ ID NO: 460722 - DNA, 120 bp, Artificial Sequence
  ENSG00000157470_40 (sequence is synthesized)
gctgaagttgggcacagagcgcaactggcgttgcattttcgcgggggctgcatgctagcgaaccaaccgacgcccggagggactgtttgggggagctggggtggtgcacggattgccagg

SEQ ID NO: 460723 - DNA, 120 bp, Artificial Sequence
  ENSG00000157470_41 (sequence is synthesized)
accaaccaagtctcctctcggaaggtgtctgcgtttgctgactggttgtcaccccctgccccacttcagaacgcgtttgtgaagaagacattctctctggatgaagcaactacagaagtg

SEQ ID NO: 460724 - DNA, 120 bp, Artificial Sequence
  ENSG00000157470_42 (sequence is synthesized)
cagaattccctttatgaatgtgatagaatggaggggaaagaatgcaagtcttgctaagtggactcaaggccattttcacaaagagcactgaaaatatctgctctgggaccccatggaggg

SEQ ID NO: 460725 - DNA, 120 bp, Artificial Sequence
  ENSG00000157470_43 (sequence is synthesized)
tctaaagttcacctttgtgggtcagaaacacatcacccctcacccttctacctccaacagaattccctttatgaatgtgatagaatggaggggaaagaatgcaagtcttgctaagtggac

SEQ ID NO: 460726 - DNA, 120 bp, Artificial Sequence
  ENSG00000157470_44 (sequence is synthesized)
agtttccaaagatctctggatcctgtagtcctcctcccgcgccagccaccgaagaacgctgcggacccagctcgctcctggtagcaagacccgaactatccagaacatttctgccttcaa

SEQ ID NO: 460727 - DNA, 120 bp, Artificial Sequence
  ENSG00000157470_45 (sequence is synthesized)
agggcgagacggcggcgacttagcaggcggggcgcatgctgcggagggcaagagtccactcgtactcgccggtcgccgccggcccagatccagaacatttctgccttcaactccagcaag

SEQ ID NO: 460728 - DNA, 120 bp, Artificial Sequence
  ENSG00000157483_0 (sequence is synthesized)
gagactcagccagaggagtacggattaagtggccgaagaaagaggagtgaggcaggggagcgaggcggacgctccgagcgcatcggactcacctgggccggcggcgaccggcgagtacga

SEQ ID NO: 460729 - DNA, 120 bp, Artificial Sequence
  ENSG00000157483_1 (sequence is synthesized)
gtggactcttgccctccgcagcatgcgccccgcctgctaagtcgccgccgtctcgccctcacctagcaccgccaatcccgcctggatggagtcccctctgggttcccattggctcctgtg

SEQ ID NO: 460730 - DNA, 120 bp, Artificial Sequence
  ENSG00000157483_2 (sequence is synthesized)
agtgcttgggtgtcgggagcctgtttttggcgaggggaaccaacttttgaagttcgcccagaagactgcgttccagccccagttccccggcagcgggacccggcgaagacgcgaccgcgg

SEQ ID NO: 460731 - DNA, 120 bp, Artificial Sequence
  ENSG00000157483_3 (sequence is synthesized)
cgcgagtcaccatgggaagcaaaggtgtctaccagtaccactggcaaagccacaatgtcaagcacagtggtgtggacgacatggtgctactgtccaagatcacagagaactccatcgtgg

SEQ ID NO: 460732 - DNA, 120 bp, Artificial Sequence
  ENSG00000157483_4 (sequence is synthesized)
agaatctgaagaagagatacatggatgactacatttttacatatataggatctgtattaatctcagtcaaccctttcaagcagatgccatattttggggaaaaggaaattgaaatgtacc

SEQ ID NO: 460733 - DNA, 120 bp, Artificial Sequence
  ENSG00000157483_5 (sequence is synthesized)
aaggagcggcacagtatgaaaacccaccacatatctatgcccttgcagataatatgtacagaaacatgatcattgacagagagaaccagtgcgtcattatcagtggtgaaagtggtgctg

SEQ ID NO: 460734 - DNA, 120 bp, Artificial Sequence
  ENSG00000157483_6 (sequence is synthesized)
gaaaaacagtggctgccaaatatatcatgagctacatctccagagtgtctggaggagggaccaaagtccagcacgtgaaggacattatcctgcagtccaacccgctgctggaggccttcg

SEQ ID NO: 460735 - DNA, 120 bp, Artificial Sequence
  ENSG00000157483_7 (sequence is synthesized)
ggaacgccaagaccgtccggaacaacaactccagccgatttggaaaatactttgaaatccagttcagtccaggtggggaaccagatggtggaaagatctccaacttccttctggaaaaat

SEQ ID NO: 460736 - DNA, 120 bp, Artificial Sequence
  ENSG00000157483_8 (sequence is synthesized)
ctagggtggtgatgaggaacccaggagagcggagttttcacatattttaccagctcatcgagggcgcctctgcagagcagaaacacagccttggcatcaccagcatggactattattact

SEQ ID NO: 460737 - DNA, 120 bp, Artificial Sequence
  ENSG00000157483_9 (sequence is synthesized)
acctgagcctctcgggctcatacaaggttgatgacattgacgacaggcgggagtttcaggaaactctgcacgccatgaatgtgattgggatctttgcagaagagcaaacgctggtgttgc

SEQ ID NO: 460738 - DNA, 120 bp, Artificial Sequence
  ENSG00000157483_10 (sequence is synthesized)
agatagtggcgggtattctccacctgggaaacatcagcttcaaagaagttggcaactacgcggctgtggagagtgaagagtttttagcttttcctgcatatctgctagggataaaccagg

SEQ ID NO: 460739 - DNA, 120 bp, Artificial Sequence
  ENSG00000157483_11 (sequence is synthesized)
accggttgaaagaaaagctaacaagccggcagatggatagcaagtggggaggcaaatccgaatccatccacgtgaccctcaacgtagagcaggcctgttacacccgggatgcgctcgcca

SEQ ID NO: 460740 - DNA, 120 bp, Artificial Sequence
  ENSG00000157483_12 (sequence is synthesized)
aggccctgcacgcccgggtctttgatttcttggtagattccatcaataaagccatggagaaagaccatgaagaatacaacattggcgtcctagacatctatggctttgaaatattccaga

SEQ ID NO: 460741 - DNA, 120 bp, Artificial Sequence
  ENSG00000157483_13 (sequence is synthesized)
aaaatggctttgaacagttttgtatcaattttgttaatgaaaaactgcagcagatttttattgaactgacattaaaggcagaacaggaagaatatgttcaagagggaataagatggacac

SEQ ID NO: 460742 - DNA, 120 bp, Artificial Sequence
  ENSG00000157483_14 (sequence is synthesized)
ccattgagtactttaataataaaatcgtatgtgacctcatagagaacaaagtgaaccctcctggcatcatgagcatcctggatgacgtgtgcgccacgatgcatgcggtgggtgaggggg

SEQ ID NO: 460743 - DNA, 120 bp, Artificial Sequence
  ENSG00000157483_15 (sequence is synthesized)
cagatcagacgctgctccagaaacttcagatgcagattgggagtcatgagcacttcaacagttggaaccaaggcttcatcattcatcattatgctgggaaggtatcctatgacatggatg

SEQ ID NO: 460744 - DNA, 120 bp, Artificial Sequence
  ENSG00000157483_16 (sequence is synthesized)
gcttttgtgaaaggaaccgggatgtgctttttatggatctcatcgagcttatgcagagcagcgagctgcctttcataaagtctttatttccggaaaatctgcaggctgacaagaaagggc

SEQ ID NO: 460745 - DNA, 120 bp, Artificial Sequence
  ENSG00000157483_17 (sequence is synthesized)
gcccaactactgccggaagcaaaataaagaaacaagccaatgaccttgtgagcaccctgatgaaatgtacgccccactacattcgctgcatcaagccaaacgaaaccaagaagcccagag

SEQ ID NO: 460746 - DNA, 120 bp, Artificial Sequence
  ENSG00000157483_18 (sequence is synthesized)
actgggaggaaagcagggtaaagcatcaagtcgaatatttgggtctgaaagagaacattcgagtgagaagagctggctatgcctatcggcgcatcttccaaaaattcctacagaggtatg

SEQ ID NO: 460747 - DNA, 120 bp, Artificial Sequence
  ENSG00000157483_19 (sequence is synthesized)
ccattctgaccaaagccacctggccttcttggcagggagaggagaagcaaggcgtcctgcacctgctgcagtcggtcaacatggacagcgaccagttccagctggggaggagtaaagtgt

SEQ ID NO: 460748 - DNA, 120 bp, Artificial Sequence
  ENSG00000157483_20 (sequence is synthesized)
tcatcaaagcccccgagtctctatttcttttagaagagatgagagagagaaagtatgatgggtatgctcgagtgatacagaaatcatggaggaaattcgtggcccggaagaaatacgttc

SEQ ID NO: 460749 - DNA, 120 bp, Artificial Sequence
  ENSG00000157483_21 (sequence is synthesized)
aaatgagagaagaagcctcagacctcttattgaacaagaaggagagaaggagaaacagtattaacaggaactttataggggattatattgggatggaagagcacccagaactccagcagt

SEQ ID NO: 460750 - DNA, 120 bp, Artificial Sequence
  ENSG00000157483_22 (sequence is synthesized)
tcgtgggcaagagggagaagattgatttcgcagacacagtcaccaagtatgacaggaggttcaagggtgtaaagcgagacctgctccttaccccaaagtgcttgtacttaatcggacgag

SEQ ID NO: 460751 - DNA, 120 bp, Artificial Sequence
  ENSG00000157483_23 (sequence is synthesized)
aaaaagtcaaacagggcccagacaagggcctggtgaaagaagtcctgaagcggaaaatcgagatagaacggatcttgtctgtgtccctcagtactatgcaggatgacatttttattctcc

SEQ ID NO: 460752 - DNA, 120 bp, Artificial Sequence
  ENSG00000157483_24 (sequence is synthesized)
atgagcaagagtatgacagtttgcttgaatctgtcttcaaaactgaattcctaagcctcttagcaaagcgttacgaggagaagacccagaagcaactacctctgaaattcagcaatacgc

SEQ ID NO: 460753 - DNA, 120 bp, Artificial Sequence
  ENSG00000157483_25 (sequence is synthesized)
ttgaactgaagttgaaaaaggaaaactggggcccctggagtgcagggggctcccggcaagtgcagttccaccaagggtttggggacctggctgtcctcaagcccagtaacaaagtgctgc

SEQ ID NO: 460754 - DNA, 120 bp, Artificial Sequence
  ENSG00000157483_26 (sequence is synthesized)
aggtcagcatcggacctggactgcccaagaactcccgtcctaccagaaggaacactacccaaaatacaggttattccagtgggactcaaaatgccaactacccagtgagagctgcccctc

SEQ ID NO: 460755 - DNA, 120 bp, Artificial Sequence
  ENSG00000157483_27 (sequence is synthesized)
ctcccccaggataccatcagaacggagtcatcagaaaccagtatgtgccatatccccatgctcctggaagccagaggtccaatcagaaaagcctgtacacctccatggcccgcccgccct

SEQ ID NO: 460756 - DNA, 120 bp, Artificial Sequence
  ENSG00000157483_28 (sequence is synthesized)
tgcctcggcagcagtctaccagttcagaccgagtgtcacagacgccagagagcctggatttcctcaaggtcccggaccagggagctgcaggggtcaggagacaaacaaccagtcggcctc

SEQ ID NO: 460757 - DNA, 120 bp, Artificial Sequence
  ENSG00000157483_29 (sequence is synthesized)
ccccagcagggggcagacccaagccccagcccaagcccaagcctcaggtgccacagtgcaaggctttgtatgcctatgacgctcaggacacagacgaactcagctttaatgccaatgaca

SEQ ID NO: 460758 - DNA, 120 bp, Artificial Sequence
  ENSG00000157483_30 (sequence is synthesized)
ttattgatattatcaaagaagatccttctggctggtggacgggtcgactacgaggcaagcagggcctgttccccaacaactatgtgaccaagatctgaggtgcccgtgactctgacacat

SEQ ID NO: 460759 - DNA, 120 bp, Artificial Sequence
  ENSG00000157483_31 (sequence is synthesized)
ggggcagaggagctccaggcacagaccaggggaggggatatttaggggctccccttacaatccacaatgagcaattgcttctccaaggcctggagctattctggtaccttccccatggag

SEQ ID NO: 460760 - DNA, 120 bp, Artificial Sequence
  ENSG00000157483_32 (sequence is synthesized)
gacactgaaaaggctgggttggggacagggagtatcactccataagtgatcctaaaaggtagcctcttcataggaacccaggaggacaaaaccaccatgcattaagatttatttattgta

SEQ ID NO: 460761 - DNA, 120 bp, Artificial Sequence
  ENSG00000157483_33 (sequence is synthesized)
tttaaacctggtgagaggacaagtgaggtctgctcagaccttgtaggcttctatcaaaacagcaccctgcttgctcaccaggcctagagaatggctgtaggtggccgctgacaagtgcct

SEQ ID NO: 460762 - DNA, 120 bp, Artificial Sequence
  ENSG00000157483_34 (sequence is synthesized)
ttagttgaagagcacatttctttcatctctcttgtccatacctgatagacacattcctctctgccaccttccttcagggaggacccgccctctgcagactgggcttagcgtgagcaggca

SEQ ID NO: 460763 - DNA, 120 bp, Artificial Sequence
  ENSG00000157483_35 (sequence is synthesized)
cttcccatgtacgtgccaagggtaagctggcctgctgagcccagggcgacagaggggcactggtttacactttgccgggaccatcagggccgccaagcaggtcaggggctgggggctggg

SEQ ID NO: 460764 - DNA, 120 bp, Artificial Sequence
  ENSG00000157483_36 (sequence is synthesized)
gggctgctggctttgctttctctgggtcttcaattagaatgtggctggcccatattggtttgtgtttaaatgctgtacttactacaagaaggatcttttttcaagctgtacatttataaa

SEQ ID NO: 460765 - DNA, 120 bp, Artificial Sequence
  ENSG00000157483_37 (sequence is synthesized)
aacagatcatatactgtatatataaaaatcttgagatggtagaaacatgtatgaatgtactaagtagtattccactgtactcattcataaggtaggttttcttacaaaactcacaccagg

SEQ ID NO: 460766 - DNA, 120 bp, Artificial Sequence
  ENSG00000157483_38 (sequence is synthesized)
tacttaaagatgtgctctgcttttttccaactacggagtgtcactgctttctaggtcagtccctgcagactcttctcaactctttccctataggaaacttactccgcgtcctgcccccac

SEQ ID NO: 460767 - DNA, 120 bp, Artificial Sequence
  ENSG00000157483_39 (sequence is synthesized)
ctcctaaataaataaaggaatcggcgaacaccttcttcttttatgacatttgttatgggttgaattgtgtgcctccaaagaagatgttggagtcccagccaccagtacctcacaatatga

SEQ ID NO: 460768 - DNA, 120 bp, Artificial Sequence
  ENSG00000157483_40 (sequence is synthesized)
ccttatttggaaatagagtctttatggagcaaacaaacaaaactaattaaaatgaagtcattagagtgggtcttaatccaatataatggtgtcctgatgaaaaggggaaatttggacaca

SEQ ID NO: 460769 - DNA, 120 bp, Artificial Sequence
  ENSG00000157483_41 (sequence is synthesized)
gagaccaacatgccagaggaaagaccatgtgaaaaggcagggagaagacagccattcacaagccctggacagaggcctggaacagattctccctcacaccctcacaaggaaccagccctg

SEQ ID NO: 460770 - DNA, 120 bp, Artificial Sequence
  ENSG00000157483_42 (sequence is synthesized)
cccaccttggtcttggacttccaacctccagaactgtgaggcaatacatttcgctgtttaagccactcggtttgtggtagtttgttacggcagccctaacaaactaaaacaatgttttct

SEQ ID NO: 460771 - DNA, 120 bp, Artificial Sequence
  ENSG00000157483_43 (sequence is synthesized)
tgccataatagtgaaaagctggaatcagtgtaatgcccatcaataatggaatggttgtaagtagagactgccatttctctacctttcctcctctgggtgccatagccattcttaagctac

SEQ ID NO: 460772 - DNA, 120 bp, Artificial Sequence
  ENSG00000157483_44 (sequence is synthesized)
tggtaacttagagtttgagcagcatacacctttgaggctttcaggatcctcaagtccatgggaaaaaattatcagggcttacgtataagggaaaaaaattgatctagatttgaaacgaag

SEQ ID NO: 460773 - DNA, 120 bp, Artificial Sequence
  ENSG00000157483_45 (sequence is synthesized)
atacatttaattctgctgtgttttacttcaagaacagggagcaaactccattctgtaacagtaacgaataatgttaaaaggctacttcagttccatgttgcgaccagagaggaaagtaga

SEQ ID NO: 460774 - DNA, 120 bp, Artificial Sequence
  ENSG00000157483_46 (sequence is synthesized)
gccatgatgcggtgagttgaggaaaggtaatcctgttgacactagtggtctctaaagtactttcacattcatggactccccgcagtgggaggaagataccaccagaactgggacagagga

SEQ ID NO: 460775 - DNA, 120 bp, Artificial Sequence
  ENSG00000157483_47 (sequence is synthesized)
gcatgctggagtccccacagccaccagcactcaggctgcgttctcagggcaggaacaccaggaccatcttcccttgttatcataagcccctggctggctgggacaagcctttgtttttcc

SEQ ID NO: 460776 - DNA, 120 bp, Artificial Sequence
  ENSG00000157483_48 (sequence is synthesized)
tcctgattgattgattggcattttacacttgtgtgtaactgggaaccatcgggctctaggtcacaaaacagggactgagttaaacccccacgagtaacaccctcatccatggaaatcaca

SEQ ID NO: 460777 - DNA, 120 bp, Artificial Sequence
  ENSG00000157483_49 (sequence is synthesized)
gaccaagcccttagcacctgcatcgtgtgcccagccagtgccaggctcaaggagatgcccaacaaatggtgctgaaataggtaagtgacccacaggggaaggagacttagatctgcgtag

SEQ ID NO: 460778 - DNA, 120 bp, Artificial Sequence
  ENSG00000157483_50 (sequence is synthesized)
agatgctgaaatgctgacactattaagaaaagtttggagaaatagtggtttatcttaaacttatttgtatatatttagaaattcaacatggggactaccagaaaaatctgggataaataa

SEQ ID NO: 460779 - DNA, 120 bp, Artificial Sequence
  ENSG00000157483_51 (sequence is synthesized)
catttccctttttttcctaattaaaaagtcttcagaaaaatgtcttttttccctttaagacactaacctgggtttcctctagtctgtggatctagcctggcctgccattttgttcactgt

SEQ ID NO: 460780 - DNA, 120 bp, Artificial Sequence
  ENSG00000157483_52 (sequence is synthesized)
gcagttaagcaaatatgaccactttaggagtcacttaccaggaaagaacatacagaagatcaaggggccacccccaccttctggaacttgccatcctgtttgaaataaggggtgttcatg

SEQ ID NO: 460781 - DNA, 120 bp, Artificial Sequence
  ENSG00000157483_53 (sequence is synthesized)
tgcacacacagcaacgtgtatagcagtatcaaacacagtataaaaatgtgacatcccttcaaccaaaggttttaagtaaccaggaactaaatgagaaggcctgactgtgtaccctagggt

SEQ ID NO: 460782 - DNA, 120 bp, Artificial Sequence
  ENSG00000157483_54 (sequence is synthesized)
agaggtgttcaagctttagttgtagaagagagagagacagaggtctgtataagggtggtatccactctactgatggccgtctgtgagacagagagaggctgatctgaaactcctgggatc

SEQ ID NO: 460783 - DNA, 120 bp, Artificial Sequence
  ENSG00000157483_55 (sequence is synthesized)
tcagcctctcaaagtgctgggattatgggcaagagccaccgtacctggccaactggcttaaagacatgcaaaagggccgtctcttccacagtgttttgtgaaacaatacagagacatgtg

SEQ ID NO: 460784 - DNA, 120 bp, Artificial Sequence
  ENSG00000157483_56 (sequence is synthesized)
aatacagagacatgtggagaggacaaagggtgaagccttcttgaataagcttgctccccaaccatgaaggatgccaacccactgacctcccaacgtgtggtcccagcccatcgtaatcaa

SEQ ID NO: 460785 - DNA, 120 bp, Artificial Sequence
  ENSG00000157483_57 (sequence is synthesized)
acctgactccccactactaccaagtccagcccaatgaaggtagaaaagcatcgtgcagtttcctccttaaaggacctgccctgtgtgcacaccatgtccaccaatattctgctggccaga

SEQ ID NO: 460786 - DNA, 120 bp, Artificial Sequence
  ENSG00000157483_58 (sequence is synthesized)
gcttagtcatgtggcctcaactcaagggggctggaggtctctgcacagagctgtctcagcagcttacccagagcaccagagtgacagcgggctcctgccaggtggaagtgttcacaaaaa

SEQ ID NO: 460787 - DNA, 120 bp, Artificial Sequence
  ENSG00000157483_59 (sequence is synthesized)
tgagtaagagaaaatatggatgtgcctttatgaattacaaactccatgggcttccatagagcatggcttttacataatctaaattccttctctttgcgactccctcctgaactcatcccc

SEQ ID NO: 460788 - DNA, 120 bp, Artificial Sequence
  ENSG00000157483_60 (sequence is synthesized)
agaccctccctgagtggagctggtcacaccaagtcagcctgtgcctctagttgctaccatttcttttataggtgttgtcccagttaagatttcactggcagtagggctggattctggttt

SEQ ID NO: 460789 - DNA, 120 bp, Artificial Sequence
  ENSG00000157483_61 (sequence is synthesized)
ccagggcaatcaagagcagagcatgaacggtgcgtctttggtagacaatttaactctgtgtttctggcacccctcacttttgtgatcaaaagaaagaccagaggagcctttctgcaattc

SEQ ID NO: 460790 - DNA, 120 bp, Artificial Sequence
  ENSG00000157483_62 (sequence is synthesized)
tgccctctttccctgttttgcttttctcccaaggcctagctgattgattgcagttctttctggatttagtaacttggttttattcctacccactaatcttgatgtctttttccctactag

SEQ ID NO: 460791 - DNA, 120 bp, Artificial Sequence
  ENSG00000157483_63 (sequence is synthesized)
atcatacctttccactctgagcaccctttctaacaagaagactggctcagtatggttcactaggtcgcccaaggtcacacagttcttccctgggggagccatcacaggaactctgagtca

SEQ ID NO: 460792 - DNA, 120 bp, Artificial Sequence
  ENSG00000157483_64 (sequence is synthesized)
aaggcctgtgcgtttttattttcagacagcacctcactttgtcacccagactagagaacagtggtgcgatcatgccttactgcagtctcaaactccagggctcaggtgatcctcccacct

SEQ ID NO: 460793 - DNA, 120 bp, Artificial Sequence
  ENSG00000157483_65 (sequence is synthesized)
ctcccaagtagctgggaccacaagcatgtgccaccacattcggctaattatttgtacagatggggtctccctgtgttgcccagctggtctcaaagctctgggctcaagcagtcttcccgc

SEQ ID NO: 460794 - DNA, 120 bp, Artificial Sequence
  ENSG00000157483_66 (sequence is synthesized)
ggattacaagcatgagccactgtgcccaaaaggcctgtgcttttaatcattttctccaattcaacagatatttagtaatgtgatggtctactgtgtcagcctttcaacttccaatatctt

SEQ ID NO: 460795 - DNA, 120 bp, Artificial Sequence
  ENSG00000157483_67 (sequence is synthesized)
cagcctttcaacttccaatatcttcctctcagaacataaaagtctatttaaaaagagagagagaagaaaactcacgcataaaactcaacagctagaaacttgtaagctcctttaatgggc

SEQ ID NO: 460796 - DNA, 120 bp, Artificial Sequence
  ENSG00000157483_68 (sequence is synthesized)
aggagctccatctaacaaatctgaatcctctgattcatctctttccaagaccattaaccttctctttaaaataattaacagctatgttcaagtatcttcttcacactagaagctatacta

SEQ ID NO: 460797 - DNA, 120 bp, Artificial Sequence
  ENSG00000157483_69 (sequence is synthesized)
agtgcttggcatactttacttagcaccaccctatgagggagacactcttatccccacttcacaggtacagaaactaaagtatagagatcaccactacttaaaatcaaacccaaagcaccc

SEQ ID NO: 460798 - DNA, 120 bp, Artificial Sequence
  ENSG00000157483_70 (sequence is synthesized)
acgttcagagttagtgctcttctatactatggatacatcatctcatttttaatttccgtgtttttatgatatggtttctacttctgccactcatttcccatttatgacattttagtttgg

SEQ ID NO: 460799 - DNA, 120 bp, Artificial Sequence
  ENSG00000157483_71 (sequence is synthesized)
ggtgcctgctgtgccatctaagaaagtatcttaaaggtctttttttatgacatcctggaagaatttcctaagtcaggacatttaatatttaactaagtaaaatatgtaataaggaagcta

SEQ ID NO: 460800 - DNA, 120 bp, Artificial Sequence
  ENSG00000157483_72 (sequence is synthesized)
attaattgcattcttgcctgaaggggaatactgactttcaagatggtatcttaagtctggggagctgtttccttgcctaagaaaggacctgataagcattgtctgttttggagaggtcag

SEQ ID NO: 460801 - DNA, 80 bp, Artificial Sequence
  ENSG00000157500_0 (sequence is synthesized)
gcacggccgctcggcgcctggagaaggctgtgcgggcggggacggctgcagcccttgccggagagggcgggccggggtca

SEQ ID NO: 460802 - DNA, 120 bp, Artificial Sequence
  ENSG00000157500_1 (sequence is synthesized)
gctgcgtctcctgccaccgccctccctccgccacgatgccggggatcgacaagctgcccatcgaggagacgctggaggacagcccgcagacaaggtctttactaggtgtatttgaagaag

SEQ ID NO: 460803 - DNA, 120 bp, Artificial Sequence
  ENSG00000157500_2 (sequence is synthesized)
atgccacagctatttccaactatatgaaccagttgtatcaagctatgcatcggatttatgatgcacagaatgaattaagtgcagcaacacacctgacctcaaaacttttaaaagaatatg

SEQ ID NO: 460804 - DNA, 120 bp, Artificial Sequence
  ENSG00000157500_3 (sequence is synthesized)
aaaaacagcgttttccattgggaggtgatgatgaagttatgagctctacattgcaacagttttcaaaagttatagatgagcttagctcttgtcatgcagtgctttcaactcaacttgctg

SEQ ID NO: 460805 - DNA, 120 bp, Artificial Sequence
  ENSG00000157500_4 (sequence is synthesized)
atgccatgatgttccccattacccagtttaaagaaagagatctgaaagaaatactaacattaaaggaagtatttcagattgcaagtaatgatcatgatgctgcgattaatagatatagcc

SEQ ID NO: 460806 - DNA, 120 bp, Artificial Sequence
  ENSG00000157500_5 (sequence is synthesized)
gtttatcaaaaaaaagagaaaatgacaaggtgaagtatgaagtaacagaagatgtgtacacatccagaaagaaacaacaccagaccatgatgcattatttttgtgcattaaatactcttc

SEQ ID NO: 460807 - DNA, 120 bp, Artificial Sequence
  ENSG00000157500_6 (sequence is synthesized)
agtacaagaagaaaatagcattgttagaacctctacttgggtacatgcaagctcagataagtttctttaagatgggttctgaaaatcttaatgaacaactggaagaatttttagctaata

SEQ ID NO: 460808 - DNA, 120 bp, Artificial Sequence
  ENSG00000157500_7 (sequence is synthesized)
ttggaacaagcgttcagaatgttcgcagggaaatggacagtgatatagagaccatgcaacagacaatagaggatttggaagtagccagtgatcccttatatgtgcctgacccagacccca

SEQ ID NO: 460809 - DNA, 120 bp, Artificial Sequence
  ENSG00000157500_8 (sequence is synthesized)
ccaaatttcctgttaatcgaaatttaacccgaaaggctggataccttaatgctaggaataaaacaggcttggtgtcatctacctgggacagacagttttacttcacgcagggtggaaatt

SEQ ID NO: 460810 - DNA, 120 bp, Artificial Sequence
  ENSG00000157500_9 (sequence is synthesized)
taatgagtcaggcccgtggggatgtagcaggaggcctggccatggacatagacaactgttcagtgatggctgtggactgtgaagacagacgatattgttttcagatcacctctttcgatg

SEQ ID NO: 460811 - DNA, 120 bp, Artificial Sequence
  ENSG00000157500_10 (sequence is synthesized)
gaaaaaaatcttcaattttgcaagcagagagtaaaaaagatcatgaagagtggatctgtacaataaacaacatatctaaacaaatatacttaagtgaaaatccagaggaaactgctgcac

SEQ ID NO: 460812 - DNA, 120 bp, Artificial Sequence
  ENSG00000157500_11 (sequence is synthesized)
gagtaaatcaatcagctctggaagctgtcactccttccccatctttccagcagaggcacgagagcctgcggccagcagcaggacaatctcggccaccgacagctcgaaccagcagttcag

SEQ ID NO: 460813 - DNA, 120 bp, Artificial Sequence
  ENSG00000157500_12 (sequence is synthesized)
gatccttaggatctgagtctacaaatttggctgccctctctctagattctcttgttgccccagacaccccaatacagtttgacataatttctcctgtgtgtgaagatcagcctggccagg

SEQ ID NO: 460814 - DNA, 120 bp, Artificial Sequence
  ENSG00000157500_13 (sequence is synthesized)
caaaagcctttggccagggaggcaggcgtacaaatccatttggagaatctggaggaagtacaaaatctgaaactgaagattctattcttcatcagttatttattgtccgattccttggtt

SEQ ID NO: 460815 - DNA, 120 bp, Artificial Sequence
  ENSG00000157500_14 (sequence is synthesized)
caatggaggtgaaatcagatgaccatccagatgttgtttatgaaactatgcgccaaatcttagctgcccgggccatccataacatctttcgtatgacagaatcgcatttattagtcactt

SEQ ID NO: 460816 - DNA, 120 bp, Artificial Sequence
  ENSG00000157500_15 (sequence is synthesized)
gtgactgtttaaagttaattgatccacagacacaagttacaaggctcacgtttccattaccttgtgtagttttgtatgctacacaccaggaaaataagcgcctttttggatttgttcttc

SEQ ID NO: 460817 - DNA, 120 bp, Artificial Sequence
  ENSG00000157500_16 (sequence is synthesized)
ggacatcaagcgggagaagtgaaagtaatctgtcatcagtctgctatatatttgagtcaaacaatgagggggaaaagatatgtgattctgttggactggcaaaacagatagctttgcatg

SEQ ID NO: 460818 - DNA, 120 bp, Artificial Sequence
  ENSG00000157500_17 (sequence is synthesized)
ctgaactggatcgtagggcatcagaaaaacaaaaagaaatagagagagtaaaagagaagcaacagaaagaactcaataaacaaaaacagattgaaaaggacttggaagaacaaagtcggt

SEQ ID NO: 460819 - DNA, 120 bp, Artificial Sequence
  ENSG00000157500_18 (sequence is synthesized)
tgatagctgcttccagtagaccaaaccaagccagtagtgaggggcagtttgttgtccttagcagtagccagtcagaagagagtgatttgggagaaggaggaaagaagagagaatcagaag

SEQ ID NO: 460820 - DNA, 120 bp, Artificial Sequence
  ENSG00000157500_19 (sequence is synthesized)
cataagcttatacttttggtagatattcccccttggaatttgacagtttctatggtgaaatggcagaaggtaacaactatgttgaaatatcaaggaggagattaagctttatatttgctt

SEQ ID NO: 460821 - DNA, 120 bp, Artificial Sequence
  ENSG00000157500_20 (sequence is synthesized)
atttgttgtagctacattttaaaaaaaagattgaacttgatgacttaggtttgcattgatcttttttcccccttaaacataatgtactatgtattaacatctaaaggaaacctgctcatc

SEQ ID NO: 460822 - DNA, 120 bp, Artificial Sequence
  ENSG00000157500_21 (sequence is synthesized)
tccctgaagcagactgctgaggaattacatttgctcaagaattttttccgtcaaattgtgaacttttaattcttgcattgtaattggctgtgtccataagaaatcatttattcttcaggc

SEQ ID NO: 460823 - DNA, 120 bp, Artificial Sequence
  ENSG00000157500_22 (sequence is synthesized)
ttagacattcatggatatgcttttctttcattaggaacattttgctggtgatgaggaagcatttagctgaataagtttaaagccctttatacagagaattctacaagtttgcaaatattt

SEQ ID NO: 460824 - DNA, 120 bp, Artificial Sequence
  ENSG00000157500_23 (sequence is synthesized)
taacaatattaaatgtgcaatagaacttttataaaataattagaacagagattttacagttaaggtttcaaattgtggcaggtggtactgttgatctcagggtactttctgggattgctc

SEQ ID NO: 460825 - DNA, 120 bp, Artificial Sequence
  ENSG00000157500_24 (sequence is synthesized)
acatttctctaatgtactgcacttgatgccagtaggaaagaagcttaagtgtcttcagttcaagattgatagagcccttggcattttattatcacattcttagttctcaggttgggactt

SEQ ID NO: 460826 - DNA, 120 bp, Artificial Sequence
  ENSG00000157500_25 (sequence is synthesized)
tacattttagattaggattgacaagtaaagatactgctatggaatgatacattgtattttctgcattgtgtgaaatagtttttattgaaagtcaagtgacatttcaaaagaagttctata

SEQ ID NO: 460827 - DNA, 120 bp, Artificial Sequence
  ENSG00000157500_26 (sequence is synthesized)
acaattatgtttcatgcttaaagtaaaaattcccagagtttagtttagaaaatgtaatcttttaaatttcagactgatatattcccagtattttcataatgccatgttttgataaagtac

SEQ ID NO: 460828 - DNA, 120 bp, Artificial Sequence
  ENSG00000157500_27 (sequence is synthesized)
tgaatcaccactttatatccacaaaggcaaataactaatgtatgataatagaataatttgcactaattattgtaaatatgtctactcttcaaatgagtaaaaggtccaattttgtgaaag

SEQ ID NO: 460829 - DNA, 120 bp, Artificial Sequence
  ENSG00000157500_28 (sequence is synthesized)
attgaaaatgaattgaatgcctagtagagtataggagaagttgaccaaggaaggatttaacctggtgccaaggttaaaataacatttctctactgcctattgtttatgttaaaccttaat

SEQ ID NO: 460830 - DNA, 120 bp, Artificial Sequence
  ENSG00000157500_29 (sequence is synthesized)
tttttttctgtaatcacttttaacactgctaatagaaattatgttttcatgtgtttcacatgaaaaagtatatatatacaaagttaatatagtgggtaaaatactttacatagtcacaca

SEQ ID NO: 460831 - DNA, 120 bp, Artificial Sequence
  ENSG00000157500_30 (sequence is synthesized)
tttacaaatttttcaagaggttagccactaagactttaataattttacaagggaaaaagcctttttttttctttgatatacagttttttcttcttagttctgcattagaaatggcatctg

SEQ ID NO: 460832 - DNA, 120 bp, Artificial Sequence
  ENSG00000157500_31 (sequence is synthesized)
ttttaggtctcaaaatataactcagctgtttcacactgtatatgtacattgttttctgtaggaataggataatgatatataggatcatgatattccttctatccatgtgccaaatgggtg

SEQ ID NO: 460833 - DNA, 120 bp, Artificial Sequence
  ENSG00000157500_32 (sequence is synthesized)
taatgtttatttactgatgctttatgttaccaaaacatacagtaaaaaagtagaaatttatgaaatacttttgataaaaagtttattttgtgcttaccaaaaggaatgctttcacaatag

SEQ ID NO: 460834 - DNA, 120 bp, Artificial Sequence
  ENSG00000157500_33 (sequence is synthesized)
tgtatcagttcttttgttttgttaaagttggaatttattctgttgccagcatttaagtagtcatggcaagtcctgtttttaagaccttttggagactggagctttctgttccattaagtc

SEQ ID NO: 460835 - DNA, 120 bp, Artificial Sequence
  ENSG00000157500_34 (sequence is synthesized)
ttttgtttatactacaaattgtcacctcacttagttcagatgaaatctgttactctacaaggaaggtgttcatcattaggaggcagctttactaagctggtgctttgcatggtagcaagt

SEQ ID NO: 460836 - DNA, 120 bp, Artificial Sequence
  ENSG00000157500_35 (sequence is synthesized)
gctgccctttatcagcaccctgggtcatagtgtaggctagagttaaggcactggcagacttagggatgctggacagacctgtagttcgttttaagtcatgttcacaggaatttctacaat

SEQ ID NO: 460837 - DNA, 120 bp, Artificial Sequence
  ENSG00000157500_36 (sequence is synthesized)
aataaacccatcatctccataggtcagatcgaagtgcattccaatgctaaatagaagttatgagtgggtttaacaattttagatgattcagcttttgttccattactgttgaactatatg

SEQ ID NO: 460838 - DNA, 120 bp, Artificial Sequence
  ENSG00000157500_37 (sequence is synthesized)
aactattccattactgcagagatttaagtatctgttttaataagctctttttgttatttaaaggctgcccatgggtttctgcctagtggtaaagctgattgttaccctcctttgaaatcc

SEQ ID NO: 460839 - DNA, 120 bp, Artificial Sequence
  ENSG00000157500_38 (sequence is synthesized)
cttctagttctgagatgctttgagggtaactggattcgattttgggatatcttttctcacattcagacttacacttaatggtgttagaaatcaacaaaactcctttttaaaaagaaaaga

SEQ ID NO: 460840 - DNA, 120 bp, Artificial Sequence
  ENSG00000157500_39 (sequence is synthesized)
tattaagcctgcctacttctacaatgcattctgttacctatttgaacagtatgtttgtaactatggcaatgaagtcagtagataggaaaccagttattccttctacctttaaaaattttg

SEQ ID NO: 460841 - DNA, 120 bp, Artificial Sequence
  ENSG00000157500_40 (sequence is synthesized)
agaacttgccaaccagggattaaagctattatcttgaacagagtccctaaagctagtctagtttttgccacatctgcaatgattattgtttaatttcaaaagaatcctcaggctctacaa

SEQ ID NO: 460842 - DNA, 120 bp, Artificial Sequence
  ENSG00000157500_41 (sequence is synthesized)
tctaggggtggtaaatgtgtttccactatacttgggaaaaggtcagtaggatgtgcatcctagggaagataaaatcgtatatggtaaaggcatttgagttaattttgcattatatctagg

SEQ ID NO: 460843 - DNA, 120 bp, Artificial Sequence
  ENSG00000157500_42 (sequence is synthesized)
aaccatattatttaaaatttgaatcctattaatgctgagagatcctaagagctagtatgttgtaaaacctgccacctgaataaaatgaaaaaaaaagtgtttttttgagacagagtcttg

SEQ ID NO: 460844 - DNA, 120 bp, Artificial Sequence
  ENSG00000157500_43 (sequence is synthesized)
ggcgtgagccaccgtgcccggccctaaaatgaaattattaatgttggttctgaaacagcctcttagcattcagattgtattttaaatacttaaacacaccaattgtagaaagcaaccctt

SEQ ID NO: 460845 - DNA, 120 bp, Artificial Sequence
  ENSG00000157500_44 (sequence is synthesized)
cctttatttttagcaagtttggtttactcttctcccatgagattttgtctttctacattaactagtaagacataaagatttgaaactggaactatattatactttttaaccaatctctgt

SEQ ID NO: 460846 - DNA, 120 bp, Artificial Sequence
  ENSG00000157500_45 (sequence is synthesized)
ggcttcactcatgaaatttacttcagttaatatgagactgggggttaagttgtaactaatatgcaaaattgctttgtatatttggtgattttgtaatgtaagtgaattgattcttatttc

SEQ ID NO: 460847 - DNA, 120 bp, Artificial Sequence
  ENSG00000157500_46 (sequence is synthesized)
actgatactattaatcatgcagtgtacaattcaaaatcatgcaatgtttcactttagaattggatttgaagaactcgactttatgtgatcatggtattggtatacatgtggggtggagaa

SEQ ID NO: 460848 - DNA, 120 bp, Artificial Sequence
  ENSG00000157500_47 (sequence is synthesized)
cttattttttcattttgtcacaataggtatatactgacaaggcttcaggaaaaaagttgttagaagattttttaatgtataataaagtccatgatttttgtacagtgttttttaatgaaa

SEQ ID NO: 460849 - DNA, 120 bp, Artificial Sequence
  ENSG00000157500_48 (sequence is synthesized)
tatatatacacatcttacaacttgataataatcctgatcctgtatattcaagtgtgatagtatcagctatgattggtctttggctgttgtagttaagtctatggccatctccaaaaagtt

SEQ ID NO: 460850 - DNA, 120 bp, Artificial Sequence
  ENSG00000157500_49 (sequence is synthesized)
gtcattgaacattttatgtaacttaaaagaattaacacaattctttttgtaatttttttaacacagttctttttgactttgtaaaatgtgttaatgactaataaaacaaatgtaatattc

SEQ ID NO: 460851 - DNA, 120 bp, Artificial Sequence
  ENSG00000157500_50 (sequence is synthesized)
ctccgccacgatgccggggatcgacaagctgcccatcgaggagacgctggaggacagcccgcagaatagagtccaagaagcagagcagcaaagaatatgaagacttttaaagctcatgac

SEQ ID NO: 460852 - DNA, 63 bp, Artificial Sequence
  ENSG00000157500_51 (sequence is synthesized)
tcgtgcacctgtaatcccagctactgaggaggtctgaggcacgagaatgacttgaatccggga

SEQ ID NO: 460853 - DNA, 120 bp, Artificial Sequence
  ENSG00000157500_52 (sequence is synthesized)
tggtttattatgttgattttttgttgtgtatgtctaaacttccaattcatctgtgtcttctaaagtgcaccaacattgatcagttagtgtgtgagggcagaggccttcatcatagtaatt

SEQ ID NO: 460854 - DNA, 120 bp, Artificial Sequence
  ENSG00000157500_53 (sequence is synthesized)
tagtgatcaatagtgtttcttaataggatggggcattttagagctttttttttttaaatgttaactgtggttttaataattagatttcttctatgtggctcatggtaactgaccatgtgt

SEQ ID NO: 460855 - DNA, 120 bp, Artificial Sequence
  ENSG00000157500_54 (sequence is synthesized)
attgcaacagttttcaaaagttatagatgaggtaaacgtttattttattttgcttgattaaatggtcttataattgagttacccagttgcttagcttttattttatgaataaagctctat

SEQ ID NO: 460856 - DNA, 69 bp, Artificial Sequence
  ENSG00000157500_55 (sequence is synthesized)
gtagatattcccccttggaatttgacagtttctatggtgaaatggcagaagagatggggtcttgctccg

SEQ ID NO: 460857 - DNA, 120 bp, Artificial Sequence
  ENSG00000157500_56 (sequence is synthesized)
gcagagctactttttaaaggacttagactgcattgagattttagttgatcccctgtttttggagcacagctttcaactttgaacagatccgaacttgatcaacataatcaagcatcactc

SEQ ID NO: 460858 - DNA, 120 bp, Artificial Sequence
  ENSG00000157500_57 (sequence is synthesized)
gaacaacctttccagagagatgttgcagccatgacaaagttattacttcacagaactgagggaaacaaaatcagaattaggaaagtaaatgaaaaacacaaagtatctatggtttagcat

SEQ ID NO: 460859 - DNA, 120 bp, Artificial Sequence
  ENSG00000157500_58 (sequence is synthesized)
agtagtcaaaggagatgtggtgtgatgaaagccaagagagaaaaatgtctcaaaaatgggaagggatggtagtggtcaactgtacttatcctgattctttttttcatcagaaataagatc

SEQ ID NO: 460860 - DNA, 120 bp, Artificial Sequence
  ENSG00000157502_0 (sequence is synthesized)
agtcttcggggaggagctgcattacacacaggcttcggaggcttccgtggagaagcttggaggtaatggctgtcgtaaatgctagttattttcagagagttctcgaagatttggaataaa

SEQ ID NO: 460861 - DNA, 120 bp, Artificial Sequence
  ENSG00000157502_1 (sequence is synthesized)
gccgagccccagaaagacaggtcaaccacagaagtgctgagccaggtaaagaccctgctggacaagcagctggagtgagaatcaagacagctggaccacaggaccagacccagcagtatc

SEQ ID NO: 460862 - DNA, 120 bp, Artificial Sequence
  ENSG00000157502_2 (sequence is synthesized)
catgtaacaggaaaggtccccttgctattcccatcactgggagggggcggagcctcgtcggagccgctcggaagggagctgtacccggccagtattgggggaggggcagcatttcaagag

SEQ ID NO: 460863 - DNA, 120 bp, Artificial Sequence
  ENSG00000157502_3 (sequence is synthesized)
gctgcagctgacaagaagcttcaagcataggttaatatcagagaagcacatgacctgggcaatctgcatgtgatgccaaccaagccttggaaagacagtgcaaccacagaagtgccgagc

SEQ ID NO: 460864 - DNA, 120 bp, Artificial Sequence
  ENSG00000157502_4 (sequence is synthesized)
tgggtaaaggccctgctggacaagcagttggagtgagaatcaagacagccggaccacaggaccagacccaccaggatccacatgacagtggtatcttccggtatcatcctattcaaacaa

SEQ ID NO: 460865 - DNA, 120 bp, Artificial Sequence
  ENSG00000157502_5 (sequence is synthesized)
cgtgttcaagcatccttggaaaattgaggtggagaacaggccacacaagctgtaaaccctttgtagtcataagacgaaagaggatttgttaagagtattgttttgggtagaacttgcatt

SEQ ID NO: 460866 - DNA, 120 bp, Artificial Sequence
  ENSG00000157502_6 (sequence is synthesized)
agcagtgacaaagatagccacctcaacctttggtaataacccttggcacacaaatataaaccataatggagtctgagtatgtcctatgcaactggaaagaccagttgtggccagcaaaag

SEQ ID NO: 460867 - DNA, 120 bp, Artificial Sequence
  ENSG00000157502_7 (sequence is synthesized)
ttttgtccagatctgaaacttcatcaaacagtaagaggaaaaaggcattttctctagaagttcaaatactctcactagatgaaaaaattaaattggacagcacagaaacaaagatcctaa

SEQ ID NO: 460868 - DNA, 120 bp, Artificial Sequence
  ENSG00000157502_8 (sequence is synthesized)
ataaatctcaaattgaagccattgctgcctcattaggactacagtcagaggacagtgctccacctacagaggaaactgcctatggaagatcactaaaagtggcactgggtattctgaatg

SEQ ID NO: 460869 - DNA, 120 bp, Artificial Sequence
  ENSG00000157502_9 (sequence is synthesized)
agagaacaaatttgagtcaagcaagcacttcagatgaagaggagatcactatgctgtctcaaaatgtaccacaaaaacagtccgattcaccccctcataaaaaataccggaaggatgaag

SEQ ID NO: 460870 - DNA, 120 bp, Artificial Sequence
  ENSG00000157502_10 (sequence is synthesized)
gtgacttaccagggtgtcttgaggaaagggaaaactcagcatgcttgttagcatcttcagagagtgatgattccctgtatgatgataaatcacaagcacccacaatggtcgatactattc

SEQ ID NO: 460871 - DNA, 120 bp, Artificial Sequence
  ENSG00000157502_11 (sequence is synthesized)
caagtgaagtggaaacaaagtcattacaaaactctagctggtgcgagactttcccttcactttcggaagataatgatgaaaaagagaacaagaataagattgatatctcagcagttatgt

SEQ ID NO: 460872 - DNA, 120 bp, Artificial Sequence
  ENSG00000157502_12 (sequence is synthesized)
ctgtgcattctgcagtcaaagaggaaagtgcatgtgttaaagatgaaaagtttgctccacctttgtcacctttgtcatcagatatgctcattatgcccaaagctttgaaagaagagagcg

SEQ ID NO: 460873 - DNA, 120 bp, Artificial Sequence
  ENSG00000157502_13 (sequence is synthesized)
aggatacctgcctagagaccctggctgttccctctgaatgctctgctttctcagagaatattgaggatcctggagagggtccctcaaatccatgcttagataccagccagaatcaacctt

SEQ ID NO: 460874 - DNA, 120 bp, Artificial Sequence
  ENSG00000157502_14 (sequence is synthesized)
ccatggaatcagagatgggggctgcagcatgccctgggagttgttcaagggaatgcgaggtttcatttagtgcctctaaccctgtctgggattattcacatcttatgagtagtgaaagaa

SEQ ID NO: 460875 - DNA, 120 bp, Artificial Sequence
  ENSG00000157502_15 (sequence is synthesized)
attttcagagactggattttgaagaacttgaggaagaaggtcaagcctctgacaagtcattgcttccaagtcgcattaatctttctctattagatgatgatgaggaagacgaagaacttc

SEQ ID NO: 460876 - DNA, 120 bp, Artificial Sequence
  ENSG00000157502_16 (sequence is synthesized)
cacgcttcattttacattatgagacacatccgtttgaaacaggaatgatagtctggtttaaatatcagaaatatccattttggccagcagtgataaaaagtatcagacgaaaagagagga

SEQ ID NO: 460877 - DNA, 120 bp, Artificial Sequence
  ENSG00000157502_17 (sequence is synthesized)
tggacaaagccagggaggattatagtgagagtattgactggtgcatctcactaatttgtgactacagagttagaataggttgtggttctttcacgggctctttgcttgagtattatgctg

SEQ ID NO: 460878 - DNA, 120 bp, Artificial Sequence
  ENSG00000157502_18 (sequence is synthesized)
ctgatattagttacccagttaggaaagaaacaaaacaggatactttcaggaacaaatttccaaagctgcataatgaagatgccagggaaccgatggctgtaacttcccagaccaagaaaa

SEQ ID NO: 460879 - DNA, 120 bp, Artificial Sequence
  ENSG00000157502_19 (sequence is synthesized)
tgtccttccaaaaaattctccctgaccggatgaaggctgctcgggaccgagccaacaagaacctggtggacttcattgtgaatgcaaagggaacagagaaccatcttctggccattgtaa

SEQ ID NO: 460880 - DNA, 120 bp, Artificial Sequence
  ENSG00000157502_20 (sequence is synthesized)
atggcacaaaaggatccagatggctgaaatcatttttgaatgcaaataggttcacaccctgtattgaaacatactttgaggatgaagatcagttggatgaagtggtgaaatatttacaag

SEQ ID NO: 460881 - DNA, 120 bp, Artificial Sequence
  ENSG00000157502_21 (sequence is synthesized)
aagtctgcaatcaaatagatcaaataatgccaacttggataaaagatgataaaattaaatttatcctagaagttcttctgccagaagcaattatttgttcaatttctgctgttgatgggt

SEQ ID NO: 460882 - DNA, 120 bp, Artificial Sequence
  ENSG00000157502_22 (sequence is synthesized)
tagattacgaggcagctgaagcaaagtatctaaaaggaccatgtctaggctacagggaaagagaattatttgatgcaaaaataatatatgaaaagagacgaaaagcaccaacaaatgaag

SEQ ID NO: 460883 - DNA, 120 bp, Artificial Sequence
  ENSG00000157502_23 (sequence is synthesized)
ctcactaaatgtgctgaaagttgaaaccatgacagggagctctcatagatactagttgaaaaaagtctctgaacaattctctctaatacatattttctgcaaatgggagcatggataatg

SEQ ID NO: 460884 - DNA, 120 bp, Artificial Sequence
  ENSG00000157502_24 (sequence is synthesized)
tgttcacttttttttgagatctctaggatctgtggttataattacatctttatttccttttcttgcgcttcttcaaagttaattttgtcaacatatttcagcagttctactttcccgtac

SEQ ID NO: 460885 - DNA, 120 bp, Artificial Sequence
  ENSG00000157502_25 (sequence is synthesized)
attttttagaaagcataattcctaaatgattttgaagggaaagtactattttgttttatgacacttttgagtctatgctgtattgttaaatatattgtgcacaattattttaatgttaaa

SEQ ID NO: 460886 - DNA, 120 bp, Artificial Sequence
  ENSG00000157502_26 (sequence is synthesized)
attgcactggtgttagatattaacgaagatgattggaaaaaagtctgaaagatacatcatttctatattccttgcttaatttttataaaatattgggttttcccttaagatagttgaagt

SEQ ID NO: 460887 - DNA, 120 bp, Artificial Sequence
  ENSG00000157502_27 (sequence is synthesized)
atttttcttgccatgcctatttatttttgcaaaaaaattatctgctatatagaaccaaagatagattcgctttgctatatattataactatacttgcttttgcaataaaacaacttgtaa

SEQ ID NO: 460888 - DNA, 120 bp, Artificial Sequence
  ENSG00000157502_28 (sequence is synthesized)
ttcaaaaatgaagattatctgcatatagtatttatgtgtgtgaataacatcttggcatgcagaaaataattttggctgctttgaacaggattgttcattctacacttccctgaaattcca

SEQ ID NO: 460889 - DNA, 120 bp, Artificial Sequence
  ENSG00000157502_29 (sequence is synthesized)
tttttgggagtgtctatccttcaatggctgaatagttccttaaatcagacaagctcctggctatcttcataaccagcagtgagtagatcttcttaatatagctgtctgaccacatgtgga

SEQ ID NO: 460890 - DNA, 120 bp, Artificial Sequence
  ENSG00000157502_30 (sequence is synthesized)
aggcagctagacttattgtatttacagcctggccactctagacatatgaatccaggctgactgcttaagtgcccatctcgtttgatataaactgtagaaaaggcaagcactttgttctga

SEQ ID NO: 460891 - DNA, 120 bp, Artificial Sequence
  ENSG00000157502_31 (sequence is synthesized)
gtcttttatctccaaatacatagttgtctcaaaccaagcaagctttatcaaaatggcttatttgcagaatagttccaatgatataaatgccaactggcaagtcattccaaactgcttgaa

SEQ ID NO: 460892 - DNA, 120 bp, Artificial Sequence
  ENSG00000157502_32 (sequence is synthesized)
ggagtagatgaaccagaatctgagaatttggaaataggtcacagaaaaagcctccatttggctaaatatgacaattatctgagtatggttaaatacatacaattaaatgtctgaagccaa

SEQ ID NO: 460893 - DNA, 120 bp, Artificial Sequence
  ENSG00000157502_33 (sequence is synthesized)
tgagttgtttattctaacttgaaatatatttttgtgagaataaatgttagaaaagttagtttattttggaaacctgccgtgaaaggaaattctaaaggcttaacatgaaactgtctgcat

SEQ ID NO: 460894 - DNA, 120 bp, Artificial Sequence
  ENSG00000157502_34 (sequence is synthesized)
ttctacctgttagacaatggttgctcttgggctcttgttatacagtcatatggctacacgtttatgtaaagtttgcaaaagtttggtgttttgatttataataaaactgttatattattc

SEQ ID NO: 460895 - DNA, 80 bp, Artificial Sequence
  ENSG00000157510_0 (sequence is synthesized)
ccggagcccctgcgccctgcggcccgctccccggggaccgggccggcgccatggaccgaggccaggtgctggagcagctg

SEQ ID NO: 460896 - DNA, 120 bp, Artificial Sequence
  ENSG00000157510_1 (sequence is synthesized)
gccaggtgctggagcagctgctcccagagctcaccgggctgctcagcctcctggaccacgagtacctcagcgataccaccctggaaaagaagatggccgtggcctccatcctgcagagcc

SEQ ID NO: 460897 - DNA, 120 bp, Artificial Sequence
  ENSG00000157510_2 (sequence is synthesized)
tgcagccccttccagcaaaggaggtctcctacctgtatgtgaacacagcagacctccactcggggcccagcttcgtggaatccctctttgaagaatttgactgtgacctgagtgaccttc

SEQ ID NO: 460898 - DNA, 120 bp, Artificial Sequence
  ENSG00000157510_3 (sequence is synthesized)
gggacatgccagaggatgatggggagcccagcaaaggagccagccctgagctagccaagagcccacgcctgagaaacgcggccgacctgcctccaccgctccccaacaagcctccccctg

SEQ ID NO: 460899 - DNA, 120 bp, Artificial Sequence
  ENSG00000157510_4 (sequence is synthesized)
aggactactatgaagaggcccttcctctgggacccggcaagtcgcctgagtacatcagctcccacaatggctgcagcccctcacactcgattgtggatggctactatgaggacgcagaca

SEQ ID NO: 460900 - DNA, 120 bp, Artificial Sequence
  ENSG00000157510_5 (sequence is synthesized)
gcagctaccctgcaaccagggtgaacggcgagcttaagagctcctataatgactctgacgcaatgagcagctcctatgagtcctacgatgaagaggaggaggaagggaagagcccgcagc

SEQ ID NO: 460901 - DNA, 120 bp, Artificial Sequence
  ENSG00000157510_6 (sequence is synthesized)
cccgacaccagtggccctcagaggaggcctccatgcacctggtgagggaatgcaggatatgtgccttcctgctgcggaaaaagcgtttcgggcagtgggccaagcagctgacggtcatca

SEQ ID NO: 460902 - DNA, 120 bp, Artificial Sequence
  ENSG00000157510_7 (sequence is synthesized)
gggaggaccagctcctgtgttacaaaagctccaaggatcggcagccacatctgaggttggcactggatacctgcagcatcatctacgtgcccaaggacagccggcacaagaggcacgagc

SEQ ID NO: 460903 - DNA, 120 bp, Artificial Sequence
  ENSG00000157510_8 (sequence is synthesized)
tgcgtttcacccagggggctaccgaggtcttggtgctggcactgcagagccgagagcaggccgaggagtggctgaaggtcatccgagaagtgagcaagccagttgggggagctgagggag

SEQ ID NO: 460904 - DNA, 120 bp, Artificial Sequence
  ENSG00000157510_9 (sequence is synthesized)
tggaggtccccagatccccagtcctcctgtgcaagttggacctggacaagaggctgtcccaagagaagcagacctcagattctgacagcgtgggtgtgggtgacaactgttctacccttg

SEQ ID NO: 460905 - DNA, 120 bp, Artificial Sequence
  ENSG00000157510_10 (sequence is synthesized)
gccgccgggagacctgtgatcacggcaaagggaagaagagcagcctggcagaactgaagggctcaatgagcagggctgcgggccgcaagatcacccgtatcattggcttctccaagaaga

SEQ ID NO: 460906 - DNA, 120 bp, Artificial Sequence
  ENSG00000157510_11 (sequence is synthesized)
agacactggccgatgacctgcagacgtcctccaccgaggaggaggttccctgctgtggctacctgaacgtgctggtgaaccagggctggaaggaacgctggtgccgcctgaagtgcaaca

SEQ ID NO: 460907 - DNA, 120 bp, Artificial Sequence
  ENSG00000157510_12 (sequence is synthesized)
ctctgtatttccacaaggatcacatggacctgcgaacccatgtgaacgccatcgccctgcaaggctgtgaggtggccccgggctttgggccccgacacccatttgccttcaggatcctgc

SEQ ID NO: 460908 - DNA, 120 bp, Artificial Sequence
  ENSG00000157510_13 (sequence is synthesized)
gcaaccggcaggaggtggccatcttggaggcaagctgttcagaggacatgggtcgctggctcgggctgctgctggtggagatgggctccagagtcactccggaggcgctgcactatgact

SEQ ID NO: 460909 - DNA, 120 bp, Artificial Sequence
  ENSG00000157510_14 (sequence is synthesized)
acgtggatgtggagaccttaaccagcatcgtcagtgctgggcgcaactccttcctatatgcaagatcctgccagaatcagtggcctgagccccgagtctatgatgatgttccttatgaaa

SEQ ID NO: 460910 - DNA, 120 bp, Artificial Sequence
  ENSG00000157510_15 (sequence is synthesized)
agatgcaggacgaggagcccgagcgccccacaggggcccaggtgaagcgtcacgcctcctcctgcagtgagaagtcccatcgtgtggacccgcaggtcaaagtcaaacgccacgcctcca

SEQ ID NO: 460911 - DNA, 120 bp, Artificial Sequence
  ENSG00000157510_16 (sequence is synthesized)
gtgccaatcaatacaagtatggcaagaaccgagccgaggaggatgcccggaggtacttggtagaaaaagagaagctggagaaagagaaagagacgattcggacagagctgatagcactga

SEQ ID NO: 460912 - DNA, 120 bp, Artificial Sequence
  ENSG00000157510_17 (sequence is synthesized)
gacaggagaagagggaactgaaggaagccattcggagcagcccaggagcaaaattaaaggctctggaagaagccgtggccaccctggaagctcagtgtcgggcaaaggaggagcgccgga

SEQ ID NO: 460913 - DNA, 120 bp, Artificial Sequence
  ENSG00000157510_18 (sequence is synthesized)
ttgacctggagctgaagctggtggctgtgaaggagcgcttgcagcagtccctggcaggagggccagccctggggctctccgtgagcagcaagcccaagagtggggaaactgcaaataaac

SEQ ID NO: 460914 - DNA, 120 bp, Artificial Sequence
  ENSG00000157510_19 (sequence is synthesized)
cccagaacagcgttccagagcaacctctccctgtcaactgtgtttctgagctgaggaagaggagcccatccatcgtagcctccaaccaaggaagggtgctacagaaagccaaggaatggg

SEQ ID NO: 460915 - DNA, 120 bp, Artificial Sequence
  ENSG00000157510_20 (sequence is synthesized)
aaatgaagaagacctaggaagaggatgaggatttcattccaaaggaaataccagcttgtccacctgaggaagaaatgcttttttcacaaggagacaccaagagaagactaggaagtagcc

SEQ ID NO: 460916 - DNA, 120 bp, Artificial Sequence
  ENSG00000157510_21 (sequence is synthesized)
ctcgttctccagggcacccaaaataccagcctttattgtctgcatgattttaggggatatggggagggaacaagtagaagggaagagggaaatggagagcatccttatgactttacaaag

SEQ ID NO: 460917 - DNA, 120 bp, Artificial Sequence
  ENSG00000157510_22 (sequence is synthesized)
ggtggaaatgaggatggagggatacagaagtctgcacagctgtaaaggttttatagatgtctttgccttcccttctgaggaagggaagaagtaatgaaagcacatgtgaataaccccttc

SEQ ID NO: 460918 - DNA, 120 bp, Artificial Sequence
  ENSG00000157510_23 (sequence is synthesized)
catcccattcacagcatcgcactcccagtccttaaggcaaagggaggcagtgctgaagcattggtggtgcagtgtaaagagacaagacctgatcatctgatcacacttgtgccaacttga

SEQ ID NO: 460919 - DNA, 120 bp, Artificial Sequence
  ENSG00000157510_24 (sequence is synthesized)
ttcatattgggcattactaacaacccctggtcaaggtaaataggttgaacaatcaataacattatccctgcctgcatacatgtgaacaaaagctatagaggacatgcaaattctacagtc

SEQ ID NO: 460920 - DNA, 120 bp, Artificial Sequence
  ENSG00000157510_25 (sequence is synthesized)
tgcagctactggaatcttccagatttcagtgttttaaaatcagagctctgaatacacaaaaggaaagagaaatggagcagctgacatattttaagctcacagtgatactcagtgacagga

SEQ ID NO: 460921 - DNA, 120 bp, Artificial Sequence
  ENSG00000157510_26 (sequence is synthesized)
gcacagagctctaatgtccacaggatgttgtagggtagggtctctcagtaaatcaagtcccttacctatgttctgacactgaggctcttggagctatgggttagaaatccaggaggcaat

SEQ ID NO: 460922 - DNA, 120 bp, Artificial Sequence
  ENSG00000157510_27 (sequence is synthesized)
atgtctttattctaatgaagtcctcatcttgcactcagaggcccactagtttgcccttctatatattaagtaaaaccaagagaaattaagaggatgatggcttctttctgtcacatgggt

SEQ ID NO: 460923 - DNA, 120 bp, Artificial Sequence
  ENSG00000157510_28 (sequence is synthesized)
gctaaaccttttacaaacacttgatacttctatagagggaccaaggacctcaagtcctgggcagtctccttactgtgctactcactactgtctcaacactgtagtgagtctgtctttaac

SEQ ID NO: 460924 - DNA, 120 bp, Artificial Sequence
  ENSG00000157510_29 (sequence is synthesized)
acatttccttccaataaagataaaaccacttaactcttaagtgccagtgcttagctcaagaggaaagaaggaaaatcccagaataaccgtggccactttgctataggggttacatatttt

SEQ ID NO: 460925 - DNA, 120 bp, Artificial Sequence
  ENSG00000157510_30 (sequence is synthesized)
aacccacctaaggttttacagactttagcctcactcaaactttatcaccctctgaggtagctggagaccacagcaggaaaaataacctgaccagtaatcacccactgattagtggcagag

SEQ ID NO: 460926 - DNA, 120 bp, Artificial Sequence
  ENSG00000157510_31 (sequence is synthesized)
cgtaggacttaggggttataagcccagatccagatagggctaggtttgagccatgcctctaatgaccagctgggtgaccttgggaaagtcacttgattgctctgattcttgttttcctta

SEQ ID NO: 460927 - DNA, 120 bp, Artificial Sequence
  ENSG00000157510_32 (sequence is synthesized)
tctgtgaaatgggactaacaattgttacttttctcccaagattgttgggaagatttaataagataatatatagtaggcatcttgcatagtgtctgagaaataagaaatgctcagtcaata

SEQ ID NO: 460928 - DNA, 86 bp, Artificial Sequence
  ENSG00000157510_33 (sequence is synthesized)
gcttgagcccaggagtttgagactgtagtgcactatgatcacgcctgtgaattgccactgcactccagcctaagcaaatagcaaga

SEQ ID NO: 460929 - DNA, 120 bp, Artificial Sequence
  ENSG00000157510_34 (sequence is synthesized)
gtgaattgccactgcactccagcctaagcaaatagcaagaccccatctattaaaaaaaaaaagtggctattattagctatatcagaaatgtctgactcacaagcctgtgttctttccact

SEQ ID NO: 460930 - DNA, 120 bp, Artificial Sequence
  ENSG00000157510_35 (sequence is synthesized)
gaagaggaaattacttttcagtgttcttttttaaaacgtggatcctgaaatgtcacctaactctccaactatgtcttcagtgtctgtcatactctttcttatgcagttattttggggtta

SEQ ID NO: 460931 - DNA, 120 bp, Artificial Sequence
  ENSG00000157510_36 (sequence is synthesized)
agtgtcttttctcaccaacagatgaactctcagaggagtggctgggggtaattaataattaacatttatcaagcactcaccatatgtcaggcactgtgtcagccatggccagcttcacag

SEQ ID NO: 460932 - DNA, 120 bp, Artificial Sequence
  ENSG00000157510_37 (sequence is synthesized)
gcatgcaacctgtgcagtcacacagggccccatgcttagaagggccctgttcttggtttaatgctctactattgccttcttaatcatatttgaacaaggagttctgcttttccttttgcc

SEQ ID NO: 460933 - DNA, 120 bp, Artificial Sequence
  ENSG00000157510_38 (sequence is synthesized)
ctttaaattagatagccagtcctggtgctaactaaccacttttctaggtattatccctttagttttcactgaaaccctgagataagttatattgccctagttttcacagttcaggaaatg

SEQ ID NO: 460934 - DNA, 120 bp, Artificial Sequence
  ENSG00000157510_39 (sequence is synthesized)
gaagctcacagaggtcaggtaacttgtccaagctcccatagttcttatatttacatgctggtggagccagcatgtgaatataagaagtctgaccctagagccttattcttaattttaaag

SEQ ID NO: 460935 - DNA, 120 bp, Artificial Sequence
  ENSG00000157510_40 (sequence is synthesized)
ctctatgtcatccatatatctccctccccttgtactgcaacattcagaagcacactagcacttaataaatagacgaatgaatgcatggatgcaagcagcaacctggtgaacgttaggcag

SEQ ID NO: 460936 - DNA, 120 bp, Artificial Sequence
  ENSG00000157510_41 (sequence is synthesized)
agcaacctggtgaacgttaggcagctaggagaaatgtaagcaaaatggctaaggcacagatgccacttgttcttggttgttaaaatgccttgtttaggccaggtatggtggctcatgcct

SEQ ID NO: 460937 - DNA, 65 bp, Artificial Sequence
  ENSG00000157510_42 (sequence is synthesized)
caaaaatacaaaagttagctgggcacggtggcacatgccggtagtcccagctacttgggaggctg

SEQ ID NO: 460938 - DNA, 120 bp, Artificial Sequence
  ENSG00000157510_43 (sequence is synthesized)
aaaaatgccttatttggttgtgttttttcaaagtgtaagccacaggtctaagcccaacactgccaagtgttcagtctgtcagaattctactgtcactgtttccttattgcgggatcttgc

SEQ ID NO: 460939 - DNA, 120 bp, Artificial Sequence
  ENSG00000157510_44 (sequence is synthesized)
ataggtttaccaacctttctgagcctcaattttctcatatgtaaaagagaatcataatacctccctaaaccatatcacccttttcataaggccaaaaagaaaatataagttattggtcat

SEQ ID NO: 460940 - DNA, 120 bp, Artificial Sequence
  ENSG00000157510_45 (sequence is synthesized)
gacacatttgagttggacctcggattagataaaaagatgaaaatactccagctctgtcctcatggaactcagagacaagcaggaaagaaaatgtgacccaaataactacagtacaaataa

SEQ ID NO: 460941 - DNA, 120 bp, Artificial Sequence
  ENSG00000157510_46 (sequence is synthesized)
cccatgttatgacaagattcagagtgctcaaggaacacttcccattcccttaaaaaaaaaaattaagggactatccagtaactaagctggcaactccaagtgccctggaccccagtcacc

SEQ ID NO: 460942 - DNA, 120 bp, Artificial Sequence
  ENSG00000157510_47 (sequence is synthesized)
aatccatcctctcagtctgtcagctttccatcctaaatctctaaaattcatccatatcttcctatcttcactgacactatccaacttaattaagtcattcaacaaatacttgagtaccta

SEQ ID NO: 460943 - DNA, 120 bp, Artificial Sequence
  ENSG00000157510_48 (sequence is synthesized)
ctatactagatgtcagaaatcagtggtgaacaagacagacacctcatgaagctcacattctagttggaggaaaaaaccttaacaaggaagcaaaagaaataaaatactaagaaactaaaa

SEQ ID NO: 460944 - DNA, 120 bp, Artificial Sequence
  ENSG00000157510_49 (sequence is synthesized)
gggctggggacttcctgtccctgagaagccaaatttaagttcctctgtgtcctgtgggagctggaactgcaagcctgtcaccctcccaaccatgtcaccattggcttaggagaagctacc

SEQ ID NO: 460945 - DNA, 120 bp, Artificial Sequence
  ENSG00000157510_50 (sequence is synthesized)
ctaagtcatggttgtcttttcaatacctggtatggtatgaggcacaggatagttgctgacaaacatttgttagctaattatcatgtgctgggggagttggagggagattgaaccaataaa

SEQ ID NO: 460946 - DNA, 120 bp, Artificial Sequence
  ENSG00000157510_51 (sequence is synthesized)
gtggggaatgggaaatgaagaagacctaggaagaggatgaggatttcattccaaaggaaataccagcttgtccacctgaggaagaaatgcttttttcacaaggagacaccaagagaagac

SEQ ID NO: 460947 - DNA, 120 bp, Artificial Sequence
  ENSG00000157510_52 (sequence is synthesized)
acgggctcaaccccaggggaactaactggctggggggaaagtcaggcaactgccaaactgtaggtgcccagcacagagctggcacaacagtaggtgcttaataaatgtctcctgaattca

SEQ ID NO: 460948 - DNA, 120 bp, Artificial Sequence
  ENSG00000157514_0 (sequence is synthesized)
atatcccagtgctgactcccgggcgtgcagaccgctaactagctcactcgctctcagctcctgccaccgctcagccgtcacagcccaggggagcccgagagcctgagagcctgcaaaccg

SEQ ID NO: 460949 - DNA, 120 bp, Artificial Sequence
  ENSG00000157514_1 (sequence is synthesized)
gggagggagggagcaaaggagggagggagcaagggcgcgccctggctctccctctgccctgctgcccgcccttcctgcctccacagcttgtcttttccaggcaccctggagtcccctcag

SEQ ID NO: 460950 - DNA, 120 bp, Artificial Sequence
  ENSG00000157514_2 (sequence is synthesized)
gccagctcggtgggcgcgcacctgccagccgcccctgacctcgcaggccaggcgacctccgagcctgagaagatggcccagtccaagctcgattgccgctcacctgtcggcctcgactgc

SEQ ID NO: 460951 - DNA, 120 bp, Artificial Sequence
  ENSG00000157514_3 (sequence is synthesized)
tgcaactgctgcctggacctggcccatcggagtgggctccagcgaggcagcagcggggagaacaacaacccgggcagccctacagtgagcaactttcggcagctgcaggaaaagctggtc

SEQ ID NO: 460952 - DNA, 120 bp, Artificial Sequence
  ENSG00000157514_4 (sequence is synthesized)
tttgagaacctcaataccgacaagctcaacagcataatgcggcaggattcgctagagccggtgctgcgggacccctgctacctgatcaacgagggcatctgcaaccgcaacatcgaccag

SEQ ID NO: 460953 - DNA, 120 bp, Artificial Sequence
  ENSG00000157514_5 (sequence is synthesized)
accatgctctccatcctgctcttcttccacagtgcctccggagccagcgtggtggccatagacaacaagatcgaacaggccatggatctggtgaagaatcatctgatgtatgctgtgaga

SEQ ID NO: 460954 - DNA, 120 bp, Artificial Sequence
  ENSG00000157514_6 (sequence is synthesized)
gaggaggtggagatcctgaaggagcagatccgagagctggtggagaagaactcccagctagagcgtgagaacaccctgttgaagaccctggcaagcccagagcagctggagaagttccag

SEQ ID NO: 460955 - DNA, 120 bp, Artificial Sequence
  ENSG00000157514_7 (sequence is synthesized)
tcctgtctgagccctgaagagccagctcccgaatccccacaagtgcccgaggcccctggtggttctgcggtgtaagtggctctgtcctcagggtgggcagagccactaaacttgttttac

SEQ ID NO: 460956 - DNA, 120 bp, Artificial Sequence
  ENSG00000157514_8 (sequence is synthesized)
ctagttctttccagtttgtttttggctccccaagcatcatctcacgaggagaactttacacctagcacagctggtgccaagagatgtcctaaggacatggccacctgggtccactccagc

SEQ ID NO: 460957 - DNA, 120 bp, Artificial Sequence
  ENSG00000157514_9 (sequence is synthesized)
taacaccaagccagtgagcctctaatgctactgcgccctgggggctcccagggcctgggcaacttagctgcaactggcaaaggagaagggtagtttgaggtgtgacaccagtttgctcca

SEQ ID NO: 460958 - DNA, 120 bp, Artificial Sequence
  ENSG00000157514_10 (sequence is synthesized)
gaaagtttaaggggtctgtttctcatctccatggacatcttcaacagcttcacctgacaacgactgttcctatgaagaagccacttgtgttttaagcagaggcaacctctctcttctcct

SEQ ID NO: 460959 - DNA, 120 bp, Artificial Sequence
  ENSG00000157514_11 (sequence is synthesized)
ctgtttcgtgaaggcaggggacacagatgggagagattgagccaagtcagccttctgttggttaatatggtataatgcatggctttgtgcacagcccagtgtgggattacagctttggga

SEQ ID NO: 460960 - DNA, 120 bp, Artificial Sequence
  ENSG00000157514_12 (sequence is synthesized)
tgaccgcttacaaagttctgtttggttagtattggcatagtttttctatatagccataaatgcgtatatatacccatagggctagatctgtatcttagtgtagcgatgtatacatataca

SEQ ID NO: 460961 - DNA, 120 bp, Artificial Sequence
  ENSG00000157514_13 (sequence is synthesized)
catccacctacatgttgaagggcctaaccagccttgggagtattgactggtcccttacctcttatggctaagtctttgactgtgttcatttaccaagttgacccagtttgtcttttaggt

SEQ ID NO: 460962 - DNA, 120 bp, Artificial Sequence
  ENSG00000157514_14 (sequence is synthesized)
taagtaagactcgagagtaaaggcaaggaggggggccagcctctgaatgcggccacggatgccttgctgctgcaaccctttccccagctgtccactgaaacgtgaagtcctgttttgaat

SEQ ID NO: 460963 - DNA, 120 bp, Artificial Sequence
  ENSG00000157514_15 (sequence is synthesized)
gccaaacccaccattcactggtgctgactacatagaatggggttgagagaagatcagtttgggcttcacagtgtcatttgaaaacgttttttgttttgttttgtaattattgtggaaaac

SEQ ID NO: 460964 - DNA, 120 bp, Artificial Sequence
  ENSG00000157514_16 (sequence is synthesized)
tttcaagtgaacagaaggatggtgtcctactgtggatgagggatgaacaaggggatggctttgatccaatggagcctgggaggtgtgcccagaaagcttgtctgtagcgggttttgtgag

SEQ ID NO: 460965 - DNA, 120 bp, Artificial Sequence
  ENSG00000157514_17 (sequence is synthesized)
agtgaacactttccactttttgacaccttatcctgatgtatggttccaggatttggattttgattttccaaatgtagcttgaaatttcaataaactttgctctgtttttctaaaaataaa

SEQ ID NO: 460966 - DNA, 120 bp, Artificial Sequence
  ENSG00000157514_18 (sequence is synthesized)
ctccacaggtccgccccaatccccgctcacacttgggaaacttgggactgcgctggggccgcgtgtggcacctcaggggggcggcccccggcctcaagaggagggggaggagaaggagga

SEQ ID NO: 460967 - DNA, 120 bp, Artificial Sequence
  ENSG00000157514_19 (sequence is synthesized)
agaggaggaagtgagcccgaaggatccgctcggagctgtttgtccagctgtttctattcgcacccggagcagtacagccagaagggggccgagccgaaggtggctggctttaggcgctaa

SEQ ID NO: 460968 - DNA, 120 bp, Artificial Sequence
  ENSG00000157514_20 (sequence is synthesized)
acatctattgaaagggtaacgacagacggagatcaactaaggtggcaggtaaggttcagaaaaggagaaggacaacaaatttggagaaataggagaagcttgtcttttccaggcaccctg

SEQ ID NO: 460969 - DNA, 120 bp, Artificial Sequence
  ENSG00000157514_21 (sequence is synthesized)
tttgcatggcccctgacgccatgtgacgcagccggctcctcctatataaagaagcaggagccaaaatatctccgagtctgggttggactggcggccgtggagtttgtgacatacgaggtg

SEQ ID NO: 460970 - DNA, 120 bp, Artificial Sequence
  ENSG00000157514_22 (sequence is synthesized)
acacccctcgagtcacttcccttcaactccagctggagcgcctgcttggctttgggttcgttctgcagccttcgccccgctcctagcctcagggccggactccagcgcagagcccagccc

SEQ ID NO: 460971 - DNA, 120 bp, Artificial Sequence
  ENSG00000157514_23 (sequence is synthesized)
agcgcagcctgccagcagccacccagccgcccagccgcccagccccgcacgaaacccggccagagcttcctagcagcccgagccatgaacaccgaaatgtatcagacccccatggaggtg

SEQ ID NO: 460972 - DNA, 120 bp, Artificial Sequence
  ENSG00000157514_24 (sequence is synthesized)
gggggctggccgagcgccgtgcgccgcttgggagaaggccggaagcttaccagccgagaaggaattcctagctagcttcagagccgggtaggtttgcctgggaccttgtaggccggctgt

SEQ ID NO: 460973 - DNA, 120 bp, Artificial Sequence
  ENSG00000157514_25 (sequence is synthesized)
gggggactccccgggtcgcacagccccattgtttgcatattgcccgagcaggccacggtggcctgcgcgccccaggactcgcaagcagctccgatcggttggaactcggggcggcggcag

SEQ ID NO: 460974 - DNA, 120 bp, Artificial Sequence
  ENSG00000157514_26 (sequence is synthesized)
gagaaggagagagagaggaagagccgaggcagatggaggactttggccacaactgccatgtactcaagagtagaaccgagtgggtaatgggtcgctttgctttttgtcttggcagtgcct

SEQ ID NO: 460975 - DNA, 120 bp, Artificial Sequence
  ENSG00000157514_27 (sequence is synthesized)
aattgctagagctgcttttccaagacagtgtccatctctccaccaagattctccttgggctccctcccactcatcatcgccttctgcatctgcatctgcattctcctccccattttcctg

SEQ ID NO: 460976 - DNA, 120 bp, Artificial Sequence
  ENSG00000157514_28 (sequence is synthesized)
cccctgaaattcggagctctgggccctggccatgcagggcagttcacatgatccacagagaacaaggcactttctctttctctgtctttccttcttgcttccctccttctggactttggg

SEQ ID NO: 460977 - DNA, 120 bp, Artificial Sequence
  ENSG00000157514_29 (sequence is synthesized)
gattttccatgaaaccaaagtaactatgtaagtggcagtggccttcctgtctatagtctcccacactggagtggaaccagaagggaagagagaagataagcgagaagcaaggacaaatta

SEQ ID NO: 460978 - DNA, 120 bp, Artificial Sequence
  ENSG00000157514_30 (sequence is synthesized)
gctgctctatttcaaaggccagacttgtgaatgaaggagccgatgcgggggtggggagtactgactgaaatgtaagtcagttttacgtgaaaactgaacgtcatgaaaagtttagttttt

SEQ ID NO: 460979 - DNA, 120 bp, Artificial Sequence
  ENSG00000157514_31 (sequence is synthesized)
tcagacactaatcgttatttaatcctacacatttaaagtattccaagtctctgagtcctgagaaaccctggaaacccaccacttgcccacccagaacatccctccatcttacagagctgg

SEQ ID NO: 460980 - DNA, 120 bp, Artificial Sequence
  ENSG00000157514_32 (sequence is synthesized)
agagagaaggaaggggaggactgaggagagacggcgaaggggcagagggaaaccgggacagagactgcctctgaggggttcagggaagagaggacacagcgagctggggaaaggagcttg

SEQ ID NO: 460981 - DNA, 120 bp, Artificial Sequence
  ENSG00000157514_33 (sequence is synthesized)
aagggtgcgggcggggtggggcgaggggtggagggacaggatccagccgctcggggcccccgcccgccagccggagaagtggcggaggaccgttctccgccgtcccctctaggcttgtct

SEQ ID NO: 460982 - DNA, 120 bp, Artificial Sequence
  ENSG00000157514_34 (sequence is synthesized)
acgcaggaaggggggggtcaccgccgctctgggatccgtcatcgaagcgtccctgcggccgctgcgccgtgaaaaccagctgctgcagccgcagaggcagccggaggcagaggggcggcg

SEQ ID NO: 460983 - DNA, 120 bp, Artificial Sequence
  ENSG00000157514_35 (sequence is synthesized)
ggcaggaccagacagggctgggcagggggctggccgagcgccgtgcgccgcttgggagaaggccggaagcttaccagccgagaaggaattcctagctagcttcagagccggtgcctccgg

SEQ ID NO: 460984 - DNA, 120 bp, Artificial Sequence
  ENSG00000157514_36 (sequence is synthesized)
gcgtgcgtatttctggcggaggatgcgccatgagcgctgaaagagcctgaaccgaagcgtccggctcgccgagagagtgagagccgggccggctcccaggagcgcgggcgaggcttgtct

SEQ ID NO: 460985 - DNA, 120 bp, Artificial Sequence
  ENSG00000157514_37 (sequence is synthesized)
ggcatcactgcgtcattctcatcccctgacttagctgctgcttatgtaactctgggcaggattgagggaatgggtgaaaaagcccttagccaaaaccctgaggaagccgacagcctgcct

SEQ ID NO: 460986 - DNA, 120 bp, Artificial Sequence
  ENSG00000157538_0 (sequence is synthesized)
acgcgcagccggaagtggcggctgctgcggagaattggagatggggaccgccctggacatcaagattaaaagagcgaataaagtttatcacgccggggaagtgctctctggcgtggtggt

SEQ ID NO: 460987 - DNA, 120 bp, Artificial Sequence
  ENSG00000157538_1 (sequence is synthesized)
catatcgagtaaggattcagtccaacaccagggagtgtctttgaccatggaaggaactgtaaacctccagctcagtgccaaaagtgtgggtgtgtttgaagctttttataattctgttaa

SEQ ID NO: 460988 - DNA, 120 bp, Artificial Sequence
  ENSG00000157538_2 (sequence is synthesized)
gcctatccagattatcaacagcaccatagaaatggtgaagccggggaaatttcccagcggcaaaacagaaatcccttttgaatttcctctgcacttgaagggtaacaaagttctgtatga

SEQ ID NO: 460989 - DNA, 120 bp, Artificial Sequence
  ENSG00000157538_3 (sequence is synthesized)
gacgtatcatggcgtgtttgtcaacattcagtatacactgcgctgtgacatgaagcggtctctgttggccaaggacttgacaaagacctgtgaatttatcgttcactccgctcctcagaa

SEQ ID NO: 460990 - DNA, 120 bp, Artificial Sequence
  ENSG00000157538_4 (sequence is synthesized)
ggggaagtttactcccagtcccgtggacttcacgattacacctgaaaccttacagaacgtcaaagagagagctttgcttcccaaatttctccttcgaggacatctcaactcaacaaactg

SEQ ID NO: 460991 - DNA, 120 bp, Artificial Sequence
  ENSG00000157538_5 (sequence is synthesized)
tgtcatcacgcagccactaacgggagagctggtggtggagagctcggaagccgccatcagaagcgtggagctgcagctggtgcgcgtggagacgtgcgggtgtgcagaaggctatgcccg

SEQ ID NO: 460992 - DNA, 120 bp, Artificial Sequence
  ENSG00000157538_6 (sequence is synthesized)
cgacgccacggagattcagaacattcagatcgccgacggggatgtgtgcaggggcctctctgtccccatctacatggtcttccctaggctgttcacctgccctacactggagaccaccaa

SEQ ID NO: 460993 - DNA, 120 bp, Artificial Sequence
  ENSG00000157538_7 (sequence is synthesized)
cttcaaagtggaatttgaggttaacatcgtggtgctgcttcaccctgaccacctcatcacggagaacttcccgctgaagctctgcaggatatagcccggaggagggaagcatagagaacg

SEQ ID NO: 460994 - DNA, 120 bp, Artificial Sequence
  ENSG00000157538_8 (sequence is synthesized)
ggagtggccatctggaaatccagctggttatccaaatcctaaggggagctacagccagcggcatatacttgtttttgtgattattctgtatcagaaatgaaacagaccctcaaattaact

SEQ ID NO: 460995 - DNA, 120 bp, Artificial Sequence
  ENSG00000157538_9 (sequence is synthesized)
ttccttcctcatttcttgaggcttctgcttccaacaggcacctctaatcagaccttttctttgaaattcaacaagatttcttaatgctatttgccaagaccatttcacagaaaacattga

SEQ ID NO: 460996 - DNA, 120 bp, Artificial Sequence
  ENSG00000157538_10 (sequence is synthesized)
ctgtggctcttgccttatctgttcctttttaggtacagtaaaacaattgtgacagcagtttgagcttgctggagagtggcatcatggggacaaaaggaaacctctgacttgctaatggat

SEQ ID NO: 460997 - DNA, 120 bp, Artificial Sequence
  ENSG00000157538_11 (sequence is synthesized)
gtagccagggactccccatagcaaagggtctgtggccagttgacatccaggatggctgcaagcgcacttgatggtcaggaagtttgcagatactcgccaaggcagagcgcaaagtgctag

SEQ ID NO: 460998 - DNA, 120 bp, Artificial Sequence
  ENSG00000157538_12 (sequence is synthesized)
acaggtgtgagccaccacacccagcctctgtagttctttttacaacatttttcattataactttaaattttttaagcaactggaaaagtgttccttgctctcttggggggatttggctgg

SEQ ID NO: 460999 - DNA, 120 bp, Artificial Sequence
  ENSG00000157538_13 (sequence is synthesized)
ggatttggctggtgccgaagtgtttctgaagtctcaagaactgccataaaatctcacgctgccatttccctgaacagatacatacatagagagagacagttttccaaactgtgtcacgca

SEQ ID NO: 461000 - DNA, 120 bp, Artificial Sequence
  ENSG00000157538_14 (sequence is synthesized)
gagacagttttccaaactgtgtcacgcaggctgagtgcactggcaggatcacagctcacggcagcctcaacctccctggctcaagcgatccctcccctcagcctcctgagtagctgagac

SEQ ID NO: 461001 - DNA, 120 bp, Artificial Sequence
  ENSG00000157538_15 (sequence is synthesized)
ctgtgcccagcagtttcccagaatatatttaaatgcaaagttacatgaggggaaaacatgtatgtttgctcctgttgttactgggtaggttctgaacagcagaaacccatgtgcagggtg

SEQ ID NO: 461002 - DNA, 120 bp, Artificial Sequence
  ENSG00000157538_16 (sequence is synthesized)
ggctggtgaaggcccctctccgcaaggtggtagcaggaaaaggtccttgacttgatgaatttggtctgcctctgagccactggaggaagctgttttgagccagggttttttggcctaaag

SEQ ID NO: 461003 - DNA, 120 bp, Artificial Sequence
  ENSG00000157538_17 (sequence is synthesized)
ccagcatttcctcagtctccctttgtggttcgaaggatatggactattgcaatacatttcttccttcaaatcctgccactgttttgttggcccacaactaataggacctcaaaataagcc

SEQ ID NO: 461004 - DNA, 120 bp, Artificial Sequence
  ENSG00000157538_18 (sequence is synthesized)
atgctgctttgcacacacactagccttcttttgtacttttcattctggatgggcttggccaaaacaggctcaggccaaagacctcccaagctgtatgtacttccagtatcctgaaacagt

SEQ ID NO: 461005 - DNA, 120 bp, Artificial Sequence
  ENSG00000157538_19 (sequence is synthesized)
gtttggtgacataatgccaagggtaaacaagcctgatttaggcactgctttatccaggggcttcacccatgaaattaataaaacttatctgagtcacttgaaacttggttcccagaaaac

SEQ ID NO: 461006 - DNA, 120 bp, Artificial Sequence
  ENSG00000157538_20 (sequence is synthesized)
acatttctggtttataatctccttttatgctcacctgacattaattatctatccttgatgatgtgtttaaactgagtagcagaaaacagaggccacactttctgggaaattttaaaggaa

SEQ ID NO: 461007 - DNA, 120 bp, Artificial Sequence
  ENSG00000157538_21 (sequence is synthesized)
gaaaccatttttaatgagatgaaaatatttaacgaatttaaaaagctaatgacaattttgagaaaaggtttgggatgtatattgctatgtaatttaataaactgattttatggatataaa

SEQ ID NO: 461008 - DNA, 120 bp, Artificial Sequence
  ENSG00000157538_22 (sequence is synthesized)
ggggtcacgcgcagccggaagtggcggctgctgcggagaattggagatggggaccgccctggacatcaagattaaaagagcgaataaagtttatcacgccggggtgagtgaattattgta

SEQ ID NO: 461009 - DNA, 120 bp, Artificial Sequence
  ENSG00000157538_23 (sequence is synthesized)
aggcaaacccttgtaaccctacccacatcctgctggagaggagactggaagtaggatcactccatctagattctgggagaagaccctgctccaaaggaccttgatgaggtttcatggttt

SEQ ID NO: 461010 - DNA, 120 bp, Artificial Sequence
  ENSG00000157538_24 (sequence is synthesized)
ggtaacctcatgcactgtgggaatgtcagaggaccccgagataatgcttcactgccaagtctgaaaattgtgtccacaagatttgattggtagtattttctatcattgtacaacttaaaa

SEQ ID NO: 461011 - DNA, 120 bp, Artificial Sequence
  ENSG00000157538_25 (sequence is synthesized)
ttaaattttagaaactttcttacaagcagaattacaaaaagagtaactaacaagaaagtgagattgtgatgggataacggaatgtcaagtctaattgtcaggaaaagacaaaataacatg

SEQ ID NO: 461012 - DNA, 120 bp, Artificial Sequence
  ENSG00000157538_26 (sequence is synthesized)
ggaatgacaatcaaaatggactaaggacttagaagatccgaaactatgaagctactaaaagaaacattggggaatgctccaggacattggtctgggcaaagatttcttgagcaatacctt

SEQ ID NO: 461013 - DNA, 120 bp, Artificial Sequence
  ENSG00000157538_27 (sequence is synthesized)
aaaaggacaggcaacccaagcaaaaatggacagatgggatcacatcaagctaaaaaacttctacacagcgaaggaaacaaagtgaacagaataacatgggaatgttttctgtaatttagt

SEQ ID NO: 461014 - DNA, 120 bp, Artificial Sequence
  ENSG00000157538_28 (sequence is synthesized)
agtaactggcaatagtttacaaacacattttgtgtatactgctgtcattgcactgattaccttctgttgtagtgactttgttctattagtccactcaattaaaatatttggttttgttta

SEQ ID NO: 461015 - DNA, 120 bp, Artificial Sequence
  ENSG00000157538_29 (sequence is synthesized)
tcctacgcgactgacttcacaagttttcttctgacaaacggtgtggtctttctctcaacgttagtagacgggcccaagaatttaatactgtgtttattgctgagacctcgcatgtatatt

SEQ ID NO: 461016 - DNA, 120 bp, Artificial Sequence
  ENSG00000157538_30 (sequence is synthesized)
cgacgttaatttctcatttccctgataaatgcatttgatgtatggccgttatttctgatgggagcctcaaggcactcgtgctgtaacttcttttccctctgtttcttctgggctcttttc

SEQ ID NO: 461017 - DNA, 120 bp, Artificial Sequence
  ENSG00000157538_31 (sequence is synthesized)
cagccggaagtggcggctgctgcggagaattggagatggggaccgccctggacatcaagattaaaagagcgaataaagtttatcacgccggggtgaccgcaaaggtctaatgaacgaaag

SEQ ID NO: 461018 - DNA, 120 bp, Artificial Sequence
  ENSG00000157538_32 (sequence is synthesized)
ggggtgaaccgtgacagcgcttcggcccgcactaaggccggctcttgtgccggaaggaggaaggcgtgggcattcgcccctcggagctagggagtgtgtgcgacgccgctgcgaggtcac

SEQ ID NO: 461019 - DNA, 120 bp, Artificial Sequence
  ENSG00000157538_33 (sequence is synthesized)
acgattacacctgaaaccttacagaacgtcaaagaggatcaagtgaaggacaagctgggaggcctgggccctgggatgtcattggcctcatccctcagaggctggacatgtgtcgtgggg

SEQ ID NO: 461020 - DNA, 120 bp, Artificial Sequence
  ENSG00000157538_34 (sequence is synthesized)
cctgccacctggaggacgggtgccccgaactcccgggagccggattgtctgtccactttctgccggacagaaacacttcactggggtggtccccacggggcgttccttgtggcttttcta

SEQ ID NO: 461021 - DNA, 120 bp, Artificial Sequence
  ENSG00000157538_35 (sequence is synthesized)
ggtataggtttatttgtaaacacgaagaacttttctttccacagaaccattcaggtttattgttggaaaataagaaaataacacataaagcaaataaaataaaattgcttattcacaaaa

SEQ ID NO: 461022 - DNA, 120 bp, Artificial Sequence
  ENSG00000157538_36 (sequence is synthesized)
gcgggaagggcagggtgcggcgcctggccgcagacagacaagggggcgccggctcttcagaaccccagggagaaagcggtggagggctagagttgaggagactaaggacatttgaggagg

SEQ ID NO: 461023 - DNA, 120 bp, Artificial Sequence
  ENSG00000157538_37 (sequence is synthesized)
gcaggcattaccaagttaaaacctcctgaaagacaactccattgggcgaccgtctgcgccgcacagcctgacgggagcgtcatccttcctgcgcaggctgcaaccgacagacaggctcgg

SEQ ID NO: 461024 - DNA, 120 bp, Artificial Sequence
  ENSG00000157538_38 (sequence is synthesized)
ctccgcctccagccgcggggcacgcggggagagccgttcctccctccctccgctaacccggacagcaaaggagcatttccggcgtaagactgtccctacggaaggggtggggctagcttg

SEQ ID NO: 461025 - DNA, 120 bp, Artificial Sequence
  ENSG00000157538_39 (sequence is synthesized)
gatggggaaatttgacagaactgtgttcaggacccaggcttgcgcctcttagttccccgtccttcctgcatcgccaggctgccgttggtttatttttgaaagggaaaagctatttgacct

SEQ ID NO: 461026 - DNA, 120 bp, Artificial Sequence
  ENSG00000157538_40 (sequence is synthesized)
gcagaactcttggccttcacctactgatttcggtttcacctctcgttttagcctcagaaggggaagtttactcccagtcccgtggacttcacgattacacctgaaaccttacagaacgtc

SEQ ID NO: 461027 - DNA, 120 bp, Artificial Sequence
  ENSG00000157538_41 (sequence is synthesized)
aaagagcattcccatcagacagaggccgggcagcaacgtgcttttcaaagattccgcagtgccctccgtggtggacgcctcacggccagggcaggtacagtgaggacacagacgcctggg

SEQ ID NO: 461028 - DNA, 120 bp, Artificial Sequence
  ENSG00000157538_42 (sequence is synthesized)
cagtgccagcccagctcccccgcctcctgcatcaggacagggctgtctggctgtcagtggcagccgctggtggagcctcagctggtccctcgagctgcacggtgaacttgggcccgtcca

SEQ ID NO: 461029 - DNA, 120 bp, Artificial Sequence
  ENSG00000157538_43 (sequence is synthesized)
aaactctgcctggccccggcctccctgatcttgccctctcatccactgccatgcatttctcctaaacagtggagtcctgtagttcttcctggatgtaacttttcatccttcctctaattc

SEQ ID NO: 461030 - DNA, 120 bp, Artificial Sequence
  ENSG00000157538_44 (sequence is synthesized)
tttattctgctgtctggaccacactgactaggatcaagtgaaggacaagctgggaggcctgggccctgggatgtcattggcctcatccctcagaggctggacatgtgtcgtggggagcct

SEQ ID NO: 461031 - DNA, 120 bp, Artificial Sequence
  ENSG00000157538_45 (sequence is synthesized)
ttcagacagggaagccaaaagagtggacacccctgctctagaccatcatcagtccttcctggccagcgtcaggtgtgcagagtaaagagagctttgcttcccaaatttctccttcgagga

SEQ ID NO: 461032 - DNA, 120 bp, Artificial Sequence
  ENSG00000157538_46 (sequence is synthesized)
cttgtttccctggggtcacgcgcagccggaagtggcggctgctgcggagaattggagatggggaccgccctggacatcaagattaaaagagcgaataaagtttatcacgccgggcctcag

SEQ ID NO: 461033 - DNA, 120 bp, Artificial Sequence
  ENSG00000157538_47 (sequence is synthesized)
gcgtccctaggcggggcagggctgtcccgccaggtgcgtctccgccaaggtgggtgcgttcccgccaggtgcgtccccgccaggtgcttcccgcgcgaggctggctgccctgcgaggagg

SEQ ID NO: 461034 - DNA, 120 bp, Artificial Sequence
  ENSG00000157538_48 (sequence is synthesized)
ccccagggcaggcgccgccgccgcatctgcgggacgtgcagggcaggcgcccagctccggggctgcgctcttcccatctggccccttgaacacccggcggtgttgggttctcaggcttga

SEQ ID NO: 461035 - DNA, 120 bp, Artificial Sequence
  ENSG00000157538_49 (sequence is synthesized)
gctccctcagtgagcgctgagggcggaggagttgacgaccaaactcccctttccctctctcctaaggtgaccgcaaaggtctaatgaacgaaagctaaaacaaaccttggaagcagaaat

SEQ ID NO: 461036 - DNA, 120 bp, Artificial Sequence
  ENSG00000157538_50 (sequence is synthesized)
atgccaatatctgatcctttcagtaactgggatccagccagaggtaaagattcctagaaaaattgtctctgtctagaccaagcccattcaacccacagcccaccggccaggatggctttg

SEQ ID NO: 461037 - DNA, 120 bp, Artificial Sequence
  ENSG00000157538_51 (sequence is synthesized)
aatgtgacccaacacaaattcataaaccttaaaacatgagattttgtttctgtgatttttttttagctcatcagctatcattagtgttaatatattttatgtgtgacccaagacaattct

SEQ ID NO: 461038 - DNA, 120 bp, Artificial Sequence
  ENSG00000157538_52 (sequence is synthesized)
tcttcttccaacgtggcccagggaagccaaaagagtggacacccctgctctagaccatcatcagtccttcctggccagcgtcaggtgtgcagagtaaaggtttgtaggcttctcatcaag

SEQ ID NO: 461039 - DNA, 120 bp, Artificial Sequence
  ENSG00000157538_53 (sequence is synthesized)
cgtcaaagaaactagttttcttcaaatttccatgaaataaaataaatgtcttgggttttaaaaattgtacaattgggaacatctttgaatgtttttttttttaagagacagcatctcatt

SEQ ID NO: 461040 - DNA, 120 bp, Artificial Sequence
  ENSG00000157538_54 (sequence is synthesized)
cttgtcacccagactggagtgcactggtgtaatcattgctcactggagcctcaagcaatcctcctgcctctgcctcccacgtaactgagactacaggtgtgcaccagcctgcccagctaa

SEQ ID NO: 461041 - DNA, 82 bp, Artificial Sequence
  ENSG00000157538_55 (sequence is synthesized)
gtaactgagactacaggtgtgcaccagcctgcccagctaatttttaaaacattttttagagatggggtcttgctgtgttaca

SEQ ID NO: 461042 - DNA, 120 bp, Artificial Sequence
  ENSG00000157538_56 (sequence is synthesized)
cactgtgcctggccaggacttttctttttaactgtgtgtgtgtcaggttgtcttgaacaccatggcgactccctcagactttttcatgtcttattccttggtaagaaggagctttctagc

SEQ ID NO: 461043 - DNA, 120 bp, Artificial Sequence
  ENSG00000157538_57 (sequence is synthesized)
tctgagactaggcaattaggatggttctctgaggcattctctgtacacagagtgtcagtcaggtgccatatgtagagagtcgttgaataattcagccggctaatgtccaagacgtcagta

SEQ ID NO: 461044 - DNA, 120 bp, Artificial Sequence
  ENSG00000157538_58 (sequence is synthesized)
cttcgctcctttcttcccgttttgtgagacggtcccggtggactgtgtaaccactatccaacttcgcttccaggttttatttgcaccaaagtatggagcactttccccccttgcctgcat

SEQ ID NO: 461045 - DNA, 120 bp, Artificial Sequence
  ENSG00000157538_59 (sequence is synthesized)
catgggcccatgggaagggccgctcagcgccagggcctgctgtgggtcacagagctcagaacctgccgcccttcggtccctcagtgccagggcctgccacaggccatacagctcagagcc

SEQ ID NO: 461046 - DNA, 120 bp, Artificial Sequence
  ENSG00000157538_60 (sequence is synthesized)
tgctgcccttcggctgctcaacaaaaccttgttaaggagctgctgtgccgcacaggggacacacccacaggcagtcctggtgcttgtgggacttccactgtcacatggggaaacacacag

SEQ ID NO: 461047 - DNA, 120 bp, Artificial Sequence
  ENSG00000157538_61 (sequence is synthesized)
acccacatcagtgtagacatgggcaggtgacgctgagctctgtgtagacatgggcaggtgacgctgagctccgtgtagacatgggcaggtgacgctgagctctgtgtagacatgggcagg

SEQ ID NO: 461048 - DNA, 120 bp, Artificial Sequence
  ENSG00000157538_62 (sequence is synthesized)
tgacgctgagctccgtgaagaaaactcccgtgaacgagcaccacaggagtggggggtggtgtggatactgagaaagtggctctgtgtgaaggtccaggacccgtgaaaaccccagagtga

SEQ ID NO: 461049 - DNA, 120 bp, Artificial Sequence
  ENSG00000157538_63 (sequence is synthesized)
gcgctcagaagcaggaaggccttgagccccgcggcctagatgcctctagtgagtttccatgaacctgtgtgttcatattttaaccatgggatctgaatcaggtcacagacacccttttat

SEQ ID NO: 461050 - DNA, 120 bp, Artificial Sequence
  ENSG00000157538_64 (sequence is synthesized)
attctgcctttttcccttaacattgtatcatgaacatttccatgtttttaactcttcctataaatattgtaatgggacctccatcttaataagaatcatgttaattgggagatcactcca

SEQ ID NO: 461051 - DNA, 120 bp, Artificial Sequence
  ENSG00000157538_65 (sequence is synthesized)
cactacgaagaagtagaacagagagacccagtaggaagggaccgagccttctcagtagcaggggactgtgattcagagaggctcggggacctctaggttggaagtcaggagtgagcactg

SEQ ID NO: 461052 - DNA, 120 bp, Artificial Sequence
  ENSG00000157538_66 (sequence is synthesized)
catccacatcaagagcagcacctctgtgtgttcccctccaattccgtgcgagtgacctcaaatgcacggtcaggcccgagactggaactcactcggactctaagcagcgcctgggtatca

SEQ ID NO: 461053 - DNA, 120 bp, Artificial Sequence
  ENSG00000157538_67 (sequence is synthesized)
tggcggctccagtgcagctgttttcctgctgtaaaggaaagcccccgccagctccctatcttgcctgctgggcatccctctctgtccactccagccacaccctccacccttctggggggc

SEQ ID NO: 461054 - DNA, 120 bp, Artificial Sequence
  ENSG00000157538_68 (sequence is synthesized)
acaacaagaggggtggagaacccattgaagggagtggtggcaggaagtgcccagaggactctaatgtagtgacaataaagtgaggaaggacaggccggccactgctggtggccgactctt

SEQ ID NO: 461055 - DNA, 120 bp, Artificial Sequence
  ENSG00000157538_69 (sequence is synthesized)
cttgtggctgatgtttgggcggaggtggacactcccacacggggatgttgtcctgcagaccccagccacaggtgggcactgactccaaggccccttccacagctgagctgccacagtgtg

SEQ ID NO: 461056 - DNA, 120 bp, Artificial Sequence
  ENSG00000157538_70 (sequence is synthesized)
cacagggtgccctctgcccacacgatgcccttcccacccctcctcacactggggaaggagatggtgcttgtttgtcgtcaggtgcttcctcttcacacacatcccttttgttaggatcaa

SEQ ID NO: 461057 - DNA, 120 bp, Artificial Sequence
  ENSG00000157538_71 (sequence is synthesized)
caaggctcacccatatcagctgaagagtcggtggagaaggaatcctgtttgctgaaaggtgatggatgaatagtatccaatggagcaacaatgaaattgttgcttctgaagactgtttct

SEQ ID NO: 461058 - DNA, 120 bp, Artificial Sequence
  ENSG00000157538_72 (sequence is synthesized)
cacctggggattggggacatgggcccagacagctatgcgctggttcacagtctgctatttcattaagaaccgtaggaaatgtaaaaataaggcaaaggaatacaaatgaattgaaagggt

SEQ ID NO: 461059 - DNA, 120 bp, Artificial Sequence
  ENSG00000157538_73 (sequence is synthesized)
tctagaatatcctttttaggaaagcaaagggacagggaaagtgtagttggtgaagcctgatcactcatgttccaagatgagaggacaaaaattcacttagagaaagttgacagaggtagt

SEQ ID NO: 461060 - DNA, 120 bp, Artificial Sequence
  ENSG00000157538_74 (sequence is synthesized)
cagacatcagcatagtcatctccactgaaagtttggctgaaaggtcagggtggcgctgaggggacagcaatgaaacccacccgcaccgggtgctccttcgccgttagagcttcctgcgac

SEQ ID NO: 461061 - DNA, 62 bp, Artificial Sequence
  ENSG00000157540_0 (sequence is synthesized)
tcgtcccggtgacttcctggaatcagtgttatagttttgccgctggactcttccctcccttc

SEQ ID NO: 461062 - DNA, 120 bp, Artificial Sequence
  ENSG00000157540_1 (sequence is synthesized)
tcagtgttatagttttgccgctggactcttccctcccttcccccaccccatcaggatgatatgagacttgaaagaagacgatgcatacaggaggagagacttcagcatgcaaaccttcat

SEQ ID NO: 461063 - DNA, 120 bp, Artificial Sequence
  ENSG00000157540_2 (sequence is synthesized)
ctgttcggcttgcaccgtcattttcattccatgctgctggccttcagatggctggacagatgccccattcacatcagtacagtgaccgtcgccagccaaacataagtgaccaacaggttt

SEQ ID NO: 461064 - DNA, 120 bp, Artificial Sequence
  ENSG00000157540_3 (sequence is synthesized)
ctgccttatcatattctgaccagattcagcaacctctaactaaccagaggcggatgccccaaaccttccgtgacccagcaactgctcccctgagaaaactttctgttgacttgatcaaaa

SEQ ID NO: 461065 - DNA, 120 bp, Artificial Sequence
  ENSG00000157540_4 (sequence is synthesized)
catacaagcatattaatgaggtttactatgcaaaaaagaagcgaagacaccaacagggccagggagacgattctagtcataagaaggaacggaaggtttacaatgatggttatgatgatg

SEQ ID NO: 461066 - DNA, 120 bp, Artificial Sequence
  ENSG00000157540_5 (sequence is synthesized)
ataactatgattatattgtaaaaaacggagaaaagtggatggatcgttacgaaattgactccttgataggcaaaggttcctttggacaggttgtaaaggcatatgatcgtgtggagcaag

SEQ ID NO: 461067 - DNA, 120 bp, Artificial Sequence
  ENSG00000157540_6 (sequence is synthesized)
aatgggttgccattaaaataataaagaacaagaaggcttttctgaatcaagcacagatagaagtgcgacttcttgagctcatgaacaaacatgacactgaaatgaaatactacatagtgc

SEQ ID NO: 461068 - DNA, 120 bp, Artificial Sequence
  ENSG00000157540_7 (sequence is synthesized)
atttgaaacgccactttatgtttcgaaaccatctctgtttagtttttgaaatgctgtcctacaacctctatgacttgctgagaaacaccaatttccgaggggtctctttgaacctaacac

SEQ ID NO: 461069 - DNA, 120 bp, Artificial Sequence
  ENSG00000157540_8 (sequence is synthesized)
gaaagtttgcgcaacagatgtgcactgcactgcttttccttgcgactccagaacttagtatcattcactgtgatctaaaacctgaaaatatccttctttgtaaccccaaacgcagtgcaa

SEQ ID NO: 461070 - DNA, 120 bp, Artificial Sequence
  ENSG00000157540_9 (sequence is synthesized)
tcaagatagttgactttggcagttcttgtcagttggggcagaggatataccagtatattcagagtcgcttttatcggtctccagaggtgctactgggaatgccttatgaccttgccattg

SEQ ID NO: 461071 - DNA, 120 bp, Artificial Sequence
  ENSG00000157540_10 (sequence is synthesized)
atatgtggtccctcgggtgtattttggttgaaatgcacactggagaacctctgttcagtggtgccaatgaggtagatcagatgaataaaatagtggaagttctgggtattccacctgctc

SEQ ID NO: 461072 - DNA, 120 bp, Artificial Sequence
  ENSG00000157540_11 (sequence is synthesized)
atattcttgaccaagcaccaaaagcaagaaagttctttgagaagttgccagatggcacttggaacttaaagaagaccaaagatggaaaacgggagtacaaaccaccaggaacccgtaaac

SEQ ID NO: 461073 - DNA, 120 bp, Artificial Sequence
  ENSG00000157540_12 (sequence is synthesized)
tcataacattcttggagtggaaacaggaggacctggtgggcgacgtgctggggagtcaggtcatacggtcgctgactacttgaagttcaaagacctcattttaaggatgcttgattatga

SEQ ID NO: 461074 - DNA, 120 bp, Artificial Sequence
  ENSG00000157540_13 (sequence is synthesized)
ccccaaaactcgaattcaaccttattatgctctgcagcacagtttcttcaagaaaacagctgatgaaggtacaaatacaagtaatagtgtatctacaagccccgccatggagcagtctca

SEQ ID NO: 461075 - DNA, 120 bp, Artificial Sequence
  ENSG00000157540_14 (sequence is synthesized)
gtcttcgggcaccacctccagtacatcgtcaagctcaggtggctcatcggggacaagcaacagtgggagagcccggtcggatccgacgcaccagcatcggcacagtggtgggcacttcac

SEQ ID NO: 461076 - DNA, 120 bp, Artificial Sequence
  ENSG00000157540_15 (sequence is synthesized)
agctgccgtgcaggccatggactgcgagacacacagtccccaggtgcgtcagcaatttcctgctcctcttggttggtcaggcactgaagctcctacacaggtcactgttgaaactcatcc

SEQ ID NO: 461077 - DNA, 120 bp, Artificial Sequence
  ENSG00000157540_16 (sequence is synthesized)
tgttcaagaaacaacctttcatgtagcccctcaacagaatgcattgcatcatcaccatggtaacagttcccatcaccatcaccaccaccaccaccatcaccaccaccatggacaacaagc

SEQ ID NO: 461078 - DNA, 120 bp, Artificial Sequence
  ENSG00000157540_17 (sequence is synthesized)
cttgggtaaccggaccaggccaagggtctacaattctccaacgaatagctcctctacccaagattctatggaggttggccacagtcaccactccatgacatccctgtcttcctcaacgac

SEQ ID NO: 461079 - DNA, 120 bp, Artificial Sequence
  ENSG00000157540_18 (sequence is synthesized)
ttcttcctcgacatcttcctcctctactggtaaccaaggcaatcaggcctaccagaatcgcccagtggctgctaataccttggactttggacagaatggagctatggacgttaatttgac

SEQ ID NO: 461080 - DNA, 120 bp, Artificial Sequence
  ENSG00000157540_19 (sequence is synthesized)
cgtctactccaatccccgccaagagactggcatagctggacatccaacataccaattttctgctaatacaggtcctgcacattacatgactgaaggacatctgacaatgaggcaaggggc

SEQ ID NO: 461081 - DNA, 120 bp, Artificial Sequence
  ENSG00000157540_20 (sequence is synthesized)
tgatagagaagagtcccccatgacaggagtttgtgtgcaacagagtcctgtagctagctcgtgactacattgaaacttgagtttgtttcttgtgtgtttttatagaagtggtgttttttt

SEQ ID NO: 461082 - DNA, 120 bp, Artificial Sequence
  ENSG00000157540_21 (sequence is synthesized)
tccaaaaacaaagtgcaaagctgcttgaatcaggaggagattaacacactgaaccgctacaagagggcaaagctgattttttttttaacttgaaaagattgcaaagggacattgaagtgt

SEQ ID NO: 461083 - DNA, 120 bp, Artificial Sequence
  ENSG00000157540_22 (sequence is synthesized)
ttaaaagagccatgtccaaacccatcttcatggatagctcagaggtatcctctttttgctcccccattttaacttgccacatcccagtcacagtggggtttttttgtctttctattcagc

SEQ ID NO: 461084 - DNA, 120 bp, Artificial Sequence
  ENSG00000157540_23 (sequence is synthesized)
aaaagttaatattcagatgttggtcttggtcatttgccaactaattttaaagtaaaaggcactgcacataatttgcataaagggccccatgagggtgttttttttttttctttttgtccc

SEQ ID NO: 461085 - DNA, 120 bp, Artificial Sequence
  ENSG00000157540_24 (sequence is synthesized)
aaaaataactcatattgtctctgaggttcttttccagtgaagtgtttagtattgctgctatttggagtacaaagttggagcttttaaagaacctgggagttcaaaagtataaggagaaat

SEQ ID NO: 461086 - DNA, 120 bp, Artificial Sequence
  ENSG00000157540_25 (sequence is synthesized)
aaatgaaaagcagaaatattttgaggcaataagtatagactcaaatctatattatgacccacttgtagcaccacttggaattctaccaataagagatttatttgggcaaactataatggt

SEQ ID NO: 461087 - DNA, 120 bp, Artificial Sequence
  ENSG00000157540_26 (sequence is synthesized)
tgttggaaattgcaaatcttagtgtgaattattttagtccagttggtttctttctttctcttacctgaaatgaactatactgaggcaataggagctttgtatagtaatttaggagtgtaa

SEQ ID NO: 461088 - DNA, 120 bp, Artificial Sequence
  ENSG00000157540_27 (sequence is synthesized)
aacaacttagggaaaaggattattaagcaggatgattgggatgacatcatgtgaaatttaggaattggaggcattgggaattgagagggtgctaacaaaggaaaacagcttattttagaa

SEQ ID NO: 461089 - DNA, 120 bp, Artificial Sequence
  ENSG00000157540_28 (sequence is synthesized)
tttgtctggaggatgtagaattgaagaagttttggtatttcttctgcagcggccccagtgcccttgaccaggaacatctcttggagtcagtagttttcatgaggctgacctaggaacttg

SEQ ID NO: 461090 - DNA, 120 bp, Artificial Sequence
  ENSG00000157540_29 (sequence is synthesized)
gccaacatatgcaacattgttctatttaaaatattccttgaattaaattcgatagtatcaatttaaaacataaagttttcactcaactcctttagaagttagattttagcttgtacttgt

SEQ ID NO: 461091 - DNA, 120 bp, Artificial Sequence
  ENSG00000157540_30 (sequence is synthesized)
ctttacctcttctgctgattatcagttgacaacactgagattactttcattttcctgtaagtcattatgaatttttctggtcaaccatgagttatcagtggaagcaataagtaggaagta

SEQ ID NO: 461092 - DNA, 120 bp, Artificial Sequence
  ENSG00000157540_31 (sequence is synthesized)
ctgtaaaagaattacaataaaataagagaaaccacttggagagcaagagggcttgtggacttgggggagcggttgtgagaaatgtctcagaacttaatttacaaataacattggtagatt

SEQ ID NO: 461093 - DNA, 120 bp, Artificial Sequence
  ENSG00000157540_32 (sequence is synthesized)
gacatgttgtctttcctataaagtaactttacctctgtcttaatagtaaactactatgaaagtgaattcgtgttcctcttgatttgtgaactgatgaaaattacaaaatgtggagttttt

SEQ ID NO: 461094 - DNA, 120 bp, Artificial Sequence
  ENSG00000157540_33 (sequence is synthesized)
tccccagataaagtaaatggtggaatattcaggtttatttgatacctagaaaatacctgaaattttccgtggtaataggcacattttgaaactgttttttttttctctgacaattgaata

SEQ ID NO: 461095 - DNA, 120 bp, Artificial Sequence
  ENSG00000157540_34 (sequence is synthesized)
ttatatatagttgattttgattattgaagactaaggaaaatttaagtttgaatgttagaaaatgaattttgcaaatttgaagtaattttattctttatgttttgggattgtagttatgtt

SEQ ID NO: 461096 - DNA, 120 bp, Artificial Sequence
  ENSG00000157540_35 (sequence is synthesized)
ggtgggaaatttgggtttttaagtcctctaaacacacttgggcacggaaatgcagtactgtaaggaagagggacctccagcttccacaaacaccatcttcagctgtatgaaagggacggt

SEQ ID NO: 461097 - DNA, 120 bp, Artificial Sequence
  ENSG00000157540_36 (sequence is synthesized)
tgtggtgaagtttgtcaggcacagtaagcatgctgagtggcggggatcagaactctcctatctgaacctactgaggagcaaagcagcaattacatgggatcctgtggctctcccgttgca

SEQ ID NO: 461098 - DNA, 120 bp, Artificial Sequence
  ENSG00000157540_37 (sequence is synthesized)
gaggccacaggaagataggatggaacgtgactggtctcctaaccaaggtgcactgagaagcaatcaacgggtcggtcgtggccagtcctggggaggtctgagtggtggtctttgggataa

SEQ ID NO: 461099 - DNA, 120 bp, Artificial Sequence
  ENSG00000157540_38 (sequence is synthesized)
cctttggccttatggatttggactcgaaattagaagagcctaccatttcagatgcaatcacttttggacatgcttttgcagacagtccttaatgctgaaaacacagagaatgggtaattc

SEQ ID NO: 461100 - DNA, 120 bp, Artificial Sequence
  ENSG00000157540_39 (sequence is synthesized)
aagaggcctttcttttaaaatagacttttgtgacccactaattgtaaggtattgcaaggtcactttgcgtgtgtcataaagttgacttccttattggttgaaggtcacagaagtagtggt

SEQ ID NO: 461101 - DNA, 120 bp, Artificial Sequence
  ENSG00000157540_40 (sequence is synthesized)
ttgctttgatggaaatagctacagctgtgtcccttcctgctttttactttttcttttgctttttctcggcacgtggtatctccaccatttcttctgcacaaagatgtcttctgttcatcc

SEQ ID NO: 461102 - DNA, 120 bp, Artificial Sequence
  ENSG00000157540_41 (sequence is synthesized)
tgaacatttttaaaaaatgcagaattttatgtgactgcttttttgcctcacaattatgctgtgaattttacaaaaatttattttcttttttgataatttattgtaccaaagctgttttta

SEQ ID NO: 461103 - DNA, 120 bp, Artificial Sequence
  ENSG00000157540_42 (sequence is synthesized)
tagcacatagatgtctgtaaccaataatgtagcagttctgcactttgacacaaggtgtaactagaccatttttaaatgtcagttgaaaattatggctgtactattgcttaaacaaaactg

SEQ ID NO: 461104 - DNA, 120 bp, Artificial Sequence
  ENSG00000157540_43 (sequence is synthesized)
gaactgttgttgaatccatagccaatacatttacagcaatctgtgtactgaacatagtagattgacatctaattcaagattacaacatctgttacattctaagtgtgttcaggcttctga

SEQ ID NO: 461105 - DNA, 120 bp, Artificial Sequence
  ENSG00000157540_44 (sequence is synthesized)
aggtaaagggacactggatccagaagctatggaaccagcagttgattcttgtattcctgattaacctacttgtaaacttgaaagcaagaccttgattgcaccaacaggtccagagtatga

SEQ ID NO: 461106 - DNA, 120 bp, Artificial Sequence
  ENSG00000157540_45 (sequence is synthesized)
gtgcaagcaaagcagaactctcatgcgtgacctgagcagacaggctggtatttaacaggtgcctcgtgttgagattacgctgccttaatgtaacacagtctggcagttgctaaatttgtg

SEQ ID NO: 461107 - DNA, 120 bp, Artificial Sequence
  ENSG00000157540_46 (sequence is synthesized)
ttcccattttaaattgaccaattttggggtgtgacacttttgagcggttgaattgggagaatgaagataagtaatttacctgtccaggatcaaaagaagcctagaaaagaagcagtaatc

SEQ ID NO: 461108 - DNA, 120 bp, Artificial Sequence
  ENSG00000157540_47 (sequence is synthesized)
tacctctgccgataacctgtttaagatgactcagcagaacaccgcgtttcattctattggtcaattccatgtggctgactaggtcaattttttttctgaacaaaagcaggtttttatatg

SEQ ID NO: 461109 - DNA, 120 bp, Artificial Sequence
  ENSG00000157540_48 (sequence is synthesized)
taaacagtgagaaaagaaaggctaaacactatgtaaatgtgaatggaaacttggaaatactcgtttttataaactacaaaaactttttgttgtttatcaggaaatccatatttattttgt

SEQ ID NO: 461110 - DNA, 120 bp, Artificial Sequence
  ENSG00000157540_49 (sequence is synthesized)
aattaactgtcaagcctgtggatgatttttttgaacttggtagttcataaaggtttacagtgaataaaaggatatcatcttgagtatagcaatatcaaaaggaattcagtagttactgct

SEQ ID NO: 461111 - DNA, 120 bp, Artificial Sequence
  ENSG00000157540_50 (sequence is synthesized)
gtttaggaatataaggttaagatatcatatgggtcaggtcattttttttttctgtgctggttgccacatcttagcaagcaccaaaaaactaaagcagtttttaaaccgatatttacgtaa

SEQ ID NO: 461112 - DNA, 120 bp, Artificial Sequence
  ENSG00000157540_51 (sequence is synthesized)
agaaaatcataaaatccaatgcttctgcatactgtgttatgttacagtccagttttgtgtgctttactacacagtttggttacaggacttctgtgcattgtaaacataaacagcatggaa

SEQ ID NO: 461113 - DNA, 120 bp, Artificial Sequence
  ENSG00000157540_52 (sequence is synthesized)
aaggttaaatacctgtgttcagattgtaagatctagtccggacttgctgtgtatattgtaacgttaaatgaaaaaagaacccccctttgtattatagtcatgcggtcttatgtatgataa

SEQ ID NO: 461114 - DNA, 120 bp, Artificial Sequence
  ENSG00000157540_53 (sequence is synthesized)
acagttgaataatttgtcctcagactctttactatgcttttttaaaaattaatttaagaaaaatgtaaacatagtaaaaatcttcctatgcaattaaactggtccaggtctggtaggtat

SEQ ID NO: 461115 - DNA, 120 bp, Artificial Sequence
  ENSG00000157540_54 (sequence is synthesized)
agtatcaaagttgagttaaatgtgtaaaaaggaaactatttgagatacattgacataggcatcagcaatctctgaaagtaaaaattggaggtttaacagatcattttgatttttcacatt

SEQ ID NO: 461116 - DNA, 120 bp, Artificial Sequence
  ENSG00000157540_55 (sequence is synthesized)
gatttttttatttgaatgtttacataattttgtgattcaaaatgctcatattttagttggtagcatttcgactggatgtgagggtctgatggttttctctgatatgctttgacgtgcttg

SEQ ID NO: 461117 - DNA, 120 bp, Artificial Sequence
  ENSG00000157540_56 (sequence is synthesized)
gatgaaggaaggaatacgaatactcattcttccttccctaactcctcgtacggggccatatcagaattctagaattcttgccactgtgattcaattgctaacctaaagtcttctcttttt

SEQ ID NO: 461118 - DNA, 120 bp, Artificial Sequence
  ENSG00000157540_57 (sequence is synthesized)
acaaattcacctgcttcagtatatattaaggtggctttcgagaggcaagatgcttatttaaaagttaagcgtgaatctgtaaaattaaggttggttgcgtaaagttgaagttaaccacat

SEQ ID NO: 461119 - DNA, 120 bp, Artificial Sequence
  ENSG00000157540_58 (sequence is synthesized)
gtaagaaaggaaaacttccattagttttcttcttagggtgtgagaattttacctaggcacatggatattgggctgaaaaaaaaaaaccgacatttttatttaaaactacatgtaaaaaat

SEQ ID NO: 461120 - DNA, 120 bp, Artificial Sequence
  ENSG00000157540_59 (sequence is synthesized)
catgaaagattcagtaattatgttaggctcacaagtgaccattgagtttgcccctgtactgcttcccagcttttgtggtgttgaacttttctgttcttccaatagggagatacataatca

SEQ ID NO: 461121 - DNA, 120 bp, Artificial Sequence
  ENSG00000157540_60 (sequence is synthesized)
aaatacacacgaagacgagatagcaggcactcagttctaggccagtttctcagtttcctttgggcctgcctttattttgatagtcgcagaatgcaggttcagatgcgatccggtgcattc

SEQ ID NO: 461122 - DNA, 120 bp, Artificial Sequence
  ENSG00000157540_61 (sequence is synthesized)
tgggtggtatccccatagacagaatacaagttcaagactcatttttatgtccatttttatagtggtagactgtatgtaatagaccagatggttcattccaaatacatgacttggtcttac

SEQ ID NO: 461123 - DNA, 120 bp, Artificial Sequence
  ENSG00000157540_62 (sequence is synthesized)
tgctatatatgaaggaagtttgaaaatgtaatggggacaaaagccgtgcgtgacttcggtatacccagacttcattcagatttcttaaaaatctgctagggatgtctgttgaccagacgt

SEQ ID NO: 461124 - DNA, 120 bp, Artificial Sequence
  ENSG00000157540_63 (sequence is synthesized)
tggaaaacctttggtgtcagggagagtagaggagaagttctgattttcataaccctggtttcttatctaggcctgtttccttgcgtgaaaacatacatcaccaagtaatttgtagtacaa

SEQ ID NO: 461125 - DNA, 120 bp, Artificial Sequence
  ENSG00000157540_64 (sequence is synthesized)
agaacaagagaagaaaccctaagaagatagcttatttgttatcctcccttttaatgactaaccttaatccaaatgaatccactgagaaccagcctgtggatgcctactgggctttcaccc

SEQ ID NO: 461126 - DNA, 120 bp, Artificial Sequence
  ENSG00000157540_65 (sequence is synthesized)
tggaccaggaatttttgacgtatgcctgtgttgaaggcactggatgcttgttttgtggaagacatgttcattgaggtaagtggctcatcgcttggtgtgtttggctctctttggcattat

SEQ ID NO: 461127 - DNA, 120 bp, Artificial Sequence
  ENSG00000157540_66 (sequence is synthesized)
gcatagccaaggtcccagattttggctgctctcagtgggtgttcttgcatcagaactttaaaaaaaataacactaccttaacactgagactgtcaggtatttgtcagtatttatttctaa

SEQ ID NO: 461128 - DNA, 120 bp, Artificial Sequence
  ENSG00000157540_67 (sequence is synthesized)
tttcctactttaaatcttaggagacaaagtgtttctccaactggacgctgatttgaaacacaactagaatgctacaggtctctcttccagtatgcagctgctgtacctgaaaatttttcc

SEQ ID NO: 461129 - DNA, 120 bp, Artificial Sequence
  ENSG00000157540_68 (sequence is synthesized)
ccataatttcccatctttagggtatgtccctgttatcaggtgtggaattaatgtgggtaaatttccatttcagttgaatttcctgtcatccccagcaaaacctgtgaatccttcttcaaa

SEQ ID NO: 461130 - DNA, 120 bp, Artificial Sequence
  ENSG00000157540_69 (sequence is synthesized)
gcatagaggaggcagagacaagtcttaaaccggcttcccttcgcttttaccaggtagcctggttcagtcccagctgggtcctgaaggagcacagtactagagcctgagtcatgttgacta

SEQ ID NO: 461131 - DNA, 120 bp, Artificial Sequence
  ENSG00000157540_70 (sequence is synthesized)
ttaataaagtgcattaagtttgggtcaggcaaagtggtggcaaaagttcatgatgcaggacagaggaaacaagtggacaagacaagtggagcccagctctgttcgcatgggaggccgggc

SEQ ID NO: 461132 - DNA, 120 bp, Artificial Sequence
  ENSG00000157540_71 (sequence is synthesized)
gatgctggcatgggtgtggttggccgagttctcatagctagagaaaggccgtgtaggtataagtgcttaatgtttcatctgtctgaaagaccagctatttgataatcttcccgattaaat

SEQ ID NO: 461133 - DNA, 120 bp, Artificial Sequence
  ENSG00000157540_72 (sequence is synthesized)
ttctaaaattgctactttgggaatttttttctttattcttgtaaagttttgcttccattatatactcattcattagtcagtgtacttgcccctgaattccatatctgaaactgcagtcac

SEQ ID NO: 461134 - DNA, 120 bp, Artificial Sequence
  ENSG00000157540_73 (sequence is synthesized)
ggtgtgtgtggtagttctgcactagggtggccaggaagcagccaagcaggtgtgccgggcagggagttgttaatgaacacccaggcaagaggacgggcctgagcctgagtgtggccagca

SEQ ID NO: 461135 - DNA, 120 bp, Artificial Sequence
  ENSG00000157540_74 (sequence is synthesized)
gaaagtgttgagttgcttaaaagagaccctgggaggatgaatttggaatcatcatccactcactgttggacagaaagactgcagagaagggcactgctggggtggggtttgttaactccc

SEQ ID NO: 461136 - DNA, 120 bp, Artificial Sequence
  ENSG00000157540_75 (sequence is synthesized)
tctgaaatgaaagaaaatacctctagtggcatgaaacggctaagttttttttaatgttacttctttaattttagagacggtgtctggctttgtcacgcaagctggagtttggtggtgtga

SEQ ID NO: 461137 - DNA, 85 bp, Artificial Sequence
  ENSG00000157540_76 (sequence is synthesized)
ctgtgcacaccaccatgcctggctgtttttaatacggggttttgctgagttgctcaggcgctcctcaaactgctggcctcaagtg

SEQ ID NO: 461138 - DNA, 120 bp, Artificial Sequence
  ENSG00000157540_77 (sequence is synthesized)
tgagttgctcaggcgctcctcaaactgctggcctcaagtgatcctccagcctgggcctctcaaacataaataggctgggcgtggtggctcacgtctgtaaagatttaaagcggaaaagcg

SEQ ID NO: 461139 - DNA, 120 bp, Artificial Sequence
  ENSG00000157540_78 (sequence is synthesized)
gaatgcagtgaaatagcatgagaaagagcgtttttatgtacatcacagacaagccttgttctgctgaagaggtgatgccacgaggtggggaggagctcacttcaggcaccactcccactt

SEQ ID NO: 461140 - DNA, 120 bp, Artificial Sequence
  ENSG00000157540_79 (sequence is synthesized)
ccattgcccgcaaatccaggaaagaaatgactaatgaactctagtgatcgcaaactgctcaatcggtactcatcaatttaaaatgactgtccagccttgctgcacactaaactcatctgt

SEQ ID NO: 461141 - DNA, 120 bp, Artificial Sequence
  ENSG00000157540_80 (sequence is synthesized)
agaactttataaaaccacggatgaccatcacactagcaggattttagattcagagttggggtggggcctggagctctgttttctgaaactttgcgggccattctgaacctgcagccaggc

SEQ ID NO: 461142 - DNA, 120 bp, Artificial Sequence
  ENSG00000157540_81 (sequence is synthesized)
gaaactttgcgggccattctgaacctgcagccaggcaggactctggcaagaagaggcgtgtggctaatatgacggaagtctgaatccaaggactttttttttttttttttttggagacag

SEQ ID NO: 461143 - DNA, 83 bp, Artificial Sequence
  ENSG00000157540_82 (sequence is synthesized)
gctttgtctcccaggttggtttcccagattcaagcgattctcgtgcctcagcctttcaagtagctgggattacaggtgcacac

SEQ ID NO: 461144 - DNA, 89 bp, Artificial Sequence
  ENSG00000157540_83 (sequence is synthesized)
gtgcacaccaccacacccagctaatagtatttttgatagagagggggtttcgcattcaagctatccacctgcctcggcctcccaaagtg

SEQ ID NO: 461145 - DNA, 120 bp, Artificial Sequence
  ENSG00000157540_84 (sequence is synthesized)
acatcttgaaatggagtttgattaccaaagtttacatagagtaatggataattaaaattttcaatttatggtgcattacaaaatgttataaacaagcctccgggaaaggcagaaattgcc

SEQ ID NO: 461146 - DNA, 120 bp, Artificial Sequence
  ENSG00000157540_85 (sequence is synthesized)
agatgtaagtatataaaacttacacagtttgttcctttttgttgtcttcccttgtggagatgggtcagtgtaacatcctattcattaatagctctcagatgtcccatgagaatggcacat

SEQ ID NO: 461147 - DNA, 120 bp, Artificial Sequence
  ENSG00000157540_86 (sequence is synthesized)
gttatttcccaacagtgggaatggaattagttcctttatatctcagtctcatctggtcttgtaagccggtgaagggtttcccagggcaccagccaccagctctgtatagtagttacagtt

SEQ ID NO: 461148 - DNA, 120 bp, Artificial Sequence
  ENSG00000157540_87 (sequence is synthesized)
tccctctctagaatcccaaagaggttcagatcccactgctcctctcattggcttcgtgaccctgggtacgctgctcaacttgcgcaaggattactgtccgctttgtacaatggagatacc

SEQ ID NO: 461149 - DNA, 120 bp, Artificial Sequence
  ENSG00000157540_88 (sequence is synthesized)
tatagtgtccacttaggagatgctgtgcatgcctcagtgaggtaatgtccgcagaaagcacaatgcctagtatgtagaaagtgtccgataaatataatatgcggctaaacagcggagtcc

SEQ ID NO: 461150 - DNA, 120 bp, Artificial Sequence
  ENSG00000157540_89 (sequence is synthesized)
acagcctgaatggaacttctttttctacgtaaatacagcaaacaatgcagggaaatgaggtggacagtgttctccgtggagggctaaacagcattgctttccagctgacttttatttttg

SEQ ID NO: 461151 - DNA, 120 bp, Artificial Sequence
  ENSG00000157540_90 (sequence is synthesized)
gagtctgggactaggtgttaacattcctttactagttggttttgcataccgcacagtccctgcatctatttaagagttttgaggtttgttgtgggaagtttttttttttttttttttttt

SEQ ID NO: 461152 - DNA, 120 bp, Artificial Sequence
  ENSG00000157540_91 (sequence is synthesized)
ccaaagtgctgggattacaggtgtgagggagtttttcggtagtttgctttgccttgataaactatatgatatttaaatgttttataaggatgggttttcagtagaatttctctgtacaac

SEQ ID NO: 461153 - DNA, 120 bp, Artificial Sequence
  ENSG00000157540_92 (sequence is synthesized)
caacctcagggagactgcctggaggaataactgtggtaagggtctgtttttgaacaggcatggtcattagacccttgtgatcacgcatccaggggccagtccccaccctttgctcccact

SEQ ID NO: 461154 - DNA, 120 bp, Artificial Sequence
  ENSG00000157540_93 (sequence is synthesized)
ccaaggaaagtctgttacatttttagccttcagaggtttgatgtagataggaagagatgagggtgacagaaatcagctcttaagtttataaataaaacagggatattatcggggaagctt

SEQ ID NO: 461155 - DNA, 120 bp, Artificial Sequence
  ENSG00000157540_94 (sequence is synthesized)
ttgaaatgtaataggttgtaacccacattttgaaagcagtaaggaaataattgctgcttttttcttcttctttattctgttgactttgttgataatattaggtgactacatcgagcctgg

SEQ ID NO: 461156 - DNA, 120 bp, Artificial Sequence
  ENSG00000157540_95 (sequence is synthesized)
gttctctcagtattagcctgttattcctaaagtatcatcctctccttgtatcaaatataaggacaaaaatgtcttaggataaaagtctgtttgtttgcattagactatacatgatttgca

SEQ ID NO: 461157 - DNA, 120 bp, Artificial Sequence
  ENSG00000157540_96 (sequence is synthesized)
ttacaatgggccgtggatttggatggatgatgaagctgaaacaagggacctaatcatgggatttaactgttcacttcaggtagataagatatttctgggagaagtaaattggatgagctt

SEQ ID NO: 461158 - DNA, 120 bp, Artificial Sequence
  ENSG00000157540_97 (sequence is synthesized)
ttgtgcttcccagcagctccaggtcttgtccctggccagtctgggcagctctgcgctcagaggcctttggcacgatgggtcctcccagcaggggctccagcgctcaccgctgggtgagat

SEQ ID NO: 461159 - DNA, 120 bp, Artificial Sequence
  ENSG00000157540_98 (sequence is synthesized)
ctacagggctcagtgcgcttggagtcctggattcctccaggactgctactgtattccaattgagtggtggtttgctcttcacagagcgcttacatgggattcttaccttctgactggagt

SEQ ID NO: 461160 - DNA, 120 bp, Artificial Sequence
  ENSG00000157540_99 (sequence is synthesized)
gtcaccctcgcccaggaatgtgggtgctggagagacgggctacctctttctgtaggcggatgtttctgaaggcatctcccactgattatgtaatgacagctacttaacatcttctgtagt

SEQ ID NO: 461161 - DNA, 120 bp, Artificial Sequence
  ENSG00000157540_100 (sequence is synthesized)
cttgaagaattcagatgaggagcttgtccagggagggctcccacgtgcgtattcactaattgtggtctttctccccagctcggttttgtttgcgtattagagttctgaccatcttcacta

SEQ ID NO: 461162 - DNA, 120 bp, Artificial Sequence
  ENSG00000157540_101 (sequence is synthesized)
gaagtgggggcggctagcagtgactagatgcaagaagcaaaacggtaaatttccttttactggcaaaattaaaacagtgaacttgaaatatctcccctactccctgcagagacactctga

SEQ ID NO: 461163 - DNA, 120 bp, Artificial Sequence
  ENSG00000157540_102 (sequence is synthesized)
atcaaagaaaacaatcagtactaaccctggaaacaatttaaaaatgaacaaaaagtcctaccctgaagaagaagaatgtcttaccagcaaacggtcttgggacagctggtgtgagaacta

SEQ ID NO: 461164 - DNA, 120 bp, Artificial Sequence
  ENSG00000157540_103 (sequence is synthesized)
tataagagaaatcaacaaatattaattgaacaccagtcatgtgcaaagcacttagctaggtcttagggatgaggacaaaaagcatgtcacattttgttgttataagtgggaaagataagt

SEQ ID NO: 461165 - DNA, 120 bp, Artificial Sequence
  ENSG00000157540_104 (sequence is synthesized)
aattacaagtaagcccagtgtttttaaaagagtgtgaacagagaccttattctaatccagagaggctgtgaagtgctgtattcccaaggaactgaagttctagctgatacctaatggagg

SEQ ID NO: 461166 - DNA, 120 bp, Artificial Sequence
  ENSG00000157540_105 (sequence is synthesized)
aatgggtgttatcctggtgggaatgccctagaatctaggagaagacaacaggccattcgaaggtgaggaggcttgccagcatcagtttataagtggacagagtcgagagctatttaggaa

SEQ ID NO: 461167 - DNA, 120 bp, Artificial Sequence
  ENSG00000157540_106 (sequence is synthesized)
ggagagctgacagacctcggggactgaatggatgctgggagtaggggtgaaaagagaggagtcaggcttcctcccagagtttgaggactttgagtgctaagggcttgtaggagaacgttg

SEQ ID NO: 461168 - DNA, 120 bp, Artificial Sequence
  ENSG00000157540_107 (sequence is synthesized)
tggagatgtccggtaggcatctgaaagaatggatggaggaggggaaagtcgggcctgggaatggccaatttctggtcattctcatataggcaactgatggcgaaggggatgacctagagg

SEQ ID NO: 461169 - DNA, 120 bp, Artificial Sequence
  ENSG00000157540_108 (sequence is synthesized)
gagttgggaggacagcctaggatacgtaaataagagaatcttgtatgttctaaaaattaacatcattgcagcttcctcagccctaggatggtttttagatctatcaagggatagaagatt

SEQ ID NO: 461170 - DNA, 120 bp, Artificial Sequence
  ENSG00000157540_109 (sequence is synthesized)
gtccagccccttgctgcccagtgtagtcagtgggctgacgacattagcatcacctgggtgcttgctagcaatgcaaaatctcaggccccagcccagaccactggatgagaatctgcattt

SEQ ID NO: 461171 - DNA, 120 bp, Artificial Sequence
  ENSG00000157540_110 (sequence is synthesized)
gaacaaggtccccaggtcattcatgcacattcaaagtcagagacactgccccaacacctcactttagagtgagaaaacttaacaggtttaagcaacttgcagaagatgacacaactgacc

SEQ ID NO: 461172 - DNA, 120 bp, Artificial Sequence
  ENSG00000157540_111 (sequence is synthesized)
agcgacagtctgtcttctagtcaggcctctttccagttctccacgctgaccttgactttcgagatcacataccaagaccttcagctggatggtccctgtagctgctgtgaccactagaag

SEQ ID NO: 461173 - DNA, 120 bp, Artificial Sequence
  ENSG00000157540_112 (sequence is synthesized)
cagggttaggggcgagactaatttaatatcaattaatgtagacactaggcttagggctagggaaaatgtagtgaaggatgcctgtattgtcctaatgaaccacactggtgcctacaaaat

SEQ ID NO: 461174 - DNA, 120 bp, Artificial Sequence
  ENSG00000157540_113 (sequence is synthesized)
ttttattttggcaaaaccgtccatgaatttggagatgttgaacaggtttctctccgacaatcgtctcgtttaattgtgaaactagaatcacttccaggaagctctgaagaatcaagtctg

SEQ ID NO: 461175 - DNA, 120 bp, Artificial Sequence
  ENSG00000157540_114 (sequence is synthesized)
agtgatgcaatgctgcttcctccttccttctcaaaagcctgctctttgcccatttctctgttcccaaggtcattttctccccttcttgtttccaggatccacagttcctgctctgcttcc

SEQ ID NO: 461176 - DNA, 120 bp, Artificial Sequence
  ENSG00000157540_115 (sequence is synthesized)
gctttccccactgctggttcaggctgtctgcagcagcagcagctccagggtgctgggacactgctgggtgacgctccacagtgtgtgcttccccatgtggcttccacagtcccctcttgc

SEQ ID NO: 461177 - DNA, 120 bp, Artificial Sequence
  ENSG00000157540_116 (sequence is synthesized)
ttctcccacatgttagtcttcatagattagtcttcatcaattcttagtattattttttagggatagggtcttgctgtgttgcccaggctgcagtgcagtggtatgatctctgcttactgc

SEQ ID NO: 461178 - DNA, 85 bp, Artificial Sequence
  ENSG00000157540_117 (sequence is synthesized)
tgtgcctggctaaattattttatattttgtagagttgaggtcgcacttttttgcccatgctggtcttgaacccctgggctcaagc

SEQ ID NO: 461179 - DNA, 120 bp, Artificial Sequence
  ENSG00000157540_118 (sequence is synthesized)
aagcgatccttctgcctcagcctcccattacgggcaggagccactgcacacagctgatgaattttcgtttaggcccctttctttgtgagagggggccccaggattatgccccgggattaa

SEQ ID NO: 461180 - DNA, 120 bp, Artificial Sequence
  ENSG00000157540_119 (sequence is synthesized)
gtgagagggggccccaggattatgccccgggattaaaagaagctgggaggctctccaggaccctgaacaaaggtggaagtagggttgtaaatggaagaaaaaataagagagattcattat

SEQ ID NO: 461181 - DNA, 120 bp, Artificial Sequence
  ENSG00000157540_120 (sequence is synthesized)
gttctaatgactatgagggaagctttagtttttgtctccctgaagcatcaacctgctttcctgctgctgttatcacatccttccagggctatcggctgttcaggaacaggagagctctgg

SEQ ID NO: 461182 - DNA, 120 bp, Artificial Sequence
  ENSG00000157540_121 (sequence is synthesized)
aagagcagggacgactttggcttctgtttcctgcccattgcagattaggcatcagcaaggtaccctcctgtttttgtatggctcaccaaactaagggtgattttcacattttacatggct

SEQ ID NO: 461183 - DNA, 120 bp, Artificial Sequence
  ENSG00000157540_122 (sequence is synthesized)
gaaaaacatcaaatgatatttcaggacatagggaaattatatgacatttgaatttcagtgtccataaatgaagttttattggaacataaccacattcatttgcaagttgtccacggccac

SEQ ID NO: 461184 - DNA, 120 bp, Artificial Sequence
  ENSG00000157540_123 (sequence is synthesized)
tttggtgctactgtggcagaattgagtagttgctgcagagaccgtatgatgagaatatgtggcattctcatcattttgccctgccgctctgtgcaatgtaaattgcagtgacacagttat

SEQ ID NO: 461185 - DNA, 120 bp, Artificial Sequence
  ENSG00000157540_124 (sequence is synthesized)
aactcagcagcattttgaatgccacttgtattcccatgctacaacattttattttttattaccaatatatacaagaaaagtggatttcaaatatcattgtgcttttaaggtacaatggag

SEQ ID NO: 461186 - DNA, 120 bp, Artificial Sequence
  ENSG00000157540_125 (sequence is synthesized)
ttgtgcttttaaggtacaatggagtatgaattgttactgaattaggcagcaaagtgcaatgacatggtagctgtcctaaggaacacaatacaaccaggtgcagtggctcatgcctgtaat

SEQ ID NO: 461187 - DNA, 120 bp, Artificial Sequence
  ENSG00000157540_126 (sequence is synthesized)
gggagaatcacttgaacccaggatttggagaccagcttgggtggtatagtgagaccccccatctccacaaaaagtaaaaaaaaaccaaaatacatgttgttacttcccatcttagcactc

SEQ ID NO: 461188 - DNA, 120 bp, Artificial Sequence
  ENSG00000157540_127 (sequence is synthesized)
atcaagatatttctaattcacaagaaagcaatggtcagaaaaattagaaaatttaaaattgaatatctcatcacagaatttattcacaaaaataaaaaatgaaaatgaagctacaaccaa

SEQ ID NO: 461189 - DNA, 120 bp, Artificial Sequence
  ENSG00000157540_128 (sequence is synthesized)
agtaagtttcagatggctcatttgttagccaagcaaggaaagtcacttatggtgaattaattaaatcatgcttgattactgcagctgaagaaacatgctcagagaaagtaaacttgttta

SEQ ID NO: 461190 - DNA, 120 bp, Artificial Sequence
  ENSG00000157540_129 (sequence is synthesized)
ttggcctttccacgacaacagttgctcaaagagttgacattaggaatgacatcagtagtcgactaaaaaggcaaatggttttgagtggtttcccctgactctcatgacaggggtcaccat

SEQ ID NO: 461191 - DNA, 120 bp, Artificial Sequence
  ENSG00000157540_130 (sequence is synthesized)
atgttatgcacactgctccgctattgctctttatttgaggagccagtaccaagttggaagtaactgaagaattggcctctatcaatagtcttatgtggaacaactactggcaaaagtatt

SEQ ID NO: 461192 - DNA, 85 bp, Artificial Sequence
  ENSG00000157540_131 (sequence is synthesized)
atcaatagtcttatgtggaacaactactggcaaaagtattttcaaagctgagaaaactggtcaggtgtggcggctcatgcctata

SEQ ID NO: 461193 - DNA, 120 bp, Artificial Sequence
  ENSG00000157540_132 (sequence is synthesized)
tactccagcctggatgacagagtgagaacattgtctcaaaacaaaaagttgagaaaacgaattcagtacaccctgaagtggaatctgctaagatgtgttatgactgttggtagtggaaat

SEQ ID NO: 461194 - DNA, 120 bp, Artificial Sequence
  ENSG00000157540_133 (sequence is synthesized)
ctgaagtggaatctgctaagatgtgttatgactgttggtagtggaaatatatgtgtgtattagtccattttcatactgctataaagaaaagcctgagactgggtaatttataaagaaaaa

SEQ ID NO: 461195 - DNA, 120 bp, Artificial Sequence
  ENSG00000157540_134 (sequence is synthesized)
tttaatggactcacagtcccgcatggttggggaggcctcacaatcgttgtggaaggtaaaggagaagccaaggcaagtcttaggtggcggcaagcaagagagtgtgtgcaggggaactgc

SEQ ID NO: 461196 - DNA, 90 bp, Artificial Sequence
  ENSG00000157540_135 (sequence is synthesized)
aatcctgcctacccatgacacgtggggattatgggggctacaattcaatgagatttgggtggggacacagctaactcatatcagtgtgga

SEQ ID NO: 461197 - DNA, 120 bp, Artificial Sequence
  ENSG00000157540_136 (sequence is synthesized)
agatttgggtggggacacagctaactcatatcagtgtggaatagaaaatggctcagttggacaacttacaaagcttgtaataatataaggtgttaaagcctatagattattcattgtatt

SEQ ID NO: 461198 - DNA, 120 bp, Artificial Sequence
  ENSG00000157540_137 (sequence is synthesized)
atttaagtcaacagatactttgtgagaaatatttgaatctatcatgcattattgaaccagtattgtcaatagtgaacttcctttagctcttgtggacttcactatcaacagctctcatga

SEQ ID NO: 461199 - DNA, 120 bp, Artificial Sequence
  ENSG00000157540_138 (sequence is synthesized)
atttttgtcagaaatattagctgaatatcccgacatggcctgtaatacagcagttcaatggtttagtagtggtaaagtttcatttaagttttgagctcaggacaaagattgaaatttttc

SEQ ID NO: 461200 - DNA, 120 bp, Artificial Sequence
  ENSG00000157540_139 (sequence is synthesized)
tgaatgagaactgccccgaaccaccgttactaaacactgaatagttttggaaattcacttttgctgcagacttgatagtgtttcttaaggaattcagcctaaaccacaagataaaaacag

SEQ ID NO: 461201 - DNA, 120 bp, Artificial Sequence
  ENSG00000157540_140 (sequence is synthesized)
tgtttatgtgaaactcctactgtgttaagtgatttcaagaagaactattgtttgaatcacaactaatgttactgctttaagctcttcccatgttgttaaaagttaaaaaaagaagagctc

SEQ ID NO: 461202 - DNA, 120 bp, Artificial Sequence
  ENSG00000157540_141 (sequence is synthesized)
cattcccacacacatttgccacagatacattatctgagcccaaactacagtttgagcagtgtgttagggacctcaatgcaaacccaaaagaaatttttatatttcagaatccattgatct

SEQ ID NO: 461203 - DNA, 120 bp, Artificial Sequence
  ENSG00000157540_142 (sequence is synthesized)
gcatttgagaagtgattaatgtgttgaaaggcaactatctaaagaaaaatttaatagagtctaatagaatcttataaaaatgtataaatgtgttttatgtaataaatatgctaagctaaa

SEQ ID NO: 461204 - DNA, 120 bp, Artificial Sequence
  ENSG00000157540_143 (sequence is synthesized)
gaccgggtcggtccgtcgccattttgttggttggtttttttttaaaccctttcgcttcccgcccgaataataataaaaagccccattggagtgaggcgggggtggcggcggcaaccgcgg

SEQ ID NO: 461205 - DNA, 120 bp, Artificial Sequence
  ENSG00000157540_144 (sequence is synthesized)
cgggggtatccggggagactgctgctgtcgctgctgctgatcgcggcccaggtcggcctcagagagcggacaccccgagcggggggtgcgggcgccgccgccgccgcttctgctgctgct

SEQ ID NO: 461206 - DNA, 120 bp, Artificial Sequence
  ENSG00000157540_145 (sequence is synthesized)
gttcctgctgctgctgttggtgccgctgccgccgccggcgagcaggcgggaccggtgtgagtgcgagtgtgtgtgcgagggagcgtgtgcgagggcgattgtgcgcgcgagtgtgcgggt

SEQ ID NO: 461207 - DNA, 120 bp, Artificial Sequence
  ENSG00000157540_146 (sequence is synthesized)
gtgtgcgagtgtctgtctgtctgtgcggggactcgggggcgggcggttcgggctctcctggcggaggagccgccgccgccgcccgggccccggcgcttctcgctgcgcaggttcggagcg

SEQ ID NO: 461208 - DNA, 120 bp, Artificial Sequence
  ENSG00000157540_147 (sequence is synthesized)
cgcgccattttgtgagatttacaaaatcctcctcgggaagaagccgccggcagcagccgccgctcggcgcccggcctcgccgacgccgccctctgcgccgggccggccgtgcggccccgc

SEQ ID NO: 461209 - DNA, 120 bp, Artificial Sequence
  ENSG00000157540_148 (sequence is synthesized)
cgcctggaatcggggcccggggactgcggtatttgccggggagggggctgtcgcctccccggccccgggcgccgctggaaccgcgagccgaggagagactgagcaggctgcggcgcggcc

SEQ ID NO: 461210 - DNA, 120 bp, Artificial Sequence
  ENSG00000157540_149 (sequence is synthesized)
gagaggctgccggggcggcgctggctgcggaggccgcggcgggagcgcggcgcgggagcccgaggctgagactcaccggaggaagcggcgcgagcgccccgccatcgtcccgtgttatag

SEQ ID NO: 461211 - DNA, 120 bp, Artificial Sequence
  ENSG00000157540_150 (sequence is synthesized)
atctaaagggcattccgatggagcaggcaggctgcgccccgaaaggtggggagaggttggaagcagatgggcaggcacaggcgagcgtgcactgcctgaaaaagttttcatgatggctcc

SEQ ID NO: 461212 - DNA, 120 bp, Artificial Sequence
  ENSG00000157540_151 (sequence is synthesized)
agcctaatttcccaacgctggtctcgggcgccacaaaacctgggcggcccgaccggagccaggtgccagcctcagggccgccgggcccggcgcagcgtccggaattcctgcgatgtctgg

SEQ ID NO: 461213 - DNA, 120 bp, Artificial Sequence
  ENSG00000157540_152 (sequence is synthesized)
cggcggtggctcctccccgcccccaccacggcctccgccggcattttccggctaggaggcccgccagcccttcgaagaaccggctccacgcgcggacggtcgcggccgccgcgcttcccg

SEQ ID NO: 461214 - DNA, 120 bp, Artificial Sequence
  ENSG00000157540_153 (sequence is synthesized)
ccttcctcaagagtgtacttttaatatttgcaaatagagctcagcaatggatatgcaagtatttggatgaccataattctttaaaggtagtgatactgcatcagtaatataaactcctta

SEQ ID NO: 461215 - DNA, 120 bp, Artificial Sequence
  ENSG00000157540_154 (sequence is synthesized)
cattttactaatgactggtgaattttaatcacttaatagatagtattgcctctttgttatgggccttgtatagtctgtagatgattgttaattacatatgctagaggtatttaccttctt

SEQ ID NO: 461216 - DNA, 120 bp, Artificial Sequence
  ENSG00000157540_155 (sequence is synthesized)
gtccgatagaccacttcaaagagaaaagaattaccatgttcaggtggtgcagtgggagtccactcacttttcaggaggctttggaaagctgggggttgttccctggctttttctcccact

SEQ ID NO: 461217 - DNA, 120 bp, Artificial Sequence
  ENSG00000157540_156 (sequence is synthesized)
tcatgttgtaactatatcagacctctaagcaggcaggcagtcttagtctcttgtatcagtcgcaccaataccaagagttttgggtctttctccttgtgctttatttatttatttatttag

SEQ ID NO: 461218 - DNA, 88 bp, Artificial Sequence
  ENSG00000157540_157 (sequence is synthesized)
tgggtctttctccttgtgctttatttatttatttatttagagacagacttgcacttctcggctcactgcaacttccatttcccaggtt

SEQ ID NO: 461219 - DNA, 120 bp, Artificial Sequence
  ENSG00000157540_158 (sequence is synthesized)
gggagcgcggcgcgggagcccgaggctgagactcaccggaggaagcggcgcgagcgccccgccatcgtcccggctgaagtgcagtggcacgatcataggtggtcactacagtctcagatt

SEQ ID NO: 461220 - DNA, 120 bp, Artificial Sequence
  ENSG00000157540_159 (sequence is synthesized)
gtgagctcgcacgtggttcatttgcttgtgtcacctgccattctcaggtggagcagcactggatgccaggtgcctttagaatgaccgtatcatttaccctagaggttcatgacgttcctg

SEQ ID NO: 461221 - DNA, 120 bp, Artificial Sequence
  ENSG00000157540_160 (sequence is synthesized)
tgatttaaagttactgtgtaataagtggatatatattgaatagaaatagatggcatctcttctacttaggaaggtcagaaaaataattataaaaacatataattgagaattaggtaaatg

SEQ ID NO: 461222 - DNA, 120 bp, Artificial Sequence
  ENSG00000157540_161 (sequence is synthesized)
gcatgagccaccacacccggccactttttatatgttttaacagtcattctgaaatgtttctaacttgtgatttcttctttaacctgtcattagaattttgttacataatttcaaaatatt

SEQ ID NO: 461223 - DNA, 120 bp, Artificial Sequence
  ENSG00000157540_162 (sequence is synthesized)
tgaggattttctagatgtcttattgagttctagtttagtagcagtttggtcacagaacgtgattttagtcctttaaaatcgagacttgttttatggcctagcatctaatgtgtctttgtg

SEQ ID NO: 461224 - DNA, 120 bp, Artificial Sequence
  ENSG00000157540_163 (sequence is synthesized)
aatgttttatgtgtgcttgataagaattgtattttgtgtttgtttggcgtagtggtctccagctatcaatgtagatcaaattgtttgatatttttcttcatatcttttatatctttgtgt

SEQ ID NO: 461225 - DNA, 120 bp, Artificial Sequence
  ENSG00000157540_164 (sequence is synthesized)
gtatttgtgtatattctgtcagtaattgagagaagagtcttcattgataagtttggatttgtcttagactccctttgtaacattgctttatggtttttgaagctttgttaataggtatat

SEQ ID NO: 461226 - DNA, 120 bp, Artificial Sequence
  ENSG00000157540_165 (sequence is synthesized)
gcatgtttgatattgttacgacttattgataaattgacccttttatcatcctgaaatgtccctctttgtctctagtcatgtttgtctttaagtctgctttgtccgatatcactatagtct

SEQ ID NO: 461227 - DNA, 120 bp, Artificial Sequence
  ENSG00000157540_166 (sequence is synthesized)
taccagtgttcttattcttgatattttcatggtgtgtgtgtgtagatatgaaagatatgaagaaaaatatgcaacatgtgtagacacacacacacacacttttacccttttactgtaaac

SEQ ID NO: 461228 - DNA, 120 bp, Artificial Sequence
  ENSG00000157540_167 (sequence is synthesized)
ctgtgcctacctttatatttaaagaattatttttgtgttgtgtgcaacatatgatcaagtcgtttttttaatctagtctgttagtggttaacccattattcagagttttgggtttaagac

SEQ ID NO: 461229 - DNA, 120 bp, Artificial Sequence
  ENSG00000157540_168 (sequence is synthesized)
ttgtcttatttgtgttctgtttgtctttcctgttctttgtttcctattccttctttcctgccttttgcggggaggtttgttgaatactttttggcattttattttatctcttgtactgat

SEQ ID NO: 461230 - DNA, 120 bp, Artificial Sequence
  ENSG00000157540_169 (sequence is synthesized)
ttttttacttattcctctatgtgtcatgtttagtgttccttttataatatgcacgtttaacattagtttaccttcaaataataatatattgcttgttaaacagtgtgataaccatgtgat

SEQ ID NO: 461231 - DNA, 120 bp, Artificial Sequence
  ENSG00000157540_170 (sequence is synthesized)
tctatctacctcttgtgcacttgttgtattacttttgcatgttataaacctcacaacacattgttggctgtttaaataaaaaatagatttaacacaaaaaagaaatttaaaaagacataa

SEQ ID NO: 461232 - DNA, 120 bp, Artificial Sequence
  ENSG00000157540_171 (sequence is synthesized)
aataaggataatagatcttttatatttatccttatatttgctcttttctggtgttattcattcctttttgcaattcctagcttccatctggtattatttcttcagcctcaagaccttcct

SEQ ID NO: 461233 - DNA, 120 bp, Artificial Sequence
  ENSG00000157540_172 (sequence is synthesized)
ttaacttttattttgtaatgaataagctatcccgataaattctctcagcaggtgttgatctgaaaatacttgtttacctttattttttggaagatattttcagtgaatatagaattatag

SEQ ID NO: 461234 - DNA, 120 bp, Artificial Sequence
  ENSG00000157540_173 (sequence is synthesized)
attaacttctttctttcagtgaaagaaaaagatgttacgatatagcttaaagatgtattgactttttttctggattacactgtttcggtagagaagtcagtggttattcttagcattgtt

SEQ ID NO: 461235 - DNA, 120 bp, Artificial Sequence
  ENSG00000157540_174 (sequence is synthesized)
cccctgcatataatattttccccctcttccctctggctgattttaatattttctctttgtttgatttccgcagtttgactatttacctaggtatgattttctttgtattttttctcctgg

SEQ ID NO: 461236 - DNA, 120 bp, Artificial Sequence
  ENSG00000157540_175 (sequence is synthesized)
gagttcactgagtttcttggatctgtgggttgatctctatcatcagtttttgaaaatcctcagatacagtcttgccaaatatttgttctgctttcgtctttcttctagttctccagtgat

SEQ ID NO: 461237 - DNA, 120 bp, Artificial Sequence
  ENSG00000157540_176 (sequence is synthesized)
gtgtatgttacagtgctgaatattatcccagaggtctctgtctggtttattcattctgttttctgtttgtgtttttaatttggataatttctttttctgtcttcttgttcactgatttct

SEQ ID NO: 461238 - DNA, 120 bp, Artificial Sequence
  ENSG00000157540_177 (sequence is synthesized)
ctgtcttcttgttcactgatttcttttttttccttgtgctgagtccagtctgttgttgaatccattaaatggattcatgtgatgttattgttatttttgagacaggttctcactctgtca

SEQ ID NO: 461239 - DNA, 120 bp, Artificial Sequence
  ENSG00000157540_178 (sequence is synthesized)
ctattaaaattttttgtaggaacggggtctggctatgttgccttggctggtcttgaactcctggactcaagcagtcttcccacctcaacctgggtgtagagacatgagcccagcctatat

SEQ ID NO: 461240 - DNA, 120 bp, Artificial Sequence
  ENSG00000157540_179 (sequence is synthesized)
tttttagttctagcatttctattttgttttaaatatagtttttctcttctgaaattctacatctattcatatgttgtccacttttgaactaaattgtttatcataatttatcagaagtaa

SEQ ID NO: 461241 - DNA, 120 bp, Artificial Sequence
  ENSG00000157540_180 (sequence is synthesized)
tttatcataattattttaaagttccagtctgctattttcaacatctgcaccatttatttatgtgtatcttctattgggtttttttctttcatgtgattgtggacgtcatttttaaaaaat

SEQ ID NO: 461242 - DNA, 120 bp, Artificial Sequence
  ENSG00000157540_181 (sequence is synthesized)
gtttgtaatttttaaatgtgtgacaaattttctttgcttaagaacagttaaagatggaagtgagtcatattttccctcagaaagaggcctctcaactctgtcaggcccctcatgtggggc

SEQ ID NO: 461243 - DNA, 120 bp, Artificial Sequence
  ENSG00000157540_182 (sequence is synthesized)
tgagttgatctcttttgtagcttagctgactctgggctttgcttgtttgacttagattctactccccactgttttcatatgttttgagctgggatcaggacattcccttcagcagtgttt

SEQ ID NO: 461244 - DNA, 120 bp, Artificial Sequence
  ENSG00000157540_183 (sequence is synthesized)
gtgtctttagaatcagggaaaatctagtggtctctatacattactgcccagtcagcagccccactcctaactctctgtgcctgggagatcgccttcctcctgctgtactgccccatcctt

SEQ ID NO: 461245 - DNA, 120 bp, Artificial Sequence
  ENSG00000157540_184 (sequence is synthesized)
ctgtctgtccactcctggccgtcagaagttggttcagacttgggctggagtcttctcgctcatctgtggcttacttgcgccttctcccactgcaggtctcttccaggagaggcttttcat

SEQ ID NO: 461246 - DNA, 120 bp, Artificial Sequence
  ENSG00000157540_185 (sequence is synthesized)
tttgtagaattcaggagatttttgttccaactttggatcctcatacagctctctgatgggtctttaaaaggcagtgattttatgacttattagaggaggaacaatcatctcacacatttc

SEQ ID NO: 461247 - DNA, 120 bp, Artificial Sequence
  ENSG00000157540_186 (sequence is synthesized)
tgcattgtaacagaagtcaaagtctggtgatgctattcttaaattcaatatttatagagatcttgagggttatagtattatctgtcaaaaatgagttttcaggaaatctcaacacacgtt

SEQ ID NO: 461248 - DNA, 120 bp, Artificial Sequence
  ENSG00000157540_187 (sequence is synthesized)
agtttattattacatagattttctaaagggaagcatacataattttctctttttctaccatgagcaggtagggttaggccagtgcctttttatgtagaacatccttggtgtcattgccat

SEQ ID NO: 461249 - DNA, 120 bp, Artificial Sequence
  ENSG00000157540_188 (sequence is synthesized)
agctttcttgggctgctgttgctgaaggaagtgtaacaggtgctgcgggtgcacagttaggtaggaaagaggctcccagccagggtgagcaggggcatgcatgttctctgtaaaagatga

SEQ ID NO: 461250 - DNA, 120 bp, Artificial Sequence
  ENSG00000157540_189 (sequence is synthesized)
gagaaaatgcttttagccttgtggacctctgttgcatattttttgtttttggttgcttgtttttacaacctttgaaaacagaaaaaccatttgtagctggagctgtagaaaaccaggctc

SEQ ID NO: 461251 - DNA, 120 bp, Artificial Sequence
  ENSG00000157540_190 (sequence is synthesized)
tggatcaggccatagtttactgacccctgggctaaatgatctttatagccatttttggtctcagaattaatgttgaactgtaactaccatgcatttgggatagtaatgtgtgaaaaggca

SEQ ID NO: 461252 - DNA, 120 bp, Artificial Sequence
  ENSG00000157540_191 (sequence is synthesized)
gaggatttaactatgaagtgtcctttttaataaaggcctcaacatatatatttaaacatatttgaaattcaattatgtgagtgtttacgtattccaccaaatttagagaaagcctttcat

SEQ ID NO: 461253 - DNA, 120 bp, Artificial Sequence
  ENSG00000157540_192 (sequence is synthesized)
tgttatagttttgccgctggactcttccctcccttcccccaccccatcaggatgatatgagacttgaaagaagacgatgcatacaggaactatttctcagcattgtcagctcctggattg

SEQ ID NO: 461254 - DNA, 120 bp, Artificial Sequence
  ENSG00000157540_193 (sequence is synthesized)
atactgcacattggctataccaagtagatgctcactttcgactgagaagagacagagtaactagctcagcaaaaccaaaacgtcacattcagcatctgcaagactaggtgaacagtatcc

SEQ ID NO: 461255 - DNA, 120 bp, Artificial Sequence
  ENSG00000157540_194 (sequence is synthesized)
ttgggctcccaaagtgctgggattacagaatcttctgaatattgaaaacagagaactatactggaagaacatagtgtattaagactcatggagagggagatgtgatactgtgtcactgag

SEQ ID NO: 461256 - DNA, 120 bp, Artificial Sequence
  ENSG00000157540_195 (sequence is synthesized)
tcccttcccccaccccatcaggatgatatgagacttgaaagaagacgatgcatacagccaaatatgaggtgacgtttaagctgctacttgaaagagaagtgggagttaggcagagcagta

SEQ ID NO: 461257 - DNA, 120 bp, Artificial Sequence
  ENSG00000157540_196 (sequence is synthesized)
ggggaatcatgtttggggaagagtgaagagtgtacttgagagagtgtggaggtgccttggaggagctggagcccagaggtgccccatgagaacaacacaggaggctgcaggtggaggagg

SEQ ID NO: 461258 - DNA, 120 bp, Artificial Sequence
  ENSG00000157540_197 (sequence is synthesized)
tgttatagttttgccgctggactcttccctcccttcccccaccccatcaggatgatatgagacttgaaagaagacgatgcatacagaatcttctgaatattgaaaacagagaactatact

SEQ ID NO: 461259 - DNA, 120 bp, Artificial Sequence
  ENSG00000157540_198 (sequence is synthesized)
aacaggcaaacagcgcagtgtgccccaacccacaccaaaactttgagttaatggttcttttctatcaaaatattttgattttattttaaagtggctgattaaaaatttgtttatttctgt

SEQ ID NO: 461260 - DNA, 120 bp, Artificial Sequence
  ENSG00000157540_199 (sequence is synthesized)
tggacagcaagatttatataagtgacttgatctggtagtaatagtctaaatcttggggaatgtgccttccatgtagcataccatgtagaaacaaatgagaatagtgtgtgtgtgtttttt

SEQ ID NO: 461261 - DNA, 120 bp, Artificial Sequence
  ENSG00000157540_200 (sequence is synthesized)
atttgcaacttactggtaccatttgtttgctaataatgatgcatgtttatccatagggtcatctttccagtaactttaaccatttctaatctagctcagaaactagttgtgagctagtat

SEQ ID NO: 461262 - DNA, 120 bp, Artificial Sequence
  ENSG00000157540_201 (sequence is synthesized)
gttcttagtggttgtggaaccatttttggggcatctgcaacaagatctcaggctcctccccagtctcttcatcagcttggcagcattagaagctattagatttacaactacagaaaagag

SEQ ID NO: 461263 - DNA, 120 bp, Artificial Sequence
  ENSG00000157540_202 (sequence is synthesized)
tttatagcagtcttataaggaagatggtagaatccttaagttatggttggtttgtataagaagccccatacccagggtcatagggctctgcagctaagattggaagctgccgtacttctg

SEQ ID NO: 461264 - DNA, 120 bp, Artificial Sequence
  ENSG00000157540_203 (sequence is synthesized)
cctactccaaagtctgtttcattctcacatagtcttccttctgaaaacagaaataggagacagaagaattatgacaatactgaagtctagggccatttgatacatgggcaaaatatcttc

SEQ ID NO: 461265 - DNA, 120 bp, Artificial Sequence
  ENSG00000157540_204 (sequence is synthesized)
tagtacaccttctttcgcagtattttttaatcaaatctaatatgtcagtgattgtaagacaccatcattttatgtaccgtcaaggaaaaaactgttaagtattcatataagatgccatca

SEQ ID NO: 461266 - DNA, 120 bp, Artificial Sequence
  ENSG00000157540_205 (sequence is synthesized)
atcgaagatacagaccttaagatcagcacagagccatagtcacttgtgttcagaaacactgaccttatttgatacacgtaaggctgagttttatttaacagatcttttaagaaaacgtta

SEQ ID NO: 461267 - DNA, 120 bp, Artificial Sequence
  ENSG00000157540_206 (sequence is synthesized)
tgattctttggtccaccccaaaaaggtagaaacaaataatggatctttaaaaggggcaagcttcagattgtttagattttgtttgtgaaatacttctcattcctcattattaaaatataa

SEQ ID NO: 461268 - DNA, 120 bp, Artificial Sequence
  ENSG00000157540_207 (sequence is synthesized)
aatgagtttctattaatttttcttagtttctttatagatactgatataattcataataataccattcttatcttaaaaccttgtcacacacaatgaaactttgctgttcactgtcagtta

SEQ ID NO: 461269 - DNA, 120 bp, Artificial Sequence
  ENSG00000157540_208 (sequence is synthesized)
taacttacatgaggtgacccatttccattcaagggttttagaagcacatcaaggacattctaaggatgattgacttacacaatgatctctgaacatgcctcctgccttctcctcactctt

SEQ ID NO: 461270 - DNA, 120 bp, Artificial Sequence
  ENSG00000157540_209 (sequence is synthesized)
gagtatttgcttaggggagcagaaaaaatactggtagcattactgtaacattttaattctgctttatttaaaaaagacatagctggcatatagttaagtactgaaaaatgttagctactc

SEQ ID NO: 461271 - DNA, 120 bp, Artificial Sequence
  ENSG00000157540_210 (sequence is synthesized)
atacttgggttttcaagcctcgggagctcacccagcaatacatagctagggagaaggggtagggagaataaaaatcagcgaaagccaggatattaataaagagttttgatggttaaggac

SEQ ID NO: 461272 - DNA, 120 bp, Artificial Sequence
  ENSG00000157540_211 (sequence is synthesized)
aagcaggcgaattaagactctggaaaccgagaaggtgtatagaaaagaaaaccagagagctggacgacaaggacacagtaacagcacaaggggattcatctaaagggcattccgatggag

SEQ ID NO: 461273 - DNA, 120 bp, Artificial Sequence
  ENSG00000157542_0 (sequence is synthesized)
gcttttatctcggagccgcgtcgcttcgtgcgctgccagcggggctcagccagtcggctggaattgagtagcattcattgaatctgcggatttcatgacgtctctctgcgtggtccacca

SEQ ID NO: 461274 - DNA, 120 bp, Artificial Sequence
  ENSG00000157542_1 (sequence is synthesized)
cttttctcctaaccggggattttttttttcttctgccactcttatctttccccacttcattccacccagtctccctcccccgtccctgcccaaacgcgcgcccctccgcccctcccttgg

SEQ ID NO: 461275 - DNA, 120 bp, Artificial Sequence
  ENSG00000157542_2 (sequence is synthesized)
ccccagcgcccagccctgctctccgcgctcggccagagggagccagtccggagacggccgcacctggctggagaggctgggcgggcggaggggtggagacccgcggacgccgggaagccg

SEQ ID NO: 461276 - DNA, 120 bp, Artificial Sequence
  ENSG00000157542_3 (sequence is synthesized)
gacctggagccggagcagccgcgagcagaatggagtctcctaacagcctctcggtgctgatgtgaaatttgaccatctgattccagtttttttcttttccttttcttttttgcatttcct

SEQ ID NO: 461277 - DNA, 120 bp, Artificial Sequence
  ENSG00000157542_4 (sequence is synthesized)
tccctcgccatccgtcgtgtagtgaattgttcagtcttgctccgtttcaagagaggagatcatgattgagtgaagccaccccgtccgcagccaggaaaagcacaaagaagaaactgcaac

SEQ ID NO: 461278 - DNA, 120 bp, Artificial Sequence
  ENSG00000157542_5 (sequence is synthesized)
aatggccaagctgacagaatccatgactaacgtcctggagggcgactccatggatcaggacgtcgaaagcccagtggccattcaccagccaaagttgcctaagcaggccagggatgacct

SEQ ID NO: 461279 - DNA, 120 bp, Artificial Sequence
  ENSG00000157542_6 (sequence is synthesized)
gccaagacacatcagccgagatcggaccaaaaggaaaatccagaggtacgtgaggaaagacggaaagtgcaatgttcatcacggcaacgtgagggagacctatcgctacctgaccgatat

SEQ ID NO: 461280 - DNA, 120 bp, Artificial Sequence
  ENSG00000157542_7 (sequence is synthesized)
cttcaccacattagtggacctgaagtggagattcaacctattgatttttgtcatggtttacacagtgacctggctcttttttggaatgatctggtggttgatcgcatacatacggggaga

SEQ ID NO: 461281 - DNA, 120 bp, Artificial Sequence
  ENSG00000157542_8 (sequence is synthesized)
catggaccacatagaggacccctcctggactccttgtgttaccaacctcaacgggttcgtctctgcttttttattctcaatagagacagaaaccaccattggttatggctaccgggtcat

SEQ ID NO: 461282 - DNA, 120 bp, Artificial Sequence
  ENSG00000157542_9 (sequence is synthesized)
cacagataaatgcccagagggaattattcttctcttaatccaatctgtgttggggtccattgtcaatgcattcatggtgggatgcatgtttgtaaaaatctctcaacccaagaagagggc

SEQ ID NO: 461283 - DNA, 120 bp, Artificial Sequence
  ENSG00000157542_10 (sequence is synthesized)
agagaccctggtcttttccacccatgcagtgatctccatgcgggatgggaaactgtgcctgatgttccgggtaggggaccttaggaattcccacattgtggaggcttccatcagagccaa

SEQ ID NO: 461284 - DNA, 120 bp, Artificial Sequence
  ENSG00000157542_11 (sequence is synthesized)
gttgatcaaatccaaacagacctcggagggggagttcatcccgttgaaccagacggatatcaacgtagggtattacacgggggatgaccgtctgtttctggtgtcaccgctgatcattag

SEQ ID NO: 461285 - DNA, 120 bp, Artificial Sequence
  ENSG00000157542_12 (sequence is synthesized)
ccatgaaattaaccaacagagtcctttctgggagatctccaaagcccagctgcccaaagaggaactggaaattgtggtcatcctagaaggaatggtggaagccacagggatgacatgcca

SEQ ID NO: 461286 - DNA, 120 bp, Artificial Sequence
  ENSG00000157542_13 (sequence is synthesized)
agctcgaagctcctacatcaccagtgagatcctgtggggttaccggttcacacctgtcctgaccctggaggacgggttctacgaagttgactacaacagcttccatgagacctatgagac

SEQ ID NO: 461287 - DNA, 120 bp, Artificial Sequence
  ENSG00000157542_14 (sequence is synthesized)
cagcaccccatcccttagtgccaaagagctggccgagttagccagcagggcagagctgcccctgagttggtctgtatccagcaaactcaaccaacatgcagaactggagactgaagagga

SEQ ID NO: 461288 - DNA, 120 bp, Artificial Sequence
  ENSG00000157542_15 (sequence is synthesized)
agaaaagaacctcgaagagcaaacagaaagaaatggtgatgtggcaaacctggagaatgaatccaaagtttagtgccctagctgggcaaacccttctcttctccccccaacacaatcttt

SEQ ID NO: 461289 - DNA, 120 bp, Artificial Sequence
  ENSG00000157542_16 (sequence is synthesized)
ccttgtctctcattctctttctttttctgtctctcttgctttgttctttatttgtttatatttaatttttacatgaccagaaaacaaatcttcaaggtgtaaaatatctacctgccctct

SEQ ID NO: 461290 - DNA, 120 bp, Artificial Sequence
  ENSG00000157542_17 (sequence is synthesized)
ctcagttattcagattgacaaggtagacatggatttgatgaaagtgcaaagtgccctcatttgtggcccaagcctggtctcctcccaaaatactacacatccaactcctggagatttcag

SEQ ID NO: 461291 - DNA, 120 bp, Artificial Sequence
  ENSG00000157542_18 (sequence is synthesized)
ttacttacctgcatgtgttgtacaataccagatcactcaaaaaggtgtgtcaaagattttacctgggatatgacaagcaaggtttctggtgcctatttattcattcagtgagacacagag

SEQ ID NO: 461292 - DNA, 120 bp, Artificial Sequence
  ENSG00000157542_19 (sequence is synthesized)
tggagccctcagttttatggatcccaattcatttcatctactacagggtgaggtgcttgcccccatgtgggtgtggcagttacagggcccaggtgagctgaagacaaaccactgtacata

SEQ ID NO: 461293 - DNA, 120 bp, Artificial Sequence
  ENSG00000157542_20 (sequence is synthesized)
tatatgccttatgtaattattttctttttgtaattagtaataaaacccagcatgtacaaaagtaccatagaacagaactgctaaatactgtacatagatgtatcattaatgtaggtttag

SEQ ID NO: 461294 - DNA, 120 bp, Artificial Sequence
  ENSG00000157542_21 (sequence is synthesized)
atatataactttagaaataagaagcaaaaaaaaaaagaaagaaagaaagattcctaacatgcagtaggcatttctgttttgatgtctgtgttttccaggttattttgatccagttgacgg

SEQ ID NO: 461295 - DNA, 120 bp, Artificial Sequence
  ENSG00000157542_22 (sequence is synthesized)
ctggcccttcagtgcatggcctttgtttgtgtctcagactggcagacgttagggtacctcactgttcccacacggatcctttcattgaatccaacaagccataggtctgggggaaattga

SEQ ID NO: 461296 - DNA, 120 bp, Artificial Sequence
  ENSG00000157542_23 (sequence is synthesized)
gaggtctggtagatggcaaaacccaccaccaatatgctgatatactgtgaaatgttacaaaacagatgtctttttttaaaagataacaagggcctcactaactggcctggaggaggggga

SEQ ID NO: 461297 - DNA, 120 bp, Artificial Sequence
  ENSG00000157542_24 (sequence is synthesized)
ataccaggaaggaaatattctctagcctgtcaccaaaggtatgtttttacttttcacatgagctcttgccctttgtagtacaataatttaggaaacttttctgcaaaaccattgattctc

SEQ ID NO: 461298 - DNA, 120 bp, Artificial Sequence
  ENSG00000157542_25 (sequence is synthesized)
cagctgtagtttctctacactcttacaatgagacatggtaagttagcagaagatggtttgggtctaaagccgtgaaattcacaaaggcatgtagtgagtggcatgcattataatcatcga

SEQ ID NO: 461299 - DNA, 120 bp, Artificial Sequence
  ENSG00000157542_26 (sequence is synthesized)
cctctcactttgactctatctggctttctgagaatgacatctcgcctgtccctggggcttatccatcagcatttcttgcattgtgatcttttattattttgaaatgaccagagttcagta

SEQ ID NO: 461300 - DNA, 120 bp, Artificial Sequence
  ENSG00000157542_27 (sequence is synthesized)
ttcaaagattagatcaacaatcttgatgattgtctaagaaatgtctctagagtatgccacaggctagaaatcaaatccagtgtctgtcaatcaaaagaaaacaaataaaaaaattccagc

SEQ ID NO: 461301 - DNA, 89 bp, Artificial Sequence
  ENSG00000157542_28 (sequence is synthesized)
gtatttgtactggaaatctgaattttaaaatgaaaaaaataaggaaacaaatcttagatcaaacctccggggcaggtggagattttgca

SEQ ID NO: 461302 - DNA, 120 bp, Artificial Sequence
  ENSG00000157542_29 (sequence is synthesized)
aatcttagatcaaacctccggggcaggtggagattttgcactgttacagatctttcacattcactttgcatttataagctgtttgttctttaacacagttgcccatcataaatattcatt

SEQ ID NO: 461303 - DNA, 120 bp, Artificial Sequence
  ENSG00000157542_30 (sequence is synthesized)
gaatggatccaagtttattttcagctcctacagctgtgctcagtttgaggctctgcaccatggaggtcaaagagatcaaactagctgtccctctttgtttcccttgccttccctgacctg

SEQ ID NO: 461304 - DNA, 120 bp, Artificial Sequence
  ENSG00000157542_31 (sequence is synthesized)
atcgcacaggcctttggtgtagtctggggaccttgtctactaaaaaagaagtcccaggataaggaaagtggctcctaaatataacctcggggcctctcttctcccatctcagagaccttg

SEQ ID NO: 461305 - DNA, 120 bp, Artificial Sequence
  ENSG00000157542_32 (sequence is synthesized)
gatcaggacaactgcctcttggcactgactttaaggaaaacaaaactgttggctatagccctttcctgtttgccagcatttccttttttgcattgaatctctgttgaatcatttctttat

SEQ ID NO: 461306 - DNA, 120 bp, Artificial Sequence
  ENSG00000157542_33 (sequence is synthesized)
ttcgcacactctaagaaggaggtggtggtccgggaggaggaagctcgatacactccccttgaggctgcggggaggagccatggcttgacctctctgcagcctaatgaagggcactcttgg

SEQ ID NO: 461307 - DNA, 120 bp, Artificial Sequence
  ENSG00000157542_34 (sequence is synthesized)
cttggggagctcccctgcaaccttgccagggtcgcagggcaggccatggcaggcacaaaacaagatggaataggggcggcaaaatgtcttctaatttagctcttgaagactcactgggcc

SEQ ID NO: 461308 - DNA, 120 bp, Artificial Sequence
  ENSG00000157542_35 (sequence is synthesized)
tttttaattccattgctaaggtttaaaggacagcgcacacccccgtgtctggttggaagagcaagcagctcagggcctcatccctgcttgcctgccctttagcacaactgaacgaagagc

SEQ ID NO: 461309 - DNA, 120 bp, Artificial Sequence
  ENSG00000157542_36 (sequence is synthesized)
cttgacaacacgttggccacgtgcacctgtcagttctgtgtctgtgacgggcacccagatgtgaggtctctccctgtttctcactgtctttgttgtcaatgtagttggagacagaacttg

SEQ ID NO: 461310 - DNA, 120 bp, Artificial Sequence
  ENSG00000157542_37 (sequence is synthesized)
aaccaaatctcgtttttgtaatgtgagcctctgaatctttacatggggatgctcctgaagaaccttttactagaatgtccctatcaaacatgtctatttttctacagttgttaacacagt

SEQ ID NO: 461311 - DNA, 120 bp, Artificial Sequence
  ENSG00000157542_38 (sequence is synthesized)
ttaacagtgtattttgtgtcaactgttaaaatttggaactgaaagttcattgagactgattttctaagcagcgagtagtgagtgaatggtgttttccattaagacagctcaacaaaattg

SEQ ID NO: 461312 - DNA, 120 bp, Artificial Sequence
  ENSG00000157542_39 (sequence is synthesized)
accccacaatttccactcattctattccgcaatatccagtcctcattccctcagtcactccattagcaaaccaagtgcaatgagaattttttaaaagtctcttttaatacaacagtatcc

SEQ ID NO: 461313 - DNA, 120 bp, Artificial Sequence
  ENSG00000157542_40 (sequence is synthesized)
ataactaatgaagatcactctcaactagatcctttggtctgtttggttaatgtatttgagtcatttttccataaagcatggtgggatccgtgagccagataagaatttggaatttaaggg

SEQ ID NO: 461314 - DNA, 120 bp, Artificial Sequence
  ENSG00000157542_41 (sequence is synthesized)
ttatggtttgccacagttgaccccaatttgacagaacaaagtgctcctggatggaagggcaggttcagctgcaagcatgaccccccaccacaaggctgctgagttcctcggattctcacc

SEQ ID NO: 461315 - DNA, 120 bp, Artificial Sequence
  ENSG00000157542_42 (sequence is synthesized)
tccacccaccccaacgtgctctccaactggaagagcacccattcatttataaatcaactttatggaaccaataaaatcatttctgttttagctgtcccctgggtaagctatactctttta

SEQ ID NO: 461316 - DNA, 120 bp, Artificial Sequence
  ENSG00000157542_43 (sequence is synthesized)
cattaacatagcaaatgtcaacttttctgttccttcaaacatggccttccagcctggttgttccagcatatatcccctctatgtccatgaggcagaactctctcttcccccactccgttc

SEQ ID NO: 461317 - DNA, 120 bp, Artificial Sequence
  ENSG00000157542_44 (sequence is synthesized)
ttccatctatccccatcctttgctgtttccctggttctccagttccaattctattgttttagttcagtaccttatgttccctaacagaaatccagctgcaaatgtcaacctatttcttaa

SEQ ID NO: 461318 - DNA, 120 bp, Artificial Sequence
  ENSG00000157542_45 (sequence is synthesized)
gcacaattttctcttgcaggtctaaccaagctagggctctgaaatgtctatttttcactgcactccaatttaaaaattattcatgacttcatttaatagtctaaattttgaattctccag

SEQ ID NO: 461319 - DNA, 120 bp, Artificial Sequence
  ENSG00000157542_46 (sequence is synthesized)
agcaacattcttatgctttccatccctacattttcttacatttcagttttcttacttttttcccctttgcttttttatttagatttaagccagtgtctttgggatatttagaaactgctt

SEQ ID NO: 461320 - DNA, 120 bp, Artificial Sequence
  ENSG00000157542_47 (sequence is synthesized)
acaaaggtgggaactggtggacagagaaagggggcataagaatgctattagaaaactacctgaactcaccagaagaatgggaaatcatttgatttgctgagagaatacaattaaaatact

SEQ ID NO: 461321 - DNA, 120 bp, Artificial Sequence
  ENSG00000157542_48 (sequence is synthesized)
catagtaaatcatttccaaaacagtttgctaatagtctggctactcttcagtctttctttccttgacttgggtgatactctgtatgatttaaaaatgtcaggaaggtagttgaaagttca

SEQ ID NO: 461322 - DNA, 120 bp, Artificial Sequence
  ENSG00000157542_49 (sequence is synthesized)
gtgtcctctatatattgtaaacattatcttcaaggatgatttcctttcaatggatggctttaacattgaaaaacataggtaacatatacataatagatgattcattgatattactttaca

SEQ ID NO: 461323 - DNA, 120 bp, Artificial Sequence
  ENSG00000157542_50 (sequence is synthesized)
atacactaaaataacattatcttgtttctgaactttatggccaaccggtatctaagaaaatgttagcctttaatttaaaattgagtaaagcacgcctcttcctaatatttctgcctttaa

SEQ ID NO: 461324 - DNA, 120 bp, Artificial Sequence
  ENSG00000157542_51 (sequence is synthesized)
tgtcttgagtgctttagatgcagagtgtcatctagaagtcaaaattctgtcagaaggctgctaagagattttgataaatcacagaatatataataataacccaacaatattttacccaac

SEQ ID NO: 461325 - DNA, 120 bp, Artificial Sequence
  ENSG00000157542_52 (sequence is synthesized)
atggtgtggtgtttgagagcattaagagcacttgtacaaattatcttatttcattctaattcaccatgagaggttgagtattataatttacattttatagagggaaaactagggtttggg

SEQ ID NO: 461326 - DNA, 120 bp, Artificial Sequence
  ENSG00000157542_53 (sequence is synthesized)
caaattggccaagtttaaaggccagtgaatcatagctccttgtctcaaatccaggtcacagggccctaagctgtgggctatttttactacaaaaaatttcagcaaaccaaatctgctaaa

SEQ ID NO: 461327 - DNA, 120 bp, Artificial Sequence
  ENSG00000157542_54 (sequence is synthesized)
aaaaaaaaaatctggcctgctgcctgttattgtaccacttgtgagctaagagcaatttttacattttttaataattgggggaaaaaaaagaaaagaagaatattttgagacatgtgaaaa

SEQ ID NO: 461328 - DNA, 120 bp, Artificial Sequence
  ENSG00000157542_55 (sequence is synthesized)
tcatcctaaattcaaatttcaatgtccacaaacaaagttttattggaacacagccacagccatttgtctgtgtattgcctatggctgcttccacatgcactcacagagctgagtaattac

SEQ ID NO: 461329 - DNA, 120 bp, Artificial Sequence
  ENSG00000157542_56 (sequence is synthesized)
aacagagaccgtgtggccagcaaagattgaaatatttactatctggccctgtataaaaaaagtttgctgacccctgtactgtactgttaagtactattggtactattaagtactagtaat

SEQ ID NO: 461330 - DNA, 120 bp, Artificial Sequence
  ENSG00000157542_57 (sequence is synthesized)
agtactattaataatagtatgtaagagtactaagtactatgaaatattgtactgtactcttaagagagtcctaggcaatatagaagaatgactttttttctagcataaattattgaagtc

SEQ ID NO: 461331 - DNA, 120 bp, Artificial Sequence
  ENSG00000157542_58 (sequence is synthesized)
actcataagtctgttcaaaataacataactcttttttttcggttgtcaaagagacaactgcttcacaagacttagagagcccagtcattcagttagggtctcaaaggaagaatccttcct

SEQ ID NO: 461332 - DNA, 120 bp, Artificial Sequence
  ENSG00000157542_59 (sequence is synthesized)
tttcatgccattcctccagagtggcaaatagagtcaacagccagccaggatctagcggtcaactcagaaagtggatacagtaaaattactccttaatgaactacagagaaatgggcattc

SEQ ID NO: 461333 - DNA, 120 bp, Artificial Sequence
  ENSG00000157542_60 (sequence is synthesized)
ccagcccagccgctgaaatattgcttcagtggcaccctcaggcgttggatgatgtacatagctcaggctgccagtctctgctcagcaaagcagcccagacctgcagtggttgccacacat

SEQ ID NO: 461334 - DNA, 120 bp, Artificial Sequence
  ENSG00000157542_61 (sequence is synthesized)
caaacccgcctcgctcctccacatggcttctctcttaggctctcttggaggagagttaaataggtggcccagatgtctccctctgttttcttgctagttttctctagcctacagtttaca

SEQ ID NO: 461335 - DNA, 120 bp, Artificial Sequence
  ENSG00000157542_62 (sequence is synthesized)
actgatcaaggtgatgaacgtgaacctggaactagctcatgtttaattgcgctagtttttgctctctctagccactaagctagaagtttaatgtgtaattaaagaactaaatgcttctta

SEQ ID NO: 461336 - DNA, 120 bp, Artificial Sequence
  ENSG00000157542_63 (sequence is synthesized)
tggaaaaccaaaaggtcctttgaaaagagctcagggagacacggaagtatagtaaagggttgttggatttcttgcgctttctgagtctgaagcaaagacaaagattggtaattacagaca

SEQ ID NO: 461337 - DNA, 120 bp, Artificial Sequence
  ENSG00000157542_64 (sequence is synthesized)
taatggatggaaaaagtccagaccttggggtttttagatgagtcaatattaaatggcattctttgtgtcactaagctgaactcccttgtcttctaaggaagcatttctaatgccagaggt

SEQ ID NO: 461338 - DNA, 120 bp, Artificial Sequence
  ENSG00000157542_65 (sequence is synthesized)
agtcagccaagctaggttccttatctttttagttctatggaaaaacatatcaagttctcttatgagtgctttcctggaaatcagatgagaaagaaaaaaaagtaacaatgtaacaaatca

SEQ ID NO: 461339 - DNA, 120 bp, Artificial Sequence
  ENSG00000157542_66 (sequence is synthesized)
ttgtgatgttgttatattgtcgacagataaaggatggatttgatcctgcgtctgaaactaagtaggtaatggtatctacaatatagatcatgcaaaaagcttgtgacccttcaactgcat

SEQ ID NO: 461340 - DNA, 120 bp, Artificial Sequence
  ENSG00000157542_67 (sequence is synthesized)
ggaagagtgggaggaaacaactaagtgggaggaaacaaatctcaaagttcaacaccataaaacttaaataaatgtaaaaggagtcaaacttttacttggcctcattgccttggtaaaaga

SEQ ID NO: 461341 - DNA, 120 bp, Artificial Sequence
  ENSG00000157542_68 (sequence is synthesized)
aagcttcatgtatccacctaattcaataagagagtcctaggaaaaggaaggcaaaatactttaaaggcacacaaaaatatttcactggggtggtcaacatgattaagtgatggagattag

SEQ ID NO: 461342 - DNA, 120 bp, Artificial Sequence
  ENSG00000157542_69 (sequence is synthesized)
atttatcactgatgaaaacagtatttatagagttatttttagacactataccccctagatgcaaatcccaacatgcactgtggttggccggagaattgtggccacatagtaaacagatct

SEQ ID NO: 461343 - DNA, 120 bp, Artificial Sequence
  ENSG00000157542_70 (sequence is synthesized)
tgatttcagagaatgaaatgttcctaccgactttgtgtaattgcccatttcaagattaaggctcagtgcccattgttttaacaccgatcatcaatactgtgatatcaactaagccaatct

SEQ ID NO: 461344 - DNA, 120 bp, Artificial Sequence
  ENSG00000157542_71 (sequence is synthesized)
ttataagaatatgaagggctgtttttctcaggcaatgtaaatatctgctaccaacaagcactagtgaaataaacatgtaatcatcatcgtttctaaaactctgatagaaatcacaaaaca

SEQ ID NO: 461345 - DNA, 120 bp, Artificial Sequence
  ENSG00000157542_72 (sequence is synthesized)
ttcaagcaaaagggcaaggtcttccaggagcctaggagcagacttttggctacaaagagcctagtccaggctgaatgccttatggagtatgtcagtcttgggtcttatcactaaacacaa

SEQ ID NO: 461346 - DNA, 120 bp, Artificial Sequence
  ENSG00000157542_73 (sequence is synthesized)
ctagtagaactcgatcaactggagtgcagagatcagagtttcggtcagccgtgcattacccaaacctctgggtcttcagccagtcttcttagaagaggggaaggagcactgtcctcagat

SEQ ID NO: 461347 - DNA, 120 bp, Artificial Sequence
  ENSG00000157542_74 (sequence is synthesized)
ccggccatcacgggcatcgccctgacatcatctctcagcattgctgactgtgggcatgggtatgagaaataccctcccgtagctcagacttgggcagaacaaaatcctcagccatgccca

SEQ ID NO: 461348 - DNA, 120 bp, Artificial Sequence
  ENSG00000157542_75 (sequence is synthesized)
cccactgaggtctctctaggggagcttctccctgcagggtctggctcttgcccatctggacaatgaccccctagaagtatcttccgggggaccctgtatctttcaagcttaacttgcccc

SEQ ID NO: 461349 - DNA, 120 bp, Artificial Sequence
  ENSG00000157542_76 (sequence is synthesized)
acacccttgaccccacagagcacctccctgggtcaggaatgatgactaaattaagacctttagcatctgctaagcacaggggtgccctcccatgtgaaagtccaagtaaaataaatggag

SEQ ID NO: 461350 - DNA, 120 bp, Artificial Sequence
  ENSG00000157542_77 (sequence is synthesized)
tcagggtaaggaaatccccaaaagttctgattttctcatggtgatgatctcagtgcttttctttttcatgacatatctaattctcttttctctaggaagtctcacgttttggtatcacga

SEQ ID NO: 461351 - DNA, 120 bp, Artificial Sequence
  ENSG00000157542_78 (sequence is synthesized)
tgccgtgggcacagactcagtcatcgggccaatggcagaactctctccagatagtctgacctggtccctctttttgagtaaggctgggagtttggtttgtttgagccaccccacaaccaa

SEQ ID NO: 461352 - DNA, 77 bp, Artificial Sequence
  ENSG00000157542_79 (sequence is synthesized)
aggctgggagtttggtttgtttgagccaccccacaaccaatagaatcccaccctggctaagaaatctcacaaggccg

SEQ ID NO: 461353 - DNA, 89 bp, Artificial Sequence
  ENSG00000157542_80 (sequence is synthesized)
tttgagaccagcctggccaatatggtaataccccgcctctactaaaaatatgaaaaagttagctgggcatggtagttcctgcctgtaca

SEQ ID NO: 461354 - DNA, 67 bp, Artificial Sequence
  ENSG00000157542_81 (sequence is synthesized)
gaaagaaagaaagagaaaagaaatcgcacatccccacctctatcagggtcaccaaatgaaggcatca

SEQ ID NO: 461355 - DNA, 120 bp, Artificial Sequence
  ENSG00000157542_82 (sequence is synthesized)
acatccccacctctatcagggtcaccaaatgaaggcatcaatttcaagtcccgttattatctgcaaggaactctgcattgcagcacttacagacacaacttatgctgtctcctggtgccc

SEQ ID NO: 461356 - DNA, 120 bp, Artificial Sequence
  ENSG00000157542_83 (sequence is synthesized)
acacagctttcgggtgatggcagattgtcagccaaccattccccccagctgctctctcttaatttgctccctcatctcaccacgaaaacttcacttttcctggcacccccgttggaaggt

SEQ ID NO: 461357 - DNA, 120 bp, Artificial Sequence
  ENSG00000157542_84 (sequence is synthesized)
taatatcatttttgagcatccacaatccagcaacctattattggggttagtcctattccttaccacttaatagccaccaccaattttaaccgagcgtatatgttcagagtctaaccatat

SEQ ID NO: 461358 - DNA, 120 bp, Artificial Sequence
  ENSG00000157542_85 (sequence is synthesized)
atatatatatatatatatatatgtacattttgttcctgcttcataattgcccagagagtctatgagtgatggttgggcgtatacatggtctcagcccggtaactgacgagagcagcataa

SEQ ID NO: 461359 - DNA, 120 bp, Artificial Sequence
  ENSG00000157542_86 (sequence is synthesized)
agttaggtcttgtgctgaaaggacagctggactggtccagtgggatcttcttgtcctttgcagcatgccattaggggaccagcttgccaaagaagctcctgaacatctttattcagccca

SEQ ID NO: 461360 - DNA, 120 bp, Artificial Sequence
  ENSG00000157542_87 (sequence is synthesized)
gtgcttcctcgtcttaaccaagagccacacagagacaacagtgaactcacaagttcataggattccaaaatgattgactccccaagtgtctgcctgtgttggcaaagtgctctttccttt

SEQ ID NO: 461361 - DNA, 120 bp, Artificial Sequence
  ENSG00000157542_88 (sequence is synthesized)
cccactgtctgcacagactgtactctggggaaactcccagcacttgtgggtgcctggttaccgaggatgtgcttggctgccatggtaactcccagcctctcagtgtggaccactctcccg

SEQ ID NO: 461362 - DNA, 120 bp, Artificial Sequence
  ENSG00000157542_89 (sequence is synthesized)
caggctcgaggagacctggcagaggccccatggggcggaggctccctagggctgctccacctgcagacagccttgggagaacccaaggtaatgtggagtaggacccagcacacaggagct

SEQ ID NO: 461363 - DNA, 120 bp, Artificial Sequence
  ENSG00000157542_90 (sequence is synthesized)
ccctccgcacgccaggtctggggtattcccatcctttcttcctaagatgggatgcacttaggtggccaaattgcttcttaaaaggctcttcttcaagccatcatcctcatatcacactca

SEQ ID NO: 461364 - DNA, 120 bp, Artificial Sequence
  ENSG00000157542_91 (sequence is synthesized)
tgcccacactccagtcacatttgcctttaaaaaattttcaaaattatttttgtattatcccatgtaacagatgtccaaagagttgccattttcttaacactaaataaattctgcctagaa

SEQ ID NO: 461365 - DNA, 120 bp, Artificial Sequence
  ENSG00000157542_92 (sequence is synthesized)
gattaagattggtccagaacagggagtgttttaataagcacaaatataaacaaaagcaattttaaaatttacttatggattctttcagaaaacctgatttcaaatcagaaatactcattt

SEQ ID NO: 461366 - DNA, 120 bp, Artificial Sequence
  ENSG00000157542_93 (sequence is synthesized)
ttgcccccagagcaaagttccagaatactatttcttcttgaacttgccattttccatctggctttgaacttgagaatagactcccctatattggcataaaaggtaaagtggaatttacca

SEQ ID NO: 461367 - DNA, 120 bp, Artificial Sequence
  ENSG00000157542_94 (sequence is synthesized)
ctgaaactttcagagctcaatttagtctggccccatggaccaggcaagaataaactctgctcaccagtaacaattctgcagccaccgtactgaacacaaaccctggagaaattctggaca

SEQ ID NO: 461368 - DNA, 60 bp, Artificial Sequence
  ENSG00000157542_95 (sequence is synthesized)
gccaccgtactgaacacaaaccctggagaaattctggacatggtactgcttaagaatgct

SEQ ID NO: 461369 - DNA, 120 bp, Artificial Sequence
  ENSG00000157542_96 (sequence is synthesized)
aaaaaaaaaaaaaaaaaaaagaatgctgggaatgtcagtcgagggtctgatttcagaaagaggacattaatattcaaatccctgaaccatgcccacactgtgggagtcaggcctaacaag

SEQ ID NO: 461370 - DNA, 120 bp, Artificial Sequence
  ENSG00000157542_97 (sequence is synthesized)
ccacactgtgggagtcaggcctaacaagatcccagggtccatagtttacctggtcagcttgctgtgtctcatggggcattagagggtagatgagaactttccgcaatctcgacaactgca

SEQ ID NO: 461371 - DNA, 120 bp, Artificial Sequence
  ENSG00000157542_98 (sequence is synthesized)
ctgtaagaatttcttctgtgtattttctaattctgtgacaacaggcatcaacaaaacatgtggcctgttatcacatggttcctccctgtgtgcaccttcatagagattttttccttttct

SEQ ID NO: 461372 - DNA, 120 bp, Artificial Sequence
  ENSG00000157542_99 (sequence is synthesized)
aaaagaatgaggattcctctgaatgttacactatgcaacaataatgtccccagtccttcataagtaacacagtaacaatataagcaccctctccctacataacacacacacatacacaca

SEQ ID NO: 461373 - DNA, 120 bp, Artificial Sequence
  ENSG00000157542_100 (sequence is synthesized)
aatacacacacagacacatgcatacacacacacatacacacagacacatgcatacacacacatacagagacatgcgcatacacacacacgcatacatgcacatgcatacacacaccaaga

SEQ ID NO: 461374 - DNA, 120 bp, Artificial Sequence
  ENSG00000157542_101 (sequence is synthesized)
catgcatacacacacgcatacacagagacacatgcatacacacacgtgcatacacacacagacatatgcatacacacacgcatacagacatgcatacacacacatgcatacagagacaca

SEQ ID NO: 461375 - DNA, 120 bp, Artificial Sequence
  ENSG00000157542_102 (sequence is synthesized)
tgcatacacacacgcatacacacacacgcatacacagagacatgcatacacacatgcatacagagacacatgcatacacgcacacagacacatgcatacacacacacgcagacacagaca

SEQ ID NO: 461376 - DNA, 120 bp, Artificial Sequence
  ENSG00000157542_103 (sequence is synthesized)
catgcatacacacagagatacacgcatactcacacagacacagacacatgcatacgcacacacagatatacacacacacacacacacacacactcttatcctttccaatcagttatgagt

SEQ ID NO: 461377 - DNA, 120 bp, Artificial Sequence
  ENSG00000157542_104 (sequence is synthesized)
gacaccacaaaagtaaatttccagaaatcaaagccttaagattggcgttcctcccctgcatgcactgtggcattattttaaaaatgtaccatacacttccctgaacctgcaggcaacagc

SEQ ID NO: 461378 - DNA, 120 bp, Artificial Sequence
  ENSG00000157542_105 (sequence is synthesized)
ctttcttccagtgtttggtaggaaccctggattcagaagaccaggttttgcccccagatgagcaatgtcgtcctgggtatatcatttcactggtcggaaatagcttcctccacccctttt

SEQ ID NO: 461379 - DNA, 120 bp, Artificial Sequence
  ENSG00000157542_106 (sequence is synthesized)
ttaaaaacttgataaattttattttttagagcagcattaacttcacagcaaaatagagcagaaattaccaagagctctcatttacccccggcccccgcatgcatggccgcccccacgagt

SEQ ID NO: 461380 - DNA, 120 bp, Artificial Sequence
  ENSG00000157542_107 (sequence is synthesized)
gatatgccaaaccacaatggtacatctgtggaaatggatgagtctacactgagacattactatcaccccagagtccattgtttacaatggtgttgtacattctatggatttgggcaaatg

SEQ ID NO: 461381 - DNA, 120 bp, Artificial Sequence
  ENSG00000157542_108 (sequence is synthesized)
tataaaggcatggatccaccattatagaatcatacaggatagtcccacggccctaaaaatcctctgtgctctcccaattcatcttgtgtcctcccaacccctggcaaccactgatctatt

SEQ ID NO: 461382 - DNA, 120 bp, Artificial Sequence
  ENSG00000157542_109 (sequence is synthesized)
gtctccatagttttgccttttccagaatggcatataattggactcatgcagtacgcagccttataaaattggcttatttcacttagtaacatgcatttaagtttccctcatatcttttta

SEQ ID NO: 461383 - DNA, 120 bp, Artificial Sequence
  ENSG00000157542_110 (sequence is synthesized)
tttatggcttgagagctcacttttttagcaccaaacactcatccattttctggatgtaccactgtttatttatccattcacctactgaaggacaccttggttgcttccaagtttggtcag

SEQ ID NO: 461384 - DNA, 120 bp, Artificial Sequence
  ENSG00000157542_111 (sequence is synthesized)
ttatgaataaagccactataaatatctgtatgcaggtttttgtgtggacataagttttcaattcatttgggtaaatatgatatgttaaagctatatttagtcttgcaagacacagccaaa

SEQ ID NO: 461385 - DNA, 120 bp, Artificial Sequence
  ENSG00000157542_112 (sequence is synthesized)
ctgccttccaaagtggctgtactgttttgcattccactagcgatgaatgagggttcccgttgctccatatcttcaccagcatttagtgttgtcaatgatctgcatttgggccattctaaa

SEQ ID NO: 461386 - DNA, 120 bp, Artificial Sequence
  ENSG00000157542_113 (sequence is synthesized)
agatgtacggtggtgtttcattgctgttttaatttgcaattccctaatgacatgatttgggacatatttttatatgcttgttttccatctgtacatcttctttggtgaggtgtctgttca

SEQ ID NO: 461387 - DNA, 120 bp, Artificial Sequence
  ENSG00000157542_114 (sequence is synthesized)
ggtcttttgggcatttttttaaatcgggttgttttcttattgttgatttgttaaagttctttgtaaattttagataataattctttatcagatgtgtcttctgtaaatattttctcccag

SEQ ID NO: 461388 - DNA, 120 bp, Artificial Sequence
  ENSG00000157542_115 (sequence is synthesized)
tccgtggcttgtcttctcattatcttgaccttgtctttttcagagcagacgcttttaattttactgaagttcagcttatcatttacttctttcatgatcatgtctttggtgttctatcta

SEQ ID NO: 461389 - DNA, 120 bp, Artificial Sequence
  ENSG00000157542_116 (sequence is synthesized)
aaaatctattgccatatccaaggtcatctaagttttctcttatatgttaccttctaggagttgtatagttttgcattttacattagatctgtgaccgattttgagttaatttttgtgaaa

SEQ ID NO: 461390 - DNA, 120 bp, Artificial Sequence
  ENSG00000157542_117 (sequence is synthesized)
agtgtttgttaggtctgtatttagactcttttttttttttttttttttgcctgtggatgtgcaaatgtgcagctatttcaacaccgtttgttgaaaagaccctctttgccgcactgtttt

SEQ ID NO: 461391 - DNA, 120 bp, Artificial Sequence
  ENSG00000157542_118 (sequence is synthesized)
gcctgtgctcctttgccaaggatcagttaactatatttgtgtgggtctgtttctcagctctccattctgttccactgatctatttgtctattccttcaccaacaccacatcgtcttgagt

SEQ ID NO: 461392 - DNA, 120 bp, Artificial Sequence
  ENSG00000157542_119 (sequence is synthesized)
actgtagctttctttctccatataaactgcagactcagttttttggtaccaacaaaataacttgctgagatttttattgggattgtatttaatctacagaggaagctgggaagtgacatc

SEQ ID NO: 461393 - DNA, 120 bp, Artificial Sequence
  ENSG00000157542_120 (sequence is synthesized)
ttgacaatattgagtccctccatgaaatggaatatctctgtatttacttagttcttctttgatatcattcaccagttttgtagttttcctcatgtagatcttatacatattgttagattt

SEQ ID NO: 461394 - DNA, 120 bp, Artificial Sequence
  ENSG00000157542_121 (sequence is synthesized)
ataccttaagtacttcatttcaagggatactaatttaaataatcatgtgcttttaatttcaaatttcacttattcattgccggtatataggaaaacaattgactttgtatattaactttg

SEQ ID NO: 461395 - DNA, 120 bp, Artificial Sequence
  ENSG00000157542_122 (sequence is synthesized)
aatcctaaaatcttgctataatcccttattagttccaggaaggttctggggcttgtttttgttttgttttttggtcagttatttcagattttctacatagatgatcatgtcatctgtaaa

SEQ ID NO: 461396 - DNA, 120 bp, Artificial Sequence
  ENSG00000157542_123 (sequence is synthesized)
caaagacaaagttttatttcttctttcttcccaatctatatatttttatttcctttccttgtcttattgcatcagccaggacttccagtatcatgttgaaaagcagtagtgatggggaca

SEQ ID NO: 461397 - DNA, 120 bp, Artificial Sequence
  ENSG00000157542_124 (sequence is synthesized)
ccttttttttcctgatcttagtgagacagcttcaggtttctcaccatcacgccatttagtatgatgttagctgtaaggttttttttttagatattgtttatcaggttgaggggcttctcc

SEQ ID NO: 461398 - DNA, 120 bp, Artificial Sequence
  ENSG00000157542_125 (sequence is synthesized)
tctattcctgctttactgagtgtttttatcatgaaagactgtttggatttttctgcatctgttgatatgatcatgcaatttttcttcttttgcctgttgatattcattacattagttgat

SEQ ID NO: 461399 - DNA, 120 bp, Artificial Sequence
  ENSG00000157542_126 (sequence is synthesized)
ctttgaatgttgaaccagccttatatacctaggacaaattccacctggtcatggtgtttaattattttcatatattgttggacttgatttgctaatattttgttgaggatttctgcatct

SEQ ID NO: 461400 - DNA, 120 bp, Artificial Sequence
  ENSG00000157542_127 (sequence is synthesized)
atgcttatgacaggtattggtctgtagttttcttgtaatgtctttgtctggttttggtattaaggtgatgctggattcatagaatgagttagcaagtgttctctctgcttctagcttttg

SEQ ID NO: 461401 - DNA, 120 bp, Artificial Sequence
  ENSG00000157542_128 (sequence is synthesized)
aaagagattgtagataatcagtatcatttcttccttaagtctttggtagaattcaccagtgaacccatctgggccaagtgctttctggttggggaggttactaaccattgattcaaatta

SEQ ID NO: 461402 - DNA, 120 bp, Artificial Sequence
  ENSG00000157542_129 (sequence is synthesized)
tttaacagagatatacctattcagattgtctatttgctcttgtgtgagttttgacaaattctatttttcaaggaattggttcatttcatctacattatcaaatttgtgggtataaagtca

SEQ ID NO: 461403 - DNA, 120 bp, Artificial Sequence
  ENSG00000157542_130 (sequence is synthesized)
ttcataaaattccttcattatcttttattatccttttaacctccatgggattgctagtaacgtccccgctctcatttctgatagtagtaatttgtgttctttctctttttttcttagtta

SEQ ID NO: 461404 - DNA, 120 bp, Artificial Sequence
  ENSG00000157542_131 (sequence is synthesized)
gcatgccttgagacttatggagcttattgatcttttcaaagaatcaactttgtttctatttattttattgatttcctattttcaatttcgtgaatttttaatctaattttaattatttct

SEQ ID NO: 461405 - DNA, 120 bp, Artificial Sequence
  ENSG00000157542_132 (sequence is synthesized)
tctcattggcttactttgggtttaatttgctctttttttctacttttttaaaatggaaacttaaatgattgatttcagatcttcttttgtgctatctgcattcaatgttataaatttccc

SEQ ID NO: 461406 - DNA, 120 bp, Artificial Sequence
  ENSG00000157542_133 (sequence is synthesized)
tttaagcattgtttttattgcatcccacaaattataataagctatgtttttattttcatttatttcaaaatattttttcacttatcttgagatttcttctttgacccatgatatttacac

SEQ ID NO: 461407 - DNA, 120 bp, Artificial Sequence
  ENSG00000157542_134 (sequence is synthesized)
gtgtgttgtttaatctccaagtattttggcattttccagctacctttctgttactgatttctagcttaattccattgttatctaagagcaaacattgtaggacttgtattcctttttttt

SEQ ID NO: 461408 - DNA, 120 bp, Artificial Sequence
  ENSG00000157542_135 (sequence is synthesized)
agaatttctattcttttaaatgtgttaaggtatgttttatgacccagaatgcagtctaacttgatgaacattccatgcaagcttaagcaaaaagactaatctgctgtagtttcctcatct

SEQ ID NO: 461409 - DNA, 120 bp, Artificial Sequence
  ENSG00000157542_136 (sequence is synthesized)
ttttcaacaaacatttgaaccccatagtctctgctttaataattctagtatccattccaacctacaccaccatcagttctagactgtacctctacactaaatgaccccagatggttcagc

SEQ ID NO: 461410 - DNA, 120 bp, Artificial Sequence
  ENSG00000157542_137 (sequence is synthesized)
tttaagtctcagctgttttcatcatttaactgattcccttgctggcagcagggaaattaactaccagccacacacttgtctccaacagcacccaccgaccacgtcctgctcccctgtcat

SEQ ID NO: 461411 - DNA, 120 bp, Artificial Sequence
  ENSG00000157542_138 (sequence is synthesized)
taccaccactaaacccggtagcagagagatgagctgtgaggtaggtgccttctagataaatgaggtgctactggacatgcactgtggtcttctctgcagtagaaaaatgtccaaggaagg

SEQ ID NO: 461412 - DNA, 120 bp, Artificial Sequence
  ENSG00000157542_139 (sequence is synthesized)
tcagcatcattgatagaaaataaatgtgaggctgcatctcgccagctcatccatgagcaattccttcagctccagcaggctactgacaatttgcttttaacccaaatccagctctaccct

SEQ ID NO: 461413 - DNA, 120 bp, Artificial Sequence
  ENSG00000157542_140 (sequence is synthesized)
ccctaaagcatgcacctagggccccagtcagaaaaacaaaacaaaaactaaaccagacaggataattaaggaggcaaaaagcttaaaccataatattttaattaagctgatttattttaa

SEQ ID NO: 461414 - DNA, 120 bp, Artificial Sequence
  ENSG00000157542_141 (sequence is synthesized)
ccgtagcactactgctttattttagttatataccagtaatggaaaatagtggccacttttcattattaatcataagataattcattgtatttgtctttcctaataaaatggcattatatt

SEQ ID NO: 461415 - DNA, 120 bp, Artificial Sequence
  ENSG00000157542_142 (sequence is synthesized)
aaggcccaaaatgtttactatggcccagtaaaatatagggttgttctgtgagctatttcttaggatagaaaattattccagaaagctattagttcaaaagtctctagcagtgccaaggtt

SEQ ID NO: 461416 - DNA, 120 bp, Artificial Sequence
  ENSG00000157542_143 (sequence is synthesized)
tcaatagtctctttaattttgaatctatgcgattgaagataagactgcatctagtttgggggttgcatgtttgtggacattcatgtttctatgtacctggaacttcttattctcaccatc

SEQ ID NO: 461417 - DNA, 120 bp, Artificial Sequence
  ENSG00000157542_144 (sequence is synthesized)
acacagaattttcaagaactagttaagcaaagaaagcaaagcccagcaggtgtcagaattgggtccccaagctgagggtcattagggtgcatgtcagtgtgccaactccaatatccacac

SEQ ID NO: 461418 - DNA, 120 bp, Artificial Sequence
  ENSG00000157542_145 (sequence is synthesized)
ctagagaacgcacatcttcccaaaagaaatgaagcacagatgatacttgatcctcaactttgtctccagaaattttttcaggaacttgagttctttatcaaatgctcacatcctacagag

SEQ ID NO: 461419 - DNA, 120 bp, Artificial Sequence
  ENSG00000157542_146 (sequence is synthesized)
aaataaagtgttccattttcaaggttcatgaagctcgtcaatgctgggagcaggcacacacttgtatttttatactcagggatcccaacaggcaactaaaactagacaaggacaaaactc

SEQ ID NO: 461420 - DNA, 120 bp, Artificial Sequence
  ENSG00000157542_147 (sequence is synthesized)
cactcaaaatattctgaaagttagctgatgccccatattttattactccaaatgtgtattcacttgcctgagtgctggccatgagcactcagtgaacacttgcagtacagtgagtgatgt

SEQ ID NO: 461421 - DNA, 120 bp, Artificial Sequence
  ENSG00000157542_148 (sequence is synthesized)
ccttgacaagttactatgaagactctgagaaaaagtaacatcccccactgtcctcaacaagcctgtaatcccatggctgccagcccttaccatgcaacaacactgcgctaagtgcatcga

SEQ ID NO: 461422 - DNA, 120 bp, Artificial Sequence
  ENSG00000157542_149 (sequence is synthesized)
accacacaaaaccctgtgagaaaatactgcttcccacttcacacgtgaagtaactgagtctagttttagaaatacctaaacgaagagggacaggcacaacaaatttgctggaatgtaaag

SEQ ID NO: 461423 - DNA, 120 bp, Artificial Sequence
  ENSG00000157542_150 (sequence is synthesized)
aaagtagatcagtttctgcgtaagcagtaagaaatggcctcatgaggaagaaagggacatttgccctgacatttctcaaagactgcttaggttttggagacagagatccaagggcaggca

SEQ ID NO: 461424 - DNA, 86 bp, Artificial Sequence
  ENSG00000157542_151 (sequence is synthesized)
caagattagcctgtgcaacacagcaagaccccatctctattttaaaaagagagagagagatccaaaagcaaaggcatttcagtttg

SEQ ID NO: 461425 - DNA, 120 bp, Artificial Sequence
  ENSG00000157542_152 (sequence is synthesized)
aagagagagagagatccaaaagcaaaggcatttcagtttgcaaggccagcatgggagagggtcttaaaacagaaacacacaaggtaagattgggggatggtacctagaccagcctaggat

SEQ ID NO: 461426 - DNA, 120 bp, Artificial Sequence
  ENSG00000157542_153 (sequence is synthesized)
cataggatttgataaaatatgcatttggaaaactggtgctaatttatagagacttagaatttcaggctaaggacaaggactaagaaacgaatagcatgaacagtattattgataaaccca

SEQ ID NO: 461427 - DNA, 120 bp, Artificial Sequence
  ENSG00000157542_154 (sequence is synthesized)
tcattgcatcttaaaggctctgaagtctttagtattgaattaaaaaataattttcactggacaaaaccaaaaggtctttacacaactgtcaagcactttgaaatgattcagcaaaaagca

SEQ ID NO: 461428 - DNA, 120 bp, Artificial Sequence
  ENSG00000157542_155 (sequence is synthesized)
gaataaatcactagtggaatttcaatagcatgtagttgtaaaccatcatgtgtccagcaaaatcacaaaacaagagtttattttagaagggacttagggatattaagaaatataacatac

SEQ ID NO: 461429 - DNA, 120 bp, Artificial Sequence
  ENSG00000157542_156 (sequence is synthesized)
aaaataactaaagttttctccaagcaaaaccaatgatcctttagggatgaacagaaagaaaacaagaaatgcttctttcaaaagttgctaccaaggcttctaagatttctttggaataaa

SEQ ID NO: 461430 - DNA, 120 bp, Artificial Sequence
  ENSG00000157542_157 (sequence is synthesized)
gtcactaagatttgcttctgaggtcaatcttgccaacttttccaccatgctttttaggaaggaacaccaggtagggctcaagtactggtttggctcctgtcccattttttggtccttttg

SEQ ID NO: 461431 - DNA, 120 bp, Artificial Sequence
  ENSG00000157542_158 (sequence is synthesized)
taactccctttactcaactccaagtatgtctgtgcacggacaatgagacgaaagcatgctcaatgcgaaagcacaaattatgtattgagaaatcactacaatgccaaatttttttaaaat

SEQ ID NO: 461432 - DNA, 120 bp, Artificial Sequence
  ENSG00000157542_159 (sequence is synthesized)
aaaaaaaaaatatatatatatatatatatctttaagaactcgctgtgttagggaaactgtttacatattgaggtgttcctctttttttgactggaacaataaaagaaaaatttgatatgg

SEQ ID NO: 461433 - DNA, 120 bp, Artificial Sequence
  ENSG00000157542_160 (sequence is synthesized)
ctttcccttaaggatgtctgagagctggtctcctcactcttttcttccgcctattaaactttccgcttcttaactcacccatgtgtgtccatgtcgttaatcatcttgacgagagatgat

SEQ ID NO: 461434 - DNA, 120 bp, Artificial Sequence
  ENSG00000157542_161 (sequence is synthesized)
gaaccccggatatttaccccagacagtgatgccgcttcaccagcattgcactctacttccccgcttcctgatcctgcctcagcttctcctctccacagagaagaaaaaattctgcctaaa

SEQ ID NO: 461435 - DNA, 120 bp, Artificial Sequence
  ENSG00000157551_0 (sequence is synthesized)
aggtgtttggagagcccggactggatgcccactagaatcctgtgctgtgaacagtgagagagttttcttcattttgaggaaccctaaacacctatctttcccaaggcaacctgtctggac

SEQ ID NO: 461436 - DNA, 120 bp, Artificial Sequence
  ENSG00000157551_1 (sequence is synthesized)
tgagcatttctctgacttgacataacttcccatccagccaggagtctgcactcttcagtctttgcaggcagtagcagaatcccatggtagccaggtgggtgaaggggagcgaggacgttc

SEQ ID NO: 461437 - DNA, 120 bp, Artificial Sequence
  ENSG00000157551_2 (sequence is synthesized)
tacctgccttgaagaagacacctgacctgcggagtgagtgaccagtgtttccagagcctggcaatggatgccattcacatcggcatgtccagcacccccctggtgaagcacactgctggg

SEQ ID NO: 461438 - DNA, 120 bp, Artificial Sequence
  ENSG00000157551_3 (sequence is synthesized)
gctgggctcaaggccaacagaccccgcgtcatgtccaagagtgggcacagcaacgtgagaattgacaaagtggatggcatatacctactctacctgcaagacctgtggaccacagttatc

SEQ ID NO: 461439 - DNA, 120 bp, Artificial Sequence
  ENSG00000157551_4 (sequence is synthesized)
gacatgaagtggagatacaaactcaccctgttcgctgccacttttgtgatgacctggttcctttttggagtcatctactatgccatcgcgtttattcatggggacttagaacccggtgag

SEQ ID NO: 461440 - DNA, 120 bp, Artificial Sequence
  ENSG00000157551_5 (sequence is synthesized)
cccatttcaaatcataccccctgcatcatgaaagtggactctctcactggggcgtttctcttttccctggaatcccagacaaccattggctatggagtccgttccatcacagaggaatgt

SEQ ID NO: 461441 - DNA, 120 bp, Artificial Sequence
  ENSG00000157551_6 (sequence is synthesized)
cctcatgccatcttcctgttggttgctcagttggtcatcacgaccttgattgagatcttcatcaccggaaccttcctggccaaaatcgccagacccaaaaagcgggctgagaccatcaag

SEQ ID NO: 461442 - DNA, 120 bp, Artificial Sequence
  ENSG00000157551_7 (sequence is synthesized)
ttcagccactgtgcagtcatcaccaagcagaatgggaagctgtgcttggtgattcaggtagccaatatgaggaagagcctcttgattcagtgccagctctctggcaagctcctgcagacc

SEQ ID NO: 461443 - DNA, 120 bp, Artificial Sequence
  ENSG00000157551_8 (sequence is synthesized)
cacgtcaccaaggagggggagcggattctcctcaaccaagccactgtcaaattccacgtggactcctcctctgagagccccttcctcattctgcccatgacattctaccatgtgctggat

SEQ ID NO: 461444 - DNA, 120 bp, Artificial Sequence
  ENSG00000157551_9 (sequence is synthesized)
gagacgagccccctgagagacctcacaccccaaaacctaaaggagaaggagtttgagcttgtggtcctcctcaatgccactgtggaatccaccagcgctgtctgccagagccgaacatct

SEQ ID NO: 461445 - DNA, 120 bp, Artificial Sequence
  ENSG00000157551_10 (sequence is synthesized)
tatatcccagaggaaatctactggggttttgagtttgtgcctgtggtatctctctccaaaaatggaaaatatgtggctgatttcagtcagtttgaacagattcggaaaagcccagattgc

SEQ ID NO: 461446 - DNA, 120 bp, Artificial Sequence
  ENSG00000157551_11 (sequence is synthesized)
acattttactgtgcagattctgagaaacagcaactcgaggagaagtacaggcaggaggatcagagggaaagagaactgaggacacttttattacaacagagcaatgtctgatcacagggg

SEQ ID NO: 461447 - DNA, 120 bp, Artificial Sequence
  ENSG00000157551_12 (sequence is synthesized)
cgccatccaggtttaaccctgcaagctgtttccacatcagaactcccttcaaacacaaagattgctgtgaaaacgaaaatgtgtagacgcactctcaaaaactgcacggacatacaaaat

SEQ ID NO: 461448 - DNA, 120 bp, Artificial Sequence
  ENSG00000157551_13 (sequence is synthesized)
caatcttttcctttgatcttgtggctaaaccagcatttctgtgtttgagagatttcctgttaggtgcttcgtctgaaagtgaactctcataattcaaattgtataaaataaagctacatt

SEQ ID NO: 461449 - DNA, 120 bp, Artificial Sequence
  ENSG00000157551_14 (sequence is synthesized)
tctaagagcttggtgtagggcaattggaataatgtcctgttagataaacagacatttagcaatcctgacattaaaaggaaatgtatttctatacaagattattagctgtaatacaagata

SEQ ID NO: 461450 - DNA, 120 bp, Artificial Sequence
  ENSG00000157551_15 (sequence is synthesized)
tttatttaaccaatgaccttatggctgagagttgaattgtggttcagtattcattgatctcactgctttaaaacatgctctttttgttcaagcaggaaaaatattatatctaattatgtc

SEQ ID NO: 461451 - DNA, 120 bp, Artificial Sequence
  ENSG00000157551_16 (sequence is synthesized)
tatgtggtaatacctaaaaagaggtagagagactctatgttcacaaaatatagtaatttcatttttacctttcttcagtggactgaattgtatggaaggaaattgatcagatctgtaatt

SEQ ID NO: 461452 - DNA, 120 bp, Artificial Sequence
  ENSG00000157551_17 (sequence is synthesized)
cacaactgtggaaacctacacaaatggggctgatgccattgtttcctctattttattttatttatttttgaatccactatctctttccattcaaaatatttccattcaaaatgtggttca

SEQ ID NO: 461453 - DNA, 120 bp, Artificial Sequence
  ENSG00000157551_18 (sequence is synthesized)
cagacccgccacatcagcaccatccgagagcttattagtaatgtgtagattctcatgtcccagccagacttacagaattggggtctgtatcttaacaagaaccccagatgatttgtgtac

SEQ ID NO: 461454 - DNA, 120 bp, Artificial Sequence
  ENSG00000157551_19 (sequence is synthesized)
aaatgaaagttcgaaagctgtgctctggacagtgttctcaaagcaactttctgaagccgtgtggaaaactgactctgtgtgggtcccgtatccctgtggcatccagacctggcctctctt

SEQ ID NO: 461455 - DNA, 120 bp, Artificial Sequence
  ENSG00000157551_20 (sequence is synthesized)
catttcattattattggccaatatttctttcagccatttcatttcttatctattaaaatggcttgcccataaaggaactgcataggattatcccctgacattccaagagcaaaataaagc

SEQ ID NO: 461456 - DNA, 120 bp, Artificial Sequence
  ENSG00000157551_21 (sequence is synthesized)
tcttgagagtaattgttgtctcagtcatgcttgctgattacagttagcacaaaagaaaaattcagctgcctgacaatacaggaaatgttctcagatgctgatgtttgtaaggtccggtgg

SEQ ID NO: 461457 - DNA, 120 bp, Artificial Sequence
  ENSG00000157551_22 (sequence is synthesized)
ggccatgaggaagaagaggagctgaaggtaagaaactcataaacaagatgactctttgatgcatgaacaagatttgaaaatctcaagcctgtaaagaatacccctgctatttaaataaag

SEQ ID NO: 461458 - DNA, 120 bp, Artificial Sequence
  ENSG00000157551_23 (sequence is synthesized)
ctcataccaagaggtaacattttgccccgggccaaattcaggggtctagtgccctgcattcctttgaggcaaaaaataaatgggctatgactggttaaatgtccaaaaggtgaattctca

SEQ ID NO: 461459 - DNA, 120 bp, Artificial Sequence
  ENSG00000157551_24 (sequence is synthesized)
tttcattcaaacaaagacagatttgcgcattcactcaagcagaatgtggccatgaatattcagcccctgcatacatacaaagatgtacgcatgattccccccaccaagcacacacacagt

SEQ ID NO: 461460 - DNA, 120 bp, Artificial Sequence
  ENSG00000157551_25 (sequence is synthesized)
cacacacgcacacacacacacatgcacacacgcgcgtgcacacacgcacacatgcacacacacatacgcacacgtaaacacatgcacacatgcacacacgcgcacacatgcacacacgca

SEQ ID NO: 461461 - DNA, 120 bp, Artificial Sequence
  ENSG00000157551_26 (sequence is synthesized)
cacacttgcacaggccctggctcttcaagcataatcatggtagtcatcagtgaaagacatttgaggttaagacagcaagtccttgacaaatatgttcatgtctatttggttctagttcta

SEQ ID NO: 461462 - DNA, 120 bp, Artificial Sequence
  ENSG00000157551_27 (sequence is synthesized)
taaaaatatgaacattgggactcagagaaaatggggaaaataaagtggattcaggttatcagtgaaatgatggtatagattacagcaaatctggatatatattgatgttactgcatttgc

SEQ ID NO: 461463 - DNA, 120 bp, Artificial Sequence
  ENSG00000157551_28 (sequence is synthesized)
aaatgtcctcccattaaacagaaaatgtggctaaaatccctggcctggaactgaactagtttaaggcaggtgtaagaatagtgggaggaaagtttgtgaaagtttaaagaatgccctcaa

SEQ ID NO: 461464 - DNA, 120 bp, Artificial Sequence
  ENSG00000157551_29 (sequence is synthesized)
tccatgaacgagagggaggatgttgtctttaattatttagaaggtttttttttccttgtctgttgataattttatggaaggttgctttagatctccattccttaaaaaaatattacatgt

SEQ ID NO: 461465 - DNA, 120 bp, Artificial Sequence
  ENSG00000157551_30 (sequence is synthesized)
cagtgtagttagatattatctcttttagttattatacttgctatttttactgtatagtgtggtataatcaacaaaaaataatgccacgggcatgtttacaccttttctgttgcactatta

SEQ ID NO: 461466 - DNA, 120 bp, Artificial Sequence
  ENSG00000157551_31 (sequence is synthesized)
aattcttttcacagtattcatatcaatgctaatttgaatgtgatgccaattaaaaatcttgttcatttatattgtatatggtacaaggacgtagcataagatccaaaaaaaattttgtat

SEQ ID NO: 461467 - DNA, 120 bp, Artificial Sequence
  ENSG00000157551_32 (sequence is synthesized)
tgtcatttagcatatcaatttcagccaaatttggaagacttgatcatcttatcttttgctctacacactcaaaacaaatattgcagcagaaatatcaccttaaaaatatcttattttata

SEQ ID NO: 461468 - DNA, 120 bp, Artificial Sequence
  ENSG00000157551_33 (sequence is synthesized)
tttagataatattgaaatcacagtctattaaaattggaaatttaattcaaataaaaatcaaacaaaatagttgtttcaatttatctaaatatctggtcttaagagtgccttaagagtgtc

SEQ ID NO: 461469 - DNA, 120 bp, Artificial Sequence
  ENSG00000157551_34 (sequence is synthesized)
ctattattactttgtacgtaatactttcatgttactatgctaacaaaggatttaggtagccaacttaatttattatatctggtcggtcttctgcttgaaacagattcacactcaacaccc

SEQ ID NO: 461470 - DNA, 120 bp, Artificial Sequence
  ENSG00000157551_35 (sequence is synthesized)
aactaaggaggagccaaagtagtggagtattcctgacccaaaaaggcttttgaattttgaaacatttctaatgtgttaggttttctcaatgagaccattaaaaaacgttgtgttccattt

SEQ ID NO: 461471 - DNA, 120 bp, Artificial Sequence
  ENSG00000157551_36 (sequence is synthesized)
gagaaaccagagtcaacagcagtaaatcagtgtgccccacaagccacgtcttattcagcaataaaatagtgctcacatggtgcctggcagacagtggctctggacagcaaagcactgagt

SEQ ID NO: 461472 - DNA, 120 bp, Artificial Sequence
  ENSG00000157551_37 (sequence is synthesized)
cacccaaccccactcctttgggatggggttgggagtcatgcattggctccctttttcatcctggggaaattacaacacaacgcagagtgtccagaaatctaaagagctggtttaaggtga

SEQ ID NO: 461473 - DNA, 120 bp, Artificial Sequence
  ENSG00000157551_38 (sequence is synthesized)
aaaaaatgccatgaatgaatgaaccagatgtttaataaatcaaaacaactattttgttggatttttatttgaattaaatttcccaatttttaatagactgtgatttcaatattatcgaaa

SEQ ID NO: 461474 - DNA, 120 bp, Artificial Sequence
  ENSG00000157551_39 (sequence is synthesized)
tgtaaacaaagatatatttttaaggtggcatttctactccagcatgaaaaaaatagtggcatttgcactctagcattattctgtctcccttatttgagtcttcaatatatatgcccagct

SEQ ID NO: 461475 - DNA, 120 bp, Artificial Sequence
  ENSG00000157551_40 (sequence is synthesized)
ggagggagaagaagagaaaaatgaaagcactaggcctttgactaggtttggttctatatgctgtcatgatgttcaaaatgtcagacatttgaccacatggcacagtgaatactctcacgc

SEQ ID NO: 461476 - DNA, 120 bp, Artificial Sequence
  ENSG00000157551_41 (sequence is synthesized)
acgctctcaattttggctttcattcttgctagacttttcttctattaaatttctgaaataactagttttttttttttgaacttgaaaatcagctttttattttttttaattttattatta

SEQ ID NO: 461477 - DNA, 120 bp, Artificial Sequence
  ENSG00000157551_42 (sequence is synthesized)
agaatgatggtttccagtttcatccaataactagttttatcatagctttccatgatgtaattttttaagcgaaaggtactaacatttccagtcttgatttccaagttttgtggtgtgcac

SEQ ID NO: 461478 - DNA, 120 bp, Artificial Sequence
  ENSG00000157551_43 (sequence is synthesized)
atttccaagttttgtggtgtgcactcgaaatctagtctctgattgttaaactctgggtaggtacaagaggctcttaattttcttcctcccaggaggacttacttacacttaaaggtcaaa

SEQ ID NO: 461479 - DNA, 120 bp, Artificial Sequence
  ENSG00000157551_44 (sequence is synthesized)
tcttcctcccaggaggacttacttacacttaaaggtcaaaagcttaacattcacttctaaatggttaactgcatacactttaccctttgtaaacttcaatttatcttttttttttttttt

SEQ ID NO: 461480 - DNA, 87 bp, Artificial Sequence
  ENSG00000157551_45 (sequence is synthesized)
gatactgggtctcgctctgtcgcccaggctgctatccgcttccaggttcacgccattctctccctcagcctcccgagtagctgggac

SEQ ID NO: 461481 - DNA, 120 bp, Artificial Sequence
  ENSG00000157551_46 (sequence is synthesized)
aagaaaaagaaaagaaaagaaaataaacgtggcaaaactagaccttcagacacttcacttcacttaaccctatggccctccttatcttgcacccaatttcttttcaacatcatacatgct

SEQ ID NO: 461482 - DNA, 120 bp, Artificial Sequence
  ENSG00000157551_47 (sequence is synthesized)
tttcttttcaacatcatacatgcttggttgactgtttcttcatatttgctgttcattctataaagtcaaatagattggtgggttaaaaaataatcaattcaaattcaaattaggaattta

SEQ ID NO: 461483 - DNA, 120 bp, Artificial Sequence
  ENSG00000157551_48 (sequence is synthesized)
tggacattcagatatccacatatttgagggcaggaatttttacttttcaattggtatgttggcagtgtgtaaaaatagaagaccaagagaaggcggttgattggagttgatacttaatag

SEQ ID NO: 461484 - DNA, 120 bp, Artificial Sequence
  ENSG00000157551_49 (sequence is synthesized)
ctaataaaaattacaagaaaggatggtggaagtcaaaggacagaactgatacacgagtataaaagccaacgatgtcatatatgtaggcaaagtctttgtaatctgaatataatgccagag

SEQ ID NO: 461485 - DNA, 120 bp, Artificial Sequence
  ENSG00000157551_50 (sequence is synthesized)
agctagggctgccaggcactctgtatgtgcagaatatgtcctatatggagtaattttttatttgtgtagacttttttaggataccttaaatgtcttacatgcaacctttttttccccata

SEQ ID NO: 461486 - DNA, 120 bp, Artificial Sequence
  ENSG00000157551_51 (sequence is synthesized)
tattacaaaattgccttggaaattagacaaatcttcaaacttaactgaaactcctgtcctgaatagttatttgccaaatctgacaaatttacaaagagtgttcacataatcccaaactat

SEQ ID NO: 461487 - DNA, 120 bp, Artificial Sequence
  ENSG00000157551_52 (sequence is synthesized)
gcccatttctacaagagaaatacatgcctctttatttggagtttatgatattcatacaactagtagtagagtcagggagtattccagaaacatatttccctggcttgcccaattatcaag

SEQ ID NO: 461488 - DNA, 120 bp, Artificial Sequence
  ENSG00000157551_53 (sequence is synthesized)
ggaaaatttcagctgaacacggggaacccagtctttgacactcctgtgtgcagtgtggagcagcgtgcactgtctgagtctccatagtgaggaatggtcttccctggggcatcaccctag

SEQ ID NO: 461489 - DNA, 120 bp, Artificial Sequence
  ENSG00000157551_54 (sequence is synthesized)
aaggatgggctcaaagtcgccctccacgtgggtgcacaggagcccagattctcaagccccagttgcagaattaggctgatggttttacaaaagagtcctcctaaaagtccatcactaagt

SEQ ID NO: 461490 - DNA, 120 bp, Artificial Sequence
  ENSG00000157551_55 (sequence is synthesized)
tttgtttggttagcaacccttgccacatgatgtagtacttagctataattttatttttattcaaggccaaatcttatctggtgtccatgccttcccacctacttaaaatttcaaatttca

SEQ ID NO: 461491 - DNA, 120 bp, Artificial Sequence
  ENSG00000157551_56 (sequence is synthesized)
ccctcaaaaatatttcagtaaataaaagttagatctactcaaaattagactccaagggaattactatagttgattatagagtatctatttccttaaaaaaaaaaaaccataagttgttga

SEQ ID NO: 461492 - DNA, 120 bp, Artificial Sequence
  ENSG00000157551_57 (sequence is synthesized)
ctctgagctaggaaatgcgtgatctctcagctgacttactttatgcaaatttacttaatattatagaagagtaaagagcttccaagaaggtgattggagggaagttcaaagggaagattt

SEQ ID NO: 461493 - DNA, 120 bp, Artificial Sequence
  ENSG00000157551_58 (sequence is synthesized)
ttttcattcactgtagttttagctgtattctttcatctgcaatcaaatctcaggattaaggatgtcgtattacatcaaatcattacaggaagtatgactgtatcagcggctttttacaaa

SEQ ID NO: 461494 - DNA, 120 bp, Artificial Sequence
  ENSG00000157551_59 (sequence is synthesized)
aacaaacctccagatcacaaaaggaagctgtgtttgtgtactgacacgaagtgttacgtagcagccaggagaggaaggatagcagccgacttggatccatttttgaggaattatttctgt

SEQ ID NO: 461495 - DNA, 120 bp, Artificial Sequence
  ENSG00000157551_60 (sequence is synthesized)
aaggtgtcatggaattgtaagttacaaaaataaggcttttgtaaacagaatctccattccagaaggacggactccaaaatgctacttaatgaaattcatgggaatgttatggtgatggaa

SEQ ID NO: 461496 - DNA, 120 bp, Artificial Sequence
  ENSG00000157551_61 (sequence is synthesized)
atcccaaatgacatgtagattttatatgcaaacaatcccactgcttgtaactcctggcagtgtgtacttaccaaaatcttgatcacacttaggtctcttgctatatatagaaccacatct

SEQ ID NO: 461497 - DNA, 120 bp, Artificial Sequence
  ENSG00000157551_62 (sequence is synthesized)
gatccttatacagtgttgcaagatatatgtccttgctttcccatggttcttaagtgagtcttaagcttggatttgctccagcagaatggtggtttgtgtttctcaaggctgagctactat

SEQ ID NO: 461498 - DNA, 120 bp, Artificial Sequence
  ENSG00000157551_63 (sequence is synthesized)
ttggtgcatgtcggaaatctcacactaactgtggatactctgtcatcactgaacccaatcatacaatgaccagacagctttaaatacctacttttgtatgctatgaattcatccgtttac

SEQ ID NO: 461499 - DNA, 120 bp, Artificial Sequence
  ENSG00000157551_64 (sequence is synthesized)
ttgtcaaatcctttatttccatatgtgtctccatcaccttttttttctctccggataaatggaattactgtaacttgtgaaacaatggcaaacactataaagctaattttacagtcttga

SEQ ID NO: 461500 - DNA, 120 bp, Artificial Sequence
  ENSG00000157551_65 (sequence is synthesized)
acaggagcacgtagcctgcaggtgtgggttgtacacaggcttccccctgctgagtcagttccccagatctcttcatcacttccccagatctctgggatcttcagctgagattgggcccca

SEQ ID NO: 461501 - DNA, 120 bp, Artificial Sequence
  ENSG00000157551_66 (sequence is synthesized)
gcacctggactcaaggacaggtgggagttaaccaagaaagggagaaaatgaagaaccttcaggaaggaattcatgtgccagatgtgggctgagagggcacccagctgctcaggaaggggc

SEQ ID NO: 461502 - DNA, 120 bp, Artificial Sequence
  ENSG00000157551_67 (sequence is synthesized)
ctgtctttcacccataaaaactgaagccatgtgccagaagccctcgtggctcaagggctctgtccttggacacggatgagggcagctgggcggtgggaccgaggctctgcctgaatgctc

SEQ ID NO: 461503 - DNA, 120 bp, Artificial Sequence
  ENSG00000157551_68 (sequence is synthesized)
caggtactagaagatgctaggggcctcacagacagcttgttcccggctgttaacatggagcagagcgttccctggggctgagcatgggagcccagcacttcttatagtgtttccagagcc

SEQ ID NO: 461504 - DNA, 120 bp, Artificial Sequence
  ENSG00000157551_69 (sequence is synthesized)
agtggtgaagagtataaatcgtggttttccaagtgtagtctaaggtctaacagcatcggggatatctgggaaattatcagaactacagaccctctggctgcaccccaaacctgctgaatc

SEQ ID NO: 461505 - DNA, 120 bp, Artificial Sequence
  ENSG00000157551_70 (sequence is synthesized)
cgtcttcagaggaaggatagctgtacagcgtggtgaaggactcaatgagaaggtgcattgcccatccttcagagagctctgtgtgaatccataaaaggtgcttaaagcttttcactccat

SEQ ID NO: 461506 - DNA, 120 bp, Artificial Sequence
  ENSG00000157551_71 (sequence is synthesized)
agcagcagttggaaatgatgtagaatctggggagagaccttttaaagaaaggtgatatcaaggcttgtttgtggactgagaatgatgtgtgatcttggaagtcagcttgagaatggagca

SEQ ID NO: 461507 - DNA, 120 bp, Artificial Sequence
  ENSG00000157551_72 (sequence is synthesized)
gtcaagacacaaattggttggcaggtcatgatcagcatgagaggaatctctatcctgcttccaggctatccttggcactgtgatttttaataaaataatgcactgactttgcattcaaag

SEQ ID NO: 461508 - DNA, 120 bp, Artificial Sequence
  ENSG00000157551_73 (sequence is synthesized)
aaattactggacagtcaaaatatacacacatatgcaaaaattgaggagcaatttcccataagatacaaaccttggaaatcaagaaagttctggaatgatgaagctgttcatgccaagacc

SEQ ID NO: 461509 - DNA, 120 bp, Artificial Sequence
  ENSG00000157551_74 (sequence is synthesized)
ttttcttggaactcctttttattgcttgtgctcctggtacatcagcccatttcatggtacgttgaagcatgcctccctgtgggattgctggattcccagcccagtgaggtaatgaccaag

SEQ ID NO: 461510 - DNA, 120 bp, Artificial Sequence
  ENSG00000157551_75 (sequence is synthesized)
tccctccctccctccctccctccttccctatccctccctcctctgcccaatgtctcccaatctctttcctttctctcttcagttcctccaggtaattcttactcaaacttgtaccaactt

SEQ ID NO: 461511 - DNA, 120 bp, Artificial Sequence
  ENSG00000157551_76 (sequence is synthesized)
aaaatattctagactcttcccttccagcgctcactgtttacttcctctgcacttccccttcctgcctccccgtgtgccggcagtagcagaatcccatggtagccaggtgggtgaagggga

SEQ ID NO: 461512 - DNA, 120 bp, Artificial Sequence
  ENSG00000157551_77 (sequence is synthesized)
gcagtagcagaatcccatggtagccaggtgggtgaaggggagcgaggacgttctacctgccttgaagaagacacctgacctgcggatgtttccagagcctggcaatggatgccattcaca

SEQ ID NO: 461513 - DNA, 120 bp, Artificial Sequence
  ENSG00000157554_0 (sequence is synthesized)
atccgctctaaacaacctcatcaaaactactttctggtcagagagaagcaataattattattaacatttattaacgatcaataaacttgatcgcattatggccagcactattaaggaagc

SEQ ID NO: 461514 - DNA, 120 bp, Artificial Sequence
  ENSG00000157554_1 (sequence is synthesized)
cttatcagttgtgagtgaggaccagtcgttgtttgagtgtgcctacggaacgccacacctggctaagacagagatgaccgcgtcctcctccagcgactatggacagacttccaagatgag

SEQ ID NO: 461515 - DNA, 120 bp, Artificial Sequence
  ENSG00000157554_2 (sequence is synthesized)
cccacgcgtccctcagcaggattggctgtctcaacccccagccagggtcaccatcaaaatggaatgtaaccctagccaggtgaatggctcaaggaactctcctgatgaatgcagtgtggc

SEQ ID NO: 461516 - DNA, 120 bp, Artificial Sequence
  ENSG00000157554_3 (sequence is synthesized)
caaaggcgggaagatggtgggcagcccagacaccgttgggatgaactacggcagctacatggaggagaagcacatgccacccccaaacatgaccacgaacgagcgcagagttatcgtgcc

SEQ ID NO: 461517 - DNA, 120 bp, Artificial Sequence
  ENSG00000157554_4 (sequence is synthesized)
agcagatcctacgctatggagtacagaccatgtgcggcagtggctggagtgggcggtgaaagaatatggccttccagacgtcaacatcttgttattccagaacatcgatgggaaggaact

SEQ ID NO: 461518 - DNA, 120 bp, Artificial Sequence
  ENSG00000157554_5 (sequence is synthesized)
gtgcaagatgaccaaggacgacttccagaggctcacccccagctacaacgccgacatccttctctcacatctccactacctcagagagactcctcttccacatttgacttcagatgatgt

SEQ ID NO: 461519 - DNA, 120 bp, Artificial Sequence
  ENSG00000157554_6 (sequence is synthesized)
tgataaagccttacaaaactctccacggttaatgcatgctagaaacacagggggtgcagcttttattttcccaaatacttcagtatatcctgaagctacgcaaagaattacaactaggcc

SEQ ID NO: 461520 - DNA, 120 bp, Artificial Sequence
  ENSG00000157554_7 (sequence is synthesized)
agatttaccatatgagccccccaggagatcagcctggaccggtcacggccaccccacgccccagtcgaaagctgctcaaccatctccttccacagtgcccaaaactgaagaccagcgtcc

SEQ ID NO: 461521 - DNA, 120 bp, Artificial Sequence
  ENSG00000157554_8 (sequence is synthesized)
tcagttagatccttatcagattcttggaccaacaagtagccgccttgcaaatccaggcagtggccagatccagctttggcagttcctcctggagctcctgtcggacagctccaactccag

SEQ ID NO: 461522 - DNA, 120 bp, Artificial Sequence
  ENSG00000157554_9 (sequence is synthesized)
ctgcatcacctgggaaggcaccaacggggagttcaagatgacggatcccgacgaggtggcccggcgctggggagagcggaagagcaaacccaacatgaactacgataagctcagccgcgc

SEQ ID NO: 461523 - DNA, 120 bp, Artificial Sequence
  ENSG00000157554_10 (sequence is synthesized)
cctccgttactactatgacaagaacatcatgaccaaggtccatgggaagcgctacgcctacaagttcgacttccacgggatcgcccaggccctccagccccaccccccggagtcatctct

SEQ ID NO: 461524 - DNA, 120 bp, Artificial Sequence
  ENSG00000157554_11 (sequence is synthesized)
gtacaagtacccctcagacctcccgtacatgggctcctatcacgcccacccacagaagatgaactttgtggcgccccaccctccagccctccccgtgacatcttccagtttttttgctgc

SEQ ID NO: 461525 - DNA, 120 bp, Artificial Sequence
  ENSG00000157554_12 (sequence is synthesized)
cccaaacccatactggaattcaccaactgggggtatataccccaacactaggctccccaccagccatatgccttctcatctgggcacttactactaaagacctggcggaggcttttccca

SEQ ID NO: 461526 - DNA, 120 bp, Artificial Sequence
  ENSG00000157554_13 (sequence is synthesized)
tcagcgtgcattcaccagcccatcgccacaaactctatcggagaacatgaatcaaaagtgcctcaagaggaatgaaaaaagctttactggggctggggaaggaagccggggaagagatcc

SEQ ID NO: 461527 - DNA, 120 bp, Artificial Sequence
  ENSG00000157554_14 (sequence is synthesized)
aaagactcttgggagggagttactgaagtcttactacagaaatgaggaggatgctaaaaatgtcacgaatatggacatatcatctgtggactgaccttgtaaaagacagtgtatgtagaa

SEQ ID NO: 461528 - DNA, 120 bp, Artificial Sequence
  ENSG00000157554_15 (sequence is synthesized)
gcatgaagtcttaaggacaaagtgccaaagaaagtggtcttaagaaatgtataaactttagagtagagtttggaatcccactaatgcaaactgggatgaaactaaagcaatagaaacaac

SEQ ID NO: 461529 - DNA, 120 bp, Artificial Sequence
  ENSG00000157554_16 (sequence is synthesized)
acagttttgacctaacataccgtttataatgccattttaaggaaaactacctgtatttaaaaatagaaacatatcaaaaacaagagaaaagacacgagagagactgtggcccatcaacag

SEQ ID NO: 461530 - DNA, 120 bp, Artificial Sequence
  ENSG00000157554_17 (sequence is synthesized)
acgttgatatgcaactgcatggcatgtgctgttttggttgaaatcaaatacattccgtttgatggacagctgtcagctttctcaaactgtgaagatgacccaaagtttccaactccttta

SEQ ID NO: 461531 - DNA, 120 bp, Artificial Sequence
  ENSG00000157554_18 (sequence is synthesized)
cagtattaccgggactatgaactaaaaggtgggactgaggatgtgtatagagtgagcgtgtgattgtagacagaggggtgaagaaggaggaggaagaggcagagaaggaggagaccaggg

SEQ ID NO: 461532 - DNA, 120 bp, Artificial Sequence
  ENSG00000157554_19 (sequence is synthesized)
ctgggaaagaaacttctcaagcaatgaagactggactcaggacatttggggactgtgtacaatgagttatggagactcgagggttcatgcagtcagtgttataccaaacccagtgttagg

SEQ ID NO: 461533 - DNA, 120 bp, Artificial Sequence
  ENSG00000157554_20 (sequence is synthesized)
ctgatatttaagagaaacattcaggacctcatcattatgtgggggctttgttctccacagggtcaggtaagagatggccttcttggctgccacaatcagaaatcacgcaggcattttggg

SEQ ID NO: 461534 - DNA, 120 bp, Artificial Sequence
  ENSG00000157554_21 (sequence is synthesized)
taggcggcctccagttttcctttgagtcgcgaacgctgtgcgtttgtcagaatgaagtatacaagtcaatgtttttccccctttttatataataattatataacttatgcatttatacac

SEQ ID NO: 461535 - DNA, 120 bp, Artificial Sequence
  ENSG00000157554_22 (sequence is synthesized)
tacgagttgatctcggccagccaaagacacacgacaaaagagacaatcgatataatgtggccttgaattttaactctgtatgcttaatgtttacaatatgaagttattagttcttagaat

SEQ ID NO: 461536 - DNA, 120 bp, Artificial Sequence
  ENSG00000157554_23 (sequence is synthesized)
gcagaatgtatgtaataaaataagcttggcctagcatggcaaatcagatttatacaggagtctgcatttgcactttttttagtgactaaagttgcttaatgaaaacatgtgctgaatgtt

SEQ ID NO: 461537 - DNA, 120 bp, Artificial Sequence
  ENSG00000157554_24 (sequence is synthesized)
gtggattttgtgttataatttactttgtccaggaacttgtgcaagggagagccaaggaaataggatgtttggcacccaaatggcgtcagcctctccaggtccttcttgcctcccctcctg

SEQ ID NO: 461538 - DNA, 120 bp, Artificial Sequence
  ENSG00000157554_25 (sequence is synthesized)
tcttttatttctagccccttttggaacagaaggaccccgggtttcacattggagcctccatatttatgcctggaatggaaagaggcctatgaagctggggttgtcattgagaaattctag

SEQ ID NO: 461539 - DNA, 120 bp, Artificial Sequence
  ENSG00000157554_26 (sequence is synthesized)
ttcagcacctggtcacaaatcacccttaattcctgctatgattaaaatacatttgttgaacagtgaacaagctaccactcgtaaggcaaactgtattattactggcaaataaagcgtcat

SEQ ID NO: 461540 - DNA, 120 bp, Artificial Sequence
  ENSG00000157554_27 (sequence is synthesized)
ggatagctgcaatttctcactttacagaaacaagggataacgtctagatttgctgcggggtttctctttcaggagctctcactaggtagacagctttagtcctgctacatcagagttacc

SEQ ID NO: 461541 - DNA, 120 bp, Artificial Sequence
  ENSG00000157554_28 (sequence is synthesized)
tgggcactgtggcttgggattcactagccctgagcctgatgttgctggctatcccttgaagacaatgtttatttccataatctagagtcagtttccctgggcatcttttctttgaatcac

SEQ ID NO: 461542 - DNA, 120 bp, Artificial Sequence
  ENSG00000157554_29 (sequence is synthesized)
aaatgctgccaaccttggtccaggtgaaggcaactcaaaaggtgaaaatacaaggtgaccgtgcgaaggcgctagccgaaacatcttagctgaataggtttctgaactggcccttttcat

SEQ ID NO: 461543 - DNA, 120 bp, Artificial Sequence
  ENSG00000157554_30 (sequence is synthesized)
agctgtttcagggcctgtttttttcacgttgcagtccttttgctatgattatgtgaagttgccaaacctctgtgctgtggatgttttggcagtgggctttgaagtcggcaggacacgatt

SEQ ID NO: 461544 - DNA, 120 bp, Artificial Sequence
  ENSG00000157554_31 (sequence is synthesized)
accaatgctcctgacaccccgtgtcatttggattagacggagcccaaccatccatcattttgcagcagcctgggaaggcccacaaagtgcccgtatctccttagggaaaataaataaata

SEQ ID NO: 461545 - DNA, 120 bp, Artificial Sequence
  ENSG00000157554_32 (sequence is synthesized)
caatcatgaaagctggcagttaggctgacccaaactgtgctaatggaaaagatcagtcatttttattttggaatgcaaagtcaagacacacctacattcttcatagaaatacacatttac

SEQ ID NO: 461546 - DNA, 120 bp, Artificial Sequence
  ENSG00000157554_33 (sequence is synthesized)
ttggataatcactcagttctctcttcaagactgtctcatgagcaagatcataaaaacaagacatgattatcatattcaattttaacagatgttttccattagatccctcaaccctccacc

SEQ ID NO: 461547 - DNA, 120 bp, Artificial Sequence
  ENSG00000157554_34 (sequence is synthesized)
cccagtccaggttattagcaagtcttatgagcaactgggataattttggataacatgataatactgagttccttcaaatacataattcttaaattgtttcaaaatggcattaactctctg

SEQ ID NO: 461548 - DNA, 120 bp, Artificial Sequence
  ENSG00000157554_35 (sequence is synthesized)
ttactgttgtaatctaattccaaagccccctccaggtcatattcataattgcatgaaccttttctctctgtttgtccctgtctcttggcttgccctgatgtatactcagactcctgtaca

SEQ ID NO: 461549 - DNA, 120 bp, Artificial Sequence
  ENSG00000157554_36 (sequence is synthesized)
atcttactcctgctggcaagagatttgtcttcttttcttgtcttcaattggctttcgggccttgtatgtggtaaaatcaccaaatcacagtcaagactgtgtttttgttcctagtttgat

SEQ ID NO: 461550 - DNA, 120 bp, Artificial Sequence
  ENSG00000157554_37 (sequence is synthesized)
gcccttatgtcccggaggggttcacaaagtgctttgtcaggactgctgcagttagaaggctcactgcttctcctaagccttctgcacagatgtggcacctgcaacccaggagcaggagcc

SEQ ID NO: 461551 - DNA, 120 bp, Artificial Sequence
  ENSG00000157554_38 (sequence is synthesized)
ggaggagctgccctctgacagcaggtgcagcagagatggctacagctcaggagctgggaaggtgatggggcacagggaaagcacagatgttctgcagcgccccaaagtgacccattgcct

SEQ ID NO: 461552 - DNA, 120 bp, Artificial Sequence
  ENSG00000157554_39 (sequence is synthesized)
ggagaaagagaagaaaatattttttaaaaagctagtttatttagcttctcattaattcattcaaataaagtcgtgaggtgactaattagagaataaaaattactttggactactcaaaaa

SEQ ID NO: 461553 - DNA, 120 bp, Artificial Sequence
  ENSG00000157554_40 (sequence is synthesized)
gctgagcccgtcggcgccgagggagttagtgcgacccggctcggcgcgcacggccaaggcacgcgcgctggcacacgcgggcgcggacacgcgcggacacacacgtgcgggacacgccct

SEQ ID NO: 461554 - DNA, 120 bp, Artificial Sequence
  ENSG00000157554_41 (sequence is synthesized)
cccccgacggcggcgctaacctctcggttattccaggatctttggagacccgaggaaagccgtgttgaccaaaagcaagacaaatgactcacagagaaaaaagatggcagaaccaagggc

SEQ ID NO: 461555 - DNA, 120 bp, Artificial Sequence
  ENSG00000157554_42 (sequence is synthesized)
tccgctctaaacaacctcatcaaaactactttctggtcagagagaagcaataattattattaacatttattaacgatcaataaacttgatcgcattatggccagcactattaaggaactc

SEQ ID NO: 461556 - DNA, 120 bp, Artificial Sequence
  ENSG00000157554_43 (sequence is synthesized)
agatcaaagtcaaagagaaatggagagggtgttgaaatgatcagcgaaaattaaatgtaaaatatattcttattggaagtctgatgctctattatcaataaaggacacatagcaaagata

SEQ ID NO: 461557 - DNA, 120 bp, Artificial Sequence
  ENSG00000157554_44 (sequence is synthesized)
tctcttcattgagagacatcccagatgtcctgctgagatccgtgccctaagtcacgtgatacaaagagagctgatcccggagctgaagccagtcccagacagtcttattctgcctctgtt

SEQ ID NO: 461558 - DNA, 120 bp, Artificial Sequence
  ENSG00000157554_45 (sequence is synthesized)
gatttggagactaaatccactcaaaccatttcattcaaagaccacactaaaggaattaagagcagattagccctttaactagcttttcagaaagacagatgggcaaagaaggcatcctgg

SEQ ID NO: 461559 - DNA, 120 bp, Artificial Sequence
  ENSG00000157554_46 (sequence is synthesized)
atgcctggcagttaggaataggccgacttttgaactaacagaaggatctgtccctcctcgggggaagagcacaaaacaaggacactccccagattcacagtgaccgattatcagtatgtc

SEQ ID NO: 461560 - DNA, 120 bp, Artificial Sequence
  ENSG00000157554_47 (sequence is synthesized)
acaagaagccagtcttgcagagcagaagcatgcaaccagtagtatttacatctgaatcttactgcctgtcctccaaatgatttaattaggtaataaatttacatgccattcatgcaaaaa

SEQ ID NO: 461561 - DNA, 120 bp, Artificial Sequence
  ENSG00000157554_48 (sequence is synthesized)
gttttcacttggtcggaatggggagagtgtgcaagagatcgctgcgggacaggttcctagagatcgctccgggacggtcgtgacggcccccgagggacatgagagaagaggagcggcgct

SEQ ID NO: 461562 - DNA, 120 bp, Artificial Sequence
  ENSG00000157554_49 (sequence is synthesized)
gatgcacagttgacaagaattgcccctccaagatctcattgctgtttctgggaagtaaacgctccttaaaagatttacttgtaatactcaaatcaacaaatgcccgcattcaggctcatc

SEQ ID NO: 461563 - DNA, 120 bp, Artificial Sequence
  ENSG00000157554_50 (sequence is synthesized)
atacacgctatacgatcaaatgaagcagcatatggaatagagatcaacaggggagggggaagcttttggagggaggatccagtgatctcataaagatcttgtctgagcctgttagttctg

SEQ ID NO: 461564 - DNA, 120 bp, Artificial Sequence
  ENSG00000157554_51 (sequence is synthesized)
aggtgtgttttggacattgaaaaacctgaaagtaattaaccttcccaatctaaaccgtattttccacaaataggtttgttggatactagtattttcacgtgtaattagaaaaggaattac

SEQ ID NO: 461565 - DNA, 120 bp, Artificial Sequence
  ENSG00000157554_52 (sequence is synthesized)
tttccattattaacaaatagatgtgactttgactcatgttcattttttttggccacaaattctcagacttttgatcttaatggtcaagtgcaggtaagaggaaatgaaacaaaattaagc

SEQ ID NO: 461566 - DNA, 120 bp, Artificial Sequence
  ENSG00000157554_53 (sequence is synthesized)
cagctgcttaggatctttaattaggtttgatattcactatgaatgtgtggcagggtttcttgggaaagtagagacgggataaaacataaatgatttatgtaactggatatgtcccagagt

SEQ ID NO: 461567 - DNA, 120 bp, Artificial Sequence
  ENSG00000157554_54 (sequence is synthesized)
gaatgagactttggtctcaagaactgttccagtggtttgtcgttctttgatgagctccgtaagtgttgctcttctcaacagaaggttgaattttaggtgaacagcctttcctgattgtgt

SEQ ID NO: 461568 - DNA, 120 bp, Artificial Sequence
  ENSG00000157554_55 (sequence is synthesized)
agatctggaccacagtttgaaggtgcccctccctctccctctgattgccagagaacccctgcattatcacagcaacccaagtcaccccacgtattcccaaacacccatctgctcaggaca

SEQ ID NO: 461569 - DNA, 120 bp, Artificial Sequence
  ENSG00000157554_56 (sequence is synthesized)
gaagaggcattgcctctagttgagaaccaagaagtggtcatttccttaaaagctttgtcttgtcttattttaatatttaaatcaaatgacagaactgtttatctatttttatcactaaac

SEQ ID NO: 461570 - DNA, 120 bp, Artificial Sequence
  ENSG00000157554_57 (sequence is synthesized)
tccatagtccaattttcgtcttcatacaaattaacatgtttttacaaaatctctaatcttatgcactgctcactggcaacctctgtggtgaactaaaccgtaatgaataataggccagag

SEQ ID NO: 461571 - DNA, 120 bp, Artificial Sequence
  ENSG00000157554_58 (sequence is synthesized)
agccaatgcagcctaggttgcctagaggacagagaaacccagtggcaatttctgcagctttgccaacagccctgagtcacctcgaccctcccctggctcctggtccagtctgatgaaaca

SEQ ID NO: 461572 - DNA, 120 bp, Artificial Sequence
  ENSG00000157554_59 (sequence is synthesized)
gtttacaagatgtcttccaggttagcttttcttgttagtatctgctttcaactcaaaatgcacacactcaattaaatcttctacttctgtatgacaatgttaatagactcttggaaaaaa

SEQ ID NO: 461573 - DNA, 120 bp, Artificial Sequence
  ENSG00000157554_60 (sequence is synthesized)
caaaactactttctggtcagagagaagcaataattattattaacatttattaacgatcaataaacttgatcgcattatggccagcactattaagttaaactccattgatgatgcacagtt

SEQ ID NO: 461574 - DNA, 120 bp, Artificial Sequence
  ENSG00000157557_0 (sequence is synthesized)
gccactcccgcggagcctgcgggatcggggcttcccgggagcagcgcgatcagcaccacgactcggggacacagccagggcccggtttctacaggaagcgcctcatttggagcctttttg

SEQ ID NO: 461575 - DNA, 120 bp, Artificial Sequence
  ENSG00000157557_1 (sequence is synthesized)
tgatagaatgatcattagtcctaagcccattcagaggttcaagaatggggtcggctcaatttcagggccttattacccaagcccggctgcccttcggtgccaccagcaccactgctccgt

SEQ ID NO: 461576 - DNA, 120 bp, Artificial Sequence
  ENSG00000157557_2 (sequence is synthesized)
cgctgcggaattccaaaggcaggtttggcgttagggccttggccccagagaggacgccgagcgctccacggaaagtctccgcccggctcccagggcgcacactcgcgcgcacgtggggcc

SEQ ID NO: 461577 - DNA, 120 bp, Artificial Sequence
  ENSG00000157557_3 (sequence is synthesized)
gaggccctgctcccggggcctcagggccagccggcgagggacccagccgagtgacagcaggaggcggagggaagctcagagctcccggagccgcccggccagcgtccggcctccctgatc

SEQ ID NO: 461578 - DNA, 120 bp, Artificial Sequence
  ENSG00000157557_4 (sequence is synthesized)
gtctctggccggcgccctcgccctcgcccggcgcgcaccgagcagccgcgggcgccgagcagccaccgtcccgaccaagcgccggccctgcccgcagcggcaggatgaatgatttcggaa

SEQ ID NO: 461579 - DNA, 120 bp, Artificial Sequence
  ENSG00000157557_5 (sequence is synthesized)
tcaagaatatggaccaggtagcccctgtggctaacagttacagagggacactcaagcgccagccagcctttgacacctttgatgggtccctgtttgctgtttttccttctctaaatgaag

SEQ ID NO: 461580 - DNA, 120 bp, Artificial Sequence
  ENSG00000157557_6 (sequence is synthesized)
agcaaacactgcaagaagtgccaacaggcttggattccatttctcatgactccgccaactgtgaattgcctttgttaaccccgtgcagcaaggctgtgatgagtcaagccttaaaagcta

SEQ ID NO: 461581 - DNA, 120 bp, Artificial Sequence
  ENSG00000157557_7 (sequence is synthesized)
ccttcagtggcttcaaaaaggaacagcggcgcctgggcattccaaagaacccctggctgtggagtgagcaacaggtatgccagtggcttctctgggccaccaatgagttcagtctggtga

SEQ ID NO: 461582 - DNA, 120 bp, Artificial Sequence
  ENSG00000157557_8 (sequence is synthesized)
acgtgaatctgcagaggttcggcatgaatggccagatgctgtgtaaccttggcaaggaacgctttctggagctggcacctgactttgtgggtgacattctctgggaacatctggagcaaa

SEQ ID NO: 461583 - DNA, 120 bp, Artificial Sequence
  ENSG00000157557_9 (sequence is synthesized)
tgatcaaagaaaaccaagaaaagacagaagatcaatatgaagaaaattcacacctcacctccgttcctcattggattaacagcaatacattaggttttggcacagagcaggcgccctatg

SEQ ID NO: 461584 - DNA, 120 bp, Artificial Sequence
  ENSG00000157557_10 (sequence is synthesized)
gaatgcagacacagaattaccccaaaggcggcctcctggacagcatgtgtccggcctccacacccagcgtactcagctctgagcaggagtttcagatgttccccaagtctcggctcagct

SEQ ID NO: 461585 - DNA, 120 bp, Artificial Sequence
  ENSG00000157557_11 (sequence is synthesized)
ccgtcagcgtcacctactgctctgtcagtcaggacttcccaggcagcaacttgaatttgctcaccaacaattctgggactcccaaagaccacgactcccctgagaacggtgcggacagct

SEQ ID NO: 461586 - DNA, 120 bp, Artificial Sequence
  ENSG00000157557_12 (sequence is synthesized)
tcgagagctcagactccctcctccagtcctggaacagccagtcgtccttgctggatgtgcaacgggttccttccttcgagagcttcgaagatgactgcagccagtctctctgcctcaata

SEQ ID NO: 461587 - DNA, 120 bp, Artificial Sequence
  ENSG00000157557_13 (sequence is synthesized)
agccaaccatgtctttcaaggattacatccaagagaggagtgacccagtggagcaaggcaaaccagttatacctgcagctgtgctggccggcttcacaggaagtggacctattcagctgt

SEQ ID NO: 461588 - DNA, 120 bp, Artificial Sequence
  ENSG00000157557_14 (sequence is synthesized)
ggcagtttctcctggagctgctatcagacaaatcctgccagtcattcatcagctggactggagacggatgggagtttaagctcgccgaccccgatgaggtggcccgccggtggggaaaga

SEQ ID NO: 461589 - DNA, 120 bp, Artificial Sequence
  ENSG00000157557_15 (sequence is synthesized)
ggaaaaataagcccaagatgaactacgagaagctgagccggggcttacgctactattacgacaagaacatcatccacaagacgtcggggaagcgctacgtgtaccgcttcgtgtgcgacc

SEQ ID NO: 461590 - DNA, 120 bp, Artificial Sequence
  ENSG00000157557_16 (sequence is synthesized)
cccaggctcgtggactgagtgggaagcccatcctgaccagctgctccgaggacccaggaaaggcaggattgaaaatgtccaggaaagtggccaagaagcagtggccttattgcatcccaa

SEQ ID NO: 461591 - DNA, 120 bp, Artificial Sequence
  ENSG00000157557_17 (sequence is synthesized)
accacgcctcttgaccaggctgcctcccttgtggcagcaacggcacagctaattctactcacagtgcttttaagtgaaaatggtcgagaaagaggcaccaggaagccgtcctggcgcctg

SEQ ID NO: 461592 - DNA, 120 bp, Artificial Sequence
  ENSG00000157557_18 (sequence is synthesized)
gcagtccgtgggacgggatggttctggctgtttgagattctcaaaggagcgagcatgtcgtggacacacacagactatttttagattttcttttgccttttgcaaccaggaacagcaaat

SEQ ID NO: 461593 - DNA, 120 bp, Artificial Sequence
  ENSG00000157557_19 (sequence is synthesized)
gcaaaaactctttgagagggtaggagggtgggaaggaaacaaccatgtcatttcagaagttagtttgtatatattattataatcttataattgttctcagaatcccttaacagttgtatt

SEQ ID NO: 461594 - DNA, 120 bp, Artificial Sequence
  ENSG00000157557_20 (sequence is synthesized)
taacagaaattgtatattgtaatttaaaataattatataactgtatttgaaataagaattcagacatctgaggttttatttcatttttcaatagcacatatggaattttgcaaagattta

SEQ ID NO: 461595 - DNA, 120 bp, Artificial Sequence
  ENSG00000157557_21 (sequence is synthesized)
atctgccaagggccgactaagagaagttgtaaagtatgtattatttacatttaatagacttacagggataaggcctgtggggggtaatccctgctttttgtgtttttttgtttgtttgtt

SEQ ID NO: 461596 - DNA, 120 bp, Artificial Sequence
  ENSG00000157557_22 (sequence is synthesized)
tgtttgtttttggggggttttcttgccttggttgtctggcaaggactttgtacatttgggagtttttatgagaaacttaaatgttattatctgggcttatatctggcctctgctttctcc

SEQ ID NO: 461597 - DNA, 120 bp, Artificial Sequence
  ENSG00000157557_23 (sequence is synthesized)
tttaattgtaaagtaaaagctataaagcagtatttttcttgacaaatggcatatgttttccacttctttgcatgcgtttaagtcagtttatacacaaaatggattttattttttagttta

SEQ ID NO: 461598 - DNA, 120 bp, Artificial Sequence
  ENSG00000157557_24 (sequence is synthesized)
actgtgtttctccgacagctcacctctctctgaccacccagccatttccttcctgtgctccacgttcttctgtgtgattaaaataagaatattatttttggaaatatgcaactccttttc

SEQ ID NO: 461599 - DNA, 120 bp, Artificial Sequence
  ENSG00000157557_25 (sequence is synthesized)
agagatcaggagggatttatgtagcagctatttttactgcaaaagtaattcactggaaaaaaaatgtaatttgtaagaaagctttatttttatctcagctctatgtaaagttaaagttac

SEQ ID NO: 461600 - DNA, 120 bp, Artificial Sequence
  ENSG00000157557_26 (sequence is synthesized)
tgtacagagctgaaggacggggggcggtaggggtcttgatgaaacctcttgaacgaagcacagtttgtcccatctttgttcactcgtgtgtctcaaccatcttaatagcatgctgctcct

SEQ ID NO: 461601 - DNA, 120 bp, Artificial Sequence
  ENSG00000157557_27 (sequence is synthesized)
ttttgctcagtgtccacagcaagatgacgtgattcttattttcttggacacagactattctgaggcacagagcggggacttaagatgggaaagagaaagcatcggagccattcattcgga

SEQ ID NO: 461602 - DNA, 120 bp, Artificial Sequence
  ENSG00000157557_28 (sequence is synthesized)
gaaaacgttttgatcaaaatggagacttttgtagtcgtttcaaaagagcacctgagtcatgtgtattcccggcctttataaatgacccggtcaagttggtttcaaagtccgacaggcttg

SEQ ID NO: 461603 - DNA, 120 bp, Artificial Sequence
  ENSG00000157557_29 (sequence is synthesized)
tctgtttactagctgcgtggccttggacgggtggctgacatctgtaaagaatcctcctgtgatgaaactgaggaatcgggtggccgggcaagctgggaagagcaaagccagagctgcgct

SEQ ID NO: 461604 - DNA, 120 bp, Artificial Sequence
  ENSG00000157557_30 (sequence is synthesized)
gcctcaatacccacaaaagaccattcccagtatacataagcacaggatgtttttctcaagagggatgtatttatcacttggacatctgtttataatataaacagacatgtgactgggaac

SEQ ID NO: 461605 - DNA, 120 bp, Artificial Sequence
  ENSG00000157557_31 (sequence is synthesized)
atcttgctgccaaaagaatcctaggcagtggctcattgtatgtgaggttgaaccacgtgaaattgccaatattaggctggcttttatctacaaagaaggagtttcatggggttcagccta

SEQ ID NO: 461606 - DNA, 120 bp, Artificial Sequence
  ENSG00000157557_32 (sequence is synthesized)
acagttatggaaactacagtccttataaaccattggcatggtaataaacagatcttaagtataaaaattttgtaattgggcctttactctctcaataataaagtattttgtttatataaa

SEQ ID NO: 461607 - DNA, 120 bp, Artificial Sequence
  ENSG00000157557_33 (sequence is synthesized)
gctcctgaagagcgcgccgcgtgggggacggcccggttacttcctccagagactgacgagtgcggtgtcgctccagctcagagctcccggagccgcccggccagcgtccggcctccctga

SEQ ID NO: 461608 - DNA, 120 bp, Artificial Sequence
  ENSG00000157557_34 (sequence is synthesized)
gcccactgccccactgtacccacccaagcactcacctaagctggccatggaaatgtgaatgaaaagcctgacccaggccctcttgccctgctaacccagcaaggaggctctgaccagcca

SEQ ID NO: 461609 - DNA, 120 bp, Artificial Sequence
  ENSG00000157557_35 (sequence is synthesized)
ggaggactcaggatttaggaccatactcaactggggtttgatctccactttgccctgcggtggcccctctggtagctatgtggatcctgggcagattgtccatgttgctgggcctccgtt

SEQ ID NO: 461610 - DNA, 120 bp, Artificial Sequence
  ENSG00000157557_36 (sequence is synthesized)
ggggcacaggagagcgtgtccgaggtggcctggcgccccggctttgagggtgacttcctggagcggcgccgggcccggaggatctggggcgcccaagacacctgaaggctgcggcaccgc

SEQ ID NO: 461611 - DNA, 120 bp, Artificial Sequence
  ENSG00000157557_37 (sequence is synthesized)
gggaacctgcggggcgcggggtgccatggtcacctgctcgccgcgtccagggcccgggctggggacccctcggtcgtgcgaggagagcgtggggaacctgtcggaaatgagatctggttg

SEQ ID NO: 461612 - DNA, 120 bp, Artificial Sequence
  ENSG00000157570_0 (sequence is synthesized)
agtgtatccagaagctactgtcaggaggacactgtaagagaaccttggcacctctgggcccaaagggaaagacaccagtggaaagaggtgagcatctcctggaccaccctcaagcttcag

SEQ ID NO: 461613 - DNA, 120 bp, Artificial Sequence
  ENSG00000157570_1 (sequence is synthesized)
gtgagctgagcttctaacactaccatcaaagcaactggaaccccttgaatttgatttctggagacgcgagcataatccttttgcagacatctcaacgctggctctccaggtggagcacca

SEQ ID NO: 461614 - DNA, 120 bp, Artificial Sequence
  ENSG00000157570_2 (sequence is synthesized)
tggaaggcgactgtctgagctgcatgaagtatctgatgtttgtattcaatttcttcatatttctgggcggggcctgcctgctggccatcggcatctgggtcatggtggaccccaccggct

SEQ ID NO: 461615 - DNA, 120 bp, Artificial Sequence
  ENSG00000157570_3 (sequence is synthesized)
tccgggagatcgtggctgccaatcctctgctcctcacgggcgcctacatcctcctggccatggggggcctgctctttctgctcggcttcctgggctgctgcggggccgtccgtgagaaca

SEQ ID NO: 461616 - DNA, 120 bp, Artificial Sequence
  ENSG00000157570_4 (sequence is synthesized)
agtgtctgctgctatttttcttcctgttcatcctgatcatcttcctggcagagctctcagcagccatcctggccttcatcttcagggaaaatctcacccgagaattcttcaccaaggagc

SEQ ID NO: 461617 - DNA, 120 bp, Artificial Sequence
  ENSG00000157570_5 (sequence is synthesized)
tcaccaagcactaccagggcaataacgacacagacgtcttctctgccacctggaactcggtcatgatcacatttggttgctgcggggtcaacgggcctgaagactttaagtttgcatctg

SEQ ID NO: 461618 - DNA, 120 bp, Artificial Sequence
  ENSG00000157570_6 (sequence is synthesized)
tgtttcgactcctgaccctggatagtgaagaggtgccggaggcctgctgccggagggaaccccaaagtcgggacggggtcctgctgagccgggaggagtgcctcctgggaaggagcctat

SEQ ID NO: 461619 - DNA, 120 bp, Artificial Sequence
  ENSG00000157570_7 (sequence is synthesized)
tcctaaacaagcagggctgttacacggtgatcctcaacaccttcgagacctacgtctacttggccggagcccttgccatcggggtactggccatcgagcttttcgccatgatctttgcca

SEQ ID NO: 461620 - DNA, 120 bp, Artificial Sequence
  ENSG00000157570_8 (sequence is synthesized)
tgtgcctcttccggggcatccagtagagggtatggcctgaagcctgaagactcgccccacccaccactgcccagcacccagtgtcctcccgtgcccctccccgctgtcctcttggcccca

SEQ ID NO: 461621 - DNA, 120 bp, Artificial Sequence
  ENSG00000157570_9 (sequence is synthesized)
ggggagaagatgaggccatcagagatggccaggagaagggccaggggaatagagctatttttttaacaaaacaaaatgaagacaaaaatatggactgatgtatcctcgcctggactcagg

SEQ ID NO: 461622 - DNA, 120 bp, Artificial Sequence
  ENSG00000157570_10 (sequence is synthesized)
gcaggtgccgtgggttctccagagaccccagcaactggcccaggatgcaggctgctctagagaccaaaggaacaccaggcccagcgccctctttggtccagccagaccctgggccctctc

SEQ ID NO: 461623 - DNA, 120 bp, Artificial Sequence
  ENSG00000157570_11 (sequence is synthesized)
tcctcactgcaccaggacctgatgccaagaaagtgaggatttaggcaacaaggaggcaaaagcaaatctcagagaagtcatcaaagcccaggggctgcacggagattcagctgccatgtc

SEQ ID NO: 461624 - DNA, 120 bp, Artificial Sequence
  ENSG00000157570_12 (sequence is synthesized)
tttgaggactcggaacccacagcgcaatccctggtccactggaggatggactgttccccccttcaggccggggccaagagtgagctgctaacacggcatccaagaatggcccagctggta

SEQ ID NO: 461625 - DNA, 120 bp, Artificial Sequence
  ENSG00000157570_13 (sequence is synthesized)
ggatccttgctttccccatctgttggaccaaataatctcaaaggcccagagaggacagtgaccatccacagacacacagcacaggcgtgacagttctgaaaagaagctgagttgtctcca

SEQ ID NO: 461626 - DNA, 120 bp, Artificial Sequence
  ENSG00000157570_14 (sequence is synthesized)
ggctgctgtcactgcatccaggactctgtcagctctgctgcccacatgcacccctggcctcagcatcccggttcccccagacaagagagggcaagtcagccaggaactgcctcctccctg

SEQ ID NO: 461627 - DNA, 120 bp, Artificial Sequence
  ENSG00000157570_15 (sequence is synthesized)
ctctacagctaagaaaacaccattccatgacttcccaccgcgccctcgctcctacctccccacacctctctctgagtccccaggaacacacagaggtgcacatcacattcccttgtccac

SEQ ID NO: 461628 - DNA, 120 bp, Artificial Sequence
  ENSG00000157570_16 (sequence is synthesized)
actgcccgcctctcccacatgccacccccttccctgtccttccccaactccccagctccaagagtggaagaaatccccaagatcatctgggtctccctctccacacccagaactgaggct

SEQ ID NO: 461629 - DNA, 120 bp, Artificial Sequence
  ENSG00000157570_17 (sequence is synthesized)
acttctccaccctcttgcatacctccagggacagagagcttactacctcccaaggcagcctcctgcctttggactgctctgactttagcatcagcttaatacacagaagaggtttctgtt

SEQ ID NO: 461630 - DNA, 120 bp, Artificial Sequence
  ENSG00000157570_18 (sequence is synthesized)
tttctgtggctctgtccatggcatcccacttgcccactctccttcctggagtgttgaggtcacacattgactcccctgagccctcttctctccaggctaaagaatcccgaaggcatcgag

SEQ ID NO: 461631 - DNA, 120 bp, Artificial Sequence
  ENSG00000157570_19 (sequence is synthesized)
gccatttctgctgcaacaaggtttcctgtctcttcactgtccgcacatttcttagtattccctccaggcttgggcagggagactcgcagatgcacacccacaagtattcagttctcaaac

SEQ ID NO: 461632 - DNA, 120 bp, Artificial Sequence
  ENSG00000157570_20 (sequence is synthesized)
tctagacgagtgttggcaactggattgcaagatgctcctaccctgatagatcaggggtggctgctggaggctgtgctggggatctgaggtttggtctgggctcagtgggagacggcagtg

SEQ ID NO: 461633 - DNA, 120 bp, Artificial Sequence
  ENSG00000157570_21 (sequence is synthesized)
caatcctgatgagtgatgtctgccaggcaccgtaagtttgattagtgatgtctgccacgggcagggatggaaggagcagtgtgatgtctgctctcttctctcccctctgtccctcttcag

SEQ ID NO: 461634 - DNA, 120 bp, Artificial Sequence
  ENSG00000157570_22 (sequence is synthesized)
gaagaaagagctcattctgtctcacaagccaccggcatcctgtatcagcttccagcctcccctcaggctttccagtcaccagggacactcggagccacagcctagagccccgtgttccct

SEQ ID NO: 461635 - DNA, 120 bp, Artificial Sequence
  ENSG00000157570_23 (sequence is synthesized)
ggcctgtgcgtctgcccccttctgagatgcagccagaagctctgtgcctgctgcaaagattcaggtggaccctcctctaatctcctcctgctgtgcccgccagtccttgccctcccacca

SEQ ID NO: 461636 - DNA, 120 bp, Artificial Sequence
  ENSG00000157570_24 (sequence is synthesized)
ggtctctgagctcagtgttaccaaattcgccctttaacagcttgctctggcaaccccataaatgacacctgaggtccgtagaagctaagctcctgagacccagggggacctgccactggt

SEQ ID NO: 461637 - DNA, 120 bp, Artificial Sequence
  ENSG00000157570_25 (sequence is synthesized)
accgcggcccagcctggggcctgggggctgcccctcttgaaccacccacatgcttagccccagctttttggaagaggcaaatggctggtctgaggatgacacacaaaaacaaaaacaaaa

SEQ ID NO: 461638 - DNA, 120 bp, Artificial Sequence
  ENSG00000157570_26 (sequence is synthesized)
aacaaaaaacccatgctgggcaggactgaggcaaattgcacagctttatggctctaatccaggggcatcccaggcttctggggcccacagaagtcagagggaggacccaagagaaagggc

SEQ ID NO: 461639 - DNA, 120 bp, Artificial Sequence
  ENSG00000157570_27 (sequence is synthesized)
tggtcatgaagggaaatctggctaaggtgggttcaagggcagacacaagactgcccctcagcagctttctacaaatgtgccaaggaaccctcaatcagccctgattcagctcgccagcca

SEQ ID NO: 461640 - DNA, 120 bp, Artificial Sequence
  ENSG00000157570_28 (sequence is synthesized)
gccactggccaccctcttaggctggaaagggaagacaggcagtttctgctcctgttggcattcgctcaggctggtagctatttgcaagactgcctgaggccattccttggaggcaaggca

SEQ ID NO: 461641 - DNA, 120 bp, Artificial Sequence
  ENSG00000157570_29 (sequence is synthesized)
aagaaagctcagcccaaatcaggcttgagcctccctccagagcacagggagaaacagggtttagctggcttggtccagatacaacccacagcaggttctggtggtggctggggttgtggg

SEQ ID NO: 461642 - DNA, 120 bp, Artificial Sequence
  ENSG00000157570_30 (sequence is synthesized)
ggaggggtgggcagggatacctctttgtttcttttcaccccgaaatacaacagcccataacagagacttcctcggaccccactaacagggcaaggaacaagaagactacaccgctcatca

SEQ ID NO: 461643 - DNA, 120 bp, Artificial Sequence
  ENSG00000157570_31 (sequence is synthesized)
caaaccctgcctgtatcgaaagccactttcctgctctgaagctactgcctcttagagaaagggaatagctctttatgggctgggggtgagggcccctccccagggtccctgttaatttct

SEQ ID NO: 461644 - DNA, 120 bp, Artificial Sequence
  ENSG00000157570_32 (sequence is synthesized)
ggccttggtgctcaggcctgtccacagcctcccttgtctatgtctctatccatgcttaaggggcccggacaggatttcccaaaccagccgaggccccagcacccgccgtctccccagaag

SEQ ID NO: 461645 - DNA, 120 bp, Artificial Sequence
  ENSG00000157570_33 (sequence is synthesized)
ccccctcctccttcccccatgggtcatatgttgaaagtctattttaaaaactatgttccttgccgtagattgcagagctaatttatcacgtttctctcctgtgagaccccccttttatat

SEQ ID NO: 461646 - DNA, 120 bp, Artificial Sequence
  ENSG00000157570_34 (sequence is synthesized)
gatatatccagaggaagttttgtaatataaaacaggacgcccacactgatggttttgcactggtttttgtgaatgtttcttacaaaaagaaaaaggaacaaagaataaatagtgaccgtg

SEQ ID NO: 461647 - DNA, 80 bp, Artificial Sequence
  ENSG00000157570_35 (sequence is synthesized)
agctgccgccggcgtcgcggggctccaggctgcggggcggacgtagcgccgagcgatccaccgcggagccgcgcgaggcc

SEQ ID NO: 461648 - DNA, 80 bp, Artificial Sequence
  ENSG00000157570_36 (sequence is synthesized)
gcgggtccccggacgcgccgccaccgccgggaaggcagccggcgccgggcaagttgcgagcgcgcccctccgaccaggaa

SEQ ID NO: 461649 - DNA, 120 bp, Artificial Sequence
  ENSG00000157570_37 (sequence is synthesized)
atatttatgggaaatttcccaatattccaatcactgtagttgcaacattagacatggcctgcacgctgtcagttctctgtcccaccttaggggccgggtggcaaagagggtctttggtgc

SEQ ID NO: 461650 - DNA, 120 bp, Artificial Sequence
  ENSG00000157570_38 (sequence is synthesized)
aatgctgccaagtcgctgtttctgggtctcctgccctgcaccccctccccactgtcctgtctcagcagccgtgtgatagggtgagagctctggggacacctgccatgaaccctagtccac

SEQ ID NO: 461651 - DNA, 120 bp, Artificial Sequence
  ENSG00000157570_39 (sequence is synthesized)
agaaccaagaagcatttgtctgctgaggcccaagactgggtagaggtggtgagcatcgtcccccgtccgccaccacagcatgcaacaggctcctgctatgctcctggggctgctccagtc

SEQ ID NO: 461652 - DNA, 120 bp, Artificial Sequence
  ENSG00000157570_40 (sequence is synthesized)
tggtcacacagtggtgacaggtggagcccgcccacacccagtcttctgatgccactcctttgcagaggctgtatgtccttctctgtccccgcccctgtgtcctcctcctgcccaccagaa

SEQ ID NO: 461653 - DNA, 120 bp, Artificial Sequence
  ENSG00000157570_41 (sequence is synthesized)
actcaggattctcgcagcccgtacaacctacccagaaggaaatttacccagagtgggctcaaacgggtttcatcagcgatctccttccagggtggctgagtagggttgttcaggttgcac

SEQ ID NO: 461654 - DNA, 120 bp, Artificial Sequence
  ENSG00000157570_42 (sequence is synthesized)
actgtacgaggggcctctctaagggtaccatttgcatggaaggtatatatttgtttattcttttcatattttgatctcaatcctgttgactccaaggaggaatcactggtgtgtttgtta

SEQ ID NO: 461655 - DNA, 120 bp, Artificial Sequence
  ENSG00000157570_43 (sequence is synthesized)
tgaaaaatgtctgatagcagtggagtgccttaatcttacaaaatgagtatactgcgtcactggtgtgacagatggacggatgcattggccagtggccgccccatcccctgcctgccctct

SEQ ID NO: 461656 - DNA, 120 bp, Artificial Sequence
  ENSG00000157570_44 (sequence is synthesized)
ttaaaagcaattcaaggtgcggctgggactcactggctctcgccgcaggtgaattcctgcctggctcacctagtgcttgatgcctctgaccctggggctggctcaggggagtggtgggtc

SEQ ID NO: 461657 - DNA, 120 bp, Artificial Sequence
  ENSG00000157570_45 (sequence is synthesized)
agaagtgcctaacctccctttctgcctgtttctcctcccaactcctccactggcccgagcagctgggcggggcctgcctgctggccatcggcatctgggtcatggtggaccccaccggct

SEQ ID NO: 461658 - DNA, 120 bp, Artificial Sequence
  ENSG00000157578_0 (sequence is synthesized)
gggacgcgccggcgctgcggcgttggcgcagtcgtgggaacagcgcggagcagagaagcaccaaaagaggcaaactgagatgcagacaaatgatcatccgtatgctgatcattttgaata

SEQ ID NO: 461659 - DNA, 120 bp, Artificial Sequence
  ENSG00000157578_1 (sequence is synthesized)
gttttttaaaatatattctttctttaaaaagagaccaaaacctgtcaaaaaaatactaccgtggaaagctcataaatactacagtgtgaagaaccctgtgcttatcttcagtttatcatc

SEQ ID NO: 461660 - DNA, 120 bp, Artificial Sequence
  ENSG00000157578_2 (sequence is synthesized)
agacatcttagggaagtttaataaagaacaccaggagaattgagaattaaatgaaaaggtaaatccttttaaagacctcagaagatggatctgtttgtttcaatctgcttttgaggttgt

SEQ ID NO: 461661 - DNA, 120 bp, Artificial Sequence
  ENSG00000157578_3 (sequence is synthesized)
ttgctatgtctttggctgatctaacaaaaacaaatatagatgagcatttcttcggcgtggcattagaaaacaataggaggtctgcagcatgcaagagaagcccaggcacaggcgattttt

SEQ ID NO: 461662 - DNA, 120 bp, Artificial Sequence
  ENSG00000157578_4 (sequence is synthesized)
cacggaacagtaatgcttccaataagagtgttgattatagcagatctcagtgctcctgtggaagtttaagttctcagtatgattattcagaagactttctctgtgattgttcagaaaagg

SEQ ID NO: 461663 - DNA, 120 bp, Artificial Sequence
  ENSG00000157578_5 (sequence is synthesized)
ctattaatagaaattatttaaagcagcctgtggtaaaagaaaaggagaagaaaaagtataatgtttctaaaatctcccaatctaaaggccagaaggaaatatcagttgaaaaaaagcaca

SEQ ID NO: 461664 - DNA, 120 bp, Artificial Sequence
  ENSG00000157578_6 (sequence is synthesized)
cctggaatgcatcactctttaattctcaaatccatatgattgcccaaagaagagatgctatggctcatcgaatactctcagcaaggcttcataaaattaaaggactaaaaaatgaattag

SEQ ID NO: 461665 - DNA, 120 bp, Artificial Sequence
  ENSG00000157578_7 (sequence is synthesized)
ctgatatgcatcataaattggaagccatccttacagaaaaccaatttttgaaacaacttcagcttaggcatttgaaagctataggaaaatatgagaattcacaaaataatctacctcaaa

SEQ ID NO: 461666 - DNA, 120 bp, Artificial Sequence
  ENSG00000157578_8 (sequence is synthesized)
ttatggctaaacatcagaatgaagtaaaaaatttaaggcaactacttaggaaatcccaggaaaaggaaagaactctatctaggaaacttagagaaactgacagccagttactgaagacta

SEQ ID NO: 461667 - DNA, 120 bp, Artificial Sequence
  ENSG00000157578_9 (sequence is synthesized)
aagatatcttgcaggcactgcagaaactttctgaagacaaaaaccttgcagaaagggaagaactcactcataaattatctattatcacaacaaaaatggacgcaaatgacaaaaaaatac

SEQ ID NO: 461668 - DNA, 120 bp, Artificial Sequence
  ENSG00000157578_10 (sequence is synthesized)
actgaggttgaactgcagagcctttagccggcagctggctattgagactcggaagactttagcagctcagacagctaccaagactctgcaggtggaagtaaaacaccttcaacaaaaact

SEQ ID NO: 461669 - DNA, 120 bp, Artificial Sequence
  ENSG00000157578_11 (sequence is synthesized)
taaggaaaaggatcgtgagcttgaaattaaaaacatctatagtcatcgaatacttaaaaatttacatgacacagaggactatccaaaagtttcttcaacaaaatcagtccaagcagacag

SEQ ID NO: 461670 - DNA, 120 bp, Artificial Sequence
  ENSG00000157578_12 (sequence is synthesized)
aaaaattttgccattcacaagtatgagacaccagggaacccaaaaatcagatgttccacctttgacaactaagggtaaaaaggcaacaggaaacatcgatcataaagaaaaatcaactga

SEQ ID NO: 461671 - DNA, 120 bp, Artificial Sequence
  ENSG00000157578_13 (sequence is synthesized)
aataaatcatgaaattcctcactgtgtgaataaactaccaaagcaagaggattctaagagaaaatatgaagatttatcaggggaagagaaacatttggaagtccaaatactgctggagaa

SEQ ID NO: 461672 - DNA, 120 bp, Artificial Sequence
  ENSG00000157578_14 (sequence is synthesized)
tactggaagacaaaaagacaaaaaagaagaccaagaaaagaaaaacatttttgtgaaagaagagcaagaactaccaccaaaaataattgaagttattcatcctgaaagagaaagcaatca

SEQ ID NO: 461673 - DNA, 120 bp, Artificial Sequence
  ENSG00000157578_15 (sequence is synthesized)
agaagatgttctagtaagagaaaagtttaaaagaagcatgcagagaaatggtgtggatgacacacttggcaaaggcactgctccctacacgaaaggccccctcagacaaagaagacatta

SEQ ID NO: 461674 - DNA, 120 bp, Artificial Sequence
  ENSG00000157578_16 (sequence is synthesized)
ctcattcacagaagcaactgaaaacctgcatcatgggcttcctgcttcaggggggccagccaatgccggcaacatgaggtacagtcatagtacaggcaagcatctcagtaacagagagga

SEQ ID NO: 461675 - DNA, 120 bp, Artificial Sequence
  ENSG00000157578_17 (sequence is synthesized)
aatggagctagagcattctgacagtgggtatgagccctcatttggtaagtcttccagaataaaagtgaaggatacaactttcagagataagaaaagcagtctcatggaagaactctttgg

SEQ ID NO: 461676 - DNA, 120 bp, Artificial Sequence
  ENSG00000157578_18 (sequence is synthesized)
atcaggctatgtcttgaaaactgaccaatcaagtcctggtgttgcaaaaggctcagaggagcctttgcaaagtaaggagtcgcatcccctgcctcccagtcaggcctccaccagccatgc

SEQ ID NO: 461677 - DNA, 120 bp, Artificial Sequence
  ENSG00000157578_19 (sequence is synthesized)
tttcggagactctaaagtaactgtggtaaattctattaagccatcgtcacctacagaaggaaaaagaaaaataattatttaaatataatcaatatcctaatgcattctggtttgatataa

SEQ ID NO: 461678 - DNA, 120 bp, Artificial Sequence
  ENSG00000157578_20 (sequence is synthesized)
gcggagcaggtaacggccccgctgctgccgtcgtccccctcagccggttaccctgttacagccccagctctgggcccttccggaccctcctgctacgctctttctgggcttccagtatcg

SEQ ID NO: 461679 - DNA, 120 bp, Artificial Sequence
  ENSG00000157578_21 (sequence is synthesized)
ccggtcactcagtcctcgcccctgcctgcctcgctggcgccccgccgtttcctcctcgcggcacagtttgccaaggaacagctaccccggctcggcagtgaccgggcgccccggcgacac

SEQ ID NO: 461680 - DNA, 120 bp, Artificial Sequence
  ENSG00000157578_22 (sequence is synthesized)
gattgtggactgcctaatatatttcatcagaagagaaggctggagaattaagcagatgcagcaaaaagcagaaactgacttcaaaaaaaaccctctcagtagagaaagtgatattagatt

SEQ ID NO: 461681 - DNA, 120 bp, Artificial Sequence
  ENSG00000157578_23 (sequence is synthesized)
ccgctgggcagggggacggcctgggccgagtctgtcagcactgccttcaaaatgcacccagaatagattcacaattctaccatttctctcaaccgccactgtcaccaccttggtccaggc

SEQ ID NO: 461682 - DNA, 120 bp, Artificial Sequence
  ENSG00000157578_24 (sequence is synthesized)
ctgagaagcaccaaaagaggcaaactgagatgcagacaaatgatcatccgtatgctgatcattttgaataatgaaaagcggaatctaatttgcatttcattatgagagaattgagaatta

SEQ ID NO: 461683 - DNA, 120 bp, Artificial Sequence
  ENSG00000157578_25 (sequence is synthesized)
tactaactgcttcacttggcgtgctgcactaaataattatgttgtctaatagagggcacagaaagggagtggtttgaaggaaaaacagaagcagctcaaactagaaatgttcatctgttg

SEQ ID NO: 461684 - DNA, 120 bp, Artificial Sequence
  ENSG00000157578_26 (sequence is synthesized)
cagtgcacaagagttcactctgtggctggactggtttatctggaaatgaccattctctaagagagcacagctacagtgctaagggactttttccctgtgctgaaaagattgcattgtgtt

SEQ ID NO: 461685 - DNA, 120 bp, Artificial Sequence
  ENSG00000157578_27 (sequence is synthesized)
acgtgaaacctctctttgaagtcaaccctctaccttaaactgttgattaaaaggctacttccctaaaaacctactcagtgcatccgttcagggcctttgtattctccctcaccattttgg

SEQ ID NO: 461686 - DNA, 120 bp, Artificial Sequence
  ENSG00000157578_28 (sequence is synthesized)
ccaggaattaccacacagacatttgtagttattttcaaaatagcagcttttcccagataatgttcctgggtagtagggaaggaaaaggaattaaaataattaaagagatgactggattga

SEQ ID NO: 461687 - DNA, 120 bp, Artificial Sequence
  ENSG00000157578_29 (sequence is synthesized)
ttttcctcaacagcacttggttgtcaaaagcctggggattacattataagggatgacttgggagaaggcattgatatcatattaagaattctcctgcatatcttacattagctagtttga

SEQ ID NO: 461688 - DNA, 120 bp, Artificial Sequence
  ENSG00000157578_30 (sequence is synthesized)
gtctgtatagacataaacataaatggaattaatttaggatttaattctgtaatatttgatgctgaaacacgagtattttctatgatcttgaagtaagtaaatatcaggttcgtttcctcc

SEQ ID NO: 461689 - DNA, 120 bp, Artificial Sequence
  ENSG00000157578_31 (sequence is synthesized)
acgttttaatctcagttatttcttctgttgttaaaattccctattttccaataaatttttttcacatgaaattaatatgtgatctacagaaaataatgagcaacctcaattttcactctt

SEQ ID NO: 461690 - DNA, 120 bp, Artificial Sequence
  ENSG00000157578_32 (sequence is synthesized)
gtataccaaagtgatattattgggccttttaggtaatattgtattcatcttagcgtatgtctgtcatgtaaaagcaaatctgttttcatgtatgtatctaagttgttcatgtttttatat

SEQ ID NO: 461691 - DNA, 120 bp, Artificial Sequence
  ENSG00000157578_33 (sequence is synthesized)
ctatacataaaaccaaaacaaattccataactattttctttgatacaaaaagcacttaccaagtatgagaaatttctgtttggttgtaggcatttagtggaggaaaactgttttgtggac

SEQ ID NO: 461692 - DNA, 120 bp, Artificial Sequence
  ENSG00000157578_34 (sequence is synthesized)
caaaacatgttatttctttaacattaatgttttagggagtggtatttttagtgattctttccccttgtagctttccatgtcttccacttttcctgtttgggaaagtactgctgttataat

SEQ ID NO: 461693 - DNA, 120 bp, Artificial Sequence
  ENSG00000157578_35 (sequence is synthesized)
ggaggaggtcctactttatgttaaaacaaagaaaagtggtccttttggtaagctttctgtcaagtccagatctaacagttctccaataaaatagttctcattccagagagcagatgaata

SEQ ID NO: 461694 - DNA, 120 bp, Artificial Sequence
  ENSG00000157578_36 (sequence is synthesized)
actgtaccaaatgaaagtcttaaatcttaaaaatgagaatttaactctattttacatgtagacattgattggaaaatgaacgtatcttagagaactttacatatctacacatacacagat

SEQ ID NO: 461695 - DNA, 120 bp, Artificial Sequence
  ENSG00000157578_37 (sequence is synthesized)
atgctttattttttataatatgcattatcagtattcatcacagttataataacaataatatgttttatctgattctttaatttttgccattctggtagatgaaaagcggaatctaatttg

SEQ ID NO: 461696 - DNA, 120 bp, Artificial Sequence
  ENSG00000157578_38 (sequence is synthesized)
ggcgcagtcgtgggaacagcgcggagcagagaagcaccaaaagaggcaaactgagatgcagacaaatgatcatccgtatgctgatcattttgaatagtaagtacctgggtgctgataccg

SEQ ID NO: 461697 - DNA, 90 bp, Artificial Sequence
  ENSG00000157578_39 (sequence is synthesized)
ctgatcattttgaatagtaagtacctgggtgctgataccgcgatcaatgtgacaggtccctgccctcaaggagctaaggcccctagccaa

SEQ ID NO: 461698 - DNA, 65 bp, Artificial Sequence
  ENSG00000157578_40 (sequence is synthesized)
ttatctctgggctcaagcaattctcctgcctcggcctgagtagctgggattacaggtgtacgcca

SEQ ID NO: 461699 - DNA, 120 bp, Artificial Sequence
  ENSG00000157578_41 (sequence is synthesized)
gctgggattaaaggcgtgagccactgcgcccggccctacccttgccactctcttaaactcctagccccatcttttctcttttgccatcaggtaaaaccccaattaaccaaagtaacagag

SEQ ID NO: 461700 - DNA, 120 bp, Artificial Sequence
  ENSG00000157578_42 (sequence is synthesized)
aggtaaaaccccaattaaccaaagtaacagagtaggattgccacggttagctgagggtctgtaggagattgcatttcataaatgaccattttcctcagatttgatctcccaccacgccct

SEQ ID NO: 461701 - DNA, 120 bp, Artificial Sequence
  ENSG00000157578_43 (sequence is synthesized)
tgtgctgtcacttcatagagaagcttgaagctgtcacatgggaatcccctcattcttcagctcccaaaactgcaagccttacttatatctgttcctaccttccttcctcctcctaaccaa

SEQ ID NO: 461702 - DNA, 120 bp, Artificial Sequence
  ENSG00000157578_44 (sequence is synthesized)
ccggcgctgcggcgttggcgcagtcgtgggaacagcgcggagcagccttcagccatgcttctgccactgcctctgcaggaaagccacctgctttaaaaaaaagtcttcatggagtgctta

SEQ ID NO: 461703 - DNA, 120 bp, Artificial Sequence
  ENSG00000157578_45 (sequence is synthesized)
tgagagggtcggctgttttctccagctcatttttccaaagcaaacaatcccaccagctatctcaggcaagaaacacataatccaaaaactttaattatttatgttcaactctgtactgga

SEQ ID NO: 461704 - DNA, 120 bp, Artificial Sequence
  ENSG00000157578_46 (sequence is synthesized)
gcgcagtcgtgggaacagcgcggagcagagaagcaccaaaagaggcaaactgagatgcagacaaatgatcatccgtatgctgatcattttgaatagcaagaaacacataatccaaaaact

SEQ ID NO: 461705 - DNA, 120 bp, Artificial Sequence
  ENSG00000157578_47 (sequence is synthesized)
gatttcactggcttcttgcctttcatctcagctgaagaatcagtgtttgaattgccagtgaaatgtaaatacctatctcagcaccccaagaggatggtctccaagtctggccagaaggaa

SEQ ID NO: 461706 - DNA, 120 bp, Artificial Sequence
  ENSG00000157578_48 (sequence is synthesized)
atgtaagtggaatcccacagctgcacccttttgtatctggctgcttttgttcagcatagtgtttttgagattcatctatattgatgccactatcattagtgtatacctctcattgtttct

SEQ ID NO: 461707 - DNA, 120 bp, Artificial Sequence
  ENSG00000157578_49 (sequence is synthesized)
ccggcgctgcggcgttggcgcagtcgtgggaacagcgcggagcagagaagcaccaaaagaggcaaactgagatgcagacaaatgatcatccgtatgctgatcattttgaataccttcagc

SEQ ID NO: 461708 - DNA, 120 bp, Artificial Sequence
  ENSG00000157593_0 (sequence is synthesized)
gctcctggaggcggcggcgggagcgcagggggcgcgcggcccggggactcgcattccccggttccccctccaccccacgcggcctggaccatggacgccagatggtgggcagtggtggtg

SEQ ID NO: 461709 - DNA, 120 bp, Artificial Sequence
  ENSG00000157593_1 (sequence is synthesized)
ggacgccagatggtgggcagtggtggtgctggctgcgttcccctccctaggggcaggtggggagactcccgaagcccctccggagtcatggacccagctatggttcttccgatttgtggt

SEQ ID NO: 461710 - DNA, 120 bp, Artificial Sequence
  ENSG00000157593_2 (sequence is synthesized)
gaatgctgctggctatgccagctttatggtacctggctacctcctggtgcagtacttcaggcggaagaactacctggagaccggtaggggcctctgctttcccctggtgaaagcttgtgt

SEQ ID NO: 461711 - DNA, 120 bp, Artificial Sequence
  ENSG00000157593_3 (sequence is synthesized)
gtttggcaatgagcccaaggcctctgatgaggttcccctggcgccccgaacagaggcggcagagaccaccccgatgtggcaggccctgaagctgctcttctgtgccacagggctccaggt

SEQ ID NO: 461712 - DNA, 120 bp, Artificial Sequence
  ENSG00000157593_4 (sequence is synthesized)
gtcttatctgacttggggtgtgctgcaggaaagagtgatgacccgcagctatggggccacagccacatcaccgggtgagcgctttacggactcgcagttcctggtgctaatgaaccgagt

SEQ ID NO: 461713 - DNA, 120 bp, Artificial Sequence
  ENSG00000157593_5 (sequence is synthesized)
gctggcactgattgtggctggcctctcctgtgttctctgcaagcagccccggcatggggcacccatgtaccggtactcctttgccagcctgtccaatgtgcttagcagctggtgccaata

SEQ ID NO: 461714 - DNA, 120 bp, Artificial Sequence
  ENSG00000157593_6 (sequence is synthesized)
cgaagctcttaagttcgtcagcttccccacccaggtgctggccaaggcctctaaggtgatccctgtcatgctgatgggaaagcttgtgtctcggcgcagctacgaacactgggagtacct

SEQ ID NO: 461715 - DNA, 120 bp, Artificial Sequence
  ENSG00000157593_7 (sequence is synthesized)
gacagccaccctcatctccattggggtcagcatgtttctgctatccagcggaccagagccccgcagctccccagccaccacactctcaggcctcatcttactggcaggttatattgcttt

SEQ ID NO: 461716 - DNA, 120 bp, Artificial Sequence
  ENSG00000157593_8 (sequence is synthesized)
gggctcactgctagaacagggggccctactggagggaacccgcttcatggggcgacacagtgagtttgctgcccatgccctgctactctccatctgctccgcatgtggccagctcttcat

SEQ ID NO: 461717 - DNA, 120 bp, Artificial Sequence
  ENSG00000157593_9 (sequence is synthesized)
cttttacaccattgggcagtttggggctgccgtcttcaccatcatcatgaccctccgccaggcctttgccatccttctttcctgccttctctatggccacactgtcactgtggtgggagg

SEQ ID NO: 461718 - DNA, 120 bp, Artificial Sequence
  ENSG00000157593_10 (sequence is synthesized)
gctgggggtggctgtggtctttgctgccctcctgctcagagtctacgcgcggggccgtctaaagcaacggggaaagaaggctgtgcctgttgagtctcctgtgcagaaggtttgagggtg

SEQ ID NO: 461719 - DNA, 120 bp, Artificial Sequence
  ENSG00000157593_11 (sequence is synthesized)
gaaagggcctgaggggtgaagtgaaataggaccctcccaccatccccttctgctgtaacctctgagggagctggctgaaagggcaaaatgcaggtgttttctcagtatcacagaccagct

SEQ ID NO: 461720 - DNA, 120 bp, Artificial Sequence
  ENSG00000157593_12 (sequence is synthesized)
ctgcagcaggggattggggagcccaggaggcagccttcccttttgccttaagtcacccatcttccagtaagcagtttattctgagccccgggggtagacagtcctcagtgaggggttttg

SEQ ID NO: 461721 - DNA, 120 bp, Artificial Sequence
  ENSG00000157593_13 (sequence is synthesized)
gggagtttggggtcaagagagcataggtaggttccagttactcttcccacaagttcccttaagtcttgccctagctgtgctctgccaccttccagactcactcccctctgcaaatacctg

SEQ ID NO: 461722 - DNA, 120 bp, Artificial Sequence
  ENSG00000157593_14 (sequence is synthesized)
catttcttaccctggtgagaaaagcacaagcggtgtaggctccaatgctgctttcccaggagggtgaagatggtgctgtgctgaggaaaggggatgcagagccctgcccagcaccaccac

SEQ ID NO: 461723 - DNA, 120 bp, Artificial Sequence
  ENSG00000157593_15 (sequence is synthesized)
ctcctatgctcctggatccctaggctctgttccatgagcctgttgcaggttttggtactttagaaatgtaactttttgctcttataattttattttattaaattaaattactgcagtgga

SEQ ID NO: 461724 - DNA, 120 bp, Artificial Sequence
  ENSG00000157593_16 (sequence is synthesized)
acgtgactgccgcgcctcagcacgggggccgggtggggtcccggctgctcggccgtcggccagcatatcgctgcccggagccagcggggatgggagctgcggcttggttttgtgctcctt

SEQ ID NO: 461725 - DNA, 120 bp, Artificial Sequence
  ENSG00000157593_17 (sequence is synthesized)
agaattactacccagccaacaaagcaaggagacaccttcatcctgtcagaaaacggggaaactaacacagaggagcggcttgggatgcagagcctcaatgtcctgtccacaagatggcaa

SEQ ID NO: 461726 - DNA, 120 bp, Artificial Sequence
  ENSG00000157600_0 (sequence is synthesized)
gaagttgctagctgggggcagagacggccacgcggttgcaggagtaagagatccctctgtggcgaattggccaacggctcctttcaaccctgcctcgttggtggccactggagaagcgcg

SEQ ID NO: 461727 - DNA, 120 bp, Artificial Sequence
  ENSG00000157600_1 (sequence is synthesized)
gggggctcccccagacagccgtggggacaagttagagccagcactttaccccgggccttgcgtgtagcttcccctcccctactctcggtgccctggtgtctggaggggggttgtgggggt

SEQ ID NO: 461728 - DNA, 120 bp, Artificial Sequence
  ENSG00000157600_2 (sequence is synthesized)
gtgcccgccttacatggtccaccacccgggcaaccctctgggcttgtgttccatctcactcttgcttcctgtactgtggtcaaggggaaccactgcatcatgtcccggtatagctaccag

SEQ ID NO: 461729 - DNA, 120 bp, Artificial Sequence
  ENSG00000157600_3 (sequence is synthesized)
agtctcctggactggctctatgggggcgtggaccccagttttgcaggcaatgggggccccgactgtgctgccttcctctcttggcagcagcggctgctggaaagtgtggtggtcctgacc

SEQ ID NO: 461730 - DNA, 120 bp, Artificial Sequence
  ENSG00000157600_4 (sequence is synthesized)
ctggctctgttggagatcctggtggccctgcggcacatcctgaggcagacgaaggaggacggtaggggtagccctggcagccagccagagcaggtgacccagcggccagaggaaggcaag

SEQ ID NO: 461731 - DNA, 120 bp, Artificial Sequence
  ENSG00000157600_5 (sequence is synthesized)
gagagcctgagcaagaatctgctcttagtagccctgtgcctgaccttcggggtggaggtgggctttaagttcgccaccaagaccgtcatctacctgctcaacccctgtcacctggtcacc

SEQ ID NO: 461732 - DNA, 120 bp, Artificial Sequence
  ENSG00000157600_6 (sequence is synthesized)
atgatgcatatctttctcctggcctgccctccatgtcggggagctatcgtcgtcttcaagctacagatgcacatgttgaatggagctcttctggcattgctgtttcctgtggtaaacact

SEQ ID NO: 461733 - DNA, 120 bp, Artificial Sequence
  ENSG00000157600_7 (sequence is synthesized)
cggctgctcccctttgaattggagatttactacattcagcatgttatgctctacgtggtacccatctacctgctttggaaaggaggtgcttacactccagagcccctcagcagtttccgg

SEQ ID NO: 461734 - DNA, 120 bp, Artificial Sequence
  ENSG00000157600_8 (sequence is synthesized)
tgggctcttctctcaactggcctcatgttcttttatcacttcagcgtcttgcagatcctcggcctggtcaccgaagtgaatttgaacaacatgctgtgtccggccatctcagacccattc

SEQ ID NO: 461735 - DNA, 120 bp, Artificial Sequence
  ENSG00000157600_9 (sequence is synthesized)
tacggcccctggtatcgcatctgggcctcgggacaccagactctcatgaccatgacccacgggaagctggtcatcctgttctcatacatggctgggcccttgtgtaaatatctgctggat

SEQ ID NO: 461736 - DNA, 120 bp, Artificial Sequence
  ENSG00000157600_10 (sequence is synthesized)
ttgctccggcttccagccaagaaaatagactgaaggtgcttattttttttttttttcctccctgaggaagcaagtcgtgacttgacttggagaacacccagttcttgataaaatcatggg

SEQ ID NO: 461737 - DNA, 120 bp, Artificial Sequence
  ENSG00000157600_11 (sequence is synthesized)
agagggcagtaggatgtttggtgtatttctttttcctcctttctgtccctttcttctaccactcttcctttcccagctcttccccctacgatgtctccttgagcctggggtgtagtgctg

SEQ ID NO: 461738 - DNA, 120 bp, Artificial Sequence
  ENSG00000157600_12 (sequence is synthesized)
ggcgctggattttcctccttccctttggctctctctctgctcctagtggccttacatggggagattgcagtgagcggctctttcactctgcttgtcggtgctttaacaacagctggttga

SEQ ID NO: 461739 - DNA, 120 bp, Artificial Sequence
  ENSG00000157600_13 (sequence is synthesized)
ggagaaagggaacaacaagtagtagttcttttggcatcgaagcaatgagattgggttgtgtttcatttctccactgccagggacctccaggcttatgctggcgtcccatttagtctccag

SEQ ID NO: 461740 - DNA, 120 bp, Artificial Sequence
  ENSG00000157600_14 (sequence is synthesized)
cacagcccttaccacgggggactgaggccttgtttctataccagcggcaagcccagagccgagggatttcacagctcgtggtcaagacagaaccagccagattctggtcactggtgtccc

SEQ ID NO: 461741 - DNA, 120 bp, Artificial Sequence
  ENSG00000157600_15 (sequence is synthesized)
atgactcaaagtaaacagccaaccagccactccctccaggatgctgcctggggtgggaggtgagagcaccacccagcccaagggctagattccattgagagggttggagatctattgcaa

SEQ ID NO: 461742 - DNA, 120 bp, Artificial Sequence
  ENSG00000157600_16 (sequence is synthesized)
tgacaaatccaaagtgaagagggtcaagatatatacagtactaggccagaccctgtgtaagttctgcctgtgagagttgagaactgatgcatatcccaatcagaagtgagcacagaaaac

SEQ ID NO: 461743 - DNA, 120 bp, Artificial Sequence
  ENSG00000157600_17 (sequence is synthesized)
tgtgatttgaatcatacactctgttttaggaaaatgttgataatagataccattttaatcttgagtgccccttaaatgtgttccctctccctttccctctccccccacccctccccctcc

SEQ ID NO: 461744 - DNA, 120 bp, Artificial Sequence
  ENSG00000157600_18 (sequence is synthesized)
cccctccctccctctttccctctctcaggcagcttcagggaagaatgagctggaattggctggttggttggtttttgagtttggagaatcctcgcatcagggcccatttctggaagattc

SEQ ID NO: 461745 - DNA, 120 bp, Artificial Sequence
  ENSG00000157600_19 (sequence is synthesized)
tgtagatctgtttcttggttttacagggccagtgttgtttccctagggccagatttcttcagtgtatccacactcagtgctgaattgtttaatgtgggggacatcacgtcctcctcatcc

SEQ ID NO: 461746 - DNA, 120 bp, Artificial Sequence
  ENSG00000157600_20 (sequence is synthesized)
tgtctacccccaaatcccatgtctaggttgaaagggggctgccaaagaattaagtcctcatgggtggaggttcaggtgctccacaaggaggagcttttgttgaaggacttcagctcagtt

SEQ ID NO: 461747 - DNA, 120 bp, Artificial Sequence
  ENSG00000157600_21 (sequence is synthesized)
atgcacggacctcaagcaggcaggaagtggctgggcattgctgactccacattgactcccactaggaacagatttgcttaagaacagaaaagctcatttggtgattttgtctgatgagcc

SEQ ID NO: 461748 - DNA, 120 bp, Artificial Sequence
  ENSG00000157600_22 (sequence is synthesized)
tcccttcccctgtcccactctaggcaacacagttgacctagaccagttccagtatttccagtttgaccgtgtttgacctacactgagcttcggtgcctcagtggtcataattttagcaag

SEQ ID NO: 461749 - DNA, 120 bp, Artificial Sequence
  ENSG00000157600_23 (sequence is synthesized)
gcgggcattgaggctatcaatccccagggcttggggagcaggaggggagggcaccaagtgctcttactctcctgagctccttttgatgcgtaagctttgtttttggccctctttgaaggc

SEQ ID NO: 461750 - DNA, 120 bp, Artificial Sequence
  ENSG00000157600_24 (sequence is synthesized)
agggccaaacttttcttagtgcctctcaccttagggtggccctccagggaaggtgctccttgaatggctggattggccctgcccaccgtcaaactgctacatgtaggaatagctgatgag

SEQ ID NO: 461751 - DNA, 120 bp, Artificial Sequence
  ENSG00000157600_25 (sequence is synthesized)
gaaatacacaaggcctcagtgccccttggcctctttacaaaaggagaagttggaaggggattgtgggaggagcccctgggggcctggtctgtcctccaccagaacttggagttgctgcca

SEQ ID NO: 461752 - DNA, 120 bp, Artificial Sequence
  ENSG00000157600_26 (sequence is synthesized)
gcagaggatctgtgcctcagctgaagactagctccggaatgtcataggggtgtgactgtgtaggccttctcctcctcctcgtttctgtggcatggcacaggttgcctggttgctcgagcc

SEQ ID NO: 461753 - DNA, 120 bp, Artificial Sequence
  ENSG00000157600_27 (sequence is synthesized)
ttccccatgttgacatcctccacaagcttgcctttgctctgtctacagcttagtaccccattctggagggcactttctggtgcttggaaggagagaagaaagcaaaagccacatgcctgg

SEQ ID NO: 461754 - DNA, 120 bp, Artificial Sequence
  ENSG00000157600_28 (sequence is synthesized)
catggccaagccagagacagatccacctgtcagaggaaggaagaagtaaagggggcatgcagggcttttgggggccagattggctcagaaacatgtaggtcaaaagaatagagggggccc

SEQ ID NO: 461755 - DNA, 120 bp, Artificial Sequence
  ENSG00000157600_29 (sequence is synthesized)
agtctataggcttcacaaggagccatggcctgtatttggggcattggggagcataaggcatctgaactggtccagatctcactcttatcttgggccaagccaacgtggagagaagcaacc

SEQ ID NO: 461756 - DNA, 120 bp, Artificial Sequence
  ENSG00000157600_30 (sequence is synthesized)
caaccagactcttggcagcctgccttacagggtagcccaccttatagggtagccctcatatctgccctgtgccggccctctactgccccagctttggtacaggagtgagggagaagctgg

SEQ ID NO: 461757 - DNA, 120 bp, Artificial Sequence
  ENSG00000157600_31 (sequence is synthesized)
agcttgcacacccagtggccagtggggctgtcttcccagctcctcctcagggctttcctgtcagtgccaagccagttccccagccaggtttccgtgtgccatttgccagcgtgtgggagc

SEQ ID NO: 461758 - DNA, 120 bp, Artificial Sequence
  ENSG00000157600_32 (sequence is synthesized)
tctgcgcgtgtgtgagggtgtttgtagaagagggcagtttcctttcaaatggccttaggaagggaaaagagtactccctccagcccctaggtagccttggccagggatgtgggccaagaa

SEQ ID NO: 461759 - DNA, 120 bp, Artificial Sequence
  ENSG00000157600_33 (sequence is synthesized)
cagtctgtggagctggccaacttgtggcatccactccaaatagcagagacccagtcacgcctgcttctggtcctccctgccctcagtatttggttttgtacaccaaagatgatctggccc

SEQ ID NO: 461760 - DNA, 120 bp, Artificial Sequence
  ENSG00000157600_34 (sequence is synthesized)
atcttcctcccagaggcacaacagtaacatgttcctctgtcagcctgtgaaggcatgcagggttctgaagccacagactcagtctccccaagtcagcaatctctttctctctctctcctc

SEQ ID NO: 461761 - DNA, 120 bp, Artificial Sequence
  ENSG00000157600_35 (sequence is synthesized)
aaacttcatcgcattcatagaagctgcttgcagggtcgccgggctaaccagggtgatcggcgaactttaccgtacagtacctcagtctagctgtcagatcaccccttttgctgtagcctc

SEQ ID NO: 461762 - DNA, 120 bp, Artificial Sequence
  ENSG00000157600_36 (sequence is synthesized)
tgttgaggtttttatatttgtgatcattggtaattcagtgtcctatgaagtgggcacagctccccacagagagcaagttgtcagcaggtctctgtgcactggtattggggcagggcagtg

SEQ ID NO: 461763 - DNA, 120 bp, Artificial Sequence
  ENSG00000157600_37 (sequence is synthesized)
ccctgggggtaagctaggtggctcagggagtggcagaagggccatttttccctctgccaaaaagacttccttggatttgtagatgttgacccagagtcctctgtcccctcctgaagagga

SEQ ID NO: 461764 - DNA, 120 bp, Artificial Sequence
  ENSG00000157600_38 (sequence is synthesized)
ttttcttactggtttctactgaaggggaggtaggggaggaggaaaaaaggaccatgtgtgatgctgttagacaagacactgacgctgattatggagggtctcctgcaggcccttgtgggc

SEQ ID NO: 461765 - DNA, 120 bp, Artificial Sequence
  ENSG00000157600_39 (sequence is synthesized)
tccttggcaaggccccaggctgggaaggagctccccccactgcccatcctgcccgctttgtggcgggtagagtcagtgacagggaggcagccctccttttgtgtatatagagtgagctga

SEQ ID NO: 461766 - DNA, 120 bp, Artificial Sequence
  ENSG00000157600_40 (sequence is synthesized)
tttgggctcaggaaaacctagtcgcttgttgctctcgtctgtgacatttttgtacactggtttgctactcatggcaagaaacagacaaagccccatgaaaaataaaacaaaacaaaagtc

SEQ ID NO: 461767 - DNA, 120 bp, Artificial Sequence
  ENSG00000157600_41 (sequence is synthesized)
atttcaaacaaagctgttgttttgaaaactcttgctttcttttggtgtccattttgtgttctattttaaagaatctttcatttatattggtgttattgtagtgaagagaatgtgataggc

SEQ ID NO: 461768 - DNA, 120 bp, Artificial Sequence
  ENSG00000157600_42 (sequence is synthesized)
tgatctgtaatggtttctgtcaggagcttagcaaatgcctctgcccctcttcccctacccctgtccttcctcagttcccagctgggattgctatgcactgggcagacccgtcactgtctc

SEQ ID NO: 461769 - DNA, 120 bp, Artificial Sequence
  ENSG00000157600_43 (sequence is synthesized)
ccctgaacccccacacagtggcttcccttagaaccagtctttgtactctccctaaacagcagcaggcttaggatttttgtcaggctggttcttgcgtgctctgtgcccccaccagtttgc

SEQ ID NO: 461770 - DNA, 120 bp, Artificial Sequence
  ENSG00000157600_44 (sequence is synthesized)
tcacctcttggggcattttgtaatgtgttttctctgtcttgtaaaaccttttgattgtaccgaaatggtatctgcagtcgcctttggaaataaatggtcattaatttgtgtacttagcat

SEQ ID NO: 461771 - DNA, 120 bp, Artificial Sequence
  ENSG00000157600_45 (sequence is synthesized)
tctgaattttagtctcaggtgtttctgttgttgaagatccttgaatgaaaaggaaccctcaccatggggcttactgttataatgtttcttcatttactgttattaaaagatttatgagaa

SEQ ID NO: 461772 - DNA, 80 bp, Artificial Sequence
  ENSG00000157600_46 (sequence is synthesized)
gcggctgctgcagggggaggaagacggggaggaggagccgtgcgccgcggcggcggccgccaggggaaccgagcgcccgg

SEQ ID NO: 461773 - DNA, 120 bp, Artificial Sequence
  ENSG00000157600_47 (sequence is synthesized)
atggaggataacaggacaaccaactgggttgaaactggaggcttgttctctttaatagttttctgggcttctagcctagggaaattgtggatcagaaccagccaaatggacttataaggg

SEQ ID NO: 461774 - DNA, 120 bp, Artificial Sequence
  ENSG00000157600_48 (sequence is synthesized)
aaatttgtccccgaaaatcagcttacctcctcttgtctgtgggtatagaaaagtaagatttaactgtggtgcccagtgttgcatttttacatctctgtttagcatgttggaagtgtcttg

SEQ ID NO: 461775 - DNA, 120 bp, Artificial Sequence
  ENSG00000157600_49 (sequence is synthesized)
tgggacagatggtttgtgggacatgagagggaagaggcagagtatacctgcataagggagcccaccgtgccaaatgacagggaaggagtcagacaagctaggccagccagccccaatagc

SEQ ID NO: 461776 - DNA, 120 bp, Artificial Sequence
  ENSG00000157600_50 (sequence is synthesized)
tctggtttctttctttccccaacagcagcctggccagacaactcagcctgcttccctggggaactcctagggctagtcattgccagaggtgaggtgagctggcagaagtaggggtggggg

SEQ ID NO: 461777 - DNA, 120 bp, Artificial Sequence
  ENSG00000157600_51 (sequence is synthesized)
tgtgaagcccaatgtgtcctgaactccctgggttgatgtgagtggctgtctggcccatgcagaagaacacaatgatttccctacctcctccaacaaggtggaagaagagtcaggtagtaa

SEQ ID NO: 461778 - DNA, 120 bp, Artificial Sequence
  ENSG00000157601_0 (sequence is synthesized)
gcactccagcactgcgcagggaccgccttggaccgcagttgccggccaggaatcccagtgtcacggtggacacgcctccctcgcgcccttgccgcccacctgctcacccagctcaggggc

SEQ ID NO: 461779 - DNA, 120 bp, Artificial Sequence
  ENSG00000157601_1 (sequence is synthesized)
tttggaattctgtggccacactgcgaggagatcggttctgggtcggaggctacaggaagactcccactccctgaaatctggagtgaagaacgccgccatccagccaccattccaaggagg

SEQ ID NO: 461780 - DNA, 120 bp, Artificial Sequence
  ENSG00000157601_2 (sequence is synthesized)
tgcaggagaacagctctgtgataccatttaacttgttgacattacttttatttgaaggaacgtatattagagcttactttgcaaagaaggaagatggttgtttccgaagtggacatcgca

SEQ ID NO: 461781 - DNA, 120 bp, Artificial Sequence
  ENSG00000157601_3 (sequence is synthesized)
aaagctgatccagctgctgcatcccaccctctattactgaatggagatgctactgtggcccagaaaaatccaggctcggtggctgagaacaacctgtgcagccagtatgaggagaaggtg

SEQ ID NO: 461782 - DNA, 120 bp, Artificial Sequence
  ENSG00000157601_4 (sequence is synthesized)
cgcccctgcatcgacctcattgactccctgcgggctctaggtgtggagcaggacctggccctgccagccatcgccgtcatcggggaccagagctcgggcaagagctccgtgttggaggca

SEQ ID NO: 461783 - DNA, 120 bp, Artificial Sequence
  ENSG00000157601_5 (sequence is synthesized)
ctgtcaggagttgcccttcccagaggcagcgggatcgtgaccagatgcccgctggtgctgaaactgaagaaacttgtgaacgaagataagtggagaggcaaggtcagttaccaggactac

SEQ ID NO: 461784 - DNA, 120 bp, Artificial Sequence
  ENSG00000157601_6 (sequence is synthesized)
gagattgagatttcggatgcttcagaggtagaaaaggaaattaataaagcccagaatgccatcgccggggaaggaatgggaatcagtcatgagctaatcaccctggagatcagctcccga

SEQ ID NO: 461785 - DNA, 120 bp, Artificial Sequence
  ENSG00000157601_7 (sequence is synthesized)
gatgtcccggatctgactctaatagaccttcctggcataaccagagtggctgtgggcaatcagcctgctgacattgggtataagatcaagacactcatcaagaagtacatccagaggcag

SEQ ID NO: 461786 - DNA, 120 bp, Artificial Sequence
  ENSG00000157601_8 (sequence is synthesized)
gagacaatcagcctggtggtggtccccagtaatgtggacatcgccaccacagaggctctcagcatggcccaggaggtggaccccgagggagacaggaccatcggaatcttgacgaagcct

SEQ ID NO: 461787 - DNA, 120 bp, Artificial Sequence
  ENSG00000157601_9 (sequence is synthesized)
gatctggtggacaaaggaactgaagacaaggttgtggacgtggtgcggaacctcgtgttccacctgaagaagggttacatgattgtcaagtgccggggccagcaggagatccaggaccag

SEQ ID NO: 461788 - DNA, 120 bp, Artificial Sequence
  ENSG00000157601_10 (sequence is synthesized)
ctgagcctgtccgaagccctgcagagagagaagatcttctttgagaaccacccatatttcagggatctgctggaggaaggaaaggccacggttccctgcctggcagaaaaacttaccagc

SEQ ID NO: 461789 - DNA, 120 bp, Artificial Sequence
  ENSG00000157601_11 (sequence is synthesized)
tctgtaaatctctgcccctgttagaaaatcaaatcaaggagactcaccagagaataacagaggagctacaaaagtatggtgtcgacataccggaagacgaaaatgaaaaaatgttcttcc

SEQ ID NO: 461790 - DNA, 120 bp, Artificial Sequence
  ENSG00000157601_12 (sequence is synthesized)
tgatagataaagttaatgcctttaatcaggacatcactgctctcatgcaaggagaggaaactgtaggggaggaagacattcggctgtttaccagactccgacacgagttccacaaatgga

SEQ ID NO: 461791 - DNA, 120 bp, Artificial Sequence
  ENSG00000157601_13 (sequence is synthesized)
gtacaataattgaaaacaattttcaagaaggccataaaattttgagtagaaaaatccagaaatttgaaaatcagtatcgtggtagagagctgccaggctttgtgaattacaggacatttg

SEQ ID NO: 461792 - DNA, 120 bp, Artificial Sequence
  ENSG00000157601_14 (sequence is synthesized)
agacaatcgtgaaacagcaaatcaaggcactggaagagccggctgtggatatgctacacaccgtgacggatatggtccggcttgctttcacagatgtttcgataaaaaattttgaagagt

SEQ ID NO: 461793 - DNA, 120 bp, Artificial Sequence
  ENSG00000157601_15 (sequence is synthesized)
tttttaacctccacagaaccgccaagtccaaaattgaagacattagagcagaacaagagagagaaggtgagaagctgatccgcctccacttccagatggaacagattgtctactgccagg

SEQ ID NO: 461794 - DNA, 120 bp, Artificial Sequence
  ENSG00000157601_16 (sequence is synthesized)
accaggtatacaggggtgcattgcagaaggtcagagagaaggagctggaagaagaaaagaagaagaaatcctgggattttggggctttccagtccagctcggcaacagactcttccatgg

SEQ ID NO: 461795 - DNA, 120 bp, Artificial Sequence
  ENSG00000157601_17 (sequence is synthesized)
aggagatctttcagcacctgatggcctatcaccaggaggccagcaagcgcatctccagccacatccctttgatcatccagttcttcatgctccagacgtacggccagcagcttcagaagg

SEQ ID NO: 461796 - DNA, 120 bp, Artificial Sequence
  ENSG00000157601_18 (sequence is synthesized)
ccatgctgcagctcctgcaggacaaggacacctacagctggctcctgaaggagcggagcgacaccagcgacaagcggaagttcctgaaggagcggcttgcacggctgacgcaggctcggc

SEQ ID NO: 461797 - DNA, 120 bp, Artificial Sequence
  ENSG00000157601_19 (sequence is synthesized)
gccggcttgcccagttccccggttaaccacactctgtccagccccgtagacgtgcacgcacactgtctgcccccgttcccgggtagccactggactgacgacttgagtgctcagtagtca

SEQ ID NO: 461798 - DNA, 120 bp, Artificial Sequence
  ENSG00000157601_20 (sequence is synthesized)
gactggatagtccgtctctgcttatccgttagccgtggtgatttagcaggaagctgtgagagcagtttggtttctagcatgaagacagagccccaccctcagatgcacatgagctggcgg

SEQ ID NO: 461799 - DNA, 120 bp, Artificial Sequence
  ENSG00000157601_21 (sequence is synthesized)
gattgaaggatgctgtcttcgtactgggaaagggattttcagccctcagaatcgctccaccttgcagctctccccttctctgtattcctagaaactgacacatgctgaacatcacagctt

SEQ ID NO: 461800 - DNA, 120 bp, Artificial Sequence
  ENSG00000157601_22 (sequence is synthesized)
atttcctcatttttataatgtcccttcacaaacccagtgttttaggagcatgagtgccgtgtgtgtgcgtcctgtcggagccctgtctcctctctctgtaataaactcatttctagcaga

SEQ ID NO: 461801 - DNA, 120 bp, Artificial Sequence
  ENSG00000157601_23 (sequence is synthesized)
agtctgaagtcatgcaatttgacttttcctttctggaaaccagcgagcagaaatgaaaccgaaactgaattgtccgggaaattcgcggtgggggcggagagcgcagggagaagtaagccc

SEQ ID NO: 461802 - DNA, 120 bp, Artificial Sequence
  ENSG00000157601_24 (sequence is synthesized)
agtgcaggatcctgaggcccgtgtttgcaggaccagggccggccttccgattccccattcattccagaagcaccgaaccacgctgtgcccggatcccaagtgcagcggcacccagcgtgg

SEQ ID NO: 461803 - DNA, 120 bp, Artificial Sequence
  ENSG00000157601_25 (sequence is synthesized)
gcctggggttgccggttgacccggtcctcagcctggtagcagaggccaggccagtgccacaaggcacctaagtccacctgggcctggagcaggacaggttgcaaaagaaaatatctcggg

SEQ ID NO: 461804 - DNA, 120 bp, Artificial Sequence
  ENSG00000157601_26 (sequence is synthesized)
acccccaaactccttatgctaagggaaacatcgagcctgggaactgagccatcaacgctgccattctttttcccaaacagaaccctgttgtcagaggtacacccagagcaactccacacc

SEQ ID NO: 461805 - DNA, 120 bp, Artificial Sequence
  ENSG00000157601_27 (sequence is synthesized)
gggtgcatgccacagcaactccatcttaaataggagctggtaaaacgaggctgatacctactgggctgcattcccagacggcatagcgaggaggtgctgaagagcgcaggtttggagaat

SEQ ID NO: 461806 - DNA, 120 bp, Artificial Sequence
  ENSG00000157601_28 (sequence is synthesized)
gatcacctggattggaaccatagctctaccaatatggaacccagctccttaggcctcggtcttctcatggagaacatggtgtgataatcctactcctctgggagggtggctgttaagcct

SEQ ID NO: 461807 - DNA, 120 bp, Artificial Sequence
  ENSG00000157601_29 (sequence is synthesized)
atctgattcagcaggcctgggttcgggcccgagaacctgcgtctcccgcgagttcccgcgaggcaagtgctgcaggtgcggggccaggagctaggtttcgtttctgcgcccggagccgcc

SEQ ID NO: 461808 - DNA, 120 bp, Artificial Sequence
  ENSG00000157601_30 (sequence is synthesized)
aaagtgctgagattacaggcgtgagccccggggcccggcctggagggatattcttgaagcgccttgagcagggaggcagcgtttgtctttatctgaccttggcttctttgggtcactctg

SEQ ID NO: 461809 - DNA, 120 bp, Artificial Sequence
  ENSG00000157601_31 (sequence is synthesized)
ggcttctttgggtcactctgtttctctttccgtgaataaaaagccagtgagcacacactgtgtcccaggcactcttctacgctctggggacatcaccatgaacaactagtcagagtcccc

SEQ ID NO: 461810 - DNA, 120 bp, Artificial Sequence
  ENSG00000157601_32 (sequence is synthesized)
acctccaggggccttccgttctggtggtgggtttggttccatggttgaatgcacccagctgcttatctgttcaataggcatctgctttattttaagcttactttgcaaagaaggaagatg

SEQ ID NO: 461811 - DNA, 120 bp, Artificial Sequence
  ENSG00000157601_33 (sequence is synthesized)
gcgggcaggcggacggacttgcaggaaatgcagccgggaggatgggcaggttgtgggatgctccgccgttccgcgaccacccgcctccccggcccagcagaaccgggtccaggctggggg

SEQ ID NO: 461812 - DNA, 120 bp, Artificial Sequence
  ENSG00000157601_34 (sequence is synthesized)
ataaaaacatatctatacatgtctgtgtatttttgtgatgaccaagtctatagtcagacaccatgatacacatttattatatcagctggaagagctcattccatatcattgtggaaatat

SEQ ID NO: 461813 - DNA, 120 bp, Artificial Sequence
  ENSG00000157601_35 (sequence is synthesized)
gcaagacattccatccagttgtaagcaactgaaatttgccttgactttccccaacagcaaaaaggcagacatgcgtgttctggctacatcaaggtggaaatcggtcctgtgttctcttct

SEQ ID NO: 461814 - DNA, 120 bp, Artificial Sequence
  ENSG00000157601_36 (sequence is synthesized)
agtttcacctctgagcattgatttctaaagaaaggaaaggttcgaaccaaagccagcaccaaacttcagcactttcctcctggggtgcatcccacaccaacgagcaaacctctcattctc

SEQ ID NO: 461815 - DNA, 120 bp, Artificial Sequence
  ENSG00000157601_37 (sequence is synthesized)
cagatgccaagttggtattcaacaattcaattcaattctgacactaactaccctcagtcagtgtggaccccatagcttaagggctcagttccacaacactggccccaactacaaatgccg

SEQ ID NO: 461816 - DNA, 120 bp, Artificial Sequence
  ENSG00000157601_38 (sequence is synthesized)
gtcacaagtcccagacctcctattcttctgatggactgtttataaatcaaggttcttgcgacccattcctcaggtcaaccaagaactctggaacacacttcactgacatttactggtcta

SEQ ID NO: 461817 - DNA, 120 bp, Artificial Sequence
  ENSG00000157601_39 (sequence is synthesized)
ttagaaaggatttgataaggggcacaaatgaagctgttggagaggcacatagtaggggcctgaacacagaagcttctgtccccacggggttgggggcaccatcctcatggcacagagatg

SEQ ID NO: 461818 - DNA, 120 bp, Artificial Sequence
  ENSG00000157601_40 (sequence is synthesized)
ccgccgttccgcgaccacccgcctccccggcccagcagaaccgggtccaggctgggggaggtgctagcggtgtatgcacctaagtccacctgggcctggagcaggacagaaccctgttgt

SEQ ID NO: 461819 - DNA, 120 bp, Artificial Sequence
  ENSG00000157601_41 (sequence is synthesized)
ggctgttaaggtgagtgattgcacacgagtccctctagctgatgttaccgagcggtccttgtttttagagctcccaagagggtggcgggccacttccaagatggcggcaagcctcttgtt

SEQ ID NO: 461820 - DNA, 120 bp, Artificial Sequence
  ENSG00000157601_42 (sequence is synthesized)
acagattccaaggaatggaatcttggggcatgtggtgagtgttctcattaggacgaacccaggcacttagacatgcgggaacaatggcgagcctttagcccgaatgggagcggcaatggg

SEQ ID NO: 461821 - DNA, 120 bp, Artificial Sequence
  ENSG00000157601_43 (sequence is synthesized)
gcaatgggtgcctcgctggatcaggagcacagcggacacactgccggatccagaggggtggacatcagtggtgggtctgtgatggcggcaaacaacagcagacagcaaatggcagtggtg

SEQ ID NO: 461822 - DNA, 120 bp, Artificial Sequence
  ENSG00000157601_44 (sequence is synthesized)
tttaggataaaaagtttaaatatcaaataaatgtatgccaggggtcatttgcttttaagattcttccagcaaattattaagcaaaaagagcatgccttgctttttcatggtaaagagaag

SEQ ID NO: 461823 - DNA, 120 bp, Artificial Sequence
  ENSG00000157601_45 (sequence is synthesized)
aagggagcggggagaggggaaactttacttcataccatttgatcctcatatttttttgcatcttaagaagagaacaaatgatcctaccaatattgaactatttttctctctttgattaga

SEQ ID NO: 461824 - DNA, 120 bp, Artificial Sequence
  ENSG00000157601_46 (sequence is synthesized)
gtcgcttctgggggcagcgcccagtaaccgcgctaggagcgcggagaagggcattgggagagcggcgttcgtggcggagactagcgctccggagcacgggcacgacgggggcaccttctc

SEQ ID NO: 461825 - DNA, 120 bp, Artificial Sequence
  ENSG00000157601_47 (sequence is synthesized)
ggctgctagtaactaacaataataataatcataatcatagcaagggcgctgatgggcgggctcggagcacgcctgattctggttcccaccaggctgcccaggctcctgatgacgcatcag

SEQ ID NO: 461826 - DNA, 120 bp, Artificial Sequence
  ENSG00000157601_48 (sequence is synthesized)
aaacatccccctaacccgcggccttcctgcaggagaggttgggaaggggtgggggacggggctcgggggaggtctccgagggactctagtaagcggggaagggcgccgggaaagtttcag

SEQ ID NO: 461827 - DNA, 120 bp, Artificial Sequence
  ENSG00000157601_49 (sequence is synthesized)
atccacggctgcgcgggccacgagcccacccgaacgccgaccactgctttccgtcgacttctatttcctgggaacgcgcgaaagcaaacccaagtcagactgcggaggtcgctggggagg

SEQ ID NO: 461828 - DNA, 120 bp, Artificial Sequence
  ENSG00000157601_50 (sequence is synthesized)
gaaggttcaaggagttctcgccgatcctgctgaataaagggggttccgagctgggccgagatggggcatgcgcgggaagacccctgcccgctgttcccccccaccgccccagtggatgcc

SEQ ID NO: 461829 - DNA, 120 bp, Artificial Sequence
  ENSG00000157601_51 (sequence is synthesized)
atgcctggggcctccccggcgcgtggggctgacgcaccctcggggtccatcgtagttggccgggatcgtggagtgggtgcggtggacgaagggaggcaggacagtcccgggggtggcaga

SEQ ID NO: 461830 - DNA, 120 bp, Artificial Sequence
  ENSG00000157601_52 (sequence is synthesized)
aggagcccgggcacagctgagacctgcgctcccatcccaccaacactcacagcaggtgctgccgagctgggcaattgggatggcccaagttatttggttaaattttaaatcacgtttgtt

SEQ ID NO: 461831 - DNA, 80 bp, Artificial Sequence
  ENSG00000157601_53 (sequence is synthesized)
cgattctgtcaccacacctggctaatttgtatgtgtttagtagagacagcatttcaccatattggccaggctggtttcaa

SEQ ID NO: 461832 - DNA, 120 bp, Artificial Sequence
  ENSG00000157601_54 (sequence is synthesized)
cttcccaaagtactgggattacaggcacgagccactgcacccagtcaggttcattttagttgttatgttaaccaggtttcctgcacctgtgcgctaactttcactttcccaaaaggtttc

SEQ ID NO: 461833 - DNA, 120 bp, Artificial Sequence
  ENSG00000157601_55 (sequence is synthesized)
acagtacaatgattaaagggagtgatagggtaaggacccacagtggaggctctggaggccagcccactgacagccactccagggagtccagaagtcccgctctagtgctgggtggtggag

SEQ ID NO: 461834 - DNA, 120 bp, Artificial Sequence
  ENSG00000157601_56 (sequence is synthesized)
ggaaatctgttcctccagggacctcgtcctcggctgcccagctgccaaagtcaggaataagctttcagaaatctcactgccaagattccgaaaacgcttcagacattgctagtcccttgt

SEQ ID NO: 461835 - DNA, 120 bp, Artificial Sequence
  ENSG00000157601_57 (sequence is synthesized)
cgcttttgcgatcctccacaggtgtgcgtgccactgggtccttattcactggggtctctggtggcattgggccacagcaagtgttccctcatccccttagtctaccacacacatgcttac

SEQ ID NO: 461836 - DNA, 120 bp, Artificial Sequence
  ENSG00000157601_58 (sequence is synthesized)
cactttgaagaaaaacccctttactatgagcgaaagtgagaaacacgtatgtttattgtttctaaagaaagaaacttaatatgggcttaatgctacctagtgagtgcctccattttgaga

SEQ ID NO: 461837 - DNA, 120 bp, Artificial Sequence
  ENSG00000157601_59 (sequence is synthesized)
cattagggtcacaagtcattattatatatcatgggcacaaacctgccctgggcagggacggaaggaagcccctgcacaggggcagttgctcaggatgtgagaagagcctggtgcataacc

SEQ ID NO: 461838 - DNA, 120 bp, Artificial Sequence
  ENSG00000157601_60 (sequence is synthesized)
ccatccatgcccacctaacatctcaggctctgaccagtggggctgtgcagtagcgagtggatggagggctggaaccctgcagcctcctctccaaacacagggtgcagccaagacatttta

SEQ ID NO: 461839 - DNA, 120 bp, Artificial Sequence
  ENSG00000157601_61 (sequence is synthesized)
ggagcaatttgggatggagagctaggagtcgccacctcttggctcttccaaggccggaactggtgcctgcactcagttcagtttgaagactgcagctggatgccaagttccatggaggag

SEQ ID NO: 461840 - DNA, 120 bp, Artificial Sequence
  ENSG00000157601_62 (sequence is synthesized)
taagaaaccggtttgaactcccgagattgccctgcccctgaaatccaaactgatgttccgaatgatcagggaaaggtacaaacgtttatggtttacagacaaaacccataaggtttagct

SEQ ID NO: 461841 - DNA, 120 bp, Artificial Sequence
  ENSG00000157601_63 (sequence is synthesized)
ttcagagaatctcattttatgaagcaaattagggaagggaatctactcaccaagtcctgtttcagctgattgagtggaacctgtggtcatgtggtacaagtcctggtctcaatgatgctc

SEQ ID NO: 461842 - DNA, 120 bp, Artificial Sequence
  ENSG00000157601_64 (sequence is synthesized)
cttatctggctgcagaaaggccaactgaggcaaccatagcccagaagactggtactcctgagaggcagatgaagtggtggtctttgatatcgagcctgggatgccctgggcacatgaggt

SEQ ID NO: 461843 - DNA, 120 bp, Artificial Sequence
  ENSG00000157601_65 (sequence is synthesized)
atttccaaaggcatgggagttttagggaataaattcccagattgtcagactccataagtaccgtttacaatggattaccttttataaccatcccaatcctacctgacaaaagaggtgggc

SEQ ID NO: 461844 - DNA, 84 bp, Artificial Sequence
  ENSG00000157601_66 (sequence is synthesized)
gggcagatttgtgagaccccatctctactaaataaatacaaaaaattagccgggtctggtggcgtgcacctgtagtcccagcta

SEQ ID NO: 461845 - DNA, 120 bp, Artificial Sequence
  ENSG00000157613_0 (sequence is synthesized)
agagaggaaagtgacagaagacgtgcggagggagacgcagagacagaggagaggccggcagccacccagtctcgggggagcacttagctcccccgccccggctcccaccctgtccggggg

SEQ ID NO: 461846 - DNA, 120 bp, Artificial Sequence
  ENSG00000157613_1 (sequence is synthesized)
gctcctgaagccctcagccccaaccccgggctccccatggaagccagctgtgccccaggaggagcaggaggaggtggagtcggctgaatgcccacggtgcgcccggggcccctgagccca

SEQ ID NO: 461847 - DNA, 80 bp, Artificial Sequence
  ENSG00000157613_2 (sequence is synthesized)
cgccgcctccgtccgcccctcccccggggcttcgccccggacctgccccccgcccgtttgccagcgctcaggcaggagct

SEQ ID NO: 461848 - DNA, 120 bp, Artificial Sequence
  ENSG00000157613_3 (sequence is synthesized)
ccagcgctcaggcaggagctctggactgggcgcgccgccgccctggagtgagggaagcccagtggaagggggtcccgggagccggctgcgatggacgccgtcttggaacccttcccggcc

SEQ ID NO: 461849 - DNA, 120 bp, Artificial Sequence
  ENSG00000157613_4 (sequence is synthesized)
gacaggctgttccccggatccagcttcctggacttgggggatctgaacgagtcggacttcctcaacaatgcgcactttcctgagcacctggaccactttacggagaacatggaggacttc

SEQ ID NO: 461850 - DNA, 120 bp, Artificial Sequence
  ENSG00000157613_5 (sequence is synthesized)
tccaatgacctgttcagcagcttctttgatgaccctgtgctggatgagaagagccctctattggacatggaactggactcccctacgccaggcatccaggcggagcacagctactccctg

SEQ ID NO: 461851 - DNA, 120 bp, Artificial Sequence
  ENSG00000157613_6 (sequence is synthesized)
agcggcgactcagcgccccagagcccccttgtgcccatcaagatggaggacaccacccaagatgcagagcatggagcatgggcgctgggacacaaactgtgctccatcatggtgaagcag

SEQ ID NO: 461852 - DNA, 120 bp, Artificial Sequence
  ENSG00000157613_7 (sequence is synthesized)
gagcagagcccggagctgcccgtggaccctctggctgccccctcggccatggctgccgcggccgccatggccaccaccccgctgctgggcctcagccccttgtccaggctgcccatcccc

SEQ ID NO: 461853 - DNA, 120 bp, Artificial Sequence
  ENSG00000157613_8 (sequence is synthesized)
caccaggccccgggagagatgactcagctgccagtgatcaaagcagagcctctggaggtgaaccagttcctcaaagtgacaccggaggacctggtgcagatgcctccgacgccccccagc

SEQ ID NO: 461854 - DNA, 120 bp, Artificial Sequence
  ENSG00000157613_9 (sequence is synthesized)
agccatggcagtgacagcgacggctcccagagtccccgctctctgcccccctccagccctgtcaggcccatggcgcgctcctccacggccatctccacctccccactcctcactgcccct

SEQ ID NO: 461855 - DNA, 120 bp, Artificial Sequence
  ENSG00000157613_10 (sequence is synthesized)
cacaaattacaggggacatcagggccactgctcctgacagaggaggagaagcggaccctgattgctgagggctaccccatccccacaaaactccccctcaccaaagccgaggagaaggcc

SEQ ID NO: 461856 - DNA, 120 bp, Artificial Sequence
  ENSG00000157613_11 (sequence is synthesized)
atctcagcccaggagagccgtcgtaagaagaaggagtatgtggagtgtctagaaaagaaggtggagacatttacatctgagaacaatgaactgtggaagaaggtggagaccctggagaat

SEQ ID NO: 461857 - DNA, 120 bp, Artificial Sequence
  ENSG00000157613_12 (sequence is synthesized)
gccaacaggaccctgctccagcagctgcagaaactccagactctggtcaccaacaagatctccagaccttacaagatggccgccacccagactgggacctgcctcatggtggcagccttg

SEQ ID NO: 461858 - DNA, 120 bp, Artificial Sequence
  ENSG00000157613_13 (sequence is synthesized)
tgctttgttctggtgctgggctccctcgtgccctgccttcccgagttctcctccggctcccagactgtgaaggaagaccccctggccgcagacggcgtctacacggccagccagatgccc

SEQ ID NO: 461859 - DNA, 120 bp, Artificial Sequence
  ENSG00000157613_14 (sequence is synthesized)
tcccgaagcctcctattctacgatgacggggcaggcttatgggaagatggccgcagcaccctgctgcccatggagcccccagatggctgggaaatcaaccccggggggccggcagagcag

SEQ ID NO: 461860 - DNA, 120 bp, Artificial Sequence
  ENSG00000157613_15 (sequence is synthesized)
cggccccgggaccacctgcagcatgatcacctggacagcacccacgagaccaccaagtacctgagtgaggcctggcctaaagacggtggaaacggcaccagccccgacttctcccactcc

SEQ ID NO: 461861 - DNA, 120 bp, Artificial Sequence
  ENSG00000157613_16 (sequence is synthesized)
aaggagtggttccacgacagggatctgggccccaacaccaccatcaaactctcctaggccatgccaagacccaggacataggacggacccctggtacccagaagaggagttcttgctcac

SEQ ID NO: 461862 - DNA, 120 bp, Artificial Sequence
  ENSG00000157613_17 (sequence is synthesized)
taacccggatccgcctcgtgcccctgcctcctggagcttcccattccaggagaaaaggctccacttcccagcccttccttgcccctgacatttggactcttcccttgggccgaccactct

SEQ ID NO: 461863 - DNA, 120 bp, Artificial Sequence
  ENSG00000157613_18 (sequence is synthesized)
gttctcattctccttcccaccaacatccatccgtccttctcagacaaaccactcactgggtaccccacctcctctctcatatgcccaacacgaccactgcctccctgcccccacacctgc

SEQ ID NO: 461864 - DNA, 120 bp, Artificial Sequence
  ENSG00000157613_19 (sequence is synthesized)
acccaaacagacacatcaacgcaccccactcacagacaccccttaccccacccccactgtacagagaccaagaacagaaattgtttgtaaataatgaaccttattttttattattgccaa

SEQ ID NO: 461865 - DNA, 120 bp, Artificial Sequence
  ENSG00000157613_20 (sequence is synthesized)
tcccctaagatattgtattttacaaatctccctcttcccttcgcccctcccttgttttatattttatgaagttagtgcgggctttgctgctccctggcccaggaaagagggactacctga

SEQ ID NO: 461866 - DNA, 120 bp, Artificial Sequence
  ENSG00000157613_21 (sequence is synthesized)
ctgaccctcacctggcacccccctgctgctgcccaagccgctgggcctttttaattgccaaactgctctcttcatcagctcagcacatgctttaagaaagcaaaaccaaaaaaaaaaaaa

SEQ ID NO: 461867 - DNA, 120 bp, Artificial Sequence
  ENSG00000157613_22 (sequence is synthesized)
ggcgcgctgaggctgcttctggtcagggaaaccattctcctacaccgaccccagcaggcagctgcgcccccagagctttaccctgtctctgcactgaccttggggaaggaatttagggag

SEQ ID NO: 461868 - DNA, 120 bp, Artificial Sequence
  ENSG00000157613_23 (sequence is synthesized)
gggtaaaacaaggctagagctggtaccattactgccccgggagagtcccctctgccgccaccagagacagccaccaaagcgccccacgcactttcctgagcacctggaccactttacgga

SEQ ID NO: 461869 - DNA, 82 bp, Artificial Sequence
  ENSG00000157613_24 (sequence is synthesized)
gagactgatgtggagatatataaataaacgaagtgccgtgataaaagcaaacacagcaataaagcaaaaatggctgggcacg

SEQ ID NO: 461870 - DNA, 67 bp, Artificial Sequence
  ENSG00000157613_25 (sequence is synthesized)
gtcaggagttccagacaaggcacgcctgtagtctcagctagtcaggaggctaaggcaggagaatcac

SEQ ID NO: 461871 - DNA, 64 bp, Artificial Sequence
  ENSG00000157613_26 (sequence is synthesized)
atggtggcgcacgcctgtagtctcagctagtcgcaaacgcaccactgcactccagcctgggtga

SEQ ID NO: 461872 - DNA, 120 bp, Artificial Sequence
  ENSG00000157613_27 (sequence is synthesized)
cataccaggcactgtgccaaacagctccttcttatcagctcagggtgctgggggtgccagggagggaaggtcagtgaaactgtggcaggtgtcggttaagcaaaagaaggctggcatctg

SEQ ID NO: 461873 - DNA, 120 bp, Artificial Sequence
  ENSG00000157613_28 (sequence is synthesized)
tggcagtccgtgtcccacaatgtcagggctggtgcaagctcatgctcagctgaactcatgatgtccaagtggagctgatgtgcaacgttgctaactcggtttcccctgctctccccagag

SEQ ID NO: 461874 - DNA, 120 bp, Artificial Sequence
  ENSG00000157613_29 (sequence is synthesized)
cttccctcctccaacccccttggccaggagcatcacagggcaggcctgagcttccacaaggtgacccagccagtcaccatgaggcaggccccaggcgccaggccactctgcagaggagcc

SEQ ID NO: 461875 - DNA, 120 bp, Artificial Sequence
  ENSG00000157613_30 (sequence is synthesized)
acgcaggaggtgacctttcctatcttgactgaaacgggcacctggcgtggaggccaagtctggagccagccccctaggagagctccaggaggcagagatgcctgcggggtcaaagcctgc

SEQ ID NO: 461876 - DNA, 120 bp, Artificial Sequence
  ENSG00000157613_31 (sequence is synthesized)
ctttctggcccaaagtaggtccaagcccttgtagttatttcgccacctgctgtacattgtgggaactgcaacccctacgtgcccgtttgggtggagagagattaaacatttgcccaccaa

SEQ ID NO: 461877 - DNA, 80 bp, Artificial Sequence
  ENSG00000157617_0 (sequence is synthesized)
ccggggcggcgcgcgcaggaggaagcgcggcccgcagcggcccaggaacttcccagacgccgagtcgggagcgcgggccg

SEQ ID NO: 461878 - DNA, 80 bp, Artificial Sequence
  ENSG00000157617_1 (sequence is synthesized)
cggggtccgctcgcgcccctgttccgcaggtgtgcggggcttgcgcccagcccgggccgcggccgccgcgcgtttcctcc

SEQ ID NO: 461879 - DNA, 80 bp, Artificial Sequence
  ENSG00000157617_2 (sequence is synthesized)
gggctccgaccccgccgcgccccctccacgcccccagcgcgctgtggccgcagccagcgcgtgtcctgagtccgccgttc

SEQ ID NO: 461880 - DNA, 120 bp, Artificial Sequence
  ENSG00000157617_3 (sequence is synthesized)
gggatgcgccatggccatggcccggctgggctcgtggctcggggaggcgcagtggctcgcgctggtgtcgctcttcgtcgcggccctggccacggtaggcctgtacctggcgcagtgggc

SEQ ID NO: 461881 - DNA, 120 bp, Artificial Sequence
  ENSG00000157617_4 (sequence is synthesized)
gctggccagggcgcgaccccagccccagcggcgggcggtggagcctggagaggggccgcgcccggggtccgacgcgctgctctcctggatcctgacgctgggcagctggaggagccagtg

SEQ ID NO: 461882 - DNA, 120 bp, Artificial Sequence
  ENSG00000157617_5 (sequence is synthesized)
gcaggcggcctgggtgaccgccctgaacgaggaggccgagaggaaagggggcccacctttcctgtcctttgaggaggacccgcggcagcaggcactggagctggtggtgcaggaggtctc

SEQ ID NO: 461883 - DNA, 120 bp, Artificial Sequence
  ENSG00000157617_6 (sequence is synthesized)
cagcgtgctcaggtcggcggaggagaaggtggtggtctgtcacgtggtgggccaggctattcagttcttggtcagcgagacgcctgccttgggtgctggatgccggctgtacgacatgcg

SEQ ID NO: 461884 - DNA, 120 bp, Artificial Sequence
  ENSG00000157617_7 (sequence is synthesized)
gctctcccctttccatttacagctggagttccacatgaaggagaagagagaggacctccagattagctggtctttcatcagtgtgccggaaatggccgttaatatccagcccaaagcact

SEQ ID NO: 461885 - DNA, 120 bp, Artificial Sequence
  ENSG00000157617_8 (sequence is synthesized)
gggggaggaccaggtggctgagacaagtgcgatgtctgacgttctcaaggacatcttgaagcatttggctggttctgcctctccatcagtggttctgattaccaagcccacgactgtaaa

SEQ ID NO: 461886 - DNA, 120 bp, Artificial Sequence
  ENSG00000157617_9 (sequence is synthesized)
ggaagctcagaacttacagtgtgctgcatctactgctcaggaatcctgtcctcctaaacctccaagggctcacgagctgaagctactggtgaggaacatccacgtcttgctgctcagcga

SEQ ID NO: 461887 - DNA, 120 bp, Artificial Sequence
  ENSG00000157617_10 (sequence is synthesized)
gcccggtgcctcaggccacattaatgcagtgtgcgtcgtgcagctgaacgatcctgttcagaggttctccagcaccctgacgaaaaacactccggacctcatgtgggaagaggaattcac

SEQ ID NO: 461888 - DNA, 120 bp, Artificial Sequence
  ENSG00000157617_11 (sequence is synthesized)
cttcgagttgaatgccaagtcgaaggagttacacctgcagatttcagaggctgggcgatcctcagaaggtctgctggcgacggcgacagttcctctggacttatttaagaagcagccttc

SEQ ID NO: 461889 - DNA, 120 bp, Artificial Sequence
  ENSG00000157617_12 (sequence is synthesized)
tgggccacagagcttcacgctgaccagcgggtctgcctgcggcagctcggtgctgggctcggtcacggcagagttctcttacatggaacctggtgaattgaaatcctggcccatccctcc

SEQ ID NO: 461890 - DNA, 120 bp, Artificial Sequence
  ENSG00000157617_13 (sequence is synthesized)
ccctgttcctgctgcaaaaatagaaaaggaccgcacggtgatgccctgtgggactgtggtcactactgtcactgctgtgaagaccaagcctcgcgtcgacgtggggagggcgtccccgct

SEQ ID NO: 461891 - DNA, 120 bp, Artificial Sequence
  ENSG00000157617_14 (sequence is synthesized)
gagctctgattctccggtgaagactcccatcaaggtgaaggtgatcgagaaggacatctctgtccaggccatcgcctgccgcagcgcccccgtcagcaaaacactctcttcttcagacac

SEQ ID NO: 461892 - DNA, 120 bp, Artificial Sequence
  ENSG00000157617_15 (sequence is synthesized)
agaattgttggtgttgaatggttcggatccagtggctgaagtggccattcgacagctcagtgaatcttcaaagctgaaactcaagtcgccacggaagaaaagcactattatcatatcagg

SEQ ID NO: 461893 - DNA, 120 bp, Artificial Sequence
  ENSG00000157617_16 (sequence is synthesized)
gatctccaagacctcactatctcaggaccacgacgctgccctgatgcagggctacacggcctctgtggacagcacccaccaggaggacgccccatcccatccggagagggcggcagcctc

SEQ ID NO: 461894 - DNA, 120 bp, Artificial Sequence
  ENSG00000157617_17 (sequence is synthesized)
tgccccgccagaggaagccgagtcagcccaggcatcccttgcccccaagccccaggaggacgagctagactcctgggacttggagaaggagccacaggccgcggcatggagcagccaggt

SEQ ID NO: 461895 - DNA, 120 bp, Artificial Sequence
  ENSG00000157617_18 (sequence is synthesized)
cctgctggaccccgacggtgatgagctgtcagagagctccatgagtgtcttggagccgggcactgccaaaaagcataaaggaggaattctaaggaaaggtgcaaagctgttcttccgccg

SEQ ID NO: 461896 - DNA, 120 bp, Artificial Sequence
  ENSG00000157617_19 (sequence is synthesized)
gcggcatcaacagaaagacccaggcatgagtcagtcacacaatgaccttgtgttcctggagcagccagagggttcccggaggaaaggcatcaccctcaccaggatcctgaacaagaagct

SEQ ID NO: 461897 - DNA, 120 bp, Artificial Sequence
  ENSG00000157617_20 (sequence is synthesized)
gctctccaggcacagaaacaagaacaccatgaacggtgcccccgtggagccctgcacgtagggcctgaggtcatcacctccaagccagaagacgtgcacccatgttaactaccctcacca

SEQ ID NO: 461898 - DNA, 120 bp, Artificial Sequence
  ENSG00000157617_21 (sequence is synthesized)
ggacgcagccagtgtgtccgccggatgtccagatgccccgcttgtcttgctgggtttcttccaaccatctcgtcatttaaagggaaaacaaaatctgagtctccagccaggaggcttctc

SEQ ID NO: 461899 - DNA, 120 bp, Artificial Sequence
  ENSG00000157617_22 (sequence is synthesized)
ccagagaggacaaaaaagcccaacttgccaccagatgctaaatgagacttgacagctgcagagcttgggctgtgctcatagctaagggttagggttcaatattagaaggagattaacatt

SEQ ID NO: 461900 - DNA, 120 bp, Artificial Sequence
  ENSG00000157617_23 (sequence is synthesized)
ataagtgaaataatatgctctaatagattgtggagggcaggtttgagggacttagtttacctattctacactaacaagtgttgttttgggtccatgcctggaccatgtcacaaaaaggag

SEQ ID NO: 461901 - DNA, 120 bp, Artificial Sequence
  ENSG00000157617_24 (sequence is synthesized)
gtgcccccctgtgctgtcactgtgaatggaaaggatgggtcacctctcttcatctgctgcttggaataaaaaatgcagctggccctgagtacagggaagtggaacataggcaggattttg

SEQ ID NO: 461902 - DNA, 120 bp, Artificial Sequence
  ENSG00000157617_25 (sequence is synthesized)
gattaatagagaaattttgataagaatggagacgctacgacagatgtaggaagtcatctacctttgatattagccatagaacttgaacactaactatatcctatgcatagtatgcagaac

SEQ ID NO: 461903 - DNA, 120 bp, Artificial Sequence
  ENSG00000157617_26 (sequence is synthesized)
ttgacatccagggttttttttcctgcctgtcatacttgctaaacaagagcacagcgggcctgtcagatgaagtcaggagccatacgtgaccgctcgtagaacacagtaaccaaacacata

SEQ ID NO: 461904 - DNA, 120 bp, Artificial Sequence
  ENSG00000157617_27 (sequence is synthesized)
catggattttgccaagtgctgccagtagccaaaacaaagtctttttagggcaatagaggaaattattttgtgtctcaggtgtcagtcttaggaatggaagtttaataacaaatgggccaa

SEQ ID NO: 461905 - DNA, 120 bp, Artificial Sequence
  ENSG00000157617_28 (sequence is synthesized)
actcgcaggacattccttctatgagcgcttcagaattttgctgtgaacagtcctcttggacacaggttggggtgcccttgtttgggtttgttttggtggaaaacatcacaaacctggcac

SEQ ID NO: 461906 - DNA, 120 bp, Artificial Sequence
  ENSG00000157617_29 (sequence is synthesized)
accatttgaatatccctaatatcattccagtcgctttcctcatcagttgcctttctatttcagttcattcacagatctcacttctgaatgtgccacttccagtagacatgctggtcaaag

SEQ ID NO: 461907 - DNA, 120 bp, Artificial Sequence
  ENSG00000157617_30 (sequence is synthesized)
agcagtcatcattggggtgaagtgttcttgacagtttaatatgattcacttttctccaaagacatgtaaaaggctgttacgaaagcttggcttctgtcatggagacggaaatgggcaagc

SEQ ID NO: 461908 - DNA, 120 bp, Artificial Sequence
  ENSG00000157617_31 (sequence is synthesized)
ttccttccgtagcctcttgttaatccttaaacattaaatatttcgggggtaatagagccactggtgagtaaaaacctatataaaaaccaaaattataggattttttcttttttagtaaaa

SEQ ID NO: 461909 - DNA, 120 bp, Artificial Sequence
  ENSG00000157617_32 (sequence is synthesized)
accggtatcaaaaccaaaattataggatttttttcttttttagtaaaaacctatataaaaaccaaaattataggattttttcttttttagtaaaaacctatatgaaaaccaaaattatag

SEQ ID NO: 461910 - DNA, 120 bp, Artificial Sequence
  ENSG00000157617_33 (sequence is synthesized)
gatttttttcttttttagtaaaaacctgtataaaaaccaaaattataggatttttttttcttcttttttagagagagagattagaaaacgacattaggaatttcactttaaaatgcgcat

SEQ ID NO: 461911 - DNA, 120 bp, Artificial Sequence
  ENSG00000157617_34 (sequence is synthesized)
tacaaacttcttaggtgttccaggaattatcaagtgactttaaaatgacttttccaacctgctttgtttttaaaaattatattccagttttaatcattgtaaaaaaagcacctggagttt

SEQ ID NO: 461912 - DNA, 120 bp, Artificial Sequence
  ENSG00000157617_35 (sequence is synthesized)
caaaacatgtgaatactaccaagtttctgtccccaaagtcaggcatcactgttagtcttttgggacagatgggacagatgttcactttaatgttttacttgaagttttactgctctttgc

SEQ ID NO: 461913 - DNA, 120 bp, Artificial Sequence
  ENSG00000157617_36 (sequence is synthesized)
catgtggtaaaaagaggctgagacatatttaagaattccaagaggatattatgtgtcagaatttcagacactgatgagaagtttttaattgttcttttttatttgattttggaattcagg

SEQ ID NO: 461914 - DNA, 120 bp, Artificial Sequence
  ENSG00000157617_37 (sequence is synthesized)
ttgttcttttttatttgattttggaattcaggtgcactctattcaagtgcaaggatatcagaagtttttttttatttaaaaaatttttttttcgagatggagtttcactctgttgcccag

SEQ ID NO: 461915 - DNA, 88 bp, Artificial Sequence
  ENSG00000157617_38 (sequence is synthesized)
tggcctcccagcggccccaggattttatattaagccttcttgctctcaaaaaaaaaaaaaggttttaactattccatttccagatgaa

SEQ ID NO: 461916 - DNA, 120 bp, Artificial Sequence
  ENSG00000157617_39 (sequence is synthesized)
aaaaaaaaaaaaggttttaactattccatttccagatgaatcccatgagcgctgcttactgttgaataccaaggtctagggctctgcttcctgtagacacgcacacgttgtctccatcca

SEQ ID NO: 461917 - DNA, 120 bp, Artificial Sequence
  ENSG00000157617_40 (sequence is synthesized)
atggccttttctgaagttacagaaaacaccaacatgggagggagtttatgaagcaaaggcaaaggcaacacgtcggctagcttcagggtagcaccgtgagaaatgggctgtattgatact

SEQ ID NO: 461918 - DNA, 120 bp, Artificial Sequence
  ENSG00000157617_41 (sequence is synthesized)
gtgaatgtttgttttccaagctgttttatacaggtttgttttttcatggtgtagggtatttatgacaaagtaaatgttgtgaaggttaaagataaattaagattatccaccaaatgctaa

SEQ ID NO: 461919 - DNA, 120 bp, Artificial Sequence
  ENSG00000157617_42 (sequence is synthesized)
aaatactgatgtgtaaatcacctttatcgcctcacctcttctacaagcttttgtggcttgagggcttttgtttttggcttttgtctggatgaaagttttgcccagttgtgttttaaaaac

SEQ ID NO: 461920 - DNA, 120 bp, Artificial Sequence
  ENSG00000157617_43 (sequence is synthesized)
aattcctcatgaacactaagattaattgtgtctgtatctctggaactgggtgctcatgttggttttaatgagcttgcaacccttccccgtttgctttgtttaaggaggtgcctctgttct

SEQ ID NO: 461921 - DNA, 120 bp, Artificial Sequence
  ENSG00000157617_44 (sequence is synthesized)
ttgtggaggagtgaaatggagctttaagtgtgtgtgtgtgttatgtgtgtttgcacacacgcgtgtgttattgtagcaataacaaaaagtagccatctccttgttccagctgaaaacctg

SEQ ID NO: 461922 - DNA, 120 bp, Artificial Sequence
  ENSG00000157617_45 (sequence is synthesized)
ctgtgagagttttgacagagcactttattttcgtcaagtttcaagtctgagttcaaaaccagccctgatcccttatgaccaactgctactcgaccagtcgccactcagtggccacctggt

SEQ ID NO: 461923 - DNA, 120 bp, Artificial Sequence
  ENSG00000157617_46 (sequence is synthesized)
gcccgtttagatttttgcttgggttttactggccacctctatagacgagagttgcaaagttgctttgagcagagagggaaagattaatttacactgctggccaccgaaggcaggtgtttc

SEQ ID NO: 461924 - DNA, 120 bp, Artificial Sequence
  ENSG00000157617_47 (sequence is synthesized)
ctgggtagtaatctcacggctcttgatctggaaacttcagagtacaaattggtggatggtggaaggcaggacacgtatctctgtctgacggaaaacagacctcggggctggcgtaaaccc

SEQ ID NO: 461925 - DNA, 120 bp, Artificial Sequence
  ENSG00000157617_48 (sequence is synthesized)
tgctgccaggccctctccccactgccccaaaccggcctagacacgaagaccaaagcagcctgcacagggcaaggcccccgcggaatcctgcagagcaaactcaggttaacttgggtccat

SEQ ID NO: 461926 - DNA, 120 bp, Artificial Sequence
  ENSG00000157617_49 (sequence is synthesized)
gaccgtttgcattcgaaacacaatacactgcctcgttctctcagttagcagctgggcagcagcgcaccattcatcatttaggcttgtggtttgttgtttactctaccaatgttatgtcga

SEQ ID NO: 461927 - DNA, 120 bp, Artificial Sequence
  ENSG00000157617_50 (sequence is synthesized)
aactgcattgtaaaaagagaagaaagtggcaggttttccaggtccacggaaaggtttggcctgacgctggagtgcggtgatgaacttacgtgacaatgattgtattcctcagtagcactt

SEQ ID NO: 461928 - DNA, 120 bp, Artificial Sequence
  ENSG00000157617_51 (sequence is synthesized)
taaacgccgaagacagccctgcagcaagcctgcacacgggcttgggtgggttcctttggagaagatgtggctggaacacaaacaatctttgaaagaaataaatgtgcacacagaacacta

SEQ ID NO: 461929 - DNA, 120 bp, Artificial Sequence
  ENSG00000157617_52 (sequence is synthesized)
cttgcctggagtcccggggcgaattcccgtgcccgatcggacacttactgagcttgcacatgatacatgaatagctgtgaccccaatgtgcttccgcctctcatagagctgaatttcacc

SEQ ID NO: 461930 - DNA, 120 bp, Artificial Sequence
  ENSG00000157617_53 (sequence is synthesized)
aagactcaggggctctcttgttggtgaacagtagcaaaatctggagtaactgtgcctggaattttttggccccaagtctaaacaaaggaatagtttccagataagcgctgtttgcatagg

SEQ ID NO: 461931 - DNA, 120 bp, Artificial Sequence
  ENSG00000157617_54 (sequence is synthesized)
agcgccaaatcctgaaatcattctgcagcaccgtttaggctaaaacactaaaccaaaacagttaacaacaaatgatgtcttaagcatcttaaaggtagctttaggtcaaacatgggtttt

SEQ ID NO: 461932 - DNA, 120 bp, Artificial Sequence
  ENSG00000157617_55 (sequence is synthesized)
ggtttttaaagatacaaatattttcttagattgtaaaactctccccataaacataccaaaattgggaagcccttgcccagcctatccagcaataaaatcaagccatttggttacctccta

SEQ ID NO: 461933 - DNA, 120 bp, Artificial Sequence
  ENSG00000157617_56 (sequence is synthesized)
aagtgagaaagttgttatttctcccagttaactagttttatatcctagttgttagcaagaatcctgaggcgacttccttgattttggagtcccgagaaaactgggatgcccgtgagataa

SEQ ID NO: 461934 - DNA, 120 bp, Artificial Sequence
  ENSG00000157617_57 (sequence is synthesized)
gagtcctgagagagaagcctaacgcaggtcggggacctgcacagcatgggggtgctgtttacctggagagaagtcaacttctgatcccattcctgggtccccactccttctggcctcact

SEQ ID NO: 461935 - DNA, 120 bp, Artificial Sequence
  ENSG00000157617_58 (sequence is synthesized)
caaatttcgttccagcccagcctgatggaatccatgaaatttcgaactttacaaaaacaatgcaaagaacagccacataacctttactcaaactcacgtatccttaacatttgcccagtt

SEQ ID NO: 461936 - DNA, 120 bp, Artificial Sequence
  ENSG00000157617_59 (sequence is synthesized)
tcctctactatttgtgctcatgcttggtctctctctccctccccttactcattttcttttacacacacacacacacacaacttgagggtaaattgtatgcatcttggccctttatcctca

SEQ ID NO: 461937 - DNA, 120 bp, Artificial Sequence
  ENSG00000157617_60 (sequence is synthesized)
attctttagtgtgtattttcccaggaatggagatactctctgctgtgtccacggtacagttgtcagctccctgaatttacattgctgcaattccttagcttatgcccatcttccagtttt

SEQ ID NO: 461938 - DNA, 120 bp, Artificial Sequence
  ENSG00000157617_61 (sequence is synthesized)
tgtcactggacgaccccgtgatgtccttcagagcagtgacctttccactccggcacagggccggacattgcctgcctgtcttattgctttagcatcctctgtcctgcagcgtttccacag

SEQ ID NO: 461939 - DNA, 120 bp, Artificial Sequence
  ENSG00000157617_62 (sequence is synthesized)
cctttctttgtcttttatggcatcgacatttttcaaacattctgaaacgtgagcacttccccgtgggctggatgcacgggaggagcgtgttccggctgctgggcgtgtgggcctttccgt

SEQ ID NO: 461940 - DNA, 120 bp, Artificial Sequence
  ENSG00000157617_63 (sequence is synthesized)
tgaagaagttagcccaagcacttggttaacgtccagagagttccatttacaaatgtcaaattatgttcctcaccccacaaaggagtcatgtgtggtgttgtgtttacacagtttatccta

SEQ ID NO: 461941 - DNA, 120 bp, Artificial Sequence
  ENSG00000157617_64 (sequence is synthesized)
ttcaccaaggacatgggagactttctaatcagggacgctttacacgttgagaggttggcaaatcatttcaagaaaaattatcgaaagagaggaacatgatgtaagactcccctttggtac

SEQ ID NO: 461942 - DNA, 120 bp, Artificial Sequence
  ENSG00000157617_65 (sequence is synthesized)
agaacctctgctctcgtcaccacccagtcacggggaactttcactttccacgtgacacgtttccaaagccttttacttttttgcagtgaatgtttattccttttgtaatcagagagaaat

SEQ ID NO: 461943 - DNA, 120 bp, Artificial Sequence
  ENSG00000157617_66 (sequence is synthesized)
gaacattgtagtgtcccccgtggacaccgcactccctttctcccccttctcccgctctgggacgtccgctcagagcaggtggtggcaagtgtgtggtttcagctgtggagaggccagccc

SEQ ID NO: 461944 - DNA, 120 bp, Artificial Sequence
  ENSG00000157617_67 (sequence is synthesized)
ctcaggtgaagggccatgttacagatccttactctttttattacattttttaaaattgattttaaaatttttatctatctatttatttattttgagaccagctaatttgttatgagactg

SEQ ID NO: 461945 - DNA, 120 bp, Artificial Sequence
  ENSG00000157625_0 (sequence is synthesized)
tgtaactagacttaaccatactttttttttttttttaaatagaaaatgactgtggtgctagaagatcattacttttggaaagccggttaacatccatttcctaagagaaacttggccacc

SEQ ID NO: 461946 - DNA, 120 bp, Artificial Sequence
  ENSG00000157625_1 (sequence is synthesized)
atttgctctggcatggcgcaaagcagcccacagcttgatattcaggttctccatgatcttcgacaacgtttccctgaaattccagagggcgtggtgtctcagtgcatgttacagaataac

SEQ ID NO: 461947 - DNA, 120 bp, Artificial Sequence
  ENSG00000157625_2 (sequence is synthesized)
aacaatcttgaagcctgttgccgagccctttcccaggagagtagcaaatacttatatatggaataccatagtccagatgacaataggatgaatagaaatcgccttttacatattaacctg

SEQ ID NO: 461948 - DNA, 120 bp, Artificial Sequence
  ENSG00000157625_3 (sequence is synthesized)
ggtatccattctcctagtagctatcacccaggagatggagcccaacttaatggtggtcgaacactggtacatagctcaagtgatggacatattgatcctcagcatgcagcaggtaaacag

SEQ ID NO: 461949 - DNA, 120 bp, Artificial Sequence
  ENSG00000157625_4 (sequence is synthesized)
ctgatatgtttagttcaagaaccacactcagctccagctgttgttgctgctactcccaactacaatccattttttatgaacgaacagaacagaagtgcagctactcctccttcacaacca

SEQ ID NO: 461950 - DNA, 120 bp, Artificial Sequence
  ENSG00000157625_5 (sequence is synthesized)
cctcaacagccatcttccatgcaaacaggaatgaatccgtctgctatgcaagggccttcaccaccaccgccacctccttcatacatgcacatacctcggtatagtacaaatccaattact

SEQ ID NO: 461951 - DNA, 120 bp, Artificial Sequence
  ENSG00000157625_6 (sequence is synthesized)
gttacagtatcccagaacctcccttctggacagactgtaccaagagctttacaaattcttccacaaattccaagcaatctctatgggtctcctggttctatttatattagacagacatct

SEQ ID NO: 461952 - DNA, 120 bp, Artificial Sequence
  ENSG00000157625_7 (sequence is synthesized)
cagagttcatcaggaagacaaactcctcagagtacgccgtggcagtcctcaccacagggcccagtgcctcactatagccagcgtcctttacctgtttatccacaccaacagaactatcag

SEQ ID NO: 461953 - DNA, 120 bp, Artificial Sequence
  ENSG00000157625_8 (sequence is synthesized)
ccttctcagtattctcccaaacagcagcagatccctcagtctgcttaccattcaccacctccttctcaatgtccttcacccttcagctctccacagcatcaagtgcaaccttcccagttg

SEQ ID NO: 461954 - DNA, 120 bp, Artificial Sequence
  ENSG00000157625_9 (sequence is synthesized)
ggccacatctttatgccacctagtccttcaactactccaccccatccatatcaacaaggacctcctagctatcagaaacagggaagccattcagtagcctatcttccatacacagcatct

SEQ ID NO: 461955 - DNA, 120 bp, Artificial Sequence
  ENSG00000157625_10 (sequence is synthesized)
agtttatccaaaggttccatgaagaagatagaaattacagttgaaccttctcaaagacctgggacagcaattaataggagtccttcacccatcagtaatcaaccatctccacggaatcaa

SEQ ID NO: 461956 - DNA, 120 bp, Artificial Sequence
  ENSG00000157625_11 (sequence is synthesized)
cactcactgtacacagccaccacgccaccttcaagttctccttcaagagggatatctagtcaaccaaaacctccatttagtgttaatcctgtgtatattacatatacacagccaactgga

SEQ ID NO: 461957 - DNA, 120 bp, Artificial Sequence
  ENSG00000157625_12 (sequence is synthesized)
ccttcttgtactccatcaccatctcctcgagtgataccaaacccaactacagtttttaaaattaccgtaggccgagcaacgactgaaaatcttttaaatttagtggaccaagaagagcgc

SEQ ID NO: 461958 - DNA, 120 bp, Artificial Sequence
  ENSG00000157625_13 (sequence is synthesized)
tctgcagcaccagaacctattcagcccatttcagtgataccaggctctgggggagaaaagggaagccataaatatcagagaagttctagttctggatcagatgactatgcctacacacaa

SEQ ID NO: 461959 - DNA, 120 bp, Artificial Sequence
  ENSG00000157625_14 (sequence is synthesized)
gccttgctgttacatcaacgagcaaggatggagaggttagcaaagcaactgaaacttgagaaagaggagctagagcggttgaagtctgaagttaatggtatggagcatgacctgatgcag

SEQ ID NO: 461960 - DNA, 120 bp, Artificial Sequence
  ENSG00000157625_15 (sequence is synthesized)
agacggctcagaagagtcagctgcaccactgcgatccctacgcctgaggaaatgacaagattgagaagcatgaacagacaactccagataaatgttgactgtacactgaaagaagttgac

SEQ ID NO: 461961 - DNA, 120 bp, Artificial Sequence
  ENSG00000157625_16 (sequence is synthesized)
ctccttcaatctagaggaaactttgatccaaaagccatgaataatttttatgacaacatagaacctggcccagttgtaccacccaagccatctaaaaaagactcctcagacccctgcaca

SEQ ID NO: 461962 - DNA, 120 bp, Artificial Sequence
  ENSG00000157625_17 (sequence is synthesized)
attgagagaaaagcccgaagaattagcgtgacctccaaagtacaggcagacatccatgacacccaggcagcagctgcagatgagcatcgaactggctccacacaaagtcctcggacacaa

SEQ ID NO: 461963 - DNA, 120 bp, Artificial Sequence
  ENSG00000157625_18 (sequence is synthesized)
cctcgagatgaagactacgaaggggctccatggaattgtgatagctgcacctttcttaaccacccagcactaaatcgctgtgagcagtgcgagatgccacggtacacctgaattcagaaa

SEQ ID NO: 461964 - DNA, 120 bp, Artificial Sequence
  ENSG00000157625_19 (sequence is synthesized)
agtctgcgccaggttgaaagtgaaactttgagcactaccagaagaaaaggaaacctcgggactctattcatccacccagccttttcattttcgattgcacagcggggaggaggaatggct

SEQ ID NO: 461965 - DNA, 120 bp, Artificial Sequence
  ENSG00000157625_20 (sequence is synthesized)
ttgtggtcgtcgttgtgctcacgaaaggaaaaatggggaggtcttttttttctcctttcttaactcactacagagtgagagatagaaagggatacttgaaactgggaaaggattcactct

SEQ ID NO: 461966 - DNA, 120 bp, Artificial Sequence
  ENSG00000157625_21 (sequence is synthesized)
gtgaaagaatgtacacacagaagtcaagagctcttctgtggtggaatcccaattgttaaagttactgctgagtggcccttattttttaaagtagtactttgaatcatagtatgaaatgct

SEQ ID NO: 461967 - DNA, 120 bp, Artificial Sequence
  ENSG00000157625_22 (sequence is synthesized)
acagtttatgcaaactgtgaattcccagagcagacttacctggtcaccgctctctggaaaaccaaggctccccgtgcttcttcccattgcttcctactaaagaggacaacaggaaaaagc

SEQ ID NO: 461968 - DNA, 120 bp, Artificial Sequence
  ENSG00000157625_23 (sequence is synthesized)
acctagaatatttggggggggggggcaaattaattaagggtatttgtaattgctgcttttttcaggggtaatttccaacacacatacatgcacacaaacaaaatgttttaaaatgtgatt

SEQ ID NO: 461969 - DNA, 120 bp, Artificial Sequence
  ENSG00000157625_24 (sequence is synthesized)
tgtagcagtcaggaactaggcatatcatgcctttgtttaaaagtacaatcagaggtggtaagatgcctttggcttgtacagtgtgattcatcgagctctatcaacactggtaactaagac

SEQ ID NO: 461970 - DNA, 120 bp, Artificial Sequence
  ENSG00000157625_25 (sequence is synthesized)
ctacttatgccacataagagatgcatttttttaagttactgcatgtttttattaaggccattggttttcaaaataacaagtccttacaaagtatgattttataaatgatattctcgtaaa

SEQ ID NO: 461971 - DNA, 120 bp, Artificial Sequence
  ENSG00000157625_26 (sequence is synthesized)
tagcacagtgaatgtatgccaaatgcaagtccattccaaaatccatttggaaatcttgagctcagctgtggttcttaaacttttgcagtccatagggccttttttttttccttccaattt

SEQ ID NO: 461972 - DNA, 120 bp, Artificial Sequence
  ENSG00000157625_27 (sequence is synthesized)
tgtgataaattcatgatgtttacagcacagataaaactttgtgccataatcctaatttagctgaaatcaatattaactgttcaataaaaacttacttgcatatgttaacaaaccagtgtg

SEQ ID NO: 461973 - DNA, 120 bp, Artificial Sequence
  ENSG00000157625_28 (sequence is synthesized)
aggggaattacagttggccaacgacaaagttgcacactgcattatttaggaaaggagggattgtcaaaaattattaagagaaaggtgaatatagaggactttgaaacaacttttaaaatt

SEQ ID NO: 461974 - DNA, 120 bp, Artificial Sequence
  ENSG00000157625_29 (sequence is synthesized)
taacataactgtatctagaggtcaattgagtctctacaggcagttcagatcattttaaagcactccttatttatgaaatagaacttcagggtgcggataagagatataaagtcatgtgac

SEQ ID NO: 461975 - DNA, 120 bp, Artificial Sequence
  ENSG00000157625_30 (sequence is synthesized)
tcactagggtgcatcgctggaaacttaatagcacatttcattaaggtctctgccattgttggagttccttcttagctcagaattggagttttggaatcttcccctcattttggtgagtat

SEQ ID NO: 461976 - DNA, 120 bp, Artificial Sequence
  ENSG00000157625_31 (sequence is synthesized)
aaacagcaataaagttagtaggttctcccatcctaaaggattttacctgaggatatcgtcttaggaatatccatagacgctcccatcaggtttctcccccaacccccctacaccgccccc

SEQ ID NO: 461977 - DNA, 120 bp, Artificial Sequence
  ENSG00000157625_32 (sequence is synthesized)
ccacttctaatttagcagtaatctctggcagacctggaaaaacaagctgctcttaatagcataatgaaaccaaaggcgtaataactcatcatagttttccatcagaatcatttcacactc

SEQ ID NO: 461978 - DNA, 120 bp, Artificial Sequence
  ENSG00000157625_33 (sequence is synthesized)
tgcctacagctttgaaaacattttttcatatgtgaaaaactccccaaaatatatccactagtctcccaaaggaagcatggtaattaacactgataaaaacatctctcacacaacaactgt

SEQ ID NO: 461979 - DNA, 120 bp, Artificial Sequence
  ENSG00000157625_34 (sequence is synthesized)
ggcaaaactgtgaaaataacggtgagaaagcagatgggcttaaaagcatggtccccaaaacaacgttcttcaaaggtttttgtaacactggtctctgtctccaataacagtctagccgtc

SEQ ID NO: 461980 - DNA, 120 bp, Artificial Sequence
  ENSG00000157625_35 (sequence is synthesized)
ctactgttctgtaatatgcctttgcctttgtatggtttcatatctctttagtgatggtcaaccccacttggttttaagttacaatttaggggaaatatatatatatatactgcttggtgt

SEQ ID NO: 461981 - DNA, 120 bp, Artificial Sequence
  ENSG00000157625_36 (sequence is synthesized)
cctagctaaaaggtttaccagtattcatagtgatatgctgaagtggaggcaattaacttggcagttgtcagttgagaatgaaagtagcatgtctgaaaacagtctgatgctttataaaac

SEQ ID NO: 461982 - DNA, 120 bp, Artificial Sequence
  ENSG00000157625_37 (sequence is synthesized)
catgtagatgactttaaaactattgcatgaaaatacatcaaggttaataagctgttatacagtagatgcatggtttcaatcctttggtgatattatctagtcaatcattgttttcacctg

SEQ ID NO: 461983 - DNA, 120 bp, Artificial Sequence
  ENSG00000157625_38 (sequence is synthesized)
ccaggaaaagagagaaaacagtctattggataggtgtaaagggtggggtatgcggtatcagattgattttaaggaagttttgtacatgttaatttttaattgtgcacaagtttcatatgc

SEQ ID NO: 461984 - DNA, 120 bp, Artificial Sequence
  ENSG00000157625_39 (sequence is synthesized)
caacataggctgtattcagttttaaaataggcaaaatgacttgacactgataaatctggtatgtttaactgtgtcccatatgtagactgctttttgcctatgaccagtttgaacaagaat

SEQ ID NO: 461985 - DNA, 120 bp, Artificial Sequence
  ENSG00000157625_40 (sequence is synthesized)
tcacccaactttcaagatgccttttcaaaaggatcttgtagtcagttggtatgtacagacaattggcatggaagtggtaggatataaatcggatgacgcctggctgctgaggtgccagct

SEQ ID NO: 461986 - DNA, 120 bp, Artificial Sequence
  ENSG00000157625_41 (sequence is synthesized)
ggatcagctggtgcacttcttgtttcttgtaagaggtttctttaaaatgactagtttgatgtatctggtaacatataggcctgactatacattttacattatttcgctattttgtaaact

SEQ ID NO: 461987 - DNA, 120 bp, Artificial Sequence
  ENSG00000157625_42 (sequence is synthesized)
gggattttagaaagcacgtttgccattttgttaaagtacattgccccttaaattttggagtagtttttaaaagtttaaaatggtaatagaggagccagaaactttttaagcattgtaaaa

SEQ ID NO: 461988 - DNA, 120 bp, Artificial Sequence
  ENSG00000157625_43 (sequence is synthesized)
tgttttgaattgatattgactttgtttggaagagagtagaggcagggggctttaaagaaacaaagaaatgcattgtaaaaatgtagttttagagcaaattaataatgatggtggggaaag

SEQ ID NO: 461989 - DNA, 120 bp, Artificial Sequence
  ENSG00000157625_44 (sequence is synthesized)
tgttgctaatttgtttatttccctggaagaaatgggaagtgtgataagcagtttaatttttaaggagctggtctcaattttagtactttttaattatgcaaataaatcaatgtttcctta

SEQ ID NO: 461990 - DNA, 120 bp, Artificial Sequence
  ENSG00000157625_45 (sequence is synthesized)
aattttgtcattgctttgtcacagttgtctagggttcatatccaaccttctgtggcaattcaattttatatagtcttttaagaggtaattgtaatgtatttctgacagtataaacaaaaa

SEQ ID NO: 461991 - DNA, 120 bp, Artificial Sequence
  ENSG00000157625_46 (sequence is synthesized)
gaatataaggcatagaagaattgtcctctaaaaatatcaatgatgtatcctggaatgtgaagatgtccctttatagttaaaaattgaattattttaatattgtaccattgttagaccttg

SEQ ID NO: 461992 - DNA, 120 bp, Artificial Sequence
  ENSG00000157625_47 (sequence is synthesized)
aatgagtccatgttaccgtgtgtgtctgtatatctatctgtagagaaagaaaaatgacaactgaaatgttacttttaaaaatcagaataaattgggcactgtctgtgttgcaccactact

SEQ ID NO: 461993 - DNA, 120 bp, Artificial Sequence
  ENSG00000157625_48 (sequence is synthesized)
gtatcttttcgaaagaattaacagtatttgcctattgtaaaggttaattctgatgacgttttcacattcaccagactttttttcctgtattatttgcatccccaaatatttaatacaagt

SEQ ID NO: 461994 - DNA, 120 bp, Artificial Sequence
  ENSG00000157625_49 (sequence is synthesized)
agattctgcatggcttgggcattcagagattaatagaatgatgactcaattttaattctaaagccatgaaaagttactttgagactgaacaattctgaattatttatgatacccaatgtc

SEQ ID NO: 461995 - DNA, 120 bp, Artificial Sequence
  ENSG00000157625_50 (sequence is synthesized)
catgtttctttccctactgtaaaagaattgatcagtttcttcattaaagcagcaaaaacttattaaatcttgtaaataccatgtctcttttagatttctgtgtatgctgtgaatgaaatc

SEQ ID NO: 461996 - DNA, 120 bp, Artificial Sequence
  ENSG00000157625_51 (sequence is synthesized)
attttgagatgaaattgtacaaaggcattttaaaaggctctgcatgcatcgtacctccaaacagtacatattcggaaagtcaaagattcctgcaaaataaataaactaaaagcaaacact

SEQ ID NO: 461997 - DNA, 120 bp, Artificial Sequence
  ENSG00000157625_52 (sequence is synthesized)
cacatgaccattggctggagcccagttgaccaagaaggaagccagagaaagccacacattcgggcgagcaaggatcacaaggagacacatctgagcctgatatagaggattgcacatcag

SEQ ID NO: 461998 - DNA, 120 bp, Artificial Sequence
  ENSG00000157625_53 (sequence is synthesized)
cacatcattcagagatcctggactttgagatgtatgtagtaacaggacactgtcttcagccttttcttcaagtttttgaccgtggattgtgttgtgtcaaactggatgaattatcttagt

SEQ ID NO: 461999 - DNA, 120 bp, Artificial Sequence
  ENSG00000157625_54 (sequence is synthesized)
tgaattttcaccagttgaaaaattggagatttctagactactgaaaagaagttgctttcagagctggagatgtgaataaaatttctgtgccagggttgataaaccatcttgaggattcca

SEQ ID NO: 462000 - DNA, 120 bp, Artificial Sequence
  ENSG00000157625_55 (sequence is synthesized)
tccaggaaaccccatcacagttggttgttatgtctccttagactcctcttggctgtgacagtttctcagacttttgttcttgaggagtactgatcagaaaatgactgtggtgctagaaga

SEQ ID NO: 462001 - DNA, 120 bp, Artificial Sequence
  ENSG00000157625_56 (sequence is synthesized)
aatatactgactgatgtccacagctgctgcatacttttgactagtaggctgcattctggaaactttgatccaaaagccatgaataatttttatgacaacatagaacctggcccagttgta

SEQ ID NO: 462002 - DNA, 120 bp, Artificial Sequence
  ENSG00000157625_57 (sequence is synthesized)
cagtttttatccgtaagattacaatcctgggaaagagatccccctgtcccatggtcatggatcagatttggggatgaaaaaatagttttacttcggcagtttcatcaagttcttatcatt

SEQ ID NO: 462003 - DNA, 120 bp, Artificial Sequence
  ENSG00000157625_58 (sequence is synthesized)
tagactgttctatgttgttactttgcatttatcctctttttgtcatttactgtgaatattttataaattgatgggttttaattctaaaacttagtagagttcatattatgtgatagacat

SEQ ID NO: 462004 - DNA, 120 bp, Artificial Sequence
  ENSG00000157625_59 (sequence is synthesized)
ctaaaatatctgtaaaaagggatcccaaatcagagtatcagatttctcagttttaaaataaactctatatatgttatttttcatgttatgttatgtgaaaacattcaactataatcatag

SEQ ID NO: 462005 - DNA, 120 bp, Artificial Sequence
  ENSG00000157625_60 (sequence is synthesized)
atgtccacagctgctgcatacttttgactagtaggctgcattctggtaggcccatgaatattgctcccatcggttgaattgtctgcttaccaagagttgattctgtccccaaacctgttt

SEQ ID NO: 462006 - DNA, 120 bp, Artificial Sequence
  ENSG00000157625_61 (sequence is synthesized)
atgccagttattgtatttctgcaatttaatgtttcataaactgacatgaaggagaaagccgctctttctatgaaagccaaaggcaaatcactcaaaaaatagggattgtgaattagatat

SEQ ID NO: 462007 - DNA, 120 bp, Artificial Sequence
  ENSG00000157625_62 (sequence is synthesized)
gggtgaaaacaactgaaaaaagtctaaaaggattctgtactcaaattgcattataagtgttcttaatatctttcttgctccattctaaagcaatcaaaattatagatgagggttcagcaa

SEQ ID NO: 462008 - DNA, 120 bp, Artificial Sequence
  ENSG00000157625_63 (sequence is synthesized)
actagggcctgttgcctgtttctgtgaataaaagttttagtggagcgatagccatgcccatttgtttacatattgcctatggttgcctttgtgcttcaacagcacagttgactacttgca

SEQ ID NO: 462009 - DNA, 120 bp, Artificial Sequence
  ENSG00000157625_64 (sequence is synthesized)
acagagactctatcacaggtccacaaagtctaaaatattatctggcccttgacagaaaaggtttgccaacctctgctgtaggtcatcatgggtgtggtttatgtaagaaatacaatatgg

SEQ ID NO: 462010 - DNA, 120 bp, Artificial Sequence
  ENSG00000157625_65 (sequence is synthesized)
aaccccagccaacagacacgtaaaaattaggtctttatctaactaactttaaaatatagctatatacaagtgttttgttacgttaaagttgacgtgtaatttttcttaattctgtgtatt

SEQ ID NO: 462011 - DNA, 120 bp, Artificial Sequence
  ENSG00000157625_66 (sequence is synthesized)
aatcagctttcctgccccccatcccccacacttaacttttcttgattatggcagctaagactttctacagtgttttaagagtatataataaaatatctcactgccatttttaggcaagat

SEQ ID NO: 462012 - DNA, 90 bp, Artificial Sequence
  ENSG00000157625_67 (sequence is synthesized)
gtatataataaaatatctcactgccatttttaggcaagattaaacaaacagtaggctgggcacaatggctcatgcctgtattcccagcag

SEQ ID NO: 462013 - DNA, 89 bp, Artificial Sequence
  ENSG00000157625_68 (sequence is synthesized)
aacatagggagaccccatccctacaaataattttttgtgatcccagctacgtgggaggctaaggcaggaggatcacctgagcccaggag

SEQ ID NO: 462014 - DNA, 120 bp, Artificial Sequence
  ENSG00000157625_69 (sequence is synthesized)
gtgagccgtgatcacaccgctgcactctagcctaggcaacagaaggagactcggtctaaaaaacaaagagcgagagattaaagattagtggcaggtgaacccaaaagacacggcattatc

SEQ ID NO: 462015 - DNA, 120 bp, Artificial Sequence
  ENSG00000157625_70 (sequence is synthesized)
ttttcagaagcctagtcactctatagcccactaacttgaagcaatcaaagaattactatgcatgatgtaggggttacataaactattgctactatattttagaagattgcatcaatttct

SEQ ID NO: 462016 - DNA, 120 bp, Artificial Sequence
  ENSG00000157625_71 (sequence is synthesized)
tttacttgtgtggtctttggagcaaaacaaacagtaaaacatttggttaggatacttatagtaagccttttgtgatctagaaattagaacatgagctgtaacaagtaattgaagaaatac

SEQ ID NO: 462017 - DNA, 120 bp, Artificial Sequence
  ENSG00000157625_72 (sequence is synthesized)
atatgcagcttcttaaagcataaaaagattcaattaatacatcaaatagcactgtggcttttatgagctatcacagcaattattttcagaaaattatcttaaaacagcatattcaagtgg

SEQ ID NO: 462018 - DNA, 120 bp, Artificial Sequence
  ENSG00000157625_73 (sequence is synthesized)
ataaaacatttgtgaaagggcctgcaagggaaaccactattaaggttttataagcaaagagctgtgttttttgtctgcattggacaatgagctctttgggatacttaggcatttctaaat

SEQ ID NO: 462019 - DNA, 120 bp, Artificial Sequence
  ENSG00000157625_74 (sequence is synthesized)
ctcttttcataacgaatctaaatgtatccattttatactaaattctactcttccacactgcagaaaactttttatactgagtttccaatctaaacttttaagctagggaaggaatctaaa

SEQ ID NO: 462020 - DNA, 120 bp, Artificial Sequence
  ENSG00000157625_75 (sequence is synthesized)
cctttttcggtggtgacggggggaggcaggggaataagcatttagaatagatgcaaatcagtgcatgacttgatgaaaaccagcttttttgtgatttttggtaaggaaaacttgttggga

SEQ ID NO: 462021 - DNA, 120 bp, Artificial Sequence
  ENSG00000157625_76 (sequence is synthesized)
aaaaaaaaagtagatctggaaatgaagagatttaatatatttaaactatcagtattagtaccatacagcatcttctataaataagtatggctacagttaactgtaatcgtttagaacaag

SEQ ID NO: 462022 - DNA, 120 bp, Artificial Sequence
  ENSG00000157625_77 (sequence is synthesized)
cagagcacagtgataggttcacagaagtgaaggcaggacccaaaaccaaccttggaggagacacagcaggagatgtggctgaaatacagacactagaccagggaatgaacatttgaagac

SEQ ID NO: 462023 - DNA, 120 bp, Artificial Sequence
  ENSG00000157625_78 (sequence is synthesized)
agacaggtgaaaattttgtggcaagacaaaattctcaggtattgttctatctattctgaaattggcaccttttatcattgataaatctgtaggaaacatttaacacttagtgtaagattc

SEQ ID NO: 462024 - DNA, 120 bp, Artificial Sequence
  ENSG00000157625_79 (sequence is synthesized)
tccttttcttgaaaataagaatacataaactgctgatgttatttcacatttattgaggttgcttagtagtctcaaaatataacttgattaatccttgtaaatgtttatatttggcttttt

SEQ ID NO: 462025 - DNA, 120 bp, Artificial Sequence
  ENSG00000157625_80 (sequence is synthesized)
ctgtagttcaatttataatgaatttttaaggtaaattatgataaatatgaaagtaagctttcattatttaagtgttctttctcacagtttgttcattaaaaatcaaaacaagcagaaaga

SEQ ID NO: 462026 - DNA, 120 bp, Artificial Sequence
  ENSG00000157625_81 (sequence is synthesized)
gaaaacagttcaaccatcctttcatttctcttcttcatttatctccccaaatgccccacatgcctaatcctgcctaaggagactagccttacaattagaaaaatattcctttaagtgtaa

SEQ ID NO: 462027 - DNA, 120 bp, Artificial Sequence
  ENSG00000157625_82 (sequence is synthesized)
tacattgtagacatacatctgtgtagtggttttcttgggtcttttctcacagcgatgaaaacacaatttcattgggaggacagaattatgtaatgaattttgaaatcctggaaaacattt

SEQ ID NO: 462028 - DNA, 120 bp, Artificial Sequence
  ENSG00000157625_83 (sequence is synthesized)
ttcccttcttatgtgttttatttacatattttctttaaaaaaaaatcaaataacaggaaaaaagagttcttaaatgcctgatgaatttactttctttataggaaactttgatccaaaagc

SEQ ID NO: 462029 - DNA, 120 bp, Artificial Sequence
  ENSG00000157625_84 (sequence is synthesized)
tataggaaactttgatccaaaagccatgaataatttttatgacaacatagaacctggcccagttgtaccacccaagccatctaaaaaagggtcccgctctgtcgcccaggctggagtgca

SEQ ID NO: 462030 - DNA, 85 bp, Artificial Sequence
  ENSG00000157625_85 (sequence is synthesized)
tcctgctaagtcactgttcctggtctgaaagactcttttctatgactcatttaactcaaacacaatttgcaaaaactgatagtcc

SEQ ID NO: 462031 - DNA, 120 bp, Artificial Sequence
  ENSG00000157625_86 (sequence is synthesized)
ctcatttaactcaaacacaatttgcaaaaactgatagtcccttagagttagttataatgggatttcggttaaaatttcttaaatatgtattgaatgctcaatgcgtagctcaattatgta

SEQ ID NO: 462032 - DNA, 120 bp, Artificial Sequence
  ENSG00000157625_87 (sequence is synthesized)
gatagatgcttgctgttacacagggaaaacatgactcctaccccaagcagtttaatattctacatatgtacacttctaataaaaaagagactaggaagccatctcagtcatcttcactat

SEQ ID NO: 462033 - DNA, 120 bp, Artificial Sequence
  ENSG00000157625_88 (sequence is synthesized)
tagaaatttagtagttgtaattctataataatatatattattggtgaaagtataaatggttctattatatgccaaattgtctttaacccgttttttatcttcttctgttaaaacttagaa

SEQ ID NO: 462034 - DNA, 120 bp, Artificial Sequence
  ENSG00000157625_89 (sequence is synthesized)
ctgttaaaacttagaaacagtagaacttgattaaattctataattttttggtaagcctttcatcacaaatttataaaagctattcagttttctccataaaatcaagtttgttttccatta

SEQ ID NO: 462035 - DNA, 120 bp, Artificial Sequence
  ENSG00000157625_90 (sequence is synthesized)
agcacttgcagattctcatattgtatttgaaactaaatcggcgttttctaaaagtacatatagtttagcacagattggcctgctattgcaggccactcaaatacaaaaagaaaaaagata

SEQ ID NO: 462036 - DNA, 120 bp, Artificial Sequence
  ENSG00000157625_91 (sequence is synthesized)
aaccagtaaaacacaaattactggtagaataggtttattggttcgaataaataaatgtcttggagttattacagatatataccagaaatccaagtgtaattaatatagtttatctgaatt

SEQ ID NO: 462037 - DNA, 120 bp, Artificial Sequence
  ENSG00000157625_92 (sequence is synthesized)
ctaagtgtgataattaaagaatgtgagggagacagaaggaaagagagagaaagagacagagaaacaaaccttttttggattggactttgtagttaagcaatacagtgtgtacgtgctctt

SEQ ID NO: 462038 - DNA, 120 bp, Artificial Sequence
  ENSG00000157625_93 (sequence is synthesized)
cagcgggcttagaatgtctcccaacccttattagtaactcataacagtggtagattggactttgtagttaaacaatacagtgtgtatgtgtgctcttcagtgggcttagacagcttcccc

SEQ ID NO: 462039 - DNA, 120 bp, Artificial Sequence
  ENSG00000157625_94 (sequence is synthesized)
aaccttcatcagtaagcaagcaagcacactgaccttggtgtcccacgatctgagcactggtcctggtcatcttggccacctgaccttgttcaaactcaatctgagcaccatagagggaca

SEQ ID NO: 462040 - DNA, 120 bp, Artificial Sequence
  ENSG00000157625_95 (sequence is synthesized)
atccagccaaatactccaaaggttgtaagagttagtgagataaggtatgtgactcgacagaagtactttgcaaatctaagaaacagaactttaccttattctttggagccttaaggagac

SEQ ID NO: 462041 - DNA, 120 bp, Artificial Sequence
  ENSG00000157625_96 (sequence is synthesized)
attcactctgcttttgtttactcagacaatggagtatttaagtacctgagcaccatgctttggattctggagcagtgatttccaaagatgagttgtactgtgggctcagaattcattaga

SEQ ID NO: 462042 - DNA, 120 bp, Artificial Sequence
  ENSG00000157625_97 (sequence is synthesized)
aaatgcaagatctttctttggttcctaagggcaaataatataaaggctgccatttttcatttttaatccaaagggttgcttactaataaactataaatttatagaaacaattttctagca

SEQ ID NO: 462043 - DNA, 120 bp, Artificial Sequence
  ENSG00000157625_98 (sequence is synthesized)
agatattaggatgcctacagttcttgtctgtgttgcaaagtgtctgctgggcttctgcacacataggtaattggaattcaggaaatgatttgggagcacgtggttgtcagtatatactat

SEQ ID NO: 462044 - DNA, 120 bp, Artificial Sequence
  ENSG00000157625_99 (sequence is synthesized)
cacgtggttgtcagtatatactattatatcgagttggttctgatttttcaagtactgctatttttaaaaaatccaccagacacagtggctcctgcctgtaataccaacactttgggaggc

SEQ ID NO: 462045 - DNA, 120 bp, Artificial Sequence
  ENSG00000157625_100 (sequence is synthesized)
tgagaccagcctgggcaacatagcgagagaccctgtctctacaaaaaataaaatttaaaaaattagctgggcgtggtagtggcatgcacctgtagtcttggatacttgggaggctgaggc

SEQ ID NO: 462046 - DNA, 67 bp, Artificial Sequence
  ENSG00000157625_101 (sequence is synthesized)
tattgtgccactgtactccagcctggacagcagaacaagaccctgtctcaaaaaaaacaaaaacaaa

SEQ ID NO: 462047 - DNA, 120 bp, Artificial Sequence
  ENSG00000157625_102 (sequence is synthesized)
cccgacggaagccctgaagccagagcttgcttgccaagctctcgctcagaccggatctaggaaatacgaggcgggcctcggtgggagggacgcactgagggaggagggaggaaagggggc

SEQ ID NO: 462048 - DNA, 80 bp, Artificial Sequence
  ENSG00000157625_103 (sequence is synthesized)
acggcgcgtaccctgggggttcgggcggggaagcggcgccggcccggaccccccgcgggagtaggcgacgggcgtgaggg

SEQ ID NO: 462049 - DNA, 120 bp, Artificial Sequence
  ENSG00000157637_0 (sequence is synthesized)
gtgtccctagctggctctgcggctcttccgggtctgggctcggagattcacaggcggcccgcgaggccgagcgagggacgcatggccctgaggcggccgcagggcttggcggggtccgga

SEQ ID NO: 462050 - DNA, 120 bp, Artificial Sequence
  ENSG00000157637_1 (sequence is synthesized)
ggttgacctcgcccccgcagccggccttcgaggctgcctcctccaggcagcctctggggcccgcgcccgcgcctgctcaggctcccgtgttcaggctgcccatcccctccccaccggcgt

SEQ ID NO: 462051 - DNA, 120 bp, Artificial Sequence
  ENSG00000157637_2 (sequence is synthesized)
cccggacgttgggacctgtgaccgtggcctcgggctgggcttccaaagccggccgcagcccggcgacccccgaggcctctcgccccgggcccctagacctctcactatgaccgcggccgc

SEQ ID NO: 462052 - DNA, 120 bp, Artificial Sequence
  ENSG00000157637_3 (sequence is synthesized)
cgcctccaactgggggctgatcacgaacatcgtgaacagcatcgtaggggtcagtgtcctcaccatgcccttctgcttcaaacagtgcggcatcgtcctgggggcgctgctcttggtctt

SEQ ID NO: 462053 - DNA, 120 bp, Artificial Sequence
  ENSG00000157637_4 (sequence is synthesized)
ctgctcatggatgacgcaccagtcgtgcatgttcttggtgaagtcggccagcctgagcaagcggaggacctacgccggcctggcattccacgcctacgggaaggcaggcaagatgctggt

SEQ ID NO: 462054 - DNA, 120 bp, Artificial Sequence
  ENSG00000157637_5 (sequence is synthesized)
ggagaccagcatgatcgggctgatgctgggcacctgcatcgccttctacgtcgtgatcggcgacttggggtccaacttctttgcccggctgttcgggtttcaggtgggcggcaccttccg

SEQ ID NO: 462055 - DNA, 120 bp, Artificial Sequence
  ENSG00000157637_6 (sequence is synthesized)
catgttcctgctgttcgccgtgtcgctgtgcatcgtgctcccgctcagcctgcagcggaacatgatggcctccatccagtccttcagcgccatggccctcctcttctacaccgtgttcat

SEQ ID NO: 462056 - DNA, 120 bp, Artificial Sequence
  ENSG00000157637_7 (sequence is synthesized)
gttcgtgatcgtgctctcctctctcaagcacggcctcttcagtgggcagtggctgcggcgggtcagctacgtccgctgggagggcgtcttccgctgcatccccatcttcggcatgtcctt

SEQ ID NO: 462057 - DNA, 120 bp, Artificial Sequence
  ENSG00000157637_8 (sequence is synthesized)
cgcctgccagtcccaggtgctgcccacctacgacagcctggatgagccgtcagtgaaaaccatgagctccatatttgcttcctcccttaatgtggtcaccaccttctacgtcatggtggg

SEQ ID NO: 462058 - DNA, 120 bp, Artificial Sequence
  ENSG00000157637_9 (sequence is synthesized)
gtttttcggctacgtcagcttcaccgaggccacggccggcaacgtgctcatgcactttccctccaacctggtgacggagatgctccgtgtgggcttcatgatgtcagtggctgtgggctt

SEQ ID NO: 462059 - DNA, 120 bp, Artificial Sequence
  ENSG00000157637_10 (sequence is synthesized)
ccccatgatgatcctgccatgcaggcaggccctgagcacgctgctgtgtgagcagcagcaaaaagatggcacctttgcagcagggggctacatgccccctctccggtttaaagcacttac

SEQ ID NO: 462060 - DNA, 120 bp, Artificial Sequence
  ENSG00000157637_11 (sequence is synthesized)
tcacaggagcgaccatgggaagcctcatctgcttcatctgcccggcgctgatctacaagaaaatccacaagaacgcactttcctcccaggtggtgctgtgggtcggcctgggcgtcctgg

SEQ ID NO: 462061 - DNA, 120 bp, Artificial Sequence
  ENSG00000157637_12 (sequence is synthesized)
tggtgagcactgtcaccacactgtctgtgagcgaggaggtccccgaggacttggcagaggaagcccctggcggccggcttggagaggccgagggtttgatgaaggtggaggcagcgcggc

SEQ ID NO: 462062 - DNA, 120 bp, Artificial Sequence
  ENSG00000157637_13 (sequence is synthesized)
tctcagcccaggatccggttgtggccgtggctgaggatggccgggagaagccgaagctgccgaaggagagagaggagctggagcaggcccagatcaaggggcccgtggatgtgcctggac

SEQ ID NO: 462063 - DNA, 120 bp, Artificial Sequence
  ENSG00000157637_14 (sequence is synthesized)
gggaagatggcaaggaggcaccggaggaggcacagctcgatcgccctgggcaagggattgctgtgcctgtgggcgaggcccaccgccacgagcctcctgttcctcacgacaaggtggtgg

SEQ ID NO: 462064 - DNA, 120 bp, Artificial Sequence
  ENSG00000157637_15 (sequence is synthesized)
tagatgaaggccaagaccgagaggtgccagaagagaacaaacctccatccagacacgcgggcggaaaggctccaggggtccagggccagatggcgccgcctctgcccgactcagaaagag

SEQ ID NO: 462065 - DNA, 120 bp, Artificial Sequence
  ENSG00000157637_16 (sequence is synthesized)
agaaacaagagccggagcagggagaggttgggaagaggcctggacaggcccaggccttggaggaggcgggtgatcttcctgaagatccccagaaagttccagaagcagatggtcagccag

SEQ ID NO: 462066 - DNA, 120 bp, Artificial Sequence
  ENSG00000157637_17 (sequence is synthesized)
ctgtccagcctgcaaaggaggacctggggccaggagacaggggcctgcatcctcggccccaggcagtgctgtctgagcagcagaacggcctggcggtgggtggaggggaaaaggccaagg

SEQ ID NO: 462067 - DNA, 120 bp, Artificial Sequence
  ENSG00000157637_18 (sequence is synthesized)
ggggaccgccgccaggcaacgccgccggggacacagggcagcccgcagaggacagcgaccacggtgggaagcctcccctcccagcggagaagccggctccagggcctgggctgccgcccg

SEQ ID NO: 462068 - DNA, 120 bp, Artificial Sequence
  ENSG00000157637_19 (sequence is synthesized)
agcctcgcgagcagagggacgtggagcgagcgggtggaaaccaggcggccagccagctggagggtaaggcctccgccctacagccgcctgcctcaggcccagggagcggcagccccctcc

SEQ ID NO: 462069 - DNA, 120 bp, Artificial Sequence
  ENSG00000157637_20 (sequence is synthesized)
cccagccctggggtgatgcccaggtcatcctcgggagccctgccaggccccccttctctttccagccgcctgctgagcagacccctcggagagctttctgctcccttcccatcagcagct

SEQ ID NO: 462070 - DNA, 120 bp, Artificial Sequence
  ENSG00000157637_21 (sequence is synthesized)
tgctttctgggaaccttttatctgccttactcccctttaaacacctgcggcatcgtcacatggcttgtgattaccgttttatctcccttgctcccctttaaaacacctgcggcattgtca

SEQ ID NO: 462071 - DNA, 120 bp, Artificial Sequence
  ENSG00000157637_22 (sequence is synthesized)
aagctggcagggcggagatgctggaccacgccgtcctgcttcaggtgatcaaagaacagcaggtgcagcaaaagcgcttgctggaccagcaggagaagctgctggcggtgatcgaggagc

SEQ ID NO: 462072 - DNA, 120 bp, Artificial Sequence
  ENSG00000157637_23 (sequence is synthesized)
agcacaaggagatccaccagcagaggcaggaggacgaggaggataaacccaggcaggtggaggtgcatcaagagcccggggcagcggtgcccagaggccaggaggcccctgaaggcaagg

SEQ ID NO: 462073 - DNA, 120 bp, Artificial Sequence
  ENSG00000157637_24 (sequence is synthesized)
ccagggagacggtggagaatctgcctcccctgcctttggaccctgtcctcagagctcctgggggccgccctgctccatcccaggaccttaaccagcgctccctggagcactctgaggggc

SEQ ID NO: 462074 - DNA, 120 bp, Artificial Sequence
  ENSG00000157637_25 (sequence is synthesized)
ctgtgggcagagaccctgctggccctcctgacggcggccctgacacagagcctcgggcagcccaggccaagctgagagatggccagaaggatgccgcccccagggcagctggcactgtga

SEQ ID NO: 462075 - DNA, 120 bp, Artificial Sequence
  ENSG00000157637_26 (sequence is synthesized)
aggagctccccaagggcccggagcaggtgcccgtgccagaccccgccagggaagccgggggcccagaggagcgcctcgcagaggaattccctgggcaaagtcaggacgttactggcggtt

SEQ ID NO: 462076 - DNA, 120 bp, Artificial Sequence
  ENSG00000157637_27 (sequence is synthesized)
cccaagacaggaaaaaacctgggaaggaggtggcagccactggcaccagcattctgaaggaagccaactggctcgtggcagggccaggagcagagacgggggaccctcgcatgaagccca

SEQ ID NO: 462077 - DNA, 120 bp, Artificial Sequence
  ENSG00000157637_28 (sequence is synthesized)
agcaagtgagccgagacctgggccttgcagcggacctgcccggtggggcggaaggagcagctgcacagccccaggctgtgttacgccagccggaactgcgggtcatctctgatggcgagc

SEQ ID NO: 462078 - DNA, 120 bp, Artificial Sequence
  ENSG00000157637_29 (sequence is synthesized)
agggtggacagcagggccaccggctggaccatggcggtcacctggagatgagaaaggcccgcgggggggaccatgtgcctgtgtcccacgagcagccgagaggcggggaggacgctgctg

SEQ ID NO: 462079 - DNA, 120 bp, Artificial Sequence
  ENSG00000157637_30 (sequence is synthesized)
tccaggagcccaggcagaggccagagccagagctggggctcaaacgagctgtcccggggggccagaggccggacaatgccaagcccaaccgggacctgaaactgcaggctggctccgacc

SEQ ID NO: 462080 - DNA, 120 bp, Artificial Sequence
  ENSG00000157637_31 (sequence is synthesized)
tccggaggcgacggcgggaccttggccctcatgcagagggtcagctggccccgagggatggggtcatcattggccttaaccccctgcctgatgtccaggtgaacgacctccgtggcgccc

SEQ ID NO: 462081 - DNA, 120 bp, Artificial Sequence
  ENSG00000157637_32 (sequence is synthesized)
tggatgcccagctccgccaggctgcggggggagctctgcaggtggtccacagccggcagcttagacaggcgcctgggcctccagaggagtcctagcacctgctggccatgagggccacgc

SEQ ID NO: 462082 - DNA, 120 bp, Artificial Sequence
  ENSG00000157637_33 (sequence is synthesized)
cagccactgccctcctcggccagcagcaggtctgtctcagccgcatcccagccaaactctggaggtcacactcgcctctccccagggtttcatgtctgaggccctcaccaagtgtgagtg

SEQ ID NO: 462083 - DNA, 120 bp, Artificial Sequence
  ENSG00000157637_34 (sequence is synthesized)
acagtataaaagattcactgtggcatcgtttccagaatgttcttgctgtcgttctgttgcagctcttagtctgaggtcctctgacctctagactctgagctcactccagcctgtgaggag

SEQ ID NO: 462084 - DNA, 120 bp, Artificial Sequence
  ENSG00000157637_35 (sequence is synthesized)
aaacggcctccgctgcgagctggctggtgcactcccaggctcaggctggggagctgctgcgtctgtggtcaggcctcctgctcctgccagggagcacgcgtggtcttcgggttgagctcg

SEQ ID NO: 462085 - DNA, 120 bp, Artificial Sequence
  ENSG00000157637_36 (sequence is synthesized)
gccgtgcgtggaggtgcgcatggctgctcatggtcccaacacaggctactgtgagagccagcatccaaccccacgcttgcagtgactcagaatgataattattatgactgtttatcgatg

SEQ ID NO: 462086 - DNA, 120 bp, Artificial Sequence
  ENSG00000157637_37 (sequence is synthesized)
cttcccacagtgtggtagaaagtcttgaataaacacttttgccttcacccagcctcggtggatgctgtttggtgtccaggaagcacagggagcaggggccagacaagccgggtgtccagg

SEQ ID NO: 462087 - DNA, 120 bp, Artificial Sequence
  ENSG00000157637_38 (sequence is synthesized)
ggcactggccggtgccgccctttgcactcctcatggttggcccagccctccattgtctgtgtttttcaaaatccaattgtggctttttttaaaaagtaaaaaacaccactgataacctga

SEQ ID NO: 462088 - DNA, 120 bp, Artificial Sequence
  ENSG00000157637_39 (sequence is synthesized)
gcaagcggaggacctacgccggcctgggtccacacaagcttcctcttctaaactcagaccaagacagccgtcctcaccgtgctggtgcagacctgctctctctgtgtctctcctggacac

SEQ ID NO: 462089 - DNA, 120 bp, Artificial Sequence
  ENSG00000157637_40 (sequence is synthesized)
cagatgccttcctgcggagctgcctgcagagagccttgctgttctccccaactcggaattccatggaggaagctcctcaggcctgggctgttgctggagttcagtggctcctctcccagt

SEQ ID NO: 462090 - DNA, 120 bp, Artificial Sequence
  ENSG00000157637_41 (sequence is synthesized)
acatgcaccgcatctctgggtgcgccttggagccgggacttccctttgcccttctccggctgggccgtgggggaagcgcgggggtcaccagatgaccgctcggggcctgggagggaccct

SEQ ID NO: 462091 - DNA, 120 bp, Artificial Sequence
  ENSG00000157637_42 (sequence is synthesized)
gctgagtcagcgccgtttctcatctgctgcagagaatcccgcggtcagggcggagagaatggcggctccttccgcattcggccgccccgtcgggaacgcatgctcctcatcggcaaggct

SEQ ID NO: 462092 - DNA, 120 bp, Artificial Sequence
  ENSG00000157637_43 (sequence is synthesized)
cctcattagctgtccacgtggacaccacaagcccagggctctcgtcccctcccttcctgaagcaccatgctcgaaaggagtctccatttgtttctataaatcccaaccaaagggtgaaaa

SEQ ID NO: 462093 - DNA, 120 bp, Artificial Sequence
  ENSG00000157637_44 (sequence is synthesized)
tgaaagccctccgtcagagtccctctggtgcaggctgtggcgctcgggtacctgggaccggcactgaaccctctggggacctgcaagctctggccagcagcacggggttcggccgtgctg

SEQ ID NO: 462094 - DNA, 120 bp, Artificial Sequence
  ENSG00000157637_45 (sequence is synthesized)
ggctgtgggatgctgtttccagccggcccccagtggtcaccgggtgggaggactgcatcgcagggacttgtctctttgtctgttaaaaaatctgattgagtgaaagaagaacctgcctcc

SEQ ID NO: 462095 - DNA, 120 bp, Artificial Sequence
  ENSG00000157637_46 (sequence is synthesized)
tgtccttcccttgctctgtctttgtttcttgtagtttcatttgcagacagtagatccaaaaataacctggcagccagaatttgaaatacccctcatgccccggagaatctgggcccgtgg

SEQ ID NO: 462096 - DNA, 120 bp, Artificial Sequence
  ENSG00000157637_47 (sequence is synthesized)
gtttctgtgaaatcgcccttgacagcttggctcagtacctttgttctggacgagcttctcacgctgttggattgagtgttcctttttcttttgcactagcattccacgcctacgggaagg

SEQ ID NO: 462097 - DNA, 77 bp, Artificial Sequence
  ENSG00000157637_48 (sequence is synthesized)
cctccaggcttattttcttacgtgcttgtcctagaacaactgaatgtgtaaagtggaaaaaacaaaaacaaaacccc

SEQ ID NO: 462098 - DNA, 120 bp, Artificial Sequence
  ENSG00000157637_49 (sequence is synthesized)
aactgaatgtgtaaagtggaaaaaacaaaaacaaaaccccacccagcccagataaccatctctgacattctggcacattccttttgactgttgctctggacactcacttccatgggcaac

SEQ ID NO: 462099 - DNA, 120 bp, Artificial Sequence
  ENSG00000157637_50 (sequence is synthesized)
gagcaggcttgctggggtcctgccgggtgcgcctggggcacagccagtgggagaactgatgcggcacagtggctggctgtgcgggagaggccatcccgggtgggcttccaggggcagtca

SEQ ID NO: 462100 - DNA, 120 bp, Artificial Sequence
  ENSG00000157637_51 (sequence is synthesized)
gggcgcagcctctcccgggccctcaggcctgcgtgcatcactgagctgtccgggcttcacggtcacagtcatgatgggtgtcaccagtggccagtgttcgggcacactccctgcaggtga

SEQ ID NO: 462101 - DNA, 120 bp, Artificial Sequence
  ENSG00000157637_52 (sequence is synthesized)
cgcgactgcccatccaaaccgaggcctcgcggggcgagtcccttgtcctccagctcgttgaactggggccccgggcacaggtcggctggaccagcttggcgaaccggacagctgcgagac

SEQ ID NO: 462102 - DNA, 120 bp, Artificial Sequence
  ENSG00000157637_53 (sequence is synthesized)
gaggctgggcaggggcagcagaatcgatggttcctccctcagtccccagtctctctccctgcaccagattagcatgcaaatggagcgggccccggcagctggtggggacaggaagaggct

SEQ ID NO: 462103 - DNA, 120 bp, Artificial Sequence
  ENSG00000157637_54 (sequence is synthesized)
ggtggctgacagctactgtaatatctgtcacacagttgtttgccagaccactaaatgtcaggtgccgcgctgtgctcgtgtgtctgggcgcacacggggggcggcgcggggggcgcctga

SEQ ID NO: 462104 - DNA, 120 bp, Artificial Sequence
  ENSG00000157637_55 (sequence is synthesized)
caggtaacacgttgttaagtgcccgtctaagagctgcttaggacagttcttgcattttaattgcgaaggcagttaccattggctcattgccacaagcctatgaggttgttaaatattttt

SEQ ID NO: 462105 - DNA, 120 bp, Artificial Sequence
  ENSG00000157637_56 (sequence is synthesized)
atctgccacttccttttgtcccgcccttgccttctgtcccccaaccccccaaaccctcccttgactttcctgcaaaaccttctgagtcttcaccgtgtgtgcaggtgggaagcctcccct

SEQ ID NO: 462106 - DNA, 120 bp, Artificial Sequence
  ENSG00000157637_57 (sequence is synthesized)
gtgtgggcgtgcctgcacccagatgtggaggtttattttaaggctgtgccccaaggggacccagtttgggggtggctgtgcccgccctggtcctagcatagccctggcccagagcactgc

SEQ ID NO: 462107 - DNA, 120 bp, Artificial Sequence
  ENSG00000157637_58 (sequence is synthesized)
tcccacaccctcgggcctcggagctcggctgtgttcatctacagggatctgtcacctgtccctccaggaaagctccttacgcctttgctctcctgagaataaaacttgctctgaatcctc

SEQ ID NO: 462108 - DNA, 120 bp, Artificial Sequence
  ENSG00000157637_59 (sequence is synthesized)
accggctgaaaagagaggcgtaaatccggcgcagacgggaaaagaccatcggcatgcggggggctggcagagcggcccctgtagcgttagtgggcatgcattgagccaatcgtaaactaa

SEQ ID NO: 462109 - DNA, 120 bp, Artificial Sequence
  ENSG00000157637_60 (sequence is synthesized)
tgtgacagatgaaatttgttcataccgctgtgtttacacccacatgcgagatccaaatcgtcatttcccacttagcgtctctcttggcagctccatctccaccagaacgcgccccagtct

SEQ ID NO: 462110 - DNA, 120 bp, Artificial Sequence
  ENSG00000157637_61 (sequence is synthesized)
tgctgtttaatatcccattatgatcggtgacagaagccgcattcttccgccacgtacctagttaccagttgccctttgtgtctgcgtgtttgcatatttagaaataaatctgcagctggg

SEQ ID NO: 462111 - DNA, 120 bp, Artificial Sequence
  ENSG00000157653_0 (sequence is synthesized)
cctttaggacccgaggcaggctctgggcccgccgggtccgttaatctcaccgcgccgcaaggggccacgttttaccacttgatttagcaaccctaagcggtttggaatctgctttgctct

SEQ ID NO: 462112 - DNA, 120 bp, Artificial Sequence
  ENSG00000157653_1 (sequence is synthesized)
cacaggacctcagcccgtcgtgatcagattctcccactttcttttttctttcctggaatggagtgggcagtctttttccatctctaccgaagttgatgttcatttttaatcttttcgccc

SEQ ID NO: 462113 - DNA, 120 bp, Artificial Sequence
  ENSG00000157653_2 (sequence is synthesized)
ctcacgcttttgtaataatggtactaagactgagtgttatttagattttattgttgttgtttgtgtttaacgcgaactatttaggcagcccagggataatgctggccatatagagatgcg

SEQ ID NO: 462114 - DNA, 120 bp, Artificial Sequence
  ENSG00000157653_3 (sequence is synthesized)
cctgattaggtctcaggagtcaattcggactgggcagagcactagaatgctgcagggttggcctttggcctaaaccatttctagctatggacttgccagatgagagccagtgggacgaaa

SEQ ID NO: 462115 - DNA, 120 bp, Artificial Sequence
  ENSG00000157653_4 (sequence is synthesized)
ccacctgtggcttggctgtttgtcagcacccacaatgctgggcaactatccgccgcattgagaggggccatcctcgaatcctcggctcatcctgcaaaactcccctggatgctgaagata

SEQ ID NO: 462116 - DNA, 120 bp, Artificial Sequence
  ENSG00000157653_5 (sequence is synthesized)
aactcccagtgctcaccgtggtagacatcttagattccggctttgcagctcatcatttaccagaatgtacctttactaaggcccattctttattgtctcagagttcaaagttttactcca

SEQ ID NO: 462117 - DNA, 120 bp, Artificial Sequence
  ENSG00000157653_6 (sequence is synthesized)
aatttcatggcaggcctccgaagggtttacctgacaaaagtttgatcaactgtactaacagacttcccaaatttccagtgttgaatttgaatgagacgcaacttccctgccctgaagatg

SEQ ID NO: 462118 - DNA, 120 bp, Artificial Sequence
  ENSG00000157653_7 (sequence is synthesized)
ttagaaatatggttgtattgtggatcccagaagaaacagagatacatgtgagccagcatgggaagaagaaaagaaagaactcggcagtgaaaagcaagtcatttctgggtctctctggaa

SEQ ID NO: 462119 - DNA, 120 bp, Artificial Sequence
  ENSG00000157653_8 (sequence is synthesized)
tcctacctctctgggctcaatccgaagcgttacctcaggatctactgaaggaacttttgccaggtggaaagcaaaccatgctctgtccagagatgaagataaaattggccatgatgaaaa

SEQ ID NO: 462120 - DNA, 120 bp, Artificial Sequence
  ENSG00000157653_9 (sequence is synthesized)
agaatcttcccttggaaaagaaccgacctgacagtgtgatttcttctaagatgtttctatctatacaccgcctcaccctggaaagaccagcactgcgatatcctgaacgtttgaagaaat

SEQ ID NO: 462121 - DNA, 120 bp, Artificial Sequence
  ENSG00000157653_10 (sequence is synthesized)
tacataacctgaagacagaaggttacaggaaacagcagcagcggcagcagcagcagcagcagcaacagaagaaggtgaaaacacctattaagaaacaggaggctaaaaagaaagccaaga

SEQ ID NO: 462122 - DNA, 120 bp, Artificial Sequence
  ENSG00000157653_11 (sequence is synthesized)
gtgatccagggatccagagcacttcacataaacatccagttaccaccgttcatgaccgtctctatggttacagaactctgccaggtcagaacagtgacatgaagcagcagcagcagatgg

SEQ ID NO: 462123 - DNA, 120 bp, Artificial Sequence
  ENSG00000157653_12 (sequence is synthesized)
aaaaaggaaccacttcgaaacaggattccacggagagaccaaagatgaactactatgaccatgcggatttccaccacagtgtaaaaagtcctgaattgtatgaaacagaacccactaaca

SEQ ID NO: 462124 - DNA, 120 bp, Artificial Sequence
  ENSG00000157653_13 (sequence is synthesized)
aggacattagtgctccagtggacgctgtgccagaagcccaggctgccaggcaaaagaagatctcctttaacttttcagaaattatggctagcacaggctggaactctgagctcaaactac

SEQ ID NO: 462125 - DNA, 120 bp, Artificial Sequence
  ENSG00000157653_14 (sequence is synthesized)
ttaggattcttcaggacactgatgatgaggatgaggaggaccagtcctctggggcagagtgagaagcctctggaggaatagactgaaggcatcccctggggcagccgtgttccaaagcgg

SEQ ID NO: 462126 - DNA, 120 bp, Artificial Sequence
  ENSG00000157653_15 (sequence is synthesized)
gatggctggtatcctgagggcagcaacgtttcacataagggcaagaggagaggggcttctgctctctggagcctttaccagggcctgagctctgagcttagggattccattttctttgtt

SEQ ID NO: 462127 - DNA, 120 bp, Artificial Sequence
  ENSG00000157653_16 (sequence is synthesized)
cacctctacttgcctctaaaataaatgtaggagaaaaatccccagcctttttaaatttagattatttcctttccattagggtcagaataattttggtgattaaacacaactgcttttcaa

SEQ ID NO: 462128 - DNA, 120 bp, Artificial Sequence
  ENSG00000157653_17 (sequence is synthesized)
ccaggatgtggcgtacagcacgaagacgctggcggcgcgggagatggcgctccgggcctccttggagatgttgacaccgtccgggagctgcgaggagaccggggagcactagaatgctgc

SEQ ID NO: 462129 - DNA, 120 bp, Artificial Sequence
  ENSG00000157654_0 (sequence is synthesized)
cccgggcgagcccgccgtgcgcacagctctgcccgccgcccctggagcggatccccagccgtccctgggcgttctcccgggttctagcaaagccccccggggtgcccatcagtttccttg

SEQ ID NO: 462130 - DNA, 120 bp, Artificial Sequence
  ENSG00000157654_1 (sequence is synthesized)
ggtgactacagcgtgtgttttttctttcctctttcccctgcctgtgtgcccttctccaggatggcagaggcggaattgcacaaggaaaggctgcaagccatagcagaaaaaagaaagagg

SEQ ID NO: 462131 - DNA, 120 bp, Artificial Sequence
  ENSG00000157654_2 (sequence is synthesized)
cagactgaaatagaaggcaagcgacaacagcttgacgagcagatacttctgctgcagcattccaagtccaaagtgcttcgggagaaatggctgctgcagggcatacccgctggaactgcc

SEQ ID NO: 462132 - DNA, 120 bp, Artificial Sequence
  ENSG00000157654_3 (sequence is synthesized)
gaagaggaggaagccaggaggcggcagtctgaagaggatgagttcagagtcaagcaacttgaagataacattcagaggctggagcaagaaatacaaacgctagaaagtgaagagtcccag

SEQ ID NO: 462133 - DNA, 120 bp, Artificial Sequence
  ENSG00000157654_4 (sequence is synthesized)
atatctgccaaagagcaaatcatcctagagaaactgaaggaaacagaaaaatccttcaaggactttcagaagggtttctccagtacggatggagatgcagtaaattacatttcctcccag

SEQ ID NO: 462134 - DNA, 120 bp, Artificial Sequence
  ENSG00000157654_5 (sequence is synthesized)
cttcccgacctgccaatcctctgttcacgaacagcagaaccatcacctgggcaggacgggaccagcagagcggctggagtcgggtgggagaatgtgctgctaaaggaaggtgagtcagcc

SEQ ID NO: 462135 - DNA, 120 bp, Artificial Sequence
  ENSG00000157654_6 (sequence is synthesized)
tcgaacgccacagaaacatccggcccagacatgactatcaagaagcctccccagctttctgaggatgatatctggctaaaaagcgagggagacaactatagtgccaccctcctggagcct

SEQ ID NO: 462136 - DNA, 120 bp, Artificial Sequence
  ENSG00000157654_7 (sequence is synthesized)
gctgccagctctctttccccagatcacaaaaacatggaaattgaggtgtctgttgcagaatgtaaaagtgttcctggaatcacctctaccccacatcccatggaccatccctccgctttc

SEQ ID NO: 462137 - DNA, 120 bp, Artificial Sequence
  ENSG00000157654_8 (sequence is synthesized)
tattcacccccgcataatggcctccttactgatcaccacgaatccctggataatgatgttgccagagagatccgctatctagatgaggtgctagaggccaactgctgtgattctgctgtg

SEQ ID NO: 462138 - DNA, 120 bp, Artificial Sequence
  ENSG00000157654_9 (sequence is synthesized)
gatggaacgtacaatggaacatcctccccagagcctggtgcagtggttctggtgggcggcctaagcccccctgtccacgaggcgacccagccagaacccactgaaagaacagctagccgg

SEQ ID NO: 462139 - DNA, 120 bp, Artificial Sequence
  ENSG00000157654_10 (sequence is synthesized)
caggcacctcctcacatcgagctcagtaatagcagccctgaccccatggcagaggcagaaagaacaaatggccattcccccagccagcctagagatgcgctgggggacagcctgcaggtg

SEQ ID NO: 462140 - DNA, 120 bp, Artificial Sequence
  ENSG00000157654_11 (sequence is synthesized)
cctgtcagccccagctccacaaccagctcacggtgttcttcccgagatggagagttcactctcaccacactgaaaaaggaggccaagtttgagctgcgtgccttccatgaggacaagaag

SEQ ID NO: 462141 - DNA, 120 bp, Artificial Sequence
  ENSG00000157654_12 (sequence is synthesized)
ccctccaagctctttgaggatgacgagcatgagaaagaacaatactgcattagaaaagtgaggccttcagaggagatgctggagctggaaaaggagaggagagagctcatccgcagccag

SEQ ID NO: 462142 - DNA, 120 bp, Artificial Sequence
  ENSG00000157654_13 (sequence is synthesized)
gccgtcaagaagaatcctggcattgcagcaaaatggtggaatcccccgcaggaaaaaaccatcgaggagcagctggacgaggaacatctggagtcgcacaaaaagtacaaggagcgcaaa

SEQ ID NO: 462143 - DNA, 120 bp, Artificial Sequence
  ENSG00000157654_14 (sequence is synthesized)
gagagaagggcacagcaggaacagttgctgctgcagaagcagttacagcagcagcagcagcagcccccatcgcagctctgcacagcccctgcctcttctcatgaacgcgcaagcatgatt

SEQ ID NO: 462144 - DNA, 120 bp, Artificial Sequence
  ENSG00000157654_15 (sequence is synthesized)
gacaaagcaaaggaggacattgtcacagagcagatagatttctctgctgctcgcaaacaatttcagctgatggagaattccaggcaagcggtggccaagggccagagtacacccaggctg

SEQ ID NO: 462145 - DNA, 120 bp, Artificial Sequence
  ENSG00000157654_16 (sequence is synthesized)
ttctccatcaagcctttctacaggcctctggggtcagtcaactcagacaagccactgactaatccgagaccaccttctgtcgggggacctccagaagacagtggtgcctcagccgccaag

SEQ ID NO: 462146 - DNA, 120 bp, Artificial Sequence
  ENSG00000157654_17 (sequence is synthesized)
ggacagaaatcccccggtgccctggagaccccatcggcagcaggaagccagggcaacacagcctctcaggggaaggaagggccctacagcgagccttctaaacgtgggcccttatctaaa

SEQ ID NO: 462147 - DNA, 120 bp, Artificial Sequence
  ENSG00000157654_18 (sequence is synthesized)
ctgtgggctgaggatggagaatttacgagcgcccgggctgtcctcactgtggtcaaggatgatgaccatgggattttggatcagttctcaagatctgtcaatgtctccttgacccaagag

SEQ ID NO: 462148 - DNA, 120 bp, Artificial Sequence
  ENSG00000157654_19 (sequence is synthesized)
gagcttgactctggtctggacgaattgtcggtgaggtctcaggataccacagtcctggagaccctatccaatgatttcagcatggacaacatcagtgacagcggggcatccaatgagaca

SEQ ID NO: 462149 - DNA, 120 bp, Artificial Sequence
  ENSG00000157654_20 (sequence is synthesized)
accaatgccctccaggaaaattcactggctgatttttctctgccccagacaccacaaactgacaacccctcagagggccgaggagaaggcgtctccaagtcatttagtgatcatggtttc

SEQ ID NO: 462150 - DNA, 120 bp, Artificial Sequence
  ENSG00000157654_21 (sequence is synthesized)
tattccccttcctccacgctgggggactctccgttggttgatgaccccttggagtatcaggctggcctcctggtgcagaatgccattcaacaagccatagccgagcaggtggataaagct

SEQ ID NO: 462151 - DNA, 120 bp, Artificial Sequence
  ENSG00000157654_22 (sequence is synthesized)
gtgtccaaaaccagcagggatggagcagagcaacagggacctgaagcgactgtagaggaagctgaagctgcggctttcggctcagaaaagcctcagagcatgtttgagccacctcaggtg

SEQ ID NO: 462152 - DNA, 120 bp, Artificial Sequence
  ENSG00000157654_23 (sequence is synthesized)
tcttctcctgttcaagagaaaagggatgtattaccaaagattctgcctgctgaagacagggcgctcagggaaagggggcccccccagccactgccagctgtgcagcccagtggcccgatt

SEQ ID NO: 462153 - DNA, 120 bp, Artificial Sequence
  ENSG00000157654_24 (sequence is synthesized)
aacatggaggagaccaggcccgaaggaagctatttcagcaagtactcggaggcagctgagctgagaagcacagcctccctcctggccactcaagaatctgacgtgatggttgggcctttc

SEQ ID NO: 462154 - DNA, 120 bp, Artificial Sequence
  ENSG00000157654_25 (sequence is synthesized)
aagctgaggtccaggaaacagcggactttgtccatgattgaggaagagatccgagcagctcaggaaagggaagaggagctgaagaggcagagacaagtcttgcagagtacgcagagcccc

SEQ ID NO: 462155 - DNA, 120 bp, Artificial Sequence
  ENSG00000157654_26 (sequence is synthesized)
aggacaaagaatgccccatcactgccctccagaacatgctacaaaactgctccagggaaaatagagaaagtcaaacctcctccatcccccaccactgaaggccccagcttgcagcctgac

SEQ ID NO: 462156 - DNA, 120 bp, Artificial Sequence
  ENSG00000157654_27 (sequence is synthesized)
ttagcccctgaagaggctgccggaacccagcggcccaagaatctgatgcagaccctcatggaagactatgagacacacaaatctaaaaggcgcgagagaatggatgatagtagttacact

SEQ ID NO: 462157 - DNA, 120 bp, Artificial Sequence
  ENSG00000157654_28 (sequence is synthesized)
tctaagttactgtcttgcaaggtgacttccgaggtcctcgaggccacacgggttaatcgaagaaagagcgcactggctttgcgctgggaagcagggatctatgccaaccaggaggaagaa

SEQ ID NO: 462158 - DNA, 120 bp, Artificial Sequence
  ENSG00000157654_29 (sequence is synthesized)
gacaacgaataaacttccttcaacccaggaagcgtctttggtgcttgggagaccaagaaaccaagaaattaacaactgaaagcattttaatggactatttattaaagtgcaaacaaactc

SEQ ID NO: 462159 - DNA, 120 bp, Artificial Sequence
  ENSG00000157654_30 (sequence is synthesized)
agcaatccttatgtagaccagaagctgcaatatacaatgatgaaaatgaaacgaaaaggaagtccccccatcagactctggacacccaggaatcaaaagagaaaggacttttttggtgac

SEQ ID NO: 462160 - DNA, 120 bp, Artificial Sequence
  ENSG00000157654_31 (sequence is synthesized)
aatcaacatagttgctgcaggcggaactgagaccagcctctctgggcgatgaaggacaatggtggtagggccacttagagagcagtagggcccaggctggtgcagcctacatggcacagg

SEQ ID NO: 462161 - DNA, 120 bp, Artificial Sequence
  ENSG00000157654_32 (sequence is synthesized)
atatttccctgcaccagtttcccacctgtcacttgcagcatcagagggtgttgcattaactccattttctccagcagccataaaatgaatggcgtttctctccatatttgcccagaagag

SEQ ID NO: 462162 - DNA, 120 bp, Artificial Sequence
  ENSG00000157654_33 (sequence is synthesized)
gcagttatgattccacttctcctacatttaattatttttaattgagaacaactcatgatcacaattcataaaatccatattttaagacaatagttcttcatgtcacaaacacaatctatt

SEQ ID NO: 462163 - DNA, 120 bp, Artificial Sequence
  ENSG00000157654_34 (sequence is synthesized)
ctacatgaggaggctgagaaaggggaagagaaaaacaaaccaaatggatgatgttagctttaggatcgtgtctgcttataatattcactgatctgcagtttatgagaacacattttcaca

SEQ ID NO: 462164 - DNA, 120 bp, Artificial Sequence
  ENSG00000157654_35 (sequence is synthesized)
gttatgtttcttcataggaaaactatatttagtgggcaacaactatttttatgatgggatgggggagtatatacacgtatagaatctgtacgcgttgaacaacttggttcaagatggtgg

SEQ ID NO: 462165 - DNA, 120 bp, Artificial Sequence
  ENSG00000157654_36 (sequence is synthesized)
gggcatttttagagcggcaataattgaaaaaaaaggcgaactctgccttggagaggtagatgataagaaataaaaaggtgtttataactattttgtattataaagtgggccttagagata

SEQ ID NO: 462166 - DNA, 120 bp, Artificial Sequence
  ENSG00000157654_37 (sequence is synthesized)
ggaagaagaatgatggattccttttggatcaatcagaaaggaaacacgaaagaaaagtcaggaaggtagagagagaaaaagggagggaaggagaaagaatgggaataaaataaggaggta

SEQ ID NO: 462167 - DNA, 120 bp, Artificial Sequence
  ENSG00000157654_38 (sequence is synthesized)
agagatactatttttgctgagcaaccagtgtgtttcaggatgatacaaagaaaaatatagaatagaaataagtgcaggcttggaatcagctacaaatcctaaagatggggtgtgtgtgga

SEQ ID NO: 462168 - DNA, 120 bp, Artificial Sequence
  ENSG00000157654_39 (sequence is synthesized)
tgtgtgtgtgtgtgtgtgtacaccattgtgtgtttgtaaaatgtgtatgttcatgagtaagggtgtgtgtgtgtgtgtattaaaattccagagtgaccgtggcacttgggtgtacaggta

SEQ ID NO: 462169 - DNA, 120 bp, Artificial Sequence
  ENSG00000157654_40 (sequence is synthesized)
attcctccagagctgtttgctggcttcaggagtggagtgagaatttcttttttatgaaaagggatataaaggcaccgagctgatgcagtatttgtaatattaagttgacctaacaaggta

SEQ ID NO: 462170 - DNA, 120 bp, Artificial Sequence
  ENSG00000157654_41 (sequence is synthesized)
tttgcatgagtcacaattacaaagttttgagcggttttgtaatttgacatttaggagagtctcctatttattctcatactttacattcatgcttagtatactatagaggatgccagcttt

SEQ ID NO: 462171 - DNA, 120 bp, Artificial Sequence
  ENSG00000157654_42 (sequence is synthesized)
aatctttctgtcatttaaagcaatatgataagggtattcaataattgggtgccctaaatttctggatgagaaaattttcaattctggccatgagaaagaaaaaaaaataaacagccttct

SEQ ID NO: 462172 - DNA, 120 bp, Artificial Sequence
  ENSG00000157654_43 (sequence is synthesized)
ttttttttcctttgttttaaaactgtggttttttaaaaaagcaataattaactcagacctcactaaaaatcatttttgtttttatattgttatgtcataagctctattatgttattctaa

SEQ ID NO: 462173 - DNA, 120 bp, Artificial Sequence
  ENSG00000157654_44 (sequence is synthesized)
caagtagcaatttcacaaaatttgtatgtagatgttaacgcacatttcctttgcttcttttattagactagtgttgactttggggggggacatttattcacaaatgagaagtaggcacaa

SEQ ID NO: 462174 - DNA, 120 bp, Artificial Sequence
  ENSG00000157654_45 (sequence is synthesized)
agtaaaaaatggaaccatctactaacaaggatcctttaaaactgccaagggagctctaacttgaagccacatcctacagatggcagcccaaatagcacatgggcaattggcaccatcttt

SEQ ID NO: 462175 - DNA, 120 bp, Artificial Sequence
  ENSG00000157654_46 (sequence is synthesized)
atatggttgagtctcctgaatattttgaatgaattctcaacaaaatgtgctagccactggggacgcaaaacaagtaagatccctgttgcaagaaattcattttatagtgagggaggttgg

SEQ ID NO: 462176 - DNA, 120 bp, Artificial Sequence
  ENSG00000157654_47 (sequence is synthesized)
catggagactaaaattctcaggaaaatgagatccgtgttagattagaagtcctgatgtgaaatgggaggactcaggaaggaggatcgtctttacctgaggatttctagccagaggtccca

SEQ ID NO: 462177 - DNA, 120 bp, Artificial Sequence
  ENSG00000157654_48 (sequence is synthesized)
gatgcctgggctgagaacccagcgataagggggcgttcccaaagcagacacagggataagaacagaggaggcagcagcattgcacagccccaggcacagtggcagttaggatggctggag

SEQ ID NO: 462178 - DNA, 120 bp, Artificial Sequence
  ENSG00000157654_49 (sequence is synthesized)
agtaggatagttctatgggttgcccaaaaaatgtgatgcgcttcatgttttctctgactcatggatctggtagagaccatagacatgatatagactaacttccccatttttcacaagagg

SEQ ID NO: 462179 - DNA, 120 bp, Artificial Sequence
  ENSG00000157654_50 (sequence is synthesized)
aaaccatccttatgacttaccttaaagttttttgttctgttttgaaggaaaccatgtgcttcatgaaacctacagttgacaagagaatgtacagctaagagaaaagcttaagaggccaca

SEQ ID NO: 462180 - DNA, 120 bp, Artificial Sequence
  ENSG00000157654_51 (sequence is synthesized)
ctattcgcggaatggctttagaggcagatgaagtggtctttgaccacagttgattgaaccagagcacttattgcttaaagaataacagagttctagagctgggggttcttgggccatgct

SEQ ID NO: 462181 - DNA, 120 bp, Artificial Sequence
  ENSG00000157654_52 (sequence is synthesized)
ccgtgtgtggataaggaaagaaatactgtttctgggactctcccacagtcacaaagctgttttcactgtggcccctacatctcttaacttttgctattactcctatgctgccttccggat

SEQ ID NO: 462182 - DNA, 120 bp, Artificial Sequence
  ENSG00000157654_53 (sequence is synthesized)
tactgctgtctatcttcttgctccactcactgaagatcctattataatcccatgaaaatgtaaattacagtttacttgggagagccagattttctctgtgctcttgagttttttattcat

SEQ ID NO: 462183 - DNA, 120 bp, Artificial Sequence
  ENSG00000157654_54 (sequence is synthesized)
tcaagaaaccttgggccaccgctttgtacatagcaccgtgctaggctctgggatcccaaatggacccttttaactttctgaagatgggaccgtcccctggaggaaagtcattcctgccta

SEQ ID NO: 462184 - DNA, 120 bp, Artificial Sequence
  ENSG00000157654_55 (sequence is synthesized)
atccatcgagagaaagaggcttacgaaaaactttgcctctgatgctcagccccacccccaaatagcacacaagcttgttaaccccacctcttacaaaatgtttagattctgtaggtgtta

SEQ ID NO: 462185 - DNA, 120 bp, Artificial Sequence
  ENSG00000157654_56 (sequence is synthesized)
aaagcctttctggaagtattgcattctgccgtgtttataggtgttcactttcctccagagctgattaactactgacatgacttggctttctcatccagaaattatggaaacagggtctgt

SEQ ID NO: 462186 - DNA, 120 bp, Artificial Sequence
  ENSG00000157654_57 (sequence is synthesized)
cagtggcaggaggccgtgctgtgttttacttggatgacacaatgcagtttacttgcctcttcatacccatgcatgctgctcaccctagacaatgacatataagccgtatatagatcaatg

SEQ ID NO: 462187 - DNA, 120 bp, Artificial Sequence
  ENSG00000157654_58 (sequence is synthesized)
tatatacacacacacatatatatatataaagtgtaacaaggaacactaaaacagtgttgattcttgtctctgaagacaaataattaaaccttttttttcccaactaaagaatggatttaa

SEQ ID NO: 462188 - DNA, 120 bp, Artificial Sequence
  ENSG00000157654_59 (sequence is synthesized)
ggatttaattaaactatgtattgaaaaaaaagtagcctaagtgttagagatggtgaatatattccattttagttaaagaacaaatttcctgaattttaagcattcagtgagctgccaatt

SEQ ID NO: 462189 - DNA, 120 bp, Artificial Sequence
  ENSG00000157654_60 (sequence is synthesized)
ttgattttgtgttgctctttacccaaattattttttctttgtttttctttttttgggggaggaggggaaaaaagcagcaatactgtgtttggaaattatactctgtatctggttttcctg

SEQ ID NO: 462190 - DNA, 120 bp, Artificial Sequence
  ENSG00000157654_61 (sequence is synthesized)
tgtatgttaaccacttaaatgttattatcctgctttggttttagagtgattgtgaggcattcaatgcaagtatacagttattttctcattaaaatccaatgtgtgttgagtttttataaa

SEQ ID NO: 462191 - DNA, 120 bp, Artificial Sequence
  ENSG00000157654_62 (sequence is synthesized)
gggagggtggaacggcccactcggagtcccagctccttctccttcctgtcgtcgttagcagggagggccagaggaggtgcagccagcctgcttagaaactttggtgcaccgcgctttctt

SEQ ID NO: 462192 - DNA, 120 bp, Artificial Sequence
  ENSG00000157654_63 (sequence is synthesized)
caattctttttgcccggcacagtttgcgccgttgaagagggctggaagtttatttccagctattgctgcagcacttccttctcctagtgctgttcgttcttcttatgggaactggtactc

SEQ ID NO: 462193 - DNA, 120 bp, Artificial Sequence
  ENSG00000157654_64 (sequence is synthesized)
atgcgctggccccagcccggggctgccgctcgccttcccccggagtctcctggacccccggagtctcctggacccccggagcgggaggcagcggccgcgcggcgctggactggagcagaa

SEQ ID NO: 462194 - DNA, 120 bp, Artificial Sequence
  ENSG00000157654_65 (sequence is synthesized)
aggtgtgtgcgggcaggtacaggatgcgagctcagtcctgcttcccctgaaatcctgtgacctggcagagggctgtgttcctgtgtccttacatcggatgtcctactgaagaaagggaaa

SEQ ID NO: 462195 - DNA, 120 bp, Artificial Sequence
  ENSG00000157654_66 (sequence is synthesized)
ctgggacgaagctgtaggcacagtgggttctgaagatcagatataactgagggaaagttaggtcatgattgccacctggatgctgttctctctcttcacgaagcctccccagctttctga

SEQ ID NO: 462196 - DNA, 120 bp, Artificial Sequence
  ENSG00000157654_67 (sequence is synthesized)
aggaatttgtccagcttgagccagggtgcacgcaggaatctgtctggaaaaaggcagttctcactgaggaggtttgaggcgcgcgctctgggcaggaagcctccccagctttctgaggat

SEQ ID NO: 462197 - DNA, 120 bp, Artificial Sequence
  ENSG00000157654_68 (sequence is synthesized)
ctgtgtacgccatggaaattaatgtggagaaagacaaacaaacaggagagaccaagattctctctacatctaccattggcccagagggggtccatcagaaaggagtcaaagtctatgatg

SEQ ID NO: 462198 - DNA, 120 bp, Artificial Sequence
  ENSG00000157654_69 (sequence is synthesized)
aaggctggacaatcaagcttaggaggagggcacgtgtctgaaaggactgtgattgcagatgggagcctcagccatcccaaggaacacatgctctgcaaagaagctaagttagaaatggta

SEQ ID NO: 462199 - DNA, 120 bp, Artificial Sequence
  ENSG00000157654_70 (sequence is synthesized)
cataagtctaggaaagaccattcttccgggaacccagggcagcaggcccaagcccccagcgctgcagggccggaggcaaacttggatcagcccgtcaccatgatttttatgggctaccaa

SEQ ID NO: 462200 - DNA, 120 bp, Artificial Sequence
  ENSG00000157654_71 (sequence is synthesized)
aatatcgaggatgaagaggagacgaaaaaggtgctaggctatgatgaaaccatcaaggctgaattggtcctcattgatgaagatgatgagaagtcattgagggagaagacagtgacggac

SEQ ID NO: 462201 - DNA, 120 bp, Artificial Sequence
  ENSG00000157654_72 (sequence is synthesized)
gtgtccactattgacgggaacgcggctgagcttgtgtccgggaggccggtctcagacaccacagagccctcatccccagaagggaaggaagagagcctagctacagagccagccccaggt

SEQ ID NO: 462202 - DNA, 120 bp, Artificial Sequence
  ENSG00000157654_73 (sequence is synthesized)
acccaaaagaaaaagcgctgtcaatgctgtgttgtcatgtgaccacttctttcttctcctttcttctgggcagcctgtactctccaccactcacgtagacctcactgtaccactaactgc

SEQ ID NO: 462203 - DNA, 120 bp, Artificial Sequence
  ENSG00000157654_74 (sequence is synthesized)
aatactgtgaactggaagcaaacacctgccttgccttgcagttgaattgctttgatctctctcattttttttccttttcctcacctgagagacaacgtgcatgtgtgtgcttcattctct

SEQ ID NO: 462204 - DNA, 120 bp, Artificial Sequence
  ENSG00000157654_75 (sequence is synthesized)
agaatttctcccactcttcgagcctacagcagacatgttaggagaatgctgctgcttgcaacacacccagagacggtggggcaggtgacactgcgtgtgtgcccggtgtctctggaagtg

SEQ ID NO: 462205 - DNA, 120 bp, Artificial Sequence
  ENSG00000157654_76 (sequence is synthesized)
gtgcactcggctccgggagaggcgagcagcgccggtgagccccgcagcagcgcacccggccgcggagccccgcgatggagatggcagaggcggaattgcacaaggaaaggctgcaagcca

SEQ ID NO: 462206 - DNA, 120 bp, Artificial Sequence
  ENSG00000157654_77 (sequence is synthesized)
tccttgtgtcttcaagagtgaatcacttccttcctgctcgattggaatggactcttcgtatcagccagtgatatggtagccttaactcacttgactggaattgaacccattggcactggg

SEQ ID NO: 462207 - DNA, 120 bp, Artificial Sequence
  ENSG00000157654_78 (sequence is synthesized)
ggtttcattttgtagtgtgttcctgtaacgtagtcacacactgccatgtctctggtttctcacttgcctcctttgctgtggatctttgtttttatatcttgtgtggcaaaatgctgttgg

SEQ ID NO: 462208 - DNA, 120 bp, Artificial Sequence
  ENSG00000157654_79 (sequence is synthesized)
ctctagccggttgctagtgtagccaaaagtggaccttacttagtctgtccgatctagggtgatgctttttgctgccttacataagcttccagattacagtattgtgcattcatggctttc

SEQ ID NO: 462209 - DNA, 120 bp, Artificial Sequence
  ENSG00000157654_80 (sequence is synthesized)
tttctgttaaaactgaaatgaagtcaatgtagaagaacccagagcttgtcacagctgaaatgtagggactgattccataacctgcccatcagcggttgtctctctttctatggtttaacc

SEQ ID NO: 462210 - DNA, 120 bp, Artificial Sequence
  ENSG00000157654_81 (sequence is synthesized)
gatgaaccctttatataagaagcaccattttaaaatttctaaggacatgaaacaaacattgtttgaagcatcagtagcaattgatctccaaacttaggcaaattcacaagccttgtttct

SEQ ID NO: 462211 - DNA, 120 bp, Artificial Sequence
  ENSG00000157654_82 (sequence is synthesized)
attctcttaaaaaaatgtaaatttttatattgtttcttttttctggatattttctggtcatgttaatctattttcaatgaggagatcatcttgagaagtatctttgcagtgaccatattt

SEQ ID NO: 462212 - DNA, 120 bp, Artificial Sequence
  ENSG00000157654_83 (sequence is synthesized)
atggatggtgctgtaatgcattaactgttcatctcctccccagttgattacaaagccttgcatccatactcttttctttctggccccatgagaaagagaatgttttaggtaacttcaact

SEQ ID NO: 462213 - DNA, 120 bp, Artificial Sequence
  ENSG00000157654_84 (sequence is synthesized)
tgtaggtttatctgcccttcaaaaaaaaaaactttaaaaaacttttaaaaattaagaaagacctatcttctcaatgttaagcacttaatttcataacaaatattaagtggcacatagctg

SEQ ID NO: 462214 - DNA, 120 bp, Artificial Sequence
  ENSG00000157654_85 (sequence is synthesized)
agcttcttagggcattgttttgtttttagcttctggagattccagaagagcaaagaatattttttatctagaacacaatgaacagtttttgaaataccttctcagcactcccccaaagca

SEQ ID NO: 462215 - DNA, 120 bp, Artificial Sequence
  ENSG00000157654_86 (sequence is synthesized)
aaaagccacatatgtagtaaaaccaaagggaaacaatttaataaaataacaatagtatagtaatgaaataaagatataacatgattactggttttaataagagttatcttaactttaagt

SEQ ID NO: 462216 - DNA, 120 bp, Artificial Sequence
  ENSG00000157654_87 (sequence is synthesized)
tatttgcccatttatagcattgttatgaattattcataaaattatgtcccacagtatatagttttgaaaaaacatatgatatactacatccagtctaacttctgtggaaagtagatcaga

SEQ ID NO: 462217 - DNA, 120 bp, Artificial Sequence
  ENSG00000157654_88 (sequence is synthesized)
aaaaataagatagtcttgagagaattttattatagaagctgtctaatttgacctattttgcttgctcagtgctaaatctattgcttttttttaatctcctggcttgaaattatatttact

SEQ ID NO: 462218 - DNA, 120 bp, Artificial Sequence
  ENSG00000157654_89 (sequence is synthesized)
tcaataggaaaggtaaaaacatcagtttttacttttcaaagttaattttctgaaataattgcattttaatgagcacaaaatgggtcattttatttttattatactcatcttgtttacacc

SEQ ID NO: 462219 - DNA, 120 bp, Artificial Sequence
  ENSG00000157654_90 (sequence is synthesized)
tatacataaacagaaaacgttaaagaagagaaaaataaaggagctaagttctgctgttgaagattatttcatccaaggcttggttttgaataactgagggaaatatctctaaatctcaag

SEQ ID NO: 462220 - DNA, 120 bp, Artificial Sequence
  ENSG00000157654_91 (sequence is synthesized)
ttcatcaaagcagctgcaatggaataaaattgctattttatcgagaaacctggtttggatgcttataaattccactactctcagcttcattttcctgagtacgtggtcactgaagcatca

SEQ ID NO: 462221 - DNA, 120 bp, Artificial Sequence
  ENSG00000157654_92 (sequence is synthesized)
tttagacattacataaactggcatgcagataaacctatttacatagagggagaaaacagtttcaatgtcttggacaatctgttattttaatgatttacttaagaaagaaacaatctgaaa

SEQ ID NO: 462222 - DNA, 120 bp, Artificial Sequence
  ENSG00000157654_93 (sequence is synthesized)
gcttaccatagcttatcttttctactcacttggagattcaagctattcaatgtgagttttaaaaagttaagcacagttagtgagtgaaatggtagaatgtagaacctttaagcttgctgg

SEQ ID NO: 462223 - DNA, 120 bp, Artificial Sequence
  ENSG00000157654_94 (sequence is synthesized)
ttgataaacagaatcaatcttccaggacagataattccctgaagggacctatccttgcataagtgaactagttactcatacagaaaatgatctgcacatcttactacaacactacacaca

SEQ ID NO: 462224 - DNA, 120 bp, Artificial Sequence
  ENSG00000157654_95 (sequence is synthesized)
agaactaaaagattaatgattatctgtattctcttcactaattactattatgggggaataatgattagcaaattatatgaattcgagttctctctatacttttattagtaaagcttatca

SEQ ID NO: 462225 - DNA, 120 bp, Artificial Sequence
  ENSG00000157654_96 (sequence is synthesized)
tttaatggactgaagtaagatgtgttacctttattcgagctatttgtagccacactaaatgaaggtgtgtttgaatatggcgcatatatttgcatatgtcccatcattttcttgtcataa

SEQ ID NO: 462226 - DNA, 120 bp, Artificial Sequence
  ENSG00000157654_97 (sequence is synthesized)
tggggaattcaggcttagccagtacttctatgggatgagacctataatcccacctatagcagcaagtaactacccttcatgatgatagtgtacatggagctgtgattatgaacatgctgc

SEQ ID NO: 462227 - DNA, 120 bp, Artificial Sequence
  ENSG00000157654_98 (sequence is synthesized)
ctttcctgctgccattggcattctctctgtaaattttattatgtgtggtatcacactctccaaaaatgcagggtatttggttacataaccaaactaattaaagaatcagtaatgaaattg

SEQ ID NO: 462228 - DNA, 120 bp, Artificial Sequence
  ENSG00000157654_99 (sequence is synthesized)
caaaaccatgatcttttttgagctaatgattagttgggctttcctttaaaataatataatcaggccgagtgcagcggctcacacctgtaatctcggcactttggaagtccgcggcgggtg

SEQ ID NO: 462229 - DNA, 120 bp, Artificial Sequence
  ENSG00000157654_100 (sequence is synthesized)
aaaaaaaaaaaaaaaaaaaatcatataatcagttcccttttaaatagaaagaggaggaaaaaaaaaaggaaaagggggggtatctcatttgtatacaaatagattttcaatggcatttaa

SEQ ID NO: 462230 - DNA, 120 bp, Artificial Sequence
  ENSG00000157654_101 (sequence is synthesized)
tttcaatggcatttaataaaagattctttaatggttaaaatgataaagattaattctacatatcttgaaaaatcttaatgacttctgtattcttgacttcttaaaaatattttctttctt

SEQ ID NO: 462231 - DNA, 120 bp, Artificial Sequence
  ENSG00000157654_102 (sequence is synthesized)
ttagtgtgcaataagacaaactaaggggaattttttcagcttgtatctcttttacccatattattttccttgcataagcaaaaaaataataattgcctctaaaactgatttgacagtgtt

SEQ ID NO: 462232 - DNA, 120 bp, Artificial Sequence
  ENSG00000157654_103 (sequence is synthesized)
cagtgacatcatttaatattggtgatggggtggaagagaaggtagggaatgcccttatggccaaacctaaaacacagtttccttgagccttctgagcaatcttagaattattcagaagct

SEQ ID NO: 462233 - DNA, 120 bp, Artificial Sequence
  ENSG00000157654_104 (sequence is synthesized)
ttcaggaaactcaaattctattaatttgatttggttcctttccaaaatgttaatagacatgtatttgcttaaaacgtctacctattccatttaatttcctgctgataaatgtattttatc

SEQ ID NO: 462234 - DNA, 120 bp, Artificial Sequence
  ENSG00000157654_105 (sequence is synthesized)
tacaagcaagtagaatattttgttttggttaaagtcaagtttttataaaaggaggggaagtataagagagagtttcctagagatacaatatcatctctggagcaaaatgttgaggccaag

SEQ ID NO: 462235 - DNA, 120 bp, Artificial Sequence
  ENSG00000157654_106 (sequence is synthesized)
tgtaaaaacagactatttctctttacttcctgcagaatttcatttcaagggaccacagcacacccttgaaaattaccatttatttaatgccagttgaaccaatgggtagcaaaagaggag

SEQ ID NO: 462236 - DNA, 120 bp, Artificial Sequence
  ENSG00000157654_107 (sequence is synthesized)
ggagggaacatggtcatagagacaaaatctaactactataccaggtcttcctttgtaagaaatattagccctgccaatataaaacgcagatggacatagacagaataagcatcgaggact

SEQ ID NO: 462237 - DNA, 120 bp, Artificial Sequence
  ENSG00000157654_108 (sequence is synthesized)
ttttcttatttacttgaaatctagaagctcagtcatctctgctcatccctggacccactggagagttttactcactaacaggtcctttcctggaagaaataacctcatctcctgccatat

SEQ ID NO: 462238 - DNA, 120 bp, Artificial Sequence
  ENSG00000157654_109 (sequence is synthesized)
tagtttacaataaaaatcattccaaagtgagccatttcacattgcatttttgccacatgcacatttgctattgaaaccacagattctcagcataagtaagacataggtgtttcagaaact

SEQ ID NO: 462239 - DNA, 120 bp, Artificial Sequence
  ENSG00000157654_110 (sequence is synthesized)
tcataaatacacgatctttcaggtgctcctcaatttcttaatcaaggtatattgaactccagtgattaggatagaacctgaaaacatcctttgttctattggatagtacaacacagcaag

SEQ ID NO: 462240 - DNA, 120 bp, Artificial Sequence
  ENSG00000157654_111 (sequence is synthesized)
agcacacagttatttgtataataaaacaacttaattaatgaggaagatgggatgtttgattcctgctaccaccagttcacttcacaaaggccttcttctggtattaccaggaaaactttc

SEQ ID NO: 462241 - DNA, 120 bp, Artificial Sequence
  ENSG00000157654_112 (sequence is synthesized)
ctgcattttctagggaaaaagaaaagtcgtttattaggagcacaatgcagatatgtatctgtgttttcatagcttcagcaaacttcttagtaaaattcccatttcaacaaaaaccaaaat

SEQ ID NO: 462242 - DNA, 120 bp, Artificial Sequence
  ENSG00000157654_113 (sequence is synthesized)
actgattgtttgaatgtagaaaggtatagaataaagactacaaaggggaattttaccagggctccttagaccagcttccccagcataatttttatataactcaagtaagcctctgcttcc

SEQ ID NO: 462243 - DNA, 120 bp, Artificial Sequence
  ENSG00000157654_114 (sequence is synthesized)
cctctcctttccagtataatataagaaggtcggaactgtcgcacaaaagaacttgatttcaatatgaaaatataatatgtaattttggggactgcagactttctgcatcaaagatctgga

SEQ ID NO: 462244 - DNA, 120 bp, Artificial Sequence
  ENSG00000157654_115 (sequence is synthesized)
cagccttaacttttataaaaataatttttcaatgttctcttttactaaccaggaaaacaagatgttttctgaaattaatgactttttctattttgggtctgttttctaagtttttacagg

SEQ ID NO: 462245 - DNA, 120 bp, Artificial Sequence
  ENSG00000157654_116 (sequence is synthesized)
ttgaggtataaagggtcgtcttctcctcatattgcctcttcataatcacctggggctattttttgcaagtcactgcatttttacaaaaaataaaaataaaaagtacatctcacaaatcat

SEQ ID NO: 462246 - DNA, 120 bp, Artificial Sequence
  ENSG00000157654_117 (sequence is synthesized)
aaaattctccctagacttcagacagtccttctggagtgaaagaatagaaatacagaaagaaaagaattacagggtggctttctttttattttcctatggttaatgtactgtatggtatat

SEQ ID NO: 462247 - DNA, 120 bp, Artificial Sequence
  ENSG00000157654_118 (sequence is synthesized)
atgtttacagaatgtatctgccttgtgatgttaacaaaatgaatgacaaaaaatagtactgatgtgccatttgacagtttgccttagcatcactgtttatgttcttcttttctgtccttt

SEQ ID NO: 462248 - DNA, 120 bp, Artificial Sequence
  ENSG00000157654_119 (sequence is synthesized)
ttggtaaaaaaaaacgcaggttgtattccaaagctgtattaacacaacattctcttccccactcctacccagccttcttcagagctgtgaatttcattacaggagcattgaggcagaacc

SEQ ID NO: 462249 - DNA, 120 bp, Artificial Sequence
  ENSG00000157654_120 (sequence is synthesized)
ttgcaggtgtggcccaaaggggctaaagtgggcataggttgggatttacttctgcccgtctaccaaccaaacacgtatctgtgttctcatataagcctgcaaaattttacaccctgcctt

SEQ ID NO: 462250 - DNA, 120 bp, Artificial Sequence
  ENSG00000157654_121 (sequence is synthesized)
tcagggagacaggccacatggagcgcatgacctcttgtagtcgtctcctcacagtccttcccactgtgagagaaggaaacttgcagacccccaactggatctgggagcatatttttaagc

SEQ ID NO: 462251 - DNA, 120 bp, Artificial Sequence
  ENSG00000157654_122 (sequence is synthesized)
acagttggcattgcttgaaaaagcaagagagatggactcaaattctatgattgagccatgactgaggaatgtgcccattcgttatagtcgaagatgagtaggatgatatgggtgagaata

SEQ ID NO: 462252 - DNA, 120 bp, Artificial Sequence
  ENSG00000157654_123 (sequence is synthesized)
ggagtggctgtagaaatggaatattttacagttatgtatttttttaaggaatagtatttttataatgaaatctatatacattatggagcttgagttggaaaacacccttgactgagctat

SEQ ID NO: 462253 - DNA, 120 bp, Artificial Sequence
  ENSG00000157654_124 (sequence is synthesized)
ttcttcattccattaaaggtaactttctggggagtcctatagcactaggccaagccttgggggcatgaacaaagggcctgtcacttggccttgcactgccattacatgagatccagtgtt

SEQ ID NO: 462254 - DNA, 120 bp, Artificial Sequence
  ENSG00000157654_125 (sequence is synthesized)
tccaaataggccttggttggaagattgagctttctatacctgccattaggtagattagatagatggcttgatagctctctgggctatacttttaataatatataataatctttgggaagg

SEQ ID NO: 462255 - DNA, 120 bp, Artificial Sequence
  ENSG00000157654_126 (sequence is synthesized)
agatagctattttaaatgcaagcaaagcccagaaactatcaaagtccaaatctttcacatatttaaggagtaattgccacatttgaggttaagggaccacttactatggtgcatttgaga

SEQ ID NO: 462256 - DNA, 120 bp, Artificial Sequence
  ENSG00000157654_127 (sequence is synthesized)
aatatatatgaaacggtgagtcagagccctctgaccatcttcagtctacacataagcagataaaccaccaatataaatcttataggggccagacgaggtggcttatgcctgtaatcccag

SEQ ID NO: 462257 - DNA, 120 bp, Artificial Sequence
  ENSG00000157654_128 (sequence is synthesized)
cactttggggggccaaggcaggaggatagtgtgagcccagaagttcaagaccaggctaggcaacatgttgagaccatgttgtttagtctctactaaaaaatataaaaattagccagcatg

SEQ ID NO: 462258 - DNA, 120 bp, Artificial Sequence
  ENSG00000157654_129 (sequence is synthesized)
tctgtctcaaaaaaaaaaacaaaaaaacaattatcagttggccttctacataacacagggctacactgtatttttagagttaagtagatacaggaaaagattgtctttatccataaagga

SEQ ID NO: 462259 - DNA, 120 bp, Artificial Sequence
  ENSG00000157654_130 (sequence is synthesized)
ataaaggagattctgaatttttagagttcctgaatattttcccccaagtttctgtcaaattcctgaagtcccttccctatcacactcagtttcctgaagctcttcccctacacctgctcc

SEQ ID NO: 462260 - DNA, 120 bp, Artificial Sequence
  ENSG00000157654_131 (sequence is synthesized)
tctgtctggctaacagagttgtcatgtctcagaaactactcaccactcttgtgagactctcttcccaagcatcatccttcctcaggatgaggcctttttctactacccaagagatcaaga

SEQ ID NO: 462261 - DNA, 120 bp, Artificial Sequence
  ENSG00000157654_132 (sequence is synthesized)
ccctttttctaacaagacaaggttatatctactccattttcaagagaaataacccctctggttcccatgcaaatcgcttaaattccttcatcaccagaatctctccaacaggcccaactc

SEQ ID NO: 462262 - DNA, 120 bp, Artificial Sequence
  ENSG00000157654_133 (sequence is synthesized)
cagcccagctgtgaacactgctgtcatggagacaactccaaaatgaaagaactatgcaattgcctgaaggtgctaatggagagccagtttactctaatctcttattactaaggaacctct

SEQ ID NO: 462263 - DNA, 120 bp, Artificial Sequence
  ENSG00000157654_134 (sequence is synthesized)
cggtttcgagattaagtgggcagggagacatccagtcacttagttttgcaatgacaggtcttgatatacacagaggccaccaggcaatgcctgatccaaactattctgtatgtagctcca

SEQ ID NO: 462264 - DNA, 120 bp, Artificial Sequence
  ENSG00000157654_135 (sequence is synthesized)
actccaattctgtgatatcctattctggcaggtgggaagagttctattctttgcagggttctggaacattctttcctgctctcaagctcctgacttaggagagtcaaaatcatacagggg

SEQ ID NO: 462265 - DNA, 120 bp, Artificial Sequence
  ENSG00000157654_136 (sequence is synthesized)
ttccagaaaatgttgtgtctgatgcagcttctcagtgaatgtaggttgttggtgaaattttcagctttagcatctcactcggggtgagtgatgtctctgtaaatactttcatttgtggtt

SEQ ID NO: 462266 - DNA, 120 bp, Artificial Sequence
  ENSG00000157654_137 (sequence is synthesized)
ggttggtgggggtgggggtgggagcctgtcgtgcttactctgaattagcttactgggctagctgctgtactttgtaacctgaagtgtactttgactgttctgtttccttcagatgaaaaa

SEQ ID NO: 462267 - DNA, 120 bp, Artificial Sequence
  ENSG00000157654_138 (sequence is synthesized)
caaaataaaaaccgacttcagaaaagacactaccagcgacagctgatgctgtacttgtagcttctctctgttcctctgtacagtattaatagacaataaactgccttttcactgcatcta

SEQ ID NO: 462268 - DNA, 120 bp, Artificial Sequence
  ENSG00000157654_139 (sequence is synthesized)
ggggctgacaagcaggatgttcccttgtactgagaggaaacgaaattgaaaatgcaagtctgagctcatttctttctggtgacttgtgggtcgcttcagatgtttgcaaccttatcccaa

SEQ ID NO: 462269 - DNA, 80 bp, Artificial Sequence
  ENSG00000157657_0 (sequence is synthesized)
cagcagcccggcccgggaggagcaggacgcgccggggccgcctcctcccgcacggacccatgaaccagccgggcggcgcg

SEQ ID NO: 462270 - DNA, 120 bp, Artificial Sequence
  ENSG00000157657_1 (sequence is synthesized)
gcggctccgcaggctgacggagccagtgcagccggaaggaaaagcactgcgagcagggagcgcttgaagcgcagccagaagagcaccaaggtggagggcccagagccagtgccagccgag

SEQ ID NO: 462271 - DNA, 120 bp, Artificial Sequence
  ENSG00000157657_2 (sequence is synthesized)
gcctcgctgagtgccgagcaaggaacgatgacggaggtgaaggtgaagacagagctgcccgatgactacatccaggaggtgatctggcagggcgaggccaaggaggagaagaaggcggtc

SEQ ID NO: 462272 - DNA, 120 bp, Artificial Sequence
  ENSG00000157657_3 (sequence is synthesized)
agcaaggatgggaccagcgacgtgcctgccgagatctgcgtggtgatcggcggcgtccgcaaccagcagacccttgatggaaaagcgcccgaaggcagcccccacggtggatctgtgcga

SEQ ID NO: 462273 - DNA, 120 bp, Artificial Sequence
  ENSG00000157657_4 (sequence is synthesized)
agccggtattcagggacctggatttttgaccaagcattgagatatgcatctgggtcttacgaatgcggaatctgtggcaagaagtacaagtattacaactgcttccagacccacgtgcgg

SEQ ID NO: 462274 - DNA, 120 bp, Artificial Sequence
  ENSG00000157657_5 (sequence is synthesized)
gcgcaccgagacaccgaagccacctcaggggagggagcctcccaaagcaacaatttcaggtacacatgtgatatctgcgggaagaagtacaaatactacagctgtttccaagagcaccga

SEQ ID NO: 462275 - DNA, 120 bp, Artificial Sequence
  ENSG00000157657_6 (sequence is synthesized)
gacctgcacgcagtggatgtgtttagtgtggaaggggcccctgagaaccgggcagaccccttcgaccaaggtgtcgtggccacggacgaggtgaaggaggagcccccggagccattccag

SEQ ID NO: 462276 - DNA, 120 bp, Artificial Sequence
  ENSG00000157657_7 (sequence is synthesized)
aaaatcgggccaaaaactggcaattacacctgtgaattctgcggcaaacagtacaagtactacactccctaccaggagcatgtggccttacacgcccccatcagtactgcccccgggtgg

SEQ ID NO: 462277 - DNA, 120 bp, Artificial Sequence
  ENSG00000157657_8 (sequence is synthesized)
gagccaccggatgatccagacacgggctctgagtgttcacatccagaggtctccccatctccacgcttcgtggcagcgaagacccagacgaaccagtcggggaaaaaagctccggcctcc

SEQ ID NO: 462278 - DNA, 120 bp, Artificial Sequence
  ENSG00000157657_9 (sequence is synthesized)
gtggtccgatgtgccaccctcttacaccgcacccctccagccacccaaacccagacgttccgcactccaaattcgggatctccggcgagcaaggcaaccgcagcagaaagcgctttcagt

SEQ ID NO: 462279 - DNA, 120 bp, Artificial Sequence
  ENSG00000157657_10 (sequence is synthesized)
cggagagtagaaggcaaagcacaaaaccactttgaagagacgaacagcagttcgcagaactccagcgaaccctacacctgcggcgcctgtgggatccagttccagttctacaacaacctg

SEQ ID NO: 462280 - DNA, 120 bp, Artificial Sequence
  ENSG00000157657_11 (sequence is synthesized)
ttggagcacatgcagtcccatgcagctgacaatgaaaacaacattgcctccaaccagtcccgatcgccacctgctgttgtagaagagaagtggaaacctcaggcccagaggaacagtgcc

SEQ ID NO: 462281 - DNA, 120 bp, Artificial Sequence
  ENSG00000157657_12 (sequence is synthesized)
ggtttaacacccaacagcatgatccccgaaaaggagcggcagaacatcgcagagcggctgttgagggtcatgtgtgccgacctgggtgcactgagcgtggtcagcgggaaggagttcctg

SEQ ID NO: 462282 - DNA, 120 bp, Artificial Sequence
  ENSG00000157657_13 (sequence is synthesized)
aagttggcccagaccttagtagacagtggtgcccgctatggggccttctcggtcactgaaatcctgggcaacttcaacacgctggcgctgaagcacctgccacgcatgtacaaccaggtg

SEQ ID NO: 462283 - DNA, 120 bp, Artificial Sequence
  ENSG00000157657_14 (sequence is synthesized)
aaggtgaaagtgacctgtgccttgggcagcaatgcctgcctaggcatcggtgtcacctgccactcccagagtgttggccctgactcctgctacatcctcacagcctaccaggccgagggc

SEQ ID NO: 462284 - DNA, 120 bp, Artificial Sequence
  ENSG00000157657_15 (sequence is synthesized)
aaccacatcaagagctatgtgcttggtgtgaagggtgcggacattcgcgacagcggtgaccttgtgcaccactgggtgcagaacgtgctgtcggagttcgtgatgtcggagatcaggaca

SEQ ID NO: 462285 - DNA, 120 bp, Artificial Sequence
  ENSG00000157657_16 (sequence is synthesized)
gtgtacgtgacggattgccgggtgagcacgtccgccttctccaaggccggcatgtgccttcgctgctcagcctgtgccttgaactcggtggtgcagagcgtgctgagcaagcggacactg

SEQ ID NO: 462286 - DNA, 120 bp, Artificial Sequence
  ENSG00000157657_17 (sequence is synthesized)
caggcccgcagcatgcacgaggtcatcgagctgctcaacgtgtgcgaggacctggcgggctccacgggcctggccaaggagaccttcgggtcgctggaggagacgtctccaccaccctgc

SEQ ID NO: 462287 - DNA, 120 bp, Artificial Sequence
  ENSG00000157657_18 (sequence is synthesized)
tggaactcggtgacggactcactgttgctggtgcatgagcgctatgagcagatctgcgagttctacagccgggccaagaagatgaacctcatccagagcctcaacaagcacctgctcagc

SEQ ID NO: 462288 - DNA, 120 bp, Artificial Sequence
  ENSG00000157657_19 (sequence is synthesized)
aacctggcggccatcctgacgccggtgaagcaggcagtcatcgagctgagcaacgagagccagcccaccctgcagctggtgctgcccacctacgtcaggctggagaagctgttcacggcc

SEQ ID NO: 462289 - DNA, 120 bp, Artificial Sequence
  ENSG00000157657_20 (sequence is synthesized)
aaggccaacgacgcaggcactgtcagcaagctctgccacctcttcctggaggcgctcaaggagaacttcaaggtgcacccggcccacaaggtggccatgatcctggacccgcagcagaag

SEQ ID NO: 462290 - DNA, 120 bp, Artificial Sequence
  ENSG00000157657_21 (sequence is synthesized)
ctgcggcctgtgccaccctaccagcacgaggagatcatcggcaaggtctgtgagctcatcaacgaggtgaaggagtcctgggccgaggaggccgacttcgagcccgctgccaagaagccc

SEQ ID NO: 462291 - DNA, 120 bp, Artificial Sequence
  ENSG00000157657_22 (sequence is synthesized)
cgctctgctgccgtcgagaaccccgcagctcaggaagatgatcggctaggcaaaaatgaagtgtacgattacctgcaggagcccctcttccaggctacccctgatctcttccagtactgg

SEQ ID NO: 462292 - DNA, 120 bp, Artificial Sequence
  ENSG00000157657_23 (sequence is synthesized)
tcgtgcgttacccaaaagcacacaaaactcgccaagctcgccttctggctcctggcggttccggccgtgggcgccagaagcgggtgtgtaaatatgtgtgaacaagcgcttctaatcaaa

SEQ ID NO: 462293 - DNA, 120 bp, Artificial Sequence
  ENSG00000157657_24 (sequence is synthesized)
cggaggcggctgctcagtccagaagatatgaataaactcatgtttctgaaatccaacatgctttaagacttgacttcgggggaaaaaaaaagaaaaagagaagataacattagaaaaaaa

SEQ ID NO: 462294 - DNA, 120 bp, Artificial Sequence
  ENSG00000157657_25 (sequence is synthesized)
gtgctttttttatatgtgtgtgtgtgcgtgtatgtacacagccacacgtgtgtgcacgtgtctgaacacgtgctgtggttgtgggggtgtgggggggtctctgtgctcatctccatggcc

SEQ ID NO: 462295 - DNA, 120 bp, Artificial Sequence
  ENSG00000157657_26 (sequence is synthesized)
cacacacacacacacacacacacacgaccctggtgcgtgtacatacgcctgtgcttggacgggtgtgcattgaactgggcgtgtcaggaaagctgagcgattgggaaagagggagatgtt

SEQ ID NO: 462296 - DNA, 120 bp, Artificial Sequence
  ENSG00000157657_27 (sequence is synthesized)
ctgagcgattgggaaagagggagatgtttcacctccttttctcagtaagggggctttagaagactccgctttcaggtgtgcagattggcagaaagctgatgttgtgaaatgttcaggcag

SEQ ID NO: 462297 - DNA, 120 bp, Artificial Sequence
  ENSG00000157657_28 (sequence is synthesized)
ctgagatctgaagtgacttgacgctctctgtccttcaccccggtcctccttttccctctttgaccctcttccagccctcctaccctcctgatcccattgtgcacccccccacacactcgg

SEQ ID NO: 462298 - DNA, 120 bp, Artificial Sequence
  ENSG00000157657_29 (sequence is synthesized)
ctgctctgctgtggactctccacactgcatcagatggacggtttctgcactggactttgtttcttgttcaccttcagggcattgagctgctgcctttgagataccccttgggtgtcccgg

SEQ ID NO: 462299 - DNA, 120 bp, Artificial Sequence
  ENSG00000157657_30 (sequence is synthesized)
ggcagccgccttagaaacacacctatctatctccccaaatcaggaaaggagacttaaagagtataaagctgacattttgctttttaatataagagaggagaaaaagacatttttcagaga

SEQ ID NO: 462300 - DNA, 120 bp, Artificial Sequence
  ENSG00000157657_31 (sequence is synthesized)
agtatagatactgtctccactccctaataatttctctccctaacattttagcaatttttaccttgtttgggggttcattttgtttcttcagatttgatttagactctgctaggaggcact

SEQ ID NO: 462301 - DNA, 120 bp, Artificial Sequence
  ENSG00000157657_32 (sequence is synthesized)
gaatgtctataacttatgttttggagttttgtttttttacttgccccttttgttcctcaagtcacactgtaaactagctcatctctgtggtgtactcagtatcctacagtctttcttggc

SEQ ID NO: 462302 - DNA, 120 bp, Artificial Sequence
  ENSG00000157657_33 (sequence is synthesized)
cttccctgtacagttcagttttcacatattcgaacggccaagaccaggttcttggctgtgctatttggagaccaggcgttggggaggattcacgggttccacagctgcggggtttggtgg

SEQ ID NO: 462303 - DNA, 120 bp, Artificial Sequence
  ENSG00000157657_34 (sequence is synthesized)
ccgtaggggaagcagtggtttgggagttctgaatgtaagcgccagagctgccctcctggtccgctgtgcgtggtacccagtgtgcatcacactactcaccccctcccggaccctggcagt

SEQ ID NO: 462304 - DNA, 120 bp, Artificial Sequence
  ENSG00000157657_35 (sequence is synthesized)
ccacagcgactccgaagtcagcccatagtcacatccaccacacctcagacctgccacagcctctcctcacttcccaggaccctgaggcttccaggagctctgctgcccacagccctcggg

SEQ ID NO: 462305 - DNA, 120 bp, Artificial Sequence
  ENSG00000157657_36 (sequence is synthesized)
gtcctcactcacacctccgacttccaggacggcagtgagcatggtgccttgtggccccaacagttgatgttccgagggtgggatggtgtttggccatgttcgactcgatgctgtgaaaga

SEQ ID NO: 462306 - DNA, 120 bp, Artificial Sequence
  ENSG00000157657_37 (sequence is synthesized)
tgtcttcaggcttttctctcctgttcccccagctgtgagcaaattaggttctacacacacagttcggatgccaagggtgacaccccattcccttcacaagaggcggttctgtcacaaatc

SEQ ID NO: 462307 - DNA, 120 bp, Artificial Sequence
  ENSG00000157657_38 (sequence is synthesized)
cactcccctggtgacccttagccgtgggatggggtggttacactaaggcttcaagctgagaatggccatcatggcgggaggctgtttgcaaaggcaccttctgtcatcctggggttggct

SEQ ID NO: 462308 - DNA, 120 bp, Artificial Sequence
  ENSG00000157657_39 (sequence is synthesized)
aagtcaactccaccccttcccaataataaagcatcactcaactgtgagatacctcgactacaaaaagcactgtaccacagccctctccccctgggtccatgacaggagcagggagtaaag

SEQ ID NO: 462309 - DNA, 120 bp, Artificial Sequence
  ENSG00000157657_40 (sequence is synthesized)
ttgattgcaaacctcatgaaggcttaggatcatggacctggaacatagtgtttgggggccaagcctgcacactttgcctcatgagaactcacccagctctccccttgaaacttggacaca

SEQ ID NO: 462310 - DNA, 120 bp, Artificial Sequence
  ENSG00000157657_41 (sequence is synthesized)
ctgaaatggatcaaagtgggccatttccacatttgctccagcaaactgtggtctcaggaactaccatgccatttcctctcctggagaagttctaggtattacctccacaacatttccaac

SEQ ID NO: 462311 - DNA, 120 bp, Artificial Sequence
  ENSG00000157657_42 (sequence is synthesized)
tgggggactgagcccacttatcagagaagagccgccatccacactggagcaggaacagggagaaatccagacaggaacctcatgtcacttcctagggaatatgggaagaaacatcagcag

SEQ ID NO: 462312 - DNA, 120 bp, Artificial Sequence
  ENSG00000157657_43 (sequence is synthesized)
actttatgatgtcagttgggcctttggaggcattctggaaggtggcctcagcatcactgatgattgacagatgctacagcaaaaggtccctctagcgttgcttgactgctggggaaggga

SEQ ID NO: 462313 - DNA, 120 bp, Artificial Sequence
  ENSG00000157657_44 (sequence is synthesized)
cagtgaccggcactttgacccacacaaggataggagctgcctactttgtgtggtaggtgagagcagagcctgggagcccatcctccctctacttggagcaaagttgtgctggtgatgccc

SEQ ID NO: 462314 - DNA, 120 bp, Artificial Sequence
  ENSG00000157657_45 (sequence is synthesized)
cattattgggccagttgattagaaaataggcatttcactttcttggaaagccatcggactaagcccagatgtgcatttagagcactcagcattcttctctttgaagcatgggatgtctgt

SEQ ID NO: 462315 - DNA, 120 bp, Artificial Sequence
  ENSG00000157657_46 (sequence is synthesized)
cctccaggaagagatttgatcttaggttgttacctccctttcacttcttttccacctcaattcaatacttaggggttggcttgcctctgcaggtttgatgtgaatgccactgggtactca

SEQ ID NO: 462316 - DNA, 120 bp, Artificial Sequence
  ENSG00000157657_47 (sequence is synthesized)
gaaagctgtcctctggggctgccttgtccagttagataacaagatagcagatgattgtttcttgcaacctctggttccctccggaaactggtgtcaccaacaggaaaggctgtaccaagg

SEQ ID NO: 462317 - DNA, 120 bp, Artificial Sequence
  ENSG00000157657_48 (sequence is synthesized)
tgccctcttctcagacaggctgttctcagagtgcaaatcctgctgcaactaacagcttaataaaacccaaagatctcacaggtccagccactggcccctttatctccaacaatatccacc

SEQ ID NO: 462318 - DNA, 120 bp, Artificial Sequence
  ENSG00000157657_49 (sequence is synthesized)
tcaccaaattctagttcagccaaaggattgagacaggctcttccagttcatctcctggtgtccagcctgaccttcacatctggaaggattttgtcgtctgcctcccagttctgggtccac

SEQ ID NO: 462319 - DNA, 120 bp, Artificial Sequence
  ENSG00000157657_50 (sequence is synthesized)
tgtaggtctttccatcacaagcctttgggggatctgggaccaggaatttgggccgtttctaccatattctcagcagcctaaggtggtggcctgctgatgtggagactactcaccttgagc

SEQ ID NO: 462320 - DNA, 120 bp, Artificial Sequence
  ENSG00000157657_51 (sequence is synthesized)
catgtggtccccaggacagaaatggcctttgttttgacatacatggacccaaaaggggaggtgaagaaaacacacctccacctggcaagtttttctccctcatctgaggtcagttgcttc

SEQ ID NO: 462321 - DNA, 120 bp, Artificial Sequence
  ENSG00000157657_52 (sequence is synthesized)
accaacaaagcccaagccaagaactgcagcgttgagggttgtccctcggagtggagtagcccaaggaatctcaggtccaccaagagcattggtaccatctgggccacgggtggatgcctt

SEQ ID NO: 462322 - DNA, 120 bp, Artificial Sequence
  ENSG00000157657_53 (sequence is synthesized)
tgttctggcacagttctccacttcccgattcctggctcagccagccaggcctccctctaatggcatttagtaaccaggaaacaaaacacatgccacctgagcaaaactgcctgcacttca

SEQ ID NO: 462323 - DNA, 120 bp, Artificial Sequence
  ENSG00000157657_54 (sequence is synthesized)
tctctggaggttcgctgcacagaggccacctgccgcatcaccagtgaggaagctttgccaccatcctgcttggcagcttcacacttgacatctgaggattggtttttggctggaaaaagg

SEQ ID NO: 462324 - DNA, 120 bp, Artificial Sequence
  ENSG00000157657_55 (sequence is synthesized)
gtaccagggtttcctggcaaggacaggagagcagtgcagtgacacagatgagaagctgtgagtctccaggattcaaggaagccaccaggtgtgcaggctgggaagagacatctctttcag

SEQ ID NO: 462325 - DNA, 120 bp, Artificial Sequence
  ENSG00000157657_56 (sequence is synthesized)
tttgaccctttatctcctgcacttttaaagaaacaccagagaaaaaatctacaaggcgtgtttccactgaagctgaacctctgcctttaggagtcccctatatttgagcaaggccacctg

SEQ ID NO: 462326 - DNA, 120 bp, Artificial Sequence
  ENSG00000157657_57 (sequence is synthesized)
cttcccctggacttgagctggactccttgaagagtgggcttctggagagatgttaggaatatagcacatgctctctgggggccacagggtcattgggaaggtttgaaatgaagatgggat

SEQ ID NO: 462327 - DNA, 120 bp, Artificial Sequence
  ENSG00000157657_58 (sequence is synthesized)
gtggctggaacagcctgtgagatggctccattggggacactcccctcatcttgtcatcacgatggatatgctggaagaggaggtgtcccagtgagccgcccgaagttcatagctttgccc

SEQ ID NO: 462328 - DNA, 120 bp, Artificial Sequence
  ENSG00000157657_59 (sequence is synthesized)
tcgccttggcaacagcggcaatgcctctatctctgggatgcatcttaaggagggctcctaacaaggccgatgatttagacagaacaagagactaagtaaggtccggctatcccgtggagc

SEQ ID NO: 462329 - DNA, 120 bp, Artificial Sequence
  ENSG00000157657_60 (sequence is synthesized)
cagtagtaggtgggagctcctgtccccgccagccctgctccagcccccgtgtccagctgggccagtggaagaactgggaaggaggaagcccctccctttcactgtggctaatgtttgcta

SEQ ID NO: 462330 - DNA, 120 bp, Artificial Sequence
  ENSG00000157657_61 (sequence is synthesized)
ggccagttatggtgaaccaatgatacagtgttttccctcttaacgttcccctcctggttttgccttttcagggttttctgggggattttgttgtagtagttgcttttcttcctctctcat

SEQ ID NO: 462331 - DNA, 120 bp, Artificial Sequence
  ENSG00000157657_62 (sequence is synthesized)
ttgggtttgaggattgtggtcgggggagccctggctttcaccaaaggagcccagtggtttctgtggaagaggcgcccactcccactttaatgagggtgaagattgtcaggtcactgtttg

SEQ ID NO: 462332 - DNA, 120 bp, Artificial Sequence
  ENSG00000157657_63 (sequence is synthesized)
acatattcatgccccgtcccttccccccccacccccccgcccacccaccacgggtgtcgctttaaagagtcaattcttgtacagagaaggatttgctaggtttgcatttgggtgttagca

SEQ ID NO: 462333 - DNA, 120 bp, Artificial Sequence
  ENSG00000157657_64 (sequence is synthesized)
tcacgacccacgagggccctgcccaaccgtgcgtcccatggggcaccttgactcttcaaaccaaaattccttaaaggggcacagcccagccttgtccgcaacctcaggggcctgggattc

SEQ ID NO: 462334 - DNA, 120 bp, Artificial Sequence
  ENSG00000157657_65 (sequence is synthesized)
ctgtggcgcttcctgaattccaggttggcacagatgatgaggtctgagaccagccggaaggaggggctcctgccataacccaggtgccagccggtctccgcctaggaccttccctcccgc

SEQ ID NO: 462335 - DNA, 120 bp, Artificial Sequence
  ENSG00000157657_66 (sequence is synthesized)
ccagccagggtgggcggcatcctacgcggtgaaacgagctcatggactgacccggggctgggcctcgccagccaggagagagcgagggccgcacggcagggctggcccaggcagctcgtc

SEQ ID NO: 462336 - DNA, 120 bp, Artificial Sequence
  ENSG00000157657_67 (sequence is synthesized)
cagggccattcagatcccaagcatcaggaaatcattttgtacaaccacccgaagcagagatattttttaagaagcgtaaattattttcagttgttttctgatcctgcctttttcttttcc

SEQ ID NO: 462337 - DNA, 120 bp, Artificial Sequence
  ENSG00000157657_68 (sequence is synthesized)
ccacaacttcacgccagtgagtcgttcacatcaggtaaatcttgagaaagccttggtgccctcctccccaccccccactcagtaaccacgtgcgtgcacccccgcatcctttctcagtag

SEQ ID NO: 462338 - DNA, 120 bp, Artificial Sequence
  ENSG00000157657_69 (sequence is synthesized)
ttaagacgttctaggcaataccatagacacatctgactgtgtctctctctttgagtgcaagaaactcaagtcatcttaaaaaaaaaaaaatacaaaaaaaatttacaaaaaaacaaacac

SEQ ID NO: 462339 - DNA, 120 bp, Artificial Sequence
  ENSG00000157657_70 (sequence is synthesized)
aaaaaaaatatcttttttaggccagagttttctacaggtattaatgaatatttttcttaatccttataagttttatgtgtttaatatttcttaataccggtagcattaatttatactttt

SEQ ID NO: 462340 - DNA, 120 bp, Artificial Sequence
  ENSG00000157657_71 (sequence is synthesized)
gtagcaacacaatatttttataaacagccggtgcttggctcaagtcttcacgaggggtttaggcagggccatcttggggaccctgtgtaccatgtactgtatttaaaaaaaaaaaaagtt

SEQ ID NO: 462341 - DNA, 120 bp, Artificial Sequence
  ENSG00000157657_72 (sequence is synthesized)
acctattgtcacacttgctgtgttaattaacaaaagatgttgtgtgcggtctcctgtatcggtgtggatccaacagctctccagggagtcacattgcatgggggttgagttgacggttct

SEQ ID NO: 462342 - DNA, 120 bp, Artificial Sequence
  ENSG00000157657_73 (sequence is synthesized)
tgtgatatgtaaacccccgagaccaaacttgagggtttatttagggttttctgtttgtcctttgggtttttgtttcactttgttttggtgccgtttctccatttacagccaaatcagttt

SEQ ID NO: 462343 - DNA, 120 bp, Artificial Sequence
  ENSG00000157657_74 (sequence is synthesized)
catgatgttcaaaacatttactgatgtcaaatggaggaaaggaacagaaaaaaagatttttacaaagtaataaaatttaaaactgagctgtttaatgttgctgtttttacctgtctgttc

SEQ ID NO: 462344 - DNA, 120 bp, Artificial Sequence
  ENSG00000157657_75 (sequence is synthesized)
ttgtccaaaagtggaacattcccagggagaagaggaaggttccactcggttctttaagtcgccaaaagccccagcccgggattcagtacctcccctgccccccgaattcttgcagcacta

SEQ ID NO: 462345 - DNA, 120 bp, Artificial Sequence
  ENSG00000157657_76 (sequence is synthesized)
tttcccagttggttgatgccaaggcaaaaagataacttttaacagttagagaggatcagttgcttaaatgatttcatgtcagtgttgtatttatggttttacaataaaacaacctttagg

SEQ ID NO: 462346 - DNA, 120 bp, Artificial Sequence
  ENSG00000157657_77 (sequence is synthesized)
tgatctctgagtctcattcatgagaatgaggccaggttgaagtgtggaagtgtggccaggttcaggggctggccaccactgctaagggttcaggggagggtgaaggaggccaactgatgc

SEQ ID NO: 462347 - DNA, 120 bp, Artificial Sequence
  ENSG00000157657_78 (sequence is synthesized)
tctcccaagaccaccagaggtggaaactgctggagagccagcccccggttctcagtgactccagcttctacggacttttcaggtgagggaggcagggggcctgggtaatggtgatgcagg

SEQ ID NO: 462348 - DNA, 120 bp, Artificial Sequence
  ENSG00000157657_79 (sequence is synthesized)
gttccccagacagcatccaggaactgctacacttatttcaattaaagcgtcaggtgtcccatgagagcaacagttcccagtcagtgcccacaaggcaccacagagccccttgccctaaaa

SEQ ID NO: 462349 - DNA, 120 bp, Artificial Sequence
  ENSG00000157657_80 (sequence is synthesized)
ccttggagggactatcaggcccctctgcctcacccccagccccggcatgtccctgcctgtctacttcctattgtaacttccaagccagccttcctttaaaggaaaaggagcttagaaacc

SEQ ID NO: 462350 - DNA, 120 bp, Artificial Sequence
  ENSG00000157657_81 (sequence is synthesized)
aacattctagaagatgcacttgggcctgggttaaccaattcagatgccctaagagccagtcagtccagagactgggctggtcaagggttatgggtgacctacacagtgggctggttggtg

SEQ ID NO: 462351 - DNA, 120 bp, Artificial Sequence
  ENSG00000157657_82 (sequence is synthesized)
gcctccagataactaagcgtgagctgacagaaggttccagactcctggactttctctggctctgagttaagtgagaatccttgttctctgtggcacaagaagaggttggacagagacagt

SEQ ID NO: 462352 - DNA, 80 bp, Artificial Sequence
  ENSG00000157680_0 (sequence is synthesized)
gatggatgctgcgggaaggggctgccatttgctgcccctgccagcggcgcgcggacctgcccgcgctcctgcagccgccg

SEQ ID NO: 462353 - DNA, 120 bp, Artificial Sequence
  ENSG00000157680_1 (sequence is synthesized)
cgcctgcgctccctccgcggccgccggagcgggcgccatgaaccccagctcctcggcgggagaggagaaaggggcgacgggcggcagcagcagcagcggaagcggcgccgggagctgctg

SEQ ID NO: 462354 - DNA, 120 bp, Artificial Sequence
  ENSG00000157680_2 (sequence is synthesized)
ggcgcggacccgcggggcgcagggtcagccgcggcggcgggggccgctgccctggacgagcccgcggccgccggccagaaggagaaggacgaagcgctggaggagaagctgaggaactta

SEQ ID NO: 462355 - DNA, 120 bp, Artificial Sequence
  ENSG00000157680_3 (sequence is synthesized)
gaagctgaggaacttaactttccggaagcaggtctcgtacaggaaagcaatctcccgggcaggcctccagcatctggctcctgcacatcccctcagccttcctgtggcaaatggtccagc

SEQ ID NO: 462356 - DNA, 120 bp, Artificial Sequence
  ENSG00000157680_4 (sequence is synthesized)
caaggagcccagagcgactttggactggagtgagaatgccgtgaatggagaacacctgtggctggagaccaacgtctcgggagacctctgctaccttggagaggagaactgccaagtcag

SEQ ID NO: 462357 - DNA, 120 bp, Artificial Sequence
  ENSG00000157680_5 (sequence is synthesized)
atttgcaaaatcagctctcaggaggaagtgtgcagtctgtaaaatcgtcgtccacaccgcctgcattgagcagctagaaaagattaatttcagatgtaaaccaacatttcgagaaggagg

SEQ ID NO: 462358 - DNA, 120 bp, Artificial Sequence
  ENSG00000157680_6 (sequence is synthesized)
ctcaaggtcaccaagagaaaattttgtacgtcatcactgggtgcacaggcgtcggcaggaggggaaatgtaagcagtgtggtaagggcttccagcaaaagttctccttccacagtaaaga

SEQ ID NO: 462359 - DNA, 120 bp, Artificial Sequence
  ENSG00000157680_7 (sequence is synthesized)
gattgtggctatcagctgttcctggtgcaagcaggcgtttcacaataaggtgacctgcttcatgctgcatcacattgaagaaccctgctccctgggggctcatgctgctgttattgtccc

SEQ ID NO: 462360 - DNA, 120 bp, Artificial Sequence
  ENSG00000157680_8 (sequence is synthesized)
gcccacttggatcattaaggtgaagaaacctcagaactccctgaaggcttcaaatcggaagaagaagagaacaagctttaaaagaaaagccagtaaaagagggatggaacaggaaaacaa

SEQ ID NO: 462361 - DNA, 120 bp, Artificial Sequence
  ENSG00000157680_9 (sequence is synthesized)
aggtcgtccttttgtgataaaacccatctcttctcctctcatgaaacccttgcttgtatttgtgaatcccaagagtggaggcaaccagggaaccaaagtcctgcagatgttcatgtggta

SEQ ID NO: 462362 - DNA, 120 bp, Artificial Sequence
  ENSG00000157680_10 (sequence is synthesized)
cctgaatccacggcaagtctttgatctttctcaggaagggccaaaagatgcgcttgaattgtataggaaagtaccaaatctgcgaattctggcctgtggtggggatggaacggtgggctg

SEQ ID NO: 462363 - DNA, 120 bp, Artificial Sequence
  ENSG00000157680_11 (sequence is synthesized)
gatcctttccatcctggatgaactgcagctgagccctcagcctcctgtgggggtccttcctctggggactgggaatgacctggctcgaactctcaactggggagggggctacactgatga

SEQ ID NO: 462364 - DNA, 120 bp, Artificial Sequence
  ENSG00000157680_12 (sequence is synthesized)
acctgtttctaagatcctgtgtcaagtggaagatgggacagttgtacagctagatcgctggaacctccatgtggaaagaaaccccgacttgcctccagaagaacttgaagatggcgtatg

SEQ ID NO: 462365 - DNA, 120 bp, Artificial Sequence
  ENSG00000157680_13 (sequence is synthesized)
taagctccctctgaatgttttcaataactacttcagccttggatttgatgcccatgtcacactggagttccatgaatccagagaagcaaatccagagaaattcaacagtcgttttcgaaa

SEQ ID NO: 462366 - DNA, 120 bp, Artificial Sequence
  ENSG00000157680_14 (sequence is synthesized)
taaaatgttctatgcaggggcagctttttctgacttcctacagagaagttctagagatctatccaaacatgttaaagttgtttgtgatggaacagatctcaccccaaagattcaggaact

SEQ ID NO: 462367 - DNA, 120 bp, Artificial Sequence
  ENSG00000157680_15 (sequence is synthesized)
gaagttccagtgtatagtatttttaaatatacccagatattgtgctggcacaatgccctggggaaacccaggtgatcaccatgatttcgaacctcagcgtcatgatgatggttatattga

SEQ ID NO: 462368 - DNA, 120 bp, Artificial Sequence
  ENSG00000157680_16 (sequence is synthesized)
gagaggctacaccagtgtcgagaagtcatgcttctaacttacaaatccatccccatgcaagtggatggggagccctgtaggttggccccagctatgattcggatctccctgaggaatcag

SEQ ID NO: 462369 - DNA, 120 bp, Artificial Sequence
  ENSG00000157680_17 (sequence is synthesized)
gccaacatggtacagaagagcaagaggagaacatccatgcctttactcaatgatccccagtctgtcccagatcgtctgaggatccgggtgaacaaaatcagtttacaagactatgaagga

SEQ ID NO: 462370 - DNA, 120 bp, Artificial Sequence
  ENSG00000157680_18 (sequence is synthesized)
ttccactatgacaaggagaaactccgagaagcttctatttcagactggttaagaaccattgctggggaactagtgcagtcatttggagcgatacctctgggtattctagttgtgcgtgga

SEQ ID NO: 462371 - DNA, 120 bp, Artificial Sequence
  ENSG00000157680_19 (sequence is synthesized)
gactgtgatttggagacttgccgtatgtacatagaccgcctacaggaggacctacagtcagtttcttctggctcccagagagttcattaccaggaccatgaaacctccttccccagggct

SEQ ID NO: 462372 - DNA, 120 bp, Artificial Sequence
  ENSG00000157680_20 (sequence is synthesized)
ctctcagcacagaggctctctcctcggtggtgcttcctagatgacagatctcaggaacatttgcactttgtgatggagatttcccaagatgagatttttattctggacccagatatggtg

SEQ ID NO: 462373 - DNA, 120 bp, Artificial Sequence
  ENSG00000157680_21 (sequence is synthesized)
gtgtcacagccggcggggacacctccgggcatgcctgacctggtggtggaacaagcctcggggatctcagactggtggaatcctgccctgcggaaacgcatgctgagtgacagtgggctg

SEQ ID NO: 462374 - DNA, 120 bp, Artificial Sequence
  ENSG00000157680_22 (sequence is synthesized)
gggatgatagctccctattatgaggactcagatctgaaagatctcagccactcccgcgtgctacagtcaccagtctcttcagaagatcatgcaattttgcaggcagtaatagctggtgat

SEQ ID NO: 462375 - DNA, 120 bp, Artificial Sequence
  ENSG00000157680_23 (sequence is synthesized)
cttatgaagctaatagaaagctataaaaatggaggcagtctgctaattcagggaccagaccactgttcactccttcactacgcagctaaaaccggcaacggggagattgtgaaatatatc

SEQ ID NO: 462376 - DNA, 120 bp, Artificial Sequence
  ENSG00000157680_24 (sequence is synthesized)
cttgaccacggaccttccgagttattggatatggcagacagtgaaacgggtgagactgcactgcacaaggctgcctgccagcggaaccgggctgtgtgccagcttctggtggatgcagga

SEQ ID NO: 462377 - DNA, 120 bp, Artificial Sequence
  ENSG00000157680_25 (sequence is synthesized)
gcatctctgagaaagacggactccaagggtaagacacctcaagaaagagcacagcaggctggggacccagacttggctgcttacctagaaagccgtcagaactataaggtcattggccat

SEQ ID NO: 462378 - DNA, 120 bp, Artificial Sequence
  ENSG00000157680_26 (sequence is synthesized)
gaggacctggaaactgctgtttgaccctggtattcgggcaaagaggacatgagcaagcgtatcacatctgccctccctgcaattgggcagctcccctggaagaagctgatggaattcata

SEQ ID NO: 462379 - DNA, 120 bp, Artificial Sequence
  ENSG00000157680_27 (sequence is synthesized)
tatctgtctctctcctgcaagaatctacctgagaccatgccactagcttttaagggctaccaagatgtacaacagaacatgatagcccattgagaaggaggcaggatacctggagatttg

SEQ ID NO: 462380 - DNA, 120 bp, Artificial Sequence
  ENSG00000157680_28 (sequence is synthesized)
tggaatacagtacgagttccacaaaatttgatccttattgcttccagcaagtagcatgaacttctgtgttcacctgtataatttattttaaagattcaaaggatgttcgtataaatggca

SEQ ID NO: 462381 - DNA, 120 bp, Artificial Sequence
  ENSG00000157680_29 (sequence is synthesized)
ctgctccatcctccccctatgcattggtttttttccctgtaccatacaattctactgtaactacccatcaacttaaagaaaaatattatctcttctctttacattcagtcttggaagacc

SEQ ID NO: 462382 - DNA, 120 bp, Artificial Sequence
  ENSG00000157680_30 (sequence is synthesized)
acaagattgtctgaaggccttctaaaaccttctgaatgtcctgcagaaatataactgtaaaaccacttccatttctaagactaaatatatcaagactatttagtgactctctctgcatgt

SEQ ID NO: 462383 - DNA, 120 bp, Artificial Sequence
  ENSG00000157680_31 (sequence is synthesized)
ccccctcacccgccaaccctccgtttcattatataggagctgggaagtgccacatggataatgtcaacttgtgtgctatatctctgaggaatggtgaggtggcatgggagatgtctgtgc

SEQ ID NO: 462384 - DNA, 120 bp, Artificial Sequence
  ENSG00000157680_32 (sequence is synthesized)
gggtcgcagcctgtcctcctctctctccccctccgccgcagcccgtcgcctccgggcagagttcatgttcagcttgggctttcgctcgggatttaggaagaggccggcggggctggaggg

SEQ ID NO: 462385 - DNA, 120 bp, Artificial Sequence
  ENSG00000157680_33 (sequence is synthesized)
cctttactcaatgatattcatcaggtgcaaactgcggacctgcggcgagtgtctgctccccccggctccttcaccattccccagtctgtcccagatcgtctgaggatccgggtgaacaaa

SEQ ID NO: 462386 - DNA, 120 bp, Artificial Sequence
  ENSG00000157680_34 (sequence is synthesized)
cggccagaaggagaaggacgaagcgctggaggagaagctgaggaacttaactttccggaagcaggtctcgtacagaatctgcacccctagagcaaatagtctctgtcgactgtaaagctg

SEQ ID NO: 462387 - DNA, 120 bp, Artificial Sequence
  ENSG00000157680_35 (sequence is synthesized)
ggctgctgggctgtagccaatagccatgcaggactggttcagcttgggctgtctgtacagctccgtactgcctatgtgtagccatctttgccttttgctgcaatagaagatgagcaaagg

SEQ ID NO: 462388 - DNA, 120 bp, Artificial Sequence
  ENSG00000157680_36 (sequence is synthesized)
attaaacagaggcccacagctagtttgcagaaccactcaattttaagtgctgtttaaattgcagagcaaataatcctgtgtgggaactgtggttacaggaaatggagcactctaacaatg

SEQ ID NO: 462389 - DNA, 120 bp, Artificial Sequence
  ENSG00000157680_37 (sequence is synthesized)
tttacttctaaactttgttgaatgataatagaaagcaccctaattgacttggaaaaaaaaaacagcaaaagcaaaagtagcaacatatgtcaacatatgtcactgaaataggaaacagtc

SEQ ID NO: 462390 - DNA, 120 bp, Artificial Sequence
  ENSG00000157680_38 (sequence is synthesized)
attggaatgttgcacagaggctaataactatagactgttggatacagtggtgagaggagccccattttaggtctttcttttaggtttttggttttcattactccaagtaatccttgaccc

SEQ ID NO: 462391 - DNA, 120 bp, Artificial Sequence
  ENSG00000157680_39 (sequence is synthesized)
aagaacaaaggcttgttgtatgagttccactgccagatttatgggatgcctggatcattcagaaggatgcttcaactattatttgtcaggtccaaaggtcgtacttaataaccccatttt

SEQ ID NO: 462392 - DNA, 120 bp, Artificial Sequence
  ENSG00000157680_40 (sequence is synthesized)
ctatgtatggggtagtctaatatattattttatctactttatttttcccttttcagaaagtccttagtgcaaaccaccattggaatctagccagaaatgtctgtcagatagttagaattg

SEQ ID NO: 462393 - DNA, 120 bp, Artificial Sequence
  ENSG00000157680_41 (sequence is synthesized)
taacatctaaacctgccacggatcgaatggtacttacaggtacctctcttagggactctgtgatccctaaaatatcagaagaaaatgtctgtctttctgtccaaatatctacttgacttg

SEQ ID NO: 462394 - DNA, 120 bp, Artificial Sequence
  ENSG00000157680_42 (sequence is synthesized)
ggggtaagtcaaaaataaaagtaggtgtccaaggattttacttttggcgaaatctgacgtctcctgagcttattttcattttgtccttggacatagcatagtgcttccctaatgtttcta

SEQ ID NO: 462395 - DNA, 120 bp, Artificial Sequence
  ENSG00000157680_43 (sequence is synthesized)
catatgaccatgaatgatagtgtctctacatttaatttaaaagtctaatggtgacattttgcttatctgagtcacatttcggtaacatatcatcattttgaaagtgcggctatgacgtgc

SEQ ID NO: 462396 - DNA, 120 bp, Artificial Sequence
  ENSG00000157680_44 (sequence is synthesized)
tatattaaacaggaacagcctttcagtggatggggattttattaccacagtctttccatagtcatttcaaaatcaaattgttggtgggaggatggattgggttgtgagtaatctacttcc

SEQ ID NO: 462397 - DNA, 120 bp, Artificial Sequence
  ENSG00000157680_45 (sequence is synthesized)
atatatcagcctcagaaatggaactatcctttggatattacaggagacactgcagcagattgtttccagaagctggaaaaatatgctccaggagaatttaatcactgggcttttgctggg

SEQ ID NO: 462398 - DNA, 120 bp, Artificial Sequence
  ENSG00000157680_46 (sequence is synthesized)
ggatttttagttggcgggactgtcaaggaaatgtgatgacagaaatataatccttaacacaaactggaatctggctttgaatggcatcttccattccctggattgagtcaaatgtttggc

SEQ ID NO: 462399 - DNA, 120 bp, Artificial Sequence
  ENSG00000157680_47 (sequence is synthesized)
caagcagtcagttatctagctgttactgttgggatgaagaactctgttttcatcaactaccatctcacatttctctaaatacttccaagtagcccagagaaaatttagggtacaggtggc

SEQ ID NO: 462400 - DNA, 120 bp, Artificial Sequence
  ENSG00000157680_48 (sequence is synthesized)
tatgggccaatttctaaatagctccaattgaagacataaatctgtgttatgaaaaatgatgagttggtactgtaagattcctgatgcatttggaaattttttcaaaccaaaaaaaaaaaa

SEQ ID NO: 462401 - DNA, 120 bp, Artificial Sequence
  ENSG00000157680_49 (sequence is synthesized)
ggcattagagtcctgtgttattcatggagaccaatatttgatatatcgctttgaaaaaagcaagtaccactaggacttgggatttccaaaataaagtgagcagaataaccacatgtttaa

SEQ ID NO: 462402 - DNA, 120 bp, Artificial Sequence
  ENSG00000157680_50 (sequence is synthesized)
tggcttcaacattaaaccacctcctgtagcatgttttaaaaattggtcctgggctttggaaagagctaaggccttatggtctaggagtttccatctcagcttaagtatattgtatcccta

SEQ ID NO: 462403 - DNA, 120 bp, Artificial Sequence
  ENSG00000157680_51 (sequence is synthesized)
ctattaggacatcaggaaagcaagtgatctagtcctggtctgaagtgccatgtaactttaacagacataaaaatatgtacctatagaaatatcatttctacaaagcctactgagacagca

SEQ ID NO: 462404 - DNA, 120 bp, Artificial Sequence
  ENSG00000157680_52 (sequence is synthesized)
ctgaagaggcagctagcttggctgactcctctgtgtttgtttctttgtgtcatggcactgactgctttgagattccatttttagatgtggttgatagaggaatggaaaatgaagagttat

SEQ ID NO: 462405 - DNA, 120 bp, Artificial Sequence
  ENSG00000157680_53 (sequence is synthesized)
taaaagacaacattctgtaacctgaaaggtagtcatttttgcaagcttatattttaatattgtgcatttaacaaaatagaacacagttaaactgtgctttatcgtattcaaggacttcat

SEQ ID NO: 462406 - DNA, 120 bp, Artificial Sequence
  ENSG00000157680_54 (sequence is synthesized)
aaagaataagagagaagattagtaagccaagaatggaataaataccatgactaggaattttgctttcagagcttatgtttcctctgtagatgtgataaccaaaaaccagtgcaagttttg

SEQ ID NO: 462407 - DNA, 120 bp, Artificial Sequence
  ENSG00000157680_55 (sequence is synthesized)
aaacataatttagctggcaaatgcacagtgatggaaattagtaatgactgatggagagccgtacatacctgttgctccttatcctttcagaatggctgctttggcagatctgcctgtgct

SEQ ID NO: 462408 - DNA, 120 bp, Artificial Sequence
  ENSG00000157680_56 (sequence is synthesized)
gggagctactcaacatcacttcattttcatctggacctagtgagagtccctttgcctaacgaatttctgaaatttatttatttactagaccccttataatattcatggctttaaaaaatg

SEQ ID NO: 462409 - DNA, 120 bp, Artificial Sequence
  ENSG00000157680_57 (sequence is synthesized)
acacagcatctttattttattacatgtcaattttattaataatatttaggggtttttttaaattataaaaatggcacatgctttttataaaatgttttaataccacagatgagtatcaca

SEQ ID NO: 462410 - DNA, 120 bp, Artificial Sequence
  ENSG00000157680_58 (sequence is synthesized)
tccacagtcaaggcatccctttgttctggtgttgtgtcccacttcccaaaaataaatacggttaacactgatgaacactgttgcttgtatgtgatgtcagaaataccccatccgttcatg

SEQ ID NO: 462411 - DNA, 120 bp, Artificial Sequence
  ENSG00000157680_59 (sequence is synthesized)
atgtatattgcataggtttagaaaagagcaaacattttaaaagcatgctgatcatttgtatatgtctagtgaacaccagtaggcaaagacaggttaaacagagaagttccatttattttt

SEQ ID NO: 462412 - DNA, 120 bp, Artificial Sequence
  ENSG00000157680_60 (sequence is synthesized)
ttgtttccaccattgctaggcttagatctgttatggcattactacaattgcacttagcattttctattacctgtgtcataaaattcatgaccaagagttcctgtaattgtttatgttgcc

SEQ ID NO: 462413 - DNA, 120 bp, Artificial Sequence
  ENSG00000157680_61 (sequence is synthesized)
ttccatgaagcatgaaacctaccatagccccaagacttatctatgctatgtttgtatttcaagtaaaggagagttctttcctctgtgatgcttacaccactttacaaggctgtttgtaac

SEQ ID NO: 462414 - DNA, 120 bp, Artificial Sequence
  ENSG00000157680_62 (sequence is synthesized)
actaacactcagtaggttgcctagtgatatttaattagggcaggctacttccgggaaggtgtaacttcagtgtagtatgggggtctgagcagcttgtcttccttccagaaggagtagcta

SEQ ID NO: 462415 - DNA, 120 bp, Artificial Sequence
  ENSG00000157680_63 (sequence is synthesized)
atgaaatcactgagaacagcatattttattcaattatgctatttaaaaatgggactttgttaaaatggctcatcataaccatcaaataaaactactaattgttctatttaaatgaattat

SEQ ID NO: 462416 - DNA, 120 bp, Artificial Sequence
  ENSG00000157680_64 (sequence is synthesized)
attcattttaggaaaagaagtagaaaaacatctaataaattagctttctgattaatctttaacacttatttaatataaaatggcttctgcctgcatcttaattgaaccacctttgaatct

SEQ ID NO: 462417 - DNA, 120 bp, Artificial Sequence
  ENSG00000157680_65 (sequence is synthesized)
ctcaactcctttcactctgaatctcatactcagctgattagaagtcctacaggtccttctctgccaggtctgtcagatcgacttggaccctacccttttctgtgtccccagtcatccatt

SEQ ID NO: 462418 - DNA, 120 bp, Artificial Sequence
  ENSG00000157680_66 (sequence is synthesized)
atctcttgtctctctaagttttgggccatagcggcagtcctgtccctgaactttctgcctactactgtcaataattttgtcacgcagttgcaaaaatcttccccagatattatgctcaaa

SEQ ID NO: 462419 - DNA, 120 bp, Artificial Sequence
  ENSG00000157680_67 (sequence is synthesized)
atacatcaaaatgaaattaccctctgggacaagtataccttttactcaaaggacacatggatgtccactgaccttgatcatcttatagaattatggcaagcatgattctgaaaatctatc

SEQ ID NO: 462420 - DNA, 120 bp, Artificial Sequence
  ENSG00000157680_68 (sequence is synthesized)
aggtttagcaaatatctgtcttagtcccatgagggtacacaatcacggctgctgcttcctcattcaacaatgtaagccacatgcctctttgacggcacctggaggactaggttatagatt

SEQ ID NO: 462421 - DNA, 120 bp, Artificial Sequence
  ENSG00000157680_69 (sequence is synthesized)
ttacactgctgagggccatctttggttttacactgtctcctcacagcttaatgagaaacctgaaaataagaaccaagaaaagagtcatgcccttggacaacctcctctcccaggacactg

SEQ ID NO: 462422 - DNA, 120 bp, Artificial Sequence
  ENSG00000157680_70 (sequence is synthesized)
agatttactgaccaggtcccagaaagaaagcagaaaaataattcttaggctcttgtagcatggattttaaaatagaaacgtgaaaattgaatggtatcttcataatgcatagactccaga

SEQ ID NO: 462423 - DNA, 120 bp, Artificial Sequence
  ENSG00000157680_71 (sequence is synthesized)
gtctatttacatatgtattcagttatgcatgtaatcatatgtccatgaatcaatcataagtgcatgtatttaatcattatttgaaaaatatttgtcactctgaggcaggcatcatactaa

SEQ ID NO: 462424 - DNA, 120 bp, Artificial Sequence
  ENSG00000157680_72 (sequence is synthesized)
ggatataacaatgaatgtaatagacaaaactcttgatttcatgaagctggcatctagaagaaaagacaaattccaatgtgataagtgcagtgcaggagaaccccagggtgtccagcatgg

SEQ ID NO: 462425 - DNA, 120 bp, Artificial Sequence
  ENSG00000157680_73 (sequence is synthesized)
gctggaaattcaaccaaggctttattgtaccagccactcattagccagcaatgttttggttcaatgaaaacataagtaggaagagaataatattttgcatttccattttactggagtcat

SEQ ID NO: 462426 - DNA, 120 bp, Artificial Sequence
  ENSG00000157680_74 (sequence is synthesized)
agtagatttctaaaaatgtatctgaaactaagattttaaaacaagacttagaaacactattaaaatgaaagctaagactgatttattctagctctcaggatagaactaggaaaaataagc

SEQ ID NO: 462427 - DNA, 120 bp, Artificial Sequence
  ENSG00000157680_75 (sequence is synthesized)
agagttttcagtgggttttgactaaatataaagaagatgaagtacaaataatatgtaatagtggagtggatatcacagttataaactttcagcctctgttagcatttaaacagaggatac

SEQ ID NO: 462428 - DNA, 120 bp, Artificial Sequence
  ENSG00000157680_76 (sequence is synthesized)
ctgaccactctgaggggtgttgtgattaggaatatgtgatttgagggggctaaaattagatgctgtgatttttcaaaagatattttttaatggctttgttgaatggcaggattttatttt

SEQ ID NO: 462429 - DNA, 120 bp, Artificial Sequence
  ENSG00000157680_77 (sequence is synthesized)
aaaaactcatgaaaatcttgatttttgatttgttaaactttgctttataactgagaattttaaaaatatctaggggaatggccgttagttatcatttaaaaaattttaaactaagcatga

SEQ ID NO: 462430 - DNA, 120 bp, Artificial Sequence
  ENSG00000157680_78 (sequence is synthesized)
atttaagagctagtcaaaagaaaacatactaaaaggtgtaatttaattaaaaatacttctggaagcttataaattttgatcagtattcttagtcattgtcaagtaaaattctattagaaa

SEQ ID NO: 462431 - DNA, 120 bp, Artificial Sequence
  ENSG00000157680_79 (sequence is synthesized)
tctgtcttactgtccatccaatataaaaaagtgctgtggtttgatattctaagagttaagtgtaatctagtataaccacagaagaaaattctgcctgtaaggtatttgggagccaagtaa

SEQ ID NO: 462432 - DNA, 120 bp, Artificial Sequence
  ENSG00000157680_80 (sequence is synthesized)
atgtacatgaaaggcaatcatggaaaactctttggcttctgccaccagcgtggcaaccacaagggaggtcctacccatggaaataagaaaatagtgatccaagttttcacccaacttttg

SEQ ID NO: 462433 - DNA, 120 bp, Artificial Sequence
  ENSG00000157680_81 (sequence is synthesized)
aaatttcaatattttgagccaaatgccttctgaaatgggaggctttgatagtgggaaatactgaaattatcttttccctcagacctttagtgaaacacacatatagttttcactctatga

SEQ ID NO: 462434 - DNA, 120 bp, Artificial Sequence
  ENSG00000157680_82 (sequence is synthesized)
cagtataaacaactcaaatctatactgtttgttaagaacagtttcaagaattaaaaagtgctttagcgttatgatgtattgacatgtttgagcttcagttggggttcaaaacaaccccaa

SEQ ID NO: 462435 - DNA, 120 bp, Artificial Sequence
  ENSG00000157680_83 (sequence is synthesized)
cgaggtgaataatgcatataatacattttagatgaatgcactgaatctcagagcagtgaattcagcctgtgcagattcatatagcaaatgatagtgctgcagccagaactgggtctttag

SEQ ID NO: 462436 - DNA, 120 bp, Artificial Sequence
  ENSG00000157680_84 (sequence is synthesized)
aaattacatattaacatgttttctaagtaagtcattttccatcattgccttcaaggatgttttatatcaattgttcagatttccataatatagaagttgcctccatgaaaaaaaaatgtt

SEQ ID NO: 462437 - DNA, 120 bp, Artificial Sequence
  ENSG00000157680_85 (sequence is synthesized)
tacctaagtttccacggaaagaatgagttagaaataagggagaatgtgaaatcaaaaagtcagagtttttgctgtcggagagaggcttgtcagcttgtacatagttcaagcaaagaaaag

SEQ ID NO: 462438 - DNA, 120 bp, Artificial Sequence
  ENSG00000157680_86 (sequence is synthesized)
tctaatgtttgcataccagggtggatttcaagagaagaaattaacagtgagcgttaatggcttctttaacttatttgtgattctcagcatttaaaaaatgttagtcctatttttcttcct

SEQ ID NO: 462439 - DNA, 120 bp, Artificial Sequence
  ENSG00000157680_87 (sequence is synthesized)
ttgaagtcactattaggatgatataatttctgaatgctgcaacaaaaaatgttaaaaatggccctgacatccaagactctattgctctaagtttatgggtgggtatgcaagctaagtgtt

SEQ ID NO: 462440 - DNA, 120 bp, Artificial Sequence
  ENSG00000157680_88 (sequence is synthesized)
atgataatacatagtcatatacatagaggtttaatacacctatgggaaattccggcatatttgaagtagagaaaaacaaacaggcttgaaatgtccttcagttcagaatctcatacttta

SEQ ID NO: 462441 - DNA, 120 bp, Artificial Sequence
  ENSG00000157680_89 (sequence is synthesized)
caagggacatttatgggcagattggtgaatatgtagaaggaggatgtttgatctggaaagaagacaaaattggattaggaataagaatatgtagaggagttaggttaagtaggactgtta

SEQ ID NO: 462442 - DNA, 120 bp, Artificial Sequence
  ENSG00000157680_90 (sequence is synthesized)
gtttcaaattctgcagggaagatgatttgtagaataaaataaggaaagaaaagagcagtaacacatgaaaaggagttagctttattacttataaggatttatttttcctaaacattgcat

SEQ ID NO: 462443 - DNA, 120 bp, Artificial Sequence
  ENSG00000157680_91 (sequence is synthesized)
ccagaaaaacagtttgggctttctgaaaaacagtgaagttgttatcactgtttcttctagtagttaagtgaagattgaacaactaactcagagatcaaaggcatatctttaattgtgaga

SEQ ID NO: 462444 - DNA, 120 bp, Artificial Sequence
  ENSG00000157680_92 (sequence is synthesized)
gatcttggactagaaaaactctgtgagattttcttggtttaaatgtctataattttagactggaacagaactcaatttgagcctatttttttcccccaggttcctgccaactagatagca

SEQ ID NO: 462445 - DNA, 120 bp, Artificial Sequence
  ENSG00000157680_93 (sequence is synthesized)
atgaaggcattttttaaaaaagcttccatcattgcaaatatatcccaaatcacttagcagcggggatttcatgaccctaaaaagttgccttgcttacacaaacacacctatgctttagta

SEQ ID NO: 462446 - DNA, 120 bp, Artificial Sequence
  ENSG00000157680_94 (sequence is synthesized)
gaaacatatcttttttaggagatttgggaattggctagcatttttgccaattgttagccaatttaggagatttggaaattggctagcaattttgccaattgttagccaattcccaaatct

SEQ ID NO: 462447 - DNA, 120 bp, Artificial Sequence
  ENSG00000157680_95 (sequence is synthesized)
cctaaaaaagatatgtttctactaaagcaaaaaggtcacagattcaggagtcaaagtgaaaacaaaggatttagtgttctttcccctacttactacccatttgttgtttgggatgtagag

SEQ ID NO: 462448 - DNA, 120 bp, Artificial Sequence
  ENSG00000157680_96 (sequence is synthesized)
tcaggactggagaagagggtgggaaattctatatcctctgccaatacagaggcatggaggcactttctataactttgtgtcatgaaacaagacttaaccccatatcagtagactaatgtt

SEQ ID NO: 462449 - DNA, 120 bp, Artificial Sequence
  ENSG00000157680_97 (sequence is synthesized)
tctgtcatatttctgtctaggtggattacagttttaattgcccatcatcccttaattctgtaatacagcttgagttcctagatttcaggttgactgggtgagggaggaagtcacttgagg

SEQ ID NO: 462450 - DNA, 120 bp, Artificial Sequence
  ENSG00000157680_98 (sequence is synthesized)
taattttaagaaatgaatccatatccagagtcttgcagaaaagacctgcttctactccaccttctttcttgttctacttcttgcctctggtttgggggcataaaagaggggcagagttgt

SEQ ID NO: 462451 - DNA, 120 bp, Artificial Sequence
  ENSG00000157680_99 (sequence is synthesized)
gaggaaaggaaaaaagattctcaaaagtagtacaataagaagaccctagtagtaacacaaattctcatggtaatctcaaacaactgatagtgttagcagatattgaaaatcaaactcagg

SEQ ID NO: 462452 - DNA, 120 bp, Artificial Sequence
  ENSG00000157680_100 (sequence is synthesized)
aaacatacagaaagattaaatttgttcaaagtggcttcaaggggtattagttgtgaaaatttcagtttatgcagcatagaagaattagattgtgtgtggaacttgggggaagtagggtca

SEQ ID NO: 462453 - DNA, 120 bp, Artificial Sequence
  ENSG00000157680_101 (sequence is synthesized)
gctaatagaagaactttttaatggagctttccaaaggacgaggtggtttttggaaggagtttgtccaacctcttataatacattatgcctgtccacaaacttgttctggtccctgataaa

SEQ ID NO: 462454 - DNA, 120 bp, Artificial Sequence
  ENSG00000157680_102 (sequence is synthesized)
gtttgaaaaaaataaggaatatttagggttttttcccacaaatctcaatatattcacttaaaaattcagagactgtgaccttgttattttgggtttaaatatacattttcctcttaaaaa

SEQ ID NO: 462455 - DNA, 120 bp, Artificial Sequence
  ENSG00000157680_103 (sequence is synthesized)
tgatagatatatgtttacaaattgtctttactcttcacttataaaacacacacatacagataggatagtcctgtcagtttaccctattttttgtttcaaatttataggtaatttcaaatt

SEQ ID NO: 462456 - DNA, 120 bp, Artificial Sequence
  ENSG00000157680_104 (sequence is synthesized)
tataggtgttggtgagatttatcacttttaagataccatctagccttgatatttgttgtaccttctatatgcaaccaaatggctcctgatctcctgatcttctggagatcaaagaatttt

SEQ ID NO: 462457 - DNA, 120 bp, Artificial Sequence
  ENSG00000157680_105 (sequence is synthesized)
tattcgccactctccccacccatcattggttggattgagactctaattacatacaagcataatttccaatgcaagtagaactttgatgctctccctgacttaccgattataagttgggaa

SEQ ID NO: 462458 - DNA, 120 bp, Artificial Sequence
  ENSG00000157680_106 (sequence is synthesized)
agtttggattcttgccatcctggggaaggagatttagaactctcatagacaaaatattctaacacaacagaatattttgcaaaacacatctttgaaaagtcaggggccaaaatagtctca

SEQ ID NO: 462459 - DNA, 120 bp, Artificial Sequence
  ENSG00000157680_107 (sequence is synthesized)
gcaaaggttagcttggctgttttttaaaattaccaatagttaagtgggcaaccatgaatctgaatattatacagaccaccactgactgaaactgaggaaaaccattcttgtgaaaaacta

SEQ ID NO: 462460 - DNA, 120 bp, Artificial Sequence
  ENSG00000157680_108 (sequence is synthesized)
aggaatagaggacaatctcagttctaaaagaatgaatatatttgatttaatttgatttctgagtgggaaaacgttcccaggcatccagggtacccttggctgtgggtattccactcgcaa

SEQ ID NO: 462461 - DNA, 120 bp, Artificial Sequence
  ENSG00000157680_109 (sequence is synthesized)
aggctacatctgtatgaagagttgcagtcacattataaagggctttttcatgatttctgattctgccctatcacatcccagagccatgcttttgcaaagctgccagctggcaggtggaat

SEQ ID NO: 462462 - DNA, 120 bp, Artificial Sequence
  ENSG00000157680_110 (sequence is synthesized)
agctggcaggtggaatccataaacaagtagcagctgtggcagtagaaagattaaagttttatttccaggtaaaggaggattcagataatacgaagtggagggagggtgggtggggggggg

SEQ ID NO: 462463 - DNA, 120 bp, Artificial Sequence
  ENSG00000157680_111 (sequence is synthesized)
gggaagaatgaagttttttgtaacaaagtcataaagtatttttccctaattttcttgcatttcctatttatataaagtatcttgatcactgtgttgcactacagagattttcaatggagt

SEQ ID NO: 462464 - DNA, 120 bp, Artificial Sequence
  ENSG00000157680_112 (sequence is synthesized)
taatttgggagactgaactaatctctgaaaaagaaattgactagttacagttactttttggacactttttctgtattgtgaattgtgtggaaatgtacagaataaaaatgaagaaatgta

SEQ ID NO: 462465 - DNA, 120 bp, Artificial Sequence
  ENSG00000157680_113 (sequence is synthesized)
cctaaatcaaatagtagtagcttttaaaaaaattactaaacttaatcaacactatttggaaagggggctagagtcagatattatgatcagttgatggctagctcaaggaatttttagaaa

SEQ ID NO: 462466 - DNA, 120 bp, Artificial Sequence
  ENSG00000157680_114 (sequence is synthesized)
tccccttccctacctccccagaatgtaccctacagccaaagtctcagcagcctacagggaaggaggctgaggagcaccctacatcagctcccctcacccattccctgctgcctccaaccc

SEQ ID NO: 462467 - DNA, 120 bp, Artificial Sequence
  ENSG00000157680_115 (sequence is synthesized)
agcaactcagaatgtgggaccgctggaaggaaaaacacccctggatggggcgaagagttctgtgtcatgattttggatttagtggaaaaagaacagaggagattttcttgttaccttaat

SEQ ID NO: 462468 - DNA, 120 bp, Artificial Sequence
  ENSG00000157680_116 (sequence is synthesized)
tttcccaacatggaagatttgggaatgaagaaggacactgcaaagagtgaggcctaaaatggaaaccagtcatgatttttattttgctactttctttacggacacgaatgcacacagtgt

SEQ ID NO: 462469 - DNA, 120 bp, Artificial Sequence
  ENSG00000157680_117 (sequence is synthesized)
ttatttccagaagcccacagctgctgattcctacacccagtgatttccactgccttttcatgattctggaattcccaagaacagtgtcatcttattagaaggtatttcccagttcgagtt

SEQ ID NO: 462470 - DNA, 120 bp, Artificial Sequence
  ENSG00000157680_118 (sequence is synthesized)
ggagacaaaccaaccttccctcacaggctgagtccttctggtttcactgccaaagcttccagactcacccagggtctgttagacatatttgaatgaatctgtcagattgttcagtcgtta

SEQ ID NO: 462471 - DNA, 120 bp, Artificial Sequence
  ENSG00000157680_119 (sequence is synthesized)
atgaggtcacactttccatgaagaccatagtggcgtcattttgtgtaccaacaattgtatcaagtcatgatgattttttaaatatcattgaaataatcattaaaatattattgagataaa

SEQ ID NO: 462472 - DNA, 120 bp, Artificial Sequence
  ENSG00000157680_120 (sequence is synthesized)
agtaaatcatacctttgctcacttgatttgaatgaagattcttgtctaccaacagttttaggaaatagatggaatttgtgtagcatcaccacttcacggtaaaacagaagaaaaagatga

SEQ ID NO: 462473 - DNA, 120 bp, Artificial Sequence
  ENSG00000157680_121 (sequence is synthesized)
ggtttctgcagttgtgatgcagaccgttgaaatgtgcctggagagaatgcccaactgggaaatcggttttcattcgggactacgtaggagtgtaacagaggacaagcatcatggctcaag

SEQ ID NO: 462474 - DNA, 120 bp, Artificial Sequence
  ENSG00000157680_122 (sequence is synthesized)
aagcagggaggaaagtggaacctggggaatgctgaccaggcatgaacattcttacatgttcaccataggaaaaaggtgtgagcacatgatgggaggctgttctatccaggaaagactgga

SEQ ID NO: 462475 - DNA, 120 bp, Artificial Sequence
  ENSG00000157680_123 (sequence is synthesized)
atttacaaaatccagatggattatgtctcaacagaagctgttggccggggttcccagagtcactaggataaagctggcagcttggcttttcctaaagggtccttcctcctggctctccgg

SEQ ID NO: 462476 - DNA, 120 bp, Artificial Sequence
  ENSG00000157680_124 (sequence is synthesized)
aaagacttgagaacagcttatagatattgacggcagatgaagaattttcatgtcttttcagaaatggttagcagccactcataacagtcctgtgacgtcacagaaatcttgactcctgct

SEQ ID NO: 462477 - DNA, 120 bp, Artificial Sequence
  ENSG00000157680_125 (sequence is synthesized)
tgtctttctcgttctcctttaagcccttccctcctccttttcatataggaccttaacacaagagggtcaggaagagaagagaagggttgctcacaggaggaaagaaggcaaggggtagct

SEQ ID NO: 462478 - DNA, 120 bp, Artificial Sequence
  ENSG00000157680_126 (sequence is synthesized)
gggaggcttcctgagcactcgaatactactagcaactcagaatgtgggaccgctggaaggaaaaacacccctggatggggcgaaggaaagcaatctcccgggcaggcctccagcatctgg

SEQ ID NO: 462479 - DNA, 80 bp, Artificial Sequence
  ENSG00000157693_0 (sequence is synthesized)
gatgaaacgcggcctccagctccgctccgccgcgggcccgggaggcgcgttccctcttggccccaaagcgagtccggcgg

SEQ ID NO: 462480 - DNA, 80 bp, Artificial Sequence
  ENSG00000157693_1 (sequence is synthesized)
gaggcgtgctgggcgcggggctgcggtgcccagaggctgcggcattaggggctcggcgcccccgaccttccgcgtcccgg

SEQ ID NO: 462481 - DNA, 120 bp, Artificial Sequence
  ENSG00000157693_2 (sequence is synthesized)
ggtggcggcggcggcggcggcggcggcgcgggcggcatatgatgctgagctggctgctccagaatgaaccacagctctgagaaggggaagtagaaacagctggcgccctgccatggcctg

SEQ ID NO: 462482 - DNA, 120 bp, Artificial Sequence
  ENSG00000157693_3 (sequence is synthesized)
tgaaccacaggtggacccgggggccactggcccattgcccccctcctcccctggctggagtgccctgcctggagggagccctcctggctgggggcaagagctccacaatggccaggtcct

SEQ ID NO: 462483 - DNA, 120 bp, Artificial Sequence
  ENSG00000157693_4 (sequence is synthesized)
cactgttctccggattgacaatacctgtgcacccatctccttcgacctgggagccgcagaagagcaactgcaaacttggggcatccaggtcccggctgaccagtacaggagcttggctga

SEQ ID NO: 462484 - DNA, 120 bp, Artificial Sequence
  ENSG00000157693_5 (sequence is synthesized)
gagtgccctcttggagccccaagtgagaagatatatcatctacaactcgaggcctatgcggctggcctttgctgtggttttctatgtggtggtgtgggccaatatctactctaccagtca

SEQ ID NO: 462485 - DNA, 120 bp, Artificial Sequence
  ENSG00000157693_6 (sequence is synthesized)
gatgtttgccttggggaaccactgggctggcatgctgctcgtgaccctggccgcggtgagcctgaccttgactcttgtgctggtctttgaaagacaccagaagaaggccaacaccaacac

SEQ ID NO: 462486 - DNA, 120 bp, Artificial Sequence
  ENSG00000157693_7 (sequence is synthesized)
ggacctgaggctggcagctgccaatggagccctcctgagacaccgggtgctgctgggggtgacagacacagtggaaggatgccagagtgtgattcagctttggtttgtctacttcgacct

SEQ ID NO: 462487 - DNA, 120 bp, Artificial Sequence
  ENSG00000157693_8 (sequence is synthesized)
ggagaactgtgtgcagtttttgtctgatcatgttcaagaaatgaagactagccaagagtccttgctgagaagcagattgagccagttgtgtgttgtcatggagactggggtgagccctgc

SEQ ID NO: 462488 - DNA, 120 bp, Artificial Sequence
  ENSG00000157693_9 (sequence is synthesized)
aacagcggaggggcctgagaacttggaggatgctcctctcctgcccggcaattcttgtcctaacgagaggccactcatgcagactgagcttcatcagcttgttcctgaggctgagccgga

SEQ ID NO: 462489 - DNA, 120 bp, Artificial Sequence
  ENSG00000157693_10 (sequence is synthesized)
ggaaatggcccgccagctgctggcagtgtttggcggctactacatccggcttctagtgacctcccagctccctcaggcaatggggacacgacacacgaactctccgagaattccatgccc

SEQ ID NO: 462490 - DNA, 120 bp, Artificial Sequence
  ENSG00000157693_11 (sequence is synthesized)
ctgccagctcatagaagcctacatcctaggcacagggtgctgcccgttcctggcgaggtgacctagggatgaaggtactcatcttccttcaagactgagcagtcaggaaggcttcaggag

SEQ ID NO: 462491 - DNA, 120 bp, Artificial Sequence
  ENSG00000157693_12 (sequence is synthesized)
cccaagatggccaatggggagccccaggtgaggagagaagcatctgggggcactccaaaaggggcctgtgatgtcagccactggggtgttgtgctcacttcagggcccagcacaaaaatc

SEQ ID NO: 462492 - DNA, 120 bp, Artificial Sequence
  ENSG00000157693_13 (sequence is synthesized)
cttgtttgacatctcatgctgaccccctggcctttgcagaagctgatggttacagagctagtcccaccaaagctactctctctgctgcttagaactgtggacacgtatggaaagactgga

SEQ ID NO: 462493 - DNA, 120 bp, Artificial Sequence
  ENSG00000157693_14 (sequence is synthesized)
cccccattgctttcattgttcagagaacccaggagacatgaagatgaccagactgggcaaattatgtgtccaaaacttggcctcagatgatgtttccatctccaaccccttcatgccaga

SEQ ID NO: 462494 - DNA, 120 bp, Artificial Sequence
  ENSG00000157693_15 (sequence is synthesized)
tggggaaactgaggctcagagaggatactgctctatgtggcattgccttgaacccctaaaattatcagacttcctttttccaatataaagaaaaaaagtaagttttcagaattctctcaa

SEQ ID NO: 462495 - DNA, 120 bp, Artificial Sequence
  ENSG00000157693_16 (sequence is synthesized)
tttttaagtttttctcccccatattttgtgaaaagcagtggtatgtgtacgtgttgtctaccagtacacaggctgcagaagacagagacagaagaaagagatcaagggcagataactgtt

SEQ ID NO: 462496 - DNA, 120 bp, Artificial Sequence
  ENSG00000157693_17 (sequence is synthesized)
gataggaatatttgagaaagattgatcctgtttgacttgaggacttattttgttcacaggcatgcacgcttgtggttgtggttttatattacagatgtagaacaatggttatgtttcccg

SEQ ID NO: 462497 - DNA, 120 bp, Artificial Sequence
  ENSG00000157693_18 (sequence is synthesized)
ttgaagagctcagaggcttccaagtgatctgctcctgaacaagtttgaagacctattgtttcatagacccaagaccaaacgcatctaaaggatccccagcccccaagacctagcctttgt

SEQ ID NO: 462498 - DNA, 120 bp, Artificial Sequence
  ENSG00000157693_19 (sequence is synthesized)
ctgcgattttggcttcatctcccacaaaacccctttatgagttcacgctctttcctggactgacatacctattcctttccatttgttggactcctattcatgcttcaaagtccagctttc

SEQ ID NO: 462499 - DNA, 120 bp, Artificial Sequence
  ENSG00000157693_20 (sequence is synthesized)
ttaagcccttctttaggaagccttcccacacagccaaccctgctgctctctgcctcctttaaattcttgatacagctgctgcttgttctgatgttttatggtattgattctgttttcctg

SEQ ID NO: 462500 - DNA, 120 bp, Artificial Sequence
  ENSG00000157693_21 (sequence is synthesized)
tgtatatgccagtttttctagctagactgtaaactccttaaggacagagactacaccttgtactttttgtgcatgacctggacctgctaaggaaaaaaaaatcttgtggattgattgctt

SEQ ID NO: 462501 - DNA, 120 bp, Artificial Sequence
  ENSG00000157693_22 (sequence is synthesized)
tgccatccccacagcagcttttgcaaattgctttccaaactcacttgaatgatgacattgctgtggacctgggttctggacctgatctgccacttcaagctgtgtaatttttggcaagtt

SEQ ID NO: 462502 - DNA, 120 bp, Artificial Sequence
  ENSG00000157693_23 (sequence is synthesized)
aagctgtgtaatttttggcaagttgctttctttgcctggtcctcagtttgcccatcaatataatgggtggattggatgatttttttttttttaattgagatggagtcttgcactgtcacc

SEQ ID NO: 462503 - DNA, 60 bp, Artificial Sequence
  ENSG00000157693_24 (sequence is synthesized)
gcaccacaaccagcctggatgattcttaagggcccttctaggaccaaagttctgggaatt

SEQ ID NO: 462504 - DNA, 120 bp, Artificial Sequence
  ENSG00000157693_25 (sequence is synthesized)
gattcttaagggcccttctaggaccaaagttctgggaatttctagcttattctgccccctcatagcccttggcctatctatctttatccacatgcagaaacatctggcaaccccacatgg

SEQ ID NO: 462505 - DNA, 120 bp, Artificial Sequence
  ENSG00000157693_26 (sequence is synthesized)
ctgagatgacctggtcctaggacacccttggacagaagactggcctacctagcagacctggatttttcttcctgatctgctgcttccaagttgtgtgaccttggctaagtcacttaacct

SEQ ID NO: 462506 - DNA, 120 bp, Artificial Sequence
  ENSG00000157693_27 (sequence is synthesized)
ttctgattgtcatttcgctttttaataaagtgggtctggtgaacaagaaatgtaataaacacgtggcttgccattcaagagatgagtctgaccattcactttctgtgtgccagagaagag

SEQ ID NO: 462507 - DNA, 120 bp, Artificial Sequence
  ENSG00000157693_28 (sequence is synthesized)
agatcatgggtatagaccagcccctggaaaggctgctttggtcaaggctgagagcagctttgctcaaggaaattattcacgaaggtgaccactgtctttctgacctggcacagaggaaat

SEQ ID NO: 462508 - DNA, 120 bp, Artificial Sequence
  ENSG00000157693_29 (sequence is synthesized)
gttggctgtgaatgtgaccaatagaaagaagcccgtatttctcagtcagtcctagaaccccggtaagtaattaacagagaataaaaatgtgtttgttaaatgacaaagcagcagtttttc

SEQ ID NO: 462509 - DNA, 120 bp, Artificial Sequence
  ENSG00000157693_30 (sequence is synthesized)
aattgtaaggtctgcttgagagcctttgatgtgtgtttcttttcctgacttttcctttctttagaatttttgatggtctcacctggtgggtggggctttcagggtatgcccacaatgtac

SEQ ID NO: 462510 - DNA, 120 bp, Artificial Sequence
  ENSG00000157693_31 (sequence is synthesized)
atttctcggcatctgtgcctcagtttcctcatttataaaatccctatgatctctgtctcacctactttacagggttgctgtgaagatcgcatactacacacaggaatgctcatcagtttt

SEQ ID NO: 462511 - DNA, 120 bp, Artificial Sequence
  ENSG00000157693_32 (sequence is synthesized)
aatgctcatcagtttttaaattttatttaatttttatttatttttttttaaatgtaattttttcagagagataaggtcttgctatgttacccagcctagtcttgaactcctggcctcaag

SEQ ID NO: 462512 - DNA, 120 bp, Artificial Sequence
  ENSG00000157693_33 (sequence is synthesized)
gcctcccatgctgctgggattacaggtgtgaactaccatgcccagccagctcctaagtcttaaggctctgtgttagtgatagatgtggccatggtgtaggcagtgcaatgtcttcgagtg

SEQ ID NO: 462513 - DNA, 120 bp, Artificial Sequence
  ENSG00000157693_34 (sequence is synthesized)
agagtgaaggtggtaactcattgcatggattctagagttctgtttattctaatccaagttcttccacttaaaaacaatgttcttcctctcattgagtctcattcctcatctataggatgg

SEQ ID NO: 462514 - DNA, 120 bp, Artificial Sequence
  ENSG00000157693_35 (sequence is synthesized)
gaataagagcatgtacctggcaggttgttgtaaggattaaatggtgtaaaaaaatgtcaagtgcttgcaactttgaataccaaacttgagtgaaagctcaataaattgttacttaaaaaa

SEQ ID NO: 462515 - DNA, 120 bp, Artificial Sequence
  ENSG00000157693_36 (sequence is synthesized)
gaggatggccaccgtgtccctccttgttgcgaggaggttctcatggccagaggtgtgatgccgccaggcttcgggctcaccccacgagcctggtatggttatcactcagccagatgaagc

SEQ ID NO: 462516 - DNA, 120 bp, Artificial Sequence
  ENSG00000157703_0 (sequence is synthesized)
ggaagctgtttggggaacttgagctatttagaagatggcaaccaagccaacagagcctgtcacgatcctcagccttcggaaattgagcctggggaccgcagagccacaggttaaagagcc

SEQ ID NO: 462517 - DNA, 120 bp, Artificial Sequence
  ENSG00000157703_1 (sequence is synthesized)
aaagacgttcaccgtggaagatgcagtggagactatcggcttcgggcgtttccacattgccctctttctgatcatgggcagtactggggtggttgaggccatggagatcatgttgatagc

SEQ ID NO: 462518 - DNA, 120 bp, Artificial Sequence
  ENSG00000157703_2 (sequence is synthesized)
tgttgtgtctcctgtcatccgctgtgaatggcaactggagaattggcaggtggcattagtaaccacgatggtgttttttggctacatggttttcagtatcctctttggcctcctggctga

SEQ ID NO: 462519 - DNA, 120 bp, Artificial Sequence
  ENSG00000157703_3 (sequence is synthesized)
cagatatggccgctggaagattctgctcatctcgttcctgtggggagcctatttctccttgctgacctcgtttgctccttcgtacatctggtttgtcttcctgcggacgatggtgggctg

SEQ ID NO: 462520 - DNA, 120 bp, Artificial Sequence
  ENSG00000157703_4 (sequence is synthesized)
tggtgtgtccggccactcgcaagggttaatcataaagactgaatttttgcccacgaaataccgaggctatatgttacccttgtctcaggtgttctggcttgcgggctccctgctcatcat

SEQ ID NO: 462521 - DNA, 120 bp, Artificial Sequence
  ENSG00000157703_5 (sequence is synthesized)
tggcttggcctctgtgatcatccccaccatcgggtggcgctggctcattcgcgtcgcctccatcccgggcatcatcctcatcgtggccttcaagtttattcctgaatctgcccggttcaa

SEQ ID NO: 462522 - DNA, 120 bp, Artificial Sequence
  ENSG00000157703_6 (sequence is synthesized)
agctggtggagcccgtcctggaaaaaagaggaagatttgcagacctattggatgctaaatatttacggaccacattacagatctgggtcatatggcttggaatctcttttgcctactatg

SEQ ID NO: 462523 - DNA, 120 bp, Artificial Sequence
  ENSG00000157703_7 (sequence is synthesized)
gggttatcctggccagtgctgagctgctggagcgggacttggtctgtggttcaaagtcagactctgcggtggtggtgactgggggggactcaggggagagccagagcccctgctactgcc

SEQ ID NO: 462524 - DNA, 120 bp, Artificial Sequence
  ENSG00000157703_8 (sequence is synthesized)
acatgtttgcaccctctgactatcggaccatgatcatcagcaccatcggtgaaattgctttgaatcctttaaatatactgggcatcaatttcctgggaagacggctgagcctttctatta

SEQ ID NO: 462525 - DNA, 120 bp, Artificial Sequence
  ENSG00000157703_9 (sequence is synthesized)
ccatgggatgcacggctttattcttccttctcctcaacatttgcacttcaagtgccggcctgattggcttcctcttcatgctgagggctctggtagctgcaaacttcaacaccgtctaca

SEQ ID NO: 462526 - DNA, 120 bp, Artificial Sequence
  ENSG00000157703_10 (sequence is synthesized)
tttacacagctgaggtctaccccaccacgatgcgcgctttggggatgggaaccagcggctccctgtgtcgcattggtgcaatggtggcaccatttatatcccaggttcttatgagtgcat

SEQ ID NO: 462527 - DNA, 120 bp, Artificial Sequence
  ENSG00000157703_11 (sequence is synthesized)
caatactgggggccctgtgtctcttctcatctgtctgtgttgtatgcgccatttctgcattcactctccccatcgaaaccaaaggacgggccctccagcaaattaaatgaagacctgcaa

SEQ ID NO: 462528 - DNA, 120 bp, Artificial Sequence
  ENSG00000157703_12 (sequence is synthesized)
acttctgtatgctactcggtaattagtaaagtgattttttttttaaaggcatatatgggaatggggtaggtaactgtatattgatctcttccttgaggaacaatatataaagtactttta

SEQ ID NO: 462529 - DNA, 120 bp, Artificial Sequence
  ENSG00000157703_13 (sequence is synthesized)
taaaatataatttaagctttcaaaggggtgtgagagggagatggtgggggggaagatggcttttcttcattgaaatcaagtctgtaaacctttatatgaataaatactaaattttaaact

SEQ ID NO: 462530 - DNA, 120 bp, Artificial Sequence
  ENSG00000157703_14 (sequence is synthesized)
gatctgagacccgacctgaaaggagaggataagaccagggagccaggcgtcttgggaacacaagtctggccacccctgagaagccatctgtgctccaatttccgtctaagacttggccac

SEQ ID NO: 462531 - DNA, 120 bp, Artificial Sequence
  ENSG00000157703_15 (sequence is synthesized)
ttggatttggtgtttaaagttatgtctatttgtaataacataaagggagactgcttctagtggccccaatttgtgtactgtataaggcagcgcatgaacagacaattttaaaaattacag

SEQ ID NO: 462532 - DNA, 120 bp, Artificial Sequence
  ENSG00000157703_16 (sequence is synthesized)
tggaaattcacaagtacacatctgaatagagtggagccgaagccgtcctctagcaacaagcgggcggcagaggaccccgtttccacctggggcaggatctgccttgttaggctcccacca

SEQ ID NO: 462533 - DNA, 120 bp, Artificial Sequence
  ENSG00000157703_17 (sequence is synthesized)
acagggagctgaaatcctgaacatgaagggcctcaggggcaagcaagaccaacgtgaaaccctgttctttaaattaacttccatccctcccgtatttccagcctacttctagtgaaaatg

SEQ ID NO: 462534 - DNA, 120 bp, Artificial Sequence
  ENSG00000157703_18 (sequence is synthesized)
gctaacggggtaaagtaacatgtaaaacctgcttagagaaccgttttatctcgctcccacttgcagatggtgttttttggctacatggttttcagtatcctctttggcctcctggctgac

SEQ ID NO: 462535 - DNA, 120 bp, Artificial Sequence
  ENSG00000157703_19 (sequence is synthesized)
agatatggccgctggaaggtaggtggggcctcacagtagcatttggaattgtcttttgtgtattcttttgggggcaaccttatcactgtttctctttagtaggcatctccctcccaatac

SEQ ID NO: 462536 - DNA, 120 bp, Artificial Sequence
  ENSG00000157703_20 (sequence is synthesized)
ccaagatagaaaatgcagacatttccctccctgatggaacattccaggcttatcttctggacatttttctcagggtacctgtgcctgcagctgttcctctgcagtccaggtgtggagtaa

SEQ ID NO: 462537 - DNA, 120 bp, Artificial Sequence
  ENSG00000157703_21 (sequence is synthesized)
aaggagatgcgggtattatagagttctaagaaatctctacccagaaggattaaaggaaggaaggccgctaagtggctctatttgaacttttaaaggttgggacttagaagcagtcatggg

SEQ ID NO: 462538 - DNA, 120 bp, Artificial Sequence
  ENSG00000157703_22 (sequence is synthesized)
ttggttagatgcccccaccacgtccagtttactgtggtggtgttgagaacagaggtctgatatcagtgggggcacacatctgttctccatttatccatatcttcgcttctaatgagttaa

SEQ ID NO: 462539 - DNA, 120 bp, Artificial Sequence
  ENSG00000157703_23 (sequence is synthesized)
taaggggaatggaaaaggccccttagcccttcagagcagccctattgggaggttttttcctctggttttcatttaaatgactagtccactgctgcaacagcaagctcagaagaagctgtt

SEQ ID NO: 462540 - DNA, 120 bp, Artificial Sequence
  ENSG00000157703_24 (sequence is synthesized)
ctttcaggactatgtgtcatgagtgagtgtccataaagtctctaaccccccagagcacccaagtaggttgggagggagcaagtctcccttaattttggggcaagaaaactcaccctcagg

SEQ ID NO: 462541 - DNA, 120 bp, Artificial Sequence
  ENSG00000157703_25 (sequence is synthesized)
cacctatctgtttgaaactagcaggaactggccacaaatgaaaagagaagtccaaattacaatcagtaggaaacagatgcaagttttaaagcctgtgatggaattttaggacaagaaaaa

SEQ ID NO: 462542 - DNA, 120 bp, Artificial Sequence
  ENSG00000157703_26 (sequence is synthesized)
gtaaaatgactagtgctggatggccaagaccattaagccaaacctgctgctatgaggcagaggcagagaaagcagaagttctctgcagagccatttgcctgaatgtcccgtccagggaca

SEQ ID NO: 462543 - DNA, 120 bp, Artificial Sequence
  ENSG00000157703_27 (sequence is synthesized)
gaaatggaagcccatgctcttaaatgagagagtttataaagaagccacccaaactgtagacctcaacctaaaggaaaggagggccagattcagaaagactcacccttttgcccccagtga

SEQ ID NO: 462544 - DNA, 120 bp, Artificial Sequence
  ENSG00000157703_28 (sequence is synthesized)
aacctctggagttaggggaacgcagtgggttcatgcagcaagttcaagaggagcctattggtaattgtgggggtaaggggtggtgttgctctgaaccttgccagctatgccagaaatatt

SEQ ID NO: 462545 - DNA, 120 bp, Artificial Sequence
  ENSG00000157703_29 (sequence is synthesized)
gacctaaaggaagaaacagagacgaaattaatataagtagggagtttatttggaccaagattgaggattgcagctcggaagtcatacagtccagttgccctgaatatatgctccgattag

SEQ ID NO: 462546 - DNA, 120 bp, Artificial Sequence
  ENSG00000157703_30 (sequence is synthesized)
cagcagttacaagtgggttttttaaaggaggagagaaaagaatttgggggcacttcctaagttatttactaataatttacattggttcgttaaaataaggtatgctatcagctgattcta

SEQ ID NO: 462547 - DNA, 120 bp, Artificial Sequence
  ENSG00000157703_31 (sequence is synthesized)
catctttcttggtgtcacaaaatctaaaaacatggagataatggatgagcgtcacattgtgcaacttgcggtaaccttttaggtaatttatcagctagtctggaaactacagggaaggta

SEQ ID NO: 462548 - DNA, 120 bp, Artificial Sequence
  ENSG00000157703_32 (sequence is synthesized)
agaaaaacaaaatgaaatacaattaccctgggcatgggtgcgggaatgtgaccggagtcgcatgctcctgtgtctctggacctgataaattctgcatacctcacattcctcagactgttc

SEQ ID NO: 462549 - DNA, 120 bp, Artificial Sequence
  ENSG00000157703_33 (sequence is synthesized)
tgagccgcttttctctctcaagttgatggatgtacggagttaaaacatattagagtgtggacatttgcaggtataaacataagcagctacacattttgctcatgttggtatagctttgaa

SEQ ID NO: 462550 - DNA, 120 bp, Artificial Sequence
  ENSG00000157703_34 (sequence is synthesized)
actagctacgtgctcaaagtcacgtgcctactaagattagacatcaagacataaattatgtcttctgattacaaacccaggtctgtcttttctatttgcttgatttctggtgaaatcctc

SEQ ID NO: 462551 - DNA, 120 bp, Artificial Sequence
  ENSG00000157703_35 (sequence is synthesized)
tctgagcataaacacaaatggaggaatctcaaaggaaaacattagtagaattggctgtatgttttaaagtacatgaaataaatagcatagattcttgtaaatttgaaaacacgagtatct

SEQ ID NO: 462552 - DNA, 120 bp, Artificial Sequence
  ENSG00000157703_36 (sequence is synthesized)
caaaaaagcacaaaaaggcattttataaaagaaatacaaattatcaagaaactttgaaaaaacattaaagtacaggagttatcaaaaacaaaatacatagcaagatataatttttcctta

SEQ ID NO: 462553 - DNA, 120 bp, Artificial Sequence
  ENSG00000157703_37 (sequence is synthesized)
tcaaatatgtaaggaaatttttccttaaagagtcctgcaccgttgaaatggacattttcatgacttgcaagtatatagacacccttactatatataacaccctgttggtgttaatatatc

SEQ ID NO: 462554 - DNA, 120 bp, Artificial Sequence
  ENSG00000157703_38 (sequence is synthesized)
attattattatataatattattaaaccctattggtataatttttctgaccatcagcctggcagtatgaaacatgaaccttgaaaatattctgctaacctgaacatttgtcttccagaaat

SEQ ID NO: 462555 - DNA, 120 bp, Artificial Sequence
  ENSG00000157703_39 (sequence is synthesized)
tagcttgctaaagatatcagagagggcataacgacttatgtacagatatcatcgcagcttattttaataatgagaagatctgaaacaacttaaactgcaacagtagagcaaggtcttatg

SEQ ID NO: 462556 - DNA, 120 bp, Artificial Sequence
  ENSG00000157703_40 (sequence is synthesized)
tattatattacatgtatgaaagtacatctttccactggaacatttatagccagccattaacacttcgttttctctcataaacagagaagataaaacagtgttaagagttatcttctctgg

SEQ ID NO: 462557 - DNA, 120 bp, Artificial Sequence
  ENSG00000157703_41 (sequence is synthesized)
gttggacaatcaatggtgatttcaatttcttaattttcttttttcttctgtattgtttactatgaatttatccttataattaaagaaaaagcaaataccttaaatgttctccttgtactc

SEQ ID NO: 462558 - DNA, 120 bp, Artificial Sequence
  ENSG00000157703_42 (sequence is synthesized)
ctcccaacatactgcctcattacgtccccagcagccctgtgagtagggaggacacgtttttgccttttgatgtccaagttcagggacctgccacccatgagggtgggcacagcatggtag

SEQ ID NO: 462559 - DNA, 120 bp, Artificial Sequence
  ENSG00000157703_43 (sequence is synthesized)
ttttaaagaatggtctgaacttggtaggtctgggcttccagacagtagaatggcatggattgtattgttggatgattgtgaaagaccagtgggcttgctacaggttagctcctcagagaa

SEQ ID NO: 462560 - DNA, 120 bp, Artificial Sequence
  ENSG00000157703_44 (sequence is synthesized)
agtatgagatggagtatctgaattaccagtatctgcgtgaaaagatccaggccaaagcatgtgtacagatggacagaaacccagttactgtggaaaaattgacaccaaagagttttggtg

SEQ ID NO: 462561 - DNA, 120 bp, Artificial Sequence
  ENSG00000157703_45 (sequence is synthesized)
tcacacaactccataaccggagacaagacacattagcaatcctttcagagactctgagataacacctcttccaaaaaaaactttcacctgtttcatgctgtcaggactgaagagataatg

SEQ ID NO: 462562 - DNA, 120 bp, Artificial Sequence
  ENSG00000157703_46 (sequence is synthesized)
gatatttggcagacagaggatatagcatgaagtgagagttagaagttaagcaagctgaaatggtatgagaaagggggtggggaaacgggcagatcccccatcttttccatatatcaaaac

SEQ ID NO: 462563 - DNA, 120 bp, Artificial Sequence
  ENSG00000157703_47 (sequence is synthesized)
ttggctctggagatgcctgacaggtggatgccaagagaggtcttacctggccaatgcgtgttaataccagttcctgttcttggactaatcacacaaaatgactacaccagattggctcag

SEQ ID NO: 462564 - DNA, 120 bp, Artificial Sequence
  ENSG00000157703_48 (sequence is synthesized)
ataaatcaatttgtcaggaaggtacaacctgtagaatggctgcaaaggaccatcttagtgaagtgaatctgtattttctctttcacataaagaacagtttagaggtaactggagcataat

SEQ ID NO: 462565 - DNA, 120 bp, Artificial Sequence
  ENSG00000157734_0 (sequence is synthesized)
agggctccgagccgagcgcgcggagcagctggggccggggcgcggatgctggaagttcacatcccgtcggtggggcccgaggccgaggggcccaggcagagcccggagaaaagccacatg

SEQ ID NO: 462566 - DNA, 120 bp, Artificial Sequence
  ENSG00000157734_1 (sequence is synthesized)
gtgttccgagtggaggtgctgtgcagcgggcgcagacacacggtgccaaggcgctacagcgagttccacgcgctgcacaagcggatcaagaagctgtacaaagtgcccgacttcccctcg

SEQ ID NO: 462567 - DNA, 120 bp, Artificial Sequence
  ENSG00000157734_2 (sequence is synthesized)
aaacgcctgcccaactggaggaccagagggttggaacagcgccggcagggcttggaggcttacatccagggcatcctgtacctgaaccaggaggtgcccaaggagttactggaattcctg

SEQ ID NO: 462568 - DNA, 120 bp, Artificial Sequence
  ENSG00000157734_3 (sequence is synthesized)
agacttcggcacttccccacagaccccaaggctagcaactggggcaccctgagggagttcctgcctggcgacagcagctcccagcagcaccagcggcctgtcctgagcttccatgtggat

SEQ ID NO: 462569 - DNA, 120 bp, Artificial Sequence
  ENSG00000157734_4 (sequence is synthesized)
ccctatgtttgcaacccctccccagagtcgctgcccaacgtggtggtgaatggtgtgctccagggcctctacagcttcagcatcagcccagataaagcccagccaaaggcggcctgtcac

SEQ ID NO: 462570 - DNA, 120 bp, Artificial Sequence
  ENSG00000157734_5 (sequence is synthesized)
cctgctcctctgccaccgatgccctgatcagtccagaggcctttggctgcctcctaagaaagtcatgtgcctctgtcctatgaactccatataaggctgggtcctcctttggcctggacc

SEQ ID NO: 462571 - DNA, 120 bp, Artificial Sequence
  ENSG00000157734_6 (sequence is synthesized)
caggacttaattacccagtgcccagttgtgccacattcccactcaaggctcagaacttggctcgcattggtagctggaggtggtagaatttgtatgctcttagagcccaacagccaaggc

SEQ ID NO: 462572 - DNA, 71 bp, Artificial Sequence
  ENSG00000157734_7 (sequence is synthesized)
tggtagaatttgtatgctcttagagcccaacagccaaggcagggtcaagaagataagtaataaaagaggaa

SEQ ID NO: 462573 - DNA, 69 bp, Artificial Sequence
  ENSG00000157734_8 (sequence is synthesized)
tcggcccaaggcaggagaatctcttgaagccaggaggcggaagttgtggtgagccgagatcgcgccact

SEQ ID NO: 462574 - DNA, 90 bp, Artificial Sequence
  ENSG00000157734_9 (sequence is synthesized)
tcaaaataaataaataataaaggaagaagtcagcatactttaggaggccaaggcaggaggatgcttgggtctggaagtttgagaccagcc

SEQ ID NO: 462575 - DNA, 120 bp, Artificial Sequence
  ENSG00000157734_10 (sequence is synthesized)
catgcctgtaatcccaatactttaggaggccaaggcaggaggatgcttgggtctggaagtttgagaccagccagcgcaacatagtgagacctgtctctaccaaaaaaaaaaaaaaaaaaa

SEQ ID NO: 462576 - DNA, 120 bp, Artificial Sequence
  ENSG00000157734_11 (sequence is synthesized)
tacagatacatcccttaacatagactggagggtggtggcaaggggagcaaatgtggaggcccagtagctggcaaagtttagaagcagggggcaaaagctcctgcctgacttttcctgggt

SEQ ID NO: 462577 - DNA, 120 bp, Artificial Sequence
  ENSG00000157734_12 (sequence is synthesized)
agctcctgggtcaaaatttcaggcaggatcccagggaaggggcaggcacccattgccacaggagagttgcaggcatgttgggatgtaggcctaggggaggtgctgcaggctcaagaacca

SEQ ID NO: 462578 - DNA, 120 bp, Artificial Sequence
  ENSG00000157734_13 (sequence is synthesized)
ggcccacacattatatattaaaaaaaaaaaaacccacatttttttttattggtcagtgttggtaggagtttgttacaaaagtgagtccatgggcctgtggaatgtgaggggagtgggtcc

SEQ ID NO: 462579 - DNA, 120 bp, Artificial Sequence
  ENSG00000157734_14 (sequence is synthesized)
gctccaccagatgccagcaccggggccagtgcagctcagagccctgtggcggactacagggcctgcacagacggtcactcaaagaaagatgtccctgtgccctactccttggcgatggca

SEQ ID NO: 462580 - DNA, 120 bp, Artificial Sequence
  ENSG00000157734_15 (sequence is synthesized)
aagggcttctccacctcgatcttgccgcagtctgcgatgatcacatccttcaggggtttatcccggctgtctgtcttggtgctctccaccttccgcaccacctcctggaaaagaaaggtg

SEQ ID NO: 462581 - DNA, 120 bp, Artificial Sequence
  ENSG00000157734_16 (sequence is synthesized)
gaagcaggagggcatggtggatcaggaggtccaccgctcaggagaaaggccccagcgtatggctcaggagggctaagacccacaagtgatcaacagcacacaaaactggaggcaccaaaa

SEQ ID NO: 462582 - DNA, 120 bp, Artificial Sequence
  ENSG00000157734_17 (sequence is synthesized)
ttctaacagactcctggccagagcagggagaatgcagatttgacgagggggtacaggaattttgttcctttgaagtaagacccaggttgggccaagggtgaggaggaggaagagggtgac

SEQ ID NO: 462583 - DNA, 120 bp, Artificial Sequence
  ENSG00000157734_18 (sequence is synthesized)
cagggcatgtggcttctcagggacattgcgttcagctgcactctgtatacctcaggggtgggaccagcacgtcactgagtgaaggaggggagggaggctctggcagttgtgcagccttcc

SEQ ID NO: 462584 - DNA, 120 bp, Artificial Sequence
  ENSG00000157734_19 (sequence is synthesized)
tggctgggctctgagggggctggaagaatttagaaccttggaggcatggaggtacagggtttattctggacaggagcactgggctgcatctgtgggttgggtccttttgggaaagggatg

SEQ ID NO: 462585 - DNA, 120 bp, Artificial Sequence
  ENSG00000157734_20 (sequence is synthesized)
gacacatggagctcctgccctggggtctgtgttgaatccccggtgaggattgcccagtagtagcccttgcttccacaactcaccatgccctctagaactttgccaaacaccacatgcttg

SEQ ID NO: 462586 - DNA, 120 bp, Artificial Sequence
  ENSG00000157734_21 (sequence is synthesized)
ccatctagccaggctgtcttgactgtcgtgatgaagaactgggagccgttggtgtctttgcctgcgttggccatgctcacccagccaggcccgtagtgcttcagtttgaagttctcatcg

SEQ ID NO: 462587 - DNA, 120 bp, Artificial Sequence
  ENSG00000157734_22 (sequence is synthesized)
gggaagcgctcaccgtagatgctctttcctgggaaaaaagacagagcaggtcaggggcgctggattgcgccaaaccaagcagacattcggggccaggactgagggggcttaacctgtcct

SEQ ID NO: 462588 - DNA, 120 bp, Artificial Sequence
  ENSG00000157734_23 (sequence is synthesized)
ctgtgccaggctaggctggagtggactacaaggacataaaagcagcgtccttcctatcttctggcctcagagccaagccatgctgactgaggccaagtggggcatcaggccaggctgatg

SEQ ID NO: 462589 - DNA, 120 bp, Artificial Sequence
  ENSG00000157734_24 (sequence is synthesized)
tggtgaacagctcacagaaggattactttgagaagatagttttgtggcttttaaataaggcgcatgttatcagctccccttagctatggcccaggcctgccacggagggactttggtgga

SEQ ID NO: 462590 - DNA, 120 bp, Artificial Sequence
  ENSG00000157734_25 (sequence is synthesized)
gggaagtgccgtgcaggatgcaggggagtcaacagggtcggaactctccagaaaaggaggactgctgtggctgaccagcctgttttcctatgagcacaaaagacacaggcatagctgcag

SEQ ID NO: 462591 - DNA, 120 bp, Artificial Sequence
  ENSG00000157734_26 (sequence is synthesized)
aggagaaagcagccagagatgtgtggggaggggcagaaaagaggggctgccccttggattctggagagtcaaagcctcttaacaaggaatgaacaggaataaaagacagctgtgagtgtg

SEQ ID NO: 462592 - DNA, 120 bp, Artificial Sequence
  ENSG00000157734_27 (sequence is synthesized)
gagcgcgcggagcagctggggccggggcgcggatgctggaagttcacatcccgtcggtggggcccgaggccgaggggcccaggcagagcccggagaaaagccacatggtgagcgcggccc

SEQ ID NO: 462593 - DNA, 120 bp, Artificial Sequence
  ENSG00000157734_28 (sequence is synthesized)
ctggatggggaggggcgccgggacccgcaggatttccccgcgctgcgctcagtggggacccggggcccgggcctgggtgaacgagcgctgcgggctggaccgtcgggggaaaccttgtcg

SEQ ID NO: 462594 - DNA, 120 bp, Artificial Sequence
  ENSG00000157734_29 (sequence is synthesized)
agggtttgggggccgcttggatttgccagcctcgcggaccatggttcgagctcttgagggaccccagggctccgaggggcaggtccgccagccggttctcccaggtgtgcgggagcggag

SEQ ID NO: 462595 - DNA, 120 bp, Artificial Sequence
  ENSG00000157734_30 (sequence is synthesized)
agtccccgggcagccgcggcgccgcaaggccgctttgtgcctttgagagcgggagggtgggcacgtcgccaggcgcaggtgctgcggcgtcctcccgcggggcctcacgcgcagacccgc

SEQ ID NO: 462596 - DNA, 120 bp, Artificial Sequence
  ENSG00000157734_31 (sequence is synthesized)
gacctcccaccggccccggcccagcctctgtccagcccccgcccaggccctgtgaggcgggcgggcgagccccagcctccgccacccccattactgcctcagtccctgcgcagccggtca

SEQ ID NO: 462597 - DNA, 120 bp, Artificial Sequence
  ENSG00000157734_32 (sequence is synthesized)
ccgggcctctgtgggtgggttggggccttcctcgccctcggccggtccaccactcaccagggtctgtcccagtagagcccgaaggcgggggcgcgggagggcttctggctggggcgaaga

SEQ ID NO: 462598 - DNA, 120 bp, Artificial Sequence
  ENSG00000157734_33 (sequence is synthesized)
ctagatatggggctacagggctgggttgtgggctttgcatttctcggctcctgggaccctcagacagcatctccttcctgctgcccacctctggagccactacctcctgctcctgtcccc

SEQ ID NO: 462599 - DNA, 120 bp, Artificial Sequence
  ENSG00000157734_34 (sequence is synthesized)
tggagcctgctttgtagacacaaggaaaacaagtttggcttccctggtctccatttcttcagcagcctgacttctttaccaagctgatgtgaaaagaatgtgacctgggaatgcggaggc

SEQ ID NO: 462600 - DNA, 120 bp, Artificial Sequence
  ENSG00000157734_35 (sequence is synthesized)
ttcatttggggtggacagctgctgtctgctgccttggcaggggctcctactcccaagtgggggctgagcccatgagcaggagctcaaggagctgcaggtctgaggccagacctgtttaat

SEQ ID NO: 462601 - DNA, 120 bp, Artificial Sequence
  ENSG00000157734_36 (sequence is synthesized)
gcacttccccacagaccccaaggctagcaactgggggtaaggggggccgatggcgggggccaggggctgtcagcagtgagcagcaccctgagggagttcctgcctggcgacagcagctcc

SEQ ID NO: 462602 - DNA, 120 bp, Artificial Sequence
  ENSG00000157734_37 (sequence is synthesized)
gcttacatccaggtatgcgagagcacagttggttgccccccggccttctgtgccaggggtgtggcccagacagagaggtgtgggggcatggcagggagggaacccacaacttggggatgt

SEQ ID NO: 462603 - DNA, 120 bp, Artificial Sequence
  ENSG00000157734_38 (sequence is synthesized)
tattcaccacctcaagcatcaattttctgagtctaatataggtccaaacacccccctctggcttgttgaaaggactgaaagaggtaacggacacaggtagtcccagctccatgaaaccca

SEQ ID NO: 462604 - DNA, 120 bp, Artificial Sequence
  ENSG00000157734_39 (sequence is synthesized)
ggtcctgtcccctccatggtgaggtcctgtgctgccctcctgatggcatgtagggtgagggtccttcccccaacagcaaagctatgccgcgtcatggggtacaacctgtgcacacagcgc

SEQ ID NO: 462605 - DNA, 120 bp, Artificial Sequence
  ENSG00000157734_40 (sequence is synthesized)
ccagcgcccagaagggccctgagcctggttcaacgctctgctgtcattgtcgtgaaattctttttttggaacaaagagccctgcattttcactggcactgcgctatgcaaattagtagct

SEQ ID NO: 462606 - DNA, 120 bp, Artificial Sequence
  ENSG00000157734_41 (sequence is synthesized)
gggcttttttttggacagacttggttacccccgccacctccggaactggggcttgttacaaatagaagcagtggtcccctgggaggtgcagttctgggctctggtgtctccaccccttcc

SEQ ID NO: 462607 - DNA, 120 bp, Artificial Sequence
  ENSG00000157734_42 (sequence is synthesized)
tcacgctcccccggcatccccaggcagcttacagtgtttctcttctcttcagcaccctgagggagttcctgcctggcgacagcaggcaagtcaaagccctagcccgcgcttggcccctgc

SEQ ID NO: 462608 - DNA, 120 bp, Artificial Sequence
  ENSG00000157734_43 (sequence is synthesized)
tgccccctagtggccatatgctaggaggcaggcctgctgcctgggcctgtctggcctgggccctgaagtctgttttccctttggtgcctcctgagcccatttcccactcaccttttcctt

SEQ ID NO: 462609 - DNA, 120 bp, Artificial Sequence
  ENSG00000157734_44 (sequence is synthesized)
catgggtccctggtgatggcaaccccgtctccacccctctgtgggattctgccctgcctcccgcacccatggttcatgaccctgtttcctcccagctcccagcagcaccagcggcctgtc

SEQ ID NO: 462610 - DNA, 120 bp, Artificial Sequence
  ENSG00000157741_0 (sequence is synthesized)
ctgcttctatttatgtgggggatccaacatggcggccgcggcgaccctggcgatggcggtgaagcccatcagaacgtagtagcggggaaggggacacggtccgcactcaccgtggcgccg

SEQ ID NO: 462611 - DNA, 120 bp, Artificial Sequence
  ENSG00000157741_1 (sequence is synthesized)
gcggagacggctgagggtggtggagggaagaaaagcgacagagagcaagaggaagggcgggcaggcacgcagcgcgccgtagaagcgagcgccggctcgagcaaaagcggagggccagaa

SEQ ID NO: 462612 - DNA, 120 bp, Artificial Sequence
  ENSG00000157741_2 (sequence is synthesized)
cagtggggatggcggagccgcgcagagtagcgttcattagcttgtcaccggtgcggcggcgcgaggccgagtacccggggcccgagcgtgagcccgagtacccccgcgagcccccccggc

SEQ ID NO: 462613 - DNA, 80 bp, Artificial Sequence
  ENSG00000157741_3 (sequence is synthesized)
cgcgggagcctgccccccgctcggacgcgcagcccccgtcgcgggagaagccgctcccccagcgcgaggtcagccgcgcc

SEQ ID NO: 462614 - DNA, 80 bp, Artificial Sequence
  ENSG00000157741_4 (sequence is synthesized)
gagaagccgctcccccagcgcgaggtcagccgcgccgagccgcccatgtcgctgcagcgggagcccccgcggcccgagcc

SEQ ID NO: 462615 - DNA, 120 bp, Artificial Sequence
  ENSG00000157741_5 (sequence is synthesized)
agccgccgcggccgccgagggagacggtgcgcctggagctggtgcttaaggaccccaccgacgagagctgcgtggagttcagttacccggagctgctgctgtgcggagaacaacggaaga

SEQ ID NO: 462616 - DNA, 120 bp, Artificial Sequence
  ENSG00000157741_6 (sequence is synthesized)
agctcattcacacagaagacccatttaatgatgaacatcaggagaggcaagaggtggaaatgttggctaagaagtttgaaatgaaatatggtgggaaaccccgtaaacaccggaaggatc

SEQ ID NO: 462617 - DNA, 120 bp, Artificial Sequence
  ENSG00000157741_7 (sequence is synthesized)
ggctacaagatttaattgatataggctttggctatgatgagacagatccatttattgataactcagaggcttatgatgaattagttcccgcttctctaacaacaaaatatggaggctttt

SEQ ID NO: 462618 - DNA, 120 bp, Artificial Sequence
  ENSG00000157741_8 (sequence is synthesized)
atatcaacactggcactctacagtttcgccaagcttcagatactgaagaagatgatattacagacaaccaaaagcacaagccacccaaggtccccaaaataaaagaagatgatattgaga

SEQ ID NO: 462619 - DNA, 120 bp, Artificial Sequence
  ENSG00000157741_9 (sequence is synthesized)
tgaagaagcggaagcggaaagaggaaggggaaaaggagaagaagccaaggaaaaaagttcccaaacaactgggagttgtggctctaaattcacacaagtctgaaaaaaagaagaaacgtt

SEQ ID NO: 462620 - DNA, 120 bp, Artificial Sequence
  ENSG00000157741_10 (sequence is synthesized)
ataaagattctctttctctagctgccatgattagaaaattccagaaagagaaggatgcattaaagaaggagtctaaccccaaagtcccagtgaccttgtcaaccccttctctgaataaac

SEQ ID NO: 462621 - DNA, 120 bp, Artificial Sequence
  ENSG00000157741_11 (sequence is synthesized)
ccccatgtgctgctgcagcactggggaatgacgtcccggacttaaatctgagcagcggtgatccagaccttcccatttttgttagcacaaatgaacatgagctgtttcaggaagctgaaa

SEQ ID NO: 462622 - DNA, 120 bp, Artificial Sequence
  ENSG00000157741_12 (sequence is synthesized)
atgccctagagatgctagatgattttgacttcgacagattactggatgctgcttctgatggtagccccctatctgagtcggggggtgaaaatggaaccaccacccagccaacctacactt

SEQ ID NO: 462623 - DNA, 120 bp, Artificial Sequence
  ENSG00000157741_13 (sequence is synthesized)
ctcaggttatgcccaaagtggtacctacactcccagagggtctacctgtacttcttgaaaaacgtatcgaagaccttcgtgtagctgccaaactttttgatgaagaaggaaggaaaaaat

SEQ ID NO: 462624 - DNA, 120 bp, Artificial Sequence
  ENSG00000157741_14 (sequence is synthesized)
tctttacacaggatatgaataatattcttctggacattgagttacagctacaagaactaggccctgtcattcgcagtggtgtctactcccaccttgaagcttttgtgccatgcaataaag

SEQ ID NO: 462625 - DNA, 120 bp, Artificial Sequence
  ENSG00000157741_15 (sequence is synthesized)
aaacactagtaaaacgtctgaagaagttacatctcaatgtccaggatgatcgtttaagagaacctctgcaaaaactgaaactggctgttagcaatgtcatgcctgaacagctatttaaat

SEQ ID NO: 462626 - DNA, 120 bp, Artificial Sequence
  ENSG00000157741_16 (sequence is synthesized)
accaggaggactgccaggctcgtagtcaagctaagtgtgccaaattgcagacagatgaagaacgagaaaaaaatggatctgaagaggatgatgatgagaaaccaggaaaacgtgtcatag

SEQ ID NO: 462627 - DNA, 120 bp, Artificial Sequence
  ENSG00000157741_17 (sequence is synthesized)
gaccaagaaagaaattccactgggatgacactatcagaactttgttatgtaaccttgttgagatcaaattgggatgctatgagttagaaccaaataaaagccagtctgctgaagattatc

SEQ ID NO: 462628 - DNA, 120 bp, Artificial Sequence
  ENSG00000157741_18 (sequence is synthesized)
ttaagtcttttatggagacagaagtgaagcccctgtggcctaagggctggatgcaggcaagaatgctttttaaggaaagccggagtgttcataatcatcttacttctgctccggcaaaga

SEQ ID NO: 462629 - DNA, 120 bp, Artificial Sequence
  ENSG00000157741_19 (sequence is synthesized)
aaaaggtgattcctgcacctaaacccaaagtaaaggaggtgatggtaaagacccttcctctccattctttccccactatgcttaaggagtgtagtccaaaaaaggaccagaaaactccaa

SEQ ID NO: 462630 - DNA, 120 bp, Artificial Sequence
  ENSG00000157741_20 (sequence is synthesized)
catccctggtggcttcggttagcggtcctccaacgagctccagcacagctgccattgctgcagctagctctagctctgcaccagcccaagaaaccatctgcctcgacgactcactagatg

SEQ ID NO: 462631 - DNA, 120 bp, Artificial Sequence
  ENSG00000157741_21 (sequence is synthesized)
aagacctttctttccattcaccttcactggatcttgtttctgaagctttagcggttatcaacaatgggaacaagggccctccagttggctcaaggataagcatgccaaccacaaagcctc

SEQ ID NO: 462632 - DNA, 120 bp, Artificial Sequence
  ENSG00000157741_22 (sequence is synthesized)
gtccaggactgagagaagaaaaattagcaagtatcatgagtaagctgccactagctactcccaaaaaactagattctactcagactacacattcttcaagtcttattgctggtcacacag

SEQ ID NO: 462633 - DNA, 120 bp, Artificial Sequence
  ENSG00000157741_23 (sequence is synthesized)
ggccagtaccaaagaaaccccaggatttagctcatactggcatctcttcaggccttattgctggttcttccattcagaaccctaaagtttctttagaacctttgccagccaggctacttc

SEQ ID NO: 462634 - DNA, 120 bp, Artificial Sequence
  ENSG00000157741_24 (sequence is synthesized)
aacaaggacttcagaggtcaagccagattcacacttcttcctcttcacagacccatgtctcctcttcttcccaagcccaaattgctgcctcttctcatgctctgggaacatccgaggccc

SEQ ID NO: 462635 - DNA, 120 bp, Artificial Sequence
  ENSG00000157741_25 (sequence is synthesized)
aagatgcttcttcgttaacacaagtaacaaaggtgcaccagcattcagctgtccagcagaactatgtgtctccattacaggccaccatcagtaaatcccagaccaaccccgtcgtgaagt

SEQ ID NO: 462636 - DNA, 120 bp, Artificial Sequence
  ENSG00000157741_26 (sequence is synthesized)
taagtaataatccccaactctcctgttcctcctcacttattaagacttcagataagccacttatgtaccgccttcccttatctaccccctcacctggaaatggttctcaagggtcccacc

SEQ ID NO: 462637 - DNA, 120 bp, Artificial Sequence
  ENSG00000157741_27 (sequence is synthesized)
ccctggtttctaggacagtacctagcaccactacctccagtaactatttagccaaggctatggtgtcacagatctccacgcagggtttcaaatctcccttctcgatggctgcctccccaa

SEQ ID NO: 462638 - DNA, 120 bp, Artificial Sequence
  ENSG00000157741_28 (sequence is synthesized)
aacttgccgcatctcccaagcctgccacatctcctaaacccctgccctcgcctaagccttctgcctcacccaagccctctctgtcagctaagccttcagtatcaactaaacttatttcta

SEQ ID NO: 462639 - DNA, 120 bp, Artificial Sequence
  ENSG00000157741_29 (sequence is synthesized)
aatccaacccaactcccaagcctactgtatccccaagtagttccagtccaaatgcactagttgcccagggtagccactccagcactaacagcccagtccataaacagcccagtggaatga

SEQ ID NO: 462640 - DNA, 120 bp, Artificial Sequence
  ENSG00000157741_30 (sequence is synthesized)
acatcagcagacagtctcccaccttgaatttattgccctctagtcgcacttcaggccttccacctacaaaaaatcttcaggccccctcaaagctaacaaactcatcatccactggaactg

SEQ ID NO: 462641 - DNA, 120 bp, Artificial Sequence
  ENSG00000157741_31 (sequence is synthesized)
ttgggaagaacagcttgagtggaattgcaatgaatgtacctgccagcagaggtagcaaccttaactcaagcggagctaataggactagtctgtctgggggaacaggaagtggaacacagg

SEQ ID NO: 462642 - DNA, 120 bp, Artificial Sequence
  ENSG00000157741_32 (sequence is synthesized)
gtgctaccaaaccattgtctactccacatagaccatccactgcctcagggtcttcagtggtaacagccagtgtgcagtccacagcaggagcatcattattggctaatgcctcacctctga

SEQ ID NO: 462643 - DNA, 120 bp, Artificial Sequence
  ENSG00000157741_33 (sequence is synthesized)
ctctcatgacatcacctttgtctgtaacaaatcaaaatgtgactccttttgggatgctgggtggccttgttccagtgaccatgcccttccagtttcccttggagatatttggctttggaa

SEQ ID NO: 462644 - DNA, 120 bp, Artificial Sequence
  ENSG00000157741_34 (sequence is synthesized)
cggacacagctggagtgacaaccacctcgggatctacctcagccgctttccaccatagcctaactcagaatttactaaagggtttacagccaggaggagctcagcatgcagcaacgcttt

SEQ ID NO: 462645 - DNA, 120 bp, Artificial Sequence
  ENSG00000157741_35 (sequence is synthesized)
cccactcacctctgcctgcacacttacagcaagcatttcacgatggaggccaaagtaaaggggacactaaattaccacggaaatctcagtgactgcccagcaagcaaaggagacgaaatg

SEQ ID NO: 462646 - DNA, 120 bp, Artificial Sequence
  ENSG00000157741_36 (sequence is synthesized)
tttagttgactgatggaatctacctgatgggaaagtacttatgtggtcatagggctgctgtttctgtcgatgtttacattctctcgtcccaagcactgtggtgaggaggaaaaagaaaag

SEQ ID NO: 462647 - DNA, 120 bp, Artificial Sequence
  ENSG00000157741_37 (sequence is synthesized)
aaaacattacttgagcaaagccaggtgcaggaggaagaaatgcttttgtgcaaagttagtgacctttggtctcttctaaagaatgacagagttaccgtattaacagacttgaaagagact

SEQ ID NO: 462648 - DNA, 120 bp, Artificial Sequence
  ENSG00000157741_38 (sequence is synthesized)
cagttgtcaaacccacagaaatacaaatttgatttttcccgggggaggaagaaggaagtgaagagaatttgggtaaactccatccatcctgggggttggatctgaacacttacagacata

SEQ ID NO: 462649 - DNA, 120 bp, Artificial Sequence
  ENSG00000157741_39 (sequence is synthesized)
attggtaataaaaggcattaaaaactggaattaggccagtttgtcaggaataatgatcatgtctatttgaatggactgtgtagcagatttgccacaaaaagaaataataatgattctatc

SEQ ID NO: 462650 - DNA, 120 bp, Artificial Sequence
  ENSG00000157741_40 (sequence is synthesized)
tccgatagacagtagctgcatagcacaccctcgaaaatcctgaacaaacttgaatctcctccagtgtgtagcaacttccctcaatcagtggactaaagatccttcaggaaagttatttta

SEQ ID NO: 462651 - DNA, 120 bp, Artificial Sequence
  ENSG00000157741_41 (sequence is synthesized)
gcacagtgatatatattattaaatcatctagatttttaaaaatcaggaagttgagcctgttgctcttaagagatgaaacctagatgtcccctttttgtaaaagggtcaatttcatcttcc

SEQ ID NO: 462652 - DNA, 120 bp, Artificial Sequence
  ENSG00000157741_42 (sequence is synthesized)
gttcagaagcaggtacttaactcttttcttcaggtgatttgtgcatctagtattgactggttaattcttatttccattcttgatgttaaaatgtgactgtgttcacatttttctcctgag

SEQ ID NO: 462653 - DNA, 120 bp, Artificial Sequence
  ENSG00000157741_43 (sequence is synthesized)
aaatggggatctttacagggttattgctttgctgcttttagcccttgcagcaacataaactctaagtttccccagttcatctaacttcacaacttctccttctgttcttttagctagtgg

SEQ ID NO: 462654 - DNA, 120 bp, Artificial Sequence
  ENSG00000157741_44 (sequence is synthesized)
tccttcaggtgattattagctattggtataaacaggtagaagtgtacactatgtttcttcattggtcattcaaatggcatgaatatagtttttgaatttttaagatggtattttaaaggg

SEQ ID NO: 462655 - DNA, 120 bp, Artificial Sequence
  ENSG00000157741_45 (sequence is synthesized)
aggaatcacattaggatcacaatcacgacatatttttactccctgtatccagtgtagtgaaattgtttggagcatttgagatcctaaagcttcactatttactcagtgtattggtatgtg

SEQ ID NO: 462656 - DNA, 120 bp, Artificial Sequence
  ENSG00000157741_46 (sequence is synthesized)
agtaaatctgcagaaaataagactccttagttattatagcttccttatgcaaatagcatattcaacaaaggatgttaagggaaaaatttatggttctccttggatacatttgatttgatg

SEQ ID NO: 462657 - DNA, 120 bp, Artificial Sequence
  ENSG00000157741_47 (sequence is synthesized)
ggtttttttgccgcattattctagttttttaagcttctgaatattttcatactatatcagagaatggtgtaaactctaaatggtataagcttcatccatttataatgacactaacctaaa

SEQ ID NO: 462658 - DNA, 120 bp, Artificial Sequence
  ENSG00000157741_48 (sequence is synthesized)
aaaaatagactggtagtgacaagatttattgcatatgtgtttattatacattaccctataccattagatttactcaattaagagtattaaccaggcccttttttcttttatacacaaaag

SEQ ID NO: 462659 - DNA, 120 bp, Artificial Sequence
  ENSG00000157741_49 (sequence is synthesized)
tcccagataccctacaggactgtgaataaataaccacagatcggttcagatctgtatgcctatattttgacttcaaagtcacattggcttgcttcatagcgaaaaagttaataaataact

SEQ ID NO: 462660 - DNA, 120 bp, Artificial Sequence
  ENSG00000157741_50 (sequence is synthesized)
gaaaactttagttccaagaacttgttacagtaaagggaaaggattatttcaaaggaatcactgatataatttcttgactctaagaatttagtttatcaataaaacaaatatggatgtagt

SEQ ID NO: 462661 - DNA, 120 bp, Artificial Sequence
  ENSG00000157741_51 (sequence is synthesized)
atgaaccccagtagatattttggaaggatactgggaggatgttgcagagaggtttgacttgaattcagtatgtttgatgaagatttgcttggtttcaattaaggaagcttgcccaatttt

SEQ ID NO: 462662 - DNA, 120 bp, Artificial Sequence
  ENSG00000157741_52 (sequence is synthesized)
tttaattttttcaaatgtagtggacctcttgcttttacgaaatatgaataaaaaggtctttgcttcatactaggggaagtgatgggattttcctttgggaaggtagcctttgttttactt

SEQ ID NO: 462663 - DNA, 120 bp, Artificial Sequence
  ENSG00000157741_53 (sequence is synthesized)
ctcataccacaagagaagtcgaagtgcgtattaatttctcttcctgaatacttgtatatatgtttgtctgtatgtatatatacatacacacatacattcatataaatgactagtttgagt

SEQ ID NO: 462664 - DNA, 120 bp, Artificial Sequence
  ENSG00000157741_54 (sequence is synthesized)
caaaaaatcatttgaatttcttaaaaccatcaattctgaatcatgccatatgaagatccctggtgactgtcatcattagaaaagaacaagataatcagttcttttccctgtaacatttta

SEQ ID NO: 462665 - DNA, 120 bp, Artificial Sequence
  ENSG00000157741_55 (sequence is synthesized)
tactaaccagtaaaaatatctgaaggcccttggctccaagaatacaatgtggagattcttctgtgttctctttagtcttgattccttgaggactactgtcagatccctaccttaaacccc

SEQ ID NO: 462666 - DNA, 120 bp, Artificial Sequence
  ENSG00000157741_56 (sequence is synthesized)
cacctgcactgacgacttacattcatttcagtcaggaccccccttttatgttgtatgaatcagtcaaacatcgttgtatttctgtatagataaagtatgatcagagagtttctacatgta

SEQ ID NO: 462667 - DNA, 120 bp, Artificial Sequence
  ENSG00000157741_57 (sequence is synthesized)
aatagtaatctatttctttcctagatcataacattgaaaaaggtgcccatactttatggtcacctgtctttaccgtttttattactaaaaacaaacatataaattggttattttttagca

SEQ ID NO: 462668 - DNA, 120 bp, Artificial Sequence
  ENSG00000157741_58 (sequence is synthesized)
cagagacttgtgactcatactgtatttttgcacttaaaaatcaaattatgttattttttaaaatggtgagtcattggaaaggatatctatagagcaacgtgtatttctgaagagcattag

SEQ ID NO: 462669 - DNA, 120 bp, Artificial Sequence
  ENSG00000157741_59 (sequence is synthesized)
caacatccaaatgcaaaaataatcagcacacatgattatatcccactccttgggattcttgattcaggaagattaagctgtttgttttcaactgttttatattttaaattgccttcactg

SEQ ID NO: 462670 - DNA, 120 bp, Artificial Sequence
  ENSG00000157741_60 (sequence is synthesized)
atatataagctgttactgtacatacaagttaatcctcagtattcacaagcaataacagtcagcagggttgtcctcggagatagctgtgctgagcctcagttggagactgggagcaaagtg

SEQ ID NO: 462671 - DNA, 120 bp, Artificial Sequence
  ENSG00000157741_61 (sequence is synthesized)
attcaattataattcttgtatgcttttgaggtcagagggtaaatgaaatcgtgattttaaaacagcctgaagaaaaaggttttgggaaaggaaatgaggctaatctgtagtcataaaatt

SEQ ID NO: 462672 - DNA, 120 bp, Artificial Sequence
  ENSG00000157741_62 (sequence is synthesized)
ctgatactttgcggaaattagaagatggtgatagtgcattcttttgtgcccaccccccctctgatggatgttgttagcccaaattacatttttcatatcatggacattgaatagggttta

SEQ ID NO: 462673 - DNA, 120 bp, Artificial Sequence
  ENSG00000157741_63 (sequence is synthesized)
ttgaatcaggaaggtaaggggaagaaccgggcacatatgtgttggaatactgtgggtttgacacctggttgaaaacaacttattggacatgatttttaacccaggatatttttttcccaa

SEQ ID NO: 462674 - DNA, 120 bp, Artificial Sequence
  ENSG00000157741_64 (sequence is synthesized)
agcagatctaaattgtttactacccagggttggaaagggcaggcacctctaatctagtctttgtcctctggttgccctctcccacacccctttccacctatacttggttcaagacatttt

SEQ ID NO: 462675 - DNA, 120 bp, Artificial Sequence
  ENSG00000157741_65 (sequence is synthesized)
ctgaaacgaaaattctgctgttgttcaaactgccattggttatgagaactctgcgtcctttgggatcatctcttagaactccagtgatctatcatatttgctgctacatttgtaaaatga

SEQ ID NO: 462676 - DNA, 120 bp, Artificial Sequence
  ENSG00000157741_66 (sequence is synthesized)
actttgcctgtattggttgactttaatttacagttctttatttctaggatgttttgtcctctagtttgactcatgtatagaattaggatactttattttaggagtgtaccgtaaaagcac

SEQ ID NO: 462677 - DNA, 84 bp, Artificial Sequence
  ENSG00000157741_67 (sequence is synthesized)
aattaggatactttattttaggagtgtaccgtaaaagcacactggtccctttgttgtttttattatttaggtttggaatttggt

SEQ ID NO: 462678 - DNA, 120 bp, Artificial Sequence
  ENSG00000157741_68 (sequence is synthesized)
aatctataatcaggccaaacttgagaactttcctgtgcttcagcactgtaattctgctgacctaatgttctcaaaagaggcacttttactttctattgtgcatgtatgattgttgttttt

SEQ ID NO: 462679 - DNA, 120 bp, Artificial Sequence
  ENSG00000157741_69 (sequence is synthesized)
tgcttttgagggggcttttgtgtttgtaataatgaagcagaagaaaagtgcagtagtagataaatgatcacaacatgttatgcaattttattttataaaattttaaggggaaaagtttaa

SEQ ID NO: 462680 - DNA, 120 bp, Artificial Sequence
  ENSG00000157741_70 (sequence is synthesized)
ctctttgtaaatcatttcttagctctggtaaaatgcttatattactcctctaaaacatgctcaattcaggcctttgtctttgttaagtgccttttttctttcttttttcctctcttttga

SEQ ID NO: 462681 - DNA, 120 bp, Artificial Sequence
  ENSG00000157741_71 (sequence is synthesized)
aactgttgtcacattatcttaaagtacagactgataagtcaggggattcaggaggaagaatctcacacttgtcaacatcatgtcatgctgtgtaaccctcttcctttgctttctatgtat

SEQ ID NO: 462682 - DNA, 120 bp, Artificial Sequence
  ENSG00000157741_72 (sequence is synthesized)
atggatatatgtgtaagatacatacattacatatatataaaactaggagctgctgtaccattgcatcctttccaaacactcccctttccatgtttgcaaaacttctgccttgtttattcc

SEQ ID NO: 462683 - DNA, 83 bp, Artificial Sequence
  ENSG00000157741_73 (sequence is synthesized)
cccctttccatgtttgcaaaacttctgccttgtttattccattgcttttagttgattaaagtgggtggattagaaaagtatct

SEQ ID NO: 462684 - DNA, 120 bp, Artificial Sequence
  ENSG00000157741_74 (sequence is synthesized)
aaaaaaagaaaataaaagtatagaaaagtatcttttcacaagaggccaccttcgccctttgaatatctgcttgtagaagttaacaataacaacacacacacacacacacacacacacgtc

SEQ ID NO: 462685 - DNA, 120 bp, Artificial Sequence
  ENSG00000157741_75 (sequence is synthesized)
attgactattcttggatataacccacttttctgtgctctttaaacttggcataagtaatataggagacagcattggaataacaagagtaccttgcaagtcacattggtaaggtgcgctag

SEQ ID NO: 462686 - DNA, 120 bp, Artificial Sequence
  ENSG00000157741_76 (sequence is synthesized)
actaaacatgtgacaaggctagcgttagaaccgcagtttggtgtctaagtttagaagcaggttagcaactgtcaacatgaaaaatgtatcatattttcttctggaaaatgatttttgaag

SEQ ID NO: 462687 - DNA, 120 bp, Artificial Sequence
  ENSG00000157741_77 (sequence is synthesized)
aaatcatatagctgcatatctatctgttaaaaggttaataaactcagaagtagaaagacttcagatgctgaggaaaacatataatctatagcattcttgagagattttccatttgctttt

SEQ ID NO: 462688 - DNA, 120 bp, Artificial Sequence
  ENSG00000157741_78 (sequence is synthesized)
tatttgctagataattacatttggcttaatctgattttatggttatttagatttctcccttgagcaaaataacataattttcagtatctaagattcatcgattttttgttgaaaacaaat

SEQ ID NO: 462689 - DNA, 120 bp, Artificial Sequence
  ENSG00000157741_79 (sequence is synthesized)
agatgtgacatgttaagggagaccaagttgaaccatccctcagacccagtacaaatatacctagtaagtgcccccctttcaatacattctaattgggaagaagaagagactagtggctta

SEQ ID NO: 462690 - DNA, 120 bp, Artificial Sequence
  ENSG00000157741_80 (sequence is synthesized)
aaaggagaaagcagaagctcctggtagtgttacctgatagcagaacttaccaggcagttggaattcacgagtgttattcttgaatgactatgtctagggggaatattgtttaaccttcgt

SEQ ID NO: 462691 - DNA, 120 bp, Artificial Sequence
  ENSG00000157741_81 (sequence is synthesized)
gcctcagattacccattagacaattgggtataatcatattcacctacctcccagggatatcagagactttactatttcaaaaatattttgagtttttgtaaaatgtcctatataattaaa

SEQ ID NO: 462692 - DNA, 120 bp, Artificial Sequence
  ENSG00000157741_82 (sequence is synthesized)
aatagtattatcatcttcctgcagaggctaaaaaatgttttccttataatgagtataaaaagcaccctatggtttttaaatttaaaaaaatcactggaattttaatttagatacatattt

SEQ ID NO: 462693 - DNA, 120 bp, Artificial Sequence
  ENSG00000157741_83 (sequence is synthesized)
gttatttaaacattatctttgaggtgggataaaatgtttagtttcaggttaacaagggagagaaataacactaagtttaagtagttttttttagccttttacggtgttactgtgattttt

SEQ ID NO: 462694 - DNA, 120 bp, Artificial Sequence
  ENSG00000157741_84 (sequence is synthesized)
cgtcaaggttgtggagctaaagttagataaagttatgatgcttggttattggagttgataaatgatcctggaagttttaactgtctcacttttccatcttctcagtctaatttcctttta

SEQ ID NO: 462695 - DNA, 120 bp, Artificial Sequence
  ENSG00000157741_85 (sequence is synthesized)
ttgcttgtttgaggacggatagctaagctttttaactttctaagaatgagtatgatgtctcattcttgcaaatcagagattgtgtactaattccattaactgtaggtgtatccagctctg

SEQ ID NO: 462696 - DNA, 120 bp, Artificial Sequence
  ENSG00000157741_86 (sequence is synthesized)
cactgaaggggtgagcactacacacagtcagctggatactcttgtagccattgcacctttgtaattcatgcttcttcaacccatgaaagaggtggagccatcagctgctcaggttgtaag

SEQ ID NO: 462697 - DNA, 120 bp, Artificial Sequence
  ENSG00000157741_87 (sequence is synthesized)
aaaatgggagacggaaggcaggattcactttctaactgggtcggggtggggaaggtcagggtagaaggaaacatgttttccccagctcccaggaggagacgaagatcattttatcccacc

SEQ ID NO: 462698 - DNA, 120 bp, Artificial Sequence
  ENSG00000157741_88 (sequence is synthesized)
ttccatccctgtatattaagtagtactactacatagaattttcccgttatcgtttaaaataatagcaacaggaaaagaaaaatggatgctgcagttttagttggggctaaatgctgagca

SEQ ID NO: 462699 - DNA, 120 bp, Artificial Sequence
  ENSG00000157741_89 (sequence is synthesized)
acgattgttggagtgtgtgtgtaaatttaaattgtagcacatattcagggtcaggaaagcaaaatgttggggatgaggaaccagtgttaccaggttcaagtgagttagtagaaagcacca

SEQ ID NO: 462700 - DNA, 120 bp, Artificial Sequence
  ENSG00000157741_90 (sequence is synthesized)
ggttcaagtgagttagtagaaagcaccaggtccaagcagacaaagcatctggttaatttccagaattggctaaggtccactgaatctctaatgatagggtgtgtgtgtgtgtgtgtgtgt

SEQ ID NO: 462701 - DNA, 120 bp, Artificial Sequence
  ENSG00000157741_91 (sequence is synthesized)
ggatttttgttgctttttccagataaggccttagtagcctctaaatatcaactatgcagataaacatactccttttttttttcacatgtccctgtcttttccattctcagataacaaatg

SEQ ID NO: 462702 - DNA, 120 bp, Artificial Sequence
  ENSG00000157741_92 (sequence is synthesized)
ttaagacccaaagaaataaggcataagggtttttgttgaatgtgtgtttgttcttctagggaaaattaacagaagcataaaatagagatactttgtgtgttcatctatcgtaaaatgtga

SEQ ID NO: 462703 - DNA, 120 bp, Artificial Sequence
  ENSG00000157741_93 (sequence is synthesized)
actctgtattcaaaaactatctacagatgctttcactggtgcaaagctgtagttagtatcatggaatgtctttgggttgttaatgataaaatcatcccagtgttcaattctgagagtttt

SEQ ID NO: 462704 - DNA, 120 bp, Artificial Sequence
  ENSG00000157741_94 (sequence is synthesized)
agattatatgacacaatgttcaggtttatagagctgaatgggtgatcaaactctaattaaaaatagctttgaatattaatgttgaattcttctttcttggtttcctttagtcttcattct

SEQ ID NO: 462705 - DNA, 120 bp, Artificial Sequence
  ENSG00000157741_95 (sequence is synthesized)
ttattcagagctcttaatcatattgctacactagaatatgaattgtatattaggagtctggggaggaaaggttaaattgtcttttacatcctcttctcactcactctggcaacctatcct

SEQ ID NO: 462706 - DNA, 120 bp, Artificial Sequence
  ENSG00000157741_96 (sequence is synthesized)
gtgtccccatagaactgagaagtaaagccctgtgcaggcctgctttagaagactttacatcccagcagaggattcaggcagggactctcaggattttaatcagactgcctttgaataatg

SEQ ID NO: 462707 - DNA, 120 bp, Artificial Sequence
  ENSG00000157741_97 (sequence is synthesized)
tgatattaaattttatttttctcatagactctcaaagtaccacttgcttgaaagtagctacttgtgatctttaatttccttatattgtgatagttctacttttcagtctttcctgtgtat

SEQ ID NO: 462708 - DNA, 120 bp, Artificial Sequence
  ENSG00000157741_98 (sequence is synthesized)
ctccatttcatagtgcgttagtacttaaacttcggacacttttccaaactgttaaacaagtcaggaatgcttttcagaatcgcagtagtattattagggtctctgtgtctaggacttaca

SEQ ID NO: 462709 - DNA, 120 bp, Artificial Sequence
  ENSG00000157741_99 (sequence is synthesized)
gtcatcagtggtcatcactgggactagaggtgttcttttttttcctcttctcctttgtattaaaaaatagattttgctactgtataatgcggcatttcatgacttcctcttgttactttt

SEQ ID NO: 462710 - DNA, 120 bp, Artificial Sequence
  ENSG00000157741_100 (sequence is synthesized)
caaggttattctaaagagatggagatcttcattagaggctatttctcataatagtctgccttgcttattttcatactccccctgaaataagcctacttttgcaaacaggccatatgaatc

SEQ ID NO: 462711 - DNA, 120 bp, Artificial Sequence
  ENSG00000157741_101 (sequence is synthesized)
aaattttatgtttgttcctcacaaaattttctacacattatttgttcccactttgctaataataatataatgattttattgtaaatctgtgttttaaatattttataacagagcactaat

SEQ ID NO: 462712 - DNA, 120 bp, Artificial Sequence
  ENSG00000157741_102 (sequence is synthesized)
ggaaacctaataaatacaaacaagataactattacccaagataacatggaaatacttctgtttttgaagttaacaacaccgtctgccctcaaagcacatttaggagtatcaaccaagacc

SEQ ID NO: 462713 - DNA, 120 bp, Artificial Sequence
  ENSG00000157741_103 (sequence is synthesized)
agccagttgacatgtttttctgtgtggcaacctgcccttaaattgtcagatcttaactatcttgtgtttgctgtgcttgcagccataagctttcctccttttttgcttatccctgctgtt

SEQ ID NO: 462714 - DNA, 120 bp, Artificial Sequence
  ENSG00000157741_104 (sequence is synthesized)
tgtagggttagtgtgccctctgtcagaaaattgggttttctttactatacctgcaaaattaccaagggttaccccaatattgtctagaggaattaaaaagaacttattctcagttgacaa

SEQ ID NO: 462715 - DNA, 120 bp, Artificial Sequence
  ENSG00000157741_105 (sequence is synthesized)
aagtattactgttatacatagttaattggaaagttggccaactttggtcacctatttttgagtcttggctatgcctttgtaattagttacatataccttctgagaccttcagataatcaa

SEQ ID NO: 462716 - DNA, 120 bp, Artificial Sequence
  ENSG00000157741_106 (sequence is synthesized)
tgggcctttccccattagaggtaggttcccagcctacaagtatttcctgtgatccatggcaagcctccagagaaaagattcaagctttgcactgcccttttgttgattgtcattgaaaac

SEQ ID NO: 462717 - DNA, 120 bp, Artificial Sequence
  ENSG00000157741_107 (sequence is synthesized)
ttactttatttcagaaagtatcaaaaataccaaattggtctttcagagagtatgtaaatctggggcttgcccttggatttcacttgttaaacaccctcaaacttaaaagaagaaaataga

SEQ ID NO: 462718 - DNA, 120 bp, Artificial Sequence
  ENSG00000157741_108 (sequence is synthesized)
tctccagctggtgaaaattttgtgccccaaataatatattaatccaagtctaccaaggtaactaagtaatggatgttttctctcttttattacaagcaagaaagttcatttgcagttgta

SEQ ID NO: 462719 - DNA, 120 bp, Artificial Sequence
  ENSG00000157741_109 (sequence is synthesized)
aaaatgattaccgaactccagacctatttgctataactgattggaaataatgattctgatttttagtctgggtaaacacatacttcggtgtgaattttgataagggaaagacttgtttgg

SEQ ID NO: 462720 - DNA, 120 bp, Artificial Sequence
  ENSG00000157741_110 (sequence is synthesized)
tagcccaaggaaaaacaggatgtatttatacagtgaatgttcactctgcagaggaacttccctccagttacatcttcctcatacattagccacctccacacttgacatagatgccaacat

SEQ ID NO: 462721 - DNA, 120 bp, Artificial Sequence
  ENSG00000157741_111 (sequence is synthesized)
gtttcaaaaccaatcttgaaggagcctaaagagttgatggtcctctaggtgaaagacaagaattactgtattgcatttgcttatagggaggtgtgtttttgctaacttgaagggatatac

SEQ ID NO: 462722 - DNA, 120 bp, Artificial Sequence
  ENSG00000157741_112 (sequence is synthesized)
tgtatttcaaataagtgtgtgacttaatattttgggatttttttttcctcctttaaaaactggacctgaacacaagctttgagttgatgtttgtaataatctcaggacctgaaagattgt

SEQ ID NO: 462723 - DNA, 120 bp, Artificial Sequence
  ENSG00000157741_113 (sequence is synthesized)
aagattgtagcatttagtgtgtcttaaaaattatgtactgtaccagccatggatttttgtaaatatacctgtctcccttttttgtattttagtaaaaaaaaaaaaaaataaatttaaata

SEQ ID NO: 462724 - DNA, 120 bp, Artificial Sequence
  ENSG00000157741_114 (sequence is synthesized)
tggtgatgacatgtgaatgggtgcgggtatgtgtgcgtgtgtgtttgtataaggctcttttgagatgaactggtgcttgtttaatttccagctcaaatcggagcaggaatatggacaaac

SEQ ID NO: 462725 - DNA, 120 bp, Artificial Sequence
  ENSG00000157741_115 (sequence is synthesized)
tgctgctactgaaccctgcactgagccgaggtatttccatttggttaactaaacgctagctaccaggaaatgacgcagaagtcacgttcttcttcccactgccatcttgcctttgcattc

SEQ ID NO: 462726 - DNA, 120 bp, Artificial Sequence
  ENSG00000157741_116 (sequence is synthesized)
tcagttctacgtgccctttgaactttaatggtaaaacatttcacactttggatggtttgcttgtctctagtttttagaaagctcttatcactccttcctaagaaaaaagaagggcaggta

SEQ ID NO: 462727 - DNA, 120 bp, Artificial Sequence
  ENSG00000157741_117 (sequence is synthesized)
aatttttttaaccaaaaaaaaatcacacatttcataaaaccctgatgaattttggatatgtgagagggcataaacattcctaaatatggacctgtgaatttagtaaattacccccatgaa

SEQ ID NO: 462728 - DNA, 120 bp, Artificial Sequence
  ENSG00000157741_118 (sequence is synthesized)
gttttttttttttttttaatttttttgcaacagccttgctcatattccaggtgtagctagcaaacccctgtttttgaagcaagagccttatttgattcagtgtagatgtttcctgtctat

SEQ ID NO: 462729 - DNA, 120 bp, Artificial Sequence
  ENSG00000157741_119 (sequence is synthesized)
tgattcagtgtagatgtttcctgtctatcctttgtgacagggccttttaatgagtgttttttctttttgtatatgttacgtgtttgttgttgtattaaataaagaggaatgtacatacta

SEQ ID NO: 462730 - DNA, 120 bp, Artificial Sequence
  ENSG00000157741_120 (sequence is synthesized)
gacttcagaacacatttatctattgaaataattgtcagggtactctctaaacacctactaaatccacactgtgacacataatggcctgggattctggtagtagggaagcatgaaggctca

SEQ ID NO: 462731 - DNA, 120 bp, Artificial Sequence
  ENSG00000157741_121 (sequence is synthesized)
gggattttcctttgttcctgggccttctacctgccagtctttttctccacctcttaatgtccatctgcatttgtaatctacagccctctgtgtcctgagtttaccaggacagatccatat

SEQ ID NO: 462732 - DNA, 120 bp, Artificial Sequence
  ENSG00000157741_122 (sequence is synthesized)
gcacacccaccctcgctgcactgcagagtgttttattccacaaaattaacctattcttgaggtcttctgttcaaaaccgtgtatttccttagtgatgtgattactagagaaagatctttt

SEQ ID NO: 462733 - DNA, 120 bp, Artificial Sequence
  ENSG00000157741_123 (sequence is synthesized)
atcccctccacatacaacaaaaaggcaagttttttctgtggtcacctttttggttgaatattggtcaattccagaacagtttcatttttccctacaacgtagggctacttctctgtagcc

SEQ ID NO: 462734 - DNA, 67 bp, Artificial Sequence
  ENSG00000157741_124 (sequence is synthesized)
ttcatttttccctacaacgtagggctacttctctgtagcctgcaagggtggcattaacggttattaa

SEQ ID NO: 462735 - DNA, 67 bp, Artificial Sequence
  ENSG00000157741_125 (sequence is synthesized)
ttagccaggcatggatgccagagaggcggaggttgtagtaagtggagatcatgccaccgccctccag

SEQ ID NO: 462736 - DNA, 120 bp, Artificial Sequence
  ENSG00000157741_126 (sequence is synthesized)
ggaggttgtagtaagtggagatcatgccaccgccctccagcctgggggacagaacagaccttgtttccagaaaaaaaaaaggggggggttattaaaatataaaattagcaagttactgag

SEQ ID NO: 462737 - DNA, 120 bp, Artificial Sequence
  ENSG00000157741_127 (sequence is synthesized)
aatttactgaacactctaattcaatattctgctgagaggtctgtttaatatcttttgggcaacattataaaattcctactctccttgtatgcagttatataggaattttttagtttttag

SEQ ID NO: 462738 - DNA, 120 bp, Artificial Sequence
  ENSG00000157741_128 (sequence is synthesized)
gaaggacagttcattattacggttgacccttggaacaacacgggagttagggatttcaccccctcatcccacacagtcagaaatccatgtgtaactttcagctctcccagaacttcactg

SEQ ID NO: 462739 - DNA, 120 bp, Artificial Sequence
  ENSG00000157741_129 (sequence is synthesized)
agaacttcactgctagtagtctactgttgacctgaagccttactgataacataaatagttcatgaacacattttatatgttttatgtacagtatactgtattcttacaataaagtaagct

SEQ ID NO: 462740 - DNA, 120 bp, Artificial Sequence
  ENSG00000157741_130 (sequence is synthesized)
atgttaagaaaatcataaggaagagaaattatatttactattcattaggttgaagtgaatcatcataaaggtcttcatcctcaggggtcaactgtatatcagagatgcattgagttggtt

SEQ ID NO: 462741 - DNA, 120 bp, Artificial Sequence
  ENSG00000157741_131 (sequence is synthesized)
gtggtttttggttctgttttttttagtataaattctaagttgtttggtttcatatattacaggtttactttgttgcaagagtttttgttgtctttgaaataaattttatgtacatacgta

SEQ ID NO: 462742 - DNA, 120 bp, Artificial Sequence
  ENSG00000157741_132 (sequence is synthesized)
gacactggggttttatatacagtttttaagctatctataccacatttccatcttaatgaaatttttaagaggaagtcagttgtgttgggttatgtgcatacacatacattaacataagta

SEQ ID NO: 462743 - DNA, 120 bp, Artificial Sequence
  ENSG00000157741_133 (sequence is synthesized)
aattttcaaaaacgtgctctagttttagaaggccttcgaagtcaggtgctgtgcctgcattacataaatcagttttcatttttgaactaaaagggctcaaatctggatttaaagatgact

SEQ ID NO: 462744 - DNA, 80 bp, Artificial Sequence
  ENSG00000157764_0 (sequence is synthesized)
ttcccccaatcccctcaggctcggctgcgcccggggccgcgggccggtacctgaggtggcccaggcgccctccgcccgcg

SEQ ID NO: 462745 - DNA, 120 bp, Artificial Sequence
  ENSG00000157764_1 (sequence is synthesized)
ccgctcctccgcctccgcctccgcctccgcctcccccagctctccgcctcccttccccctccccgcccgacagcggccgctcgggccccggctctcggttataagatggcggcgctgagc

SEQ ID NO: 462746 - DNA, 120 bp, Artificial Sequence
  ENSG00000157764_2 (sequence is synthesized)
tggtggcggcgcggagccgggccaggctctgttcaacggggacatggagcccgaggccggcgccggcgccggcgccgcggcctcttcggctgcggaccctgccattccggaggaggtgtg

SEQ ID NO: 462747 - DNA, 120 bp, Artificial Sequence
  ENSG00000157764_3 (sequence is synthesized)
gaggtgtggaatatcaaacaaatgattaagttgacacaggaacatatagaggccctattggacaaatttggtggggagcataatccaccatcaatatatctggaggcctatgaagaatac

SEQ ID NO: 462748 - DNA, 120 bp, Artificial Sequence
  ENSG00000157764_4 (sequence is synthesized)
accagcaagctagatgcactccaacaaagagaacaacagttattggaatctctggggaacggaactgatttttctgtttctagctctgcatcaatggataccgttacatcttcttcctct

SEQ ID NO: 462749 - DNA, 120 bp, Artificial Sequence
  ENSG00000157764_5 (sequence is synthesized)
tctagcctttcagtgctaccttcatctctttcagtttttcaaaatcccacagatgtggcacggagcaaccccaagtcaccacaaaaacctatcgttagagtcttcctgcccaacaaacag

SEQ ID NO: 462750 - DNA, 120 bp, Artificial Sequence
  ENSG00000157764_6 (sequence is synthesized)
aggacagtggtacctgcaaggtgtggagttacagtccgagacagtctaaagaaagcactgatgatgagaggtctaatcccagagtgctgtgctgtttacagaattcaggatggagagaag

SEQ ID NO: 462751 - DNA, 120 bp, Artificial Sequence
  ENSG00000157764_7 (sequence is synthesized)
aaaccaattggttgggacactgatatttcctggcttactggagaagaattgcatgtggaagtgttggagaatgttccacttacaacacacaactttgtacgaaaaacgtttttcacctta

SEQ ID NO: 462752 - DNA, 120 bp, Artificial Sequence
  ENSG00000157764_8 (sequence is synthesized)
gcattttgtgacttttgtcgaaagctgcttttccagggtttccgctgtcaaacatgtggttataaatttcaccagcgttgtagtacagaagttccactgatgtgtgttaattatgaccaa

SEQ ID NO: 462753 - DNA, 120 bp, Artificial Sequence
  ENSG00000157764_9 (sequence is synthesized)
cttgatttgctgtttgtctccaagttctttgaacaccacccaataccacaggaagaggcgtccttagcagagactgccctaacatctggatcatccccttccgcacccgcctcggactct

SEQ ID NO: 462754 - DNA, 120 bp, Artificial Sequence
  ENSG00000157764_10 (sequence is synthesized)
attgggccccaaattctcaccagtccgtctccttcaaaatccattccaattccacagcccttccgaccagcagatgaagatcatcgaaatcaatttgggcaacgagaccgatcctcatca

SEQ ID NO: 462755 - DNA, 120 bp, Artificial Sequence
  ENSG00000157764_11 (sequence is synthesized)
gctcccaatgtgcatataaacacaatagaacctgtcaatattgatgacttgattagagaccaaggatttcgtggtgatggaggatcaaccacaggtttgtctgctaccccccctgcctca

SEQ ID NO: 462756 - DNA, 120 bp, Artificial Sequence
  ENSG00000157764_12 (sequence is synthesized)
ttacctggctcactaactaacgtgaaagccttacagaaatctccaggacctcagcgagaaaggaagtcatcttcatcctcagaagacaggaatcgaatgaaaacacttggtagacgggac

SEQ ID NO: 462757 - DNA, 120 bp, Artificial Sequence
  ENSG00000157764_13 (sequence is synthesized)
tcgagtgatgattgggagattcctgatgggcagattacagtgggacaaagaattggatctggatcatttggaacagtctacaagggaaagtggcatggtgatgtggcagtgaaaatgttg

SEQ ID NO: 462758 - DNA, 120 bp, Artificial Sequence
  ENSG00000157764_14 (sequence is synthesized)
aatgtgacagcacctacacctcagcagttacaagccttcaaaaatgaagtaggagtactcaggaaaacacgacatgtgaatatcctactcttcatgggctattccacaaagccacaactg

SEQ ID NO: 462759 - DNA, 120 bp, Artificial Sequence
  ENSG00000157764_15 (sequence is synthesized)
gctattgttacccagtggtgtgagggctccagcttgtatcaccatctccatatcattgagaccaaatttgagatgatcaaacttatagatattgcacgacagactgcacagggcatggat

SEQ ID NO: 462760 - DNA, 120 bp, Artificial Sequence
  ENSG00000157764_16 (sequence is synthesized)
tacttacacgccaagtcaatcatccacagagacctcaagagtaataatatatttcttcatgaagacctcacagtaaaaataggtgattttggtctagctacagtgaaatctcgatggagt

SEQ ID NO: 462761 - DNA, 120 bp, Artificial Sequence
  ENSG00000157764_17 (sequence is synthesized)
gggtcccatcagtttgaacagttgtctggatccattttgtggatggcaccagaagtcatcagaatgcaagataaaaatccatacagctttcagtcagatgtatatgcatttggaattgtt

SEQ ID NO: 462762 - DNA, 120 bp, Artificial Sequence
  ENSG00000157764_18 (sequence is synthesized)
ctgtatgaattgatgactggacagttaccttattcaaacatcaacaacagggaccagataatttttatggtgggacgaggatacctgtctccagatctcagtaaggtacggagtaactgt

SEQ ID NO: 462763 - DNA, 120 bp, Artificial Sequence
  ENSG00000157764_19 (sequence is synthesized)
ccaaaagccatgaagagattaatggcagagtgcctcaaaaagaaaagagatgagagaccactctttccccaaattctcgcctctattgagctgctggcccgctcattgccaaaaattcac

SEQ ID NO: 462764 - DNA, 120 bp, Artificial Sequence
  ENSG00000157764_20 (sequence is synthesized)
cgcagtgcatcagaaccctccttgaatcgggctggtttccaaacagaggattttagtctatatgcttgtgcttctccaaaaacacccatccaggcagggggatatggtgcgtttcctgtc

SEQ ID NO: 462765 - DNA, 120 bp, Artificial Sequence
  ENSG00000157764_21 (sequence is synthesized)
cactgaaacaaatgagtgagagagttcaggagagtagcaacaaaaggaaaataaatgaacatatgtttgcttatatgttaaattgaataaaatactctctttttttttaaggtgaaccaa

SEQ ID NO: 462766 - DNA, 120 bp, Artificial Sequence
  ENSG00000157764_22 (sequence is synthesized)
agaacacttgtgtggttaaagactagatataatttttccccaaactaaaatttatacttaacattggatttttaacatccaagggttaaaatacatagacattgctaaaaattggcagag

SEQ ID NO: 462767 - DNA, 120 bp, Artificial Sequence
  ENSG00000157764_23 (sequence is synthesized)
cctcttctagaggctttactttctgttccgggtttgtatcattcacttggttattttaagtagtaaacttcagtttctcatgcaacttttgttgccagctatcacatgtccactagggac

SEQ ID NO: 462768 - DNA, 120 bp, Artificial Sequence
  ENSG00000157764_24 (sequence is synthesized)
tccagaagaagaccctacctatgcctgtgtttgcaggtgagaagttggcagtcggttagcctgggttagataaggcaaactgaacagatctaatttaggaagtcagtagaatttaataat

SEQ ID NO: 462769 - DNA, 120 bp, Artificial Sequence
  ENSG00000157764_25 (sequence is synthesized)
ttattattcttaataatttttctataactatttctttttataacaatttggaaaatgtggatgtcttttatttccttgaagcaataaactaagtttctttttataaattttgagtgcagg

SEQ ID NO: 462770 - DNA, 120 bp, Artificial Sequence
  ENSG00000157764_26 (sequence is synthesized)
cttttaaatagctttttttaaaatacattaaggatgtctcgctcatgtagaagtcaaattttgttgcaaacgcattgctcccttcacacccaatctctcccctgcaaaaaatcttcacag

SEQ ID NO: 462771 - DNA, 120 bp, Artificial Sequence
  ENSG00000157764_27 (sequence is synthesized)
aattctgtgagaacttttaggtgtgtttttctttgagatacctctggttgccaaacaccaggtaatagattttttaaagttgttattagattattcttacctctcatgatgcatatttta

SEQ ID NO: 462772 - DNA, 120 bp, Artificial Sequence
  ENSG00000157764_28 (sequence is synthesized)
gcaatcaccttatcattgtgtctcatgttctgtcctccttatattctttgcccagcaagattctacttatgatgaatgaatgctcttctccttttttcattcaatggtatgaagtatttg

SEQ ID NO: 462773 - DNA, 120 bp, Artificial Sequence
  ENSG00000157764_29 (sequence is synthesized)
ttagggttctttagtacttacactttgttgtgtagaaaatgactgtaatgtggtggtcagtgtattcttactgtgattcagagggaatcaaaagtagaaagcaacagcacgtggtcctat

SEQ ID NO: 462774 - DNA, 120 bp, Artificial Sequence
  ENSG00000157764_30 (sequence is synthesized)
caaagatttggccatctctgcttcactgtcagcctcttaactatatcttcacttactcaatttggttttgtcatgatttttaaatgtagccaatagatcaaggttcttccagtaaacaca

SEQ ID NO: 462775 - DNA, 120 bp, Artificial Sequence
  ENSG00000157764_31 (sequence is synthesized)
tatctgcataaatgcctccttgaagtcaataaagaaggaaattgagaagactttaaattaatgataatttagtttttaagtacccacaaataaatttttgaaacattttctttatttgaa

SEQ ID NO: 462776 - DNA, 120 bp, Artificial Sequence
  ENSG00000157764_32 (sequence is synthesized)
tacttagatgtcatccaggaaaatcactcaataataattacggcaaatctttaacccctcatttgggtagcttaagataagtaatgccattatgaatcagaattgattcatgactttagt

SEQ ID NO: 462777 - DNA, 120 bp, Artificial Sequence
  ENSG00000157764_33 (sequence is synthesized)
taagaaaatgaaaaggaacatttcacgtatttttaaaaatgatactaaggaataaagaagtacaactattggaaaatatctaagtatatgatttttaaatcctccagtggcattaaatat

SEQ ID NO: 462778 - DNA, 120 bp, Artificial Sequence
  ENSG00000157764_34 (sequence is synthesized)
atgattattagtaattgttagatagggttttattcattcacaaatagaagactagcaagcatgtaactaacaaagtttttacaaaattgactttgtggaatgctccaaatgtttggccat

SEQ ID NO: 462779 - DNA, 120 bp, Artificial Sequence
  ENSG00000157764_35 (sequence is synthesized)
tttgaggcacaaggtcaggggtctctttattgatagagctccttctataatttcccagcatacctgcctcacagttatcttcctttcattgttcactctctttttcttctcaatgccatc

SEQ ID NO: 462780 - DNA, 120 bp, Artificial Sequence
  ENSG00000157764_36 (sequence is synthesized)
ctgcctaggctcccatcatctgcatctgacacctttcctttctttctttactagtctcctttgcgatgggtgtggctaagctctgtagagccactcagaaactcattgttccattctgta

SEQ ID NO: 462781 - DNA, 120 bp, Artificial Sequence
  ENSG00000157764_37 (sequence is synthesized)
gccagtaaaacatgcctccaaagtgtcacagagtaattctactctctcttttaaattaggtccaccggaaatgttagtgaaaggacattaaaaatgtgacaggtgacatgtttagctaac

SEQ ID NO: 462782 - DNA, 120 bp, Artificial Sequence
  ENSG00000157764_38 (sequence is synthesized)
atggatctggagaaataggaagcagtagaattaaatgtttccctttcaggtttaattgtatttgttcttgggttttgttttatactgagttttaaatatattctccaaataaaaacatta

SEQ ID NO: 462783 - DNA, 120 bp, Artificial Sequence
  ENSG00000157764_39 (sequence is synthesized)
ttttttctaaccatatgtagagttaatctctttgactaagtaattgaaacaaaagaacatttgttcttttgtgactgcttttttcctaaaacctgagccctcttttttttttttgaaatt

SEQ ID NO: 462784 - DNA, 120 bp, Artificial Sequence
  ENSG00000157764_40 (sequence is synthesized)
aaggaaacctttttataaatttgttttgcattttaaaagttttactaatcaatgatgaggaaaaagatttgtcttcttgattttaaatagtttcaggatcacaggatgtaatcagatgct

SEQ ID NO: 462785 - DNA, 120 bp, Artificial Sequence
  ENSG00000157764_41 (sequence is synthesized)
tccagtttatttattttcaggtattacactagccatttaatcttttttatttatttattttcttcctgcccctcggatggcatataccagccatttagatactaaactctaatagttaaa

SEQ ID NO: 462786 - DNA, 120 bp, Artificial Sequence
  ENSG00000157764_42 (sequence is synthesized)
ccaatagttaaaattgtcctctctaaaacattggctatttaatataccagcttaaatggcctttctctcaagtgagtcactcttagtttaagaaaattatgtgcctttttaaaaaatatt

SEQ ID NO: 462787 - DNA, 120 bp, Artificial Sequence
  ENSG00000157764_43 (sequence is synthesized)
atgaaatggtacttcatgacagaaacattttatcagttatagtcttatttgattgaaaattgttgagcatttctgtaaaactttttactttactaaatatttcatctttcctgtgactgt

SEQ ID NO: 462788 - DNA, 120 bp, Artificial Sequence
  ENSG00000157764_44 (sequence is synthesized)
ctgttttctcaaagaatttaaaagactcgatgtgtctatgccagaatgtttctcatccttttgaaactgcctgggccaggcgtagtggctcacgctgtaatcccagcacttttggaggcc

SEQ ID NO: 462789 - DNA, 120 bp, Artificial Sequence
  ENSG00000157764_45 (sequence is synthesized)
gagaccagcctggacaacatggcgaaacggtgtctctacagaaaaatttaaaaattagccaagcatagtggtgcacaactgtagccccagccactcgggaggctgacgtgggaggatccc

SEQ ID NO: 462790 - DNA, 120 bp, Artificial Sequence
  ENSG00000157764_46 (sequence is synthesized)
aagcatagtggtgcacaactgtagccccagccactcgggaggctgacgtgggaggatcccttgaacctgggggcggaggctgctgtgagccttcatcatgccactgcactccagcctggg

SEQ ID NO: 462791 - DNA, 120 bp, Artificial Sequence
  ENSG00000157764_47 (sequence is synthesized)
aagaaaaaaagaaactgcttgaaagtcatgacgaagaatgtcaggaggggacttattctggctgcagttgactttctccttaaatgtcaagtagtgattgatttggataagaagtaaact

SEQ ID NO: 462792 - DNA, 120 bp, Artificial Sequence
  ENSG00000157764_48 (sequence is synthesized)
gttacttttcataacatactttaaggaatttatcaaattctatgtataatgcccattaaaatatactccattctggagtaaagggtaagagtaatatttttaaactagttaataaagtct

SEQ ID NO: 462793 - DNA, 120 bp, Artificial Sequence
  ENSG00000157764_49 (sequence is synthesized)
ttagctttcacataaaccatgatatttgaggtgtctaaaatcacagggtcttttttttttttttcagtcttcccagttgttctctgctctattcctaaataaagttaacttgaaaatgca

SEQ ID NO: 462794 - DNA, 120 bp, Artificial Sequence
  ENSG00000157764_50 (sequence is synthesized)
taccaatcccggactcccagtcccctcctacattctgtccccagtgaaatagtgtttgattttgagcctggcccagtgttcagaggatcaaccacaggtttgtctgctaccccccctgcc

SEQ ID NO: 462795 - DNA, 120 bp, Artificial Sequence
  ENSG00000157764_51 (sequence is synthesized)
ccttcaagtagccaccatcatggcagcatctgctcttatttcttaagtcttgtgttcgtacaatttgttaacatcaaaacacagttctgttcctcaaatctttttttaaagatacaaaat

SEQ ID NO: 462796 - DNA, 120 bp, Artificial Sequence
  ENSG00000157764_52 (sequence is synthesized)
ttccaatgcataagctgatgtggaacagaatggaatttcccatccaacaaaagaggaaagaatgttttaggaaccagaattctctgctgccagtgtttcttcaacaaaaataccacgagc

SEQ ID NO: 462797 - DNA, 120 bp, Artificial Sequence
  ENSG00000157764_53 (sequence is synthesized)
atacaagtctgcccagtcccaggaagaaagaggagagaccctgaattctgaccttttgatggtcaggcatgatggaaagaaactgctgctacagcttgggagatttgctatggaaagtct

SEQ ID NO: 462798 - DNA, 120 bp, Artificial Sequence
  ENSG00000157764_54 (sequence is synthesized)
gccagtcaactttgcccttctaaccaccagatcaatttgtggctgatcatctgatggggcagtttcaatcaccaagcatcgttctctttcctgttctggaattttgttttggagctcttt

SEQ ID NO: 462799 - DNA, 120 bp, Artificial Sequence
  ENSG00000157764_55 (sequence is synthesized)
cccctagtgaccaccagttagtttctgagggatggaacaaaaatgcagcttgccctttctatgtggtgcgtgttcaggccttgacagattttatcaaaaggaaactattttatttaaatg

SEQ ID NO: 462800 - DNA, 120 bp, Artificial Sequence
  ENSG00000157764_56 (sequence is synthesized)
gaggctgagtggtgagtagatgtgtcttggtatggaggaaaagggcatgctgcatcttcttcctgacctccggggtctctggccttttgtttccttgctcactgaggggtctgtctaacc

SEQ ID NO: 462801 - DNA, 120 bp, Artificial Sequence
  ENSG00000157764_57 (sequence is synthesized)
aagcaggctagatagtgctggcacacattgccttctttctcattgggtccagcaatgaagataagtgtttgggttttttttttttcctccacaatgtagcaaattctcaggaaatacagt

SEQ ID NO: 462802 - DNA, 120 bp, Artificial Sequence
  ENSG00000157764_58 (sequence is synthesized)
ttatatcttcctcctatgctcttccagtcaccaactacttatgcggctactttgtccagggcacaaaatgccgtggcagtatctaactaaacccccacaaaactgcttaataacagtttt

SEQ ID NO: 462803 - DNA, 120 bp, Artificial Sequence
  ENSG00000157764_59 (sequence is synthesized)
gataatttaaatataaggtacaggttttaatttctgagtttcttcttttctatttttattaaaaagaaaataattttcagatttaattgaattggaaaaaaacaatacttcccaccagaa

SEQ ID NO: 462804 - DNA, 120 bp, Artificial Sequence
  ENSG00000157764_60 (sequence is synthesized)
atacttcccaccagaattatatatcctgaaaattgtatttttgttatataaacaacttttaagaaagatcattatccttttctctacctaaatatgaggagtcttagcataatgacaaat

SEQ ID NO: 462805 - DNA, 120 bp, Artificial Sequence
  ENSG00000157764_61 (sequence is synthesized)
atttataatttttcaattaatggtacttgctggatccacactaacatctttgctaataatctcattgtttcttccaactgattcctaacactatatcccacatcttctttctagtctttt

SEQ ID NO: 462806 - DNA, 120 bp, Artificial Sequence
  ENSG00000157764_62 (sequence is synthesized)
atctagaatatgcaacctaaaataaaaatggtggcgtctccattcattctccttcttccttttttcccaagcctggtcttcaaaaggttgggcaatttggcagctgaattcccagacaga

SEQ ID NO: 462807 - DNA, 120 bp, Artificial Sequence
  ENSG00000157764_63 (sequence is synthesized)
gaatagagcaattttagggatattaggactgagggagggtgtgggaaagctgtcatcagttgtttttatagaaagaactggcattcattaagaacctaaatcttatctttgcacaaatgg

SEQ ID NO: 462808 - DNA, 120 bp, Artificial Sequence
  ENSG00000157764_64 (sequence is synthesized)
aaaatataacctagttatagcttcctttggcctttattaaagggtaatatcaatcacagtcatagcaaagaaagcggatgtattaatggcaaattaatggaaaacctcccttatcaggaa

SEQ ID NO: 462809 - DNA, 120 bp, Artificial Sequence
  ENSG00000157764_65 (sequence is synthesized)
tctagactcagaatttaggaacacaaatcaaatcagaccaaccaagctatagccaaggacttgaaagaaattaaacaagacccagaataaatcaaggaattagaaattgttatttaaaaa

SEQ ID NO: 462810 - DNA, 120 bp, Artificial Sequence
  ENSG00000157764_66 (sequence is synthesized)
tttcagattgtaactccaggccctgctgtctatattgcagccactaaaagctcactaccattagatttttgctaacatacatgtattcagaagaaagcctattgaaattttcattgtctt

SEQ ID NO: 462811 - DNA, 120 bp, Artificial Sequence
  ENSG00000157764_67 (sequence is synthesized)
gtaaaaggttgtcctagtaaaatggaaaagatccttaagttattaatcagtttgaaaagcaaatttgtttttaagttttacatcagcagggcagtgtcttacaaaattcagaaattgcaa

SEQ ID NO: 462812 - DNA, 120 bp, Artificial Sequence
  ENSG00000157764_68 (sequence is synthesized)
aggtggaaataattcacgctgatttgaagaacatcttctgtgcaataatactgcctctcttgaaaagcattggctgttttttctttttaaatatatctctagatgcttttaaatgtggct

SEQ ID NO: 462813 - DNA, 120 bp, Artificial Sequence
  ENSG00000157764_69 (sequence is synthesized)
gtgttccctttaccaagattggcttcaagtttccgcaggtagagagacctgggcttgaacaagaggatgtgtttcatgtcctgctgaggaggtagaacatgtgcagcctgggtccgggac

SEQ ID NO: 462814 - DNA, 120 bp, Artificial Sequence
  ENSG00000157764_70 (sequence is synthesized)
ttgcattttagaataggctggtatctcatttgaacgggggagcagacttgatctcaaatgaagctgtgcccaggagccaggcttagcatattgagatttttatagataccttaaaaaata

SEQ ID NO: 462815 - DNA, 120 bp, Artificial Sequence
  ENSG00000157764_71 (sequence is synthesized)
aaatatttaaacctctcttttcttcctttttctatgaaataggttttttctctagtttacaaatgacatgaaaataggttttatttgtgttttatctgctttattttttgatgcttagac

SEQ ID NO: 462816 - DNA, 120 bp, Artificial Sequence
  ENSG00000157764_72 (sequence is synthesized)
aacagttagacttactgagctcctaaaaaaacgaggaagaagtccttatttgtgaaaagcactttatgagtaattgtatagacagtatgtggctgcgtcactgatcatcttgtaagggtg

SEQ ID NO: 462817 - DNA, 120 bp, Artificial Sequence
  ENSG00000157764_73 (sequence is synthesized)
taacagtcttgtctgtaaagtggctgcagtgccttctgtagtgtgttttatttttggtagggagaggtgaagccttctgaaaaatttgagagcaactacagaggattgtttgtaactgtg

SEQ ID NO: 462818 - DNA, 120 bp, Artificial Sequence
  ENSG00000157764_74 (sequence is synthesized)
tagtattcctgatggacttttttcatcgttagagtcaaggacctagacttttgccactgaaataatattgaccaaaaaaatagtttataaaagggatttgtgaatagaaaattcagtgtg

SEQ ID NO: 462819 - DNA, 120 bp, Artificial Sequence
  ENSG00000157764_75 (sequence is synthesized)
atcatttgttgttaatgtgcaccttaaaagaagattctgtctagctgtcaaattctggttcccgaatatctcacccctgattgtatttgagatctagtagggcatactggggcattttag

SEQ ID NO: 462820 - DNA, 120 bp, Artificial Sequence
  ENSG00000157764_76 (sequence is synthesized)
aagataaaatcccatacaaatgatatatgctatatttatgttggtgttggagaagaaagagcagtatataaagaaataattcaagactgcagcactgtcaacctgaaactttgtaaatat

SEQ ID NO: 462821 - DNA, 120 bp, Artificial Sequence
  ENSG00000157764_77 (sequence is synthesized)
ttcctagcttctggtttggtgcggtgacagcactttcatcacaggatgttaccttgtattcaccaggcggagtgcgagctgctgcacatcctcctcagatctcacctgtccccactgtac

SEQ ID NO: 462822 - DNA, 120 bp, Artificial Sequence
  ENSG00000157764_78 (sequence is synthesized)
atccacccgccagctgcttgcaaacctcatctctagctttagttcgaaaccacattgcagggttcaggtgacctctacaaaaaactacctcttcagaatgaggtaatgaatagttattta

SEQ ID NO: 462823 - DNA, 120 bp, Artificial Sequence
  ENSG00000157764_79 (sequence is synthesized)
ttttaaaatatgaaaagtcaggagctctagaacatgacgatgatttaagattttaacttttttgtgtacttgtatttgagcactctcattttgtcctaaagggcattatacatttaagca

SEQ ID NO: 462824 - DNA, 120 bp, Artificial Sequence
  ENSG00000157764_80 (sequence is synthesized)
gtaatactgtaaaaaaatgtgttgctcggaatatctgaatgttgttgaaagtggtgccagaaccggtttaggggtacgtttcagaatcttaaccttgagtcaattgcatgaaattaaata

SEQ ID NO: 462825 - DNA, 120 bp, Artificial Sequence
  ENSG00000157764_81 (sequence is synthesized)
gctgtggtatcacttcactaacagtgatgtaattttaattttcagtaggcttggcatgacagtacatcctcataatgagtttgctgcagctttgtcacatgcacaggcattcatagaaag

SEQ ID NO: 462826 - DNA, 120 bp, Artificial Sequence
  ENSG00000157764_82 (sequence is synthesized)
accacccagctaagagggtagaatgattactctttttgcaagattctcttctttgtccaagttggcattgttagtgctaggaataccagcaccttgagacgagcagattccaaccattag

SEQ ID NO: 462827 - DNA, 120 bp, Artificial Sequence
  ENSG00000157764_83 (sequence is synthesized)
gctataaacaccatagccagagatggaaggtttactgtgagtatgaacagcaaatagcttacaggtcatgagttgaaatggtgtaggtgaggctctagaaaaataccttgacaatttgcc

SEQ ID NO: 462828 - DNA, 120 bp, Artificial Sequence
  ENSG00000157764_84 (sequence is synthesized)
aaatgatcttactgtgccttcatgatgcaataaaaaagctaacattttagcagaaatcagtgatttgtgaagagagcagccactctggtttaactcagctgtgttaataatttttagagt

SEQ ID NO: 462829 - DNA, 120 bp, Artificial Sequence
  ENSG00000157764_85 (sequence is synthesized)
gcaatttagactgcataggtaaatgcactaaagagtttatagccaaaatcacatttaacaatgagaaaacacacaggtaaattttcagtgaacaaaattatttttttaaagcacataatc

SEQ ID NO: 462830 - DNA, 120 bp, Artificial Sequence
  ENSG00000157764_86 (sequence is synthesized)
cctagtatagtcagatatatttatcacatagagcaactaggttgcaaatatagttcagtgacatttctagagaaactttttctactcccataggctcttcaaagcatggaacttttatac

SEQ ID NO: 462831 - DNA, 120 bp, Artificial Sequence
  ENSG00000157764_87 (sequence is synthesized)
aacagaaatgttgacagaaattgctgtagtttagggttgaagtactgtatgatgggcagcaatcatgtattaacttagaaggggaaattgaaatataggaccgaatttggttttatcagt

SEQ ID NO: 462832 - DNA, 120 bp, Artificial Sequence
  ENSG00000157764_88 (sequence is synthesized)
ttccagagtactgctgccaacctagacactgatttttcagagtttgaaatgtaaatttcttcccgggacttgattgcacatgaagctggactgcgttagtcatcctgtcccaaagcgctg

SEQ ID NO: 462833 - DNA, 120 bp, Artificial Sequence
  ENSG00000157764_89 (sequence is synthesized)
tgggggccagggtggaggtctcaaggcatcctttatgacctggccattggatgtaaaagaaaacatattccatgctgtggttcttgtatcttgtttcattcctcaccattgaaagagaaa

SEQ ID NO: 462834 - DNA, 120 bp, Artificial Sequence
  ENSG00000157764_90 (sequence is synthesized)
gtccatgtattgtctccagcacatccttgaaatgttatactgggatggattactgatgcccatcggtagttgagccccagaagagggtagtagcatctctgcctcaggtgatgatttgta

SEQ ID NO: 462835 - DNA, 120 bp, Artificial Sequence
  ENSG00000157764_91 (sequence is synthesized)
gcttggccagaggagagcggagtcaccagtatatctgtggtccatgttgctagctctggtaaaattaaaaatactggtaagatgtttgttttattagtacactagacagtaagctctgtt

SEQ ID NO: 462836 - DNA, 120 bp, Artificial Sequence
  ENSG00000157764_92 (sequence is synthesized)
ttgttgttttcaaataacctattttcacttttgtttgggcaaagacatttaaattgaaattcaattctaatttttgttaattgtggaaagggtaattaacagttcctatcaggtattttt

SEQ ID NO: 462837 - DNA, 120 bp, Artificial Sequence
  ENSG00000157764_93 (sequence is synthesized)
aatgtggaaaaggacagaaacccaactcctaaaatcttaaattaaggtaacagtgctttaaaaaaaaaaaatgcatggggcaattagtcggcaactcaatgagtgactaaagtactttta

SEQ ID NO: 462838 - DNA, 120 bp, Artificial Sequence
  ENSG00000157764_94 (sequence is synthesized)
tttaacatccacaacttcaactgttaagttttattaattactaaatcagctttattaaaatgttgacatttatttagctattttgaataattatagtgacttgacgagtgtgtatgagga

SEQ ID NO: 462839 - DNA, 120 bp, Artificial Sequence
  ENSG00000157764_95 (sequence is synthesized)
cacagccaatgtaagccagtgtatccattttttagaggtgcatttttttttaaagaattctgtagatagaagtgctctgaaaacaactaaaatatgtttattcatggtagtatcaaaaaa

SEQ ID NO: 462840 - DNA, 120 bp, Artificial Sequence
  ENSG00000157764_96 (sequence is synthesized)
tgtttgtacaaaccatctgcttctcccggccagccgagttcattctccagcaccgtgaccgctggttctcatgtacagcacatatgcgggagagttggcagaaaatttgtgaagagatgc

SEQ ID NO: 462841 - DNA, 120 bp, Artificial Sequence
  ENSG00000157764_97 (sequence is synthesized)
cgcaaaggaagggtctgttgacgggtgggattgggggttttgatgaagttgcttagtcctggttttgttttgaaaattactgcgttgcatttttgtgttaagtttttgaacccacgtgtg

SEQ ID NO: 462842 - DNA, 120 bp, Artificial Sequence
  ENSG00000157764_98 (sequence is synthesized)
ttttggtggagtatgagttggaagtcactgcaaactagcataaacaacaaagctcacagagtaggcacagatgtagagaacagagaccaaaatggggtgaggtggcagtaaatctaggat

SEQ ID NO: 462843 - DNA, 120 bp, Artificial Sequence
  ENSG00000157764_99 (sequence is synthesized)
agggaaaaattaatgtgagggtgggaaataaactgtaattacctgaaatcaaatgtaagagtgcaataagtatgctttttattctaagctgtgaacggtttttttaagaatcattccttc

SEQ ID NO: 462844 - DNA, 120 bp, Artificial Sequence
  ENSG00000157764_100 (sequence is synthesized)
ctaatacatttgtgtatgttccatagctgattaaaaccagctatatcaacatataatgcctttttattcatgttaatgaccaacgtaagtggctagcctttatgtcttatttatcttcat

SEQ ID NO: 462845 - DNA, 120 bp, Artificial Sequence
  ENSG00000157764_101 (sequence is synthesized)
gttatgttagtttacatacaggggtgtatgtctctgtgctgtccccttctcctgccttcattttaaaatgcatccatgggtcctccgtgtttcctttggccatgccacatatatagactc

SEQ ID NO: 462846 - DNA, 120 bp, Artificial Sequence
  ENSG00000157764_102 (sequence is synthesized)
agtttggccttcatgatatcgcctgatttttgaggactgtatcacagtgatatgtatttgtggtaatctcatttgttggttgtacatctgatcctttcctcaacatggcaattgctgcct

SEQ ID NO: 462847 - DNA, 120 bp, Artificial Sequence
  ENSG00000157764_103 (sequence is synthesized)
ttcctaagataggatcatacaactgatcaggggattgaatttgatcattcatcaacatgtgtctctgaattttattcagtagttgtcattgctctttggtttagaccaagaaaaaggaaa

SEQ ID NO: 462848 - DNA, 120 bp, Artificial Sequence
  ENSG00000157764_104 (sequence is synthesized)
tccccccttttcatgtattccttggtttgaggacatgactcctgtaagggagaggaaagggagatgcttcctgtttgaactgcagtgaattcacggttcctgtttcaccactccaaacct

SEQ ID NO: 462849 - DNA, 120 bp, Artificial Sequence
  ENSG00000157764_105 (sequence is synthesized)
tatggcgactcacacacacattcctcttttctgttactgccaaaggttcgggtttagtacacttcagttccactcaagcattgaaaaggttctcgtggagtctggggcgtgcccagtgaa

SEQ ID NO: 462850 - DNA, 120 bp, Artificial Sequence
  ENSG00000157764_106 (sequence is synthesized)
aagatggggactttttaattgtccacagacctctctatacctgctttgcaaaaattacaatggagtaactatttttaaagcttatttttcaattcataaaaaagacatttattttcagtc

SEQ ID NO: 462851 - DNA, 120 bp, Artificial Sequence
  ENSG00000157764_107 (sequence is synthesized)
aaatggatgatgtctccctcttttcccctattctcaatgtttgcttgaatcttttattattttttttaattctcccccatacccacttcctgatactttggttctctttcctgctcaggt

SEQ ID NO: 462852 - DNA, 120 bp, Artificial Sequence
  ENSG00000157764_108 (sequence is synthesized)
cccttcatttgtactttggagtttttctcatgtaaatttgtataacagaaaatattgttcagtttggatagaaagcatggagaataaaaaaagatagctgaaattcagattgaagaaatt

SEQ ID NO: 462853 - DNA, 120 bp, Artificial Sequence
  ENSG00000157764_109 (sequence is synthesized)
tatttctgtgtaaagttatttaaaaactgtattatataaaaggcaaaaaaagttctatgtacttgatgtgaatatgcgaatactgctataataaagattgactgcatggagaagtcttca

SEQ ID NO: 462854 - DNA, 120 bp, Artificial Sequence
  ENSG00000157764_110 (sequence is synthesized)
ttttagtatttctgtcttgttttagagagattgtttttctcctagattttgcaccagtaaataaagtatgtgtctatgtctatcatcagatatcttaaaggtcattaaattggccagaaa

SEQ ID NO: 462855 - DNA, 120 bp, Artificial Sequence
  ENSG00000157764_111 (sequence is synthesized)
actaaaagaaattatagttgtaatcaccaaatgaggcccctttttggcccatcctttccaaaaggtctatatttaaacatgcactacattttaaaattaagtctaaatatcccccaacct

SEQ ID NO: 462856 - DNA, 120 bp, Artificial Sequence
  ENSG00000157764_112 (sequence is synthesized)
taggatatgtttaacaacttttattttgtaaaaaatatcatcaaaggaaatattcactgttcgcatcaataaactattttgattagtttcaggactcctccaaaagtttctaacaaaaat

SEQ ID NO: 462857 - DNA, 120 bp, Artificial Sequence
  ENSG00000157764_113 (sequence is synthesized)
tatgggaaataaaaactgttcacagcagtcgggactcctaccattttattacagtaataatttttaaaggggaattcctccaggttaactagtcctcaaaaggattttattttcttttag

SEQ ID NO: 462858 - DNA, 120 bp, Artificial Sequence
  ENSG00000157764_114 (sequence is synthesized)
gtctcaaaaaaaaaaaattaacaaagaaatataagtggccagtaaacatatacaaaatgttcagccttactagttatcaaagaattgcaaattcaaaaaatagacatcattatttgcctc

SEQ ID NO: 462859 - DNA, 120 bp, Artificial Sequence
  ENSG00000157764_115 (sequence is synthesized)
ttagttggacaaaatctttttaaattggattatattaagagtagtggatgtattttcatcaaaggtttaatatcaatgaaaagtgaaagtgaacatgtatccaactaatagagaattgga

SEQ ID NO: 462860 - DNA, 120 bp, Artificial Sequence
  ENSG00000157764_116 (sequence is synthesized)
taaatttataccatcatatgtgattatataggagttaaaatggcatggtagaggtacatttattgatgtagaaaggtgtctttggtatatgaaatttttcaaagcagtatgtgtaagata

SEQ ID NO: 462861 - DNA, 120 bp, Artificial Sequence
  ENSG00000157764_117 (sequence is synthesized)
tttggtatatgaaatttttcaaagcagtatgtgtaagataccatattatggagctcatagaaatatataacataattttttatatgacagtattttaggccaggcacagtggctcacgcc

SEQ ID NO: 462862 - DNA, 120 bp, Artificial Sequence
  ENSG00000157764_118 (sequence is synthesized)
tttttccccaaataacttatcataccactcagatatttacatgcatttgatacaaataaatgggattaaagctgacatagactatttcagaatcagtcctgaaaaaatcaatattgggta

SEQ ID NO: 462863 - DNA, 120 bp, Artificial Sequence
  ENSG00000157764_119 (sequence is synthesized)
tgatttgacttctgctcttcagtgacatgcttcttgaactgctttcttttggatctcctggttaattagaaacatttccaacatttaaatgcttaaattaaggatcttttccccaaataa

SEQ ID NO: 462864 - DNA, 120 bp, Artificial Sequence
  ENSG00000157764_120 (sequence is synthesized)
cttattttatcacaccagtcagatatttacttgcatttggtacaaataagtgggattaaagctgacatagactatttcagaaccagtcctgaaaaaatcatgcaacagatcattttgagt

SEQ ID NO: 462865 - DNA, 120 bp, Artificial Sequence
  ENSG00000157764_121 (sequence is synthesized)
ctacaccttgagttcatcttttattaggtatagaagtatatgacttccacttatgaagaagcattgatatgtgagacaatggcaaacaatgtaaaaatagtatataattataatctacaa

SEQ ID NO: 462866 - DNA, 120 bp, Artificial Sequence
  ENSG00000157764_122 (sequence is synthesized)
tttatgatggagtatattgaagtatgtgatgaggacataaatgtattcatgtttacagaaggaagaatagtgaggaaaaagagagtgctcaggaaaacttaatgaagaaggtggtatttg

SEQ ID NO: 462867 - DNA, 120 bp, Artificial Sequence
  ENSG00000157764_123 (sequence is synthesized)
aactagactttaaagaattactacaatctgaacgggcctagggaatagaagcatggtgaaaggggaatggagaaacaacagatataaagggaataaacagatataaagggaatgaagatg

SEQ ID NO: 462868 - DNA, 120 bp, Artificial Sequence
  ENSG00000157764_124 (sequence is synthesized)
ttaggtttagaagctagtgaagaaaggtttatctaacttaagaactaccatgtgtaaaaccagattatggagagtcttggaattgaggccagaatttagacttaaaggtctttaagcaga

SEQ ID NO: 462869 - DNA, 120 bp, Artificial Sequence
  ENSG00000157764_125 (sequence is synthesized)
ttactaacttgatgaaaatggctttaaagaaaaaatcaattagcagtgaaatacagatggattgacagaaaatttagggtgaagaaggccaacctaggatgttgttggtagtgaaaactg

SEQ ID NO: 462870 - DNA, 120 bp, Artificial Sequence
  ENSG00000157764_126 (sequence is synthesized)
agagaggcagtgaagacaagttcaagtgctagaagtatggaaaagggatagatattcataaagcgtaaaagaaaaaaatgaacagtattattaatcagttgaggataaagctgagaagtg

SEQ ID NO: 462871 - DNA, 77 bp, Artificial Sequence
  ENSG00000157764_127 (sequence is synthesized)
aacagtattattaatcagttgaggataaagctgagaagtgactttaaaaataatgcaaaggcagccgggtgcggtgg

SEQ ID NO: 462872 - DNA, 120 bp, Artificial Sequence
  ENSG00000157764_128 (sequence is synthesized)
caatcatccacagagacctcaagagtaatagtatccttcctgaaatttgtctgcgaagtttgaaaacatcctgactttttcttctgcattttgtcttcacattatgtaaaaacagttttc

SEQ ID NO: 462873 - DNA, 120 bp, Artificial Sequence
  ENSG00000157764_129 (sequence is synthesized)
atgctaagttcgatatactgtaaagagaattaataaaggattgtgcatgcatgtataggagagcaggataccacagcctgcttttggtttctcgacaactgaacattacaagaaaatcta

SEQ ID NO: 462874 - DNA, 120 bp, Artificial Sequence
  ENSG00000157764_130 (sequence is synthesized)
tcagaagtctttacaatagtaggagtttttgattgcttgcttacattttatcagcactataaaactgatagttttgtagctatctattagtccctttcagacctctgaccttgctcagtg

SEQ ID NO: 462875 - DNA, 120 bp, Artificial Sequence
  ENSG00000157764_131 (sequence is synthesized)
gtagttgagatataactgaagactctaaattatataacaatgaggtgagaaaaacataatatttctcttccctaagtgcagactaagatactatctgcagcatcttcattccaatgaaga

SEQ ID NO: 462876 - DNA, 120 bp, Artificial Sequence
  ENSG00000157764_132 (sequence is synthesized)
gcctttactgctcgcccaggagtgccaagagaatatctgggcctacattgctaaaatctaatgggaaagttttaggttctcctataaacttaggaaagcatctcacctcatcctaacaca

SEQ ID NO: 462877 - DNA, 120 bp, Artificial Sequence
  ENSG00000157764_133 (sequence is synthesized)
tttcaagccccaaaaatcttaaaagcaggttatataggctaaatagaactaatcattgttttagacatacttattgactctaagaggaaagatgaagtactatgttttaaagaatattat

SEQ ID NO: 462878 - DNA, 120 bp, Artificial Sequence
  ENSG00000157764_134 (sequence is synthesized)
attgatgactggacagttaccttattcaaacatcaacaacagggaccagaaactacagttacaagaatggatatttcttgaccatcgcacaattagaagaatgagctctgctactatagc

SEQ ID NO: 462879 - DNA, 120 bp, Artificial Sequence
  ENSG00000157764_135 (sequence is synthesized)
atctgggcattatacttttcactgtatcacagattgtgctgtcagaacaggtgctttgtcctccatgggagtataataaatgatgtggcaagggcttactctccatgagaggaatgtgtg

SEQ ID NO: 462880 - DNA, 120 bp, Artificial Sequence
  ENSG00000157764_136 (sequence is synthesized)
ttcatttaaatttcacaaacatatattgatcttttgctatgtcccaggtattgtatgacattgagctatacctatctatagtttttcatgtgtcttaaactttctcgcctttgttacaga

SEQ ID NO: 462881 - DNA, 120 bp, Artificial Sequence
  ENSG00000157764_137 (sequence is synthesized)
aaaaacaaactctttgttacagaatttttcccatatagaggattccttcctccctactttcttcatccatctaaatgccaacctttcaaggctgtcctccttcctcattattactttgtg

SEQ ID NO: 462882 - DNA, 120 bp, Artificial Sequence
  ENSG00000157764_138 (sequence is synthesized)
tcaagaatattgtttatttctcatgtacatcagttacacaaataaaaatacacccatcctactccactgcccaacagtaaactccttgagagacgggaaaggccattttaaaatatttgc

SEQ ID NO: 462883 - DNA, 120 bp, Artificial Sequence
  ENSG00000157764_139 (sequence is synthesized)
ttctctctttcataaatgtttgtagtattgcatctatttgagatggtaggtagaaatagtagagcatggtgtgagtgaggggattaccaatgccaaaaagaactatggacttgtatattc

SEQ ID NO: 462884 - DNA, 120 bp, Artificial Sequence
  ENSG00000157764_140 (sequence is synthesized)
caattcgttcaatgtcattctgttcttttaaaatttgatatcttgtatggttgcttgactttatagccttcatcaaatgaaacttctaggaagatactctgatggatagtagccccataa

SEQ ID NO: 462885 - DNA, 120 bp, Artificial Sequence
  ENSG00000157764_141 (sequence is synthesized)
tttcttggctgtagggtataagccacattttcaaatacaattctgttttttttttttcttttttcacaaggcttacagctttgcatactagttccaatctctaagcagcattaggtgggg

SEQ ID NO: 462886 - DNA, 120 bp, Artificial Sequence
  ENSG00000157764_142 (sequence is synthesized)
aaagaagtcatcaaacagccatactgagaagagtaaagtattttaactgataactattccagaaagaatgtggcagttacacatcttctaaaccctattaaggaggttttggtactaaca

SEQ ID NO: 462887 - DNA, 120 bp, Artificial Sequence
  ENSG00000157764_143 (sequence is synthesized)
gtgagatctggtactgtgtcctaaattttggggtttttttggacaaatccttaatacctcatgtccttttcaacttctttttctgttgagagagagagagaacgaatggaattcatatgc

SEQ ID NO: 462888 - DNA, 120 bp, Artificial Sequence
  ENSG00000157764_144 (sequence is synthesized)
ctacaacttttccgggacaaaataattcttttaatgggaggaacacttttccttgatacagtgttttatcttacgttagacatgatttggaaggtaaatataagtggaccagaaaattgg

SEQ ID NO: 462889 - DNA, 120 bp, Artificial Sequence
  ENSG00000157764_145 (sequence is synthesized)
tcaatttaaaggtgaaagtattcatttatagtatttctggcacttattttgtaatttgaaacttaaaaccctatcaactggtgaaaagattataatcaaaggctaaaattttatattctc

SEQ ID NO: 462890 - DNA, 120 bp, Artificial Sequence
  ENSG00000157764_146 (sequence is synthesized)
atttttcagacagatcagttgttgaaaattaatatattattacttcatactcagaggtcatgcaaatagaggcatccatgtcatacaggaatgaaaaatatgtaattatttggtggcaaa

SEQ ID NO: 462891 - DNA, 120 bp, Artificial Sequence
  ENSG00000157764_147 (sequence is synthesized)
gtctatattccttaactgaaataaatggtattgtctctagtgttggatttgacatttaaacctgtctgccaaacttgaaccacagtcatgtctaagcactagtttaaaataaatcaggat

SEQ ID NO: 462892 - DNA, 120 bp, Artificial Sequence
  ENSG00000157764_148 (sequence is synthesized)
tttaagacttgagcttgttcattatctaatgtgtgtcaggtaagactcattcttcacccttgagaaatctcctttctgagttatattatcagatgttgaacgttcagtgtgattgatatg

SEQ ID NO: 462893 - DNA, 120 bp, Artificial Sequence
  ENSG00000157764_149 (sequence is synthesized)
tttcccctcatctacttcatttttggttgttgaatattagtattaaccattggaacagcgtaccctgtaagtaacatttgaagcatttaaagagaaatctgtggaattattgtgggtggt

SEQ ID NO: 462894 - DNA, 120 bp, Artificial Sequence
  ENSG00000157764_150 (sequence is synthesized)
ctataatccttaagtgcaacgaatattgttagtagacttaataagtaacccatctgtatacatcactactttttaaatgtctgtggttacttttgacaataaaaattccaaatacaactg

SEQ ID NO: 462895 - DNA, 120 bp, Artificial Sequence
  ENSG00000157764_151 (sequence is synthesized)
attacaggcgtgagtcaccacgcctggcttctttaagaatttttttaaaatatgtatgtatgagtcacaatctctctgcctgagcacccatagtctcattggagaacttagataagatac

SEQ ID NO: 462896 - DNA, 120 bp, Artificial Sequence
  ENSG00000157764_152 (sequence is synthesized)
tagataagatacatatcacaaaaagattaataaccatacaaggcagtaaatgatcatcacagctagtggtgggaagaaggaccattattacttctaggtgtgtaaagaaaggtatgataa

SEQ ID NO: 462897 - DNA, 120 bp, Artificial Sequence
  ENSG00000157764_153 (sequence is synthesized)
gcatggttacctttcagttaggcctgatcatctgggtttcaggtagctagagaagggtgagggagggcattataagcagagtaggagcagcggcaataaaaaagttaaaagtagctttgt

SEQ ID NO: 462898 - DNA, 120 bp, Artificial Sequence
  ENSG00000157764_154 (sequence is synthesized)
attgggatagtcttctctacaaatcctgttacttacttaactgtattatctcgggcaagttacttaatttatttgagcattggattccttatctgtaaaacagagtcaacaccaaccttg

SEQ ID NO: 462899 - DNA, 120 bp, Artificial Sequence
  ENSG00000157764_155 (sequence is synthesized)
tagaattcttttttgagtattagatgatatctagaatccaagtgtcccaacgttttttggcctttcagggccaccttttccactgatagccaagtaagaatacctgaattgctgtccata

SEQ ID NO: 462900 - DNA, 120 bp, Artificial Sequence
  ENSG00000157764_156 (sequence is synthesized)
atatatgactataggaactccagatcctttctctcaactttgaagacccctgtttgaagtgctttacattctcctggctgttgcttgtcacttgttgctccaacatattattccaggttg

SEQ ID NO: 462901 - DNA, 120 bp, Artificial Sequence
  ENSG00000157764_157 (sequence is synthesized)
ctcccaaaattctaagactgctgtcttccattaaaatgatgatgttatgatggtgtagcttcagtagggggcattgtgaaagaaaactgtaatcccctcaattcagtaactctttccaag

SEQ ID NO: 462902 - DNA, 120 bp, Artificial Sequence
  ENSG00000157764_158 (sequence is synthesized)
gttcatcctttaacctctactacatagaggccacattgcaatcaaagctttactaatgcctggcagttaaacaagggtcattacagcaccaaacaggaaataacacaatgtatcaagctt

SEQ ID NO: 462903 - DNA, 120 bp, Artificial Sequence
  ENSG00000157764_159 (sequence is synthesized)
ggcggtttctaaaattcatcagctctgccctgtagcagggatcttttatgggctttctccactttagcctctactctccccctgttgcacctattccctctaagaccaaaagcccttctc

SEQ ID NO: 462904 - DNA, 120 bp, Artificial Sequence
  ENSG00000157764_160 (sequence is synthesized)
ctaacatctatccctgcctgccctcaaaagaggcaaaatattaggaaattaagaaattagaaaaaattataaatctctgaatccagggaagacaagcctttttatttcgttaaacagatt

SEQ ID NO: 462905 - DNA, 120 bp, Artificial Sequence
  ENSG00000157764_161 (sequence is synthesized)
ttagctcctaatggcttccccttctctcctctggcggaggctctggtttgtataaccaagtggcccattagcgtttccacaataaaagggcttaagatgcagatgccaaaacgactgcta

SEQ ID NO: 462906 - DNA, 120 bp, Artificial Sequence
  ENSG00000157764_162 (sequence is synthesized)
aaatgttaacctttttggttttccctacacatatatagaggacttaacacaacgtccaacaacaagaagtgctgaataaattttttttttttttaaagtaaagaagaggcactgtcagat

SEQ ID NO: 462907 - DNA, 120 bp, Artificial Sequence
  ENSG00000157764_163 (sequence is synthesized)
ctgttttagatggttaccctgtgagtgggaaaatggactggataaagagagaccaaaagcaggggagcaattagagaacctttgccacagtccaaggatcatgaagatttgagcttgcac

SEQ ID NO: 462908 - DNA, 120 bp, Artificial Sequence
  ENSG00000157764_164 (sequence is synthesized)
tccttttgtgggtttcccaccatctatgatgtggcattggttttttaaaactttttattgaggtgtaatacatacatcgtaagctgtaaatgtacagcttattgtgttttcaatgagtgt

SEQ ID NO: 462909 - DNA, 120 bp, Artificial Sequence
  ENSG00000157764_165 (sequence is synthesized)
tgttcagcaaatgatgctggcaactgaatatccacatgcaaaagaatgaagtggtacccttcccttataccatgtacaaagaataacccaaaatggatcaaagacttgaacataacagtt

SEQ ID NO: 462910 - DNA, 120 bp, Artificial Sequence
  ENSG00000157764_166 (sequence is synthesized)
aaagccataaaacttttactacaagaaaacataggagaaaagcatcataactttggatttgtcaatgatttcttggccgtgatgccaaaagcccagggaacacaagaaaaaatggaaaaa

SEQ ID NO: 462911 - DNA, 120 bp, Artificial Sequence
  ENSG00000157764_167 (sequence is synthesized)
ttgtactattatcagaatttaaaacttctgatcatcaaaggatataatcaacagagtgaaaagccaacctggaatgggaaaaatatttgcaaatcttgtatctgataaggggttaatatc

SEQ ID NO: 462912 - DNA, 120 bp, Artificial Sequence
  ENSG00000157764_168 (sequence is synthesized)
cagaatataaagaactcctgtaatagcatacaaccttgttaaaaaatgggcagaggacttgaacagacatttctttaatgaagatatccagatggccacgagcatatgaaaagatgccca

SEQ ID NO: 462913 - DNA, 120 bp, Artificial Sequence
  ENSG00000157764_169 (sequence is synthesized)
acattgctaattattaggaacatgcaaatcaaaaccacaaggagataccacctcacacccattaggatgtcggctatcagacaaaaaagaagataacaagagttggcaagggtgtggaga

SEQ ID NO: 462914 - DNA, 120 bp, Artificial Sequence
  ENSG00000157764_170 (sequence is synthesized)
caagagttggcaagggtgtggagaaattggacccctgttgcactgttggtggaaatgtaaaatggagcaactgctatggaaaacagtatagaggttcctcaaaaaactaaaaatagaatt

SEQ ID NO: 462915 - DNA, 120 bp, Artificial Sequence
  ENSG00000157764_171 (sequence is synthesized)
tctgtgtatatacccaaaataattgaaagcaggatctcaaagagatatttgtacactcatgttcatagcagcattattcactatagtagccaaaggcagaagcaacccagatttctgttg

SEQ ID NO: 462916 - DNA, 120 bp, Artificial Sequence
  ENSG00000157764_172 (sequence is synthesized)
ctgctgtttgtccaagagtgatacatttatttggggtaaacttaaaattaatttattgccatttaaatttctaacgatggaatattagggagccaaacctccctcactgttactagcccc

SEQ ID NO: 462917 - DNA, 120 bp, Artificial Sequence
  ENSG00000157764_173 (sequence is synthesized)
accattttacacttaaattttcttaatgtgaagctacgatgtctaaaagtctgtgagggtttttcttccatacgattgttatagagaattttttttaagtgtagttagagaataatatgt

SEQ ID NO: 462918 - DNA, 120 bp, Artificial Sequence
  ENSG00000157764_174 (sequence is synthesized)
ggaatggacagtatttctctcccaaattgtaatgctggttcagctatacagttaatttatattttatattatcgtttaattaatcaagacccctaacccatagaaaccatttttggatag

SEQ ID NO: 462919 - DNA, 120 bp, Artificial Sequence
  ENSG00000157764_175 (sequence is synthesized)
tttctaggaggagagggagagttgtttcaattaaattaagcattatgattttgtaccacagatcaggtagtctgattctgttagctattttgtaaattacgtttatattcttcctctctc

SEQ ID NO: 462920 - DNA, 120 bp, Artificial Sequence
  ENSG00000157764_176 (sequence is synthesized)
aaagaaagtgacatcagggattccacctagattactgtatagttcaaaaatagcaagcccatctgtatgcttaaagcctccaggcagcttggttgtaataagggagcagagggcatcaaa

SEQ ID NO: 462921 - DNA, 120 bp, Artificial Sequence
  ENSG00000157764_177 (sequence is synthesized)
gtataaggaaggctgtaatttggcactgtcaccactatcatacctaccagtccaggtggtcacccaaggagagactcatcttgctgcctaaagtctgatgaacctttgtaaaattgtgca

SEQ ID NO: 462922 - DNA, 120 bp, Artificial Sequence
  ENSG00000157765_0 (sequence is synthesized)
ggccgccgcctccagcccagcacctgcggagggagcgctgaccatggctccctggcctgaattgggagatgcccagcccaaccccgataagtacctcgaaggggccgcaggtcagcagcc

SEQ ID NO: 462923 - DNA, 120 bp, Artificial Sequence
  ENSG00000157765_1 (sequence is synthesized)
cactgcccctgataaaagcaaagagaccaacaaaacagataacactgaggcacctgtaaccaagattgaacttctgccgtcctactccacggctacactgatagatgagcccactgaggt

SEQ ID NO: 462924 - DNA, 120 bp, Artificial Sequence
  ENSG00000157765_2 (sequence is synthesized)
ggatgacccctggaacctacccactcttcaggactcggggatcaagtggtcagagagagacaccaaagggaagattctctgtttcttccaagggattgggagattgattttacttctcgg

SEQ ID NO: 462925 - DNA, 120 bp, Artificial Sequence
  ENSG00000157765_3 (sequence is synthesized)
atttctctactttttcgtgtgctccctggatattcttagtagcgccttccagctggttggaggaaaaatggcaggacagttcttcagcaacagctctattatgtccaaccctttgttggg

SEQ ID NO: 462926 - DNA, 120 bp, Artificial Sequence
  ENSG00000157765_4 (sequence is synthesized)
gctggtgatcggggtgctggtgaccgtcttggtgcagagctccagcacctcaacgtccatcgttgtcagcatggtgtcctcttcattgctcactgttcgggctgccatccccattatcat

SEQ ID NO: 462927 - DNA, 120 bp, Artificial Sequence
  ENSG00000157765_5 (sequence is synthesized)
gggggccaacattggaacgtcaatcaccaacactattgttgcgctcatgcaggtgggagatcggagtgagttcagaagagcttttgcaggagccactgtccatgacttcttcaactggct

SEQ ID NO: 462928 - DNA, 120 bp, Artificial Sequence
  ENSG00000157765_6 (sequence is synthesized)
gtccgtgttggtgctcttgcccgtggaggtggccacccattacctcgagatcataacccagcttatagtggagagcttccacttcaagaatggagaagatgccccagatcttctgaaagt

SEQ ID NO: 462929 - DNA, 120 bp, Artificial Sequence
  ENSG00000157765_7 (sequence is synthesized)
catcactaagcccttcacaaagctcattgtccagctggataaaaaagttatcagccaaattgcaatgaacgatgaaaaagcgaaaaacaagagtcttgtcaagatttggtgcaaaacttt

SEQ ID NO: 462930 - DNA, 120 bp, Artificial Sequence
  ENSG00000157765_8 (sequence is synthesized)
taccaacaagacccagattaacgtcactgttccctcgactgctaactgcacctccccttccctctgttggacggatggcatccaaaactggaccatgaagaatgtgacctacaaggagaa

SEQ ID NO: 462931 - DNA, 120 bp, Artificial Sequence
  ENSG00000157765_9 (sequence is synthesized)
catcgccaaatgccagcatatctttgtgaatttccacctcccggatcttgctgtgggcaccatcttgctcatactctccctgctggtcctctgtggttgcctgatcatgattgtcaagat

SEQ ID NO: 462932 - DNA, 120 bp, Artificial Sequence
  ENSG00000157765_10 (sequence is synthesized)
cctgggctctgtgctcaaggggcaggtcgccactgtcatcaagaagaccatcaacactgatttcccctttccctttgcatggttgactggctacctggccatcctcgtcggggcaggcat

SEQ ID NO: 462933 - DNA, 120 bp, Artificial Sequence
  ENSG00000157765_11 (sequence is synthesized)
gaccttcatcgtacagagcagctctgtgttcacgtcggccttgacccccctgattggaatcggcgtgataaccattgagagggcttatccactcacgctgggctccaacatcggcaccac

SEQ ID NO: 462934 - DNA, 120 bp, Artificial Sequence
  ENSG00000157765_12 (sequence is synthesized)
caccaccgccatcctggccgccttagccagccctggcaatgcattgaggagttcactccagatcgccctgtgccactttttcttcaacatctccggcatcttgctgtggtacccgatccc

SEQ ID NO: 462935 - DNA, 120 bp, Artificial Sequence
  ENSG00000157765_13 (sequence is synthesized)
gttcactcgcctgcccatccgcatggccaaggggctgggcaacatctctgccaagtatcgctggttcgccgtcttctacctgatcatcttcttcttcctgatcccgctgacggtgtttgg

SEQ ID NO: 462936 - DNA, 120 bp, Artificial Sequence
  ENSG00000157765_14 (sequence is synthesized)
cctctcgctggccggctggcgggtgctggttggtgtcggggttcccgtcgtcttcatcatcatcctggtactgtgcctccgactcctgcagtctcgctgcccacgcgtcctgccgaagaa

SEQ ID NO: 462937 - DNA, 120 bp, Artificial Sequence
  ENSG00000157765_15 (sequence is synthesized)
actccagaactggaacttcctgccgctgtggatgcgctcgctgaagccctgggatgccgtcgtctccaagttcaccggctgcttccagatgcgctgctgctgctgctgccgcgtgtgctg

SEQ ID NO: 462938 - DNA, 120 bp, Artificial Sequence
  ENSG00000157765_16 (sequence is synthesized)
ccgcgcgtgctgcttgctgtgtgactgccccaagtgctgccgctgcagcaagtgctgcgaggacttggaggaggcgcaggaggggcaggatgtccctgtcaaggctcctgagacctttga

SEQ ID NO: 462939 - DNA, 120 bp, Artificial Sequence
  ENSG00000157765_17 (sequence is synthesized)
tccctgcctcggactcaaagaccgaatgcacggccttgtaggggacgccccagattgtcagggatggggggatggtccttgagttttgcatgctctcctccctcccacttctgcaccctt

SEQ ID NO: 462940 - DNA, 120 bp, Artificial Sequence
  ENSG00000157765_18 (sequence is synthesized)
tcaccacctcgaggagatttgctccccattagcgaatgaaattgatgcagtcctacctaactcgattccctttggcttggtggtaggcctgcagggcacttttattccaacccctggtca

SEQ ID NO: 462941 - DNA, 120 bp, Artificial Sequence
  ENSG00000157765_19 (sequence is synthesized)
ctcagtaatcttttactccaggaaggcacaggatggtacctaaagagaattagagaatgaacctggcgggacggatgtctaatcctgcgcctagctgggttggtcagtagaacctatttt

SEQ ID NO: 462942 - DNA, 120 bp, Artificial Sequence
  ENSG00000157765_20 (sequence is synthesized)
cagactcaaaaaccatcttcagaaagaaaaggcccagggaaggaatgtatgagaggctctcccagatgaggaagtgtactctctatgactatcaagctcaggcctctccctttttttaaa

SEQ ID NO: 462943 - DNA, 120 bp, Artificial Sequence
  ENSG00000157765_21 (sequence is synthesized)
ccaaagtctggcaaccaagagcagcagctccatggcctccttgccccagatcagcctgggtcaggggacatagtgtcattgtttggaaactgcagaccacaaggtgtgggtctatcccac

SEQ ID NO: 462944 - DNA, 120 bp, Artificial Sequence
  ENSG00000157765_22 (sequence is synthesized)
ttcctagtgctccccacattccccatcagggcttcctcacgtggacaggtgtgctagtccaggcagttcacttgcagtttccttgtcctcatgcttcggggatgggagccacgcctgaac

SEQ ID NO: 462945 - DNA, 120 bp, Artificial Sequence
  ENSG00000157765_23 (sequence is synthesized)
tagagttcaggctggatacatgtgctcacctgctgctcttgtcttcctaagagacagagagtggggcagatggaggagaagaaagtgaggaatgagtagcatagcattctgccaaaaggg

SEQ ID NO: 462946 - DNA, 120 bp, Artificial Sequence
  ENSG00000157765_24 (sequence is synthesized)
ccccagattcttaatttagcaaactaagaagcccaattcaaaagcattgtggctaaagtctaacgctcctctcttggtcagataacaaaagccctccctgttggatcttttgaaataaaa

SEQ ID NO: 462947 - DNA, 120 bp, Artificial Sequence
  ENSG00000157765_25 (sequence is synthesized)
cgtgcaagttatccaggctcgtagcctgcatgctgccaccttgaatcccagggagtatctgcacctggaatagctctccacccctctctgcctccttactttctgtgcaagatgacttcc

SEQ ID NO: 462948 - DNA, 120 bp, Artificial Sequence
  ENSG00000157765_26 (sequence is synthesized)
tgggttaacttccttctttccatccacccacccactggaatctctttccaaacatttttccattttcccacagatgggctttgattagctgtcctctctccatgcctgcaaagctccaga

SEQ ID NO: 462949 - DNA, 120 bp, Artificial Sequence
  ENSG00000157765_27 (sequence is synthesized)
tttttggggaaagctgtacccaactggactgcccagtgaactgggatcattaagtacagtcgagcacacgtgtgtgcatgggtcaaaggggtgtgttccttctcatcctagatgccttct

SEQ ID NO: 462950 - DNA, 120 bp, Artificial Sequence
  ENSG00000157765_28 (sequence is synthesized)
ctgtgccttccacagcctcctgcctgattacaccactgcccccgccccaccctcagccatcccaattcttcctggccagtgcgctccagccttatctaggaaaggaggagtgggtgtagc

SEQ ID NO: 462951 - DNA, 120 bp, Artificial Sequence
  ENSG00000157765_29 (sequence is synthesized)
cgtgcagcaagattggggcctcccccatcccagcttctccaccatcccagcaagtcaggatatcagacagtcctcccctgaccctcccccttgtagatatcaattcccaaacagagccaa

SEQ ID NO: 462952 - DNA, 120 bp, Artificial Sequence
  ENSG00000157765_30 (sequence is synthesized)
atactctatatctatagtcacagccctgtacagcatttttcataagttatatagtaaatggtctgcatgatttgtgcttctagtgctctcatttggaaatgaggcaggcttcttctatga

SEQ ID NO: 462953 - DNA, 120 bp, Artificial Sequence
  ENSG00000157765_31 (sequence is synthesized)
aatgtaaagaaagaaaccactttgtatattttgtaataccacctctgtggccatgcctgccccgcccactctgtatatatgtaagttaaacccgggcaggggctgtggccgtctttgtac

SEQ ID NO: 462954 - DNA, 120 bp, Artificial Sequence
  ENSG00000157765_32 (sequence is synthesized)
caggggctgtggccgtctttgtactctggtgatttttaaaaattgaatctttgtacttgcattgattgtataataattttgagaccaggtctcgctgtgttgctcaggctggtctcaaac

SEQ ID NO: 462955 - DNA, 78 bp, Artificial Sequence
  ENSG00000157765_33 (sequence is synthesized)
accaggcctgattgtaatttttttttttttttttttactggttatgggaagggagaaataaaatcatcaaacccaaaa

SEQ ID NO: 462956 - DNA, 120 bp, Artificial Sequence
  ENSG00000157765_34 (sequence is synthesized)
agtttgtttctattagggcccgtggccatcagcgaagggtccgtccttcagccgtcttggggagcaaagcccgcaatttatgttttccaagccacaaatggaccatggctccctggcctg

SEQ ID NO: 462957 - DNA, 120 bp, Artificial Sequence
  ENSG00000157765_35 (sequence is synthesized)
ccggtctcagactagtggcttccagttctgactgaagcggtctccagctctgaagcggtctccagctctgaagctatctccagctctgaagcggtctccagctctgaagcgatctccagc

SEQ ID NO: 462958 - DNA, 120 bp, Artificial Sequence
  ENSG00000157765_36 (sequence is synthesized)
tctgaagcggtctccagctctgaaacgatctccagctctgaaacaatctccagctctgaagcggtctccagctctgaaacaatctccagctctgaagcggtctccagctctgaaacagtc

SEQ ID NO: 462959 - DNA, 120 bp, Artificial Sequence
  ENSG00000157765_37 (sequence is synthesized)
tccagctctgaagcggtctccagctctgaagcggcctccagctatgaagcggtctccagctttgactccagttgtttccagctcttctggactgacttctttccagaccatggctccctg

SEQ ID NO: 462960 - DNA, 120 bp, Artificial Sequence
  ENSG00000157765_38 (sequence is synthesized)
gtctactgggtgcaggcattttcgggggccctctatcaaacattctttcccagagccctcccatttacggagagatcatgaaccagccctgagactcacagcctgtgattagcagagtaa

SEQ ID NO: 462961 - DNA, 120 bp, Artificial Sequence
  ENSG00000157765_39 (sequence is synthesized)
gattcagtctcagatctgggtgacacaaaggaccatggatttctgcaacccttggtgcctttcttgggaacccatctgtgtgacttgggagagttggggaggaaaaatggcaggacagtt

SEQ ID NO: 462962 - DNA, 70 bp, Artificial Sequence
  ENSG00000157765_40 (sequence is synthesized)
gaccgtcttggtgcagagctccagcacctcaacgtccatcgttgtcagcatggtgtcctcttcatagact

SEQ ID NO: 462963 - DNA, 120 bp, Artificial Sequence
  ENSG00000157766_0 (sequence is synthesized)
gcccacctacctccccgccgctccagagggggctcgcagagctgaggacgcgcgcagcgctgctcaaggtctctctctctcagcaccctcgccggccggcgtctgacgcgggtgccaggg

SEQ ID NO: 462964 - DNA, 120 bp, Artificial Sequence
  ENSG00000157766_1 (sequence is synthesized)
tctccgggcacctttcagtgtccattccctcagccagccaggactccgcaacccagcagttgccgctgcggccacagcccgaggggacctgcggacaggacgccggcaggaggaggggtg

SEQ ID NO: 462965 - DNA, 120 bp, Artificial Sequence
  ENSG00000157766_2 (sequence is synthesized)
cgcagcgcccgcgcagagcgtctccctcgctacgcagcgagacccgggcctcccggccccaggagcccccagctgcctcgccaggtgtgtgggactgaagttcttggagaagggagtcca

SEQ ID NO: 462966 - DNA, 120 bp, Artificial Sequence
  ENSG00000157766_3 (sequence is synthesized)
actcttcaaggtgaactatgaccactttactctgggttttcgtgactctgagggtcatcactgcagctgtcactgtagaaacttcagaccatgacaactcgctgagtgtcagcatccccc

SEQ ID NO: 462967 - DNA, 120 bp, Artificial Sequence
  ENSG00000157766_4 (sequence is synthesized)
aaccgtccccgctgagggtcctcctggggacctccctcaccatcccctgctatttcatcgaccccatgcaccctgtgaccaccgccccttctaccgccccactggccccaagaatcaagt

SEQ ID NO: 462968 - DNA, 120 bp, Artificial Sequence
  ENSG00000157766_5 (sequence is synthesized)
ggagccgtgtgtccaaggagaaggaggtagtgctgctggtggccactgaagggcgcgtgcgggtcaacagtgcctatcaggacaaggtctcactgcccaactacccggccatccccagtg

SEQ ID NO: 462969 - DNA, 120 bp, Artificial Sequence
  ENSG00000157766_6 (sequence is synthesized)
acgccaccttggaagtccagagcctgcgctccaatgactctggggtctaccgctgcgaggtgatgcatggcatcgaggacagcgaggccaccctggaagtcgtggtgaaaggcatcgtgt

SEQ ID NO: 462970 - DNA, 120 bp, Artificial Sequence
  ENSG00000157766_7 (sequence is synthesized)
tccattacagagccatctctacacgctacaccctcgactttgacagggcgcagcgggcctgcctgcagaacagtgccatcattgccacgcctgagcagctgcaggccgcctacgaagacg

SEQ ID NO: 462971 - DNA, 120 bp, Artificial Sequence
  ENSG00000157766_8 (sequence is synthesized)
gcttccaccagtgtgacgccggctggctggctgaccagactgtcagataccccatccacactccccgggaaggctgctatggagacaaggatgagtttcctggtgtgaggacgtatggca

SEQ ID NO: 462972 - DNA, 120 bp, Artificial Sequence
  ENSG00000157766_9 (sequence is synthesized)
tccgagacaccaacgagacctatgatgtgtactgcttcgccgaggagatggagggtgaggtcttttatgcaacatctccagagaagttcaccttccaggaagcagccaatgagtgccggc

SEQ ID NO: 462973 - DNA, 120 bp, Artificial Sequence
  ENSG00000157766_10 (sequence is synthesized)
ggctgggtgcccggctggccaccacgggccagctctacctggcctggcaggctggcatggacatgtgcagcgccggctggctggccgaccgcagcgtgcgctaccccatctccaaggccc

SEQ ID NO: 462974 - DNA, 120 bp, Artificial Sequence
  ENSG00000157766_11 (sequence is synthesized)
ggcccaactgcggtggcaacctcctgggcgtgaggaccgtctacgtgcatgccaaccagacgggctaccccgacccctcatcccgctacgacgccatctgctacacaggtgaagactttg

SEQ ID NO: 462975 - DNA, 120 bp, Artificial Sequence
  ENSG00000157766_12 (sequence is synthesized)
tggacatcccagaaaacttctttggagtggggggtgaggaggacatcaccgtccagacagtgacctggcctgacatggagctgccactgcctcgaaacatcactgagggtgaagcccgag

SEQ ID NO: 462976 - DNA, 120 bp, Artificial Sequence
  ENSG00000157766_13 (sequence is synthesized)
gcagcgtgatccttaccgtaaagcccatcttcgaggtctcccccagtcccctggaacccgaggagcccttcacgtttgcccctgaaataggggccactgccttcgctgaggttgagaatg

SEQ ID NO: 462977 - DNA, 120 bp, Artificial Sequence
  ENSG00000157766_14 (sequence is synthesized)
agactggagaggccaccaggccctggggctttcccacacctggcctgggccctgccacggcattcaccagtgaggacctcgtcgtgcaggtgaccgctgtccctgggcagccgcatttgc

SEQ ID NO: 462978 - DNA, 120 bp, Artificial Sequence
  ENSG00000157766_15 (sequence is synthesized)
cagggggggtcgtcttccactaccgcccgggacccacccgctactcgctgacctttgaggaggcacagcaggcctgcctgcgcacgggggcggtcattgcctcgccggagcagctccagg

SEQ ID NO: 462979 - DNA, 120 bp, Artificial Sequence
  ENSG00000157766_16 (sequence is synthesized)
ccgcctacgaagcaggctatgagcagtgtgacgccggctggctgcgggaccagaccgtcagataccccattgtgagcccccggaccccatgcgtgggtgacaaggacagcagcccagggg

SEQ ID NO: 462980 - DNA, 120 bp, Artificial Sequence
  ENSG00000157766_17 (sequence is synthesized)
tcaggacctatggcgtgcgcccatcaacagagacctacgatgtctactgctttgtagacagacttgagggggaggtgttcttcgccacacgccttgagcagttcaccttccaggaagcac

SEQ ID NO: 462981 - DNA, 120 bp, Artificial Sequence
  ENSG00000157766_18 (sequence is synthesized)
tggagttctgtgaatctcacaatgctacgctggccaccacgggccagctctacgccgcctggagccgcggcctggacaagtgctatgccggctggctggccgacggcagcctccgctacc

SEQ ID NO: 462982 - DNA, 120 bp, Artificial Sequence
  ENSG00000157766_19 (sequence is synthesized)
ccatcgtcaccccaaggcctgcctgcggtggggacaagccaggcgtgagaacggtctacctctaccctaaccagacgggcctcccagacccactgtcccggcaccatgccttctgcttcc

SEQ ID NO: 462983 - DNA, 120 bp, Artificial Sequence
  ENSG00000157766_20 (sequence is synthesized)
gaggcatttcagcggttccttctccaggagaagaagagggtggcacacccacatcaccctctggtgtggaggagtggatcgtgacccaagtggttcctggtgtggctgctgtccccgtag

SEQ ID NO: 462984 - DNA, 120 bp, Artificial Sequence
  ENSG00000157766_21 (sequence is synthesized)
aagaggagacaactgctgtaccctcaggggagactactgccatcctagagttcaccaccgagccagaaaaccagacagaatgggaaccagcctataccccagtgggcacatccccgctgc

SEQ ID NO: 462985 - DNA, 120 bp, Artificial Sequence
  ENSG00000157766_22 (sequence is synthesized)
cagggatccttcctacttggcctcccactggcgcagcaacagaggaaagtacagaaggcccttctgcaactgaagtgccctctgcctcagaggaaccatccccctcagaggtgccattcc

SEQ ID NO: 462986 - DNA, 120 bp, Artificial Sequence
  ENSG00000157766_23 (sequence is synthesized)
cctcagaggagccatccccctcagaggaaccattcccctcagtgaggccattcccctcagtggagctgttcccctcagaggagccattcccctccaaggagccatccccctcagaggaac

SEQ ID NO: 462987 - DNA, 120 bp, Artificial Sequence
  ENSG00000157766_24 (sequence is synthesized)
catcagcctcggaagagccgtatacaccttcaccccccgtgcccagctggactgagctgcccagctctggggaggaatctggggcccctgatgtcagtggtgacttcacaggcagtggag

SEQ ID NO: 462988 - DNA, 120 bp, Artificial Sequence
  ENSG00000157766_25 (sequence is synthesized)
atgtttcaggacaccttgacttcagtgggcagctgtcaggggacagggcaagtggactgccctctggagacctggactccagtggtcttacttccacagtgggctcaggcctgcctgtgg

SEQ ID NO: 462989 - DNA, 120 bp, Artificial Sequence
  ENSG00000157766_26 (sequence is synthesized)
aaagtggactaccctcaggggatgaagagagaattgagtggcccagcactcctacggttggtgaactgccctctggagctgagatcctagagggctctgcctctggagttggggatctca

SEQ ID NO: 462990 - DNA, 120 bp, Artificial Sequence
  ENSG00000157766_27 (sequence is synthesized)
agagggctctgcctctggagttggggatctcagtggacttccttctggagaagttctagagacctctgcctctggagtaggagacctcagtgggcttccttctggagaagttctagagac

SEQ ID NO: 462991 - DNA, 84 bp, Artificial Sequence
  ENSG00000157766_28 (sequence is synthesized)
cttccttctggagaagttctagagactactgcccctggagtagaggagactgcccctggagtagatgagatcagtgggcttcct

SEQ ID NO: 462992 - DNA, 90 bp, Artificial Sequence
  ENSG00000157766_29 (sequence is synthesized)
gcttccttctggagaagttctagagactactgcccctggagtagatgagatcagtactgcccctggagtagaggagatcagcgggcttcc

SEQ ID NO: 462993 - DNA, 120 bp, Artificial Sequence
  ENSG00000157766_30 (sequence is synthesized)
tacctctgcggtaggggacctcagtggacttccttctggaggagaagttctagagatttctgtctctggagtagaggacatcagtgggcttccttctggagaggttgtagagacttctgc

SEQ ID NO: 462994 - DNA, 120 bp, Artificial Sequence
  ENSG00000157766_31 (sequence is synthesized)
ctctggaatagaggatgtcagtgaacttccttcaggagaaggtctagagacctctgcttctggagtagaggacctcagcaggctcccttctggagaagaagttctagagatttctgcctc

SEQ ID NO: 462995 - DNA, 120 bp, Artificial Sequence
  ENSG00000157766_32 (sequence is synthesized)
tggatttggggacctcagtggacttccttctggaggagaaggtctagagacctctgcttctgaagtagggactgacctcagtgggcttccttctggaagggagggtctagagacttcagc

SEQ ID NO: 462996 - DNA, 120 bp, Artificial Sequence
  ENSG00000157766_33 (sequence is synthesized)
ttctggagctgaggacctcagtgggttgccttctggaaaagaagacttggtggggtcagcttctggagacttggacttgggcaaactgccttctggaactctaggaagtgggcaagctcc

SEQ ID NO: 462997 - DNA, 120 bp, Artificial Sequence
  ENSG00000157766_34 (sequence is synthesized)
agaaacaagtggtcttccctctggatttagtggtgagtattctggggtggaccttggaagtggcccaccctctggcctgcctgactttagtggacttccatctggattcccaactgtttc

SEQ ID NO: 462998 - DNA, 120 bp, Artificial Sequence
  ENSG00000157766_35 (sequence is synthesized)
cctagtggattctacattggtggaagtggtcacagcctccactgcaagtgaactggaagggaggggaaccattggcatcagtggtgcaggagaaatatctggactgccctccagtgagct

SEQ ID NO: 462999 - DNA, 120 bp, Artificial Sequence
  ENSG00000157766_36 (sequence is synthesized)
ggacattagtgggagagctagtggactcccttcaggaactgaactcagtggccaagcatctgggtctcctgatgtcagtggggaaatacctggactctttggtgtcagtggacagccatc

SEQ ID NO: 463000 - DNA, 120 bp, Artificial Sequence
  ENSG00000157766_37 (sequence is synthesized)
agggtttcctgacactagtggggaaacatctggagtgactgagcttagcgggctgtcctctggacaaccaggtattagtggagaagcatctggagttctttatggcactagtcaaccctt

SEQ ID NO: 463001 - DNA, 120 bp, Artificial Sequence
  ENSG00000157766_38 (sequence is synthesized)
tggcataactgatctgagtggagaaacatctggggtccctgatctcagtgggcagccttcagggttaccagggttcagtggggcaacatcaggagtccctgacctggtttctggtaccac

SEQ ID NO: 463002 - DNA, 120 bp, Artificial Sequence
  ENSG00000157766_39 (sequence is synthesized)
gagtggcagcggtgaatcttctgggattacatttgtggacaccagtttggttgaagtggcccctactacatttaaagaagaagaaggcttagggtctgtggaactcagtggcctcccttc

SEQ ID NO: 463003 - DNA, 120 bp, Artificial Sequence
  ENSG00000157766_40 (sequence is synthesized)
cggagaggcagatctgtcaggcaaatctgggatggtggatgtcagtggacagttttctggaacagtcgattccagtgggtttacatcccagactccggaattcagtggcctaccaagtgg

SEQ ID NO: 463004 - DNA, 120 bp, Artificial Sequence
  ENSG00000157766_41 (sequence is synthesized)
catagctgaggtcagtggagaatcctccagagctgagattgggagcagcctgccctcgggagcatattatggcagtggaactccatctagtttccccactgtctctcttgtagacagaac

SEQ ID NO: 463005 - DNA, 120 bp, Artificial Sequence
  ENSG00000157766_42 (sequence is synthesized)
tttggtggaatctgtaacccaggctccaacagcccaagaggcaggagaagggccttctggcattttagaactcagtggtgctcattctggagcaccagacatgtctggggagcattctgg

SEQ ID NO: 463006 - DNA, 120 bp, Artificial Sequence
  ENSG00000157766_43 (sequence is synthesized)
atttctggacctaagtgggctgcagtccgggctgatagagcccagcggagagccaccaggtactccatattttagtggggattttgccagcaccaccaatgtaagtggagaatcctctgt

SEQ ID NO: 463007 - DNA, 120 bp, Artificial Sequence
  ENSG00000157766_44 (sequence is synthesized)
agccatgggcaccagtggagaggcctcaggacttccagaagttactttaatcacttctgagttcgtggagggtgttactgaaccaactatttctcaggaactaggccaaaggccccctgt

SEQ ID NO: 463008 - DNA, 120 bp, Artificial Sequence
  ENSG00000157766_45 (sequence is synthesized)
gacacacacaccccagctttttgagtccagtggaaaagtctccacagctggggacattagtggagctaccccagtgctccctgggtctggagtagaagtatcatcagtcccagaatctag

SEQ ID NO: 463009 - DNA, 120 bp, Artificial Sequence
  ENSG00000157766_46 (sequence is synthesized)
cagtgagacgtccgcctatcctgaagctgggttcggggcatctgccgcccctgaggccagcagagaagattctgggtcccctgatctgagtgaaaccacctctgcattccacgaagctaa

SEQ ID NO: 463010 - DNA, 120 bp, Artificial Sequence
  ENSG00000157766_47 (sequence is synthesized)
ccttgagagatcctctggcctaggagtgagcggcagcactttgacatttcaagaaggcgaggcgtccgctgccccagaagtgagtggagaatccaccaccaccagtgatgtggggacaga

SEQ ID NO: 463011 - DNA, 120 bp, Artificial Sequence
  ENSG00000157766_48 (sequence is synthesized)
ggcaccaggcttgccttcagccactcccacggcttctggagacaggactgaaatcagcggagacctgtctggtcacacctcgcagctgggcgttgtcatcagcaccagcatcccagagtc

SEQ ID NO: 463012 - DNA, 120 bp, Artificial Sequence
  ENSG00000157766_49 (sequence is synthesized)
tgagtggacccagcagacccagcgccctgcagagacgcatctagaaattgagtcctcaagcctcctgtactcaggagaagagactcacacagtcgaaacagccacctccccaacagatgc

SEQ ID NO: 463013 - DNA, 120 bp, Artificial Sequence
  ENSG00000157766_50 (sequence is synthesized)
ttccatcccagcttctccggaatggaaacgtgaatcagaatcaactgctgcagcccccgccaggtcctgtgcagaggagccctgtggagctgggacctgcaaggagacagagggacacgt

SEQ ID NO: 463014 - DNA, 120 bp, Artificial Sequence
  ENSG00000157766_51 (sequence is synthesized)
catatgcctgtgcccccctggctacactggcgagcactgtaacatagacattgatgagtgcctctcaagcccttgtctgaatggagccacctgcgtggatgccatcgactctttcacatg

SEQ ID NO: 463015 - DNA, 120 bp, Artificial Sequence
  ENSG00000157766_52 (sequence is synthesized)
cttatgccttcccagctacgaaggggacctgtgtgagattgaccaggaggtatgtgaggagggctggaacaagtaccagggccactgttaccgccacttcccggaccgcgagacctgggt

SEQ ID NO: 463016 - DNA, 120 bp, Artificial Sequence
  ENSG00000157766_53 (sequence is synthesized)
ggatgctgagcgccggtgtcgggagcagcagtcacacctgagcagcatcgtcacccccgaggagcaggagtttgtcaacaacaatgcccaagactaccagtggatcggcctgaacgacag

SEQ ID NO: 463017 - DNA, 120 bp, Artificial Sequence
  ENSG00000157766_54 (sequence is synthesized)
gaccatcgaaggggacttccgctggtcagatggacaccccatgcaatttgagaactggcgccccaaccagcctgacaacttttttgccgctggagaggactgtgtggtgatgatctggca

SEQ ID NO: 463018 - DNA, 120 bp, Artificial Sequence
  ENSG00000157766_55 (sequence is synthesized)
cgagaagggcgagtggaatgatgttccctgcaattaccacctccccttcacgtgtaaaaagggcacagtggcctgcggagagccccctgtggtggagcatgccaggaccttcgggcagaa

SEQ ID NO: 463019 - DNA, 120 bp, Artificial Sequence
  ENSG00000157766_56 (sequence is synthesized)
gaaggaccggtatgagatcaattccctggtgcggtaccagtgcacagaggggtttgtccagcgccacatgcccaccatccggtgccagcccagcgggcactgggaggagcctcagatcac

SEQ ID NO: 463020 - DNA, 120 bp, Artificial Sequence
  ENSG00000157766_57 (sequence is synthesized)
ctgcacagaccccaccacctacaaacgcagactacagaagcggagctcacggcaccctcggaggagccgccccagcacagcccactgagaagagcttccaggacgcacccaggacgctga

SEQ ID NO: 463021 - DNA, 120 bp, Artificial Sequence
  ENSG00000157766_58 (sequence is synthesized)
gcccaggagcctgccaggctgacgtgcatcccacccagacggtgtcctcttcttgtcgctttttgtcatataaggaatcccattaaagaaggaaaaaaataaatcccacatttgtgtatg

SEQ ID NO: 463022 - DNA, 120 bp, Artificial Sequence
  ENSG00000157766_59 (sequence is synthesized)
cacccactcacccctccaaatcagcaaaaccgcatctaatttgtccgccgaatgccaaagcaaagcaaacttattataacccttggactgagtttagagacatttcttcaatttcccatc

SEQ ID NO: 463023 - DNA, 120 bp, Artificial Sequence
  ENSG00000157766_60 (sequence is synthesized)
gtgcctttccagggaccagtgcagggacagggggagaaggggaggggttaagttaaataaagaagattatttttgtttcctgactttatccaagagcagtgcaatcgttggttatttcac

SEQ ID NO: 463024 - DNA, 120 bp, Artificial Sequence
  ENSG00000157766_61 (sequence is synthesized)
ctccagggagagctagggaggagggaggagggctccaaaggagctggaaggagcagaggcctgagagcaggaagaactcggaaccgcagctgaatgtattggatgagaaggagccaggag

SEQ ID NO: 463025 - DNA, 120 bp, Artificial Sequence
  ENSG00000157766_62 (sequence is synthesized)
ggctacaccatctgtatgagggaaaagccttgggggagaggggtgggttcctgcctcctgccgagggtaagccggcaggagagagccatcagagggacctccgctgcctgggagttgggt

SEQ ID NO: 463026 - DNA, 120 bp, Artificial Sequence
  ENSG00000157766_63 (sequence is synthesized)
tccctccaagggtccctctttcagtgtcctctctctcacctgggtctgccaccctaacaggtggcaactcggcagggctgctgggggcacttcctgcccagtggggggtgccgcccaacc

SEQ ID NO: 463027 - DNA, 120 bp, Artificial Sequence
  ENSG00000157766_64 (sequence is synthesized)
ttctcccctccccacccccgcccccgggaccgtgcaggcaccagggttccgtgcacctatttatatttttgaaaactgaagattataatattataataataataaagacattggaagaga

SEQ ID NO: 463028 - DNA, 120 bp, Artificial Sequence
  ENSG00000157766_65 (sequence is synthesized)
gcatgaaaacgtccagggctcactgtcagatgttgaggctgtgtcccccacagtgcctcgggtcacaaccagcataggtcatcccaggagaccctatgagaccctttataaagggtgttt

SEQ ID NO: 463029 - DNA, 120 bp, Artificial Sequence
  ENSG00000157766_66 (sequence is synthesized)
tcagtccctctggggcagagccagctctgaaaccagcacaacgcaggctttgaccccaaggcaaggtcatccttctaaagttccccagagacaagtagagataaataagaacttgagctg

SEQ ID NO: 463030 - DNA, 120 bp, Artificial Sequence
  ENSG00000157766_67 (sequence is synthesized)
gtatttatgtctactagaaatgaagcagacctgaatttgagttatggctctgctacttaatagctgtgtgaaaatggagatataatggttcctacttcagagagagctgcaagaattaat

SEQ ID NO: 463031 - DNA, 120 bp, Artificial Sequence
  ENSG00000157766_68 (sequence is synthesized)
taagtgcacgtggtgcccttggcatagtgcctgggacacagtaaatgctcaataaatgttagctttatttcatatacatatctatatgtaaagctgtaatatatagctttattttgtaca

SEQ ID NO: 463032 - DNA, 120 bp, Artificial Sequence
  ENSG00000157766_69 (sequence is synthesized)
acctgtaatttgtacactcttgtcaaattctctcctgcttgcaaatatttttgtgatgagtttagtcaaattattctattattcttcactaagcactggtggttcaagtttttcgttgac

SEQ ID NO: 463033 - DNA, 120 bp, Artificial Sequence
  ENSG00000157766_70 (sequence is synthesized)
ctatgctatggatatgctaccatttcaaccatcactccccactggacttctgagagtgatgtcatcaagcaatatagtaagcatggccagggcatagccacggaattgctgggctctgga

SEQ ID NO: 463034 - DNA, 120 bp, Artificial Sequence
  ENSG00000157766_71 (sequence is synthesized)
tgagttcctgcagagtccatggagggtctgggtgcatggaccagaatgtagattgtaataacagcctgtgccatgttttatagtttacatcaaaactgagtgtctttgcaacttcctgtg

SEQ ID NO: 463035 - DNA, 120 bp, Artificial Sequence
  ENSG00000157766_72 (sequence is synthesized)
aatctagaattattctcaaataaacttaaggggaaaaaacttgagtgtccccaagtttcccagacatccagggtcaccttttaaaacccaattcaaggccaggagcagtggcttacgcct

SEQ ID NO: 463036 - DNA, 63 bp, Artificial Sequence
  ENSG00000157766_73 (sequence is synthesized)
aaaccctgtctctactaaaaaaaagtgcaaaaattagcctagttcaacccaggaggcggaggt

SEQ ID NO: 463037 - DNA, 120 bp, Artificial Sequence
  ENSG00000157766_74 (sequence is synthesized)
tgtctcaaaaaaaaaaaaaaaaaattcaaagttcagccagcctcaataagtcaagtccaattctctcccagaggctttgatgaggctcttgtcccagtgccccttccctgctctgggaag

SEQ ID NO: 463038 - DNA, 120 bp, Artificial Sequence
  ENSG00000157766_75 (sequence is synthesized)
tccctgctctgggaagcagaaaccaagccagttaacctcccagaaatttcccagccatgctgcccccagcctcccacccctgaccctccgtgaactcagccttgtgtattatcctgcaca

SEQ ID NO: 463039 - DNA, 120 bp, Artificial Sequence
  ENSG00000157766_76 (sequence is synthesized)
gttcagcttccttgctgaccaagcccactgctggtttcccccacaccagtacagttacccccagcccatgaatcctgccttcacgctttcaaatgccgagatggtttcatggaattgagt

SEQ ID NO: 463040 - DNA, 120 bp, Artificial Sequence
  ENSG00000157766_77 (sequence is synthesized)
accatcctcctatttttggtcgtgacacacttggaacataatccctgtcccccaaggttgttcagtagttgagagcgtggagtctggtaccagatgcttaaattcaaagactagatctga

SEQ ID NO: 463041 - DNA, 120 bp, Artificial Sequence
  ENSG00000157766_78 (sequence is synthesized)
catttgtaagccattgactctgggcaaatcatgtaactctgtgcctcagtttccccatctgtaaaatgagataatcatatctctctcataaagctgttgtgagataaagtgattttagat

SEQ ID NO: 463042 - DNA, 120 bp, Artificial Sequence
  ENSG00000157778_0 (sequence is synthesized)
actccgtctcaaacaaaacaaaacaaaaaaccttccagcttggagaaactgagagtgagcagtagggagtgagggggtccctgggaggaaccagaactcatcccgcttcagggtggggct

SEQ ID NO: 463043 - DNA, 120 bp, Artificial Sequence
  ENSG00000157778_1 (sequence is synthesized)
ggctggcccccttcttggccttggccggggcttcgtgtcacggagcgcccgagggacggtcggagcccaccccagcccgcccgccgcctgagcctggccgagctctctgcacctgcacac

SEQ ID NO: 463044 - DNA, 120 bp, Artificial Sequence
  ENSG00000157778_2 (sequence is synthesized)
atgaactgccactgcagagccccgccatggaagacacgccgttggtgatatcgaagcagaagacggaggtggtgtgcggggtccccacccaggtggtgtgtacggccttcagcagtcaca

SEQ ID NO: 463045 - DNA, 120 bp, Artificial Sequence
  ENSG00000157778_3 (sequence is synthesized)
tcctggtggtggtgacccagtttgggaagatgggcaccctggtctccctggagcccagcagcgtggccagtgacgtcagcaagcctgtgctcaccacaaaagtccttctggggcaggatg

SEQ ID NO: 463046 - DNA, 120 bp, Artificial Sequence
  ENSG00000157778_4 (sequence is synthesized)
agcctctcatccatgtctttgcaaagaacctggtagcgtttgtgtctcaagaagctggaaacagagcagtcctcctcgccgtggccgtgaaggacaaaagcatggaggggctgaaggcgc

SEQ ID NO: 463047 - DNA, 120 bp, Artificial Sequence
  ENSG00000157778_5 (sequence is synthesized)
tgagggaggtgatccgggtgtgccaggtgtggtgacctggaggcagccgccccgcgctgctcagcaggacacgtgaacacccagacacccactcagggactcaagtctcacctccctccc

SEQ ID NO: 463048 - DNA, 80 bp, Artificial Sequence
  ENSG00000157778_6 (sequence is synthesized)
acttccgggcgcggcgccggcttggtgagcgcgggtacccgcgggcttccccgggcggctgcgtccccagtagcccggcc

SEQ ID NO: 463049 - DNA, 120 bp, Artificial Sequence
  ENSG00000157778_7 (sequence is synthesized)
tgcagggccggggcggcggcgaggccgaggggcgggaagccactgcccggcctggcagtgtgaacgtgcaagtcgatcccctaacccagaaagccccaggcgcggtctctatgggcggcc

SEQ ID NO: 463050 - DNA, 120 bp, Artificial Sequence
  ENSG00000157778_8 (sequence is synthesized)
ccgctcctgcttctgttttatttttttacggacagggtctcgctctaccgcccgggttgtaatgcaatggtgtgatcacggctcaccgcagcctcgacctcccgggctgaagcgatcttc

SEQ ID NO: 463051 - DNA, 120 bp, Artificial Sequence
  ENSG00000157778_9 (sequence is synthesized)
tcaacgatcgtcctgtctcggcctcccaaagtgccgggatgacaggcatgagccaccgcgcctggccccttcttttgaatgggcctccttgcgtttccgtttcaatgccccgtgctactt

SEQ ID NO: 463052 - DNA, 120 bp, Artificial Sequence
  ENSG00000157778_10 (sequence is synthesized)
aaaaaagactcgtgtctcaggcagactcttactctggttactaagatcatctgtgcatgacggggagggtggaacaggtcccggaggagtcgtgaatggttctcaccaggacctgaatcg

SEQ ID NO: 463053 - DNA, 120 bp, Artificial Sequence
  ENSG00000157778_11 (sequence is synthesized)
ttgcttgtgtttgagaattggaggaatgagtcagcaggcgtggctcatggcccccccgtgtgcaggatcaattgtaggaggaaatttcttttttattaaaagcgaatgtgtatcccaaaa

SEQ ID NO: 463054 - DNA, 120 bp, Artificial Sequence
  ENSG00000157782_0 (sequence is synthesized)
cggcaggcaccctggcttcgggaacccaaactagccagcttccctttctgggcctgctggcctaattcccagccgcagctgccattctgggcccccctccctgaggccatctccctgcag

SEQ ID NO: 463055 - DNA, 120 bp, Artificial Sequence
  ENSG00000157782_1 (sequence is synthesized)
atttggcagcggggaaaggaggggccgagagaaggggagagaaccagagacaggactgagcgctaatctgatgtagatgatccggcagccttctccagcttggttcccctctgccatcag

SEQ ID NO: 463056 - DNA, 120 bp, Artificial Sequence
  ENSG00000157782_2 (sequence is synthesized)
ctctccaggtgactttccctgtgccctgcactctccccttctgctttcatctccttaagaaagtgcccagaaagttaaacccacacacaaacacacacacaatccacccaaaaaaaaaaa

SEQ ID NO: 463057 - DNA, 120 bp, Artificial Sequence
  ENSG00000157782_3 (sequence is synthesized)
aaatcggagagcaggagcaggcagacgagtaagagagcacgcgcgcaagagagggctcacatccgtcctggaggaagaacggcacagacggagggaggctggggttggcagagactggga

SEQ ID NO: 463058 - DNA, 120 bp, Artificial Sequence
  ENSG00000157782_4 (sequence is synthesized)
cggaagtccctcagtcccccaggagcctccttcatggacccggggatcccaagaggggctgcctcaacttaggatgggcaactgtgtcaagtatccactgagaaatctctcaaggaagat

SEQ ID NO: 463059 - DNA, 120 bp, Artificial Sequence
  ENSG00000157782_5 (sequence is synthesized)
gggctggcggctgacgccgagctcccgggaccgctcctgatgctggcccagaactgcgcagtcatgcacaacctgctgggccctgcctgcattttcctgcgcaagggcttcgctgagaac

SEQ ID NO: 463060 - DNA, 120 bp, Artificial Sequence
  ENSG00000157782_6 (sequence is synthesized)
aggcagcctgatagatcactgcgaccagaggaaattgaagagctccgagaggccttcagagaattcgacaaggacaaggatggctacatcaactgccgggatctgggcaactgcatgcgc

SEQ ID NO: 463061 - DNA, 120 bp, Artificial Sequence
  ENSG00000157782_7 (sequence is synthesized)
accatgggctacatgcccaccgagatggagctcatcgaactgtcccagcagatcaacatgaacctgggtggccatgtagattttgatgacttcgtggagctaatggggcctaaactcctg

SEQ ID NO: 463062 - DNA, 120 bp, Artificial Sequence
  ENSG00000157782_8 (sequence is synthesized)
gcagagacagcagatatgattggtgtaaaggaactgcgagatgctttccgagagtttgacaccaatggtgatggggaaataagcaccagtgagctgcgagaggctatgaggaagctcctg

SEQ ID NO: 463063 - DNA, 120 bp, Artificial Sequence
  ENSG00000157782_9 (sequence is synthesized)
ggtcatcaggtgggacaccgagacatagaggaaattatccgagatgtggacctcaatggggatggacgagtggactttgaagagtttgtccggatgatgtcccgctgaggccgcgagggc

SEQ ID NO: 463064 - DNA, 120 bp, Artificial Sequence
  ENSG00000157782_10 (sequence is synthesized)
ccctccaggactgccaagctcccaaaggcggggctaagaggagctagagcttgcctcacccgctgtagccgccgagagcccaggatgtactggcggatggggcctgcctgcaccccgggg

SEQ ID NO: 463065 - DNA, 120 bp, Artificial Sequence
  ENSG00000157782_11 (sequence is synthesized)
tacctgggccgccagggagccgggggtgggctctccggggacagccggcagcgcccccagatctgcaccgccagccgccgggagctccgggctccgggcgtagaggctgcgctgtcacat

SEQ ID NO: 463066 - DNA, 120 bp, Artificial Sequence
  ENSG00000157782_12 (sequence is synthesized)
tagaggctgcgctgtcacatgggcggcggcgacggggccgcatttaagcggccgggggacggcgcccgcctccagcgcgtcctcgggcttggctcccgccgggagccccgttctctgccc

SEQ ID NO: 463067 - DNA, 120 bp, Artificial Sequence
  ENSG00000157782_13 (sequence is synthesized)
ccgccgggccatgcgagcgcgggccccgccgcgatgagctcgcacatcgccaaaagcgagtccaagacgtcgctgctgaaggcggcggcggcggcggcgagcgggggcagccgggctccc

SEQ ID NO: 463068 - DNA, 80 bp, Artificial Sequence
  ENSG00000157782_14 (sequence is synthesized)
ccctgcccgggacccggggctgcctagccgccggctacccggctcctgcccggcgacgccgcagtcgtccggggacccca

SEQ ID NO: 463069 - DNA, 80 bp, Artificial Sequence
  ENSG00000157782_15 (sequence is synthesized)
gttcgcggaggcccctgtgccggccggcgccgcgagaggagggcgcgcgggggagccagcgtgtgctcccccaggcgcac

SEQ ID NO: 463070 - DNA, 120 bp, Artificial Sequence
  ENSG00000157782_16 (sequence is synthesized)
gggcgggatggggaggaacggggactgtccccggcgctcggcctccggggctctctgcgagcccggggccgcggggactccgttccagccgccgcgtccgaggcggacccgttcctccac

SEQ ID NO: 463071 - DNA, 120 bp, Artificial Sequence
  ENSG00000157782_17 (sequence is synthesized)
agactaactcctgcaactggaaagcgggggcgcccgccgacgaggaggccaccgtgccaagccggcagaggtcatgccaggcgccaagggccatgtgcccagctgctgctggctgggtgg

SEQ ID NO: 463072 - DNA, 120 bp, Artificial Sequence
  ENSG00000157782_18 (sequence is synthesized)
gccagggagcccgccagcagaccccacacagcatgtccgccccagggcaaagcctcccaccttcgctctgcgcccgtcccagctcgcctcagccctgttatctcagaaccaataaaaata

SEQ ID NO: 463073 - DNA, 120 bp, Artificial Sequence
  ENSG00000157782_19 (sequence is synthesized)
tgcactagccacacacgaaaaaggagggggcatgtttccactttgccccagtccccacctctcacaccctgcctgcttcatttatgtcagcaatggcacctgcatgtgcaacctctggtc

SEQ ID NO: 463074 - DNA, 120 bp, Artificial Sequence
  ENSG00000157782_20 (sequence is synthesized)
tggcagaccagccaagcctggtctccatgctgccagctccgattgccctcactgccttccagcggggatctggctggagtaggacaagtctgtttgggagctgggaggaatgacttagcc

SEQ ID NO: 463075 - DNA, 120 bp, Artificial Sequence
  ENSG00000157782_21 (sequence is synthesized)
ctggagattgactgaattgggaggttgggagcattttgggaaaggatgttgtctcattaggctctgagtgaacacttcccattggtgagaatagaagccccccgctgcccctgtctcttc

SEQ ID NO: 463076 - DNA, 87 bp, Artificial Sequence
  ENSG00000157782_22 (sequence is synthesized)
cgcatgtgccacacagagggcatcacattcagctctccccggaaccaccatttccgtcaaggattggagactctgtctgttggacca

SEQ ID NO: 463077 - DNA, 120 bp, Artificial Sequence
  ENSG00000157782_23 (sequence is synthesized)
ccatttccgtcaaggattggagactctgtctgttggaccaatttgatgcctgtgcacgctcagggctctctgaaccccgctccttgactctcagggtcccctcttgcggaaagcccctcc

SEQ ID NO: 463078 - DNA, 120 bp, Artificial Sequence
  ENSG00000157782_24 (sequence is synthesized)
cgggaccaggagccaggctgggcagggaggtgacaccctgcctctcttttgcatttgcttggtgctggctgaagatgtgccaggaggaacagaccagctacatggtggtgcagacgagcg

SEQ ID NO: 463079 - DNA, 120 bp, Artificial Sequence
  ENSG00000157782_25 (sequence is synthesized)
caactggcagctcaccaacctgagcttcctccaggcctgctccttggagatgtctctgccatctgttctgacgcctagattcagggttgccttgattgcccaggagacctgggcactgct

SEQ ID NO: 463080 - DNA, 120 bp, Artificial Sequence
  ENSG00000157782_26 (sequence is synthesized)
tgaggctggagacatgtgctttttggaccctggctccagccagaagcactggtggcccccggggtcctatgtggtgtcctgtgatcccatgacaggggaacgtacagggatgggggtcaa

SEQ ID NO: 463081 - DNA, 120 bp, Artificial Sequence
  ENSG00000157782_27 (sequence is synthesized)
attggagaaggtggggcagtgcccgcgaagcagtcacagccccattctgttgccacgtctcctcctgactcctccctgtcctcctaccctcgcttcaggatggccctgccttccctcccc

SEQ ID NO: 463082 - DNA, 120 bp, Artificial Sequence
  ENSG00000157782_28 (sequence is synthesized)
tcctgcgcctcttctgttgtcttgcagcctctgtcgccctgctcttcctgtttcattgggtggtgctctcttttccctgttgtgacctccctggactctgttttatttgcaggtttttgc

SEQ ID NO: 463083 - DNA, 81 bp, Artificial Sequence
  ENSG00000157782_29 (sequence is synthesized)
gtgacagagtgcaatggcaccatcatagctcactacagcctcaaactcctgctgacccattcttgtatctggaacaagggg

SEQ ID NO: 463084 - DNA, 120 bp, Artificial Sequence
  ENSG00000157782_30 (sequence is synthesized)
caaactcctgctgacccattcttgtatctggaacaaggggctggaggcacagaggttctgtgcccaggctggtggggctggtggcttcttgggcatctcctgttaggggcccaggagctt

SEQ ID NO: 463085 - DNA, 120 bp, Artificial Sequence
  ENSG00000157782_31 (sequence is synthesized)
ctatgtctaagggagatgtggggctttcttctcccctcaaggacctgatccaggcacacctgtgctgcatcctcgtcacctcctacccagtgcctgctgccacgtggatggcccccaggt

SEQ ID NO: 463086 - DNA, 120 bp, Artificial Sequence
  ENSG00000157782_32 (sequence is synthesized)
taggtattttgtgacttccaggtcccttgtcgcggctaataggacatgttcttttgtttcaggatagatcactgcgaccagaggaaattgaaggtaaaacttggccccttgggggaaagg

SEQ ID NO: 463087 - DNA, 120 bp, Artificial Sequence
  ENSG00000157782_33 (sequence is synthesized)
actgcctagccctctaggaaggtgtgggaagggaggttgatgggaagagaggcccctggaaatggggcctggtgcaacgcggggtatcttctgtgaaaccagctgctgaaggtgtgcaca

SEQ ID NO: 463088 - DNA, 120 bp, Artificial Sequence
  ENSG00000157782_34 (sequence is synthesized)
ggaggcaagagaaatgccccagcatcctgggaagctcctgggcctctctttccatgccggtgggcctttgggctgcctttgcccacagaggctctgcgggtcctacccctgaccacatcc

SEQ ID NO: 463089 - DNA, 120 bp, Artificial Sequence
  ENSG00000157782_35 (sequence is synthesized)
caggcaggcatggggcggctattggaatcctatctgcagtataaatacttcaaaagaagcctgagcctcaagtcccagatcaggggagggagcttggacagagaaaggtctctggtaaag

SEQ ID NO: 463090 - DNA, 120 bp, Artificial Sequence
  ENSG00000157782_36 (sequence is synthesized)
gggggcaatgacactggagaaggagctcaactttgggatctgctgctgccaatcgccatgctggggcgacctctccttccttcctgccttctctagtttgacaccaatggtgatggggaa

SEQ ID NO: 463091 - DNA, 120 bp, Artificial Sequence
  ENSG00000157782_37 (sequence is synthesized)
gaaggtaggtggggcttgaaagtgggagagaagcaagccagcagtggccatccatggagccctccaattgtgtatccatcatgcaaccatcaatccgccctaattttccaacccccagcc

SEQ ID NO: 463092 - DNA, 120 bp, Artificial Sequence
  ENSG00000157782_38 (sequence is synthesized)
ctttcatcctcttatccctccgtccatgcccccgtctaatccatctcccatcccttccccatgcatctattcatgcatctgtccatccatctatccatcctctacctttccattcatctg

SEQ ID NO: 463093 - DNA, 120 bp, Artificial Sequence
  ENSG00000157782_39 (sequence is synthesized)
tccatttatccatccattcatctacctatctatccatctgtccaccatccatccatccatccatttatctacccatctatccatccatccatcctctacctatccatccatctgtccatt

SEQ ID NO: 463094 - DNA, 87 bp, Artificial Sequence
  ENSG00000157782_40 (sequence is synthesized)
ccatccatccatcctctacctatccatccatctgtccatttatccattcatccattcatctacctatctatctatctgtccatgtcc

SEQ ID NO: 463095 - DNA, 120 bp, Artificial Sequence
  ENSG00000157782_41 (sequence is synthesized)
atccacctatccatccatctgtccatccattcatctacctattcatctatctgtccatctttccatatctatctctccatttttcatctgtttatctccttatctgtccagatgcctatt

SEQ ID NO: 463096 - DNA, 120 bp, Artificial Sequence
  ENSG00000157782_42 (sequence is synthesized)
tatccattcctccatctctaagcaatcattcctatagcaatttatccatgcatttatctgtccattcgtgcatctattcattcttctctacattcacccatgaatctatctatgtattca

SEQ ID NO: 463097 - DNA, 120 bp, Artificial Sequence
  ENSG00000157782_43 (sequence is synthesized)
tctactcatatagatctctctatgtgttcacacttctatacttccattcacacattcatgtctcttcgtctgcatatacttctacccatacttgcattgatctatccatctatctgttca

SEQ ID NO: 463098 - DNA, 120 bp, Artificial Sequence
  ENSG00000157782_44 (sequence is synthesized)
gtcatttcctcatctatatccatctactcatccattcacccatccctgtgtccatctgcacccatccttctctatccatttatctgtctacccacgcatgcatccatccacggtaggtgt

SEQ ID NO: 463099 - DNA, 120 bp, Artificial Sequence
  ENSG00000157782_45 (sequence is synthesized)
tttctgaacattacattcctcaactggacactcaggctccctaagatctgaccacagctcacctccccagccacaactcaacagtccttcattcacactccaccaaaatacttgtgatca

SEQ ID NO: 463100 - DNA, 120 bp, Artificial Sequence
  ENSG00000157782_46 (sequence is synthesized)
tcattcacactccaccaaaatacttgtgatcagtgaagctgctagggtccctcttgaatacactgatctttttgccaggagggcttttttgttgttgtttgtttgtttgtttgtttgaga

SEQ ID NO: 463101 - DNA, 120 bp, Artificial Sequence
  ENSG00000157796_0 (sequence is synthesized)
atagttcgcgtagcggctcgagcgtggagatgaagcgtattttctcactgctagaaaagacttggcttggcgcaccaatacagtttgcctggcaaaaaacatcaggaaactaccttgcag

SEQ ID NO: 463102 - DNA, 120 bp, Artificial Sequence
  ENSG00000157796_1 (sequence is synthesized)
taacaggagctgattatattgtgaaaatctttgatcgccatggtcaaaaaagaagtgaaattaacttacctggtaactgtgttgccatggattgggataaagatggagatgtcctagcag

SEQ ID NO: 463103 - DNA, 120 bp, Artificial Sequence
  ENSG00000157796_2 (sequence is synthesized)
tgattgctgagaaatctagctgcatttatctttgggatgccaacacaaataagaccagccagttagacaatggcatgagggatcaaatgtctttccttctttggtcaaaagttggaagtt

SEQ ID NO: 463104 - DNA, 120 bp, Artificial Sequence
  ENSG00000157796_3 (sequence is synthesized)
tcctggctgttggaactgttaaaggaaatttgcttatttataatcatcagacatctcgaaagattcctgtccttggaaaacatactaagagaatcacttgtggatgttggaatgcagaaa

SEQ ID NO: 463105 - DNA, 120 bp, Artificial Sequence
  ENSG00000157796_4 (sequence is synthesized)
atctgcttgctttaggtggtgaagataaaatgattacagttagtaatcaggaaggtgacacgataagacagacacaagtgagatcagagcctagcaacatgcagtttttcttgatgaaga

SEQ ID NO: 463106 - DNA, 120 bp, Artificial Sequence
  ENSG00000157796_5 (sequence is synthesized)
tggatgaccgaacctctgctgctgaaagcatgataagtgtggtgcttggcaagaaaactttgttttttttaaatctgaatgaaccagataacccagctgatcttgaatttcagcaggact

SEQ ID NO: 463107 - DNA, 120 bp, Artificial Sequence
  ENSG00000157796_6 (sequence is synthesized)
ttggcaacattgtctgctataattggtatggtgatggccgcatcatgattggtttttcatgtggacattttgtggtcatttctactcatactggagagcttggtcaagagatatttcagg

SEQ ID NO: 463108 - DNA, 120 bp, Artificial Sequence
  ENSG00000157796_7 (sequence is synthesized)
ctcgtaaccataaagataatctaaccagcattgcagtatcacagactcttaacaaagttgctacatgtggagataactgcattaaaatccaagacttggttgacttaaaagacatgtatg

SEQ ID NO: 463109 - DNA, 120 bp, Artificial Sequence
  ENSG00000157796_8 (sequence is synthesized)
ttatactcaacctggatgaggaaaataaaggattgggtaccttgtcctggactgatgatggccagttgctagcactctctacccaaaggggctcacttcatgttttcctgaccaagcttc

SEQ ID NO: 463110 - DNA, 120 bp, Artificial Sequence
  ENSG00000157796_9 (sequence is synthesized)
ccatacttggggatgcctgcagcacaaggattgcctatctcacctccctccttgaagtcaccgtagccaaccctgttgaaggagagctaccaatcacagtttctgttgatgtggaaccca

SEQ ID NO: 463111 - DNA, 120 bp, Artificial Sequence
  ENSG00000157796_10 (sequence is synthesized)
actttgtggcagtaggtctttatcatctggctgtaggaatgaataatcgagcttggttttatgtccttggagaaaatgctgtgaaaaaattgaaagatatggagtatctgggaacagtag

SEQ ID NO: 463112 - DNA, 120 bp, Artificial Sequence
  ENSG00000157796_11 (sequence is synthesized)
ccagtatttgccttcattctgactatgctgctgcactttttgaaggcaaagtccagttacatttgatagaaagcgaaatcttggatgctcaagaagaacgtgagactcggcttttcccag

SEQ ID NO: 463113 - DNA, 120 bp, Artificial Sequence
  ENSG00000157796_12 (sequence is synthesized)
cagtggatgataagtgccgtatcttatgccatgccttaactagtgatttcctcatctatggtacagatactggtgtcgttcagtatttctacattgaagactggcaattcgttaatgatt

SEQ ID NO: 463114 - DNA, 120 bp, Artificial Sequence
  ENSG00000157796_13 (sequence is synthesized)
atcgacatcctgtcagtgtgaaaaagatttttcccgacccaaatgggaccagattagttttcattgatgaaaaaagtgatggatttgtttactgtccagtcaatgacgctacctatgaga

SEQ ID NO: 463115 - DNA, 120 bp, Artificial Sequence
  ENSG00000157796_14 (sequence is synthesized)
ttccagatttttcaccaaccattaaaggtgttctttgggaaaactggccaatggataaaggtgtatttattgcttatgatgatgataaggtgtacacttatgtctttcacaaggacacta

SEQ ID NO: 463116 - DNA, 120 bp, Artificial Sequence
  ENSG00000157796_15 (sequence is synthesized)
tacaaggagccaaggttattttggctggtagcaccaaagttccttttgctcataaacctttgctgctatataatggagagctgacctgccaaacacagagtggaaaagtaaacaacatct

SEQ ID NO: 463117 - DNA, 120 bp, Artificial Sequence
  ENSG00000157796_16 (sequence is synthesized)
accttagcacccatggctttctcagcaacttaaaagatacggggcctgacgaactgagaccaatgctggcacagaatttaatgctaaagaggttttctgatgcttgggaaatgtgcagga

SEQ ID NO: 463118 - DNA, 120 bp, Artificial Sequence
  ENSG00000157796_17 (sequence is synthesized)
ttctgaatgatgaggctgcctggaatgagttggccagagcttgtctacatcacatggaagtggagtttgcaatccgtgtttatcggagaattggaaatgttggcatagtgatgtccttgg

SEQ ID NO: 463119 - DNA, 120 bp, Artificial Sequence
  ENSG00000157796_18 (sequence is synthesized)
ctcaggacttgtaccttgcatccagctgtcctattgctgccctggagatgagaagggatttacagcattgggacagtgctctacaactggcaaagcatttggccccagaccagatacctt

SEQ ID NO: 463120 - DNA, 120 bp, Artificial Sequence
  ENSG00000157796_19 (sequence is synthesized)
ttatatcaaaagaatatgctattcagcttgaattcgcgggtgattatgtaaatgctttggctcattatgagaaaggaataacaggtgataataaggaacatgatgaagcttgtctggctg

SEQ ID NO: 463121 - DNA, 120 bp, Artificial Sequence
  ENSG00000157796_20 (sequence is synthesized)
gagtggcccagatgtccataagaatgggagacatacgtcgaggggttaaccaagccctcaagcatcccagcagggtccttaaaagagactgtggagccatattggagaatatgaagcaat

SEQ ID NO: 463122 - DNA, 120 bp, Artificial Sequence
  ENSG00000157796_21 (sequence is synthesized)
tttcagaagcggcccaactgtatgaaaaaggtctctactacgataaagcagcatctgtttacatccgctctaagaattgggcaaaagttggtgatcttctgccccacgtttcttctccta

SEQ ID NO: 463123 - DNA, 120 bp, Artificial Sequence
  ENSG00000157796_22 (sequence is synthesized)
agatccatttgcagtatgccaaagccaaggaagcagatggaagatacaaagaagctgttgtagcttatgaaaatgcaaaacagtggcaaagtgtaatccgcatctatctggatcacctca

SEQ ID NO: 463124 - DNA, 120 bp, Artificial Sequence
  ENSG00000157796_23 (sequence is synthesized)
ataatcctgaaaaagctgtcaatattgttagagagacccagtctctggatggagccaaaatggtagccaggttttttctacagcttggtgactatgggtctgccatccagtttcttgtca

SEQ ID NO: 463125 - DNA, 120 bp, Artificial Sequence
  ENSG00000157796_24 (sequence is synthesized)
tgtccaaatgcaacaatgaagctttcacactggctcagcaacacaacaaaatggaaatctatgcagatattattggttctgaagacactactaatgaagactatcaaagcattgccttat

SEQ ID NO: 463126 - DNA, 120 bp, Artificial Sequence
  ENSG00000157796_25 (sequence is synthesized)
actttgaaggagaaaagagatatcttcaggctggaaaattcttcttgctgtgtggccaatattcacgagcacttaaacacttcctgaaatgcccaagctcggaagataatgtggcaatag

SEQ ID NO: 463127 - DNA, 120 bp, Artificial Sequence
  ENSG00000157796_26 (sequence is synthesized)
aaatggcaattgaaactgttggtcaggccaaagatgaactgctgaccaatcagctgatagaccatctcctgggggagaacgatggcatgcctaaggatgccaagtacctgttccgcttgt

SEQ ID NO: 463128 - DNA, 120 bp, Artificial Sequence
  ENSG00000157796_27 (sequence is synthesized)
acatggctctgaagcaataccgagaagctgcccagactgccatcatcattgccagagaagagcagtctgcaggcaactaccggaatgcacacgatgttctcttcagtatgtatgcagaac

SEQ ID NO: 463129 - DNA, 120 bp, Artificial Sequence
  ENSG00000157796_28 (sequence is synthesized)
tgaaatcccagaagatcaaaattccctccgagatggccaccaacctcatgattctgcacagctatatactagtaaagattcatgttaaaaatggagatcacatgaaaggggctcgcatgc

SEQ ID NO: 463130 - DNA, 120 bp, Artificial Sequence
  ENSG00000157796_29 (sequence is synthesized)
tcattcgggtggccaacaacatcagcaaatttccatcacacattgtacccatcctgacgtcaactgtgattgagtgtcacagggcaggcctgaagaactctgctttcagcttcgcagcta

SEQ ID NO: 463131 - DNA, 120 bp, Artificial Sequence
  ENSG00000157796_30 (sequence is synthesized)
tgttgatgaggcctgaataccgcagcaaaatagatgccaaatacaaaaagaagatcgagggaatggtcaggagacccgatatatctgagatagaagaggccacgactccatgtccattct

SEQ ID NO: 463132 - DNA, 120 bp, Artificial Sequence
  ENSG00000157796_31 (sequence is synthesized)
gcaaatttcttctcccagagtgtgaactcctctgtcctggatgtaaaaacagtatcccatattgcattgcaacaggtcgacacatgttgaaagatgactggacggtgtgtccacattgtg

SEQ ID NO: 463133 - DNA, 120 bp, Artificial Sequence
  ENSG00000157796_32 (sequence is synthesized)
acttccctgctctatactcagaattgaagatcatgctaaacactgaaagcacatgtcctatgtgttcagaaagattaaacgctgctcagctgaaaaagatttcagactgtacccagtacc

SEQ ID NO: 463134 - DNA, 120 bp, Artificial Sequence
  ENSG00000157796_33 (sequence is synthesized)
tgcgaacggaggaggaactgtgattggcacgtgcagatacaatgctcctgagaagacagcattttccacaggaggctgtttcctcccctggtggatttaagagacggtcctttctggata

SEQ ID NO: 463135 - DNA, 120 bp, Artificial Sequence
  ENSG00000157796_34 (sequence is synthesized)
cagagaaatgaaacaacggtgacctctccaggtcggcactttccacttctgtacggtggcaaaacgatgacatgtaaccttgctgtttattgtactttgtatattatttcctcttcaaag

SEQ ID NO: 463136 - DNA, 120 bp, Artificial Sequence
  ENSG00000157796_35 (sequence is synthesized)
tctttcttacacactctatcctctgcactgttaatagtaacctatgacataattgtaaatattcagctttttgctaacttttgtattttgaaaaactttaaaataaaattgttgactaga

SEQ ID NO: 463137 - DNA, 120 bp, Artificial Sequence
  ENSG00000157796_36 (sequence is synthesized)
ttttaggaaagcttatatagtaaatacttaagtgaatcagccaaactttgttagctaatatgaatctggcaatcatgtttacaatttaaaacgtctaagactactttgctcctgatttta

SEQ ID NO: 463138 - DNA, 120 bp, Artificial Sequence
  ENSG00000157796_37 (sequence is synthesized)
atattcagggcaaaaatataaaacaaagtatagttgaaaatcaatcttaaaaataaaataggtagttctgggtaacatggagtaagcacactccaccccatgtctcccactgagtacagc

SEQ ID NO: 463139 - DNA, 120 bp, Artificial Sequence
  ENSG00000157796_38 (sequence is synthesized)
tataaaacgtgaacagaatgcatggagcagatatttaaggactctgaaaagtaaatggtagcaggcagattggaaaagaagacggaatttgaagtgccaactaaccagtggggagtctcc

SEQ ID NO: 463140 - DNA, 120 bp, Artificial Sequence
  ENSG00000157796_39 (sequence is synthesized)
tcttttcttccgaagcattcttctatttgtgttcctaaggatctctaaagactcaaattgtcttctgggaagaacctcctgtgacctttgagaatattatctttaaagaggatcttgcat

SEQ ID NO: 463141 - DNA, 120 bp, Artificial Sequence
  ENSG00000157796_40 (sequence is synthesized)
gagactgaatagttctgattctcaaattgcatggtggacatgtgttaagaggtgtagacagaaagttgttgtctttctcattagagtaacccaaagctaaaggaatgttatatatttaat

SEQ ID NO: 463142 - DNA, 120 bp, Artificial Sequence
  ENSG00000157796_41 (sequence is synthesized)
tttccatcacgtaagtaccactgaccagagctctcacccatgccccatgccccatgccgcatgctagcccagcgccccttttgcaggctcccctcatacactaactcgtttaattctcac

SEQ ID NO: 463143 - DNA, 120 bp, Artificial Sequence
  ENSG00000157796_42 (sequence is synthesized)
agcagctccatgaagtggtatgtcagggccccaagaccactcccaggtttgatgactcttcactgggaggatttacaagagtcaacacacagtagtaccaaagccgagatttatcacagc

SEQ ID NO: 463144 - DNA, 120 bp, Artificial Sequence
  ENSG00000157796_43 (sequence is synthesized)
aaaaggatctgaggcaaaatgagcagaaggattcacgcaaaggcgagcaggtgcaggcacggacctccaagagtcccttcccagtggagcacacaggacgcaagttccgtaactcctcca

SEQ ID NO: 463145 - DNA, 120 bp, Artificial Sequence
  ENSG00000157796_44 (sequence is synthesized)
cgactgacttgtacaacatggtgaaacgtagagtgccaagaagctcattagagactcagcagccaggagttttattggggtgtggtcacataggtgccccctgcgtggcatgtgcccagt

SEQ ID NO: 463146 - DNA, 120 bp, Artificial Sequence
  ENSG00000157796_45 (sequence is synthesized)
tttccaggctcccagagagcaggtgttcggcataaaccacgttgtttgtacaaagattttaggcacggtgagccactcatcagttctggaaacggtgggaaccgtctccaaatctatgtt

SEQ ID NO: 463147 - DNA, 120 bp, Artificial Sequence
  ENSG00000157796_46 (sequence is synthesized)
ccagatgcgagccgagggttagctgttcaagcctttccaaggatgacagtctcaggcctgcacacacaagtacttttctgaacaaactgggacaaaagaaataacatttgcccaagatca

SEQ ID NO: 463148 - DNA, 120 bp, Artificial Sequence
  ENSG00000157796_47 (sequence is synthesized)
cattgtcagctaataatagcctgactctgtgttcacaagcacggtaggacgttgcctctgaaaaggcctcactattccaaaagacatgtcatgataacattcttaagtgattaaatactg

SEQ ID NO: 463149 - DNA, 120 bp, Artificial Sequence
  ENSG00000157796_48 (sequence is synthesized)
tcacattacatgacagggatcagcaaactttttctgtaaaggaccagatgttaaatattttagacttcgtgagacatgtggcctctgtcacaactgctcaactctgccatcttctcatga

SEQ ID NO: 463150 - DNA, 120 bp, Artificial Sequence
  ENSG00000157796_49 (sequence is synthesized)
ataatacgtaaacgaatgggcatgactgtgtttcaatagagctttatgtttggacacaaatgttaaccacatacacttttaacatgtcacaaaaatatttttcttttgatgttttttcaa

SEQ ID NO: 463151 - DNA, 120 bp, Artificial Sequence
  ENSG00000157796_50 (sequence is synthesized)
ccatttaaaaatgtaaaaatcatccttagctcatggaccatacaaaaagtcagagggctagatttggtccatgggtcataattggccaacccacattctctaagtgtatttttgttgttg

SEQ ID NO: 463152 - DNA, 120 bp, Artificial Sequence
  ENSG00000157796_51 (sequence is synthesized)
taggacaggcactctcatgactgctggtggggatggaaattggtatggcctttgcagaaagcagtttggcaatttgtggtaagagtattttttaaaaggtcctgtttttgagccggtaat

SEQ ID NO: 463153 - DNA, 120 bp, Artificial Sequence
  ENSG00000157796_52 (sequence is synthesized)
tctgggtgtctgtcctgaagaaagaatttgatgcctgcagagagattagtgtataaagtcattaatccccctaatgcttttatcagcagtcctgtcagatgcaaaaaatatctaagaggc

SEQ ID NO: 463154 - DNA, 120 bp, Artificial Sequence
  ENSG00000157796_53 (sequence is synthesized)
atgaaaggaaactcatggaagtgttgcctcaaggggtgcaggtcctagtgttacaaggcagaacatggtgtcatcaaaggaaaagcacttgatgggcagttagcctgaccccacagctac

SEQ ID NO: 463155 - DNA, 120 bp, Artificial Sequence
  ENSG00000157796_54 (sequence is synthesized)
gtactttcctcattaaacagatcatatctggttctttgcagaaaaagcaaagttcagagaccatgaccctgttttcctacagaaccagggtggaatcccgcctgtatcactgaggacagc

SEQ ID NO: 463156 - DNA, 120 bp, Artificial Sequence
  ENSG00000157796_55 (sequence is synthesized)
ccgtatcttatgccatgccttaactagtgatttcctcatctatggtacagatgtatgtattgccttcttttttagagaacactgggaatttttaatttttattttgtgatctcagtcatt

SEQ ID NO: 463157 - DNA, 120 bp, Artificial Sequence
  ENSG00000157796_56 (sequence is synthesized)
ctcttttcctaccagtcttttttctatattgaatccaatacaattaatgaagttatctgtgattaattatatacattcatgtgtctctttgcagtggggatacattctgagaaacgtgtc

SEQ ID NO: 463158 - DNA, 120 bp, Artificial Sequence
  ENSG00000157796_57 (sequence is synthesized)
attgggcaatttcatcattgtgtggatgtcatagagtgtgcttacaggaacctagatggtacagcccactgcacacctagcctgtgtggtagagcctattgctcctaggctacaaaccag

SEQ ID NO: 463159 - DNA, 120 bp, Artificial Sequence
  ENSG00000157796_58 (sequence is synthesized)
tacagcatgtgactgtactgaatactataggtaattgtaacacaatgctatctagacatagacaaggtacagtatatgtgtgatataaaatatttaaaatggcatgcctgtatagggcac

SEQ ID NO: 463160 - DNA, 120 bp, Artificial Sequence
  ENSG00000157796_59 (sequence is synthesized)
ttaccatgacaggagcttgcaggactggaaatggctctgggtgagtgagtgagtgagtggtgagtgaacgtgaaggcctgcagcattactgtacactaccatagatttttatcaacactg

SEQ ID NO: 463161 - DNA, 120 bp, Artificial Sequence
  ENSG00000157796_60 (sequence is synthesized)
tacacttagggacactaaacttatttaaacattttttcttcaaaaataaattaaccttagctcactgtaactttataagctttatatttaaaaaaactttttgactcttttgtagtaaca

SEQ ID NO: 463162 - DNA, 120 bp, Artificial Sequence
  ENSG00000157796_61 (sequence is synthesized)
aaaaactaagacacaaacacacacattagtgcaggcctgcatagcatcaggatcatcagtatcactgtctcccacctccgcatcttgtcccactgaaaggtcttcagcgggaataacatg

SEQ ID NO: 463163 - DNA, 120 bp, Artificial Sequence
  ENSG00000157796_62 (sequence is synthesized)
tgagaagggatttacagcattgggacagtgctctacaactggcaaagcatttggccccagaccagataccttttatatcaaaagaatatgctattcagcttgaattcgctttgccacatt

SEQ ID NO: 463164 - DNA, 120 bp, Artificial Sequence
  ENSG00000157796_63 (sequence is synthesized)
cagagccccattgccctggccctccacctgcatcctgaggatgactgagtcttagaatataaaacttctgtgctaagaaggaaagatgatccaccaagtcctgtcagagtacagacaccc

SEQ ID NO: 463165 - DNA, 120 bp, Artificial Sequence
  ENSG00000157796_64 (sequence is synthesized)
cagtaagccctcggaccatccagaactcttcgattttcacttccttcaggaaaattgaagttttgtaacaaattctcaaacttgtctcattatggtcagatgaattgagttcaattgaaa

SEQ ID NO: 463166 - DNA, 120 bp, Artificial Sequence
  ENSG00000157796_65 (sequence is synthesized)
tgtgtaagagatgagaagggatttacagcattgggacagtgctctacaactggcaaagcatttggccccagaccagataccttttatatcaaaagaatatgctattcagcttgaattcgc

SEQ ID NO: 463167 - DNA, 120 bp, Artificial Sequence
  ENSG00000157796_66 (sequence is synthesized)
aggtgatagctggaaacactgctaaatatttgagatgctctacctcaatgtaaattctgccgcctcaggtttccctgatcttgcaatggaaattttgcagtacaaaccccctccccatgt

SEQ ID NO: 463168 - DNA, 120 bp, Artificial Sequence
  ENSG00000157796_67 (sequence is synthesized)
cagagatggctatttctgctatctaatcgtatttctcaaagtatttccaaaaatgtagctgccagtgtgcaagctcaataagaaaacggtggggggccaggtgcagtggctcacacctat

SEQ ID NO: 463169 - DNA, 120 bp, Artificial Sequence
  ENSG00000157800_0 (sequence is synthesized)
aaaccctggtcgcaccgccaggggtgagctggcggcgggggaggcgggcagcggagccaagctgacccggcgagcggagccggggctggagagcggcgaccactgcggatctcggaagga

SEQ ID NO: 463170 - DNA, 120 bp, Artificial Sequence
  ENSG00000157800_1 (sequence is synthesized)
agaaatgatgtaaatcactcatccaaaccttaaggtcaaaggtgagaaggaaggtcaggaagaacatggcctggccaaatgtttttcaaagagggtctctgctgtcccagttcagccatc

SEQ ID NO: 463171 - DNA, 120 bp, Artificial Sequence
  ENSG00000157800_2 (sequence is synthesized)
atcatgttgtagtgttcctgctcactttcttcagttattcgttgctccatgcttcacgaaaaacatttagcaatgtcaaagtcagtatctctgagcagtggaccccaagtgcttttaaca

SEQ ID NO: 463172 - DNA, 120 bp, Artificial Sequence
  ENSG00000157800_3 (sequence is synthesized)
cgtcagttgagctgcctgtggagatctggagcagcaaccatttgttccccagtgcagagaaagcgactcttttcctcggcacactggataccattttcctcttctcctatgctgtgggcc

SEQ ID NO: 463173 - DNA, 120 bp, Artificial Sequence
  ENSG00000157800_4 (sequence is synthesized)
tattcatcagtggcatcgttggggatcggttgaatttgcgatgggttctgtcttttggcatgtgctcttctgcattagtggtgtttgtctttggtgcgctcacagaatggctgcgtttct

SEQ ID NO: 463174 - DNA, 120 bp, Artificial Sequence
  ENSG00000157800_5 (sequence is synthesized)
acaacaaatggctgtactgctgcctgtggattgtgaacggcctgctgcagtccactggttggccctgtgtggttgctgttatgggcaactggtttgggaaagccggacgaggagttgttt

SEQ ID NO: 463175 - DNA, 120 bp, Artificial Sequence
  ENSG00000157800_6 (sequence is synthesized)
ttggtctctggagtgcctgtgcttcggtgggcaacattttgggagcgtgcctagcttcttctgttcttcagtatggttatgagtatgcctttctggtgacggcgtctgtgcagtttgctg

SEQ ID NO: 463176 - DNA, 120 bp, Artificial Sequence
  ENSG00000157800_7 (sequence is synthesized)
gtgggatcgttatcttctttggactcctggtgtcaccagaagaaattggtctctcgggtattgaggcagaagaaaactttgaagaagactcacacaggccattaattaatggtggtgaaa

SEQ ID NO: 463177 - DNA, 120 bp, Artificial Sequence
  ENSG00000157800_8 (sequence is synthesized)
atgaagacgaatatgagccgaattattcaatccaagatgatagttctgttgcccaagtcaaggcgataagcttctaccaggcatgttgccttcctggagtcataccgtactcactggcct

SEQ ID NO: 463178 - DNA, 120 bp, Artificial Sequence
  ENSG00000157800_9 (sequence is synthesized)
acgcctgcttgaagttagtgaattactccttcttcttctggctccccttttatctgagtaacaacttcggctggaaggaggcggaagccgacaagctgtccatttggtacgacgttggag

SEQ ID NO: 463179 - DNA, 120 bp, Artificial Sequence
  ENSG00000157800_10 (sequence is synthesized)
ggatcataggtggaactttgcaaggcttcatctctgatgtactacagaagagagcgccggttcttgccctgagtctgcttctggcagttgggtccctcatcgggtatagtcgttctccaa

SEQ ID NO: 463180 - DNA, 120 bp, Artificial Sequence
  ENSG00000157800_11 (sequence is synthesized)
atgataagtccatcaatgcccttctgatgactgttacaggattttttattggtggaccttctaatatgattagttctgctatttctgcggacttgggtcgccaggagctcatccaaagga

SEQ ID NO: 463181 - DNA, 120 bp, Artificial Sequence
  ENSG00000157800_12 (sequence is synthesized)
gcagtgaagctttggccactgtcacaggaattgtggatggttcggggagcattggagctgcagtgggccagtatttagtgtctctgatccgggacaagctaggatggatgtgggttttct

SEQ ID NO: 463182 - DNA, 120 bp, Artificial Sequence
  ENSG00000157800_13 (sequence is synthesized)
ctcacatattgagggagtgaccggtgcccgcgagacagaaagaacaatgtcagccacatcaggaccgctggggcttcgagtctgccctaatttgggtttgtctaggagctccagcctgat

SEQ ID NO: 463183 - DNA, 120 bp, Artificial Sequence
  ENSG00000157800_14 (sequence is synthesized)
cttggattgtcaggcgtctctcaacactgccagccacctgagatgctgaccagcagtgaaggctgcactagttttctacactacaggaattactgttgatgatttttgctgttgtttcat

SEQ ID NO: 463184 - DNA, 120 bp, Artificial Sequence
  ENSG00000157800_15 (sequence is synthesized)
gaatgtgccgagtgacttctgactctgccagcatctttgacctctgactctgcccgcgtctttgtttggcctattgaggtttagcgttttaaccttaactgttgttttggacttgaactt

SEQ ID NO: 463185 - DNA, 120 bp, Artificial Sequence
  ENSG00000157800_16 (sequence is synthesized)
tctctagccttgaaaatggagtgaacaggaggcaaagccacgcgtggtttgtgttggtggtatgttccacaaatggaagagatcattgcattttgctttggtaatgagtttacagagagt

SEQ ID NO: 463186 - DNA, 120 bp, Artificial Sequence
  ENSG00000157800_17 (sequence is synthesized)
gggtcatctttgaagcatcaaatcctgatcaaatgctcaagctggaccgagctgcaagcctgccttggacaaagaatccctctgttcactgtggtgggaaagatcacactacatgcctgt

SEQ ID NO: 463187 - DNA, 120 bp, Artificial Sequence
  ENSG00000157800_18 (sequence is synthesized)
tgattggctcagtcactctgtgtctgatctaaacgtcattcagccctagaagcatgaattgcttcaaattattgtcaacttgttctcttccattttcattcaaattaactttgactcctg

SEQ ID NO: 463188 - DNA, 120 bp, Artificial Sequence
  ENSG00000157800_19 (sequence is synthesized)
gaagtattgagtcttcctttcaaggaccataaggtacatcagttatcttgaacattctgacgtgtaaaggaccataaggtacatcatttatcttgaacattccgacgtgtaactcacagc

SEQ ID NO: 463189 - DNA, 120 bp, Artificial Sequence
  ENSG00000157800_20 (sequence is synthesized)
cgaagcactccatcccagatttgttgtctgggaacttaggatcctctaggaagctaatctgcttagtctatttttagaggattgatctctggcacaagcagcttcctggagttacctcag

SEQ ID NO: 463190 - DNA, 120 bp, Artificial Sequence
  ENSG00000157800_21 (sequence is synthesized)
cagaagactagaattagagaaaagggaaagaccttttcttctagtaagtgtcaagtacagatgctctttgacttatgatggggttatgtcccagtaaacccattggaagtcaaatgcatt

SEQ ID NO: 463191 - DNA, 120 bp, Artificial Sequence
  ENSG00000157800_22 (sequence is synthesized)
taatacccctgactggacaccacagcttagcctcgtccaccctaaatgtactcagaacacttagaattgcccacagttgggcagaatcatctaacacaaactctattttataatcgagtg

SEQ ID NO: 463192 - DNA, 120 bp, Artificial Sequence
  ENSG00000157800_23 (sequence is synthesized)
ttgaatatatcatgtaatttattgaatattgtacattatgttgaaattgcaaccatttcacaccattgtaaagtccaaaaatcagaagctgaggactgtctgtacatgacattgaatcac

SEQ ID NO: 463193 - DNA, 120 bp, Artificial Sequence
  ENSG00000157800_24 (sequence is synthesized)
atgaatggattactagggcctgaggggtgtccgttctttagaaaaatgtagagtatatatatcttcagggctgtgaattccatactagttatcaatattttaagatcattctgtatatac

SEQ ID NO: 463194 - DNA, 120 bp, Artificial Sequence
  ENSG00000157800_25 (sequence is synthesized)
atattttaaattatgcaagcaaactaggaggagaatgtgcaattttgagggatacctaatttgcattcggttaggggatatttttcaacctcttgctttatactctgatatggggtgtgt

SEQ ID NO: 463195 - DNA, 120 bp, Artificial Sequence
  ENSG00000157800_26 (sequence is synthesized)
ttatgaacttgttaatgttatttaatcatgcagatttccaatcagtgtattgctcatttactgacaaaaagggaaaatacgaaacacagaaagggaaaataaactgacttttataatgaa

SEQ ID NO: 463196 - DNA, 120 bp, Artificial Sequence
  ENSG00000157800_27 (sequence is synthesized)
actcctggtgtcaccagaagaaattggaaaactctgagctccttttagtgagtgaaaggagaacagtactgccgtttgagtcctgtcgacattgtagccagcccctggcacagctggacg

SEQ ID NO: 463197 - DNA, 120 bp, Artificial Sequence
  ENSG00000157800_28 (sequence is synthesized)
ttattcaatccaagatgatagttctgttgcccaagtcaaggcgataagcttctaccaggcatgttgccttcctggagtcataccgtatttagtgtctctgatccgggacaagctaggatg

SEQ ID NO: 463198 - DNA, 120 bp, Artificial Sequence
  ENSG00000157800_29 (sequence is synthesized)
ttctgtcttttggcatgtgctcttctgcattagtgtatgcctttctggtgacggcgtctgtgcagtttgctggtgggatcgttatcttctttggactcctggtgtcaccagaagaaattg

SEQ ID NO: 463199 - DNA, 120 bp, Artificial Sequence
  ENSG00000157800_30 (sequence is synthesized)
actcagtcccattttacctctccagccggcttgtttctaactgttgagaaatcacaccttttgacaaggctgttttttcactggctttcgttagtgctgtgctcgtttctgtctttgaga

SEQ ID NO: 463200 - DNA, 120 bp, Artificial Sequence
  ENSG00000157800_31 (sequence is synthesized)
ttttgcacattatcttttatgtgctcttttgcccttttccacctatttaaagtttgcctttctctttgtgtcaagataaaatatcacttttttttttttttttaaacagagtatcattct

SEQ ID NO: 463201 - DNA, 120 bp, Artificial Sequence
  ENSG00000157800_32 (sequence is synthesized)
agtctatttagtgtctctgatccgggacaagctaggatggatgtgggttttctactttttcattctcatgacaagttgtacaattgtgtttatctcgccattaatagtgagggaaatatt

SEQ ID NO: 463202 - DNA, 120 bp, Artificial Sequence
  ENSG00000157800_33 (sequence is synthesized)
tcattctcatgagacggggtgtcaccatattgctcaggctggtctccaaatcctgagctcaaacgatctacctgccttggccttccaaagtgcgagccaccacacctggccctcttgtgg

SEQ ID NO: 463203 - DNA, 120 bp, Artificial Sequence
  ENSG00000157800_34 (sequence is synthesized)
tcttaaaggaaaggggaggagggcaggtgaagaacagaaatgccacatgtcatatttagtaggacaccagcaagtggagccatgctgcagcttcattttccccaaagctgaaacttcaaa

SEQ ID NO: 463204 - DNA, 120 bp, Artificial Sequence
  ENSG00000157800_35 (sequence is synthesized)
acaacaacccaatccaggcaagactgctaaaggcttagacccttcaagaatgaaggtttgggtgatcccaccagtcaggaggccatgacccgctgaggtgcttgctgaggacaaaggaaa

SEQ ID NO: 463205 - DNA, 120 bp, Artificial Sequence
  ENSG00000157800_36 (sequence is synthesized)
tgaggaatgggtggtggcaggctcccgtcatcagtgtggatggcagccatgcctgcagctactctaccttcccctgatcctccttcagcttctccaactcctgggccagatggggcagct

SEQ ID NO: 463206 - DNA, 120 bp, Artificial Sequence
  ENSG00000157800_37 (sequence is synthesized)
ccatgacaatgggcactggcttcttcaggacatccagaccctcaaggtcaggggcagtgagactgacacaggttccagttcatgctgctcggttccagcttgtgcttgcaggttacaggc

SEQ ID NO: 463207 - DNA, 120 bp, Artificial Sequence
  ENSG00000157800_38 (sequence is synthesized)
tgtcctgctcttctctatttatatccatttccctcctaaccacctgccctgtgaacttaactctctagcatcagacatcccatccaggaggagaacatacacacagttgtttaactagcc

SEQ ID NO: 463208 - DNA, 120 bp, Artificial Sequence
  ENSG00000157800_39 (sequence is synthesized)
tcacaattactaagatcaaatttgcacaacaaatacacacacacacagagaaatatgtatcctaatgggtctgcctctctgattaaacccttaattgatacactcattctgtggacatca

SEQ ID NO: 463209 - DNA, 120 bp, Artificial Sequence
  ENSG00000157800_40 (sequence is synthesized)
ttcagtcctttttctccagccactccgtccttgctcagtgaactcacaaacaaaggggacatagcagcagcaatagaagggatgcaagggcttagtagcctggtcttctaccctccaagc

SEQ ID NO: 463210 - DNA, 120 bp, Artificial Sequence
  ENSG00000157800_41 (sequence is synthesized)
ctgaactgacaacagatcacagcccatactgaggccctaatatggcactattccccaagaggaccaatcagctgcctggtggcaggttaattacatcaggtcacctccattatgaaagag

SEQ ID NO: 463211 - DNA, 120 bp, Artificial Sequence
  ENSG00000157800_42 (sequence is synthesized)
gaagtgctttgtacttgctggaatagacacttactatggacatgaattttccttccctacccacaatacttctgccagagccacagtaagtggacttacagaatgccctacccaccgtca

SEQ ID NO: 463212 - DNA, 120 bp, Artificial Sequence
  ENSG00000157800_43 (sequence is synthesized)
aggtaggccatatggcattacttctgaccaaggaagtcatttcatagcaaattaagtggatcagcgggctcctgctcatggagtttactagtcttaccgtgtttcccaccaccctgaagc

SEQ ID NO: 463213 - DNA, 120 bp, Artificial Sequence
  ENSG00000157800_44 (sequence is synthesized)
agctggcccaatagaacaatggaatgagcttttgaagattcacaggaccagctaccatctaccatccctataaggatgacgacaccttatagagctggtgtatgatctatgctttttttt

SEQ ID NO: 463214 - DNA, 120 bp, Artificial Sequence
  ENSG00000157800_45 (sequence is synthesized)
tctttcaagtttaacctgataatttatttgtggggaaaaagctagttttgatgagaaaaagttgtcctttccttgtaaacacaaagaaactcaacaggaattttaaatgttatagtaggc

SEQ ID NO: 463215 - DNA, 120 bp, Artificial Sequence
  ENSG00000157800_46 (sequence is synthesized)
cagaaaatgcaacagtaactcttacaatccttttcaattaaacagacaaatcaagttgaagacaaatgttaaaatactatttagcccaaatatttatcagcgtatatatcctgttgttca

SEQ ID NO: 463216 - DNA, 120 bp, Artificial Sequence
  ENSG00000157800_47 (sequence is synthesized)
cccaaatatttatcagcgtatatatcctgttgttcaattggcttttgatttaaaaaccaaacagacaaaccaacaaactttataagagctacactggctgggcgcggtggctcatgcctg

SEQ ID NO: 463217 - DNA, 72 bp, Artificial Sequence
  ENSG00000157800_48 (sequence is synthesized)
aggcagatccggctctactaaaaatacagaaatattagctgggtgtggtggcacatgcctttaatcccagct

SEQ ID NO: 463218 - DNA, 90 bp, Artificial Sequence
  ENSG00000157800_49 (sequence is synthesized)
ccaggagatggaggttgcagtgggccaagatcgtaccactgcactccagcatgggtgacaaagcgagactccctctcaaaaaaaaaaaaa

SEQ ID NO: 463219 - DNA, 120 bp, Artificial Sequence
  ENSG00000157800_50 (sequence is synthesized)
gttctgctatttctgcggacttgggtcgccaggagctcatccaaaggagcagtgaagctttggccactgtcacaggaattgtggatggttcggggagcattggagctgcagtgggccagg

SEQ ID NO: 463220 - DNA, 120 bp, Artificial Sequence
  ENSG00000157800_51 (sequence is synthesized)
caaaggagcagtgaagctttggccactgtcacaggaattgtggatggttcggggagcattggagctgcagtgggccagacaagttgtacaattgtgtttatctcgccattaatagtgagg

SEQ ID NO: 463221 - DNA, 120 bp, Artificial Sequence
  ENSG00000157800_52 (sequence is synthesized)
ttatagatacaggaaaatcttcgcatttgcaaattatttttataattgagacactggcaaggaatgaacatagatgtatttctgatttcacttcttgaaacatttcttttcatccataaa

SEQ ID NO: 463222 - DNA, 120 bp, Artificial Sequence
  ENSG00000157800_53 (sequence is synthesized)
acagatgtacaattcttctatcttttgagtatttttagatagactgtgtgactttaattgaccttagttgacctcggtctctggaccttcgttgctgcttctgtaaaatggaaataaaaa

SEQ ID NO: 463223 - DNA, 120 bp, Artificial Sequence
  ENSG00000157800_54 (sequence is synthesized)
taacatcacctcataagtagggatgtatgcagagcccttcacacgtggtaggcactccataaacagtggctgtcgctgttattttaggtctctcgggtattgaggcagaagaaaactttg

SEQ ID NO: 463224 - DNA, 120 bp, Artificial Sequence
  ENSG00000157800_55 (sequence is synthesized)
attccacttccggtgtcttggtcttatcactgtaacttgagctgagactttacttccatgtctccccccaccctcaggagtcctcagggtttccactaaagccccctttcattgagccta

SEQ ID NO: 463225 - DNA, 120 bp, Artificial Sequence
  ENSG00000157800_56 (sequence is synthesized)
caagccttgctgggaggcacaggcagcgtccaccccgatgatgtcctcccgccggcatcccgcagccttcgccttcctggttcacctgtcgcttacctgtctcgctctctcacctctgct

SEQ ID NO: 463226 - DNA, 120 bp, Artificial Sequence
  ENSG00000157800_57 (sequence is synthesized)
ggtcagcagatctgaatatctctttgtgaggagtcagagaaaggagatgatgcaaagagaaggaagcaaaaacaaaactaaaagaactttgaaggtatatgagaagaaaaagctgaaaag

SEQ ID NO: 463227 - DNA, 120 bp, Artificial Sequence
  ENSG00000157800_58 (sequence is synthesized)
aaaatgtctgcctcactccctcaaaaattctaccatagagcaaaggttgacgtccagaaaacctcaagtttatcagtcccagatgctggcagtagaagcataaagctgaggtgaattttc

SEQ ID NO: 463228 - DNA, 120 bp, Artificial Sequence
  ENSG00000157800_59 (sequence is synthesized)
cttactattttttccccagagtctagaacagtaactgcctcccaatgtctatcacagggaccagattttctccactacataggatgtgatatgtaggcagttaaatggcattatagacac

SEQ ID NO: 463229 - DNA, 120 bp, Artificial Sequence
  ENSG00000157800_60 (sequence is synthesized)
aataagcaaaattgaaacagagacaccctgttggataaaatatttacatcggtgtcctgtttccaaactgtgggctgagacctataaatgagtcatgaaatcaacctttgtgggttgcaa

SEQ ID NO: 463230 - DNA, 120 bp, Artificial Sequence
  ENSG00000157800_61 (sequence is synthesized)
ccagcattttcacaagaagggattaagaaacaacttcagaatgtatcttgtgtagtaacagtgactactgttttgcaaaatgtttgggtcagttgtacacatgcatattttacagggtga

SEQ ID NO: 463231 - DNA, 120 bp, Artificial Sequence
  ENSG00000157800_62 (sequence is synthesized)
cagggtgatgtaaaaaaaaaatgttttttttgagacagggtctcactttgtctcccaggctgaagtgcagtggcaccgtcatggctcactgcggcctcaacctcctgggctcaagcaatc

SEQ ID NO: 463232 - DNA, 120 bp, Artificial Sequence
  ENSG00000157800_63 (sequence is synthesized)
ttagcctcctgtatatctgggactacaggtgtgcaccatcatgcccagctatttatttcatttttttgtagagccagggcctcactttgttacccagactggtctcgaactcctgggatc

SEQ ID NO: 463233 - DNA, 120 bp, Artificial Sequence
  ENSG00000157800_64 (sequence is synthesized)
aagcaatcctcccacatcagcctcccaaggtgctgggataacaggcgtgggccaccgtgcctggcctgaaatgtctttttaactgtaggctggggtccgcaacgtttgagaagcactgaa

SEQ ID NO: 463234 - DNA, 120 bp, Artificial Sequence
  ENSG00000157800_65 (sequence is synthesized)
atacagggcaatttattcactgtccaagaacattacttctatgatgtcttcagataaatttgaaaatatttgtcttacccaaaattccagttacatatccattttcaggatactctcttc

SEQ ID NO: 463235 - DNA, 120 bp, Artificial Sequence
  ENSG00000157800_66 (sequence is synthesized)
atccagtgtaggtaaagattcgccccaaatgtgtgatcaggaaataaaacctgttaggtgtcagtgtcatgaagttcagtgtccaaatgttgtctttcttctggtaatggttactttttt

SEQ ID NO: 463236 - DNA, 84 bp, Artificial Sequence
  ENSG00000157800_67 (sequence is synthesized)
gtccaaatgttgtctttcttctggtaatggttactttttttttttttttcctgagataaggtttagcttttgtcactcaggctc

SEQ ID NO: 463237 - DNA, 120 bp, Artificial Sequence
  ENSG00000157800_68 (sequence is synthesized)
aagtgctgggattataggggtgagccaccgcacctggggtggttactgtttaaaaaaaaagtcacctgactcagacccactgagcacttggagaacatctacaggtagaaaacaaatgtt

SEQ ID NO: 463238 - DNA, 120 bp, Artificial Sequence
  ENSG00000157800_69 (sequence is synthesized)
gtagaaaacaaatgttacaaatatttaaatatcctgatggttttggaagtcaaggggagagagatcttacctctgtctaccacccaaccctctccaccaaggtcactataaatacaaaga

SEQ ID NO: 463239 - DNA, 120 bp, Artificial Sequence
  ENSG00000157800_70 (sequence is synthesized)
gcatagcttgggctacaggaaagaaggcattcatatgtataaatgtgtgtgtatatatacactgttttttcttttttaagagactgggtctccctctgtcacccaggctggagcacagtg

SEQ ID NO: 463240 - DNA, 120 bp, Artificial Sequence
  ENSG00000157800_71 (sequence is synthesized)
gtacgatcatagctcactgcagcctccaaaggtgcggctgaagtgatcctcctacctcaacctccctagtagctgggattaaagatacacaccaccacatggctaagaaggcattctagc

SEQ ID NO: 463241 - DNA, 120 bp, Artificial Sequence
  ENSG00000157800_72 (sequence is synthesized)
cctgagtggtggtgacacaggttatatacttgaagtatacacacacacatatatatgtatacacccatatgtaaatataacacaaaaaactatgtatttcactctatgtatatatattta

SEQ ID NO: 463242 - DNA, 120 bp, Artificial Sequence
  ENSG00000157800_73 (sequence is synthesized)
ccattttaaccgtttttaagtgtacaattcaatggcattaaatacattgttgtgcaaccaacatcaccatccatctccaggacttttttggcatcccaaacggaaactccatagccatta

SEQ ID NO: 463243 - DNA, 120 bp, Artificial Sequence
  ENSG00000157800_74 (sequence is synthesized)
aacaacaatttctcatttccccttccctccagccatgggcaaccaccatgctactttctgactctatgaatttcactactctggctacctcatataagtggaactgtactgtactggtcc

SEQ ID NO: 463244 - DNA, 120 bp, Artificial Sequence
  ENSG00000157800_75 (sequence is synthesized)
ttttatgtctgacttatttcacttagcataatgtttttgaaggttcgtctatgttgtagtatgtgtcagaatttgctaccttttttaggctgaaaaataaacgattcacaatatattttt

SEQ ID NO: 463245 - DNA, 120 bp, Artificial Sequence
  ENSG00000157800_76 (sequence is synthesized)
taagtgcaattagatccttttcagtaattgaaagtaaaataaaagaatatgctgtaggatgcaaaggtagtactgcaacactgtgagcaaacagcctaattggaaaatgagtggcatact

SEQ ID NO: 463246 - DNA, 120 bp, Artificial Sequence
  ENSG00000157800_77 (sequence is synthesized)
taaagacaaactatttttgaggcatcaattatagtacctttcattggaagaaagaatgattaaatgggagtggcttgcggatgttcatcttcctctctaaatagcaaagtgaataaaaat

SEQ ID NO: 463247 - DNA, 120 bp, Artificial Sequence
  ENSG00000157800_78 (sequence is synthesized)
gaagagctttgtaaactgcaaaacatacaaatcctgttcccttcttattttctaaaatagccatgtttaatctactttttagctgcttccttttatgaattataaagaattatattgtaa

SEQ ID NO: 463248 - DNA, 120 bp, Artificial Sequence
  ENSG00000157800_79 (sequence is synthesized)
tttttttttcctccctttcagtatttagtgtctctgatccgggacaagctaggatggatgtgggttttctactttttcattctcatgacaagttgtacaattgtgtttatctcgccatta

SEQ ID NO: 463249 - DNA, 120 bp, Artificial Sequence
  ENSG00000157800_80 (sequence is synthesized)
cggcagaaggaagaaatgatgtaaatcactcatccaaaccttaaggtcaaaggtgagaaggaaggtcaggaagaacatggcctggccaaatgtttttcaaagagggtctctgctgtccca

SEQ ID NO: 463250 - DNA, 120 bp, Artificial Sequence
  ENSG00000157800_81 (sequence is synthesized)
atcttttactgggttgtgaaatctggcctcatttaaagttttattacttattctacagccattttccctaaactgtcctactagtaaacagccaaactcaaaaaaaaaaaaaaaagaaaa

SEQ ID NO: 463251 - DNA, 65 bp, Artificial Sequence
  ENSG00000157800_82 (sequence is synthesized)
ccaagtgtggggattacagatctggagcagcaaccatttgttccccagtgcagagaaagcgactc

SEQ ID NO: 463252 - DNA, 120 bp, Artificial Sequence
  ENSG00000157800_83 (sequence is synthesized)
cttggggtacatggaactgattccagcagtgggaccagattcacctgggccatcgcatgcctgattcatgggcagcctcactgagagcagtggcagatagagtcacctgctccattgcag

SEQ ID NO: 463253 - DNA, 120 bp, Artificial Sequence
  ENSG00000157800_84 (sequence is synthesized)
tggctttttcctctttgctcttttttttcaatattcctggttgaatttgtgtagtggaatgatcatatgatgcaactaccgtaatagaatttatttgacaagctagtgcaattagttatt

SEQ ID NO: 463254 - DNA, 120 bp, Artificial Sequence
  ENSG00000157800_85 (sequence is synthesized)
aatgaatgtaaacttcacaggattagaagggctatgtgtttcactatttttgtatctttgggttctacaaaatatactagagtgtcacataattcgagaagggatttcaggaacgtggat

SEQ ID NO: 463255 - DNA, 120 bp, Artificial Sequence
  ENSG00000157800_86 (sequence is synthesized)
gttaactactaatagtttgaaaatgatactatctgggggtttccttttttttccacttctctccaacatattaagaaaactattcggatattattttgccttatgcagtagattgctagt

SEQ ID NO: 463256 - DNA, 120 bp, Artificial Sequence
  ENSG00000157823_0 (sequence is synthesized)
gctttctgggagtagccggtgctgagagaaccgtggctggcaaagatgattcaggcgattctggttttcaacaaccatgggaagccacggctagtccgcttctaccagcgtttcccagaa

SEQ ID NO: 463257 - DNA, 120 bp, Artificial Sequence
  ENSG00000157823_1 (sequence is synthesized)
gaaattcaacagcagattgttcgagagactttccatctagtcctcaagcgggatgacaacatctgtaacttcttggagggtggaagtttgattggtggctctgactacaaactgatctac

SEQ ID NO: 463258 - DNA, 120 bp, Artificial Sequence
  ENSG00000157823_2 (sequence is synthesized)
cggcactatgctaccctctactttgtattttgtgtggattcctcagagagtgaacttggaatcttggacctcatccaggtttttgtggaaactctggataagtgtttcgaaaatgtgtgt

SEQ ID NO: 463259 - DNA, 120 bp, Artificial Sequence
  ENSG00000157823_3 (sequence is synthesized)
gaattggatttgatcttccatatggataaggtgcactacatcctccaggaggtggtgatgggtgggatggtgttggaaacaaacatgaatgaaatcgtggctcagattgaggctcaaaac

SEQ ID NO: 463260 - DNA, 120 bp, Artificial Sequence
  ENSG00000157823_4 (sequence is synthesized)
aggctggagaaatccgagggtggcctttcagcagcccctgcgcgggctgtgtctgctgtgaaaaacatcaacctgccagagattcctcggaacatcaacattggcgatctcaacatcaaa

SEQ ID NO: 463261 - DNA, 120 bp, Artificial Sequence
  ENSG00000157823_5 (sequence is synthesized)
gttcccaacctgtcccagtttgtctgaggatcaagtattggcctgaaatagagtccttaagacaagcaaagacaagcaaggcaagcacgtctggaaacagaacccattttgagccttaga

SEQ ID NO: 463262 - DNA, 120 bp, Artificial Sequence
  ENSG00000157823_6 (sequence is synthesized)
agagtcaagcctcaggacctggaaactttgtgtctggggaagactgtttggcatggaatagggaagggattcctattgacactgctcgggtgcacccagttctcacatgtgcagtcatgc

SEQ ID NO: 463263 - DNA, 120 bp, Artificial Sequence
  ENSG00000157823_7 (sequence is synthesized)
cgttctctgatgcatacggccactgcagatgtgaggggccctgccttcctcagtagggagtcaacatgcccaagtcatttgcacctttacctctcacatggatgctcccaagggttaggg

SEQ ID NO: 463264 - DNA, 120 bp, Artificial Sequence
  ENSG00000157823_8 (sequence is synthesized)
actgcattgagcaggcccacctgcttcccagaacctcctcactagggctgagcaccttctctgagtagagtcttcatccttagcaccacagacttctgaggtcctgtgccctttacttgc

SEQ ID NO: 463265 - DNA, 120 bp, Artificial Sequence
  ENSG00000157823_9 (sequence is synthesized)
tggtgaggtgtcataggtagaaaagggctggcccttcagatctgggggtgtggtgagtggcaagtaagggcagaattttaggagaaccagagtcacccgctggctctactgagattgtta

SEQ ID NO: 463266 - DNA, 73 bp, Artificial Sequence
  ENSG00000157823_10 (sequence is synthesized)
cagaatcctttggtatagccaagccttttggttaccgcctcatgaagaatatgcttcccgcattgtcctagtc

SEQ ID NO: 463267 - DNA, 120 bp, Artificial Sequence
  ENSG00000157823_11 (sequence is synthesized)
accgcctcatgaagaatatgcttcccgcattgtcctagtcccagttgtattctcacaggtgttatgtgcaggacacaatccaaatcataaacctggctcatgcccaacacatttctgcta

SEQ ID NO: 463268 - DNA, 120 bp, Artificial Sequence
  ENSG00000157823_12 (sequence is synthesized)
atagggagagggacccaccacacacccacacatgccagaggtccctcctcacagaggagagggcctgtgtctgtagaaggttaaagctgacaacatgtgaaacatcccagaattatgact

SEQ ID NO: 463269 - DNA, 120 bp, Artificial Sequence
  ENSG00000157823_13 (sequence is synthesized)
cttcccaagtttaaaatacattctcctcatgagagcagaaggtttgttgctgtgttgtgaatgatgagctgcctccatagggaacccactgccacctgggccagcttctggagcatgaga

SEQ ID NO: 463270 - DNA, 120 bp, Artificial Sequence
  ENSG00000157823_14 (sequence is synthesized)
acctgagccagggtcacccttgtggggcctggacatgacgcacgctggctgcgactaggagcagggctgcctcttctccctccccaaggtctgcttgtgggcacgctctgttccctcagg

SEQ ID NO: 463271 - DNA, 120 bp, Artificial Sequence
  ENSG00000157823_15 (sequence is synthesized)
tgccattctcccagggcttaggcgcccataaatgttctttctgtggtggagtagggcctcctgcttccatactgtcgcatgggctagatctcaggtgtggtgttgagccaccttaagatg

SEQ ID NO: 463272 - DNA, 120 bp, Artificial Sequence
  ENSG00000157823_16 (sequence is synthesized)
agggctgcttcgcagtaaagtttccagcctgggcccctcttgggccttctggctggggaccctcagcctcctgatgctgttgcagggcaggtctgagagggtgcccagcagcacccggtg

SEQ ID NO: 463273 - DNA, 120 bp, Artificial Sequence
  ENSG00000157823_17 (sequence is synthesized)
tcagggccaccttgttttccatttttgaacagcgctccctgtggtttgtgcccactgctcaatacagcctccgatcctcactcttgaaagctccatgataagcacagagatgggcagtgt

SEQ ID NO: 463274 - DNA, 120 bp, Artificial Sequence
  ENSG00000157823_18 (sequence is synthesized)
gggtcagaaggtgggccgcttcctgtggaagagggaagtgtaggtgaatagatatcaaaacccctgatgtcattcttttgaggggttggattttcttttttctggcagacatttcagtac

SEQ ID NO: 463275 - DNA, 120 bp, Artificial Sequence
  ENSG00000157823_19 (sequence is synthesized)
attcacatttctctcacatttgctgaatgtgagatcagaataaaggagatcggcgtttatttcgtaccttctgtaagttggcatgagcaagatcattcaactgtccttacaacaggcatt

SEQ ID NO: 463276 - DNA, 120 bp, Artificial Sequence
  ENSG00000157823_20 (sequence is synthesized)
cttatccccattttgcagatgacgaaagtagacccagctccagtaaccttcccttagattacacggggctgagatctgagactgttcacttgactccactgtccttttctttcctcgctg

SEQ ID NO: 463277 - DNA, 120 bp, Artificial Sequence
  ENSG00000157823_21 (sequence is synthesized)
tatcatcttcttttttatagataaggaaactgagcctcagagagtctgacttctcacaaaccgtggtctaaataggcttgattttctaaggtggccagtgatcatgtcatagagtataag

SEQ ID NO: 463278 - DNA, 120 bp, Artificial Sequence
  ENSG00000157823_22 (sequence is synthesized)
agccaaagagtcgtctgtgtccctccatttaactgatgttgaagccgaagcccaaggtggtaaatgttatgttgagggtcacaaatccagagccacatccctcttcttgagttcgtttgt

SEQ ID NO: 463279 - DNA, 120 bp, Artificial Sequence
  ENSG00000157823_23 (sequence is synthesized)
tacgtggtttaatgcattactgcaggacagcccttatgctagatttcctgggatagcctagattttgaatgttttgcctgccagaaaccaatggttttaaaaaatcattgagtggtccta

SEQ ID NO: 463280 - DNA, 120 bp, Artificial Sequence
  ENSG00000157823_24 (sequence is synthesized)
cagattcaaagcgagcatccaaacatccctcacatggcctcttacaatgacataaaactgaagcccacttttttatttggaaaactcaatccctttggacaagccacaataatttttcat

SEQ ID NO: 463281 - DNA, 120 bp, Artificial Sequence
  ENSG00000157823_25 (sequence is synthesized)
tcattaactacttgaggttgcctgcaaattcagctagctttccagcctgctatcagcaaagccataaacatcttttttaaaaataggttaaggttggccaggtgcggtggctcacgcctg

SEQ ID NO: 463282 - DNA, 90 bp, Artificial Sequence
  ENSG00000157823_26 (sequence is synthesized)
ggttaaggttgtatagaatactaggctttcctttttttgtgagatgggggtctcacactgtggctcaggctggagtgcagtggtgtgatc

SEQ ID NO: 463283 - DNA, 120 bp, Artificial Sequence
  ENSG00000157823_27 (sequence is synthesized)
gatcatggctcactgcagcctcgaagccccggggtcaagtgatcctctcacctcagcctcctaggtagctggaaccacaggcacgcaaccaccactcctggctagttttatttttttagt

SEQ ID NO: 463284 - DNA, 120 bp, Artificial Sequence
  ENSG00000157823_28 (sequence is synthesized)
agaataaggtctcactatgttgcacaggctggtctctaactccttacctcaagccatcctcccgccttggcctcccaaacatgttgggattacaggtgtgagccactggacctggccaaa

SEQ ID NO: 463285 - DNA, 120 bp, Artificial Sequence
  ENSG00000157823_29 (sequence is synthesized)
tactgggttttcagtgctcactgccactaataaaaatctgaaattctttcattatgcaatttctaagtgcctggtgagggccaagctcagttctaggctctgaagattaagagagaaaca

SEQ ID NO: 463286 - DNA, 120 bp, Artificial Sequence
  ENSG00000157823_30 (sequence is synthesized)
aggctctgtctgctcctgttgtctctgtgagcatctttgacagagtgctcagattgttgggatatagtgcatcggactggcagcctgaatttgtggagaccgcagtcagtaactttgtga

SEQ ID NO: 463287 - DNA, 120 bp, Artificial Sequence
  ENSG00000157823_31 (sequence is synthesized)
tatatggaatatttagaggacagtaacccatttccctacgccctacctgatcacatcgtgccctgctgggccataccccaaacagcccaccttcctctaggcctggccatggccctgtgc

SEQ ID NO: 463288 - DNA, 120 bp, Artificial Sequence
  ENSG00000157823_32 (sequence is synthesized)
ctgccacattgaggattaagtcaggatatcttgagccctctcaaatccctgtttattcaggcctctgccacatatagagccagccttctgtccccaccacttccactaccatggagccca

SEQ ID NO: 463289 - DNA, 120 bp, Artificial Sequence
  ENSG00000157823_33 (sequence is synthesized)
cttagtaaaacgctctctgggcccagcttcgccagaaaagacaccaggggagcaaggctcaaaccaggggcagctaaatctgatcttgtggaccagtctctagtaagggctttcagcgtg

SEQ ID NO: 463290 - DNA, 120 bp, Artificial Sequence
  ENSG00000157823_34 (sequence is synthesized)
gctgtctgtccattgctttccaaataggatgcagcaatgattggtacatgggtattaagatcggtagtaggggctagtccaagtttagcaatagccaaactggagagcctctgaagtatg

SEQ ID NO: 463291 - DNA, 120 bp, Artificial Sequence
  ENSG00000157823_35 (sequence is synthesized)
agagtcccagagggatttgtcagctcctggcagacatcctgattttcaccttcctgagtctaccctaccccagagggtgccagtctcactgtggtgatggttagcccagtgtgtgctgca

SEQ ID NO: 463292 - DNA, 120 bp, Artificial Sequence
  ENSG00000157823_36 (sequence is synthesized)
ctcacacaccagcacggggtccgtgcttgcaggctggtggatgctgtcctctgggttaagactgtctcccttctcgggagcactggagggttctccatctgcgtgtttcagtggaagttg

SEQ ID NO: 463293 - DNA, 120 bp, Artificial Sequence
  ENSG00000157823_37 (sequence is synthesized)
gcagatacgaaaacaggcccctatagggaagcagttccatgaaaatgattaattctttccaaaagacttaaaattttttcctatttcaattttcctttcaaaaaaggaaatacattcatg

SEQ ID NO: 463294 - DNA, 120 bp, Artificial Sequence
  ENSG00000157823_38 (sequence is synthesized)
tagttcaaaacttaagaaaacaaaagtctgttcagcaaaagactcccactccggttccccaaacgctgagccccaccccccatccctggtagcaagaagtgtttccaattttaaggttaa

SEQ ID NO: 463295 - DNA, 120 bp, Artificial Sequence
  ENSG00000157823_39 (sequence is synthesized)
gaaacaaagtccctggatttgtgttagggatgtcttcctgagagtgggttgtgttccgtttgaccctggcggttgacctcggcccactaggatcatgccgccctctccagggaggagggc

SEQ ID NO: 463296 - DNA, 120 bp, Artificial Sequence
  ENSG00000157823_40 (sequence is synthesized)
ctccccatcaccctgtacagtggcaccccagccctggcactgcccgcccttgctcagcgtacctttcccatggcactctgacgtactggatgtttggtttctgaagttactggctgttta

SEQ ID NO: 463297 - DNA, 120 bp, Artificial Sequence
  ENSG00000157823_41 (sequence is synthesized)
ccctgccgggatgtaagcccctccagggcaggggcttgtctcgtgttcagtgctgcatcccagctgctgggcacggtacctggtccatggcgttcaataaataactgttggatgagtgaa

SEQ ID NO: 463298 - DNA, 120 bp, Artificial Sequence
  ENSG00000157823_42 (sequence is synthesized)
acttggaatcttggacctcatccaggtacatctggaagttgttttcttcatagctcccaagcttaaaaaaagagagaggaagaaaagccagtgcaacaccctacaaactggaacactagc

SEQ ID NO: 463299 - DNA, 120 bp, Artificial Sequence
  ENSG00000157823_43 (sequence is synthesized)
aaccggaagtgatcgtgttgtggcggaaggaggagctttctgggagtagccggtgctgagagaaccgtggctggcaaagatgattcaggcgattctggttttcaacaaccatgggaagcc

SEQ ID NO: 463300 - DNA, 120 bp, Artificial Sequence
  ENSG00000157823_44 (sequence is synthesized)
tttcaggatcaggccttccagttattctctgactttgtatgagagtttatcaatgttccttttcttgtttaaatatcagcttacctataggacagtaatggttagtgacttagatattta

SEQ ID NO: 463301 - DNA, 120 bp, Artificial Sequence
  ENSG00000157823_45 (sequence is synthesized)
ggtaaatataccctatcttaattcctgtatcagagcattgtcacccatctttcatagattcactcctattttttctcatcatttttatcatttctagaaacaagtactaaatgtttagat

SEQ ID NO: 463302 - DNA, 120 bp, Artificial Sequence
  ENSG00000157823_46 (sequence is synthesized)
ataagtgcaattcctgggtcataggtgaggcctctagaaggaagaaacaggcctctagaaggaagcacaaaagcaccagcagggctgcagcactggcaaaagaagtctgaggctcaaggc

SEQ ID NO: 463303 - DNA, 120 bp, Artificial Sequence
  ENSG00000157823_47 (sequence is synthesized)
ctctggactgtagaccatagtatctgccactttgttagataatgccagagtgattgtatccatttatacttctaccaatcgggggtgagtgttcccagtgctctgtatgctcaccaaagg

SEQ ID NO: 463304 - DNA, 120 bp, Artificial Sequence
  ENSG00000157823_48 (sequence is synthesized)
ttagcctctttctttctgttcctgtggttttgaataccatttacatgactcacgtctcagattttctttccctaccagcctccctgtgttggtttgtgactttatctgtcagtgttctct

SEQ ID NO: 463305 - DNA, 120 bp, Artificial Sequence
  ENSG00000157823_49 (sequence is synthesized)
caggtatttacttagatttctgcaggcatcctcaaggtcagcgcatcagccaacttctgttgtttaacagaacccttctttgtgccctgactctatctccagttctttaggtacatgagt

SEQ ID NO: 463306 - DNA, 120 bp, Artificial Sequence
  ENSG00000157823_50 (sequence is synthesized)
tcagtgttgattcttgactgcttgctcccacacccatgcttggcagcctccaactttcttaagtcccatctatctccaatcagagaaatgttagccatctttcatggtcaacttcatatt

SEQ ID NO: 463307 - DNA, 120 bp, Artificial Sequence
  ENSG00000157823_51 (sequence is synthesized)
gactagcaggactaacacgggcagctgttcgctcatccattgctcacttacacttgagtcattttgcttaccaaagaacccagtgtgtcctgggcaccaggctaggtgctttacacacat

SEQ ID NO: 463308 - DNA, 120 bp, Artificial Sequence
  ENSG00000157823_52 (sequence is synthesized)
atctgcctgcctatgtggttgccttaggcagagtgatagaatcccagggtagagggcagggacttactctgtgttgctccagaagacacaggtaggatcgggggtggaaattatttgatg

SEQ ID NO: 463309 - DNA, 120 bp, Artificial Sequence
  ENSG00000157823_53 (sequence is synthesized)
ttgctgctcaacagcccactgagcagcttggaaacagtagtgagctctcttcatggaggcgaaggatctgtcaccagagtgaaggatctatactgttgcaggagccaaagaacagaatcc

SEQ ID NO: 463310 - DNA, 120 bp, Artificial Sequence
  ENSG00000157823_54 (sequence is synthesized)
tgcactgggaaagaggtgcactacatcctccaggaggtggtgatgggtgggatggtgttggaaacaaacatgaatgaaatcgtggctcagattgaggctcaaaacaggctggagaaatcc

SEQ ID NO: 463311 - DNA, 120 bp, Artificial Sequence
  ENSG00000157823_55 (sequence is synthesized)
gctttctgggagtagccggtgctgagagaaccgtggctggcaaagatgattcaggcgattctggttttcaacaaccatgggaagccacggctagtccgcttctaccagcgtttcgtgacc

SEQ ID NO: 463312 - DNA, 120 bp, Artificial Sequence
  ENSG00000157823_56 (sequence is synthesized)
atttgcatctgtatccgctgctccatctgcagtatacggacatgctccacttcacccacactgggtcattaaaagaacaaacaaaaataagaacttgatcgatttgggattttaaatgga

SEQ ID NO: 463313 - DNA, 120 bp, Artificial Sequence
  ENSG00000157823_57 (sequence is synthesized)
aatgcactaaaaattccttaattccaccattcaccgtctaccatagaggaacagcccatctgcacggagagacagctacgtaattcactgcagcattataatactgaaaaattaaaatga

SEQ ID NO: 463314 - DNA, 120 bp, Artificial Sequence
  ENSG00000157823_58 (sequence is synthesized)
acgaaatgttccataaccgacgaacggccgaatgaccggcgtctccactccgcggaacgttctgcgagcgctaaggggatggcgggagtgcatgatttggagcgggcggtgagaaaagca

SEQ ID NO: 463315 - DNA, 120 bp, Artificial Sequence
  ENSG00000157823_59 (sequence is synthesized)
agctcccgccgcctctccgttttggcaacccggctgacggtcgtttcggcttctggggccagccgtcggtctgggcgagggacatagatccggattcgcatcctgactggccaaccaacg

SEQ ID NO: 463316 - DNA, 120 bp, Artificial Sequence
  ENSG00000157823_60 (sequence is synthesized)
ctggccgaggtgaccactctcctcggcatccgcacctgccctccaaggcgtcagagaggccggacccttgggtgctagggctcgtgagcgccggggccaagtttccgagtgccgctctca

SEQ ID NO: 463317 - DNA, 120 bp, Artificial Sequence
  ENSG00000157823_61 (sequence is synthesized)
accgctctttggtcacctggggctcctgcaccgagcatgaccctcgccctacttaagcatttaatctaggcgcaggctggtgccaggccttctgtctcccgccctactgccccgctctcg

SEQ ID NO: 463318 - DNA, 120 bp, Artificial Sequence
  ENSG00000157823_62 (sequence is synthesized)
ctgacccttttcttgatcctggcatttctgtgccattttgtgacattttcccgtgggtctctgggaacgagatagaagcgacagtggggagtgtgcctcgatgagaacttgagtgattga

SEQ ID NO: 463319 - DNA, 120 bp, Artificial Sequence
  ENSG00000157823_63 (sequence is synthesized)
agtcacattctgtcatctttttggttgttgaccacagtttcatgaggaagaaatattaagtttctgaaagtttttgttatagccagaactggaaaagttcttttttttttggaattattt

SEQ ID NO: 463320 - DNA, 120 bp, Artificial Sequence
  ENSG00000157823_64 (sequence is synthesized)
tgcttcagtgttggctgggactttccagagactagatacccttcactcttagggttgaagaaaatcagtttaaaagtggaaaaatgatgagaaattataaatgctgccgcataagggctc

SEQ ID NO: 463321 - DNA, 120 bp, Artificial Sequence
  ENSG00000157823_65 (sequence is synthesized)
aataagtgattacgtaaatttgaattttcccaacacgttcctttgcaaacacataaacatcagtatttgcttcctgtcttcgaagattatatttcttcatggcagggtttcaaaatgtta

SEQ ID NO: 463322 - DNA, 120 bp, Artificial Sequence
  ENSG00000157823_66 (sequence is synthesized)
cataattgggggactggtggaactgaagaggggaaagagccagaaaacgtgttcaggcttcagctccaccttttctactcttgcgtctgttgacaagttaataaacccttttcagacttt

SEQ ID NO: 463323 - DNA, 120 bp, Artificial Sequence
  ENSG00000157823_67 (sequence is synthesized)
ctgtgctcatagctaccacctcgctgctgaggggagagattcgtgttgccatgtgccaagacctgggagagacccctcgttgtgtcactgggcaggggggtttgagtgtctgagttgtga

SEQ ID NO: 463324 - DNA, 120 bp, Artificial Sequence
  ENSG00000157823_68 (sequence is synthesized)
gtcaggacaggtcatatctgaccactctgctgctgcaggaaaaggaaacctcgtgggttacactctgaccaccacagagtattctgactcctgatttttgcttcccttttaggtgcacta

SEQ ID NO: 463325 - DNA, 120 bp, Artificial Sequence
  ENSG00000157823_69 (sequence is synthesized)
ttgtcttaaaacaccgataaaacattggactttggaatgaaagtacgagtaagagagaaaaaggcatatgtaccaggtcctcaatactactcataaagatatcttcttcctcttttcatt

SEQ ID NO: 463326 - DNA, 120 bp, Artificial Sequence
  ENSG00000157823_70 (sequence is synthesized)
tctttctaaaatgtataatatgggaactagagtctgactctgggccaagatgactctcagatgattttctcttcccgtcagtgctgagtcacctcagagcgtcgttaccctttggctcat

SEQ ID NO: 463327 - DNA, 120 bp, Artificial Sequence
  ENSG00000157827_0 (sequence is synthesized)
gtctgctccaggtgctagccaggcaggcgcagccgtggccggctagggctggaagtgtcagcggcggccgcgggcccggcagaaggccgagtaggagggaccacgcgccgggggccgcga

SEQ ID NO: 463328 - DNA, 120 bp, Artificial Sequence
  ENSG00000157827_1 (sequence is synthesized)
tctctggcagggggcggtgtgccagcggagcaccatgcacataggcgcccagcgccccaactacccctcccgaggaaaagaggccggggccgcgctggggcggcggagagcatgagggag

SEQ ID NO: 463329 - DNA, 80 bp, Artificial Sequence
  ENSG00000157827_2 (sequence is synthesized)
agcatgagggaggccggggggcggctcggcttggagcgctgctagggagcggtgcgcgccgcacacccgcctgggcgcgg

SEQ ID NO: 463330 - DNA, 120 bp, Artificial Sequence
  ENSG00000157827_3 (sequence is synthesized)
ggagctgttctgatttccgacgcgcacgctaggggcccggagcagcccccggccccggcgcgccgccgacatgggcaacgcagggagcatggattcgcagcagaccgatttcagggcgca

SEQ ID NO: 463331 - DNA, 120 bp, Artificial Sequence
  ENSG00000157827_4 (sequence is synthesized)
caacgtgcctttgaagctgccgatgccagagccaggtgaactggaggagcgatttgccatcgtgctgaatgctatgaacctacctcctgacaaagccaggttactgcggcagtatgataa

SEQ ID NO: 463332 - DNA, 120 bp, Artificial Sequence
  ENSG00000157827_5 (sequence is synthesized)
tgagaaaaaatgggaactgatttgtgatcaggaacgattccaggtgaagaatcctccccatacatacattcaaaagctcaaaggctatctggatccagctgtaaccaggaagaaattcag

SEQ ID NO: 463333 - DNA, 120 bp, Artificial Sequence
  ENSG00000157827_6 (sequence is synthesized)
acggcgtgttcaagaatctacacaagtgctaagagaactggaaatttctttgagaactaaccacattggatgggtcagagaatttctgaatgaagaaaacaaaggtcttgatgttctagt

SEQ ID NO: 463334 - DNA, 120 bp, Artificial Sequence
  ENSG00000157827_7 (sequence is synthesized)
ggaatatctctcatttgcacagtacgcggtaacttttgactttgaaagtgtggagagtactgtggagagctcggtggacaaatcaaagccctggagtaggtccatcgaggacctgcacag

SEQ ID NO: 463335 - DNA, 120 bp, Artificial Sequence
  ENSG00000157827_8 (sequence is synthesized)
agggagcaacctgccctcacctgtgggcaacagtgtctcccgctctggaagacattctgcactgcgatataatacattgccaagcagaagaactctgaaaaattcaagattagtgagtaa

SEQ ID NO: 463336 - DNA, 120 bp, Artificial Sequence
  ENSG00000157827_9 (sequence is synthesized)
gaaagatgatgtgcatgtctgtatcatgtgtttacgtgccatcatgaattatcagtatggtttcaacatggtcatgtctcatccacacgctgtcaatgagattgcactaagcctgaacaa

SEQ ID NO: 463337 - DNA, 120 bp, Artificial Sequence
  ENSG00000157827_10 (sequence is synthesized)
caagaatcccagaacaaaagcccttgtcttagaactgttggcagccgtttgtcttgtcagaggcgggcatgaaatcattttatcagcatttgataactttaaagaggtttgtggagaaaa

SEQ ID NO: 463338 - DNA, 120 bp, Artificial Sequence
  ENSG00000157827_11 (sequence is synthesized)
acagcgctttgagaagttgatggaacatttcaggaatgaagacaataacatagattttatggtggcttctatgcagtttattaatattgtagtccattcagtagaagatatgaatttcag

SEQ ID NO: 463339 - DNA, 120 bp, Artificial Sequence
  ENSG00000157827_12 (sequence is synthesized)
agttcacctgcagtatgaatttaccaaattaggcctggacgaatacttggacaagctgaaacacactgagagtgacaagcttcaagtccagatccaggcttacctggacaatgtttttga

SEQ ID NO: 463340 - DNA, 120 bp, Artificial Sequence
  ENSG00000157827_13 (sequence is synthesized)
tgtaggagctctactggaagatgctgaaactaagaatgctgccttggagagggtggaagaactggaagaaaacatttctcatttatctgaaaaactgcaagacacagagaatgaagccat

SEQ ID NO: 463341 - DNA, 120 bp, Artificial Sequence
  ENSG00000157827_14 (sequence is synthesized)
gtccaagattgtggaactggaaaagcaactcatgcagaggaacaaggagctggatgtcgttcgggaaatctacaaagatgcaaatactcaagttcacacattaagaaaaatggtcaaaga

SEQ ID NO: 463342 - DNA, 120 bp, Artificial Sequence
  ENSG00000157827_15 (sequence is synthesized)
aaaagaagaagcaattcaaagacagtctaccctggaaaaaaagattcatgagctagagaaacaagggaccattaaaattcagaagaaaggggatggggatatcgccatactgccagttgt

SEQ ID NO: 463343 - DNA, 120 bp, Artificial Sequence
  ENSG00000157827_16 (sequence is synthesized)
ggcttctggcacattgtccatggggtcagaagtggtagcaggtaactctgtgggacccacaatgggggccgcttcctcaggacccttgccccctcctccaccaccactgcctccctcatc

SEQ ID NO: 463344 - DNA, 120 bp, Artificial Sequence
  ENSG00000157827_17 (sequence is synthesized)
agacacacctgaaacagtgcaaaatggtccagtaacaccacctatgccaccgccgccgccgccccctcctccacctcctcctcccccaccgccccctccgcctcctcctctcccaggccc

SEQ ID NO: 463345 - DNA, 120 bp, Artificial Sequence
  ENSG00000157827_18 (sequence is synthesized)
tgcagctgagactgtaccagctcctcccttagcacctccccttccctctgcacctccgctgcctggaacatcttcacccacagtggttttcaactcaggattagcagctgtgaaaattaa

SEQ ID NO: 463346 - DNA, 120 bp, Artificial Sequence
  ENSG00000157827_19 (sequence is synthesized)
gaagccaatcaagacgaagttcagaatgccagtgtttaactgggttgctctgaagcccaatcagatcaatggcacagtcttcaatgaaattgatgatgagcgaattctggaggatttaaa

SEQ ID NO: 463347 - DNA, 120 bp, Artificial Sequence
  ENSG00000157827_20 (sequence is synthesized)
tgtggatgaatttgaggaaatattcaagacaaaagcccaaggacctgccattgatctttcttcaagcaaacagaagataccacagaagggatcaaacaaagtgacattactagaagcaaa

SEQ ID NO: 463348 - DNA, 120 bp, Artificial Sequence
  ENSG00000157827_21 (sequence is synthesized)
cagggccaaaaatcttgccataactttaaggaaagctggaaagactgctgatgaaatatgtaaagctattcatgtatttgacttgaagacactgcctgtggactttgtggaatgcttgat

SEQ ID NO: 463349 - DNA, 120 bp, Artificial Sequence
  ENSG00000157827_22 (sequence is synthesized)
gcggttcctaccaactgagaatgaagtgaaagtgcttcggctctacgagcgggaaaggaagcctctggaaaacttgtcagatgaagatcggttcatgatgcagtttagtaaaatcgagag

SEQ ID NO: 463350 - DNA, 120 bp, Artificial Sequence
  ENSG00000157827_23 (sequence is synthesized)
cgtcccaaaaactcaagaaaattctggagatcatcttagcccttggaaactacatgaatagcagtaaaagaggagcagtttatggatttaaacttcagagtttagatctgctcttagata

SEQ ID NO: 463351 - DNA, 120 bp, Artificial Sequence
  ENSG00000157827_24 (sequence is synthesized)
caaagtcaacagacagaaagcaaacactgttgcactatatatccaatgtggtgaaagaaaaatatcaccaagtgtccctgttttataatgagcttcattatgtggaaaaagctgctgcag

SEQ ID NO: 463352 - DNA, 120 bp, Artificial Sequence
  ENSG00000157827_25 (sequence is synthesized)
tctcccttgagaatgttttgctggatgtcaaggagctccagaggggaatggacttgaccaagagagagtacaccatgcatgaccataacacgctgctgaaggagttcatcctcaacaatg

SEQ ID NO: 463353 - DNA, 120 bp, Artificial Sequence
  ENSG00000157827_26 (sequence is synthesized)
aggggaagctgaagaagctgcaggatgatgccaagatcgcacaggatgcctttgatgatgttgtgaagtattttggagaaaaccccaagacaacaccaccctctgtcttctttcctgtct

SEQ ID NO: 463354 - DNA, 120 bp, Artificial Sequence
  ENSG00000157827_27 (sequence is synthesized)
ttgtccggtttgtgaaagcatataagcaagcagaagaggaaaatgagctgaggaaaaagcaggaacaagctctcatggaaaaactcctagagcaagaagctctgatggagcagcaggatc

SEQ ID NO: 463355 - DNA, 120 bp, Artificial Sequence
  ENSG00000157827_28 (sequence is synthesized)
caaagtctccttctcataaatcaaagaggcagcagcaagagttaattgcagaattaagaagacgacaagttaaagataacagacatgtatatgagggaaaagatggtgccattgaagata

SEQ ID NO: 463356 - DNA, 120 bp, Artificial Sequence
  ENSG00000157827_29 (sequence is synthesized)
ttatcacagatcttagaaaccaaccatacagacgagccgatgcggtgaggagaagcgtcaggcggcgctttgatgatcagaacttgcgttctgttaatggtgccgaaataacaatgtgaa

SEQ ID NO: 463357 - DNA, 120 bp, Artificial Sequence
  ENSG00000157827_30 (sequence is synthesized)
cctgagactggcctgcatgaatacagggtgtgcgtgaatgaaactgcccacatgaactttatgtgctacgatttaactgcagccttgaacacacacaaaaatattcttaagggctcagat

SEQ ID NO: 463358 - DNA, 120 bp, Artificial Sequence
  ENSG00000157827_31 (sequence is synthesized)
ttagcaaacacggaagaattttaaaatgagctctcctttcaacccttgttaacaagtgcctaaaaatggaagtacctgttcagattaatcaaagcaataggatttgatttgattaggtat

SEQ ID NO: 463359 - DNA, 120 bp, Artificial Sequence
  ENSG00000157827_32 (sequence is synthesized)
ctttttacaccagtatgttatttttaaccaaaatgtaaagttcttattaaactcattacctgccattgtgattgtcccatcatggcccacctggtttcctgatgttgtaaataacatcaa

SEQ ID NO: 463360 - DNA, 120 bp, Artificial Sequence
  ENSG00000157827_33 (sequence is synthesized)
tgcatctgctgtgggtcctttgctgagatgtcttcgaaggaattttgttttagccatatccatcaactttgtattttacttgcaatttggaagaaggaaagtcacatgatgaaactcctt

SEQ ID NO: 463361 - DNA, 120 bp, Artificial Sequence
  ENSG00000157827_34 (sequence is synthesized)
ttgtctataaccaggccctggcaaagtgcaaacaggatgcaactgcagtggcacaaaggtcactcaatcctttgtttccagtttcacattctactacttctgcgctagagaacgatgctc

SEQ ID NO: 463362 - DNA, 120 bp, Artificial Sequence
  ENSG00000157827_35 (sequence is synthesized)
tgtgagaggcattcactagtatgaatgtggggatatagtgtataagacttatttgcagtactgtgttcttcagctagaggcagctttttaaataatgcaagtgtatttattagcattaaa

SEQ ID NO: 463363 - DNA, 120 bp, Artificial Sequence
  ENSG00000157827_36 (sequence is synthesized)
attaacatctcagtaatcagcattagcatttctgaggaccattattaattctgagaacagaaattggtgccttgcaaggaagtttactagctctatcaacaagcattcaaggttacatct

SEQ ID NO: 463364 - DNA, 120 bp, Artificial Sequence
  ENSG00000157827_37 (sequence is synthesized)
gctagcagagtagtgttaggaacctggccttactctcctctgacaatcgcaattttttcttattttttataaattcaagaagatacacttggcatcgtgtatcgaggctaagtttttcat

SEQ ID NO: 463365 - DNA, 120 bp, Artificial Sequence
  ENSG00000157827_38 (sequence is synthesized)
gcatttcccagactacttatggagaattgcagtttaagttgctgaaaagtattaacatggtattaagcttaaataatacgtaatgggactagatggcccactaagccactgttattttcc

SEQ ID NO: 463366 - DNA, 120 bp, Artificial Sequence
  ENSG00000157827_39 (sequence is synthesized)
ttcctctctggcagggcacttgatccattccaaagtcaaaaactggactgaagctaaatttgtacttttcataatatacattctgcttctggcttatcttcttggtacatcaatatatta

SEQ ID NO: 463367 - DNA, 120 bp, Artificial Sequence
  ENSG00000157827_40 (sequence is synthesized)
attgtaaagtttattgtatagtatttaaccgctgaagttcctattttatgttgtgcttatgtgaaccccttggtgaaggtcccttttccttggatgtgtagttatatgatctttttaaat

SEQ ID NO: 463368 - DNA, 120 bp, Artificial Sequence
  ENSG00000157827_41 (sequence is synthesized)
gtacagatattttgctataaaatcggtgcagttttttatggtttttacacttctctttaattcccacctaagcctctgggtaatattgtaaatattgttttaaaatgcatcagcctatgc

SEQ ID NO: 463369 - DNA, 120 bp, Artificial Sequence
  ENSG00000157827_42 (sequence is synthesized)
tatacaatctgaatgttattttaacttatagttttttttaatatatatatttaactataaggacagtttagggaacaagttacctaccacatttcactttagtgtacctatttacagaaa

SEQ ID NO: 463370 - DNA, 120 bp, Artificial Sequence
  ENSG00000157827_43 (sequence is synthesized)
gattaaactgccacctgcgggcacattcccataaatgtgtactttactttaaaaagaacatgccacgattttgtctttctgtggactcaacattcacttcgattaaaaatagcaatttga

SEQ ID NO: 463371 - DNA, 120 bp, Artificial Sequence
  ENSG00000157827_44 (sequence is synthesized)
ccaagttggacttccactacaaagcagctgttttccaaagttcaatgctgacatatatgtatattaaaataattgcctatttattaatctacaaatagacaacgttggcatgttcttttc

SEQ ID NO: 463372 - DNA, 120 bp, Artificial Sequence
  ENSG00000157827_45 (sequence is synthesized)
tgtttgtctattaatgggcctgcttcttagcaatattagaatgttttataaaagcaattcatgttacttttctggtcttttcatggcatatgagcaaataataaactatttacactacta

SEQ ID NO: 463373 - DNA, 120 bp, Artificial Sequence
  ENSG00000157827_46 (sequence is synthesized)
ccgcctcagcctcctgagtagctgggactggaggcacaaatcattgcatctggcattcttgaaatttttaatagagaaatatgctctgacagtgatatactagagacataagtgcattta

SEQ ID NO: 463374 - DNA, 120 bp, Artificial Sequence
  ENSG00000157827_47 (sequence is synthesized)
tgatatactagagacataagtgcatttataatggtgtaagtttcattaggtagatacttcgggtttttggttttaaatcaatactgacagttccctaacttgtctcccaatgctttgtgt

SEQ ID NO: 463375 - DNA, 89 bp, Artificial Sequence
  ENSG00000157827_48 (sequence is synthesized)
ggaacatttcaggaatgaagacaataacatagattttatggtgagttatttcagtattcaataaagcaaactcagtttcaatacttttt

SEQ ID NO: 463376 - DNA, 120 bp, Artificial Sequence
  ENSG00000157827_49 (sequence is synthesized)
tgcaattaatatgctatagatccaatctagaatgtccctcttaatctgtatttctctttgatttccattttattccttacatacacggtatagtaaagacaaaagtactaatcatagcaa

SEQ ID NO: 463377 - DNA, 120 bp, Artificial Sequence
  ENSG00000157827_50 (sequence is synthesized)
aactgtaatgcagcaaattagttgcctgagttaaaagaaaaaaaaaaatcaacccttggcccttaagacgtcttttaatacaatgatgtgttagtcaaccaaatgatgacctcaaatggc

SEQ ID NO: 463378 - DNA, 120 bp, Artificial Sequence
  ENSG00000157827_51 (sequence is synthesized)
tctggccaaggccatgtgtgttgttttccagctttaaaaacctacttgcgcgcctcttgccaaccttcctccagtgtcaaagtgtcatctgcaaggactgttgtctgattgttcctgagg

SEQ ID NO: 463379 - DNA, 80 bp, Artificial Sequence
  ENSG00000157833_0 (sequence is synthesized)
cgcgagagcctgggccgcgcgggactgaccgtcggggccccgggacggcggccccggggcgcccatgccatggagaagct

SEQ ID NO: 463380 - DNA, 120 bp, Artificial Sequence
  ENSG00000157833_1 (sequence is synthesized)
gggcgcccatgccatggagaagctggcggccgggctggccggcctgcgctggagcatgggcgccttcccgctcgacctcatcgtcagccgctgccgcctgcccacgctcgcctgccttgg

SEQ ID NO: 463381 - DNA, 120 bp, Artificial Sequence
  ENSG00000157833_2 (sequence is synthesized)
gccaggggagtacgccgagggcgtcagtgagcgagacatcctgctcatccactcctgccggcagtggacaacggtgacagctcataccctggaggagggccactatgtcatcgggcccaa

SEQ ID NO: 463382 - DNA, 120 bp, Artificial Sequence
  ENSG00000157833_3 (sequence is synthesized)
gatcgacatccccctgcagtacccagggaagttcaagctcctggaacaggcccgggatgtgcgggagccagtgaggtacttcagcagcgtggaggaggtggccagtgtcttccctgaccg

SEQ ID NO: 463383 - DNA, 120 bp, Artificial Sequence
  ENSG00000157833_4 (sequence is synthesized)
catcttcgtgatggaagccatcaccttcagcgtcaaggtggtgtcgggcgagttcagcgaggacagcgaggtgtacaacttcacgctgcatgcgggcgacgagctcactcttatgggcca

SEQ ID NO: 463384 - DNA, 120 bp, Artificial Sequence
  ENSG00000157833_5 (sequence is synthesized)
ggcggagatcctgtgcgccaagaccaccaaggagcgctcgcgcttcaccaccctcctgcgaaagctgggccgggccggggcgctggccggggtgggcggcggcggcccagcgagcgcggg

SEQ ID NO: 463385 - DNA, 120 bp, Artificial Sequence
  ENSG00000157833_6 (sequence is synthesized)
ggccgcgggaggcactggcggcgggggcgccaggccggtcaaaggcaagatgccctgcctcatctgcatgaaccaccgcaccaacgaaagcctgagcctgccctttcagtgccagggccg

SEQ ID NO: 463386 - DNA, 120 bp, Artificial Sequence
  ENSG00000157833_7 (sequence is synthesized)
cttcagcactcgcagcccgctggagctgcagatgcaagagggcgagcacacggtgcgcgccatcatcgagcgcgtgaggctgccggtgaacgtgctggtgcccagccggccgccgcgcaa

SEQ ID NO: 463387 - DNA, 120 bp, Artificial Sequence
  ENSG00000157833_8 (sequence is synthesized)
cccctacgacctgcacccggtgcgggagggtcattgctacaagctggttagcatcatctccaagacggtggtgctggggctggcgctgcgccgcgagggcccggcgccgctgcacttcct

SEQ ID NO: 463388 - DNA, 120 bp, Artificial Sequence
  ENSG00000157833_9 (sequence is synthesized)
gctgctcacggacacgccgcgcttcgcgctgccgcagggcctgctggccggggacccgcgcgtcgagcgcctggtgcgcgacagcgcctcctactgccgcgagcgcttcgaccccgacga

SEQ ID NO: 463389 - DNA, 120 bp, Artificial Sequence
  ENSG00000157833_10 (sequence is synthesized)
tcctactgccgcgagcgcttcgaccccgacgagtactccacggccgtgcgcgaggcgccagcggagctcgccgaagactgcgccagcccgcgccgcgcgcgcctctgcctgcccgcgccg

SEQ ID NO: 463390 - DNA, 120 bp, Artificial Sequence
  ENSG00000157833_11 (sequence is synthesized)
gctagcgccggctcccgccggcgagggcgaccaggagtacgtgagccccgactgggcagccgcgcccgagcccgccgcgccgcccgccgagatcccctacgaggagttgtgggcgcacca

SEQ ID NO: 463391 - DNA, 120 bp, Artificial Sequence
  ENSG00000157833_12 (sequence is synthesized)
ggggcccgagggcctcgtccggccgcccccagggctcgatctcatctccttcggggccgcgggaccgccgcgtcgggagccggaagcgccgccgcctccagtccctcccaaatccgaggc

SEQ ID NO: 463392 - DNA, 120 bp, Artificial Sequence
  ENSG00000157833_13 (sequence is synthesized)
ggtgaaggaggagtgccgcctgctcaatgcccctccagtgcctccccggggtggcaatggcagcggccggctctccagcagccccccggttccccctcgcttccccaagctgcagccggt

SEQ ID NO: 463393 - DNA, 120 bp, Artificial Sequence
  ENSG00000157833_14 (sequence is synthesized)
acattcccccagctccagcctctcctactactcctctggcctccaggatggggcgggttcccgcagtggcagtggctccccatcgccggacacctactccctctattgctacccatgcac

SEQ ID NO: 463394 - DNA, 120 bp, Artificial Sequence
  ENSG00000157833_15 (sequence is synthesized)
ctggggagactgcaaggtgggcgagtcctctagccgcccagcccccggtcccctaccctcaaccacacagcccagccaggcctcccgggccctcacagagcctctgagcggtcgagccgc

SEQ ID NO: 463395 - DNA, 120 bp, Artificial Sequence
  ENSG00000157833_16 (sequence is synthesized)
ctcccttctgggggctgacacccctgttaagacctaccacagctgccctcctctattcaagccctcacatccccagaagcgctttgctccgtttggagctctcaaccctttttccgggcc

SEQ ID NO: 463396 - DNA, 120 bp, Artificial Sequence
  ENSG00000157833_17 (sequence is synthesized)
ttccccaggcccagcctcgccaggccaggcctattcagctgctcccccctcctcctgcgccccctcctcctcctcttcttctgaatggcaggaaccagtcctggagcccttcgatccctt

SEQ ID NO: 463397 - DNA, 120 bp, Artificial Sequence
  ENSG00000157833_18 (sequence is synthesized)
tgagctggggcagggcagttctccagagcctgagctgctgcgttctcaggagcccagagcagtggggacacctgggcctggaccccgcctttcaccacttggcccctccaaggcctttga

SEQ ID NO: 463398 - DNA, 120 bp, Artificial Sequence
  ENSG00000157833_19 (sequence is synthesized)
gcctgaaggtttggtgctgcaccaggtccccaccccactgtcaccagctgctctgcagggacccgaggcgggaggagcactttttctaacccaagggcgcctggaagggcctcctgccag

SEQ ID NO: 463399 - DNA, 120 bp, Artificial Sequence
  ENSG00000157833_20 (sequence is synthesized)
tccccgggatggagccacaggctttggagtccgagatgcctcctcctggcagccccctgctgacctgtctgcactctccctggaggaggtctctcgcagtctgcgtttcatcgggctctc

SEQ ID NO: 463400 - DNA, 120 bp, Artificial Sequence
  ENSG00000157833_21 (sequence is synthesized)
agaggatgtggtgagcttctttgcccgagaacgcatcgatggtagcatctttgtgcagctcagtgaggacatcctggcagatgacttccacctcaccaagctgcaggtcaagaagatcat

SEQ ID NO: 463401 - DNA, 120 bp, Artificial Sequence
  ENSG00000157833_22 (sequence is synthesized)
gcagttcatcaaaggctggaggcccaagatctgaactgcccagctggagctgcacagctggaatgctggtatgggggccccaggtacagcactccggaggagcaggtgctgcctgcaaga

SEQ ID NO: 463402 - DNA, 120 bp, Artificial Sequence
  ENSG00000157833_23 (sequence is synthesized)
aggatctatgtcgagactgaggctgctcagcagccactgggtggatccaggggagatgcatgtggaaatgtggtcctctggggtcagacccctgcacgggacatcttgcctttgagtgtg

SEQ ID NO: 463403 - DNA, 120 bp, Artificial Sequence
  ENSG00000157833_24 (sequence is synthesized)
cagagtacatggggaaggggctgggggcaccactgtgtacctgggcccagtaaggcatttgccgtgattcccacaacggggtcaaaagctggccttcagggtgacctaacaccacctcat

SEQ ID NO: 463404 - DNA, 120 bp, Artificial Sequence
  ENSG00000157833_25 (sequence is synthesized)
gccctgctatagaccttcacaaacgacttccactgctgaagcctgtaggctctgtttagagacaagaagatggctggtaatttaagcaccgatttcccaagtgcccactctcctttgtgc

SEQ ID NO: 463405 - DNA, 120 bp, Artificial Sequence
  ENSG00000157833_26 (sequence is synthesized)
tctgttggcttttggcctaaagctgccccagagtgagggtgtagatgtctgtgtctgtgagatgcctttcccttccccctctgctccaccgtggttgaggggggtggggcctggccccgc

SEQ ID NO: 463406 - DNA, 120 bp, Artificial Sequence
  ENSG00000157833_27 (sequence is synthesized)
acacaggtgagtcgtgtacaagcctaacccatggcacctcagaggctccacctgtgggtcctggttcatgggtgacaactttggaagagcacagctctgcaattgacccgacccacttat

SEQ ID NO: 463407 - DNA, 120 bp, Artificial Sequence
  ENSG00000157833_28 (sequence is synthesized)
ctagttaggaagccagacactgcccagatgactctagcaccctggcttctgctctgactttactgcagctagtcatccatccgtcaggtggcgttcagtctcagaatactgattccgtgg

SEQ ID NO: 463408 - DNA, 120 bp, Artificial Sequence
  ENSG00000157833_29 (sequence is synthesized)
aagagcaggttgatttaggtcagcttctccttgattctagaagcaagcggtagtcaaccacctccaattccgccaatctcttgcccccatcatttgtctctgacaatacttggtgttttt

SEQ ID NO: 463409 - DNA, 120 bp, Artificial Sequence
  ENSG00000157833_30 (sequence is synthesized)
ccctggttttctgtcactggcacaggagggtacagttgggagagtgcgttcctggagctcagtcctgcatttgttcacgtgcctcacagcaggcctttgtgcccttgaatctcaaacatg

SEQ ID NO: 463410 - DNA, 120 bp, Artificial Sequence
  ENSG00000157833_31 (sequence is synthesized)
gggatctgcttggtacccagagctctggtcattgtgtccaaccacacaccccaccccatccgtgtcctccatctcacccagaaccacagggtgcccactagtgtcagggcccaaagtgcc

SEQ ID NO: 463411 - DNA, 120 bp, Artificial Sequence
  ENSG00000157833_32 (sequence is synthesized)
agccttctcttctgccttacctagtctacctatttatttcctccactttttatcttaaaagtagctaagccatgctggtgcccatactccaagcaggctgcctcagctcagagaagtggt

SEQ ID NO: 463412 - DNA, 120 bp, Artificial Sequence
  ENSG00000157833_33 (sequence is synthesized)
cagagagtagagcacagaacctgtgatgtggggacatttggttttcttgcagatcatttaatgaatcctcaaggactaatgaaataaatgctagactgctgaagatgagtacaagtggca

SEQ ID NO: 463413 - DNA, 120 bp, Artificial Sequence
  ENSG00000157833_34 (sequence is synthesized)
tgcccactttggcctcccaaagtgctgggttacaagcgtgagccaccgtgcctggcctgccatctccatttctgaccaggctggtggcctgagtacatcatcctgagtcccttccttccc

SEQ ID NO: 463414 - DNA, 120 bp, Artificial Sequence
  ENSG00000157833_35 (sequence is synthesized)
atcatcctgagtcccttccttccccacctcccccttcttctgtcacccaagcctgctgggtctcccttcccagtatctcttggtctgtttctgctattccctagctcttctccagaaccc

SEQ ID NO: 463415 - DNA, 120 bp, Artificial Sequence
  ENSG00000157833_36 (sequence is synthesized)
cttactggtttgtttacctgactggtctcccggttattttaatagagctgaacctggatcatggtatttctttgctcgaaacactccagtgggtctcatgttgtacagaataaagcttta

SEQ ID NO: 463416 - DNA, 120 bp, Artificial Sequence
  ENSG00000157833_37 (sequence is synthesized)
ctgctttagcaaggcattcagagcctttcaaatcccagttgctgtctgcatcccctcctgtcctccctctccctaagtccttccctgcaggcacgcaccatctggggcaggtggtctgct

SEQ ID NO: 463417 - DNA, 120 bp, Artificial Sequence
  ENSG00000157833_38 (sequence is synthesized)
tttgtgtctctgtgtctgtgtttacagtgtttcttccacagggaatgcccattctgtgaattccctttgattcttaaggtgcagctcagtgatcctctcagattccgccaggcaggtttt

SEQ ID NO: 463418 - DNA, 120 bp, Artificial Sequence
  ENSG00000157833_39 (sequence is synthesized)
gcctacctagccgtcttgtaactcttttgtcacaagtctgttgtagcacttatcacatcctgccaccattgggtactcatcgtctcacccattatatctggatttctttaagggcagact

SEQ ID NO: 463419 - DNA, 120 bp, Artificial Sequence
  ENSG00000157833_40 (sequence is synthesized)
gtattttacacagatttgtaccctctgtgtggcctaccatagtgtctgacacatagtgagtgctccatcaatatctgtgcaataattaaatgaatgaactgtgacagaagcaactaccac

SEQ ID NO: 463420 - DNA, 69 bp, Artificial Sequence
  ENSG00000157833_41 (sequence is synthesized)
aataattaaatgaatgaactgtgacagaagcaactaccacaggggcttcagaagctaaagaagcaggag

SEQ ID NO: 463421 - DNA, 70 bp, Artificial Sequence
  ENSG00000157833_42 (sequence is synthesized)
gagtttgagaccagcctgggcaacatcatgagacgtcatctctagtacttgagaggctgaggcaggagga

SEQ ID NO: 463422 - DNA, 120 bp, Artificial Sequence
  ENSG00000157833_43 (sequence is synthesized)
gccactgtactccagcctgggcgacagcaagaccctgtctcaaaaaaaacacccagaggctaaagagtcaccttgtcttctctcgacttgttccctcacctattcatggctctcttccta

SEQ ID NO: 463423 - DNA, 120 bp, Artificial Sequence
  ENSG00000157833_44 (sequence is synthesized)
tattcatggctctcttcctactgtataaagcttgagaagaggccatccatcagatgccagggcggctcagagcttgttttgtgctcatgtgggtatgcatataacaggtgtctggccagt

SEQ ID NO: 463424 - DNA, 120 bp, Artificial Sequence
  ENSG00000157833_45 (sequence is synthesized)
gaggtgagagagcttacacagggatgtcagcttcacagactggcaatcacttccgtaaagtctgtgtctcctaggggcatgtgctgagcttggcaaagcacgcagccccagactgcaggt

SEQ ID NO: 463425 - DNA, 120 bp, Artificial Sequence
  ENSG00000157833_46 (sequence is synthesized)
tgggaaggcctactctcagggaggtggctttgctgggttcaggtcagagcctctgggagagtaggattggatattggaccagggcagggtgtgggaacagagctggggtcagagtggttc

SEQ ID NO: 463426 - DNA, 80 bp, Artificial Sequence
  ENSG00000157837_0 (sequence is synthesized)
ctcccctcggcgggtgtgatcgagtggcctcgcctcatcgcctagcgcccccctcagtcgccgccgcctccgcccgccgg

SEQ ID NO: 463427 - DNA, 120 bp, Artificial Sequence
  ENSG00000157837_1 (sequence is synthesized)
cccgtcttgccgttcgcccgccccagggcccccttgttctccgcgccgccgccgccgccatgttgggtttggagctgcagcggagccgccgccgccgccgcgggtgagggaggccgagag

SEQ ID NO: 463428 - DNA, 80 bp, Artificial Sequence
  ENSG00000157837_2 (sequence is synthesized)
cagggagcggggccgcttcggagcccggcctctccccgccagccgccttcccggcccgccgtgcagccagcgagccagcg

SEQ ID NO: 463429 - DNA, 120 bp, Artificial Sequence
  ENSG00000157837_3 (sequence is synthesized)
gtgcagccagcgagccagcgagcgagcaagcaagcaagcaccggaccccggccgcgccttcagctacggcccgagcgagcccgccgccgccgggcccggccacagcctgcagcggagccc

SEQ ID NO: 463430 - DNA, 120 bp, Artificial Sequence
  ENSG00000157837_4 (sequence is synthesized)
gaggcagcgccatggcggagcagacctactcgtgggcctattccctggtggattccagtcaagtgtctacatttctgatttccattcttcttatagtctatggtagtttcaggtccctta

SEQ ID NO: 463431 - DNA, 120 bp, Artificial Sequence
  ENSG00000157837_5 (sequence is synthesized)
atatggactttgaaaatcaagataaggagaaagacagtaatagttcttctgggtctttcaatggcaacagcaccaataatagcatccaaacaattgactctacccaggctctgttccttc

SEQ ID NO: 463432 - DNA, 120 bp, Artificial Sequence
  ENSG00000157837_6 (sequence is synthesized)
caattggagcatctgtctctcttttagtaatgttcttcttctttgactcagttcaagtagtttttacaatatgtacagcagttcttgcaacgatagcttttgcttttcttctcctcccga

SEQ ID NO: 463433 - DNA, 120 bp, Artificial Sequence
  ENSG00000157837_7 (sequence is synthesized)
tgtgccagtatttaacaagaccctgctcacctcagaacaagatttcctttggttgctgtggacgtttcactgctgctgagttgctgtcattctctctgtctgtcatgctcgtcctcatct

SEQ ID NO: 463434 - DNA, 120 bp, Artificial Sequence
  ENSG00000157837_8 (sequence is synthesized)
gggttctcactggccattggcttctcatggatgcactggccatgggcctctgtgtcgccatgatcgcctttgtccgcctgccgagcctcaaggtctcctgcctgcttctctcagggcttc

SEQ ID NO: 463435 - DNA, 120 bp, Artificial Sequence
  ENSG00000157837_9 (sequence is synthesized)
tcatctatgatgtcttttgggtatttttctcagcctacatcttcaatagcaacgtcatggtgaaggtggccactcagccggctgacaatccccttgacgttctatcccggaagctccacc

SEQ ID NO: 463436 - DNA, 120 bp, Artificial Sequence
  ENSG00000157837_10 (sequence is synthesized)
tggggcccaatgttgggcgtgatgttcctcgcctgtctctgcctggaaaactggtcttcccaagctccactggcagccacttctccatgttgggcatcggagacatcgttatgcctggtc

SEQ ID NO: 463437 - DNA, 120 bp, Artificial Sequence
  ENSG00000157837_11 (sequence is synthesized)
tcctactatgctttgtccttcgctatgacaactacaaaaagcaagccagtggggactcctgtggggcccctggacctgccaacatctccgggcgcatgcagaaggtctcctactttcact

SEQ ID NO: 463438 - DNA, 120 bp, Artificial Sequence
  ENSG00000157837_12 (sequence is synthesized)
gcaccctcatcggatactttgtaggcctgctcactgctactgtggcgtctcgcattcaccgggccgcccagcccgcccttctctatttggtgccatttactttattgccactcctcacga

SEQ ID NO: 463439 - DNA, 120 bp, Artificial Sequence
  ENSG00000157837_13 (sequence is synthesized)
tggcctatttaaagggcgacctccggcggatgtggtctgagcctttccactccaagtccagcagctcccgattcctggaagtatgatggatcacgtggaaagtgaccagatggccgtcat

SEQ ID NO: 463440 - DNA, 120 bp, Artificial Sequence
  ENSG00000157837_14 (sequence is synthesized)
agtccttttctctcaactcatggtttgtttcctcttagagctggcctggtactcagaaatgtacctgtgtttaaggaactgccgtgtgactggatttggcatttaaagggagctcgtttg

SEQ ID NO: 463441 - DNA, 120 bp, Artificial Sequence
  ENSG00000157837_15 (sequence is synthesized)
caggagagaggtgctggagccctgtttggttccttctcttcctgcggatgtagaggtggggccccttccaagagggacaggcctctccccagcgcgccttcctcccacgtttttatggat

SEQ ID NO: 463442 - DNA, 120 bp, Artificial Sequence
  ENSG00000157837_16 (sequence is synthesized)
ctgcaccagactgttaccttctgggggagatggagatttgactgtttaaaaactgaaaacagcgaggagtctttctagaacttttgaacactaaaaggatgaaaaaaattagcaaaccga

SEQ ID NO: 463443 - DNA, 120 bp, Artificial Sequence
  ENSG00000157837_17 (sequence is synthesized)
gtttcagagaactgagacagaagctcttctgtcgttatattcttctttcctttttttggatttattaaatattttctgtggtgtgaagtgacttattaaatccacagacattgagtgact

SEQ ID NO: 463444 - DNA, 120 bp, Artificial Sequence
  ENSG00000157837_18 (sequence is synthesized)
tcttacaacatccacataagaatttgttgtaatgagttcatgtccacccagatgttgtgttggcagtgaacaagggcacggtttttatacatacgtacatatatatatataaacacacac

SEQ ID NO: 463445 - DNA, 120 bp, Artificial Sequence
  ENSG00000157837_19 (sequence is synthesized)
atagatatatatgaataaacaaaaatgaaatcctgctaagatcacgctgtgtagctgacaggggcttgctgtcgttttgagcatgtcgagcagtttactgtggcttccttgtatatggat

SEQ ID NO: 463446 - DNA, 120 bp, Artificial Sequence
  ENSG00000157837_20 (sequence is synthesized)
aagctgctgtccttccccttcacaactgaccccgcagttacaaactagtatagcatttgtgctgattgatgatagactcatggacttcaggagcccttacttggttttgatcagtgtagc

SEQ ID NO: 463447 - DNA, 120 bp, Artificial Sequence
  ENSG00000157837_21 (sequence is synthesized)
aaattagggatgaagagttcaaaccttttggccctttctttcttttctaggcttctccctcgcagggtgttccgtagtttcttctcgagccaatgcatgtattatagcagcaggtgtctt

SEQ ID NO: 463448 - DNA, 90 bp, Artificial Sequence
  ENSG00000157837_22 (sequence is synthesized)
cttctcgagccaatgcatgtattatagcagcaggtgtctttgtgctttctcatcatagtaacgtactacttgtaaatacatttttcgaca

SEQ ID NO: 463449 - DNA, 120 bp, Artificial Sequence
  ENSG00000157837_23 (sequence is synthesized)
ctcctttaagaaaaaaaaaaaggaaaaaagcaacacaatcctgtccttgctgttgtgattatagtcttggtttacctgtggtgacaaccgggtgttggggacacatgtcaaatgcccctc

SEQ ID NO: 463450 - DNA, 120 bp, Artificial Sequence
  ENSG00000157837_24 (sequence is synthesized)
tgagatgggccctaaattccagtaactggggaaagaaccagctgctgtgtcctgagagcctggccctgtgctgtggtctctgctgcaagcccagatttctgggagtaactagtgttaggt

SEQ ID NO: 463451 - DNA, 120 bp, Artificial Sequence
  ENSG00000157837_25 (sequence is synthesized)
ctgctgacctttacctaagcagcccctgcctggtaagaaggtgcccattgttcagaggcaaagagaagcctgcggttggcatgaggatgcctgacaacaaaggctggagaagggccctga

SEQ ID NO: 463452 - DNA, 120 bp, Artificial Sequence
  ENSG00000157837_26 (sequence is synthesized)
gttccagcctctccccaagggtccccgccccagtggctgcctctgtcttgacctgtgtaatgaattagtgtgctgtgtcactgtggcttgaagtcactgtggatcgagctcacagggggc

SEQ ID NO: 463453 - DNA, 120 bp, Artificial Sequence
  ENSG00000157837_27 (sequence is synthesized)
acccatcctgttgtcaacagagtctgaagcagtcagggtgttggattcctctgttgttgtcatcaattcctgctgaggggtttctggggttttgtttttaataaatgactcctttgtagc

SEQ ID NO: 463454 - DNA, 120 bp, Artificial Sequence
  ENSG00000157837_28 (sequence is synthesized)
ctttgtcacataatcttcactttggttgttggtaccaaacagagctcccagccatctcctccctgttctggaagactgatgggaagactctgtctgtccccagacctggtcatctgcagc

SEQ ID NO: 463455 - DNA, 120 bp, Artificial Sequence
  ENSG00000157837_29 (sequence is synthesized)
tctggcccagtcatagatacatcaaagaactgaagcttctgctgtccacagaactcaaaactgcctctgcattgggtgaagactaaaaatccacttgcggactctcccttccttccttct

SEQ ID NO: 463456 - DNA, 120 bp, Artificial Sequence
  ENSG00000157837_30 (sequence is synthesized)
cagccctcgaggatgcatatagctaattaagcaggcccagagacagagaggggggctccaaaatgactcggattaagggcaagtgccagtgatgggtagaaataacgttatccttcatgc

SEQ ID NO: 463457 - DNA, 79 bp, Artificial Sequence
  ENSG00000157837_31 (sequence is synthesized)
gttatcctggcagtgggtcattttaatttttctgtctttgttttcataagaaaattaaattccagacagaaggaacgtc

SEQ ID NO: 463458 - DNA, 120 bp, Artificial Sequence
  ENSG00000157837_32 (sequence is synthesized)
attccttgagaggatcagctaagatggagagagtatttgtggtggacttgttgactttgaagaacctcctgtaggccatctagatggagaaaatcaataggcagttagaaaaatggaaac

SEQ ID NO: 463459 - DNA, 120 bp, Artificial Sequence
  ENSG00000157837_33 (sequence is synthesized)
ggggaattcaggagatgcaggctttacctcatcaccgagcaaaaccagtaaaatactattagagattgaaatgtaactggataaaagtctgattattgagacttttgccattggcacaga

SEQ ID NO: 463460 - DNA, 81 bp, Artificial Sequence
  ENSG00000157837_34 (sequence is synthesized)
ataaaagtggtggggtggactatgtcagattggaaaccagcacagacaaaccatctgcaaaagatgttttggggtctatag

SEQ ID NO: 463461 - DNA, 120 bp, Artificial Sequence
  ENSG00000157837_35 (sequence is synthesized)
acagacaaaccatctgcaaaagatgttttggggtctatagagaaatttgattaaatgaggtgaaaattcacccaaatggaaactgggggttgttggctttggtggagggggggaacagat

SEQ ID NO: 463462 - DNA, 84 bp, Artificial Sequence
  ENSG00000157837_36 (sequence is synthesized)
aactgggggttgttggctttggtggagggggggaacagattgtgtgatctcattagattaaaaaaaaaaagtatgtaaaaaatt

SEQ ID NO: 463463 - DNA, 87 bp, Artificial Sequence
  ENSG00000157837_37 (sequence is synthesized)
agcgagactccatctccaaaaagaaaaacaaaattctaggaagatattgaacagtggtaatctctgaaaagtgggaatgtaattttt

SEQ ID NO: 463464 - DNA, 120 bp, Artificial Sequence
  ENSG00000157837_38 (sequence is synthesized)
tgaacagtggtaatctctgaaaagtgggaatgtaatttttttattttgctttactgtattctctagttttctataacgcagttaatgaattgctgggatgatgcctccagtgaatgaaag

SEQ ID NO: 463465 - DNA, 120 bp, Artificial Sequence
  ENSG00000157837_39 (sequence is synthesized)
ggggtgctatctagggtgtgagttcactttaaagcagggagcaaggacaacacatccacaacattggagggaaggcaggaaaagagagcttggaggtcttggactggtttcctgggtctc

SEQ ID NO: 463466 - DNA, 120 bp, Artificial Sequence
  ENSG00000157837_40 (sequence is synthesized)
caacagccgagcactatgtctaggaggaggaaagcaatcaccccaaattccacaagtccaaacaggctgaagaagcgggtgttttgcaccagttgcatgtaagtttctgaagctggagct

SEQ ID NO: 463467 - DNA, 120 bp, Artificial Sequence
  ENSG00000157837_41 (sequence is synthesized)
tagggctgcctgatttttgagggaattgcaaactctgtgaagggccatagcttgtggaaagaggatgagcctggagtccacactgactgctgtctgctgtaccctgtctcctccccagca

SEQ ID NO: 463468 - DNA, 120 bp, Artificial Sequence
  ENSG00000157837_42 (sequence is synthesized)
catacactgctgagagagtgaactgatgcagcctttttgcgaacagttgtgtggtatgtaaaagtctcaaaatgtgcttgccctttgacatttctccttctaggcttttatcataaggaa

SEQ ID NO: 463469 - DNA, 120 bp, Artificial Sequence
  ENSG00000157837_43 (sequence is synthesized)
gtaattaaggatatgatatgctcagagataggagtggaagattcagctgcattgggatgctttcatctgcagtcaggaaaactcttgaactgacacattggaaggactgaagattgtttt

SEQ ID NO: 463470 - DNA, 120 bp, Artificial Sequence
  ENSG00000157837_44 (sequence is synthesized)
ttaaaatgttacaagagctatttttcagagttgttcaaaagagaccttctttcctaattccttggcatttaaaaatattgtcatatgacttttctgaccttcttttgtaagcaaaactac

SEQ ID NO: 463471 - DNA, 120 bp, Artificial Sequence
  ENSG00000157837_45 (sequence is synthesized)
atactaaaaggaaaatttttcacctttatcattgttcaaaaattaagatttatataccatgtcatgtaagtttttccttataaatcttggcttcgccttctccgtctcaaccacgccacc

SEQ ID NO: 463472 - DNA, 120 bp, Artificial Sequence
  ENSG00000157837_46 (sequence is synthesized)
cttccccaactcctccttgaacctcttgatccacgtcatctgttgagacctgcccacacaatctgaaagaaaggctggagacgtcaaagtgcaggaattctatgacaccagagcagtatt

SEQ ID NO: 463473 - DNA, 120 bp, Artificial Sequence
  ENSG00000157837_47 (sequence is synthesized)
gtgtttcctgggcaggaggactcgaaggggtggagagaggcaggccagggcaaagaggccctggatggttgaaagaatagaaaactcagtggtcaagaaatggggaaaatgaaaatgttt

SEQ ID NO: 463474 - DNA, 120 bp, Artificial Sequence
  ENSG00000157837_48 (sequence is synthesized)
aaagattttctcaaatcatacagtcaacgaaagcattgcagtcacagcattctgagactctgctcttaagagcaaggagggctgatgctgaaagcaggttgcttccaactccctctgtta

SEQ ID NO: 463475 - DNA, 120 bp, Artificial Sequence
  ENSG00000157837_49 (sequence is synthesized)
taaggatattgtttttcaagatactatcaacatagaagagatcttttaagagggagaagagtttttcaatcaaggaaatgaaaccagtaaaacattttctcaagatttttctgactataa

SEQ ID NO: 463476 - DNA, 120 bp, Artificial Sequence
  ENSG00000157837_50 (sequence is synthesized)
aatgttaagcttccttcgttttgttgtaagagtgacagcacagtgggtcagaggatagatcttagacttcatcgtcagaattcttgatcatctataactggcctattccctggtggattc

SEQ ID NO: 463477 - DNA, 120 bp, Artificial Sequence
  ENSG00000157851_0 (sequence is synthesized)
gagcgcgcgtgcagccgccgccgccccgagcacccgcagctccggcgccgcggcgagacggagacggaccgagccacgggcccccgcggccgcagcatctcggaggagaacatgcttgcc

SEQ ID NO: 463478 - DNA, 120 bp, Artificial Sequence
  ENSG00000157851_1 (sequence is synthesized)
ggagaacatgcttgccaactcagccagcgtgaggatcctcatcaagggaggcaaggtggtgaacgatgactgcacccacgaggctgacgtctacatcgagaatggcatcatccagcaggt

SEQ ID NO: 463479 - DNA, 120 bp, Artificial Sequence
  ENSG00000157851_2 (sequence is synthesized)
gggccgcgagctcatgatccctggcggggccaaggtgattgatgccacaggaaaactggtgatccctggtggcatcgacaccagcacccacttccaccagaccttcatgaatgccacgtg

SEQ ID NO: 463480 - DNA, 120 bp, Artificial Sequence
  ENSG00000157851_3 (sequence is synthesized)
cgtggacgacttctaccatgggaccaaggcagcactcgtcggaggcaccaccatgatcatcggccacgtcctgcccgacaaggagacctcccttgtggacgcttatgagaagtgccgagg

SEQ ID NO: 463481 - DNA, 120 bp, Artificial Sequence
  ENSG00000157851_4 (sequence is synthesized)
tctggccgaccccaaggtctgctgtgattacgccctccacgtggggatcacctggtgggcacccaaggtgaaagcagaaatggagacactggtgagggagaagggtgtcaactcgttcca

SEQ ID NO: 463482 - DNA, 120 bp, Artificial Sequence
  ENSG00000157851_5 (sequence is synthesized)
gatgttcatgacctacaaggacctgtacatgcttcgagacagtgagctgtaccaagtgttgcacgcttgcaaggacattggggcaatcgcccgcgtccatgctgaaaatggggagcttgt

SEQ ID NO: 463483 - DNA, 120 bp, Artificial Sequence
  ENSG00000157851_6 (sequence is synthesized)
ggccgagggtgctaaggaggcactggatttggggatcacaggcccagaaggaatcgagatcagccgtccagaggagctggaagctgaagccactcatcgtgttatcaccattgcaaacag

SEQ ID NO: 463484 - DNA, 120 bp, Artificial Sequence
  ENSG00000157851_7 (sequence is synthesized)
gactcactgtccaatctacctggtcaacgtgtccagtatctcggctggtgacgttatcgcagctgctaagatgcaagggaaggttgtgctggcggagaccaccactgcacatgccacgct

SEQ ID NO: 463485 - DNA, 120 bp, Artificial Sequence
  ENSG00000157851_8 (sequence is synthesized)
gacaggcttacactactaccaccaggactggtcccacgcggctgcctatgtcacggtgcctcccctgagactggacaccaacacctcaacctacctcatgagcctgctggccaatgacac

SEQ ID NO: 463486 - DNA, 120 bp, Artificial Sequence
  ENSG00000157851_9 (sequence is synthesized)
tctgaacatcgtggcatcagatcaccggcctttcaccacaaagcagaaagctatgggcaaggaagacttcaccaagatcccacatggagtgagtggcgtgcaggaccgcatgagcgtcat

SEQ ID NO: 463487 - DNA, 120 bp, Artificial Sequence
  ENSG00000157851_10 (sequence is synthesized)
ctgggagagaggagtggttggaggaaagatggatgagaaccgttttgtggccgttaccagttccaacgcagctaagcttctgaacctgtatccccgcaagggccgcattattcccggagc

SEQ ID NO: 463488 - DNA, 120 bp, Artificial Sequence
  ENSG00000157851_11 (sequence is synthesized)
cgatgctgatgtggtggtgtgggacccagaagccacaaagaccatctcagccagcacgcaggtccagggaggagacttcaacctgtatgagaacatgcgctgccacggcgtgccactggt

SEQ ID NO: 463489 - DNA, 120 bp, Artificial Sequence
  ENSG00000157851_12 (sequence is synthesized)
caccatcagccgggggcgcgtcgtgtatgagaacggcgtcttcatgtgcgccgagggcaccggcaagttctgtcccctgaggtccttcccagacactgtctacaagaagctggtccagag

SEQ ID NO: 463490 - DNA, 120 bp, Artificial Sequence
  ENSG00000157851_13 (sequence is synthesized)
agagaagactttaaaggttagaggagtggaccgcactccctacctgggggatgtcgctgttgtcgtgcaccctgggaaaaaagagatgggaaccccactcgcagacactcctacccggcc

SEQ ID NO: 463491 - DNA, 120 bp, Artificial Sequence
  ENSG00000157851_14 (sequence is synthesized)
cgtcacccggcatgggggcatgagggaccttcacgaatccagcttcagcctctctggctctcagatcgatgaccatgttccaaagcgagcttcagctcggatcctcgctcctcccggagg

SEQ ID NO: 463492 - DNA, 120 bp, Artificial Sequence
  ENSG00000157851_15 (sequence is synthesized)
caggtcgagtggcatttggtaaaggcattgccaagccccccgagtgaggacgcaccgccgccaccagcccgcaactctccagccgaagctgcaggggcaggagaggctgggctgggtggc

SEQ ID NO: 463493 - DNA, 120 bp, Artificial Sequence
  ENSG00000157851_16 (sequence is synthesized)
acaccacccgaggggggccccgggacccacggagccctccctatgtctgcaaagtgattcactgtgcttcgagccaactctaacaggcactttgagatgtgttcctcctgctgtagtcct

SEQ ID NO: 463494 - DNA, 120 bp, Artificial Sequence
  ENSG00000157851_17 (sequence is synthesized)
ttctgccttggcctcggcgggcttttctggggcccaggaagcccacactatgcacagagcccaatgcatagagccctggccagcccttcctctcactcctgcctccgctggctttgggaa

SEQ ID NO: 463495 - DNA, 120 bp, Artificial Sequence
  ENSG00000157851_18 (sequence is synthesized)
agcccagactttagtgccctgccccctggctgactggccagttgcccagagcactttagcagatgtggtttcaaagtaaaggcctcctcccccaccccttaggccccgtggtgacatttc

SEQ ID NO: 463496 - DNA, 120 bp, Artificial Sequence
  ENSG00000157851_19 (sequence is synthesized)
ccaagtcagacagatgtcagcttcccagccatgcccaggacgtcctatctcccccaacccacctctggccctgtgtaggggcagggatgggggtggctgggactcctggtgcccctcgcc

SEQ ID NO: 463497 - DNA, 120 bp, Artificial Sequence
  ENSG00000157851_20 (sequence is synthesized)
agcttctcctgcgccccgcccacaccctcggggggtcacaggcccagaagggtagctgggcggggctcgaggctggtgccaggcgcgtgtaaatggttttgttttgcacgtttggtttgc

SEQ ID NO: 463498 - DNA, 120 bp, Artificial Sequence
  ENSG00000157851_21 (sequence is synthesized)
ttgtttgtgcatcctgtgaaaaataacggtgcttgtgtcactagcatagaatagcgacaggaatagatgtggtccttaggagacgctgcacttgacaccaaccagacagcacagggcagg

SEQ ID NO: 463499 - DNA, 120 bp, Artificial Sequence
  ENSG00000157851_22 (sequence is synthesized)
ggtggtggagggggctgggctcacaggcctctcttttccccgcctgcagtcttctgggctgcgggaggccctggccctttccccttcccctcccctccttgtctagtttcccacattcca

SEQ ID NO: 463500 - DNA, 120 bp, Artificial Sequence
  ENSG00000157851_23 (sequence is synthesized)
aaagggggcctgggatgctagccccagagatgccagcccttcaggaagcaggtgtcctttcccctctctgcccctgatcactcccagcactccccttgccttcccctgtcttcacctgcc

SEQ ID NO: 463501 - DNA, 120 bp, Artificial Sequence
  ENSG00000157851_24 (sequence is synthesized)
cacacacacacacacacacacacgcacggcttcctataacttcttcctgctggacagagactcagcgctcctcctgtgtgactggcaagaggcctcatgcctgctgagagaggaggagtg

SEQ ID NO: 463502 - DNA, 120 bp, Artificial Sequence
  ENSG00000157851_25 (sequence is synthesized)
tgagagaggaggagtgggagaggggcttgccagacaccagagagggagaccccaggcccacaggacctggctgtcgaacccgcattgctgctcaggtgccgtgatctcccgtggtcggca

SEQ ID NO: 463503 - DNA, 120 bp, Artificial Sequence
  ENSG00000157851_26 (sequence is synthesized)
ccaggcccttgccagctcatggcctcatcttctcccctgtccatccaggtgggccctccctgcttctaaagccccacagaagttcccatggaaacactagaggccgggtgtctccttcca

SEQ ID NO: 463504 - DNA, 120 bp, Artificial Sequence
  ENSG00000157851_27 (sequence is synthesized)
cctccagtgatctgggaagtgacccagccgcctgcccttgttaagcctggtctgccccgtgggaagtgacttcatgttgcacatgtgatttcagcccccgaggcttgcgcgaggcttctg

SEQ ID NO: 463505 - DNA, 61 bp, Artificial Sequence
  ENSG00000157851_28 (sequence is synthesized)
acatgtgatttcagcccccgaggcttgcgcgaggcttctggaccctcggttaaaggtcagc

SEQ ID NO: 463506 - DNA, 87 bp, Artificial Sequence
  ENSG00000157851_29 (sequence is synthesized)
gacaaacaaaaaagtcagcccctgcacatctctgtagtgcttttcatgtattcaaaccacttccgtatatgacctctcacttagtcc

SEQ ID NO: 463507 - DNA, 120 bp, Artificial Sequence
  ENSG00000157851_30 (sequence is synthesized)
gtattcaaaccacttccgtatatgacctctcacttagtcctcatgacaatggagcacttattattcttcccattttacagatgaggaaactaagacccagaaagttcaggtcctctgacc

SEQ ID NO: 463508 - DNA, 120 bp, Artificial Sequence
  ENSG00000157851_31 (sequence is synthesized)
ccagaagtgtctgtgatgaccctcccaaccttggctatctaccccacctgtggagaggaggtctggggtgacatctattgtagatcccacctgagagtttaaccaatgagaagacttact

SEQ ID NO: 463509 - DNA, 120 bp, Artificial Sequence
  ENSG00000157851_32 (sequence is synthesized)
ttcctggtaggcagcctgctttgttttgcacaggaagatagattttttttctcatctttcttataaacaacctcatgcacattctgtgtttgagccaagactagtcacccattgggggct

SEQ ID NO: 463510 - DNA, 120 bp, Artificial Sequence
  ENSG00000157851_33 (sequence is synthesized)
aaccgtgcagtgtgagctgcgtccacaccctcacttctcccttcactccccctttcctcactcaggggctgagaggacagaggtggtcagccggggagcagaggtggcgaaggggctcat

SEQ ID NO: 463511 - DNA, 120 bp, Artificial Sequence
  ENSG00000157851_34 (sequence is synthesized)
ggcaagtggcagccattggaacaggggtgaggacccaggcctgggaaagccaccagggatgggggaaaccatgacgccgcctcctggtgcagtgcacaccatctctatccctgtcagccc

SEQ ID NO: 463512 - DNA, 120 bp, Artificial Sequence
  ENSG00000157851_35 (sequence is synthesized)
tcactgggtcatgggccttgggcagatgtcaaagagcccagcagcagcggtggtggccagctgggcagagcatccttgcttgggctaggaaagctttaccttctctgagtgcctccgcct

SEQ ID NO: 463513 - DNA, 120 bp, Artificial Sequence
  ENSG00000157851_36 (sequence is synthesized)
gagagatgtgtgacccgtggcaccagggaaccacgtcttggagtggtccactgtaggccatgcgcttcatccacccccagtccctacataggccctacccttgcccgggagcttctagat

SEQ ID NO: 463514 - DNA, 120 bp, Artificial Sequence
  ENSG00000157851_37 (sequence is synthesized)
agaaatcagaaagagattcaaggagccaaatgagcggtcagcccccaccatgcactccttgccccgtgcagagctccagccagcttcgtcaccagccccactggctcctggttggaacga

SEQ ID NO: 463515 - DNA, 120 bp, Artificial Sequence
  ENSG00000157851_38 (sequence is synthesized)
aagggtctctggttgcactgaatgcagctctcaaactggtcttgtacttgctgaataaatactgttgttcttgccttagctgctctctaggtttgtggggttaagttgccagaaaattgt

SEQ ID NO: 463516 - DNA, 120 bp, Artificial Sequence
  ENSG00000157851_39 (sequence is synthesized)
gctactgtgtgtgcgtgtgcgtgcgtgtgtgtagtgctaggagtccacagtaggtctctgtcaagccgatgtcgtgatgagggcttttctgatactgacccagaagccacagaaccacaa

SEQ ID NO: 463517 - DNA, 120 bp, Artificial Sequence
  ENSG00000157851_40 (sequence is synthesized)
ggaaacccaaaccccctccagctgctgaggcgcaggcacagcctggggtcggatggagcctccagcaccccagcacccaggtgacttccccactcccctgtaaatgtcatggtgctaaga

SEQ ID NO: 463518 - DNA, 120 bp, Artificial Sequence
  ENSG00000157851_41 (sequence is synthesized)
ctgtgtcaaccccaagacgacacatggtcctgtgctttggccaccgtttgaggcaaaaactaaacagcccgacacgttgtgttctggtgcaggtttgtattaaactgtagctacttctca

SEQ ID NO: 463519 - DNA, 120 bp, Artificial Sequence
  ENSG00000157851_42 (sequence is synthesized)
gtcctccggaaccgcccccggccctccctggggacccgtgcctcagcgcgtccaggctttgtggtgtcctgagtcgccatggaaacccgagggaacgcggagccgggtgctaggggggtc

SEQ ID NO: 463520 - DNA, 120 bp, Artificial Sequence
  ENSG00000157851_43 (sequence is synthesized)
atctcttgcaaagagtctctgcaagggccagagcagcctctttggcccagagaaggcccagcctaccgcacaggaagagcgatgcatcttcaccacgggtttggccaaagacattagtca

SEQ ID NO: 463521 - DNA, 120 bp, Artificial Sequence
  ENSG00000157851_44 (sequence is synthesized)
ctgggcaggagctgagactgataagccctgccaggtcccccgtggagacagccctatggagctaactggccatcatctgagagccttaagaatatgcttcctcaccaggtcagataatgc

SEQ ID NO: 463522 - DNA, 120 bp, Artificial Sequence
  ENSG00000157851_45 (sequence is synthesized)
tttctgcccccacagtctcctggagtgggcatcttagatggcccacaggcactcacaaggctctggggcctcttacagagtacaatgggacccctgcccctgaccttcagggcacccaca

SEQ ID NO: 463523 - DNA, 120 bp, Artificial Sequence
  ENSG00000157851_46 (sequence is synthesized)
gtgtggtcccagcagtcatcccctcccccacctgactcccctgctccagccaggcctttctctggccccgcaaagccatttcctcttgaggccctgacctggtttgcgtgggcattctct

SEQ ID NO: 463524 - DNA, 120 bp, Artificial Sequence
  ENSG00000157851_47 (sequence is synthesized)
ctcctccgcccctcactgcctctgagcccttggcctgcagagatctctgaatccaggccacctgcctgcctccctcattgggcagaggatctgctgccatgagccctctctccctgttct

SEQ ID NO: 463525 - DNA, 120 bp, Artificial Sequence
  ENSG00000157851_48 (sequence is synthesized)
tccctacgtcttctttggcccaggagcccctcgagggcctgcctgtgccttagccacccacagccttggatggaggatggcttttttttcatcttttcagacagagtctccctctgttcc

SEQ ID NO: 463526 - DNA, 73 bp, Artificial Sequence
  ENSG00000157851_49 (sequence is synthesized)
cttttttttcatcttttcagacagagtctccctctgttccccaggctggagtgcattggggctcacctcggcc

SEQ ID NO: 463527 - DNA, 67 bp, Artificial Sequence
  ENSG00000157851_50 (sequence is synthesized)
gcccaccactacgctcagaatctcgaactcctggcctccagtgatgcacctgcctcggcctcccaaa

SEQ ID NO: 463528 - DNA, 120 bp, Artificial Sequence
  ENSG00000157851_51 (sequence is synthesized)
catgagcacctggcccgaggacagccttaatatatgtgtgaggaccgtagtcatgaacggcattggggaagaactgagtggcttgcataccactctcggtctattaagtcaggcttctag

SEQ ID NO: 463529 - DNA, 120 bp, Artificial Sequence
  ENSG00000157851_52 (sequence is synthesized)
ctcatccctccttccccttctgggccattagaatccccacatccaaggaaggctatgagtccaagttattcaacaaagcttaacactgaacttgtgaatgcttgttgccagcaggttggg

SEQ ID NO: 463530 - DNA, 120 bp, Artificial Sequence
  ENSG00000157851_53 (sequence is synthesized)
gttggagagctgatgagagggaattggtatacaattccatgagagtagaactacctccaccatctcacttcagctagactctaagttcggcttttctctgctatcttcactcttaaacat

SEQ ID NO: 463531 - DNA, 120 bp, Artificial Sequence
  ENSG00000157851_54 (sequence is synthesized)
tgctatcccaaggctctcactgaagtctcctgtgacacagacagactgtgccacactcattctgtagatgagtaaactgaggttcacatagatgcagtaactcacgacagaccacatggc

SEQ ID NO: 463532 - DNA, 120 bp, Artificial Sequence
  ENSG00000157851_55 (sequence is synthesized)
ctaagcggcagagctgaaattggagtcggctttgcctgcttcccacacggaggattttccctatatctatcctcaccctctaagttcctcacctcccctccccttactggtcacctcctt

SEQ ID NO: 463533 - DNA, 120 bp, Artificial Sequence
  ENSG00000157856_0 (sequence is synthesized)
gttcctagcaaccagcctgaggtctggaggtggtgcggagggagccgcctagggaccagggactcctgccatgaatccgccggggtccctagaggccctggacccgaacgtggacgagca

SEQ ID NO: 463534 - DNA, 120 bp, Artificial Sequence
  ENSG00000157856_1 (sequence is synthesized)
cttgtccacccagattctcgcgccctcggtccactccgacaactctcaggagcgcatccaggcccggcgcctccgcatcgctgcgcgcttagaagcccggaggcgggaagcacttggaga

SEQ ID NO: 463535 - DNA, 120 bp, Artificial Sequence
  ENSG00000157856_2 (sequence is synthesized)
atatttagatgggaagaaggagagtgaggaggatcaaagcaagagctacaaacagaaagaagaaagccgattgaaattggctaaacttctgctctgtggcaccgagttggtgacaaatat

SEQ ID NO: 463536 - DNA, 120 bp, Artificial Sequence
  ENSG00000157856_3 (sequence is synthesized)
ccaggtggctatagatatcagagagattcacaggagagtcgaagaagaggagataaagcgtcaaaggattgagaagctggagaatgaagttaagaccagccaggacaaattcgatgaaat

SEQ ID NO: 463537 - DNA, 120 bp, Artificial Sequence
  ENSG00000157856_4 (sequence is synthesized)
cacctcaaagtgggaagagggcaagcagaagagaattccccaagagctgtgggaaatgctcaatacccaacagctgcactgtgctggactcttagaagataagaataaactcatcagcga

SEQ ID NO: 463538 - DNA, 120 bp, Artificial Sequence
  ENSG00000157856_5 (sequence is synthesized)
gttacagcaggagttaaaaacaaaggatgaccagtatgtgaaggatttgaagaaacagtcagatgacatctgcctgcttctggagcggatggaagaacaggtgaagaatgtgatgaaaac

SEQ ID NO: 463539 - DNA, 120 bp, Artificial Sequence
  ENSG00000157856_6 (sequence is synthesized)
ctttcgtgaggagctctataacattgagaaagcatttgaggtggaacgccaagagctactggccagtaataagaagaaatgggagcaagcccttcaggctcataatgccaaagagctgga

SEQ ID NO: 463540 - DNA, 120 bp, Artificial Sequence
  ENSG00000157856_7 (sequence is synthesized)
gtatcttaacaaccgcatgaagaaagtagaggactatgagaagcagctgaacaggcagaggatctgggattgcgaagaatacaacatgatcaagatcaagctggagcaggatgtgcagat

SEQ ID NO: 463541 - DNA, 120 bp, Artificial Sequence
  ENSG00000157856_8 (sequence is synthesized)
tcttgagcagcagcttcagcagaggaaagcaatttatcagctaaaccaagagaaattagagtacaacttgcaggtgctgaagaagagagatgaagaaagcacagtaattaaatcccagca

SEQ ID NO: 463542 - DNA, 120 bp, Artificial Sequence
  ENSG00000157856_9 (sequence is synthesized)
gaagaggaagatcaatcgcctgcatgatatacttaacaatctgagatcaaaatatgccaagcaaataaagcagtttcaggaggagaaccagtctctaacctcggactacaaacgtcttgt

SEQ ID NO: 463543 - DNA, 120 bp, Artificial Sequence
  ENSG00000157856_10 (sequence is synthesized)
agaggaggcgaaggacctaatagccagagcctttgatgtggacaggatcatccacacccatcatctggggcttccctgggcagcacctgatttctggttcctgaacaatgttgggcctat

SEQ ID NO: 463544 - DNA, 120 bp, Artificial Sequence
  ENSG00000157856_11 (sequence is synthesized)
ttctcagcagccccagaagtccgccacacagatagtagaagaaatgcttatgcgctcagaagaggaggaggcagaagaggccgccgcggaaccagagtcctacctggatttgccgaagca

SEQ ID NO: 463545 - DNA, 120 bp, Artificial Sequence
  ENSG00000157856_12 (sequence is synthesized)
aatttctgaaaaaactaccaagaggatcctgatgctcctgtgtgacgagtcggggttcctcatagagagcaagctgctgagccttctcctgcccctggagcagaatgaatgctatctgct

SEQ ID NO: 463546 - DNA, 120 bp, Artificial Sequence
  ENSG00000157856_13 (sequence is synthesized)
gaggctggatgccatcttctccgcccttggaattgaaagtgaggatgacttgtataaactggtgaacttcttccttaaatatcgagctcaccgtttatcttccagcctccagatcaagcc

SEQ ID NO: 463547 - DNA, 120 bp, Artificial Sequence
  ENSG00000157856_14 (sequence is synthesized)
ctgcagtcaggcgagcatggagaaggcgagcatggaggagacaagcacgaggtcagaattggagctggcagagcagacggagatggagggagaaaaggaagaaagcctggtggaagggga

SEQ ID NO: 463548 - DNA, 120 bp, Artificial Sequence
  ENSG00000157856_15 (sequence is synthesized)
gaaggaggaagaggaggagaccccaccctccccctgggtcatccaccccaatgatgtcctcaagattctggaggccttcgtcatgggtctgaagaagcctagggactcgcgggccccgct

SEQ ID NO: 463549 - DNA, 120 bp, Artificial Sequence
  ENSG00000157856_16 (sequence is synthesized)
gagggtacagaagaatgtgcgtgacaactccaaggactcggagtactggcaggccctgaccacagtgatcccttcctccaagcagaacctctgggatgccctctacacagccttggagaa

SEQ ID NO: 463550 - DNA, 120 bp, Artificial Sequence
  ENSG00000157856_17 (sequence is synthesized)
gtaccaccttgtcctgacccagagggccaagctgctgctggaaaacagttctctggagcagcagaacacagagctgcaggcgctactgcagcagtatctgaactccaagatcaactctga

SEQ ID NO: 463551 - DNA, 120 bp, Artificial Sequence
  ENSG00000157856_18 (sequence is synthesized)
actgcaagttcctcccactcaggtgttgcgggtacccacaaaatgagctggaccgccaaaggctgatgtgttagggctggcctgatgctggtgtctgtgccggagccagctcatatcacc

SEQ ID NO: 463552 - DNA, 120 bp, Artificial Sequence
  ENSG00000157856_19 (sequence is synthesized)
cactgggccgcacctgggcctgctctctggattttccagggctgtctttatagcctgtcgaaataaggagccagaggagttacctgtgtcctgcattatgattaaagccttttaaagttg

SEQ ID NO: 463553 - DNA, 120 bp, Artificial Sequence
  ENSG00000157856_20 (sequence is synthesized)
aaaatcttaaggtagttgctgcttcctgcttgaatggatagaagctgcggacagttgtgcaaaaatgtttcagactttatatattatttacaaagtgttctagctttgtaaattcttata

SEQ ID NO: 463554 - DNA, 120 bp, Artificial Sequence
  ENSG00000157856_21 (sequence is synthesized)
gactgccaacaggggcactggccttcctccagttccctgcctctgatattgactaagccacgggactgttggcacatctcctctccgcatttggagtatcgtcttcataatgctaatttc

SEQ ID NO: 463555 - DNA, 120 bp, Artificial Sequence
  ENSG00000157856_22 (sequence is synthesized)
aatctgttgcaggtttagagactatatagccacttgctagatcatctctgaaataagaataaatgggctcacactctccctcccacttcctggttcatggctggattttgagtatgatgt

SEQ ID NO: 463556 - DNA, 120 bp, Artificial Sequence
  ENSG00000157856_23 (sequence is synthesized)
gccatttggtcttatgaaacttggcaggtctgaatttggatttgactttttctatgtggttggtgatatggcacttatagttacctgaaagttctttgacactggtgggacctgcccaat

SEQ ID NO: 463557 - DNA, 120 bp, Artificial Sequence
  ENSG00000157869_0 (sequence is synthesized)
gtgcgcgtagggggcggggccgcgcgcagagggcggggaggtgggcaagatggcgcttgccgagtgattctcctcgaatacctcctgccggcgcggagacaccggggcgggggtcctgcc

SEQ ID NO: 463558 - DNA, 120 bp, Artificial Sequence
  ENSG00000157869_1 (sequence is synthesized)
gcaactacctcccttcctcctctcccccgcccccggagccttcatccttcccttccccccccacctcgaggggcgggcctggttcccgggacaccatgtcggactctgaggaggagagcc

SEQ ID NO: 463559 - DNA, 120 bp, Artificial Sequence
  ENSG00000157869_2 (sequence is synthesized)
aggaccggcaactgaaaatcgtcgtgctgggggacggcgcctccgggaagacctccttaactacgtgttttgctcaagaaacttttgggaaacagtacaaacaaactataggactggatt

SEQ ID NO: 463560 - DNA, 120 bp, Artificial Sequence
  ENSG00000157869_3 (sequence is synthesized)
tctttttgagaaggataacattgccaggaaacttgaatgttacccttcaaatttgggatataggagggcagacaataggaggcaaaatgttggataaatatatctatggagcacagggag

SEQ ID NO: 463561 - DNA, 120 bp, Artificial Sequence
  ENSG00000157869_4 (sequence is synthesized)
tcctcttggtatatgatattacaaattatcaaagctttgagaatttagaagattggtatactgtggtgaagaaagtgagcgaggagtcagaaactcagccactggttgccttggtaggca

SEQ ID NO: 463562 - DNA, 120 bp, Artificial Sequence
  ENSG00000157869_5 (sequence is synthesized)
ataaaattgatttggagcatatgcgaacaataaaacctgaaaaacacttacggttttgccaggaaaatggttttagtagccactttgtctcagccaagacaggagactctgtcttcctgt

SEQ ID NO: 463563 - DNA, 120 bp, Artificial Sequence
  ENSG00000157869_6 (sequence is synthesized)
gctttcagaaagttgctgctgaaatccttgggatcaaattaaacaaagcagaaatagaacagtcacagcgtattgtcagggcagaaatagtgaagtacccggaagaagaaaatcaacata

SEQ ID NO: 463564 - DNA, 120 bp, Artificial Sequence
  ENSG00000157869_7 (sequence is synthesized)
tcagagtagaatctgttcagtacagtagtgcagagggtggtgaaggcagatattgtaaactacaaccaggaacctatgtcaaggactgttaaccctcctagaagctctatgtgtgcagtt

SEQ ID NO: 463565 - DNA, 120 bp, Artificial Sequence
  ENSG00000157869_8 (sequence is synthesized)
cagtgagcgcatttttcttttgtgttgatagttctggctgcccttcacctctgggtgggcccgaggacttctaggaacttgttttatcagtgaccatctctgtagttcagttaacacttt

SEQ ID NO: 463566 - DNA, 120 bp, Artificial Sequence
  ENSG00000157869_9 (sequence is synthesized)
actcccaacttgcttcatcattgctattgcctcacagtggcaggcagctccttggatttgaaagaattcaactttgggaccacacactttgaattcaaaatggaaaacccattccctgga

SEQ ID NO: 463567 - DNA, 120 bp, Artificial Sequence
  ENSG00000157869_10 (sequence is synthesized)
attagactgcttcattgcaaaagaatgatgttgtttctttgtatgtccttgcttcttttttcattgatgtaaatttttttaacttaatatgaaaactctccaagtcttgatcatcagcca

SEQ ID NO: 463568 - DNA, 120 bp, Artificial Sequence
  ENSG00000157869_11 (sequence is synthesized)
ggattttgccacagcaatttcattctcttatcggaacttgtatgtgtcaaagtatacttcagagtgcaaacattaagcaagtaatatattttacctacagatacttatgaagacattctt

SEQ ID NO: 463569 - DNA, 120 bp, Artificial Sequence
  ENSG00000157869_12 (sequence is synthesized)
tcgctatcgtgagtaaaagtatataaagctgtttctaactgaaaatgcttgaaataagcctgtaatagaaatattttttcattttttaaaaaagggcctaaattgtttatattgtagttt

SEQ ID NO: 463570 - DNA, 120 bp, Artificial Sequence
  ENSG00000157869_13 (sequence is synthesized)
gtaactcacaaagtaatatttgatattgtatttttattactgtatcgttgtcgttatgtattgtgtaatactcaggtttgaaggctttctgaattctgataaatgttcagctgatgctcc

SEQ ID NO: 463571 - DNA, 120 bp, Artificial Sequence
  ENSG00000157869_14 (sequence is synthesized)
acgtggaatttctcttgcaaactgcataagagtactcccgagaatgagttatgacattgtggatcagactgtacctgatgttcagatgtttttctttcacaaataaacttatttaaatta

SEQ ID NO: 463572 - DNA, 120 bp, Artificial Sequence
  ENSG00000157869_15 (sequence is synthesized)
gaggttgtgaactggtgagtgatgggaaagggatgcaaatccaggtctgcctgacttctcacccatcacgttatacgcctcatgctgcagtgaccctctgtcaggttcagagtaagtgct

SEQ ID NO: 463573 - DNA, 120 bp, Artificial Sequence
  ENSG00000157869_16 (sequence is synthesized)
tattacacagtttcaagtgaacgaacaaactgttttcatgactgaatatataaatctgttacacaagtatatatttagaaaaggagcccataaaaataaagaatgaatattttcaatctc

SEQ ID NO: 463574 - DNA, 120 bp, Artificial Sequence
  ENSG00000157870_0 (sequence is synthesized)
gcggggcttggggctggatctatgagccgggagcggggatccaggagcgaggagccgggagcggggaacagggagtcggggagccgggaaccagggctggcagcggccgccatgagcacg

SEQ ID NO: 463575 - DNA, 120 bp, Artificial Sequence
  ENSG00000157870_1 (sequence is synthesized)
gtggaccttgctcgcgtgggcgcgtgcatcctgaagcatgcggtgaccggggaggccgtggagctgcggagcctgtggcgggagcacgcgtgcgtggtggccgggctgcggcgcttcggg

SEQ ID NO: 463576 - DNA, 120 bp, Artificial Sequence
  ENSG00000157870_2 (sequence is synthesized)
tgcgtggtgtgccgctggatcgcccaggacctcagcagccttgctgggctcctggaccaacacggcgtgcgcctggtgggcgtagggcccgaggccctgggtctgcaggagttcctggac

SEQ ID NO: 463577 - DNA, 120 bp, Artificial Sequence
  ENSG00000157870_3 (sequence is synthesized)
ggcgactacttcgcgggagagctctacctggatgagagcaagcagctttacaaggagctaggcttcaagcggtacaacagcctgagcatcctcccagcagctctggggaagcccgtgcgt

SEQ ID NO: 463578 - DNA, 120 bp, Artificial Sequence
  ENSG00000157870_4 (sequence is synthesized)
gatgtggctgccaaggccaaggctgttggcatccaggggaacttgtctggggacctgctgcagagcggagggctgctggtggtcagcaaaggtggtgataaagtgctcctgcatttcgtc

SEQ ID NO: 463579 - DNA, 120 bp, Artificial Sequence
  ENSG00000157870_5 (sequence is synthesized)
cagaagtccccaggcgactacgtccccaaggagcacatcctgcaggtcctgggcatctctgcggaggtctgtgccagcgacccgcctcagtgtgacagagaggtgtgagggaggcgaagg

SEQ ID NO: 463580 - DNA, 120 bp, Artificial Sequence
  ENSG00000157870_6 (sequence is synthesized)
ccctggcctccgaggatctgggtggcgtctgctgccctaggtgtgctggaagtccacttggaagaactgttccggaggcgctgggtcgggatgccgaacctctcctgatccgccggcagc

SEQ ID NO: 463581 - DNA, 120 bp, Artificial Sequence
  ENSG00000157870_7 (sequence is synthesized)
aacgagccattaaaactgcagttcctgaccacgcactgcttcgcaggctccgagccctgcatcctccacagcccccgccttgctcactgttgggccctcagggcgggcagggtggctgtg

SEQ ID NO: 463582 - DNA, 120 bp, Artificial Sequence
  ENSG00000157870_8 (sequence is synthesized)
agtcccaggtgtcatcttcctgctctgcgactttctctggagaccttgggcctttggcctgtggggcactggggatggtaacctcactgccccgtcactcccttcaaaggcgacagaccc

SEQ ID NO: 463583 - DNA, 120 bp, Artificial Sequence
  ENSG00000157870_9 (sequence is synthesized)
aagcccacgtcaggagaggagcgtggggtcagctccagcagggtcggggtcagtgcctgtgtctggtgggggccactcaggagagttgggttttcagggcagagatgggcttgattccac

SEQ ID NO: 463584 - DNA, 120 bp, Artificial Sequence
  ENSG00000157870_10 (sequence is synthesized)
ctggtggggtgggtggaccctggagactctcaggtgatgggccagcctgccccaaggctctttactgatgtcagaatcattgtttgcacctgctgggtatggcctttggggcggccggcc

SEQ ID NO: 463585 - DNA, 120 bp, Artificial Sequence
  ENSG00000157870_11 (sequence is synthesized)
tcaggccctcccctcccatgcaggccgatgacaactgcagccctctctgcactccctagtccagacctggggaccactgtgggttcctgtgggtctcccggctcccttcctgcccccaat

SEQ ID NO: 463586 - DNA, 120 bp, Artificial Sequence
  ENSG00000157870_12 (sequence is synthesized)
gccacccttgcagtggccatttaaaaatgcatagcaggtgacccactgcgtccctttgcgttcagcccctcctctggctttcagttacaccaagctaaaatttcaggttcccagctgcag

SEQ ID NO: 463587 - DNA, 120 bp, Artificial Sequence
  ENSG00000157870_13 (sequence is synthesized)
ctctctgggtcccccggtgccccagtggggctccccgcatctgaatgtgtggtccctgggggtgggcacttgggggcatcctggtcactgctggccctagcattggaccctaggagacct

SEQ ID NO: 463588 - DNA, 120 bp, Artificial Sequence
  ENSG00000157870_14 (sequence is synthesized)
gactggaactggctccctccccatcagctcccagctgtcactctctcccacccccgggcagctgttttgcccaagaccactgctacctgtttacccaccctggtccctcccagacaagca

SEQ ID NO: 463589 - DNA, 120 bp, Artificial Sequence
  ENSG00000157870_15 (sequence is synthesized)
aggcctctgatttctttgaagcatttacttagctcaagtctgaagctgtagatactggaagacaatgcaccttggagggtgggcaggacacagttgattgtctctacagagctgtgacgg

SEQ ID NO: 463590 - DNA, 120 bp, Artificial Sequence
  ENSG00000157870_16 (sequence is synthesized)
gggcactgagccccgcgggtgtctgtggagggggctccggtccaggtactgcactggacactgctcatccctgggtgtcaggcaggtggctgcaccctaggccaggcgcagaggcctggc

SEQ ID NO: 463591 - DNA, 120 bp, Artificial Sequence
  ENSG00000157870_17 (sequence is synthesized)
aggcaggcttggcatggttggccggggcgggacgtacactgggtcgccgctagctgcaccttcgcacagatgcctccgagcagcgggtgggcgtgggccgcacagcgcggcagggccttg

SEQ ID NO: 463592 - DNA, 120 bp, Artificial Sequence
  ENSG00000157870_18 (sequence is synthesized)
gctaccacacgcggcatcgctccttggggtgcatgggggtgccccgggcacagtggaacgtgtctgcgaaggcggccaggttctgcagcgaccccagtaccctgtgggtgggtgggtgtg

SEQ ID NO: 463593 - DNA, 120 bp, Artificial Sequence
  ENSG00000157870_19 (sequence is synthesized)
acagcaggagcattgccatcttggacaaacatggccattttaagttctccgtgattaaaaaccagcccaaaacatcagcctaatggctcatgtcagtatgagcagaaacatttcaaccat

SEQ ID NO: 463594 - DNA, 120 bp, Artificial Sequence
  ENSG00000157870_20 (sequence is synthesized)
gagataaacccccatctgaccagaaacatgccaatcctgagaataacctcccctccagccagagatattccaactctgcaataaaactctccttcacacagaaacattcgcagcctgcgg

SEQ ID NO: 463595 - DNA, 120 bp, Artificial Sequence
  ENSG00000157870_21 (sequence is synthesized)
ctccttcacacagaaacattcgcagcctgcggtaggctcccccttcctaaacccttaaatgcccttagtctgtaagagaatgtccctgaccgaaatcggccagaagcccctctcaggttt

SEQ ID NO: 463596 - DNA, 120 bp, Artificial Sequence
  ENSG00000157870_22 (sequence is synthesized)
cgggacagcaactgtcccgcaaggcccggattgaggaggcgggagggaccgaagcaggcggacccaggatttggcgccgcgatctcgaggcttggcctggagccgtggagctgcggagcc

SEQ ID NO: 463597 - DNA, 120 bp, Artificial Sequence
  ENSG00000157870_23 (sequence is synthesized)
gcagagcggagggctgctggtggtcagcaaaggtgggtcgagggaggggcctcggccactgcctcaaggagggccttgctgaacttggtggcccagcccaggccctctctctggcttgtc

SEQ ID NO: 463598 - DNA, 120 bp, Artificial Sequence
  ENSG00000157870_24 (sequence is synthesized)
agtctcatcacagcccctccgccgcaatgtggcctggttctgcgtgtctgctgggctgagtggggctgtggcagaacagctcactcatctgggtagccgggtgggggatatggctggcca

SEQ ID NO: 463599 - DNA, 120 bp, Artificial Sequence
  ENSG00000157873_0 (sequence is synthesized)
ccttcataccggcccttcccctcggctttgcctggacagctcctgcctcccgcagggcccacctgtgtcccccagcgccgctccacccagcaggcctgagcccctctctgctgccagaca

SEQ ID NO: 463600 - DNA, 120 bp, Artificial Sequence
  ENSG00000157873_1 (sequence is synthesized)
ccccctgctgcccactctcctgctgctcgggttctgaggcacagcttgtcacaccgaggcggattctctttctctttctctttctcttctggcccacagccgcagcaatggcgctgagtt

SEQ ID NO: 463601 - DNA, 120 bp, Artificial Sequence
  ENSG00000157873_2 (sequence is synthesized)
cctctgctggagttcatcctgctagctgggttcccgagctgccggtctgagcctgaggcatggagcctcctggagactgggggcctcctccctggagatccacccccaaaaccgacgtct

SEQ ID NO: 463602 - DNA, 120 bp, Artificial Sequence
  ENSG00000157873_3 (sequence is synthesized)
tgaggctggtgctgtatctcaccttcctgggagccccctgctacgccccagctctgccgtcctgcaaggaggacgagtacccagtgggctccgagtgctgccccaagtgcagtccaggtt

SEQ ID NO: 463603 - DNA, 120 bp, Artificial Sequence
  ENSG00000157873_4 (sequence is synthesized)
atcgtgtgaaggaggcctgcggggagctgacgggcacagtgtgtgaaccctgccctccaggcacctacattgcccacctcaatggcctaagcaagtgtctgcagtgccaaatgtgtgacc

SEQ ID NO: 463604 - DNA, 120 bp, Artificial Sequence
  ENSG00000157873_5 (sequence is synthesized)
cagccatgggcctgcgcgcgagccggaactgctccaggacagagaacgccgtgtgtggctgcagcccaggccacttctgcatcgtccaggacggggaccactgcgccgcgtgccgcgctt

SEQ ID NO: 463605 - DNA, 120 bp, Artificial Sequence
  ENSG00000157873_6 (sequence is synthesized)
acgccacctccagcccgggccagagggtgcagaagggaggcaccgagagtcaggacaccctgtgtcagaactgccccccggggaccttctctcccaatgggaccctggaggaatgtcagc

SEQ ID NO: 463606 - DNA, 120 bp, Artificial Sequence
  ENSG00000157873_7 (sequence is synthesized)
cgaaggccggagctgggaccagcagctcccactgggtatggtggtttctctcagggagcctcgtcatcgtcattgtttgctccacagttggcctaatcatatgtgtgaaaagaagaaagc

SEQ ID NO: 463607 - DNA, 120 bp, Artificial Sequence
  ENSG00000157873_8 (sequence is synthesized)
caaggggtgatgtagtcaaggtgatcgtctccgtccagcggaaaagacaggaggcagaaggtgaggccacagtcattgaggccctgcaggcccctccggacgtcaccacggtggccgtgg

SEQ ID NO: 463608 - DNA, 120 bp, Artificial Sequence
  ENSG00000157873_9 (sequence is synthesized)
aggagacaataccctcattcacggggaggagcccaaaccactgacccacagactctgcaccccgacgccagagatacctggagcgacggctgctgaaagaggctgtccacctggcggaac

SEQ ID NO: 463609 - DNA, 120 bp, Artificial Sequence
  ENSG00000157873_10 (sequence is synthesized)
caccggagcccggaggcttgggggctccgccctgggctggcttccgtctcctccagtggagggagaggtggggcccctgctggggtagagctggggacgccacgtgccattcccatgggc

SEQ ID NO: 463610 - DNA, 120 bp, Artificial Sequence
  ENSG00000157873_11 (sequence is synthesized)
cagtgagggcctggggcctctgttctgctgtggcctgagctccccagagtcctgaggaggagcgccagttgcccctcgctcacagaccacacacccagccctcctgggccagcccagagg

SEQ ID NO: 463611 - DNA, 120 bp, Artificial Sequence
  ENSG00000157873_12 (sequence is synthesized)
gcccttcagaccccagctgtctgcgcgtctgactcttgtggcctcagcaggacaggccccgggcactgcctcacagccaaggctggactgggttggctgcagtgtggtgtttagtggata

SEQ ID NO: 463612 - DNA, 120 bp, Artificial Sequence
  ENSG00000157873_13 (sequence is synthesized)
ccacatcggaagtgattttctaaattggatttgaattcggctcctgttttctatttgtcatgaaacagtgtatttggggagatgctgtgggaggatgtaaatatcttgtttctcctcaaa

SEQ ID NO: 463613 - DNA, 120 bp, Artificial Sequence
  ENSG00000157873_14 (sequence is synthesized)
gaaggccccggctgccccaggccaggtcccaaccccatctccatggatgcaccctgcaggggacgccttgaggtcagcctccggcccccgtccacctctgtctcacctctcactttgtca

SEQ ID NO: 463614 - DNA, 120 bp, Artificial Sequence
  ENSG00000157873_15 (sequence is synthesized)
ccgccaggtgggccatcctgagcttggcgactgacccttatccctcgtccttggctcctctggtgcccggggtgggtgcccagacctctcctgtgcccacgtccctagctgcaaagtgga

SEQ ID NO: 463615 - DNA, 120 bp, Artificial Sequence
  ENSG00000157873_16 (sequence is synthesized)
atgggatggtgctgggactctccggccggcactcgggcctgctgcttccccacagggcttcttgtccctttctcctccagatattggttccccctgtgacctcaggggaagaggtcacct

SEQ ID NO: 463616 - DNA, 120 bp, Artificial Sequence
  ENSG00000157873_17 (sequence is synthesized)
ggaggctggtgcccacctgagtccaggcagacagaaaggggaaccagacccagaggtggcctttgagtcactgagcgcagagcctgtccatgcggccaacggctctgtccccttggagcc

SEQ ID NO: 463617 - DNA, 120 bp, Artificial Sequence
  ENSG00000157873_18 (sequence is synthesized)
tcatgccaggctcagcatggccagtgctccctgcggccaggcaggactgcacctgcgggacagggctgacggcacacctgggggcagggcctgagcctacagggaggcacagggcaggtg

SEQ ID NO: 463618 - DNA, 120 bp, Artificial Sequence
  ENSG00000157873_19 (sequence is synthesized)
ggctagccatgaacagaagaggaagctggagtgctttgggggttcatgcatgtaggctgggatttggggctcacacctcaacctgcatgcccagttccatgcccctcccctcttgtgaaa

SEQ ID NO: 463619 - DNA, 120 bp, Artificial Sequence
  ENSG00000157873_20 (sequence is synthesized)
gcacctgtctacttgggctgaggatgtgggggcacaggtggcaggtgaggctgccctcaggaggggcccaggcccagcttgtaccccacctccaccagtacctgaagaagtggggctctc

SEQ ID NO: 463620 - DNA, 120 bp, Artificial Sequence
  ENSG00000157873_21 (sequence is synthesized)
accctacctgcctctgccattggaatggcctggtttgcacagatgggaaacccgtttgcggggtgggtgtctgggtgggcacgtggggcgaggacctgcctgcgggaccctgccctggaa

SEQ ID NO: 463621 - DNA, 120 bp, Artificial Sequence
  ENSG00000157873_22 (sequence is synthesized)
caagccctcgtcccacacgcagctctgccgtcccttggtgtccctcccggcctcaggtcctccatgctgggtacctctgggcacctcgtttggctgagccaggggttcagcctggcaggg

SEQ ID NO: 463622 - DNA, 120 bp, Artificial Sequence
  ENSG00000157873_23 (sequence is synthesized)
tcccaccctgagcggcaccctggtcacatgcctgcgtccaggagagctgcagggctgaagcctgtgtgccccagataaccccttccatgggcccagacaaagcctcatcagatctgagct

SEQ ID NO: 463623 - DNA, 120 bp, Artificial Sequence
  ENSG00000157873_24 (sequence is synthesized)
tcctggaggctcaggatgggccttcccagaagcaggcccagagggaggctgcctccagatcccctgtcccctggggctgtgggtgtccctgaatgtcagggccatgggagggcccctggg

SEQ ID NO: 463624 - DNA, 120 bp, Artificial Sequence
  ENSG00000157873_25 (sequence is synthesized)
cttcaggggttggggaaagtgaacactctgctctttgtccaccttcgggaggacaccttcaaatgctgaccctgggcccctaactgacctgagacttcagagcttcttgggaggagctgg

SEQ ID NO: 463625 - DNA, 120 bp, Artificial Sequence
  ENSG00000157873_26 (sequence is synthesized)
ggtcccccagcggagcctgggatggagcagggatggctgccccagggagggggcggtggggccttccatcctgctctgccctcctcgtcctctggccccagctcagtcctgtccatctcc

SEQ ID NO: 463626 - DNA, 120 bp, Artificial Sequence
  ENSG00000157873_27 (sequence is synthesized)
agctctaaccatttttgtcccgacactggctctccctctaccttctgtccttgtctgccactggtctcccgtgctctggggtctctgcactgctggctgcctcccgcttctctcccctct

SEQ ID NO: 463627 - DNA, 120 bp, Artificial Sequence
  ENSG00000157873_28 (sequence is synthesized)
ccctctgccgtcctgtctcctttgcccagtctctccttgtttctcttctcctccttccttctctccacctccccatagccgagcttggaaaagtcagacagacctctgaggtctcatcct

SEQ ID NO: 463628 - DNA, 120 bp, Artificial Sequence
  ENSG00000157873_29 (sequence is synthesized)
ctggtgcctgccttggggctccgggactgtgggctgtctccatccggaggtctccctaccaccaggctctgtggggcagggaagcccagtggggtgcagggagccaggaagctggggtgg

SEQ ID NO: 463629 - DNA, 120 bp, Artificial Sequence
  ENSG00000157873_30 (sequence is synthesized)
ggtcagggcagggtccacagggagaccgggcgaggctggcagccttcccagtccgcgcagcgtctctgcagggggagcaagagctgcccttccacccctcccaggggacgggtaggggca

SEQ ID NO: 463630 - DNA, 120 bp, Artificial Sequence
  ENSG00000157873_31 (sequence is synthesized)
ctctgggcttttcccaccccctcacgcagggacacaggcctggtgggtctatgactgaaattggccagaccgcattctggtggttttattcggaagggaagtttaccctgttcagcagaa

SEQ ID NO: 463631 - DNA, 120 bp, Artificial Sequence
  ENSG00000157873_32 (sequence is synthesized)
tgggaccctggaggaatgtcagcaccagaccaattggcctaatcatatgtgtgaaaagaagaaagccaaggggtgatgtagtcaaggtgatcgtctccgtccaggccaagtgtggagaaa

SEQ ID NO: 463632 - DNA, 120 bp, Artificial Sequence
  ENSG00000157873_33 (sequence is synthesized)
ggtcaccagccacctgctgcatccgcgggagtggggccgaggacatgggagtggcaggtgcagcccccggtactcactcagccccagggagtgtccctggctcccagggctctgggaggt

SEQ ID NO: 463633 - DNA, 120 bp, Artificial Sequence
  ENSG00000157873_34 (sequence is synthesized)
gagggcaggtcccgggggaggctgggttagtggcagctccgggatgagacctcagaggtctgtctgacttgtccaagcccggctatggggaggtggggggaaggaaggaagaggagagaa

SEQ ID NO: 463634 - DNA, 120 bp, Artificial Sequence
  ENSG00000157873_35 (sequence is synthesized)
gccccatcagggctcatgtccccagccgtcacctcttggagctctgtcaccccaagcctgggaggtggccccagagcttttccaggatccgcggctcctcccagggcagccactgcaggc

SEQ ID NO: 463635 - DNA, 120 bp, Artificial Sequence
  ENSG00000157873_36 (sequence is synthesized)
tggggcaggtgggctttctgctgtggccagagcccaggtgtcagctggcctccctgggggaagggaaggtgggacccctgaccgtggagccctcagccacccctgcccacgcactctatg

SEQ ID NO: 463636 - DNA, 120 bp, Artificial Sequence
  ENSG00000157873_37 (sequence is synthesized)
accctgtgctcctgcctgccccctgtgggatgtggggagcaggacaggccctgctcagctgggagaagctctgggctgagggtcaacagccgccctgctggggacaaggctttgtcctca

SEQ ID NO: 463637 - DNA, 120 bp, Artificial Sequence
  ENSG00000157873_38 (sequence is synthesized)
ttgaggagagtaaggccattcattcattcattcattcatccacctatccgccctggtctgggcacctgtgctgtgcctggcctcctgtgcctggcctcctgggcactgaccccgctgtgt

SEQ ID NO: 463638 - DNA, 120 bp, Artificial Sequence
  ENSG00000157873_39 (sequence is synthesized)
ggacccggctgtggccctgggagccctgtgcacagcccccggggacgcagcttctaagcattgaggtctgaagggaaagtcagccccatcctccagccaggcggcagcaaagccacctga

SEQ ID NO: 463639 - DNA, 120 bp, Artificial Sequence
  ENSG00000157873_40 (sequence is synthesized)
tcctcacccggggcctccaatgcggggaggtctcggggcctcaggctctagggtaggccgggcagcagcttagtctcacccaactgggcacctgctggtatggtgggcagggcctctcca

SEQ ID NO: 463640 - DNA, 120 bp, Artificial Sequence
  ENSG00000157873_41 (sequence is synthesized)
ctgtgaagcgcttgttcccctcccatagatgacggttgaattagggttagttatgcacttgggggcctcagctggggaggtgggccgggcgcccccagtcctatcacccatgctgggcct

SEQ ID NO: 463641 - DNA, 120 bp, Artificial Sequence
  ENSG00000157873_42 (sequence is synthesized)
cctggggacaggctgggctagcagtcccaacacagttggcctcctctgctctcagagagggtcagtcccttggggacggtctcccagggagaagcaggagttgtgcctccgccaccgctg

SEQ ID NO: 463642 - DNA, 120 bp, Artificial Sequence
  ENSG00000157873_43 (sequence is synthesized)
tgagaccattgccatgagcctgtgtcccctgatcagacactgcccctccctgacctgtgtgtctgtgtattgcaggtgatgtagtcaaggtgatcgtctccgtccaggtattgatcctcc

SEQ ID NO: 463643 - DNA, 120 bp, Artificial Sequence
  ENSG00000157873_44 (sequence is synthesized)
tccccctctccctcccccctccaccttcccacctcccctctccccgctggggctggtgtttctggtgtacatggtgggggctcccagttctctgagggtcctgagtctttcaagtacagc

SEQ ID NO: 463644 - DNA, 120 bp, Artificial Sequence
  ENSG00000157873_45 (sequence is synthesized)
cacggtagctcaggaaagaacccaccccctcaaactgaaagcagtaaaatgaacccgagaacctggagtcccaggggggcctgagcaggcagggtctccacgattcgtgtgctcacagcg

SEQ ID NO: 463645 - DNA, 120 bp, Artificial Sequence
  ENSG00000157881_0 (sequence is synthesized)
actttcaaaatggcggagtgtggagcgagcggcagcgggagcagcggggacagtctggacaagagcatcacgctgccccccgacgagatcttccgcaacctggagaacgccaagcgcttc

SEQ ID NO: 463646 - DNA, 120 bp, Artificial Sequence
  ENSG00000157881_1 (sequence is synthesized)
gccatcgacataggcgggtcgttaaccaagctggcctactattcaacggtacagcacaaagtcgccaaggtgcggtctttcgaccactccggaaaggacacagaacgtgaacatgagccg

SEQ ID NO: 463647 - DNA, 120 bp, Artificial Sequence
  ENSG00000157881_2 (sequence is synthesized)
ccctatgagatttcagttcaagaagagatcactgctcgactgcacttcattaagtttgagaatacctacatcgaagcctgcctggacttcatcaaagaccatctcgtcaacacagagacc

SEQ ID NO: 463648 - DNA, 120 bp, Artificial Sequence
  ENSG00000157881_3 (sequence is synthesized)
aaggtcatccaggcgaccgggggcggggcctacaagttcaaagacctcatcgaagagaagctgcggctgaaagtcgacaaggaggacgtgatgacgtgcctgattaaggggtgcaacttc

SEQ ID NO: 463649 - DNA, 120 bp, Artificial Sequence
  ENSG00000157881_4 (sequence is synthesized)
gtgctcaagaacatcccccatgaggccttcgtgtaccagaaggattccgaccctgagttccggttccagaccaaccacccccacattttcccctatcttcttgtcaatatcggctctgga

SEQ ID NO: 463650 - DNA, 120 bp, Artificial Sequence
  ENSG00000157881_5 (sequence is synthesized)
gtctccatcgtgaaggtggagacggaggacaggttcgagtgggtcggcggcagctccattggaggcggcaccttctgggggcttggcgctctgctcaccaaaacgaagaagtttgacgag

SEQ ID NO: 463651 - DNA, 120 bp, Artificial Sequence
  ENSG00000157881_6 (sequence is synthesized)
ctcctgcacctggcctcgaggggccagcacagcaatgtggacatgctggtgcgggacgtctacggcggcgcccaccagactctcgggctgagcgggaacctcatcgccagcagcttcggg

SEQ ID NO: 463652 - DNA, 120 bp, Artificial Sequence
  ENSG00000157881_7 (sequence is synthesized)
aagtcggccaccgccgaccaagagttctccaaagaagacatggcgaagagcctgctgcacatgatcagcaacgacattgggcagctggcctgcctccacgcacggctgcacagcctggac

SEQ ID NO: 463653 - DNA, 120 bp, Artificial Sequence
  ENSG00000157881_8 (sequence is synthesized)
cgcgtgtactttggaggcttctttatccggggccaccccgtgaccatgcgcaccatcacctatagcatcaacttcttctccaagggggaagtgcaggcgctgtttctgaggcacgaaggc

SEQ ID NO: 463654 - DNA, 120 bp, Artificial Sequence
  ENSG00000157881_9 (sequence is synthesized)
tacctgggagccatcggagcgttcctgaaaggagctgagcaggacaatcctaaccagtacagctggggagagaactatgcaggcagctccgggctgatgagtgcatcacccgagctcggc

SEQ ID NO: 463655 - DNA, 120 bp, Artificial Sequence
  ENSG00000157881_10 (sequence is synthesized)
ccggcgcagcgggcgcggagtggcacttttgacttgctggaaatggaccggctggagaggccactggttgacctgccgctcctcctggacccgccctcctacgtgcccgacacggtggac

SEQ ID NO: 463656 - DNA, 120 bp, Artificial Sequence
  ENSG00000157881_11 (sequence is synthesized)
tcaccgatgacgctctggcccgaaaatactggctcacctgctttgaggaggccctggacggggtagtgaagcgcgcagtggcgagccagccagactctgtggatgcagccgagagggcgg

SEQ ID NO: 463657 - DNA, 120 bp, Artificial Sequence
  ENSG00000157881_12 (sequence is synthesized)
agaagttccggcagaagtactggaacaagcttcagaccctgaggcagcagcccttcgcctatgggaccctgaccgtgcgcagcctgctggacaccagggagcactgtctgaacgagttca

SEQ ID NO: 463658 - DNA, 120 bp, Artificial Sequence
  ENSG00000157881_13 (sequence is synthesized)
acttcccggatccctactccaaagtgaagcagcgggagaatggcgtggcgctgaggtgcttccccggggtcgtgcgctccctggacgcgctgggctgggaggaacggcagctggcgctgg

SEQ ID NO: 463659 - DNA, 120 bp, Artificial Sequence
  ENSG00000157881_14 (sequence is synthesized)
tgaaaggcctcctggcggggaatgtcttcgactggggggccaaagccgtgtctgctgtccttgaatccgacccctactttgggtttgaagaagcaaagaggaagttacaagaaagaccct

SEQ ID NO: 463660 - DNA, 120 bp, Artificial Sequence
  ENSG00000157881_15 (sequence is synthesized)
ggctcgtggattcctacagcgagtggcttcagagattaaaggggccccctcataaatgtgccttaattttcgcagataacagtggaatagacatcattttgggagtcttcccctttgtca

SEQ ID NO: 463661 - DNA, 120 bp, Artificial Sequence
  ENSG00000157881_16 (sequence is synthesized)
gggagctactccttagagggacagaggtcatcctggcgtgcaactcaggccccgccctgaacgacgtgacccacagcgagtccctcatcgtggcagagcgtattgcgggcatggaccctg

SEQ ID NO: 463662 - DNA, 120 bp, Artificial Sequence
  ENSG00000157881_17 (sequence is synthesized)
tcgtgcactctgcgctccaggaagagaggctgctgctggtgcagacgggctccagctccccgtgcctcgacctcagccgcctggataaggggctggccgcactggtgcgggagcgtggcg

SEQ ID NO: 463663 - DNA, 120 bp, Artificial Sequence
  ENSG00000157881_18 (sequence is synthesized)
cggatctggtggtcatcgagggcatgggccgtgctgtccacacaaactaccacgcagccctgcgctgcgagagcctcaagctggccgtcatcaagaacgcgtggctggccgagcggctgg

SEQ ID NO: 463664 - DNA, 120 bp, Artificial Sequence
  ENSG00000157881_19 (sequence is synthesized)
gcggccggctcttcagcgtcatcttcaagtacgaggtcccagccgagtgaggcgctgcagctgccggactcttctgcttgtcacttgtcaggaatgtgtttttaccaccacagggaaact

SEQ ID NO: 463665 - DNA, 120 bp, Artificial Sequence
  ENSG00000157881_20 (sequence is synthesized)
gcgttcaaatcaacgtatttatatggtactgctgtgacgcggcacatacaccccagccgcacagatgcgtgtgacccagaggcgagacgcagctttgtcctgggagacgttcatattgga

SEQ ID NO: 463666 - DNA, 120 bp, Artificial Sequence
  ENSG00000157881_21 (sequence is synthesized)
atctatttaactgctaaagaaccttttatatatatatatatataaatagagagatctatacaggtatgtctgacgggacgcagcaccgtgggcacgcaccaaatagagtttttaaaagag

SEQ ID NO: 463667 - DNA, 120 bp, Artificial Sequence
  ENSG00000157881_22 (sequence is synthesized)
gccatcgacatagggtttttaagttccagtagccccaaacccctcatctacagagactttagtctccaggacacccagagagtgtggggcatggacccccaggccccgctgtgtcctggt

SEQ ID NO: 463668 - DNA, 120 bp, Artificial Sequence
  ENSG00000157881_23 (sequence is synthesized)
agcctgcactgtggccacccggggcagggcagccgcttctctgtcgtcttggacctggcacttgtctcgcagtcatccctctgctgctgcagacctcgactttagtgtcctgggagtttc

SEQ ID NO: 463669 - DNA, 120 bp, Artificial Sequence
  ENSG00000157881_24 (sequence is synthesized)
ggagaggcttccgctcctgctgggtggccctgaggtcgccacggtcctaggctcctccctcttgcccaggattctgcctcagagcgccgcctggttgaaggctggcgcgaacagccagct

SEQ ID NO: 463670 - DNA, 120 bp, Artificial Sequence
  ENSG00000157881_25 (sequence is synthesized)
acgttgcttctaagggcagctgatagttctgctagctagcacattccttcaaaaagcaatttaggagacgtctctgctcttttgaggtagtgaagcgcgcagtggcgagccagccagact

SEQ ID NO: 463671 - DNA, 120 bp, Artificial Sequence
  ENSG00000157881_26 (sequence is synthesized)
ctcagggctttggggcccagggagtgcacatggcagcagcgccaggggctgggcagggcgcagcgcccttgtctgtcccctcaggttctgaggaggccccttccttaagcatgggtgccg

SEQ ID NO: 463672 - DNA, 120 bp, Artificial Sequence
  ENSG00000157881_27 (sequence is synthesized)
cagaggcctaagggtgtggatttgaaaatcggggctggcattttctattgtcagaatccaaattcatgtttcctatgtgtggtaggaattaaacatttctgatgtgatgatcaaagggtg

SEQ ID NO: 463673 - DNA, 120 bp, Artificial Sequence
  ENSG00000157881_28 (sequence is synthesized)
ctttgcaaagcagtcccctagactggcctgtaggacacgcaggtgtctagcacctggcgccgtctcctggggctctgaatcttgaaaatgaacccccccaccatcatttaccttcactcc

SEQ ID NO: 463674 - DNA, 120 bp, Artificial Sequence
  ENSG00000157881_29 (sequence is synthesized)
cccttcccctgggcttctctgctctcggtggggttggcgccgctgtgggcctctggcggtggtcggggctcctccggacgcagcaggtaggtgcaggcagcagcacgggggaggcggccc

SEQ ID NO: 463675 - DNA, 120 bp, Artificial Sequence
  ENSG00000157881_30 (sequence is synthesized)
agagccgtcatctgctggggtggaggctccgagccccctgggctcaggctgagggtccatgtgctgaagcccagggttgacgccaggctcctggaagggtgctcacagcaaggaggcttt

SEQ ID NO: 463676 - DNA, 120 bp, Artificial Sequence
  ENSG00000157881_31 (sequence is synthesized)
ggggctgtgacttcacagacaggcaggtcccaggggcaggctctaaactcagctctgcccctcggctcagctccctcccaggggccacagagtggcaaggtcaggcgaggtccctgctcc

SEQ ID NO: 463677 - DNA, 120 bp, Artificial Sequence
  ENSG00000157881_32 (sequence is synthesized)
gccgtcctgggtggctgggggccggggtccagcgttacccgccgcgaggtgggagggtcggcggaattttatgtcttcggccacatcggcatctgggcgccccggctccgccgcttggct

SEQ ID NO: 463678 - DNA, 120 bp, Artificial Sequence
  ENSG00000157881_33 (sequence is synthesized)
ggtggctggcctgagatttggggtccttagttctggtcgagacgaggacgagctcggcgggaagcccttggcagagtggccccgaaaaggccgcgcgttcccgcggcgtggccagctgtg

SEQ ID NO: 463679 - DNA, 120 bp, Artificial Sequence
  ENSG00000157881_34 (sequence is synthesized)
gcccgcgggccggacagtccgtgcacaggccccgctctctggagagtggacgccgggcgtgagttcaggcggccgtggacgtgggacctgggaactcgtgcctctggtttaaaagccacc

SEQ ID NO: 463680 - DNA, 120 bp, Artificial Sequence
  ENSG00000157881_35 (sequence is synthesized)
cttccgtggcctttaaggcggcctgcacttctgccctggcctctccagggtccgctgcagaccctcctgcctgatggctgtgctctcagtaatgacggcgggccaggctctgttctagac

SEQ ID NO: 463681 - DNA, 120 bp, Artificial Sequence
  ENSG00000157881_36 (sequence is synthesized)
gacgcaaccccagtgtcaaaccagggggtaagtcaaggtatccggctcaggccgccgggcagctgagggggcccagtgggggtctcgtctgtggcccagagacgtggcggaagaaggcag

SEQ ID NO: 463682 - DNA, 120 bp, Artificial Sequence
  ENSG00000157881_37 (sequence is synthesized)
ggagcgagcggcagcgggagcagcggggacagtctggacaagagcatcacgctgccccccgacgagatcttccgcaacctggagaacgccaagcgcttcgccatcgacataggacacaga

SEQ ID NO: 463683 - DNA, 120 bp, Artificial Sequence
  ENSG00000157884_0 (sequence is synthesized)
gagtccttgaggctgaggttctactgctggcagacagaaaggtgtggttggcatggggcaatgcttgaggtatcagatgcactgggaggacctggaagagtaccaggccctgaccttcct

SEQ ID NO: 463684 - DNA, 120 bp, Artificial Sequence
  ENSG00000157884_1 (sequence is synthesized)
gaccagaaatgaaattctgtgcatccatgacaccttcctgaagctctgccctcctgggaagtactacaaggaggcaacgctcaccatggaccaggtcagctccctgccagctctgcgggt

SEQ ID NO: 463685 - DNA, 120 bp, Artificial Sequence
  ENSG00000157884_2 (sequence is synthesized)
caaccctttcagagaccgtatctgcagagtgttctcccacaaaggcatgttctcctttgaggatgtgctgggcatggcatctgtgttcagcgagcaggcctgcccaagcctgaagattga

SEQ ID NO: 463686 - DNA, 120 bp, Artificial Sequence
  ENSG00000157884_3 (sequence is synthesized)
ggaggatctgcagaggatcatcctgcgactgctgaacagtgatgacatgtctgaggacctcctgatggacctcacgaaccacgtcctgagtgagtcggatctggacaatgacaacatgct

SEQ ID NO: 463687 - DNA, 120 bp, Artificial Sequence
  ENSG00000157884_4 (sequence is synthesized)
gtccttctcagagtttgaacatgcaatggccaagtctccagatttcatgaactcctttcggattcacttctggggatgctgatgtagcggcaaacacctgacatggcagcctcgagggag

SEQ ID NO: 463688 - DNA, 120 bp, Artificial Sequence
  ENSG00000157884_5 (sequence is synthesized)
accacaggaatcgaaccccctccagcactggagggagctggtttgaagtatgactttgtactgggcccacactcacctctagaatattgtttattagataaaagaaaaagcttttcctta

SEQ ID NO: 463689 - DNA, 120 bp, Artificial Sequence
  ENSG00000157884_6 (sequence is synthesized)
cctgcccaaggtgtagggaggtatggtcaggatggcccctaaggtttcagctccatctcggtttctatgtatctcccaaagttttccgagcctttctgagtcctgcttagaactagttcc

SEQ ID NO: 463690 - DNA, 120 bp, Artificial Sequence
  ENSG00000157890_0 (sequence is synthesized)
gctgctcgcggccccctgctcctgcctggcgctctggccaggctcgggctccggaggacaggaccgcgcgactggccggccgatccctgggccggccgcgggagcagcctcctttgttct

SEQ ID NO: 463691 - DNA, 120 bp, Artificial Sequence
  ENSG00000157890_1 (sequence is synthesized)
ccctgggccggccgcgggagcagcctcctttgttctcctgtgcagggcccgggatggtgctctccctgacggggctcattgccttctccttcctgcaagccacccttgccctgaaccccg

SEQ ID NO: 463692 - DNA, 120 bp, Artificial Sequence
  ENSG00000157890_2 (sequence is synthesized)
aggaccccaacgtgtgcagccactgggagagctatgctgtgactgtccaggaatcgtatgcacaccccttcgatcagatctattacacacgatgcacagacatcctcaactggttcaagt

SEQ ID NO: 463693 - DNA, 120 bp, Artificial Sequence
  ENSG00000157890_3 (sequence is synthesized)
gcaccaggcaccggatcagttataagacggcgtatcggagaggcctccggaccatgtaccggcggaggtcccagtgctgccctggctactatgagagcggagacttctgcatacccctgt

SEQ ID NO: 463694 - DNA, 120 bp, Artificial Sequence
  ENSG00000157890_4 (sequence is synthesized)
gtacggaggagtgtgtgcacggccgctgcgtttccccggacacctgccactgcgagcctggctggggagggcccgactgctccagcggctgcgacagcgaccactgggggccccactgca

SEQ ID NO: 463695 - DNA, 120 bp, Artificial Sequence
  ENSG00000157890_5 (sequence is synthesized)
gcaaccggtgccagtgccagaacggcgccctgtgtaaccccatcacaggcgcctgcgtgtgcgccgccggcttccgtggatggcgctgcgaggagctctgcgcacctggcacccacggca

SEQ ID NO: 463696 - DNA, 120 bp, Artificial Sequence
  ENSG00000157890_6 (sequence is synthesized)
agggatgccagctgccgtgccagtgccgacacggtgccagctgcgacccccgcgccggcgagtgcctctgcgcacctggctacaccggcgtctactgcgaggagctgtgccctcctggga

SEQ ID NO: 463697 - DNA, 120 bp, Artificial Sequence
  ENSG00000157890_7 (sequence is synthesized)
gccatggagctcactgtgagctgcgctgcccctgtcagaatgggggcacctgccaccacatcactggcgagtgtgcctgccccccaggctggacgggagcagtgtgtgcccagccctgcc

SEQ ID NO: 463698 - DNA, 120 bp, Artificial Sequence
  ENSG00000157890_8 (sequence is synthesized)
caccagggacatttggccagaactgcagccaggattgtccttgccaccatggagggcagtgtgaccacgtgactggacagtgccactgtacagctggatacatgggggacaggtgccaag

SEQ ID NO: 463699 - DNA, 120 bp, Artificial Sequence
  ENSG00000157890_9 (sequence is synthesized)
aggagtgccccttcgggtccttcggcttccagtgctcacagcactgtgactgccacaatggggggcagtgttcacccaccacgggtgcctgcgagtgtgagcctggctacaagggcccac

SEQ ID NO: 463700 - DNA, 120 bp, Artificial Sequence
  ENSG00000157890_10 (sequence is synthesized)
gctgccaggagcgactgtgcccggagggcctgcatggcccaggctgcaccctgccctgcccctgtgacgctgacaacaccatcagctgccacccagtaactggagcttgtacctgccagc

SEQ ID NO: 463701 - DNA, 120 bp, Artificial Sequence
  ENSG00000157890_11 (sequence is synthesized)
caggctggtctggtcaccactgcaatgaatcctgccctgttggctactatggcgatggctgccagctgccttgcacctgtcagaatggcgccgactgccacagcatcactgggggctgca

SEQ ID NO: 463702 - DNA, 120 bp, Artificial Sequence
  ENSG00000157890_12 (sequence is synthesized)
cttgtgctccgggcttcatgggagaggtctgtgccgtttcctgtgcagcagggacctatggccccaactgctcgtccatctgtagctgtaacaatggtggcacctgctccccagtagatg

SEQ ID NO: 463703 - DNA, 120 bp, Artificial Sequence
  ENSG00000157890_13 (sequence is synthesized)
gctcctgtacctgcaaggaagggtggcagggcctggactgcaccctgccatgtcccagtgggacgtggggcctgaactgcaacgagagctgcacctgtgccaatggggcagcctgcagcc

SEQ ID NO: 463704 - DNA, 120 bp, Artificial Sequence
  ENSG00000157890_14 (sequence is synthesized)
ccatagacggctcctgctcctgcactcctggctggctgggagacacctgtgagctgccttgcccggatggcacatttgggctgaactgcagtgaacactgtgactgcagccatgctgatg

SEQ ID NO: 463705 - DNA, 120 bp, Artificial Sequence
  ENSG00000157890_15 (sequence is synthesized)
gatgtgaccccgtcacaggccactgctgctgcctggccggatggacaggcatccgctgtgacagcacgtgtccacctggccgctggggccccaactgctctgtctcctgcagctgtgaga

SEQ ID NO: 463706 - DNA, 120 bp, Artificial Sequence
  ENSG00000157890_16 (sequence is synthesized)
atggaggctcctgctccccagaggatgggagctgcgagtgtgcccctggcttccgaggacccttatgccagagaatctgcccccctgggttctatggccacggctgcgcccagccatgcc

SEQ ID NO: 463707 - DNA, 120 bp, Artificial Sequence
  ENSG00000157890_17 (sequence is synthesized)
ccctctgcgtgcacagcagcaggccctgccaccacatcagcggcatctgtgagtgcctcccaggattctctggagctctctgcaaccaagtgtgtgctggaggatactttgggcaggact

SEQ ID NO: 463708 - DNA, 120 bp, Artificial Sequence
  ENSG00000157890_18 (sequence is synthesized)
gtgcccagctctgctcctgtgccaacaacgggacctgcagccctatcgatggctcctgccagtgctttcctggatggattggcaaggactgctcacaggcttgcccacccgggttctggg

SEQ ID NO: 463709 - DNA, 120 bp, Artificial Sequence
  ENSG00000157890_19 (sequence is synthesized)
gccccgcctgcttccacgcatgcagctgccacaacggggcgagctgcagcgccgaggacggggcctgccactgcacccctggctggactggactcttctgcacacagcgctgcccagcag

SEQ ID NO: 463710 - DNA, 120 bp, Artificial Sequence
  ENSG00000157890_20 (sequence is synthesized)
cattttttgggaaggactgtgggcgcgtatgccagtgtcagaatggcgccagctgtgaccacatcagtggcaagtgcacctgccgcacaggcttcaccgggcaacactgtgagcagagat

SEQ ID NO: 463711 - DNA, 120 bp, Artificial Sequence
  ENSG00000157890_21 (sequence is synthesized)
gtgccccaggaacctttggctatgggtgtcagcagctatgtgagtgcatgaacaactccacctgtgaccatgtcaccggcacctgttactgcagccctggcttcaaaggaatcaggtgtg

SEQ ID NO: 463712 - DNA, 120 bp, Artificial Sequence
  ENSG00000157890_22 (sequence is synthesized)
accaagctgccctcatgatggaggagctgaatccctacaccaagatcagcccagcactgggtgcagagcggcactcggtgggtgctgtcacaggcatcatgctcctgttattcctcattg

SEQ ID NO: 463713 - DNA, 120 bp, Artificial Sequence
  ENSG00000157890_23 (sequence is synthesized)
tggtgctgctgggcctatttgcctggcatcggcggcggcagaaagagaagggccgagacctggctccccgtgtctcctacacacctgccatgaggatgaccagcaccgactactccctct

SEQ ID NO: 463714 - DNA, 120 bp, Artificial Sequence
  ENSG00000157890_24 (sequence is synthesized)
caggtgcttgtggaatggatagacgtcagaacacatacattatggacaaaggcttcaaagattacatgaaagaatccgtgtgcagttctagtacttgttccttgaatagcagtgaaaacc

SEQ ID NO: 463715 - DNA, 120 bp, Artificial Sequence
  ENSG00000157890_25 (sequence is synthesized)
tccagaaagcagctatgtagaaatgaagtcgcctgtgcacatggggtctccgtacacagatgtgccatccttgtcgacatctaataaaaatatatatgaagttgagcccacagtcagtgt

SEQ ID NO: 463716 - DNA, 120 bp, Artificial Sequence
  ENSG00000157890_26 (sequence is synthesized)
ggtccaagaaggttgcggtcataactccagctatatccagaatgcatacgacctacctaggaacagccatattcctggtcattatgacctcctcccagtaagacagagccctgccaatgg

SEQ ID NO: 463717 - DNA, 120 bp, Artificial Sequence
  ENSG00000157890_27 (sequence is synthesized)
gccgtcccaggacaagcaatcttaagagggataagcttctctcttgcagtgtgctctactgaatattctgactctgaaagaagacagtcccttgacttgaagtaatggtacagactggct

SEQ ID NO: 463718 - DNA, 120 bp, Artificial Sequence
  ENSG00000157890_28 (sequence is synthesized)
ccagctgcatgttagttattacgttcacctggaactaaagaagagcgtccaggtgggactgggataattgttcaaggaattgtgttctcaaaggcaaatcctatcacccactcagcccca

SEQ ID NO: 463719 - DNA, 120 bp, Artificial Sequence
  ENSG00000157890_29 (sequence is synthesized)
aatgccctggattatatgatttttaaaacattttaagatacagctactcatcaacatcagctaaatatagctgatatatatatatatatttatctgaaacgtgatattttaaaaacatgt

SEQ ID NO: 463720 - DNA, 120 bp, Artificial Sequence
  ENSG00000157890_30 (sequence is synthesized)
aggtttaacaaaccttcctaggacaaaaaggagactggggagggaagaggattactttaaagcacctgaaacgtatatgtacttttggttgctgttaccatcaacatctgttttattacc

SEQ ID NO: 463721 - DNA, 120 bp, Artificial Sequence
  ENSG00000157890_31 (sequence is synthesized)
gaagacaattagtacacagacatgaactgttcttaaacagaacagtcttaaaatgtctgtacatatctgtctggtccatcaaattacaacagccaagattacagaatctatatagtctaa

SEQ ID NO: 463722 - DNA, 120 bp, Artificial Sequence
  ENSG00000157890_32 (sequence is synthesized)
tgctgacaacttctattttaaaaaacaagactttactttcttctgccccctaagtgataggtttaaacacacagagacacacacacacgtttccaaagtgcagcagtgtctctttcagtc

SEQ ID NO: 463723 - DNA, 120 bp, Artificial Sequence
  ENSG00000157890_33 (sequence is synthesized)
tacaataagattcctagggcagctttatcaaattttgccaattcaaagttcaaggacattacaagttagtcctggctttgtcatatctacttagtccatccgacacctgaatcattccat

SEQ ID NO: 463724 - DNA, 120 bp, Artificial Sequence
  ENSG00000157890_34 (sequence is synthesized)
gtaaaacagagctctaagatgatcctttaagcaagcagtcatagactggtcgggattaagtaaaagacggctagttggcctcctcattttatttggtcagcatcccttgactcaagagta

SEQ ID NO: 463725 - DNA, 120 bp, Artificial Sequence
  ENSG00000157890_35 (sequence is synthesized)
cttgctttcaagttcttcataaatcttgagattgacgtagtatgaaacctaaaagtatacaggaaattggacaaatgtggatacagcaagtttacactgcttaaagtacattatgctttt

SEQ ID NO: 463726 - DNA, 120 bp, Artificial Sequence
  ENSG00000157890_36 (sequence is synthesized)
taatggaactaaatgatcaaaaaaagaatggactgtaaccagttgctgtaacgtgatgtaaaaacgttactgtaaacagcatgaggatatgaagtccttccaccttctatcttaaaacta

SEQ ID NO: 463727 - DNA, 120 bp, Artificial Sequence
  ENSG00000157890_37 (sequence is synthesized)
ctacttactgagctagcccaatatgcattacaatgagctaatgctccagatcccagtattcagatgtgtctataccttccactatgaacacagataaactgaggctcagataagtccaaa

SEQ ID NO: 463728 - DNA, 120 bp, Artificial Sequence
  ENSG00000157890_38 (sequence is synthesized)
tgaaatgaaatcaactcccaagccctaaagagaaccttctcacaagaattaaaaacaaaaagggcaaacctaggaagctaacggctactcctgtaccactctattcactggtacagtcca

SEQ ID NO: 463729 - DNA, 120 bp, Artificial Sequence
  ENSG00000157890_39 (sequence is synthesized)
gccagtaaaaaacacttccaaaaagatacacagaagaggaactaaatgactgcgaagctggaatactgctacaggaagtatgagagttctgaaacccttgatagaaactggaagcctgcc

SEQ ID NO: 463730 - DNA, 120 bp, Artificial Sequence
  ENSG00000157890_40 (sequence is synthesized)
atggaacacaatactttgggcaataatcagaaaaagcaaaaaaataaataaatgagtacatctccccttcccacatcactcaaggcataagcagattttactgttagaggaaaatatgta

SEQ ID NO: 463731 - DNA, 120 bp, Artificial Sequence
  ENSG00000157890_41 (sequence is synthesized)
atacttacatgaatgttgcatgtgtgcatgggagcaactgagtagcaatagtaaatttactttccaaaaaagccttattaaaatataaatattagaaaattactttggagacccaagtaa

SEQ ID NO: 463732 - DNA, 120 bp, Artificial Sequence
  ENSG00000157890_42 (sequence is synthesized)
atatttctcatacatatgtagaaagaaatataggtaagcagcttacctcagtatttcagggcagcaagtgtttgtgaagcaaggatgagcagcatgaagatgtcagatcagcaaggagaa

SEQ ID NO: 463733 - DNA, 120 bp, Artificial Sequence
  ENSG00000157890_43 (sequence is synthesized)
acttcaactcaatcccaggttttctcttcttcccttatcctgcatgtacaataactgctgcctggcaaactgcaaacaagcagcatcactcaagtttgaagtttcgccgcttttgtcaac

SEQ ID NO: 463734 - DNA, 120 bp, Artificial Sequence
  ENSG00000157890_44 (sequence is synthesized)
tatcctctgggcaaaggtattcagcaagaggtggaatggctagacactgaatcaagagatttcagtgttactctggtcaagttagtcgccctctctgggctcccttttttcctatgcata

SEQ ID NO: 463735 - DNA, 120 bp, Artificial Sequence
  ENSG00000157890_45 (sequence is synthesized)
aaaaggggagaagcagagagtgggaagacagctctactaacccttcagctctagcagtccatgactttttaaggaaatgtaatacaagtcaaaccaggcaatacagaggagaagggaaag

SEQ ID NO: 463736 - DNA, 120 bp, Artificial Sequence
  ENSG00000157890_46 (sequence is synthesized)
gcagagggtgtgattatggtgacaatagctgccttcccctatcgaacagttatcagtaaaagacatttcaatcttacaaagcaactgttagaaacttctgtctaacaccatcacaaatag

SEQ ID NO: 463737 - DNA, 120 bp, Artificial Sequence
  ENSG00000157890_47 (sequence is synthesized)
gttcatggtcagcctaaacatgtatactgtgcattttatgggtgactttgaaagatctgttcaattatttttcagaaactaaattttcaaaaaattaatatgtgtacaattaaaatgaat

SEQ ID NO: 463738 - DNA, 120 bp, Artificial Sequence
  ENSG00000157890_48 (sequence is synthesized)
gaaagaaaaaccattattgtacagaggtattaatgagactatgaaacggcaatacttttttaaatcacagatttgtaatatatgttcactgtgcagagggattgtaccttgtacaaaata

SEQ ID NO: 463739 - DNA, 120 bp, Artificial Sequence
  ENSG00000157890_49 (sequence is synthesized)
aaacaaatttctcaaactaatttaacaagaatgcctactgttgtgttgcaaatggaaaacgtgcttataatctacaccttaagtttaagggtagaactaacctacatcctgcttgggcac

SEQ ID NO: 463740 - DNA, 120 bp, Artificial Sequence
  ENSG00000157890_50 (sequence is synthesized)
tttgaacacctggaagaatgaaaattattctagtagatgtttgaaaataagtgaaaaacttgtatcaaatttttgatagacgagtctctttctttaaagtaataaatgtgagcaccatat

SEQ ID NO: 463741 - DNA, 120 bp, Artificial Sequence
  ENSG00000157890_51 (sequence is synthesized)
accaagctcagtaacaagtcccttgacagagacacagcaggctggaccccctacagctatgtgaacgtgttagactcccatttccagatcagtgccctggaggccaggtacccgcccgag

SEQ ID NO: 463742 - DNA, 120 bp, Artificial Sequence
  ENSG00000157890_52 (sequence is synthesized)
gaatgtggaagctcagtctcccctagagtgacagtggggatggggagcaggagcctacctagagaagatatctggggttccaagggaaaattgtttcctgagtccctagctctgagcagc

SEQ ID NO: 463743 - DNA, 120 bp, Artificial Sequence
  ENSG00000157890_53 (sequence is synthesized)
acattgaacttagacacctcagccgccccgctgagccacactcaccagataagccttggatccaggagaggacagacaggaccagagctgagaggtgcttgtggaatggatagacgtcag

SEQ ID NO: 463744 - DNA, 120 bp, Artificial Sequence
  ENSG00000157890_54 (sequence is synthesized)
tggacaaaggcttcaaaggcaggtggatgactcagctggagaacaaagtggcttcctgaggtggagtttccagcttgcccagcccttccccattctccagtcccagtagagatggggtac

SEQ ID NO: 463745 - DNA, 120 bp, Artificial Sequence
  ENSG00000157890_55 (sequence is synthesized)
agaagagtccataattcaacacccttttctcaccacccagccaacacatacatgcactgctccatcctctgctcctgtatggaagatacttccccctgagcttagcccctccccacagac

SEQ ID NO: 463746 - DNA, 120 bp, Artificial Sequence
  ENSG00000157890_56 (sequence is synthesized)
atcaacttctcttttatccatttaggatcatcccctgctccagagccaacaattgattccccaaaactttaaagtagccccgacttttctggtgaaaatgagaagaggcactatcaactg

SEQ ID NO: 463747 - DNA, 120 bp, Artificial Sequence
  ENSG00000157890_57 (sequence is synthesized)
tagtcacatagggactcaggaatcgggccaaagccagaaccagatctcctaacattagaggggttacacgcatctgaacccaggcccaggagacctgaagcgcaagaaggccagccccag

SEQ ID NO: 463748 - DNA, 120 bp, Artificial Sequence
  ENSG00000157890_58 (sequence is synthesized)
ttctctcaacggcctaggacccagctcagtaacaagtcccttgacagagacacagcaggctggaccccctacagctatgtgaacgtgttagatcagtgccctggaggccaggtacccgcc

SEQ ID NO: 463749 - DNA, 120 bp, Artificial Sequence
  ENSG00000157890_59 (sequence is synthesized)
gccgcgggagcagctatgctgtgactgtccaggaatcgtatgcacaccccttcgatcagatctattacacacgatgcacagacatcctcaactggttcaagtgcaccaggcaccgccctg

SEQ ID NO: 463750 - DNA, 120 bp, Artificial Sequence
  ENSG00000157890_60 (sequence is synthesized)
tatgaaaaagaagaggatgtcagagctttaggcttggaatcaataaaatatggtggtacaaactcattgctggggggactgagccgacctggcatgaaaggcagaaatgactggggcgaa

SEQ ID NO: 463751 - DNA, 120 bp, Artificial Sequence
  ENSG00000157890_61 (sequence is synthesized)
ctaaaccatggactacttcctggaggaggagagagaaaaggggaggaggctgtgagcagcgtggagcacaccaggcctgggccagatggccaggaggaccacatcctggaggatcttgaa

SEQ ID NO: 463752 - DNA, 120 bp, Artificial Sequence
  ENSG00000157890_62 (sequence is synthesized)
tccacaaaaaacttaagagcttagcctttttctctcagctgggcttagccccatagatgaaagacattccttgttaagggtaaggtgtagctgctgcagatacagtttgcctttagagat

SEQ ID NO: 463753 - DNA, 120 bp, Artificial Sequence
  ENSG00000157890_63 (sequence is synthesized)
atggacaggagccctggataacaagacacgtagtgagggaaaacatcttgattggtatcaagagaagacaggggttgagtcctgactaaactatttactaacattaggaattatattagc

SEQ ID NO: 463754 - DNA, 120 bp, Artificial Sequence
  ENSG00000157890_64 (sequence is synthesized)
aaattttctgagcttcagattcctcattctaaagtagaaacaacagtcctttctgcccagccctattcacgatgtaacaagtttcaaatgacctaattggaatgaagactatacgtgcta

SEQ ID NO: 463755 - DNA, 120 bp, Artificial Sequence
  ENSG00000157890_65 (sequence is synthesized)
agttatcactcctccacctgcttttccatcttccagtgtgtgacatcctttgtctcctattcctcttttctttgtgggtttatacctgtacccctttgactctcatgtcagctgggtttg

SEQ ID NO: 463756 - DNA, 120 bp, Artificial Sequence
  ENSG00000157890_66 (sequence is synthesized)
agaaagaagctgagcaaagtgcacgtctccataccagcatgtttactcagcctccttccttatgtcttctcagcactttactgtgtacccatgtgagagtacttactgccttgtacttag

SEQ ID NO: 463757 - DNA, 120 bp, Artificial Sequence
  ENSG00000157890_67 (sequence is synthesized)
cggtttttttggctctttctgtggtagactaggaggacaggaatcaaatcgaatcacccctagtgtctcacacagcacctcgtatacaataggcagttcctaaattgtgctgaataactg

SEQ ID NO: 463758 - DNA, 120 bp, Artificial Sequence
  ENSG00000157890_68 (sequence is synthesized)
agaggagggctttggagccctggtgtccagctgtctgaacttcttctgggaagttgggtggtccctggagccacagcaggtgtgccattcccaggaaagtttggcatttctggagcaccg

SEQ ID NO: 463759 - DNA, 120 bp, Artificial Sequence
  ENSG00000157890_69 (sequence is synthesized)
gtgcctcccaggattctctggagctctctgcaaccaagctagcaagtggcagaaacaaattctgattccgacatgcatgctgaagggatgaaaagtgaaacaagcacagagatctgcatc

SEQ ID NO: 463760 - DNA, 120 bp, Artificial Sequence
  ENSG00000157890_70 (sequence is synthesized)
acttccaagcccttctccccgtcatattcaggccaccatccctaatccctccccatatgctttcctgacttgacctcagaatccttcacaataccgactccaagaactgctaccactcag

SEQ ID NO: 463761 - DNA, 120 bp, Artificial Sequence
  ENSG00000157890_71 (sequence is synthesized)
caggagttgaaaagagatataaagcttatttgcattggtgttccaccctaccagctctttgtgggggaaaaaccctgatctgtaacatctgcagatttttaaaatataaatattcctacc

SEQ ID NO: 463762 - DNA, 120 bp, Artificial Sequence
  ENSG00000157890_72 (sequence is synthesized)
ttgattataaaatctgaaataaagttgatctacctgccccagaggcctcctgtcgttgcactagcaaggaatgccaccctgcacctgctggctttctgggggcacaaggaatgaaaatga

SEQ ID NO: 463763 - DNA, 120 bp, Artificial Sequence
  ENSG00000157890_73 (sequence is synthesized)
tggcactccaacctcaagagatctctgcctccaagagcagagaagccaagacaaatccctaacacatgggaactgcaagttggatcatccctctaggaagtctacaggtgaagccaaaga

SEQ ID NO: 463764 - DNA, 120 bp, Artificial Sequence
  ENSG00000157890_74 (sequence is synthesized)
tgaaaggtcaggtcctgccctaggtttaaatgccggaatgtgtgaaatagggggctttggaactctgtcacttgccactctgttgctcattaactgtgaccttagactggactgtgagct

SEQ ID NO: 463765 - DNA, 120 bp, Artificial Sequence
  ENSG00000157890_75 (sequence is synthesized)
ttccaaggctcagtttcctcatctgcaaggttgggataattttgcctgtcctattgtctaatgcctgtcctactgtctaacaaggttatcatgagtaaccaataaaatcaccaatgggaa

SEQ ID NO: 463766 - DNA, 120 bp, Artificial Sequence
  ENSG00000157890_76 (sequence is synthesized)
ccccatccaggctccagttgatagtgcctccccttggcacagatttgtctcaaagtagcagccatgcccactgcttttccaattccagctaccacgcactggcatgtggggggcctgcca

SEQ ID NO: 463767 - DNA, 120 bp, Artificial Sequence
  ENSG00000157890_77 (sequence is synthesized)
cacatacattatggacaaaggcttcaaagttgcacctgcttagcaaatgcttgtgggttttttatagatgccaactaaatgtcttcggaaatgtaaagcgtcattatccaaccaattagt

SEQ ID NO: 463768 - DNA, 120 bp, Artificial Sequence
  ENSG00000157895_0 (sequence is synthesized)
gcggtggttcaagatggcggcgcccagtggcacagtgagcgattcggaaagtagtaacagcagtagcgatgcggaggagctggagcggtgccgcgaggcggcaatgccggcttggggctt

SEQ ID NO: 463769 - DNA, 120 bp, Artificial Sequence
  ENSG00000157895_1 (sequence is synthesized)
ggagcaacgcccgcacgtggcagggaagccaagagccggtgctgcaaatagccagttgtcaacctcccaaccgagcctcaggcataaggtgaatgagcatgaacaagatggcaacgagct

SEQ ID NO: 463770 - DNA, 120 bp, Artificial Sequence
  ENSG00000157895_2 (sequence is synthesized)
tcagaccacccctgaattccgagcccacgtagccaagaagctgggagccctgctggacagcttcattaccatctcagaagcagcaaaggagccagcaaaagctaaggtacagaaagtcgc

SEQ ID NO: 463771 - DNA, 120 bp, Artificial Sequence
  ENSG00000157895_3 (sequence is synthesized)
tttggaggatgatggtttccgccttttcttcacatctgtccctggaggccgtgagaaggaagagtctccccaaccccgccgaaagcgacagccctccagctccagtgaggacagtgacga

SEQ ID NO: 463772 - DNA, 120 bp, Artificial Sequence
  ENSG00000157895_4 (sequence is synthesized)
ggagtggcggcggtgccgggaggcagctgtgtcggcgtccgacatcctacaggagtcagccatccacagccctggaacagtggagaaggaggcaaagaagaaaaggaagttgaaaaagaa

SEQ ID NO: 463773 - DNA, 120 bp, Artificial Sequence
  ENSG00000157895_5 (sequence is synthesized)
agccaagaaggtggccagtgtcgactcggctgtcgctgccaccacccccaccagcatggccacagtccagaagcagaagtcaggtgagctcaacggggaccaggtgtcgcttgggaccaa

SEQ ID NO: 463774 - DNA, 120 bp, Artificial Sequence
  ENSG00000157895_6 (sequence is synthesized)
aaagaagaaaaaggcaaagaaggccagcgagacctctccattcccaccagcaaagagtgctacagctatacctgcaaactgaacccagccatgggcacagggctcagccagctccaagga

SEQ ID NO: 463775 - DNA, 120 bp, Artificial Sequence
  ENSG00000157895_7 (sequence is synthesized)
caaggtgtcccccccaccctggggacaaggcatttccaagccccacctccctctccaagttcaaggactgggctggcaaacccagactgcccatgagaccctgatggtgatgaaggcttg

SEQ ID NO: 463776 - DNA, 120 bp, Artificial Sequence
  ENSG00000157895_8 (sequence is synthesized)
ctcgagagttgggccaaaaaagtggctgtagggtgagaagaccaatcaaggcctgcccctctgtgctcccacggagggctggcgggggcgctgtggttccagaacatttcatgacctcag

SEQ ID NO: 463777 - DNA, 120 bp, Artificial Sequence
  ENSG00000157895_9 (sequence is synthesized)
gaaaaaaggaaccttccagttatttgagactagtggccaagtggtgaaacctccatctccctagaactgtctgaggtgggcaggggaagggagaccttccccaccacctccttagcctgg

SEQ ID NO: 463778 - DNA, 120 bp, Artificial Sequence
  ENSG00000157895_10 (sequence is synthesized)
tgtgagaaacagtttttagaaaatgagagaagggatccccaagaggccaaggcccagagaaacttttgttcttctctccttagcccacatagacttcacagaatcgtctgagaaaggaga

SEQ ID NO: 463779 - DNA, 120 bp, Artificial Sequence
  ENSG00000157895_11 (sequence is synthesized)
gctttttcacccctggctttctagaattttctttgtctgcatttgtgaatataccacacatgatggtgtctctgagccgaccagattatggaaactcaattgtcagaggacccaaaacaa

SEQ ID NO: 463780 - DNA, 120 bp, Artificial Sequence
  ENSG00000157895_12 (sequence is synthesized)
aacttagagtgatttggatattgcctctctgtcaatgctgaaccttaagacattttaagtaaacatcctcctcctctctacacccccaggatttgtgcgttcaccccacccaagacttca

SEQ ID NO: 463781 - DNA, 120 bp, Artificial Sequence
  ENSG00000157895_13 (sequence is synthesized)
gcgttcaccccacccaagacttcaggaagtgtcatagcactcgtggactaggtttcatgggacaaaggcattctgcaagaagtagaagcttgtggccgggtgcagtggctcatgcctgta

SEQ ID NO: 463782 - DNA, 120 bp, Artificial Sequence
  ENSG00000157895_14 (sequence is synthesized)
cctaggcaacatggtgaaacctcgtctctataaaaaaaagaatacaaaaattagttgggcatggtagtgagcgcctgtgaggctgcttgtgaggctgaggtgggaggatccctttagtcc

SEQ ID NO: 463783 - DNA, 120 bp, Artificial Sequence
  ENSG00000157895_15 (sequence is synthesized)
gcctgggtgacagtgagaccctgtctccaaaacaaaatttttttaaaaagtagaagcttgaggttaagatgaaatctggctttgtcattagagtctcagcagagcaagaaaagcagagat

SEQ ID NO: 463784 - DNA, 120 bp, Artificial Sequence
  ENSG00000157895_16 (sequence is synthesized)
caagaaaagcagagatgtggggtgtgagagcgtgggtgctggagcctgtctcctcttcgcaggcctctggcctgccccagcctcccgctacctgcccaaaccccatctgaatgatttgtg

SEQ ID NO: 463785 - DNA, 120 bp, Artificial Sequence
  ENSG00000157895_17 (sequence is synthesized)
gacaagcaagaagtttccaccgcatttctccttgactttactaaaagttaaataaacgtgccactcgccccggctggctacaagctgcagggggtgccgggtcaccccaggccttttcct

SEQ ID NO: 463786 - DNA, 120 bp, Artificial Sequence
  ENSG00000157895_18 (sequence is synthesized)
gaatcccagggtagacgcggtacactgaaggccaggttctcagcagcaggcccagggatgtgggaccatgcttgtcctgggttcacaggctcctttgtccctcctggcagtgctcaggac

SEQ ID NO: 463787 - DNA, 120 bp, Artificial Sequence
  ENSG00000157895_19 (sequence is synthesized)
ctcagactcctcagggtggctgcgaactgccctcagccagccaggcccccaggcttctgagtgttagtcctgtccacacaggtagctcctgtgccctggggtcacctctttcttctcctg

SEQ ID NO: 463788 - DNA, 120 bp, Artificial Sequence
  ENSG00000157895_20 (sequence is synthesized)
ggcacctcagcttggccagttccccggccctgctcagctgctcgggccttgctgccttgtgagctcagctactcctgccccaaacaagggcagggtctgcagggcgctcgagacagagga

SEQ ID NO: 463789 - DNA, 120 bp, Artificial Sequence
  ENSG00000157895_21 (sequence is synthesized)
gctgccccaccaggacctggacttggcacgggttgcgaggctcccacaggagtaaggacgacttcccagccccgaagtagccttcccagtagaggcaggaggccaggctggcctcagagg

SEQ ID NO: 463790 - DNA, 120 bp, Artificial Sequence
  ENSG00000157895_22 (sequence is synthesized)
catgatgctcttgggaacaaatacaggaaagctggaggtcatggggcctgggagagggaatcgctggggatgggaagccaggagagccctgcctgccttccctgttagcttcggcctccc

SEQ ID NO: 463791 - DNA, 120 bp, Artificial Sequence
  ENSG00000157895_23 (sequence is synthesized)
tgggctcaggcgttagagccccaggctctggcacagagtagccacccaggaaatgcctgtgtgagtaggtgatggggtcagtacaaatggcatgtgggtcactagctggaaggagttggg

SEQ ID NO: 463792 - DNA, 120 bp, Artificial Sequence
  ENSG00000157895_24 (sequence is synthesized)
gcaggaaggagtggcccggtgggtacattggtgacagaacaaggccacgctgatccagggcctctcagagctcagcaggtcacagctacacaggcctgtgtcctgagaagtgtggctgcc

SEQ ID NO: 463793 - DNA, 120 bp, Artificial Sequence
  ENSG00000157895_25 (sequence is synthesized)
agagtggtgtagcggtcccagggctctccataggcccaggctgggggtgcccaagtcataggccgcccccttcagttccaagtaagaagactgtatcccacgaagcagcgacagtccctc

SEQ ID NO: 463794 - DNA, 120 bp, Artificial Sequence
  ENSG00000157895_26 (sequence is synthesized)
ctacatctgccatgaacaggctttgctcctagctctccacgaccccctcctgtgcaccccgagcagcctccacgggttggggcgcctcagagccctccctttctgatgcatcagagcaga

SEQ ID NO: 463795 - DNA, 120 bp, Artificial Sequence
  ENSG00000157895_27 (sequence is synthesized)
gtggggagcgaggcacagctgtccaggaagggccacggttgctcggcaggctcaggtcctccaggcagggctggctgctgccctcatcaccccccaagcaggcagtacaggccccagggc

SEQ ID NO: 463796 - DNA, 120 bp, Artificial Sequence
  ENSG00000157895_28 (sequence is synthesized)
ccaggtgccgtggttactgggaggaagaggccatctgggtggagatgaaggtctcgatgacgctgtggttggatggcagcaggtggctctggccattgctggagtctgagctctggtaca

SEQ ID NO: 463797 - DNA, 120 bp, Artificial Sequence
  ENSG00000157895_29 (sequence is synthesized)
gcaccaggctgctggaggacactgcagaggcaaacaaggctgctagccacccaccaggcacccacacccaccccacctgcctgtccctaggggtactcaggatggggaggcagggccaca

SEQ ID NO: 463798 - DNA, 120 bp, Artificial Sequence
  ENSG00000157895_30 (sequence is synthesized)
cctcctggatcacagcagataacaggaaccccaaagtcacacctctaccctcggttcttcaaagggagcctcccagccagggtccacggccgcccatggagtggcctgagtacatcttag

SEQ ID NO: 463799 - DNA, 120 bp, Artificial Sequence
  ENSG00000157895_31 (sequence is synthesized)
tgtgaacactggagaagccccggtgagatgccgaggtaggtagttgtacgtgttggcttggctaggctgagtcaaacactaatctaggcgctgctgtgaatgcaggtgctttgtagatgt

SEQ ID NO: 463800 - DNA, 120 bp, Artificial Sequence
  ENSG00000157895_32 (sequence is synthesized)
ggttaatgccacaatcagttggctttgagtgaaggagattaccctgaaaatatgggtgggcctcctacatcagtggaaggccgtaagagcaaaaaccggtttcccagagaaggaattctg

SEQ ID NO: 463801 - DNA, 120 bp, Artificial Sequence
  ENSG00000157895_33 (sequence is synthesized)
cctcaaggctgcagaattcactccccagagctgccagcaacagatttcaggcctgccagccccccgcagacacgggccaagtccttcaaataaatctgttggttctgtgttcctggagaa

SEQ ID NO: 463802 - DNA, 120 bp, Artificial Sequence
  ENSG00000157895_34 (sequence is synthesized)
ttgttgctactgcatgtctacaattatctccaatttcttttaattaaaaaaaaaaatttaaaaacaggtctgccctgctccagaagctgtcctctgaaccagttttctagattggtcata

SEQ ID NO: 463803 - DNA, 120 bp, Artificial Sequence
  ENSG00000157895_35 (sequence is synthesized)
tttcccttttcatgcttgctgctaggaagctcagagcaaaatgtatgccctctctctaacaagtgtataggacttcctgactacacttctaggtctttctgttcctcttgcccttatatc

SEQ ID NO: 463804 - DNA, 84 bp, Artificial Sequence
  ENSG00000157895_36 (sequence is synthesized)
ctacacttctaggtctttctgttcctcttgcccttatatctctttgtcctatttgaaattgcattcattttgttaaattctttt

SEQ ID NO: 463805 - DNA, 62 bp, Artificial Sequence
  ENSG00000157895_37 (sequence is synthesized)
cttgttttactatgtctttaaaacttcttcaacacttactggaataaagtgggctttaaaga

SEQ ID NO: 463806 - DNA, 120 bp, Artificial Sequence
  ENSG00000157895_38 (sequence is synthesized)
acttcttcaacacttactggaataaagtgggctttaaagaaatgaagcactgcagttcgcgtggcagaggctggtcagcatgttataaccagaccatcagccctcttactaggccagcac

SEQ ID NO: 463807 - DNA, 120 bp, Artificial Sequence
  ENSG00000157895_39 (sequence is synthesized)
gctttcgcttttgcatttacaatcacataccccatcccctccacttgaaaaagaattttgtttttgtcgttatccaaaaatctcatcttaaatcaaccgtctcgtctccctgtagcttca

SEQ ID NO: 463808 - DNA, 120 bp, Artificial Sequence
  ENSG00000157895_40 (sequence is synthesized)
agcacctaatgtgtgtctggaggtgggcgaaacagttttggtatattcttttttttttttctttttttgagataggaactctctctgccacctaggctggagtgcagtggagcaattata

SEQ ID NO: 463809 - DNA, 82 bp, Artificial Sequence
  ENSG00000157895_41 (sequence is synthesized)
caagcagacacacaccaccacccctggctaattatttatgttttttagagacaggatctcgctatgttgcccaggctggtct

SEQ ID NO: 463810 - DNA, 67 bp, Artificial Sequence
  ENSG00000157895_42 (sequence is synthesized)
tttatgttttttagagacagcccaccttagccttccaaagttctgggactacaggcgtgcaccacca

SEQ ID NO: 463811 - DNA, 120 bp, Artificial Sequence
  ENSG00000157895_43 (sequence is synthesized)
gggaagccaagagccggtagggtactatgtttggggagactggctgaggggcgtgggatcttcccctggagcctgagaggatggatggtgctgcaaatagccagttgtcaacctcccaac

SEQ ID NO: 463812 - DNA, 76 bp, Artificial Sequence
  ENSG00000157895_44 (sequence is synthesized)
tggagcggtgccgcgaggcggcaatgccggcttggggcttggagcaacgcccgcacgtggcagggaagccaagagc

SEQ ID NO: 463813 - DNA, 120 bp, Artificial Sequence
  ENSG00000157895_45 (sequence is synthesized)
gcgtgagccaccgcgcccggccttgactccatcttaaaagtgcatctatctggagttcacccacttctcaccacatcaattactgcagcagactccgtgttcctgcctttgccccaacag

SEQ ID NO: 463814 - DNA, 120 bp, Artificial Sequence
  ENSG00000157911_0 (sequence is synthesized)
ccgtctgggcgtgggcgtggccggcgtggctgctcgggaccacccgaacccgcggccatggccccggccgccgccagccccccggaggtgatccgcgcggcgcagaaggacgagtactac

SEQ ID NO: 463815 - DNA, 120 bp, Artificial Sequence
  ENSG00000157911_1 (sequence is synthesized)
gacgagtactaccgcggtgggctgcggagcgcggcgggcggcgccctgcacagcctggcgggtgcgaggaagtggctggagtggaggaaggaggttgagctgctctcagatgtggcctac

SEQ ID NO: 463816 - DNA, 120 bp, Artificial Sequence
  ENSG00000157911_2 (sequence is synthesized)
tttggcctcaccacacttgcaggctaccagaccctgggggaggagtacgtcagcatcatccaggtggacccatcgcggatacatgtgccctcctcgctgcgccgtggcgtgctggtgaca

SEQ ID NO: 463817 - DNA, 120 bp, Artificial Sequence
  ENSG00000157911_3 (sequence is synthesized)
ctgcatgccgtcctgccctacctgctggacaaggccctgctccccctggagcaggagctgcaggctgaccccgacagtgggcgacccttgcaggggagcctggggccaggtgggcgtggc

SEQ ID NO: 463818 - DNA, 120 bp, Artificial Sequence
  ENSG00000157911_4 (sequence is synthesized)
tgctcaggggcgcggcgctggatgcgtcaccacacggccaccctgactgagcagcagaggagggcgctgctgcgggcggtcttcgtcctcagacagggcctcgcctgcctccagcggcta

SEQ ID NO: 463819 - DNA, 120 bp, Artificial Sequence
  ENSG00000157911_5 (sequence is synthesized)
catgttgcctggttttacatccacggtgtcttctaccacctggccaagaggctcacggggatcacgtacctccgtgtccgcagcctgcccggagaggacctgagggcccgtgttagctac

SEQ ID NO: 463820 - DNA, 120 bp, Artificial Sequence
  ENSG00000157911_6 (sequence is synthesized)
aggctgctgggggtcatctcactgctgcacctggtgctgtccatggggctgcagctgtacggtttcaggcagcggcagcgagccaggaaggagtggaggctgcaccgcggcctgtctcac

SEQ ID NO: 463821 - DNA, 120 bp, Artificial Sequence
  ENSG00000157911_7 (sequence is synthesized)
cgcagggcctccttggaggagagagccgtttccagaaaccccctgtgcaccctgtgcctggaggagcgcaggcacccaacagccacgccctgcggccacctgttctgctgggagtgcatc

SEQ ID NO: 463822 - DNA, 120 bp, Artificial Sequence
  ENSG00000157911_8 (sequence is synthesized)
gcactaccgctgagccggcgcccgggtgggcctggacacagatgacctctacgggagtctgaacgccaagatttagtctcaggattaaccttgcttgcacagaagttagaacactctcag

SEQ ID NO: 463823 - DNA, 120 bp, Artificial Sequence
  ENSG00000157911_9 (sequence is synthesized)
ttttttgtcatgtaagatactaacctagccaccctgggagagaacagaaagctgtccctggctgcgctttctcagccctgggaggggcgcctgaacccagaacatttccctaaccccaac

SEQ ID NO: 463824 - DNA, 120 bp, Artificial Sequence
  ENSG00000157911_10 (sequence is synthesized)
ctggtaggactcagccacttcttcaggaatttcacttatttggacgggattttaggtttccctcccttccccaaaccatacagttgagaagtaattcagaagtaggccagaagacacttt

SEQ ID NO: 463825 - DNA, 120 bp, Artificial Sequence
  ENSG00000157911_11 (sequence is synthesized)
attcgtttatattgtgagaaaacagccccatcaggcttgtgttaaggcaatggactgaatgagtgcgtgctgggtggggtggggcacggaggctggcgggttgcttcagccagtgcagtg

SEQ ID NO: 463826 - DNA, 120 bp, Artificial Sequence
  ENSG00000157911_12 (sequence is synthesized)
agaacagcagccccacggccccatgggaggcggcgctgctctccccgagggcggctgggcagagcacatcccccaggacttgatgaccacacggggcagagagaaaccaaccaaggccag

SEQ ID NO: 463827 - DNA, 120 bp, Artificial Sequence
  ENSG00000157911_13 (sequence is synthesized)
cacctccgtcggaagcatttggcacacacaccttcaatacacgtcaaggtcgcttccagttttagaaaacagaaatctgcatctcagcctgagacgcacagagaggtctcttcctgaccc

SEQ ID NO: 463828 - DNA, 120 bp, Artificial Sequence
  ENSG00000157911_14 (sequence is synthesized)
agacgcactcacgagccaggtcctgggggtatgggggctgccaggggcgcccgagccctctcctggggggcctgctgggcaggcgacctgctgacccacggtcactgctgtgttcagccc

SEQ ID NO: 463829 - DNA, 120 bp, Artificial Sequence
  ENSG00000157911_15 (sequence is synthesized)
ctcagctcggccccagcctatttcccgcctccatttgatgtttccaggttttcaaaactgcatttaacctgcgccagagagttcaccgtaggcatctttaataaactaactccagcaaaa

SEQ ID NO: 463830 - DNA, 120 bp, Artificial Sequence
  ENSG00000157911_16 (sequence is synthesized)
gagattccagaaagacctcacagccagcaagttggagagctgctttttgatgctagacagttggcctctggcctgtaatcttaataccccagaccatctttccatgtggccctcataggc

SEQ ID NO: 463831 - DNA, 120 bp, Artificial Sequence
  ENSG00000157911_17 (sequence is synthesized)
cctagaacagttgctcaggggaatcccggagcaagagatgagcacaggtgggagattcttcgcagactgtctgcagctcacgctaaggtgcgaggaagtggctggagtggaggaaggagg

SEQ ID NO: 463832 - DNA, 120 bp, Artificial Sequence
  ENSG00000157911_18 (sequence is synthesized)
agctcccacgggacctcaggactgagggcagccacacacaccaagtctggggacggtggccagggggctgccaggcagtgtgagaagctcctggagctggcccgggctaccagaccctgg

SEQ ID NO: 463833 - DNA, 120 bp, Artificial Sequence
  ENSG00000157911_19 (sequence is synthesized)
aggctggtcaccaccctttagagggagttgttgacagaagctctcaggctcccaaccccagctcagcatgtagcaaggaccaccgagtgccagcctggttccctacgaggggctcgcccc

SEQ ID NO: 463834 - DNA, 120 bp, Artificial Sequence
  ENSG00000157911_20 (sequence is synthesized)
gggcatcctgccgccatggagagtgtgctcggtgggcgggagacagatgtggctgcgtcacagagcatcttgggaagtgaggggctctcagagataaagaccacgtcttagggaagagca

SEQ ID NO: 463835 - DNA, 120 bp, Artificial Sequence
  ENSG00000157911_21 (sequence is synthesized)
ggccaagaggctcacggggatcacgtaccaggcgctgaggccagatcccctcagggtcctgatgagtgtggcgccatctgccttacagctccgtgtccgcagcctgcccggagaggacct

SEQ ID NO: 463836 - DNA, 120 bp, Artificial Sequence
  ENSG00000157911_22 (sequence is synthesized)
aacacaagatggaacttgagatttcctgaagcgcagtgttaaaatgcctcgagggcgtgtgccacatttccctgctgacgtaaaacacctggccagcaggaccggcttccggcaaagacc

SEQ ID NO: 463837 - DNA, 120 bp, Artificial Sequence
  ENSG00000157911_23 (sequence is synthesized)
cgcgcaaaccatgtcttgctgtttgacttacttaggaatgaggatgaccctgtattcctgggttagtcaaggtcagcttgccagagacggaggagggcgggggggccgtgaccctctaga

SEQ ID NO: 463838 - DNA, 120 bp, Artificial Sequence
  ENSG00000157911_24 (sequence is synthesized)
ctgggaggaccaccaggagaggcactgggggctgcggccgggtgggcagatgccgccgtggctccatccatcagcacccagtcctttgcttcactgtgctctggccaagcgcgtgcgact

SEQ ID NO: 463839 - DNA, 120 bp, Artificial Sequence
  ENSG00000157911_25 (sequence is synthesized)
tcctgtcacaccttaggcctgagcgcttattaagaaaacagtatgaaaaatgacaaacactcctgtccacagtctgagaatcccaagtgtctcaacacggtaccagaagtaccacctggg

SEQ ID NO: 463840 - DNA, 120 bp, Artificial Sequence
  ENSG00000157911_26 (sequence is synthesized)
agcagcactggctatcttgggtcagggacacacaagcttgaacgtggcctcttagaggagctcgatgtcagatatgtaaacactggtacaagaaaatccagacactaagcattcaccgtg

SEQ ID NO: 463841 - DNA, 120 bp, Artificial Sequence
  ENSG00000157911_27 (sequence is synthesized)
tcaattctgagacaggaaacaccgcccagagtgaggagcctgcgcagcccggggcccaggaggagaggccttcactcgcatgtcagtgtctcatctgggaccacagctgtgatgttctgc

SEQ ID NO: 463842 - DNA, 120 bp, Artificial Sequence
  ENSG00000157911_28 (sequence is synthesized)
tgtgcaatatgggtcacctttcgaaaaggccaaacaaaaggtgggctttcctgtgtccagcgactgccatgttttaggtaaagactttagtaaaggtggaggtaaaatcacttggtaaaa

SEQ ID NO: 463843 - DNA, 120 bp, Artificial Sequence
  ENSG00000157911_29 (sequence is synthesized)
cccacagctgagctcctgtagatggaaccagaggtgaggcaaggaactggaggccctccccactgaggtcagcggggcgcagacgcccccttgtcgtgccctgccttcctcctgcaatcc

SEQ ID NO: 463844 - DNA, 120 bp, Artificial Sequence
  ENSG00000157911_30 (sequence is synthesized)
tgcaggactctccagggccaagtgctgcccttggggccaaaaaacagggccttctccttcacctgccctgcagccattcaggtgcgaggaagtggctggagtggaggaaggaggttgagc

SEQ ID NO: 463845 - DNA, 120 bp, Artificial Sequence
  ENSG00000157916_0 (sequence is synthesized)
gctttaatgggaaacagtctgagtaaaacggggaaacttacaaggagctataggacgaacaatgtgacgggtggctttcagatggcctggctttggcctaaatagggtggccattccagg

SEQ ID NO: 463846 - DNA, 120 bp, Artificial Sequence
  ENSG00000157916_1 (sequence is synthesized)
tgacacattttagtgtagcctctatttaaatatggagttctttcagtggagagtaaaggtgctcctcctctgtgtctggtttacacggctccgcgagaccaaagggcccctcggtctcct

SEQ ID NO: 463847 - DNA, 120 bp, Artificial Sequence
  ENSG00000157916_2 (sequence is synthesized)
tgagcagcctggcactctgcacagaggatccaggaacggtgtcatggagccacattctgcacagacttgatgatgtggagggagctgcctggatcacttcagcgcatcagttgtgatggg

SEQ ID NO: 463848 - DNA, 120 bp, Artificial Sequence
  ENSG00000157916_3 (sequence is synthesized)
agagccaaggcacttgagggcgggattgcgtctggccacctgttgccttccacctgaagggaagatttccccagtgctcacagtgaggatgggactggaaaagcgttggtttcaggaagg

SEQ ID NO: 463849 - DNA, 120 bp, Artificial Sequence
  ENSG00000157916_4 (sequence is synthesized)
tgcaggttctggctcctgcccactgcgaacatgctgatgggccagggcaactctttagtctttgtgagcttcagttttcttatctgtaaatgagaacaataagactgaccccaactgttg

SEQ ID NO: 463850 - DNA, 120 bp, Artificial Sequence
  ENSG00000157916_5 (sequence is synthesized)
ctgaggaatgatgtctttgctttcatgtctggtatttcttagagcctcattttacagatgaggaaactgaggctggctgcgtgctcagagggtttgctgaaggcctcacagccgcttagc

SEQ ID NO: 463851 - DNA, 120 bp, Artificial Sequence
  ENSG00000157916_6 (sequence is synthesized)
acaggtgggactttaagccaaacttgagaccagagtctgtttctcctcactgccctgccgagggagcagatggggggtggtgggggaggtgaacgtcacccctggcgtcttctctagctc

SEQ ID NO: 463852 - DNA, 120 bp, Artificial Sequence
  ENSG00000157916_7 (sequence is synthesized)
aggggccaggaggcctctcatctttaaagtaggaatgacaaccggcaggccctgggtactgagctgtgctttaccgaagagcggcaggtcctgacgccgtctcctctcaggagtggggtg

SEQ ID NO: 463853 - DNA, 120 bp, Artificial Sequence
  ENSG00000157916_8 (sequence is synthesized)
gcggcgtgctcagctgaggagccaggtggcagtcaggcttggcttggcctgcccagaagcagggctgtggcaggaccttggacacgtggcttccactgtttgagacttggtgaaatgggg

SEQ ID NO: 463854 - DNA, 120 bp, Artificial Sequence
  ENSG00000157916_9 (sequence is synthesized)
gtcatgatgcccttcacttgagcatctgggaattaagtgggtgaacaatgtgacctctggcacctgggttctcaggtgaattcctcatggcatcacagcagtgttgaaataggagcagat

SEQ ID NO: 463855 - DNA, 120 bp, Artificial Sequence
  ENSG00000157916_10 (sequence is synthesized)
cattttcctgttcatggggtggaggacctggccctgagaggacaggatccctcctgctcctgccagaccagagacccaggacagggcgtggagcagacaaggtgcctgggcgggggaacc

SEQ ID NO: 463856 - DNA, 120 bp, Artificial Sequence
  ENSG00000157916_11 (sequence is synthesized)
ctgagggatccacagagggtgcggtccttggagggaggacatgcagtgccacgtgccatggaccagccagtggaccccatggccagcaaggctgctcctggggccagtggggtggacagt

SEQ ID NO: 463857 - DNA, 120 bp, Artificial Sequence
  ENSG00000157916_12 (sequence is synthesized)
cccgcccacgcaggtgactgaggtgccagtgtgggaatgaaaatgcggcctgtgctcctgggcccatgcgtctcacgctgcccttcctctccagggaagcctgtgtacctgctacttttt

SEQ ID NO: 463858 - DNA, 120 bp, Artificial Sequence
  ENSG00000157916_13 (sequence is synthesized)
cccgaacaattcatggtaaaaacacaaatggtatatggacaaaatactgaatgtggaagaaacctacttgacagtgttggtgaaaatagggccaggatttcacacccgtgaatgcttttt

SEQ ID NO: 463859 - DNA, 120 bp, Artificial Sequence
  ENSG00000157916_14 (sequence is synthesized)
actgaaaagtattttgtgtttttctcccagttacagaatgtctgaaggggacagtgtgggagaatccgtccatgggaaaccttcggtggtgtacagatttttcacaagacttggacagat

SEQ ID NO: 463860 - DNA, 120 bp, Artificial Sequence
  ENSG00000157916_15 (sequence is synthesized)
ttatcagtcctggctagacaagtccacaccctacacggctgtgcgatgggtcgtgacactgggcctgagctttgtctacatgattcgagtttacctgctgcagggttggtacattgtgac

SEQ ID NO: 463861 - DNA, 120 bp, Artificial Sequence
  ENSG00000157916_16 (sequence is synthesized)
ctatgccttggggatctaccatctaaatcttttcatagcttttctttctcccaaagtggatccttccttaatggaagactcagatgacggtccttcgctacccaccaaacagaacgagga

SEQ ID NO: 463862 - DNA, 120 bp, Artificial Sequence
  ENSG00000157916_17 (sequence is synthesized)
attccgccccttcattcgaaggctcccagagtttaaattttggcatgcggctaccaagggcatccttgtggctatggtctgtactttcttcgacgctttcaacgtcccggtgttctggcc

SEQ ID NO: 463863 - DNA, 120 bp, Artificial Sequence
  ENSG00000157916_18 (sequence is synthesized)
gattctggtgatgtacttcatcatgctcttctgtatcacgatgaagaggcaaatcaagcacatgattaagtaccggtacatcccgttcacacatgggaagagaaggtacagaggcaagga

SEQ ID NO: 463864 - DNA, 120 bp, Artificial Sequence
  ENSG00000157916_19 (sequence is synthesized)
ggatgccggcaaggccttcgccagctagaagcgggactgaggctgcctcacgtgttgcaagaacagttttgagccattgttaacaatgccttttttcttcacataaagtagttgattacg

SEQ ID NO: 463865 - DNA, 120 bp, Artificial Sequence
  ENSG00000157916_20 (sequence is synthesized)
aagtgctcgctgcagcttcccggagccggagcgcagcgcctgcggccgcccgtgccccgccgtcctccttcccgcggccgtgagggagaccgcggctcggccgtagcggagctgcgagtt

SEQ ID NO: 463866 - DNA, 120 bp, Artificial Sequence
  ENSG00000157916_21 (sequence is synthesized)
tcaatgatttgtaactgaaatatcaggttctagaagaaactggcgcttaaaccaaatcgcatggatttctttttcagtgacgttcaagtgtttctcacggatggaattctagtcagctgc

SEQ ID NO: 463867 - DNA, 120 bp, Artificial Sequence
  ENSG00000157916_22 (sequence is synthesized)
aggcgggaagccaggcgggtggagcccatgggagcaagggcgagtggccggtccccgctgtgccaggtgggcaggcaggagcaaggcctgcgagggaggaacgggccgctccccgccagc

SEQ ID NO: 463868 - DNA, 120 bp, Artificial Sequence
  ENSG00000157916_23 (sequence is synthesized)
cgccttccccagcagccgcaggtggtgccagccactccacagagcccgagggatgatctagcctgattcctgcgtgtccgaaagaacttaacgttttaaaggtgattgtcaagtaactgt

SEQ ID NO: 463869 - DNA, 120 bp, Artificial Sequence
  ENSG00000157916_24 (sequence is synthesized)
gtggggttctaatgccagtttcctaattccatctcactggagatgtttaaagttggcctctatcctaatgactcaaaacttggttcttaactaccatgattgcttttgagggcccggaat

SEQ ID NO: 463870 - DNA, 120 bp, Artificial Sequence
  ENSG00000157916_25 (sequence is synthesized)
tataaatatatattatattttaattgtttgagattattttgacacatttctttgatacgtagagtgttttgtttttaatttaaatctgtcctcatgcaaccctccatgaggggcagcgaa

SEQ ID NO: 463871 - DNA, 120 bp, Artificial Sequence
  ENSG00000157916_26 (sequence is synthesized)
gttcagcactcggccccccactgcgggagaggcggaacccacttgcatgtcagcgtttttgattcgagaaaagaaatactctcaacgttttaccaagtgattttacctccacctttacta

SEQ ID NO: 463872 - DNA, 120 bp, Artificial Sequence
  ENSG00000157916_27 (sequence is synthesized)
aagtctttacctaaaacatggcagtcgctggacacaggaaagcccaccttttgtttggccttttcgaaaggtgacccatattgcacagcagaacatcacagctgtggtcccagatgagac

SEQ ID NO: 463873 - DNA, 120 bp, Artificial Sequence
  ENSG00000157916_28 (sequence is synthesized)
actgacatgcgagtgaaggcctctcctcctgggccccgggctgcgcaggctcctcactctgggcggtgtttcctgtctcagaattgacacggtgaatgcttagtgtctggattttcttgt

SEQ ID NO: 463874 - DNA, 120 bp, Artificial Sequence
  ENSG00000157916_29 (sequence is synthesized)
accagtgtttacatatctgacatcgagctcctctaagaggccacgttcaagcttgtgtgtccctgacccaagatagccagtgctgctcccaggtggtacttctggtaccgtgttgagaca

SEQ ID NO: 463875 - DNA, 120 bp, Artificial Sequence
  ENSG00000157916_30 (sequence is synthesized)
cttgggattctcagactgtggacaggagtgtttgtcatttttcatactgttttcttaataagcgctcaggcctaaggtgtgacaggaagtcgcacgcgcttggccagagcacagtgaagc

SEQ ID NO: 463876 - DNA, 120 bp, Artificial Sequence
  ENSG00000157916_31 (sequence is synthesized)
aaaggactgggtgctgatggatggagccacggcggcatctgcccacccggccgcagcccccagtgcctctcctggtggtcctcccagtctagagggtcacggcccccccgccctcctccg

SEQ ID NO: 463877 - DNA, 120 bp, Artificial Sequence
  ENSG00000157916_32 (sequence is synthesized)
tctctggcaagctgaccttgactaacccaggaatacagggtcatcctcattcctaagtaagtcaaacagcaagacatggtttgcgcgggtctttgccggaagccggtcctgctggccagg

SEQ ID NO: 463878 - DNA, 120 bp, Artificial Sequence
  ENSG00000157916_33 (sequence is synthesized)
tgttttacgtcagcagggaaatgtggcacacgccctcgaggcattttaacactgcgcttcaggaaatctcaagttccatcttgtgttagtaacgtacccacattttgctggagttagttt

SEQ ID NO: 463879 - DNA, 120 bp, Artificial Sequence
  ENSG00000157916_34 (sequence is synthesized)
attaaagatgcctacggtgaactctctggcgcaggttaaatgcagttttgaaaacctggaaacatcaaatggaggcgggaaataggctggggccgagctgaggggctgaacacagcagtg

SEQ ID NO: 463880 - DNA, 120 bp, Artificial Sequence
  ENSG00000157916_35 (sequence is synthesized)
accgtgggtcagcaggtcgcctgcccagcaggccccccaggagagggctcgggcgcccctggcagcccccatacccccaggacctggctcgtgagtgcgtctgggtcaggaagagacctc

SEQ ID NO: 463881 - DNA, 120 bp, Artificial Sequence
  ENSG00000157916_36 (sequence is synthesized)
tctgtgcgtctcaggctgagatgcagatttctgttttctaaaactggaagcgaccttgacgtgtattgaaggtgtgtgtgccaaatgcttccgacggaggtgctggccttggttggtttc

SEQ ID NO: 463882 - DNA, 120 bp, Artificial Sequence
  ENSG00000157916_37 (sequence is synthesized)
tctctgccccgtgtggtcatcaagtcctgggggatgtgctctgcccagccgccctcggggagagcagcgccgcctcccatggggccgtggggctgctgttctcactgcactggctgaagc

SEQ ID NO: 463883 - DNA, 120 bp, Artificial Sequence
  ENSG00000157916_38 (sequence is synthesized)
aacccgccagcctccgtgccccaccccacccagcacgcactcattcagtccattgccttaacacaagcctgatggggctgttttctcacaatataaacgaataaagtgtcttctggccta

SEQ ID NO: 463884 - DNA, 120 bp, Artificial Sequence
  ENSG00000157916_39 (sequence is synthesized)
gcgttctcttcactgtgaagggccagctgtggagagatcgggctctggggccacacgtggtctatcaaacatatgcgttttctgtttctgttttccttttaccaagctttaaaaatataa

SEQ ID NO: 463885 - DNA, 120 bp, Artificial Sequence
  ENSG00000157916_40 (sequence is synthesized)
aacccagtctcagctcccaggcaggacagatgcggccgtggctgccgttctgctcttgctgtccctctcccagccacccacgtccccggtgctggtagccccacctgccccgtgtcagct

SEQ ID NO: 463886 - DNA, 120 bp, Artificial Sequence
  ENSG00000157916_41 (sequence is synthesized)
cggcggttctgtccttgagggtgagaggctcttgtgtgggctgcgtgtgcattgcttggtgagtgagggacctagagctgcctttgaacgctggagtccgaacctctgtcaggaaaagct

SEQ ID NO: 463887 - DNA, 120 bp, Artificial Sequence
  ENSG00000157916_42 (sequence is synthesized)
tatactttgtgtagttttaagaagaattgtgtctttcaagggagtaagagaaggatgtttctgtggttagggcagtacatgtctgtgagctacatgcaaagggtcctgctgctgctgtgc

SEQ ID NO: 463888 - DNA, 120 bp, Artificial Sequence
  ENSG00000157916_43 (sequence is synthesized)
ccagggtagacccctcctttccacagggatgcttctgtttgcggggacggtcggtgcagctgcaaggctggaggcggccggcaggtgcccggtgctggctgcagatgcggcgctaacctt

SEQ ID NO: 463889 - DNA, 120 bp, Artificial Sequence
  ENSG00000157916_44 (sequence is synthesized)
gtgctcgctgcagcttcccggagccggagcgcagcgcctgcggccgcccgtgccccgccgtcctccttcccgcggccgtgagggagaccgcggctcggccgtagcggagctgcgagggaa

SEQ ID NO: 463890 - DNA, 120 bp, Artificial Sequence
  ENSG00000157927_0 (sequence is synthesized)
cgcggcacgcgcgggtctgggcgccggccccagccaacggcgggtgggagcagcgcgggaacgtggcggcgcggcgggttgtgccggaggtcacggcctccccacatcctttggctgaag

SEQ ID NO: 463891 - DNA, 120 bp, Artificial Sequence
  ENSG00000157927_1 (sequence is synthesized)
ggtcacggcctccccacatcctttggctgaagcccacagtcctcatccatgaagcctcacccaccatgttttatgggacgcacttcatcatgtccccgcccaccaagagcaaactgaagc

SEQ ID NO: 463892 - DNA, 120 bp, Artificial Sequence
  ENSG00000157927_2 (sequence is synthesized)
ggcagagccagctgttgtccagcatgctgtcccggacgctgagctacaagtaccgggacctggactccaccttctccagcctgggcgccagcgatgaccccgccgagctctccacccagc

SEQ ID NO: 463893 - DNA, 120 bp, Artificial Sequence
  ENSG00000157927_3 (sequence is synthesized)
tgtcggcccctggtgtcctgaaggtgtttggggacagtgtctgcacaggaacccactacaagagcgtcctggccaccggcacctccagcgcccgtgagctggtgaaggaggcgctggagc

SEQ ID NO: 463894 - DNA, 120 bp, Artificial Sequence
  ENSG00000157927_4 (sequence is synthesized)
ggtacgccctggaccccaggcaggccggccagtacgtgctgtgtgacgtggtgggccaagccggcgatgctgggcagcggtggcaggcccggtgctttcgggtgtttggggacagtgaga

SEQ ID NO: 463895 - DNA, 120 bp, Artificial Sequence
  ENSG00000157927_5 (sequence is synthesized)
agcccctcttgatccaggaattatggaaaccccgagaaggtttatcccggaggtttgagctgaggaagaggtcggacgtggaggagctggcagccaaggaggtggacaccatcacggcag

SEQ ID NO: 463896 - DNA, 120 bp, Artificial Sequence
  ENSG00000157927_6 (sequence is synthesized)
ggataaacgcccaggcccggaggctgcagcggagtcgcgcgaagggaaccccgaccccggccctgggggatgcccggagctctcctccaccccggttgcgccgcacagtcagtgagacca

SEQ ID NO: 463897 - DNA, 120 bp, Artificial Sequence
  ENSG00000157927_7 (sequence is synthesized)
gcctgagcccagtgaacgccctgcccgctgccgcccagggccccgaggagcccggccccgacgccatgcggtactcgctgtaccagtccccgcatctgctccttctgcagggctacagcc

SEQ ID NO: 463898 - DNA, 120 bp, Artificial Sequence
  ENSG00000157927_8 (sequence is synthesized)
agcagcacgacagcctggtgtatgtgctcaaccgggaccggcacacggtgggccagcggaccccctccagcaagcccagcatcagcctctcagcccccgacatcctgcctctacactgca

SEQ ID NO: 463899 - DNA, 120 bp, Artificial Sequence
  ENSG00000157927_9 (sequence is synthesized)
ccatccgccggcaaccgctcccggacagcggccaggccgcggggaggctggtcctggagcccatccccggggcgcacatctccgtcaacttctccgaggtggggcacaggaccgtggtgc

SEQ ID NO: 463900 - DNA, 120 bp, Artificial Sequence
  ENSG00000157927_10 (sequence is synthesized)
tgcaccacggggacctgctctccctggggctctactacctgctgctattcaaggaccccgcgcaggcccagcccctgcccgcccgggccttggcgcgcctccgggctgtgccgcagagct

SEQ ID NO: 463901 - DNA, 120 bp, Artificial Sequence
  ENSG00000157927_11 (sequence is synthesized)
gccggctgtgcggggccgcgctcggggcccggggagccgcctcccctactcaggccgccctgccccggcgccagcagctgctcctggagtttgagccccacctggaggacacgctgctgc

SEQ ID NO: 463902 - DNA, 120 bp, Artificial Sequence
  ENSG00000157927_12 (sequence is synthesized)
agaggatcatgacgttgatcgagccggggggcgacgaccacaagctgacccccgccttcctcctgtgcctctgcatccagcactcggccacccacttccagccgggcacattcgggcagc

SEQ ID NO: 463903 - DNA, 120 bp, Artificial Sequence
  ENSG00000157927_13 (sequence is synthesized)
tcctgctcaagatagccaggctgatccgcgagactgtctgggagaaaaccaaagaactagcagagaagcaggcgcaactccaggagcccatctcgctggccagctgcgccatggctgatc

SEQ ID NO: 463904 - DNA, 120 bp, Artificial Sequence
  ENSG00000157927_14 (sequence is synthesized)
tggttccagacttgcagcccattcttttctggatgtctaactccatcgagctcctgtactttatccagcagaaatgcccactctacatgcagagcatggaggagcagctggacatcacag

SEQ ID NO: 463905 - DNA, 120 bp, Artificial Sequence
  ENSG00000157927_15 (sequence is synthesized)
gctcgaaggaatcgctgttctcctgcacgctgacggccagcgaggaggccatggcggtgctggaggaggtggtgctgtacgccttccagcagtgcgtctactatgtctccaagtccctgt

SEQ ID NO: 463906 - DNA, 120 bp, Artificial Sequence
  ENSG00000157927_16 (sequence is synthesized)
acatctgcctcccggcactcctggagtgcccgccattccagacggagcgccgtgagagctggtcctcggcccccgaactgcccgaggagctgcgccgcgtggtgtctgtgtaccaggcag

SEQ ID NO: 463907 - DNA, 120 bp, Artificial Sequence
  ENSG00000157927_17 (sequence is synthesized)
ccctggacctcctgcggcagctgcaggtgcaccccgaggtggcctcgcagatgctcgcctacctcttcttcttctccgggacactgcttctcaaccagctcctcgacaggggcccctccc

SEQ ID NO: 463908 - DNA, 120 bp, Artificial Sequence
  ENSG00000157927_18 (sequence is synthesized)
tgagctgcttccactggcccagaggtgtccaggcctgcgcccgcctgcagcagctcctggagtggatgcggagcgccggcttcggggcggctggagagcacttcttccagaagctctcct

SEQ ID NO: 463909 - DNA, 120 bp, Artificial Sequence
  ENSG00000157927_19 (sequence is synthesized)
gcaccctcaacctgctggccacacccagggcccagctcatccagatgagctggacagccctgcgggctgcgttccccgcactgagcccagcacagctgcaccggctgctgactcactacc

SEQ ID NO: 463910 - DNA, 120 bp, Artificial Sequence
  ENSG00000157927_20 (sequence is synthesized)
agctggcctcggccatgggccccatgagcacctgggagccaggggcccaggacagccccgaggccttcaggtcagaggatgttctggagtcctacgaaaaccccccacccatcgtcctgc

SEQ ID NO: 463911 - DNA, 120 bp, Artificial Sequence
  ENSG00000157927_21 (sequence is synthesized)
ccagcgacggcttccaggtggacttggaagccaactgcctggacgacagcatctaccagcacctgctctacgtccgccactttctgtggggtctgcggagcagagccagccccggcagcc

SEQ ID NO: 463912 - DNA, 120 bp, Artificial Sequence
  ENSG00000157927_22 (sequence is synthesized)
ctggcaggcctggcagtggggcctcccagccagtgtgccccgagggtatgcaccacgtggtccttgacgggcacctggaggccccgagctgccccctggctcccagggaccctggcccag

SEQ ID NO: 463913 - DNA, 120 bp, Artificial Sequence
  ENSG00000157927_23 (sequence is synthesized)
aggctggccccccgcacacggactcgtcctgcttgctcacgcctcccagcactccacttggccctgagcctggggaccccgactggccagagtccggcggcccctgtggaaaagcgctcc

SEQ ID NO: 463914 - DNA, 120 bp, Artificial Sequence
  ENSG00000157927_24 (sequence is synthesized)
cagagaggcagaggaacggactcagcggcctccggggtgcagctccggaaggagactctgcagcccttgcggaggagtcccctccagccccgtccagccgcagctccagcaccgaggact

SEQ ID NO: 463915 - DNA, 120 bp, Artificial Sequence
  ENSG00000157927_25 (sequence is synthesized)
tctgctacgtcttcacggtggagctggaacgaggcccctccgggctggggatgggcctgatcgacgggatgcacacgcacctgggcgcccccgggctctacatccagaccctgctcccgg

SEQ ID NO: 463916 - DNA, 120 bp, Artificial Sequence
  ENSG00000157927_26 (sequence is synthesized)
gcagccccgcagcggccgacgggcgcctgtcgctgggggaccgtatcctggaggtgaatggcagcagcctcctgggccttggctacctgagagctgtggacctgatccgtcatggcggga

SEQ ID NO: 463917 - DNA, 120 bp, Artificial Sequence
  ENSG00000157927_27 (sequence is synthesized)
agaagatgcggttcctggtcgcgaagtccgacgtggaaacagccaagaagatccatttccgcacgccccctctctaggggggctgcgaggacacccccacaggcccggcacccggtccca

SEQ ID NO: 463918 - DNA, 120 bp, Artificial Sequence
  ENSG00000157927_28 (sequence is synthesized)
cctggtgacactgggcttcctcccgccttcgtccctgttttgtaactgaccaagttgggtcccgggtggggagcctcaccctggggacatgcctgttgataacatgcatctcagtgtagg

SEQ ID NO: 463919 - DNA, 120 bp, Artificial Sequence
  ENSG00000157927_29 (sequence is synthesized)
ttctatttatatggcagatgacgtgaaattgtgatgtttgttacagagcttttatgtttaaagacttcaatggagaagtacggttcaataaactatttttcccgttcttagagggtgccc

SEQ ID NO: 463920 - DNA, 120 bp, Artificial Sequence
  ENSG00000157927_30 (sequence is synthesized)
tgctggggtctcaactcgggcagcaggcgtgggctgctcggaggggccgcaggggctccccatggcctctgcctgccaccggcacgggagaatgcagtgacagctgtcatcaggggatca

SEQ ID NO: 463921 - DNA, 120 bp, Artificial Sequence
  ENSG00000157927_31 (sequence is synthesized)
tctgaactgactctccctgcccccgtcccacccagacacagggcactgcaggaagcagctccaacagcccctcccagctgaagcagggccagacctggcagaggatgctggacttctgat

SEQ ID NO: 463922 - DNA, 120 bp, Artificial Sequence
  ENSG00000157927_32 (sequence is synthesized)
cccgctgctcagcacaggccccagagaaaggtctagacacccaggcgttggaaagtggaccggcctgatggtctctgaggcgccgagcccaccctgggccctgcttcctctcccaggact

SEQ ID NO: 463923 - DNA, 120 bp, Artificial Sequence
  ENSG00000157927_33 (sequence is synthesized)
cctgctccctcctgagttcctctcccctactaaagccaccagcgtggccctgataccaggctggcggccccaggcccttaatcctcaccagcgtccccctggccaccggccctaacccgg

SEQ ID NO: 463924 - DNA, 120 bp, Artificial Sequence
  ENSG00000157927_34 (sequence is synthesized)
gcaggaggccagcgtccctctccaccagctggctgaccatgcgcaggaccagggcagggcacttgctgcctcggggtgacagcgtgggtcgctgggcatcctcagcagctccaccaactg

SEQ ID NO: 463925 - DNA, 120 bp, Artificial Sequence
  ENSG00000157927_35 (sequence is synthesized)
ggtgtgggtggcttccgcgccctcctggctgtggtggaactggtggcccagggtcatctttgatagcaacagagaaaccctggggaagagggtcccggcatcagttgcagatgcacctct

SEQ ID NO: 463926 - DNA, 120 bp, Artificial Sequence
  ENSG00000157927_36 (sequence is synthesized)
cactgggacagaggtctgtgcggggtccccagatcggtgtcctgggtctgtcccaggccctgggcctcgtgcagctccacgctgccccctggtgtgcgctacggcgaggtgcagcgcgtc

SEQ ID NO: 463927 - DNA, 120 bp, Artificial Sequence
  ENSG00000157927_37 (sequence is synthesized)
cgccccgcgccctctgccgacccgcagttctgtgtgcggctccgcattgcgcctggctcgaaacggcgaccactgccaggttcccaaaatactggataaaatatatatatatatatagtg

SEQ ID NO: 463928 - DNA, 120 bp, Artificial Sequence
  ENSG00000157927_38 (sequence is synthesized)
acgtaatatattcgtatattttataaacattttttatattttattatataaaatataaatatttaatttttttttatgagacggagtctcgctctgtgacccaggctggagtgcagtggt

SEQ ID NO: 463929 - DNA, 120 bp, Artificial Sequence
  ENSG00000157927_39 (sequence is synthesized)
cccaaagtgctgggattacaggcgtgggattaccatgcctggccttgttctgtttcttttcctaggagtcccacaacgtgtgtgttagcactgccgagaatgtctcacagctctggacgg

SEQ ID NO: 463930 - DNA, 120 bp, Artificial Sequence
  ENSG00000157927_40 (sequence is synthesized)
cactgccgagaatgtctcacagctctggacggtctgcatttctggacctggtgcagatcccaggatcctggactctgatttgatgccttaacggtggaagggggttgagtatatttttta

SEQ ID NO: 463931 - DNA, 120 bp, Artificial Sequence
  ENSG00000157927_41 (sequence is synthesized)
tgtgggaggggtgtggactgtggccagaggaaagacagtggcaaggcatttccaaaggtggccaccaacagttcctcccacaaagagaagggggcttatctcttcttccctgcaatattc

SEQ ID NO: 463932 - DNA, 120 bp, Artificial Sequence
  ENSG00000157927_42 (sequence is synthesized)
tccggccttctgacttgctccgaacaacaggatgcagcataagtgatattctgggaccttccaagccagactgaagggcctttggtttctattttcatgctcctggaactcagcatccat

SEQ ID NO: 463933 - DNA, 120 bp, Artificial Sequence
  ENSG00000157927_43 (sequence is synthesized)
ggaaagaagctcttggcatcaccccaaggaagggaggccccgtggagtcggggaggcccagctagcctctggccgctgaagcacctagctgaggtgcgggactggtgagggctgccactg

SEQ ID NO: 463934 - DNA, 120 bp, Artificial Sequence
  ENSG00000157927_44 (sequence is synthesized)
gctgttctggtcttgctgagcttccaggcgaatgcagtcccaccagtgatcccggggacaccacgtggagcagaacgacttcccagccaggccccagacaatctacaacactgtgaaagg

SEQ ID NO: 463935 - DNA, 120 bp, Artificial Sequence
  ENSG00000157927_45 (sequence is synthesized)
ccaactgaagtggggtgtgggggacctctctcctggggacctccctggaggagcctccacccagaggacccccccgccccgccccatccccaacctggggatccggggacctcctcggcg

SEQ ID NO: 463936 - DNA, 120 bp, Artificial Sequence
  ENSG00000157927_46 (sequence is synthesized)
ggggagtcaaggagccgagagtccatgcccaagttccaaactccaggctcaggtccaaggccccctcgttccctcacggagccggaggatggggcctcccctgttgtatggctacccagg

SEQ ID NO: 463937 - DNA, 120 bp, Artificial Sequence
  ENSG00000157927_47 (sequence is synthesized)
cagagaccagtggggcagagacaggcccagtgcagagcggctcagtggggctggagggttcctggctacaaggccttgttctcagtcctgaactgctcggatgtcacaccgggtggtcgg

SEQ ID NO: 463938 - DNA, 120 bp, Artificial Sequence
  ENSG00000157927_48 (sequence is synthesized)
cgggaattcagaagggatgagtcctagggtggggccagtcactgtggccaggatcccagcctcctgtgtccacagggcaggggactcagggctcaatctgctggcccctgggttcccaca

SEQ ID NO: 463939 - DNA, 80 bp, Artificial Sequence
  ENSG00000157933_0 (sequence is synthesized)
cgggagcgggagcggccgggggagccggagcgcaccatggaggcggcggcaggcggccgcggctgtttccagccgcaccc

SEQ ID NO: 463940 - DNA, 120 bp, Artificial Sequence
  ENSG00000157933_1 (sequence is synthesized)
ccagccgcacccggggctgcagaagacgctggagcagttccacctgagctccatgagctcgctgggcggcccggccgctttctcggcgcgctgggcgcaggaggcctacaagaaggagag

SEQ ID NO: 463941 - DNA, 120 bp, Artificial Sequence
  ENSG00000157933_2 (sequence is synthesized)
ggtgcccgcagccaccgagccgccgcccgtgctgcacctgcccgccatccagccgccgccgcccgtgctgcccgggcccttcttcatgccgtccgaccgctccaccgagcgctgcgagac

SEQ ID NO: 463942 - DNA, 120 bp, Artificial Sequence
  ENSG00000157933_3 (sequence is synthesized)
catgccgtccgaccgctccaccgagcgctgcgagaccgtactggaaggcgagaccatctcgtgcttcgtggtgggaggcgagaagcgcctgtgtctgccgcagattctcaactcggtgct

SEQ ID NO: 463943 - DNA, 120 bp, Artificial Sequence
  ENSG00000157933_4 (sequence is synthesized)
gcgcgacttctcgctgcagcagatcaacgcggtgtgcgacgagctccacatctactgctcgcgctgcacggccgaccagctggagatcctcaaagtcatgggcatcctgcccttctcggc

SEQ ID NO: 463944 - DNA, 120 bp, Artificial Sequence
  ENSG00000157933_5 (sequence is synthesized)
gccctcgtgcgggctcatcaccaagacggacgccgagcgcctgtgcaacgcgctgctctacggcggcgcctacccgccgccctgcaagaaggagctggccgccagcctggcgctgggcct

SEQ ID NO: 463945 - DNA, 120 bp, Artificial Sequence
  ENSG00000157933_6 (sequence is synthesized)
ggagctcagcgagcgcagcgtccgcgtgtaccacgagtgcttcggcaagtgtaaggggctgctggtgcccgagctctacagcagcccgagcgccgcctgcatccagtgcctggactgccg

SEQ ID NO: 463946 - DNA, 120 bp, Artificial Sequence
  ENSG00000157933_7 (sequence is synthesized)
cctcatgtacccgccgcacaagttcgtggtgcactcgcacaaggccctggagaaccggacctgccactggggcttcgactcggccaactggcgggcctacatcctgctgagccaggatta

SEQ ID NO: 463947 - DNA, 120 bp, Artificial Sequence
  ENSG00000157933_8 (sequence is synthesized)
cacgggcaaggaggagcaggcgcgcctcggccgctgcctggacgacgtgaaggagaaattcgactatggcaacaagtacaagcggcgggtgccccgggtctcctctgagcctccggcctc

SEQ ID NO: 463948 - DNA, 120 bp, Artificial Sequence
  ENSG00000157933_9 (sequence is synthesized)
cataagacccaaaacagatgacacctcttcccagtcccccgcgccttccgaaaaggacaagccgtccagctggctgcggaccttggccggctcttccaataagagcctgggctgtgttca

SEQ ID NO: 463949 - DNA, 120 bp, Artificial Sequence
  ENSG00000157933_10 (sequence is synthesized)
ccctcgccagcgcctctctgctttccgaccctggtcccccgcagtgtcagcgagtgagaaagagctctccccacacctcccggccctcatccgagacagcttctactcctacaagagctt

SEQ ID NO: 463950 - DNA, 120 bp, Artificial Sequence
  ENSG00000157933_11 (sequence is synthesized)
tgagacagccgtggcgcccaacgtggccctcgcaccgccggcccagcagaaggttgtgagcagccctccgtgtgccgccgccgtctcccgggcccccgagcctctcgccacttgcaccca

SEQ ID NO: 463951 - DNA, 120 bp, Artificial Sequence
  ENSG00000157933_12 (sequence is synthesized)
gcctcggaagcggaagctgactgtggacaccccaggagccccagagacgctggcgcccgtggctgccccagaggaggacaaggactcggaggcggaggtggaagttgaaagcagggagga

SEQ ID NO: 463952 - DNA, 120 bp, Artificial Sequence
  ENSG00000157933_13 (sequence is synthesized)
attcacctcctccttgtcctcgctctcttccccgtcctttacctcatccagctccgccaaggacctgggctccccgggtgcgcgtgccctgccctcggccgtccctgatgctgcggcccc

SEQ ID NO: 463953 - DNA, 120 bp, Artificial Sequence
  ENSG00000157933_14 (sequence is synthesized)
tgccgacgcccccagtgggctggaggcggagctggagcacctgcggcaggcactggagggcggcctggacaccaaggaagccaaagagaagttcctgcatgaggtggtcaagatgcgcgt

SEQ ID NO: 463954 - DNA, 120 bp, Artificial Sequence
  ENSG00000157933_15 (sequence is synthesized)
gaagcaggaggagaagctcagcgcagccctgcaggccaagcgcagcctccaccaggagctggagttcctacgcgtggccaagaaggagaagctgcgggaggccacggaggccaagcgtaa

SEQ ID NO: 463955 - DNA, 120 bp, Artificial Sequence
  ENSG00000157933_16 (sequence is synthesized)
cctgcggaaggagatcgagcgtctccgcgccgagaacgagaagaagatgaaagaggccaacgagtcacggctgcgcctgaagcgggagctggagcaggcgcggcaggcccgggtgtgcga

SEQ ID NO: 463956 - DNA, 120 bp, Artificial Sequence
  ENSG00000157933_17 (sequence is synthesized)
caagggctgcgaggcgggccgcctgcgcgccaagtactcggcccagatcgaagacctgcaggtgaagctgcagcacgcggaggcggaccgggagcagctgcgggccgacctgctgcggga

SEQ ID NO: 463957 - DNA, 120 bp, Artificial Sequence
  ENSG00000157933_18 (sequence is synthesized)
gcgcgaggcccgggagcacctggagaaggtggtgaaggagctgcaggaacagctgtggccgcgggcccgccccgaggctgcgggcagcgagggcgctgcggagctggagccgtagattcc

SEQ ID NO: 463958 - DNA, 120 bp, Artificial Sequence
  ENSG00000157933_19 (sequence is synthesized)
gtgcctgccgccgcagcgccgccgacaacgcgggtgcaggggggcgcggctgggcggtgcagctccgcccggctccgcccctgcagcccacacagcacaacgtcttaccgtgcctattac

SEQ ID NO: 463959 - DNA, 120 bp, Artificial Sequence
  ENSG00000157933_20 (sequence is synthesized)
caagcgagtgtttgtaaccatgtagttttggaacccactgcaaaattttctactggccaagttcaagtgagtaagccgcgtcccccaactacagctggagacggggccagctcggcggcc

SEQ ID NO: 463960 - DNA, 120 bp, Artificial Sequence
  ENSG00000157933_21 (sequence is synthesized)
tgctggtcctctgcttgctggaacattctaacatttacacttttgttataagctatttaaaaccagtaaggagacttgaaattcagaaaatcaacacatttttaaatgactaacttctaa

SEQ ID NO: 463961 - DNA, 120 bp, Artificial Sequence
  ENSG00000157933_22 (sequence is synthesized)
tcacagctcatctgcccgcggctgcgtgaggacagcaggggtttttcttcagagtctattttttcagcgacaaggacccaggtcttcctgctgctgccagggagagcagggacagtgccg

SEQ ID NO: 463962 - DNA, 120 bp, Artificial Sequence
  ENSG00000157933_23 (sequence is synthesized)
cgtgcgagatgagctcgaacactgcccgccttactgccgcctaccccgcccgccacgccgccgtcgatgccagcgctgtccccacgggtaccaggaagtgcagagccgcacaggagctgc

SEQ ID NO: 463963 - DNA, 120 bp, Artificial Sequence
  ENSG00000157933_24 (sequence is synthesized)
cccggagctgaggggacggtcttcggctcctctgcaccccgtgattctgcccacgctcctccaccacgaggcactgacctgcgtcgggtggtgaccgtggctggcggtcacgccctcagc

SEQ ID NO: 463964 - DNA, 120 bp, Artificial Sequence
  ENSG00000157933_25 (sequence is synthesized)
ccctccgggcacacgtgccgcctgaccgggcgacccttttcagttcggcaaacgtcgctcccttcattttgggactgaggctgcagcattggaacaaaagagcattatttcaatttttct

SEQ ID NO: 463965 - DNA, 120 bp, Artificial Sequence
  ENSG00000157933_26 (sequence is synthesized)
ttctttttttttgttcgttcatttaaacgtatatttagaactgcactttgtccacaaccttcccttctctttctattccccagtgaactgaggtttttaccgatttatagagcagtcaaa

SEQ ID NO: 463966 - DNA, 120 bp, Artificial Sequence
  ENSG00000157933_27 (sequence is synthesized)
tccgaagtgctcgagtgcttagaaaccccctctggtgcttggttgaacaagggaatcacaagaaaacgaaaatgcaaaaactgaacttcgggggtcgttctgtgccttccagcatcttgt

SEQ ID NO: 463967 - DNA, 120 bp, Artificial Sequence
  ENSG00000157933_28 (sequence is synthesized)
acagcaaatcctgactcgtgtctttttacccccaagatatctgtcttcagtagcgactgaatctgccactctcagaataagttccttgcatttattccaaataatctcgtttactctcac

SEQ ID NO: 463968 - DNA, 120 bp, Artificial Sequence
  ENSG00000157933_29 (sequence is synthesized)
ctgtttatgcaaattgtataaggtttcttatgcccaagcttgaaaaatgatttcccagtagacaagaggcggctacctatcctacagttacggtatttatttacataagaagatcttaca

SEQ ID NO: 463969 - DNA, 120 bp, Artificial Sequence
  ENSG00000157933_30 (sequence is synthesized)
ggagttctttgcttgaatccgttctaacacccgcggcagctgcacgcgctcacagaaggtggaggttacttgcccaggtacagacgacctcggggcagtgacgagcaaagaccagagact

SEQ ID NO: 463970 - DNA, 120 bp, Artificial Sequence
  ENSG00000157933_31 (sequence is synthesized)
gctgagccctcgcatctgggtggcggaattgcctgcggggttttgcccttggtttactgaggggggtcttggttgctgctgaagccccccaccccttctaaagtgcaatgcaaaagggac

SEQ ID NO: 463971 - DNA, 120 bp, Artificial Sequence
  ENSG00000157933_32 (sequence is synthesized)
atcatgtatatgcagcgtttgtttggaattttctttgcttttgttttctttgcggttgttctgtgtgcatggattccacacctctgccgtaggtagatccgtcagcgggcattattaccg

SEQ ID NO: 463972 - DNA, 120 bp, Artificial Sequence
  ENSG00000157933_33 (sequence is synthesized)
tgtcttgtaaagggtcggttttgttatgcaacatgcagaatgctgtttttagccttgttttaccagagttgttttttttttcagttatttcttcaagggaaactaaatgatttagttgga

SEQ ID NO: 463973 - DNA, 120 bp, Artificial Sequence
  ENSG00000157933_34 (sequence is synthesized)
gcaaagctttaagtgtgttggcgtgcttctgtgtggctgtcctgtgtcgccaggtcgaagatcacagtgaggtagaggccctgccccatccccagggccgccaggcttgctccgtttgct

SEQ ID NO: 463974 - DNA, 120 bp, Artificial Sequence
  ENSG00000157933_35 (sequence is synthesized)
ttgagtttttagaccccagagggagatgagcttttccaagctgtgtctgggccagagcctctccttgcccttgctccatcccgacggtcaccgttgggtccacgcctccaccgccccatc

SEQ ID NO: 463975 - DNA, 120 bp, Artificial Sequence
  ENSG00000157933_36 (sequence is synthesized)
ttgccccaaacggaaagcgctgtatctgcagtggcagcccttccccacttcggctctgggagggtccagccagtgtcacctgggcccaccctttcctgcagctgccaggcccgtgcggtc

SEQ ID NO: 463976 - DNA, 120 bp, Artificial Sequence
  ENSG00000157933_37 (sequence is synthesized)
agtgggacccggacgtgggcaggcgagctcgggaccctcccaggcagttcccacagctcttgcctcggctcaccagggtcacttccactgtcaggggcctgagggggcagctgtggctgc

SEQ ID NO: 463977 - DNA, 120 bp, Artificial Sequence
  ENSG00000157933_38 (sequence is synthesized)
agggctgctctggactgaggggtcccaggccccgaggggtgcacgcctggctccccttggcacaggtgcgagtccgtttcttttcagcagaagggggaagaggtgtccgctgtgtgggct

SEQ ID NO: 463978 - DNA, 120 bp, Artificial Sequence
  ENSG00000157933_39 (sequence is synthesized)
gctgactcctctgtgtgtgaggcccttcatctaagtgattgtgtattcagtttaattctcattatatttctatactgaaagaagatttttaacgaagggaaaaacaacagcaataacatt

SEQ ID NO: 463979 - DNA, 120 bp, Artificial Sequence
  ENSG00000157933_40 (sequence is synthesized)
catatctctggagcagctaactcatacacgtaatgtctgcttttcgtacagaactagccaatgtaaaaacagttcacctgtaaatactttttcctttttcaccgttgtattatacatgta

SEQ ID NO: 463980 - DNA, 120 bp, Artificial Sequence
  ENSG00000157933_41 (sequence is synthesized)
tatgctgggtcctttttcagaaactcttttcttacctgagagttgtcttgttttctgggctgtttttaactgaggaaaaaaaaaatgctttcctgccggggggcaggggagacggagaaa

SEQ ID NO: 463981 - DNA, 120 bp, Artificial Sequence
  ENSG00000157933_42 (sequence is synthesized)
cccatgtgcgtttcccatgtgaccccctcctccctgtgggtctgagccccggccccccccacctcctcctccctgtgggtccgaaccccggcccccccaccccctcctccctgtgggtcc

SEQ ID NO: 463982 - DNA, 80 bp, Artificial Sequence
  ENSG00000157933_43 (sequence is synthesized)
gaaccccggcccccccaccccctcctccctgtgggtccgatccccggccccccccaccccctcctccctgtgggtccgaa

SEQ ID NO: 463983 - DNA, 120 bp, Artificial Sequence
  ENSG00000157933_44 (sequence is synthesized)
accccggcccccccacccctccctcagcccaccagggtccagggagatgttcgttctcgctttaagtcaggagtcacaaatgacttttttttttcaattaaggaaaaagctccatctcta

SEQ ID NO: 463984 - DNA, 120 bp, Artificial Sequence
  ENSG00000157933_45 (sequence is synthesized)
cctttaacatcacccagacccccgcccctgcccgtgccccacgctgctgctaacgacagtatgatgcttactctgctactcggaaactatttttatgtaattaatgtatgctttcttgtt

SEQ ID NO: 463985 - DNA, 120 bp, Artificial Sequence
  ENSG00000157933_46 (sequence is synthesized)
tataaatgcctgatttaaaaagaaaagagcttggcatatttatctatttcgctgtgtacctgttagtccttccccgaccccgaaacagatgacattgtacaataaaggactttgagagga

SEQ ID NO: 463986 - DNA, 120 bp, Artificial Sequence
  ENSG00000157933_47 (sequence is synthesized)
gtgtctggccttcgcaagagacccagcaagcagaaaacgcttacgggttcttagggaactgtaagcttgacttgaagattcggagctgggaaagtctttcctgtttaacaccttcagagg

SEQ ID NO: 463987 - DNA, 120 bp, Artificial Sequence
  ENSG00000157933_48 (sequence is synthesized)
agcggctgtgcctgagcctctggcctgtcggcagtgcagtggcagcatgaggggcagacagtcttcctccagatgccccctcatgtcacggggttacagaggaagcctccgcttctgtcc

SEQ ID NO: 463988 - DNA, 120 bp, Artificial Sequence
  ENSG00000157933_49 (sequence is synthesized)
gcccggccagcttcctgctgctgtatcttggaagaccatgtgggctgcatgggtgcttggtctcctctgagcctccggcctccataagacccaaaacagatgacacctcttcccagtccc

SEQ ID NO: 463989 - DNA, 120 bp, Artificial Sequence
  ENSG00000157954_0 (sequence is synthesized)
tcgaggccgtgcgtcgcgggggcggggccgcgcaggcgtaccgggtgccccggctctggagcataaacaagagcggggacgggatgaggcggcggttgatcccagggtggcgagtggcgg

SEQ ID NO: 463990 - DNA, 80 bp, Artificial Sequence
  ENSG00000157954_1 (sequence is synthesized)
gagtgcagcctgacccgccctcgcgcgcgcgccctccccggccgggcccactcgccgcgcgcccagccatgaacctggcg

SEQ ID NO: 463991 - DNA, 120 bp, Artificial Sequence
  ENSG00000157954_2 (sequence is synthesized)
agagcggggaggccggcgccggccagctgctcttcgccaacttcaaccaggacaacacgtccctagctgttggtagtaagtccggttataaatttttctccctttcttctgtggataagc

SEQ ID NO: 463992 - DNA, 120 bp, Artificial Sequence
  ENSG00000157954_3 (sequence is synthesized)
tggaacagatctatgaatgcaccgatacggaagatgtgtgcattgtagagagattgttctccagcagcctagtggccatcgtcagccttaaagcaccaaggaagctaaaggtttgccact

SEQ ID NO: 463993 - DNA, 120 bp, Artificial Sequence
  ENSG00000157954_4 (sequence is synthesized)
ttaagaagggaactgagatctgcaactacagctactccaacacgattctggctgtgaagctcaacaggcagaggctgatagtatgcctggaggagtccctgtacatccacaacattcggg

SEQ ID NO: 463994 - DNA, 120 bp, Artificial Sequence
  ENSG00000157954_5 (sequence is synthesized)
acatgaaggtgctgcatacgatcagggagacgcctccaaaccctgcaggcctgtgtgcgctgtcaatcaacaacgacaactgctacttggcgtacccagggagcgcgaccatcggagagg

SEQ ID NO: 463995 - DNA, 120 bp, Artificial Sequence
  ENSG00000157954_6 (sequence is synthesized)
tgcaggtcttcgataccattaatttgagagctgcaaacatgattccggctcacgacagtcctttagcggcactggcctttgacgcaagtggaactaaacttgccacggcttcggagaagg

SEQ ID NO: 463996 - DNA, 120 bp, Artificial Sequence
  ENSG00000157954_7 (sequence is synthesized)
ggaccgtgattagggtattttccattccagaaggacaaaaactctttgagtttcggagaggagtaaagaggtgcgtgagcatctgctccctggccttcagcatggacggcatgttcctct

SEQ ID NO: 463997 - DNA, 120 bp, Artificial Sequence
  ENSG00000157954_8 (sequence is synthesized)
ccaccacctggaccgggtacttcgggaaagtgctcatggcctccaccagctacctgccttcccaagtgacagaaatgttcaaccagggcagagccttcgccacggtccgcctgccattct

SEQ ID NO: 463998 - DNA, 120 bp, Artificial Sequence
  ENSG00000157954_9 (sequence is synthesized)
gcggccacaaaaacatctgctcgctagccacaattcagaagatcccgcggttgttggtgggtgccgccgacgggtacctgtacatgtacaacctggacccccaggagggcggcgagtgtg

SEQ ID NO: 463999 - DNA, 120 bp, Artificial Sequence
  ENSG00000157954_10 (sequence is synthesized)
ccctgatgaagcagcaccggctggacggcagtctggaaacgaccaatgagatcttggactctgcctctcacgactgccccttagtcactcagacatacggcgcagctgcaggaaaaggta

SEQ ID NO: 464000 - DNA, 120 bp, Artificial Sequence
  ENSG00000157954_11 (sequence is synthesized)
cttacgtgccttcatccccaacgagacttgcctacacagacgacctgggtgctgtgggtggcgcctgcctggaggacgaggccagcgccctgcgcctggatgaggacagcgagcacccgc

SEQ ID NO: 464001 - DNA, 120 bp, Artificial Sequence
  ENSG00000157954_12 (sequence is synthesized)
ccatgattcttcggactgactgaacttgacctgtgacctctgacccggggagcagagaacactggcttcacagaggactttgtgcattgctgctatgaactttgacctgagtcgggggag

SEQ ID NO: 464002 - DNA, 120 bp, Artificial Sequence
  ENSG00000157954_13 (sequence is synthesized)
aggatggcagagactttattaaaaaaaaaaaaagattgtagtggtagtctaactccataacgctgaggaaatacatcattttcacttcagtggcttttaaatcctgcttatgaattttag

SEQ ID NO: 464003 - DNA, 120 bp, Artificial Sequence
  ENSG00000157954_14 (sequence is synthesized)
ctttttgtttgtttgttttctctttttgccaaaattaactgtttggtgaagcccgcaaaacctcctcgctttgcatgcatgaacgtgccaagccagcataggggagctagaagccacttt

SEQ ID NO: 464004 - DNA, 120 bp, Artificial Sequence
  ENSG00000157954_15 (sequence is synthesized)
ccagccacctgccgttgggttttttcatatctgtacataatgccgagtgcgtaaggaaaccgtggcgtcgcgcacagtgggtctgcttgtcaaggccagttctgcagtgacaggcccagg

SEQ ID NO: 464005 - DNA, 120 bp, Artificial Sequence
  ENSG00000157954_16 (sequence is synthesized)
ggctgcccaccaggtgtgctgggcagacttcagctgggacagaagtccgatctccctagggccccacctggaccattttccctccgttttattttgttaattaaattctttccaaattgg

SEQ ID NO: 464006 - DNA, 81 bp, Artificial Sequence
  ENSG00000157954_17 (sequence is synthesized)
aggctgatagtatgcctggaggagtccctgtacatccacaacattcgggacatgaaggtgctgcatacgatcagggagacg

SEQ ID NO: 464007 - DNA, 120 bp, Artificial Sequence
  ENSG00000157954_18 (sequence is synthesized)
ctttagactttccatgtaaaactcttcatgtaaaaacgtgtgcagatagacgagattaaagttgccacggcgtgatgaatgcctggcgtcctgtgtggtgagtggtgtgctggctctgtt

SEQ ID NO: 464008 - DNA, 120 bp, Artificial Sequence
  ENSG00000157954_19 (sequence is synthesized)
tgaaaggggcatcaagagcagctggtcttggccgtcgcgctgttgtctggttagttccaaccctggtttctgaaagtatcaccttggaaggcttatgttagaggacttttttggcttttt

SEQ ID NO: 464009 - DNA, 120 bp, Artificial Sequence
  ENSG00000157954_20 (sequence is synthesized)
gaaattgcagtgaaccagttaataagtgggagaggatcacttgaatctgaaatggaaatatcaaggactacatttttccagtggataccacagcttgtgggaagtccctagctgttggta

SEQ ID NO: 464010 - DNA, 120 bp, Artificial Sequence
  ENSG00000157954_21 (sequence is synthesized)
tctgatcttgttttccctgtggatattggaggacagcgaggttctttctgatactaaaaacctttctttcaggcagcaaatgaacttgaaaggttgcctggactcgctggagcaaaggaa

SEQ ID NO: 464011 - DNA, 120 bp, Artificial Sequence
  ENSG00000157954_22 (sequence is synthesized)
agcgattttgtttgtataattaaatgatctgttcttctacttcactcttcctgttgaaaaactgtgtgatttttttttttttttaagtaaagtttgtagctcctcccatgcccaggaaag

SEQ ID NO: 464012 - DNA, 120 bp, Artificial Sequence
  ENSG00000157954_23 (sequence is synthesized)
cacagaactcaagtgtggtggccgtctgagctgtcctttcgctggccccgctgtccgcaggggcttcctacctgtgtgagaggtcgtagcgggagacagcaacagagagtaggcggctgg

SEQ ID NO: 464013 - DNA, 120 bp, Artificial Sequence
  ENSG00000157954_24 (sequence is synthesized)
gccacgtccttcacagggcgtcatgtgcctttctattttcatcttagaaaatttcctcagcaaaccgatgagagattgtggttgcaagcttcagtatttgcctcgcttcccttccctttt

SEQ ID NO: 464014 - DNA, 120 bp, Artificial Sequence
  ENSG00000157954_25 (sequence is synthesized)
catatttacagaattaaaacaacctcaagtacctcagactctgcattccaaaccaaggcacccagcagccaaagtgtcgagggcatttaagtggcattaatggcaggagagatggtttta

SEQ ID NO: 464015 - DNA, 120 bp, Artificial Sequence
  ENSG00000157954_26 (sequence is synthesized)
gaatctatggagtggtggaagttacggatagaagggaaaaggcaaaaactatttaccctgcctttgcaggctggggtttttgaaccgaggaaggctgggacgcctgtttccagatggttg

SEQ ID NO: 464016 - DNA, 120 bp, Artificial Sequence
  ENSG00000157954_27 (sequence is synthesized)
tcatggtcacgctgggcgaagagctggaggggagttgtcccctcagctgagcggctgcggtgaaatgccccagtgttcctgggttggctttacggcaaactaaatgcaggggacgctgga

SEQ ID NO: 464017 - DNA, 120 bp, Artificial Sequence
  ENSG00000157954_28 (sequence is synthesized)
gtccgactcacctacaccggcttcctcccagccgctggtgtgcggcacacacaacatctgcattaggcagaggtgcaagtgggctgattgaacttttccttcaaaacctgcttgtctgtc

SEQ ID NO: 464018 - DNA, 120 bp, Artificial Sequence
  ENSG00000157954_29 (sequence is synthesized)
ctggacctttgatgaaatgggatcccggtcacgcaggctgagacagtggggaccgccgaggccagagtgggctatgcttgagcagggatgagaagggccgcggcagcacgcagccttgac

SEQ ID NO: 464019 - DNA, 120 bp, Artificial Sequence
  ENSG00000157954_30 (sequence is synthesized)
ccacgcctgcgtcttgtggtgcaaggccagagggctctctctagaacctgaccgtgcactccatctcctgggagccacttttggcaagagtgagtgtggggggaaaaagtgtgcacaaga

SEQ ID NO: 464020 - DNA, 120 bp, Artificial Sequence
  ENSG00000157954_31 (sequence is synthesized)
gatacggaaccctgagctagggtttcctgtcaccaaagagtgagctgcatttccagttctgcgttaaagtatcgtttgttctggtgcctgcctgtggtggtgatttggagactcaaattt

SEQ ID NO: 464021 - DNA, 120 bp, Artificial Sequence
  ENSG00000157954_32 (sequence is synthesized)
cctttgccaggtctcttttgtctttctttgggattggtagtatagaagatgctgggaattgtcttcctcgctcagcctcggcttcccgcactgtaagatgaggcagttgcagaggaggcc

SEQ ID NO: 464022 - DNA, 120 bp, Artificial Sequence
  ENSG00000157954_33 (sequence is synthesized)
tcggacgtcctgtgaccctcggcccacactcccccttgggtggccctggcagggctggctaggtgcgttccctgcagaccacgggaagccctgtgcttgcctgggtcagggctaagctgt

SEQ ID NO: 464023 - DNA, 120 bp, Artificial Sequence
  ENSG00000157954_34 (sequence is synthesized)
gcgccctagaggagggaggaggactgcagattcttggtcgagaagaatgaagaggatttctgtgtttgctgagcagccattgtggagggttacccgcctccactttcccgttgcccattt

SEQ ID NO: 464024 - DNA, 120 bp, Artificial Sequence
  ENSG00000157954_35 (sequence is synthesized)
cactgccaccagctcctcttcctctgctcgaacctatgagtcccagcctcactggcggcctcagacatgctcaggagtgacggggacagagggaggccgctgagttgcccgttagaactc

SEQ ID NO: 464025 - DNA, 120 bp, Artificial Sequence
  ENSG00000157954_36 (sequence is synthesized)
ttactgctgcgccagtgacccaggtggagagggaccctgaaccaaacagaacgtgtgctaattttccgaactccaaactgtacactcatattcatttttaaattgtatttttccaaactt

SEQ ID NO: 464026 - DNA, 120 bp, Artificial Sequence
  ENSG00000157954_37 (sequence is synthesized)
caaaaaggacgatgagcgtgggggataggaaacaaaacctgtaaacgttgtgaatgggctcagtggactctgggaccaaaccttctgtaatctctaaaacaatgggaccaagagctggat

SEQ ID NO: 464027 - DNA, 120 bp, Artificial Sequence
  ENSG00000157954_38 (sequence is synthesized)
ggaacctggagtcaaaaagaactgcttcagtccccgctgtaccgcctgcctagctgtgggagcaggcagggcgcctgggagcctgcgttttctggaccgttccatgggactcatccctac

SEQ ID NO: 464028 - DNA, 120 bp, Artificial Sequence
  ENSG00000157954_39 (sequence is synthesized)
ctcacagggctgttgtgaggtgttgtgtgactgcgtgtcctgcaaacgcccagctcggtgcccagccagcggtgggcacccaataaacgctacaacataaatgtgtcttctgcaattaaa

SEQ ID NO: 464029 - DNA, 120 bp, Artificial Sequence
  ENSG00000157954_40 (sequence is synthesized)
agctgcggtcccggagcgggagaggtggtggagagggggctgctttcaccctcttgcggggaggccccctggcttcagacttaactacttctcgcaaagttggggccgaactttggggct

SEQ ID NO: 464030 - DNA, 120 bp, Artificial Sequence
  ENSG00000157954_41 (sequence is synthesized)
tgacttgtcttggccgcctgtggagcgctggagaagtgaaaggggcatcaagagcagctggtcttggccgtcgcgctgttgtctggtccctagctgttggtagtaagtccggttataaat

SEQ ID NO: 464031 - DNA, 120 bp, Artificial Sequence
  ENSG00000157954_42 (sequence is synthesized)
tgtacatccacaacattcgggacatgaaggtgctgcatacgatcagggagacgcctccaaaccctgcaggttccgcagatgagacagattttaaaagtattgatcccaaaccaagctgcc

SEQ ID NO: 464032 - DNA, 120 bp, Artificial Sequence
  ENSG00000157954_43 (sequence is synthesized)
acagaactgactgaaaggaacctttgtctttcgtgtgaatgctcgtgaggggccatccttagagtggaaatgctcctgaggctccagcgaatcaagaccctcagacccccgggctgtccc

SEQ ID NO: 464033 - DNA, 120 bp, Artificial Sequence
  ENSG00000157954_44 (sequence is synthesized)
caccccatgaccacatgttccgcaggcaccctcagcgctgtgccctgcgtgtcgcccaggcaggtgtttgtttttgagcgcagattctgcctgtggccatagccatgtggagatgttcac

SEQ ID NO: 464034 - DNA, 120 bp, Artificial Sequence
  ENSG00000157954_45 (sequence is synthesized)
atttgtggcagacgcttgcatctgttccttttgaatgaaggtcgcttgctgttgtcagaaagaaggtttatgacagctttctggtaaaagcaactgaaaagacactgaatggatgctgtg

SEQ ID NO: 464035 - DNA, 120 bp, Artificial Sequence
  ENSG00000157954_46 (sequence is synthesized)
ttctttaaaaatgatgcaaaaccctttgtccccacttgctgccgggatgagaggtaagcacggacccgcccaccctctgacatcgttagccagtgaagaccccggagctggccatggagc

SEQ ID NO: 464036 - DNA, 120 bp, Artificial Sequence
  ENSG00000157954_47 (sequence is synthesized)
gagcacctccgcatccaggctcggcagtgaggaggatgggccccagcagatgagcttctcccacaggcagcacgcagggtagacagagccctcgcgtagggcatggagggcccaggtgga

SEQ ID NO: 464037 - DNA, 120 bp, Artificial Sequence
  ENSG00000157954_48 (sequence is synthesized)
catccttttgtcagtgaagatggcctctcctcaggttcccctcacgacaaaagcgtttgtgatcagacagcccactagggtgaatggctcgtctcttaccttcccacgggtaagcagaga

SEQ ID NO: 464038 - DNA, 120 bp, Artificial Sequence
  ENSG00000157954_49 (sequence is synthesized)
cacgggtaagcagagacatggacggcttccacaagaatttattatcgcaatgaatgtgtagcatgaggggggtcttatcttttaagaggggcttactctgttgcccaggctgcagtgcag

SEQ ID NO: 464039 - DNA, 120 bp, Artificial Sequence
  ENSG00000157954_50 (sequence is synthesized)
cctcagcctcctgagtacctgggactataggcgtgcaccatgcctggctaatttttaaaattttgtagagacagaatttcgctgtgttgcccaggctggtctggaattcctgggctcaag

SEQ ID NO: 464040 - DNA, 120 bp, Artificial Sequence
  ENSG00000157954_51 (sequence is synthesized)
gctgtgttgcccaggctggtctggaattcctgggctcaagtgatctgccggtgagccaccgcgcccagcctgtctttaaaaattttaaaaagaacatcccactcagaccagcgttaacaa

SEQ ID NO: 464041 - DNA, 120 bp, Artificial Sequence
  ENSG00000157954_52 (sequence is synthesized)
taacatactttaggtggtcaaaaataataaattttgttgggtatatttcatcacaatttttaaaaagacaaatggagcatgccccgccctcccccccaaaaaagatgaatagcaacacaa

SEQ ID NO: 464042 - DNA, 120 bp, Artificial Sequence
  ENSG00000157954_53 (sequence is synthesized)
acaggatacgggaaaataacattttggggtctatactcaaggtttttggagacttctattacagagacctagcaggggtcatcagttaggccctagacgtcctcacacccttgcaaaggg

SEQ ID NO: 464043 - DNA, 120 bp, Artificial Sequence
  ENSG00000157954_54 (sequence is synthesized)
gatgtgtggtcagctgccacgtcttgtccgtggccaaaggctgtagctcctccctgaagcctgagcacccctcccccgacacctcccagaggaagctccgtgatgcccctggggccctga

SEQ ID NO: 464044 - DNA, 120 bp, Artificial Sequence
  ENSG00000157954_55 (sequence is synthesized)
gtgtctgcttataaccaaccctgtttaattttcctgtgaagaatggagacttttgctgtcggctccagagctgtgcgtctgtgtgagtagggggtggccgtccccccagggagggtgcag

SEQ ID NO: 464045 - DNA, 120 bp, Artificial Sequence
  ENSG00000157954_56 (sequence is synthesized)
gaatggattctggaggttgtatttggatttcagttttatgttatctatgaacaaacaagtagaacccccaggagaattccacacgagcatttctagcccggctgggtcaccgggtaagat

SEQ ID NO: 464046 - DNA, 120 bp, Artificial Sequence
  ENSG00000157954_57 (sequence is synthesized)
tgcctttcctgctcgaatagctctctaaagtgtggctttttcctgaagaggagcactgtggtgtccctggcatcctgacttggctcagcaatacaaccgctgcacttttttgtttgtttg

SEQ ID NO: 464047 - DNA, 87 bp, Artificial Sequence
  ENSG00000157954_58 (sequence is synthesized)
gagtgcagtggtgcagtccttgatcctcctgcctcagcctcccgaggagttacagtcatgcaacaccacacccagctaattttttat

SEQ ID NO: 464048 - DNA, 120 bp, Artificial Sequence
  ENSG00000157954_59 (sequence is synthesized)
ttgatcctcctgcctcagcctcccgaggagttacagtcatgcaacaccacacccagctaattttttatttttgtagagatggagtcttgctgggttgcccaggctggcctcaaactcctg

SEQ ID NO: 464049 - DNA, 120 bp, Artificial Sequence
  ENSG00000157954_60 (sequence is synthesized)
cctaaagtgctgggactacaggcgggtgccccgcgcccagccccactgctctcttctcagtagcagagtaggtctggctcattctgcttctggatctgctgcggcgttcagagcagtgct

SEQ ID NO: 464050 - DNA, 120 bp, Artificial Sequence
  ENSG00000157954_61 (sequence is synthesized)
aaccttagggataaattgctttgctttttctaaagttggagcagcatttccttggatgcccagccccagtaaatcaagtgggtttggcatttgtttggaccgtaatggtgttttaggaac

SEQ ID NO: 464051 - DNA, 120 bp, Artificial Sequence
  ENSG00000157954_62 (sequence is synthesized)
agctaattggcacttgcggaccaagtgtcagccctggggcgtgggcggtcactgtgcggtggccactctttattggtgtccctttttcagagagctgcaaacatgattccggctcacgac

SEQ ID NO: 464052 - DNA, 120 bp, Artificial Sequence
  ENSG00000157954_63 (sequence is synthesized)
agtcctttagcggcactggcctttgacgcaagtggaactaaacttgccacggcttcggagaaggtgagtctgcttttccccgggggagcactggtgccaaggcgtccacagactttttca

SEQ ID NO: 464053 - DNA, 120 bp, Artificial Sequence
  ENSG00000157954_64 (sequence is synthesized)
gttctgttcacacagccaccttagaggcaaggtcctatacttaccagctccgggagaagcaaagacagccacccacttgtcaggccacaggcgtgtactgcccgagagtgagcggagctt

SEQ ID NO: 464054 - DNA, 120 bp, Artificial Sequence
  ENSG00000157954_65 (sequence is synthesized)
gcagtgtgccactgggacgggagagctggtccacatttgtagtagaaaatacagaaatgtccagaggagacagaagtgccgtgtgtaaccacaccgctcacccagtgtgtttctaaatga

SEQ ID NO: 464055 - DNA, 120 bp, Artificial Sequence
  ENSG00000157954_66 (sequence is synthesized)
tgaaactaccacataacagtaaagaacccagacagtgatgaaatgtgaaaaagcaaagacagaattctatccagccagtctgaacacatttcagtgtatttcattttctctttagtcaac

SEQ ID NO: 464056 - DNA, 120 bp, Artificial Sequence
  ENSG00000157954_67 (sequence is synthesized)
aaaattgggatcctactatgggtataatttatcctttttcactctgcatgacatttgtctaagttcaaaaacacttgtaatggccgcgcagtatttagttgtgattcatgtcaacatcac

SEQ ID NO: 464057 - DNA, 120 bp, Artificial Sequence
  ENSG00000157954_68 (sequence is synthesized)
ccttttgggactttgtttctaatatgttgctgccgtaggtagtagtgtatttaagtcatgtatcaatgttttatatgtatttctaactatgaattcaagagattccagtaagaagaatgt

SEQ ID NO: 464058 - DNA, 120 bp, Artificial Sequence
  ENSG00000157954_69 (sequence is synthesized)
ctggctttaaaggagatggcctctaaatgtccccgtgtacctgtgaccgcgtggcgaggctccctggcccccaggagactgaaggctccttgttctcttcctcatttggactgtgcctct

SEQ ID NO: 464059 - DNA, 120 bp, Artificial Sequence
  ENSG00000157954_70 (sequence is synthesized)
cttttcgtttcagttcctcttttcttgaaagttgcgtcttccattcttctgtcttgaggtcgcgtctgttctcccgcctccgttttctccgctcttcattggccaccgatgacctttact

SEQ ID NO: 464060 - DNA, 120 bp, Artificial Sequence
  ENSG00000157954_71 (sequence is synthesized)
ttgatttggatatgattttgcttctcattgaaatcctaaaatagcctcccctttcaagccatctctcccctcaaactattgaccagagaagatacaataaaacgtcggctcacttcctta

SEQ ID NO: 464061 - DNA, 120 bp, Artificial Sequence
  ENSG00000157978_0 (sequence is synthesized)
cggagctggcgctgggaggggaggagcgcgcagcccgcgcgccgcagggccgggcggaaagtttttcctgacggagttttggctgcggcagcggcggcggcggccggagcgggccatgga

SEQ ID NO: 464062 - DNA, 120 bp, Artificial Sequence
  ENSG00000157978_1 (sequence is synthesized)
tggacgcgctcaagtcggcggggcgggcgctgatccggagccccagcttggccaagcagagctgggggggcggtggccggcaccgcaagctgcctgagaactggacagacacgcgggaga

SEQ ID NO: 464063 - DNA, 120 bp, Artificial Sequence
  ENSG00000157978_2 (sequence is synthesized)
cgctgctggaggggatgctgttcagcctcaagtacctgggcatgacgctagtggagcagcccaagggtgaggagctgtcggccgccgccatcaagaggatcgtggctacagctaaggcca

SEQ ID NO: 464064 - DNA, 120 bp, Artificial Sequence
  ENSG00000157978_3 (sequence is synthesized)
gtgggaagaagctgcagaaggtgactctgaaggtgtcgccacggggaattatcctgacagacaacctcaccaaccagctcattgagaacgtgtccatatacaggatctcctattgcacag

SEQ ID NO: 464065 - DNA, 120 bp, Artificial Sequence
  ENSG00000157978_4 (sequence is synthesized)
cagacaagatgcacgacaaggtgtttgcatacatcgcccagagccagcacaaccagagcctcgagtgccacgccttcctctgcaccaagcggaagatggcacaggctgttaccctcaccg

SEQ ID NO: 464066 - DNA, 120 bp, Artificial Sequence
  ENSG00000157978_5 (sequence is synthesized)
tagcccaggccttcaaagtcgcctttgagttttggcaggtgtccaaggaagagaaagagaagagggacaaagccagccaagagggaggggacgtcctgggggcccgccaagactgcaccc

SEQ ID NO: 464067 - DNA, 120 bp, Artificial Sequence
  ENSG00000157978_6 (sequence is synthesized)
cctccttgaagagcttggtcgccactgggaacctgctggacttagaggagacagctaaggccccgctgtccacggtcagcgccaacaccaccaacatggacgaggtgccgcggccacaag

SEQ ID NO: 464068 - DNA, 120 bp, Artificial Sequence
  ENSG00000157978_7 (sequence is synthesized)
ccttgagtggcagcagtgttgtctgggagctggatgatggcctggatgaagcgttttcgaggcttgcccagtctcggacaaaccctcaggtcctggacactggcctgacagcccaggaca

SEQ ID NO: 464069 - DNA, 120 bp, Artificial Sequence
  ENSG00000157978_8 (sequence is synthesized)
tgcattacgcccagtgcctctcgcctgtcgactgggacaagcctgacagcagcggcacagagcaggatgacctcttcagcttctgagggcccggggccagccggacacaagcggccctga

SEQ ID NO: 464070 - DNA, 120 bp, Artificial Sequence
  ENSG00000157978_9 (sequence is synthesized)
cacgtgatggaccaaagccacctgctgcgggggagccagttctggggcccgcctgccacctctcccagccctcagcattgtcagcctgaagatcagagctgcagccagtcaggcagggga

SEQ ID NO: 464071 - DNA, 120 bp, Artificial Sequence
  ENSG00000157978_10 (sequence is synthesized)
gagatttttcttttaagccctgctctttctctgagaaccaaaagatgccttgaatatttattcagtgacttctggcttatgctcagaagccagtctgcgtcaggcacgtctcctgctgcg

SEQ ID NO: 464072 - DNA, 120 bp, Artificial Sequence
  ENSG00000157978_11 (sequence is synthesized)
tgacatgtgcagtgctgtaatcggctcccgcttgctctcctggagcaagctctgccctggctgtgggtatcaggactgtgaccaaagcatttctagtcccttctctctttctaaggaccc

SEQ ID NO: 464073 - DNA, 120 bp, Artificial Sequence
  ENSG00000157978_12 (sequence is synthesized)
caccccccagcacaggagagcacccacagccgcagaaggggaatgtgtcctcctgctctgcttcctcagggcccagcaggcgggggtttgagccctggaccccaggctcttagagactaa

SEQ ID NO: 464074 - DNA, 120 bp, Artificial Sequence
  ENSG00000157978_13 (sequence is synthesized)
ggggcagctcctgaccaaagacgatacagcttggcactttaaagcattaacagcaggtgtgaccctgagggctcctccatggtgctgcattgagtccagctttccttctgcccttcctcc

SEQ ID NO: 464075 - DNA, 120 bp, Artificial Sequence
  ENSG00000157978_14 (sequence is synthesized)
aggagaaggggcccaaggtccccgtggatggtctccacctgtgcttggaaccagtgtaactggctgctccctgctcccagggactgacacggggatcatctctgtgaccgccctccgtcg

SEQ ID NO: 464076 - DNA, 120 bp, Artificial Sequence
  ENSG00000157978_15 (sequence is synthesized)
ggcccctgcctgccttctcccctccacgcaaggctgtgctcttcctctggtttctgtgtgtccgtttgagtgtctgcgccccgcctccccatacttcctgggatgatgtgtgaaacctga

SEQ ID NO: 464077 - DNA, 120 bp, Artificial Sequence
  ENSG00000157978_16 (sequence is synthesized)
cacctagatttatttggaaatattctatgaccactttacagatgaggaaacaggcctcaagcgtggaggggtagagtgaagagtagaacccaggtctgatgccaaagctgctttcttctc

SEQ ID NO: 464078 - DNA, 120 bp, Artificial Sequence
  ENSG00000157978_17 (sequence is synthesized)
tgcctcctcctcacgcaactcacacctccttttcttctagctttgttgtcctcccaggaaccaaaaaaccccagctattttctgaccaaaatgtgtttcataacaaaccatctggtgcct

SEQ ID NO: 464079 - DNA, 120 bp, Artificial Sequence
  ENSG00000157978_18 (sequence is synthesized)
ttccacacagaactggcaggagcctcgtgtcctgctagctgtctctcttgttgatttccgtgaaaatgcaagtgtttgaagtctgctcattccgagggtgaaacaaaatccaaccctgtc

SEQ ID NO: 464080 - DNA, 120 bp, Artificial Sequence
  ENSG00000157978_19 (sequence is synthesized)
agaatcatgctgttctctttgctgacactgtgaccctgggtcgggacagaccagcagcaatctgtctttagaatcgctttccttcctccccttttgcccccgtggggctcccggcatcct

SEQ ID NO: 464081 - DNA, 120 bp, Artificial Sequence
  ENSG00000157978_20 (sequence is synthesized)
gaaagccagcaaagcctccagcatcttttccatcctgaggtgcctcccagtggcctggcttgtcggagcaagtttcatcagccctagggaaaacacggccctcctgggaacctccttacc

SEQ ID NO: 464082 - DNA, 120 bp, Artificial Sequence
  ENSG00000157978_21 (sequence is synthesized)
tggagtaaccggacaccttagacggaggtgcctgagggtggggtgggatttgcagggtcattatcagaacatgaggataacttccttgcccctgctctgtagccacctccttggcaccgg

SEQ ID NO: 464083 - DNA, 120 bp, Artificial Sequence
  ENSG00000157978_22 (sequence is synthesized)
cctctatttgtcataaggcggcgtgggcgaggcctgacacaggccagccttggcacgaggggggccaggggttctgagaagcgctgccctgtgagagccacgctggccttcgtctccatc

SEQ ID NO: 464084 - DNA, 120 bp, Artificial Sequence
  ENSG00000157978_23 (sequence is synthesized)
tctggttgacgggctgtccgtgtgcctcctgtgtgtctgcagacaagtcttgctgtgctttatttgtgaaactttaatgaggaaaaaacaaataataaatgttctcgttttgaaactcaa

SEQ ID NO: 464085 - DNA, 120 bp, Artificial Sequence
  ENSG00000157978_24 (sequence is synthesized)
ctcgagcctgttctctgctgtttgggaaccacccttgccacttgcccatcctcaccagaaggccatggagggacctcacctgtcgcttttctgctgaggctgtgggactcctggcatcag

SEQ ID NO: 464086 - DNA, 120 bp, Artificial Sequence
  ENSG00000157978_25 (sequence is synthesized)
ttggctcttgcacttcctggctctctggacttggttatgtgattgagcctccatggcctccgtgtctttgtctgtcaatgggtttgattaaagcgttgacctcataggttcttaggagga

SEQ ID NO: 464087 - DNA, 120 bp, Artificial Sequence
  ENSG00000157978_26 (sequence is synthesized)
aggattaatgagaacattttatgtaaagctgcttacatggagccttggtatgtgccggaaagctttagccctttattaaaagtgacagcagacccagcacggtggctcatgcctgtaatc

SEQ ID NO: 464088 - DNA, 74 bp, Artificial Sequence
  ENSG00000157978_27 (sequence is synthesized)
ttgggaggctgaggcgggcagatcacttggggtcaggagttcgaggtgcagaggttgcagtaagctgagctcgc

SEQ ID NO: 464089 - DNA, 120 bp, Artificial Sequence
  ENSG00000157978_28 (sequence is synthesized)
cagtctcaaaaaaaaaaaaaaaaaaagagtggcagtagtggtgggggagacccccatcccccttgctggggtttcctaggaaagaaggctggtgagagctgttgctggtggtgggccctg

SEQ ID NO: 464090 - DNA, 120 bp, Artificial Sequence
  ENSG00000157978_29 (sequence is synthesized)
gcagcagtgttgtctgggtgagtggttgtgtggccagcagatcggtgatcctcagcctgacctctgggtgagcctggggctgctccagggaccaggccctgggacccgtgacttgtgggc

SEQ ID NO: 464091 - DNA, 120 bp, Artificial Sequence
  ENSG00000157978_30 (sequence is synthesized)
ctctgggaggaccagacccagcccggtagtgcccaggcgcaggataggggatgaacaatgtcccttttgaacctgaggctgcatccccaacaggcttggctcccagcacagctgtctcct

SEQ ID NO: 464092 - DNA, 120 bp, Artificial Sequence
  ENSG00000157978_31 (sequence is synthesized)
cacaatgcttggcctcttggcctgagcgtccacggctctgcccaccacaagaccagccaaaggcgcccttgttcttggtgtggcagagctcgctcctaccacccctccccctcagccgcc

SEQ ID NO: 464093 - DNA, 120 bp, Artificial Sequence
  ENSG00000157978_32 (sequence is synthesized)
tgaatgaggacccagagacttgggcagtcaccagcttggtccctgactccctcagggactcagggcaagccccctgacctctctgtctcagctttttcatctcagtaagggtgatgacct

SEQ ID NO: 464094 - DNA, 120 bp, Artificial Sequence
  ENSG00000157978_33 (sequence is synthesized)
ctgccaacggaatctccccgaggaacctgaaatttaattttaatttttcatttggaaataatttcagactgtgttacaaaattagtacagagaattcctgttcacccgtcatccagattc

SEQ ID NO: 464095 - DNA, 120 bp, Artificial Sequence
  ENSG00000157978_34 (sequence is synthesized)
cccaattgttaacatcttgcatgaccacattacactggtcagaatcaggaaacaaacacgatactgtgctgttatataatctatagaacttacacatttctccaggtgccccttcagtgt

SEQ ID NO: 464096 - DNA, 120 bp, Artificial Sequence
  ENSG00000157978_35 (sequence is synthesized)
tggcttggcttttggaagtaaatgaaggcaagaaaactcccttccccaccctcttccttttggaatttgaaagccatagaagtcatcaggtccaatgccctcctcttattgaaggaaaag

SEQ ID NO: 464097 - DNA, 120 bp, Artificial Sequence
  ENSG00000157978_36 (sequence is synthesized)
cctctcccacgtctccagctttgggtccttgggctgagatgctggcgatgcacccaggcaggaggcctgcctgaggccgtgcctccaggcgcccaccctgagcttgtgtcctgagtccct

SEQ ID NO: 464098 - DNA, 120 bp, Artificial Sequence
  ENSG00000157978_37 (sequence is synthesized)
tggcagccttgctctgggtggggggctgtctggtgtgggaggcaggacccaaaggtgaccattacttaagaagagggtgaaatctctgggaaccccaagtgggtgccgagagctaagggg

SEQ ID NO: 464099 - DNA, 120 bp, Artificial Sequence
  ENSG00000157978_38 (sequence is synthesized)
ctggcttgtgactgtgagcaggtcccttcaccgctcagagtctcggttttcccatctgaaaaatgggaacagccgtctccctccccaaaggtgcttgtgaggattaactgacatccgaaa

SEQ ID NO: 464100 - DNA, 120 bp, Artificial Sequence
  ENSG00000157978_39 (sequence is synthesized)
ggtttctttcctcccggctggaaacctgaaactgccccttgaggttggccaccgctaatcacccctgcccggtgattgctggggacagagtgctggggtctgaggctccaacatgttgtg

SEQ ID NO: 464101 - DNA, 80 bp, Artificial Sequence
  ENSG00000157985_0 (sequence is synthesized)
cggcgcgccgggcggcgcagtacgcagcgcgcggacccacgccacggccaggagcccagagcagcgcggccacactgccc

SEQ ID NO: 464102 - DNA, 120 bp, Artificial Sequence
  ENSG00000157985_1 (sequence is synthesized)
caggagcccagagcagcgcggccacactgcccaggggtcggccctcggccccggcgctcggagcgcggcggctgcctgggctttaatggctgctccgcggagcagcgcctagggctggaa

SEQ ID NO: 464103 - DNA, 120 bp, Artificial Sequence
  ENSG00000157985_2 (sequence is synthesized)
gctgctccgcggagcagcgcctagggctggaaggcggctgcggctcaggaagtcacccgagcaagcctccttcggggccggccgcacccgccgcggcgcgctccatgggggcgcgctccc

SEQ ID NO: 464104 - DNA, 80 bp, Artificial Sequence
  ENSG00000157985_3 (sequence is synthesized)
ctcgctcgccggccgcgcgtcccggccatgaactgagcccgcgggccagccccgcgcctgctccgcccgcgcctttcttc

SEQ ID NO: 464105 - DNA, 80 bp, Artificial Sequence
  ENSG00000157985_4 (sequence is synthesized)
gggcggcggcggcggggggcgcgcggctccgggcgcggcgcctgcaccatgaactaccagcagcagctggccaactcggc

SEQ ID NO: 464106 - DNA, 120 bp, Artificial Sequence
  ENSG00000157985_5 (sequence is synthesized)
ggccaactcggctgccatccgggccgagatccagcgcttcgagtcggtccaccccaacatctactccatctacgagctgctggagcgcgtggaggagccggtgctgcagaaccagatccg

SEQ ID NO: 464107 - DNA, 120 bp, Artificial Sequence
  ENSG00000157985_6 (sequence is synthesized)
ggagcacgtcatcgccatcgaagatgccttcgtgaacagccaggaatggacgctgagtcgatctgtcccggagctcaaagtgggaattgtgggtaacttggccagcggcaagtctgccct

SEQ ID NO: 464108 - DNA, 120 bp, Artificial Sequence
  ENSG00000157985_7 (sequence is synthesized)
ggtgcaccggtacctgacgggcacatatgtccaggaggagtctccggaaggtggcaggttcaagaaagagattgtcgttgatggacagagctatctgctgctgatcagagatgaaggggg

SEQ ID NO: 464109 - DNA, 120 bp, Artificial Sequence
  ENSG00000157985_8 (sequence is synthesized)
ccccccggaggcgcagtttgccatgtgggtggacgctgttatatttgtcttcagcttggaggatgaaataagtttccagaccgtttaccactactacagtcgaatggccaactatcggaa

SEQ ID NO: 464110 - DNA, 120 bp, Artificial Sequence
  ENSG00000157985_9 (sequence is synthesized)
cacgagcgagattcctctggttctggtgggaacccaggatgccataagttctgctaacccgagggtcatcgatgacgccagggcgaggaagctctccaacgacctgaaacggtgcacgta

SEQ ID NO: 464111 - DNA, 120 bp, Artificial Sequence
  ENSG00000157985_10 (sequence is synthesized)
ctacgagacgtgtgctacatacgggctgaatgtggagagggtcttccaggacgttgcccagaagattgttgccacaaggaagaagcagcagctgtccataggaccctgcaagtcgctacc

SEQ ID NO: 464112 - DNA, 120 bp, Artificial Sequence
  ENSG00000157985_11 (sequence is synthesized)
taattctcccagccattcctccgtctgttccgcgcaggtgtctgccgtgcacatcagccagacaagtaatggaggtgggagtttaagcgactattcctcctccgttccatcgactcccag

SEQ ID NO: 464113 - DNA, 120 bp, Artificial Sequence
  ENSG00000157985_12 (sequence is synthesized)
caccagccagaaggaacttcggatcgatgttcctcccactgccaacacgcccacgcccgttcgcaagcagtctaagcgccggtccaacctgttcacctctcggaaagggagcgacccaga

SEQ ID NO: 464114 - DNA, 120 bp, Artificial Sequence
  ENSG00000157985_13 (sequence is synthesized)
caaagagaagaaaggcctggagagtcgtgcggacagcattgggagcggccgagccatcccaattaaacagggcatgctgttgaagcgaagtggcaaatcgttgaataaagagtggaaaaa

SEQ ID NO: 464115 - DNA, 120 bp, Artificial Sequence
  ENSG00000157985_14 (sequence is synthesized)
gaaatatgtcaccctgtgtgacaatggcgtgctgacctatcatcccagtttacatgattacatgcagaatgttcatggtaaggagattgaccttctgagaaccactgtgaaagtcccagg

SEQ ID NO: 464116 - DNA, 120 bp, Artificial Sequence
  ENSG00000157985_15 (sequence is synthesized)
gaagaggccaccccgagccacgtcagcctgcgcacccatctccagccctaaaaccaatggcctatccaaggacatgagcagtttacacatctcacccaattcagacacagggctgggtga

SEQ ID NO: 464117 - DNA, 120 bp, Artificial Sequence
  ENSG00000157985_16 (sequence is synthesized)
ctccgtatgctccagccccagtatctccagcaccaccagccccaagctcgacccgcccccctcccctcacgccaacagaaagaagcaccgaaggaagaaaagcactagcaacttcaaagc

SEQ ID NO: 464118 - DNA, 120 bp, Artificial Sequence
  ENSG00000157985_17 (sequence is synthesized)
cgacggcctgtccggcactgctgaagaacaagaagaaaattttgagtttatcattgtgtccctcactggccaaacatggcactttgaagccacgacgtatgaggagcgggacgcctgggt

SEQ ID NO: 464119 - DNA, 120 bp, Artificial Sequence
  ENSG00000157985_18 (sequence is synthesized)
ccaagccatcgagagccagatcctggccagcctgcagtcgtgcgagagcagcaagaacaagtcccggctgacgagccagagcgaggccatggccctgcagtcgatccggaacatgcgcgg

SEQ ID NO: 464120 - DNA, 120 bp, Artificial Sequence
  ENSG00000157985_19 (sequence is synthesized)
gaactcccactgtgtggactgcgagacccagaatcccaactgggccagtttgaacttgggagccctcatgtgcatcgaatgctcagggatccaccggaatcttggcacccacctttcccg

SEQ ID NO: 464121 - DNA, 120 bp, Artificial Sequence
  ENSG00000157985_20 (sequence is synthesized)
agtccgatctctggacctggatgactggccagtcgagctcatcaaggtgatgtcatccatcgggaacgagctagccaacagcgtctgggaagagagcagccaggggcggacgaaaccatc

SEQ ID NO: 464122 - DNA, 120 bp, Artificial Sequence
  ENSG00000157985_21 (sequence is synthesized)
ggtagactccacaagggaagagaaggaacggtggatccgtgccaagtacgagcagaagctcttcctggccccgctgccctgcacggagctgtccctgggccagcacctgctgcgggccac

SEQ ID NO: 464123 - DNA, 120 bp, Artificial Sequence
  ENSG00000157985_22 (sequence is synthesized)
cctgctgctggcacacggctcccgggacgaggtgaacgagacctgcggggagggagacggccgcacggcgctgcatctggcctgccgcaaggggaatgtggtcctggcgcagctcctgat

SEQ ID NO: 464124 - DNA, 120 bp, Artificial Sequence
  ENSG00000157985_23 (sequence is synthesized)
ctggtacggagtggacgtcacggcccgagatgcccacgggaacacagctctggcctacgcccggcaggcctccagccaggagtgcatcgacgtgctgctgcagtacggctgccccgacga

SEQ ID NO: 464125 - DNA, 120 bp, Artificial Sequence
  ENSG00000157985_24 (sequence is synthesized)
gcgcttcgtgctcatggccacccctaacctgtccaggagaaacaataaccggaacaacagcagtgggagggtgcccaccatcatctgaggaacagccgtgcccgcctgctcgccgcacct

SEQ ID NO: 464126 - DNA, 120 bp, Artificial Sequence
  ENSG00000157985_25 (sequence is synthesized)
gggacgcggcagcctcgccgcattctcgctcagaagtcgcagcacgtgagtcccgtcgcatcccctccctcttcctggtggccacctccctcccgcccacccactctcaccccaaacaaa

SEQ ID NO: 464127 - DNA, 120 bp, Artificial Sequence
  ENSG00000157985_26 (sequence is synthesized)
atcacaaaacctggacatccctcaaggggcgaagaggcggccgggagactgcagaagtggctccttttcataaactcccctaaaccacacacaggagagagcgacgggcctcggcccttt

SEQ ID NO: 464128 - DNA, 120 bp, Artificial Sequence
  ENSG00000157985_27 (sequence is synthesized)
gatgatagcacatggcgcaggacccttgtcctggtggcacaagggatggggacgcgagggggaggggaggcgaggaacaaggagaaggggcaactttccttaactggcagttgagcacat

SEQ ID NO: 464129 - DNA, 120 bp, Artificial Sequence
  ENSG00000157985_28 (sequence is synthesized)
agtacatttcccctctaccaaacggaacacttggattccatctcttctctgaggagctcgacggcataaatcagaagcaagcacagagtttgtcaggtttgaagcccctatgatggtgtg

SEQ ID NO: 464130 - DNA, 120 bp, Artificial Sequence
  ENSG00000157985_29 (sequence is synthesized)
tgtcaaatcagttgtagctaatctgtccagggagaatactggcttcattacacttgtacagccgagttcttcccgcattactgctgtttaatagaacgtgattagtcatcgccgagaaga

SEQ ID NO: 464131 - DNA, 120 bp, Artificial Sequence
  ENSG00000157985_30 (sequence is synthesized)
aagcatattagccgaggaggtagtcacgcggcacgcgccggtgattgccacgatgtgattgcaatactcttagaagcaccatattatcccagacatgttctttcaagcccttggagccct

SEQ ID NO: 464132 - DNA, 120 bp, Artificial Sequence
  ENSG00000157985_31 (sequence is synthesized)
ctctaaattcactgtcatcatttagtatctgtttaatttttcagtccaaagagaggaaatcagtcgctgagtattatttgactccggtctccttggtgcaaaaacaaaatgggaaaaata

SEQ ID NO: 464133 - DNA, 120 bp, Artificial Sequence
  ENSG00000157985_32 (sequence is synthesized)
aataagaataactcagaaactcaaaaggaaaccacaaattcagctaataatagcatttcgagtatatttcgtaaactaaggaaatacacaaaaggctgttttttccgactgtaagagata

SEQ ID NO: 464134 - DNA, 120 bp, Artificial Sequence
  ENSG00000157985_33 (sequence is synthesized)
tttgatgtccttttgccgaggtggatgtgttagtctcaggccctcctggaccacgttgcccaagtcacacaggcttctgtgttatgtatttagataagatgtgtgaaaatatatttgaat

SEQ ID NO: 464135 - DNA, 120 bp, Artificial Sequence
  ENSG00000157985_34 (sequence is synthesized)
aaaagaagttcataaatatgcattgatttttgtacagacaaatggcacctctcttaatttataaattgaactggatgtgaactaataatgtgcaactagttgagataagagggttacaga

SEQ ID NO: 464136 - DNA, 120 bp, Artificial Sequence
  ENSG00000157985_35 (sequence is synthesized)
tgtgcaactagttgagataagagggttacagatcattgtacatggaaaatattcccagcagtaaacacttccattaatgtgatctacggcttttgaaaaggagcatctcagaataagatg

SEQ ID NO: 464137 - DNA, 120 bp, Artificial Sequence
  ENSG00000157985_36 (sequence is synthesized)
aaaaaaaaagacacactggagtatattagaaaggaaaaagaaggaatgtggtctctcatgattgaaagcatgatttagatcggatacggcttttgctaaccaaggaccaagggactctgg

SEQ ID NO: 464138 - DNA, 120 bp, Artificial Sequence
  ENSG00000157985_37 (sequence is synthesized)
caagatggggtggttttccgaatgccagaccgaggtgccttacgaaggcagctgccaatggttctgtggcacagactggctcctgagaacccagacgaccttgacctggcagcccggccc

SEQ ID NO: 464139 - DNA, 120 bp, Artificial Sequence
  ENSG00000157985_38 (sequence is synthesized)
tccacgctagtacctcgcctgattttccatcgttgcggtatccagccgcttcagacgtccgccgccttcagtggtggtagtcaaatgtagtcaaccaaaccacagcatcccttaggttaa

SEQ ID NO: 464140 - DNA, 120 bp, Artificial Sequence
  ENSG00000157985_39 (sequence is synthesized)
aagcaaacggggcagctttgcctagagctcattgacagtgtgatggggggagaagggttgtcacaatggaagatgaggacactagactcatgtagcacagaaacatgaagccacacgcac

SEQ ID NO: 464141 - DNA, 120 bp, Artificial Sequence
  ENSG00000157985_40 (sequence is synthesized)
cggcagcctccggggtgttcctcgctctctcgtatgttaaaccttatattttataagagtttttcctcttatttcactttttaaaaaaaattaaagtaggtggggaaaaaaataaagctt

SEQ ID NO: 464142 - DNA, 120 bp, Artificial Sequence
  ENSG00000157985_41 (sequence is synthesized)
tacacagaatttatatgtgggtaagtgtttcatggaaatttctaatcttaacgaagctaagtggagctcactcgtatccaaaagtataacaggtgcagaagccacaagtctgagaacctt

SEQ ID NO: 464143 - DNA, 120 bp, Artificial Sequence
  ENSG00000157985_42 (sequence is synthesized)
gacgacagttccatcgtcctgccatttgatttttcagtctgcgtttcatcactgtgtagctattgtaaatgtgaatagaaaaaaacaggtcattgcctatttttgaagaacgcgttggtg

SEQ ID NO: 464144 - DNA, 120 bp, Artificial Sequence
  ENSG00000157985_43 (sequence is synthesized)
ttcgagtccactagacacactcgctccacacagccttcaccgtagactctgtagtggacacagatatagcataaatgaaattgttaaattatttcattgtagttaattcccactatagga

SEQ ID NO: 464145 - DNA, 120 bp, Artificial Sequence
  ENSG00000157985_44 (sequence is synthesized)
atgctttatcatagtgaagtttcttttgagaagaaacggaactccttgaggcttctctttgggatgtatatgagcgtgtacatattattctatgtgtttataatataatattttcccaaa

SEQ ID NO: 464146 - DNA, 120 bp, Artificial Sequence
  ENSG00000157985_45 (sequence is synthesized)
ccatgactccccctcagaaaacacagcccctcctctaccattctcagtgatgtccatctgctccactccgcagccactttctagggcccaagttttggtagcagaaggaaaggcagtttt

SEQ ID NO: 464147 - DNA, 120 bp, Artificial Sequence
  ENSG00000157985_46 (sequence is synthesized)
tgagggtctttcgaaaaaaagaagacggggcagctttgcccagagctcgttggcagtctgtttgtatttcagtgtctaaccagaagtcctttctttgcggaccgcactctcgttcccact

SEQ ID NO: 464148 - DNA, 120 bp, Artificial Sequence
  ENSG00000157985_47 (sequence is synthesized)
ttcaagctaattaccaccaaggctgggagaggcaaggactgggggcggagctaggaataactcgtttgagaagggggtggagttttcgttgttcatttccatgttcagttctgtgacgtg

SEQ ID NO: 464149 - DNA, 120 bp, Artificial Sequence
  ENSG00000157985_48 (sequence is synthesized)
acgatgacagatcaccactgcaggatccccctcacctttcctgttcagaattaaaactctcccttgatgagaaacagccagctgagggaggcccacgagcggcctgtgtaaccccatggg

SEQ ID NO: 464150 - DNA, 120 bp, Artificial Sequence
  ENSG00000157985_49 (sequence is synthesized)
tgatctggacacatctgcacccccgcgttcagcttcgcggagactgaacttggcggggagtggaggggtgtggtgcagacctggctgcagcagaaacaccccgcagggacagtactctgt

SEQ ID NO: 464151 - DNA, 120 bp, Artificial Sequence
  ENSG00000157985_50 (sequence is synthesized)
gattctgacctcaggtgctgggacgggcagatggtttcccccgcccagcaccccagtcctggtccctggtccctctctctgtttcatcccaggaaatgagcagctcgagggtgagcaagt

SEQ ID NO: 464152 - DNA, 120 bp, Artificial Sequence
  ENSG00000157985_51 (sequence is synthesized)
gacaagttcctgagtcactggccccaaaaccaggtgcagtgtcctgtctcccaagtgtgtgcacaatgtatatatgcactggaaaggagggagaaggcagcgggtcactcgccaatcgca

SEQ ID NO: 464153 - DNA, 120 bp, Artificial Sequence
  ENSG00000157985_52 (sequence is synthesized)
gggttctcagacacaggagagagcgggatcttaatgaattgcatttcctgcagagcctctagtgcacaggccagttctcggcagtggcttttcagcacaagggccttgcattgaagctcc

SEQ ID NO: 464154 - DNA, 120 bp, Artificial Sequence
  ENSG00000157985_53 (sequence is synthesized)
ctcttctgagatttcacccagcctgatgaggcctgcatggttccggcctcgtcatccagtgtagataccagtcttcctatttttgtgacatctgcacatttggggtcattccctatatct

SEQ ID NO: 464155 - DNA, 120 bp, Artificial Sequence
  ENSG00000157985_54 (sequence is synthesized)
gcataggagctattgctaaccttgttagggagaaacatggtctaatgagaaagacagacccctaggctcagctggccctgccatccttccagaggattcctctgcaactctaggcaagca

SEQ ID NO: 464156 - DNA, 120 bp, Artificial Sequence
  ENSG00000157985_55 (sequence is synthesized)
cccagcttcctgggctctttttcctcatctgtgaaacttgcagggtgcagtgaggtttcaaaccagtgtgataagtgttggcctcacacctggcccaggggatgctgggagaacaggagc

SEQ ID NO: 464157 - DNA, 120 bp, Artificial Sequence
  ENSG00000157985_56 (sequence is synthesized)
acttgttaataacagaaacactgatgggaccgaagccagtgcacacaccaggaaacctgcccgtggctgacactgtcctccagcctgcattctggggaggctgtgatgggcacgtttgcc

SEQ ID NO: 464158 - DNA, 120 bp, Artificial Sequence
  ENSG00000157985_57 (sequence is synthesized)
aaccccccccccccagtagagcccaggaccctcctctctcagcttgccagtgccctgccctccacatggcggggaacagcatcaatgaggtccttgctccctgagagcctctctggaacc

SEQ ID NO: 464159 - DNA, 120 bp, Artificial Sequence
  ENSG00000157985_58 (sequence is synthesized)
tgcccacttttctcaacatgtatattctgctttgtagtctgaggttgattttctagaggcgaggaaggggctgagttctgccctcgtgctgttcgctggtgctgatcagggccaagacga

SEQ ID NO: 464160 - DNA, 120 bp, Artificial Sequence
  ENSG00000157985_59 (sequence is synthesized)
cccttccctctcccccacagcctgttgaggtgccgttgacgtggacagcgcccctcccttaagatgcccccttgccgttgccatgagccgctgtgactcacgcgtgcactgggccttgct

SEQ ID NO: 464161 - DNA, 120 bp, Artificial Sequence
  ENSG00000157985_60 (sequence is synthesized)
tggtgctcccctcctcctcctgtctgagatcggagcttgctggagagcaccccaggtcgccgtgcttggctgcaggcccgtccctctctccccatcctcgggttcccagcgtgttttgtg

SEQ ID NO: 464162 - DNA, 120 bp, Artificial Sequence
  ENSG00000157985_61 (sequence is synthesized)
cttgaacttggtggactcatcttaccccacaagagtggcctgctcaacctgcagcctccaatgtgccgtaggcgctctaggtccccgtggcgcccaggacaccaactctccctccctgca

SEQ ID NO: 464163 - DNA, 120 bp, Artificial Sequence
  ENSG00000157985_62 (sequence is synthesized)
cttaggatgttctggaaatgagaggaaatccacattcctgccccaggaggtgggaagcctggcaacgatgtagcttcccctgagatgcggtatgatcaggcctcagcaactactcaggag

SEQ ID NO: 464164 - DNA, 120 bp, Artificial Sequence
  ENSG00000157985_63 (sequence is synthesized)
gcaaaggtgtttggaaagcaaaccccaaacctcccggcacggcatgtgctctgcttccgtccctcaccgcctgcacaaggtcgttgagacttttctagaactccccggggttgtatttat

SEQ ID NO: 464165 - DNA, 120 bp, Artificial Sequence
  ENSG00000157985_64 (sequence is synthesized)
ggccttcaagcaaacaaattgaaaagcagtcaaggaggagttcagatagaaaagtgctggagatacacatctttccttcaaaggaaatgtaatttatttccaaccgctgcctcagacggg

SEQ ID NO: 464166 - DNA, 120 bp, Artificial Sequence
  ENSG00000157985_65 (sequence is synthesized)
ggtttcacatgttgtgaagtcacatcttgaatgactgtcaccctcatccttccccaaaaagctaaataagggcctttggcatcaatgcgtgcattctccacctttccgcggcttgcgctt

SEQ ID NO: 464167 - DNA, 120 bp, Artificial Sequence
  ENSG00000157985_66 (sequence is synthesized)
ggatttctgagtggctttcttcagggagcccttgtggtcatgtgtctttaatgctgctccccatgcccccaggccaggccagcacgctcaggtgatagcgagtggggccaggagaccccc

SEQ ID NO: 464168 - DNA, 120 bp, Artificial Sequence
  ENSG00000157985_67 (sequence is synthesized)
ctgccctgcccagtggacagatctgccccagccctgctgtggggacgggccctctatcatttaaccacatacattaggttgcttttcagcaaaatgtcagctttcctcccattatgcagg

SEQ ID NO: 464169 - DNA, 120 bp, Artificial Sequence
  ENSG00000157985_68 (sequence is synthesized)
agagagaaggggcgcaggtgtatctccttagagtacaccttggagctggatcactaagaaacagtcctcagactggtccttccgacacaggcagagagtgaactggatcgctggcccctg

SEQ ID NO: 464170 - DNA, 120 bp, Artificial Sequence
  ENSG00000157985_69 (sequence is synthesized)
ggatgctgcgctgtctgtgattagagagaagtggccagtgtcccgtctgtgattagacagaaacccctgtggcagactcctcccctctccatgaagaaagaaatatttacttagatatta

SEQ ID NO: 464171 - DNA, 120 bp, Artificial Sequence
  ENSG00000157985_70 (sequence is synthesized)
ctgtttcaaaacacaaactttattccccttagagaagaaatactgcccttaaatagactgttgaaatattaatggcccccccatttaatcagtgtgtctgcggctttcttcgcgtcacat

SEQ ID NO: 464172 - DNA, 120 bp, Artificial Sequence
  ENSG00000157985_71 (sequence is synthesized)
gtccgcattggcaggtgattctggaaagggattctgggaaaccaacaagtcttttttaaatctttgagttgtatgagaaagtatttaagttcaccagtgtagtaaacacccaccccagag

SEQ ID NO: 464173 - DNA, 120 bp, Artificial Sequence
  ENSG00000157985_72 (sequence is synthesized)
cagcggtaagcaaacctaaatctgaaaacccattcttactgtctttcaccatgagatgctggttttggtgtaaaatgacagcacttggtttggggttttgcacctgttgggtagaactgt

SEQ ID NO: 464174 - DNA, 120 bp, Artificial Sequence
  ENSG00000157985_73 (sequence is synthesized)
tcttgtctgaggtcctcaccctctacagatgggcctcagggcctggaggtgggcagatggggccagagtggccagcagagacttgcatgggctctgaaagccccagagctcaggcctaag

SEQ ID NO: 464175 - DNA, 120 bp, Artificial Sequence
  ENSG00000157985_74 (sequence is synthesized)
gctgctaggtgagaccagcaggcagctgtggcatccgaccttgggacgcccaagctgggcagccgctccatgtgccccaaacaggatatcctcatgaatgtgaggagaggctggctcagg

SEQ ID NO: 464176 - DNA, 120 bp, Artificial Sequence
  ENSG00000157985_75 (sequence is synthesized)
gcttggttttcattttggcctggcacagggtacctgtagggagcactcccccaacctgaggatggtgaaaccatatgatagagactccttgtcgaagtccacatcggactgatctagaat

SEQ ID NO: 464177 - DNA, 120 bp, Artificial Sequence
  ENSG00000157985_76 (sequence is synthesized)
gccccgtggggggattgcatggcctttgccttgagatgcaggtgaaagaaaggaaccaaacaaggcatgagtgtgttggggaatcttcccagtggagcaaacccccttaacacaccagct

SEQ ID NO: 464178 - DNA, 120 bp, Artificial Sequence
  ENSG00000157985_77 (sequence is synthesized)
gttgggaacagctgcccctaaatccaattaaaccctcatctccctggtgctgaacagtctacactggcccaggaagctaacgtctgagccgcttggagagctttggtaaacagaagacac

SEQ ID NO: 464179 - DNA, 120 bp, Artificial Sequence
  ENSG00000157985_78 (sequence is synthesized)
tggaagcccactcggtcagcagctgggcatgaggatgtcaggggcctttggacttgaggaaggacagtccaggtgcatggaatcctaatgggcctcatgcagacactggaagcagcccag

SEQ ID NO: 464180 - DNA, 120 bp, Artificial Sequence
  ENSG00000157985_79 (sequence is synthesized)
ccccctgcccaataccacagccctggggtgtcccctgacattcctggaggtccctgggcaaatgcatttcctgcctgggttctcagggtaggagaacagagaaggctccaagggtgttgg

SEQ ID NO: 464181 - DNA, 120 bp, Artificial Sequence
  ENSG00000157985_80 (sequence is synthesized)
gagtgagccaggggctggtctggggagtgggtctcacgcactgctcaggttggcacgagggacctcccccatcccaacccagccccaagggtcccagcagggctctcagcatggctgttt

SEQ ID NO: 464182 - DNA, 120 bp, Artificial Sequence
  ENSG00000157985_81 (sequence is synthesized)
tgagggtacacaggtggctggagaggggtggggcagttgcatggtgggtggcaaagtgtgcatttagaagctgcttcgtggcgttaagaacggggggagagggaccagcactgtaacgtt

SEQ ID NO: 464183 - DNA, 120 bp, Artificial Sequence
  ENSG00000157985_82 (sequence is synthesized)
agaaataattccttcttgcagacttgaaaagcatcagtttccctcccacggctgggtttttgtgtctgaaatacatctaattctccagactgcagcccctctcagccccgagcacctgag

SEQ ID NO: 464184 - DNA, 120 bp, Artificial Sequence
  ENSG00000157985_83 (sequence is synthesized)
cgctggggaggcccttattgagctcagcctggagaggggagggtcgcacgggtcccgggggcaggtctcctgcactggctcttcccttctgccagcttggaatttggttctcatcttgcc

SEQ ID NO: 464185 - DNA, 120 bp, Artificial Sequence
  ENSG00000157985_84 (sequence is synthesized)
acaggggtgcgtttcctaaagggcagccggagcagctcaaaggtgacaactgagatgcatttctaggcaggggcagggaaggccaacccaccttgcagccagttttctgtttctgtaaat

SEQ ID NO: 464186 - DNA, 120 bp, Artificial Sequence
  ENSG00000157985_85 (sequence is synthesized)
agcagtgtatagagatggaagggcagcgtgggtgtatccacagatgggtttaggttttttttttggatgttttctattacctcattcagcaactttatgtttcacaatgactcaatgatg

SEQ ID NO: 464187 - DNA, 120 bp, Artificial Sequence
  ENSG00000157985_86 (sequence is synthesized)
ctttatttatattgtttgtactgtaattaaaaccattgacagacatttcactttgcttgttatttcatatgatcttgttttgattaaatatgccagtttgtattttcctgccttgggatt

SEQ ID NO: 464188 - DNA, 120 bp, Artificial Sequence
  ENSG00000157985_87 (sequence is synthesized)
tttttgtgtccgctgtacagtattctaagggaaaaagaaaaagaaagatgtgtaaagtaacagagagaggtggctatggtgtagagacctctttctaataaagaaatgaaaatatgtcta

SEQ ID NO: 464189 - DNA, 120 bp, Artificial Sequence
  ENSG00000157985_88 (sequence is synthesized)
atctgggtctcagatggcaagcggcatcagcctggtctccttcaacagccgacccgacggcatgcaccagcgctcctactcagtctccagtgccgaccagtggagtgaggctacggtcat

SEQ ID NO: 464190 - DNA, 120 bp, Artificial Sequence
  ENSG00000157985_89 (sequence is synthesized)
cctgctggagcccgtgcccgtcagtcctccccctggccagggccgaggggtggtcagaccagcccgcattgtgctgaaggcccacaatcagcccagctgtccggggccatgatgaattag

SEQ ID NO: 464191 - DNA, 120 bp, Artificial Sequence
  ENSG00000157985_90 (sequence is synthesized)
ttcagagaattcggagtccggcacaggaatgtgtcccacgcatgaatgtcgtccttcagatctggacctgacagcctgggagctgctggggggagatcccaactgggccagtttgaactt

SEQ ID NO: 464192 - DNA, 120 bp, Artificial Sequence
  ENSG00000157985_91 (sequence is synthesized)
aaagaggttacaggagggagagctggagaaatggagcgctcctccagaaagttcggcaactcacaaaagaccccttaatttctatagcgggcaattcagtccacaaaggaaggaaatcaa

SEQ ID NO: 464193 - DNA, 120 bp, Artificial Sequence
  ENSG00000157985_92 (sequence is synthesized)
tgagcgtttacgctctttctttgaggaacctttttttaaagaaaaaaacatttactggcgctttgcatgttttgggtacaagcagtggtagaaacataaaacattaaaatccaagattga

SEQ ID NO: 464194 - DNA, 120 bp, Artificial Sequence
  ENSG00000157985_93 (sequence is synthesized)
tgacagccacggttgggaaggccctgataacctgtaggaattcgggaattccgattcatccggcataggaatgtctgtgtttaaagttggtcttgagcagacgtggataattcacactcc

SEQ ID NO: 464195 - DNA, 120 bp, Artificial Sequence
  ENSG00000157985_94 (sequence is synthesized)
ttaattttttatgtttgtttttaggcctggggatttctctcccccctcttagaaatgtattaagcttctaaccttatgaatatattactttaattaatacatttctaataggcataagct

SEQ ID NO: 464196 - DNA, 120 bp, Artificial Sequence
  ENSG00000157985_95 (sequence is synthesized)
gtgccgttaacactaattatgaatttttgatcctttaattttgttattcttatagcttggataagcatctgctctgtcgatcccccccccgcaccatcacacaaaagttatttttatggt

SEQ ID NO: 464197 - DNA, 120 bp, Artificial Sequence
  ENSG00000157985_96 (sequence is synthesized)
aacaaaatctattttattttctaaaatatatctcaacacatttagtcaaccaagttcagcataatgtatgatgtaactcctcattaatgttaattgttatccagtgtaaaaaacgcattt

SEQ ID NO: 464198 - DNA, 120 bp, Artificial Sequence
  ENSG00000157985_97 (sequence is synthesized)
atccggtttggcaggaacaggacagggtggttagcaggccacagtgtggtgggagtgaaagtgtactgtcctgtgtgatatttttgcacagcctgacagtgggggcaagtttagagcctt

SEQ ID NO: 464199 - DNA, 120 bp, Artificial Sequence
  ENSG00000157985_98 (sequence is synthesized)
gcgcgtttccattttaaaccgccgcccgccgcccgccacccgccacccttcggccgcagccggtgcagctgtccgcgcgtcccggagcccagggagtggcggaggctgcggaaccgccga

SEQ ID NO: 464200 - DNA, 120 bp, Artificial Sequence
  ENSG00000157985_99 (sequence is synthesized)
gagcgggaggatgcgcacgggccccgcgtcgtagacaatgaagccgcgggcgccgccgcctgccctgggccctgcgcaccgcggccgcacctgccggcgagagcgctctagcgcctgacc

SEQ ID NO: 464201 - DNA, 80 bp, Artificial Sequence
  ENSG00000157985_100 (sequence is synthesized)
ccgcacctgccggcgagagcgctctagcgcctgaccggccgcctcgcttggccccgccggcccatggctcggcgccccgg

SEQ ID NO: 464202 - DNA, 80 bp, Artificial Sequence
  ENSG00000157985_101 (sequence is synthesized)
cgcttggcccggcgccctcccggcccgcgggctcgctggatgcggcggggccccagcgcgcgggcgacatgtacttgttg

SEQ ID NO: 464203 - DNA, 120 bp, Artificial Sequence
  ENSG00000157985_102 (sequence is synthesized)
ccagcgcgcgggcgacatgtacttgttggacggcagtggcgagcccgcgtcgccacccgcggacgcgatgccgcgcgggacgccccccagaaagactgtctaccgcatctccgtgaccat

SEQ ID NO: 464204 - DNA, 120 bp, Artificial Sequence
  ENSG00000157985_103 (sequence is synthesized)
agactgtctaccgcatctccgtgaccatggtcaggaaggagcagctggccgcgccgggctccggcggcccggacccacgcccggttcggcggccccggcccgcgcgctccccggacgcgc

SEQ ID NO: 464205 - DNA, 120 bp, Artificial Sequence
  ENSG00000157985_104 (sequence is synthesized)
aggaggcggagggcgccgaggaaccggagggtccccggccgcgcgcttgggatttccgcaccttccgcacccgcagcaccgggcagctggaactggggcggctccggccgtgcgcacgcg

SEQ ID NO: 464206 - DNA, 80 bp, Artificial Sequence
  ENSG00000157985_105 (sequence is synthesized)
ggaacccgcggacctggccggcagcgccccggccgaggaggagggacgcggctcgcccgcgtccggcagccccgacgtgg

SEQ ID NO: 464207 - DNA, 120 bp, Artificial Sequence
  ENSG00000157985_106 (sequence is synthesized)
ctgagcttcaggcactggagcgggcctgaggcgccgcaaggccggacactgggcggcggaaggcgccacagcagctccgggagcctggcctgggcgccgtgcgacgaggccgcggccggg

SEQ ID NO: 464208 - DNA, 120 bp, Artificial Sequence
  ENSG00000157985_107 (sequence is synthesized)
ggagcccgcgaccgccacgcagcccgcctcggagaagcgcaacaccctggacgtgggcgaggtgctcagcaagaacgacgcgctctcggacctggagcgttgggaacgcagtaagagcaa

SEQ ID NO: 464209 - DNA, 120 bp, Artificial Sequence
  ENSG00000157985_108 (sequence is synthesized)
gaaccgcacgctggacaacagcgacctgcagcggctggagcgcgcgcgggcggcggccggggccggcgcggcctcggagcaccggctgctgcgcttcttcagcggcatcttcgcgcgcag

SEQ ID NO: 464210 - DNA, 120 bp, Artificial Sequence
  ENSG00000157985_109 (sequence is synthesized)
ggcgggccctcgccacggagcggagcctcgcggccacgcggctacttcagcctgcggcgggccccggccgaagcgcactcgtccagcgccgagagcatcgacggctccccgcgcagagat

SEQ ID NO: 464211 - DNA, 120 bp, Artificial Sequence
  ENSG00000157985_110 (sequence is synthesized)
aaaacaagagtgattgtttagaaattaccctcgtcctacatttgctcccaatctgtttgatctttccctgatgttatcagtgatgtgcgtttctcccggggtgcttacgccttgtatttg

SEQ ID NO: 464212 - DNA, 120 bp, Artificial Sequence
  ENSG00000157992_0 (sequence is synthesized)
acagcggccctgcggctggcgcggcggacgggatgaggcgctgcagtctctgcgctttcgacgccgcccgggggcccaggcggctgatgcgtgtgggcctcgcgctgatcttggtgggcc

SEQ ID NO: 464213 - DNA, 120 bp, Artificial Sequence
  ENSG00000157992_1 (sequence is synthesized)
acgtgaacctgctgctgggggccgtgctgcatggcaccgtcctgcggcacgtggccaatccccgcggcgctgtcacgccggagtacaccgtagccaatgtcatctctgtcggctcggggc

SEQ ID NO: 464214 - DNA, 120 bp, Artificial Sequence
  ENSG00000157992_2 (sequence is synthesized)
tgctgagcgtttccgtgggacttgtggccctcctggcgtccaggaaccttcttcgccctccactgcactgggtcctgctggcactagctctggtgaacctgctcttgtccgttgcctgct

SEQ ID NO: 464215 - DNA, 120 bp, Artificial Sequence
  ENSG00000157992_3 (sequence is synthesized)
gtggccaacggtggccgccgccttattgctgactgccacccaggactgctggatcctctggtaccactggatgaggggccgggacatactgactgcccctttgaccccacaagaatctat

SEQ ID NO: 464216 - DNA, 120 bp, Artificial Sequence
  ENSG00000157992_4 (sequence is synthesized)
gatacagccttggctctctggatcccttctttgctcatgtctgcaggggaggctgctctatctggttactgctgtgtggctgcactcactctacgtggagttgggccctgcaggaaggac

SEQ ID NO: 464217 - DNA, 120 bp, Artificial Sequence
  ENSG00000157992_5 (sequence is synthesized)
ggacttcaggggcagctagaggaaatgacagagcttgaatctcctaaatgtaaaaggcaggaaaatgagcagctactggatcaaaatcaagaaatccgggcatcacagagaagttgggtt

SEQ ID NO: 464218 - DNA, 120 bp, Artificial Sequence
  ENSG00000157992_6 (sequence is synthesized)
taggacagcaggtgctgttccgagactcagtcctaaagggttttttttcccactaagcaaggggccctgacctcgggatgagataacaaattgtaataaagtaacttctcttttcttcta

SEQ ID NO: 464219 - DNA, 120 bp, Artificial Sequence
  ENSG00000157992_7 (sequence is synthesized)
ttaaagtcaaagcattatgaatatggcactaaagtgactgagctaccagaccaatgatcctgtaaggcagccacagaactaaaaaacaacaattattattaaactgctctggattctcaa

SEQ ID NO: 464220 - DNA, 120 bp, Artificial Sequence
  ENSG00000157992_8 (sequence is synthesized)
tcccctctgtccagcaggtgctgttccgagactcagtcctaaagggttttttttcccactaagcaaggggccctgacctcgggatgagataacaaattgtaataaagtaacttctctttt

SEQ ID NO: 464221 - DNA, 120 bp, Artificial Sequence
  ENSG00000157992_9 (sequence is synthesized)
ttccgggccctggcgtctcgtctccttaccctggggctacccttgccccgtcctactgcccgcggttaacccgccgcgagccgcctctcccctccccgcccgactcaaccctgccctccc

SEQ ID NO: 464222 - DNA, 120 bp, Artificial Sequence
  ENSG00000157999_0 (sequence is synthesized)
atggggaatataaccaggaaaggaagcagagacctggtggttgacagtgccaagtccctggaagatggcccatctgcagcacttcactcgaaactctatgaagccatcatgagagaagac

SEQ ID NO: 464223 - DNA, 120 bp, Artificial Sequence
  ENSG00000157999_1 (sequence is synthesized)
tgcactacgatcgaggtactcctgagaaatcaccctgtcaaccagcccatcaccattctgcccaactccgccagcaacagattacttctgacccagccgacagagtctatcatccccatc

SEQ ID NO: 464224 - DNA, 120 bp, Artificial Sequence
  ENSG00000157999_2 (sequence is synthesized)
catctggctgccaagtaccacaaggcccagagtctgctctgcctgttacggcacggtgctgacccagaagtcagggacacgacaggcctcaccacactcaacttaatgctactgcactgg

SEQ ID NO: 464225 - DNA, 120 bp, Artificial Sequence
  ENSG00000157999_3 (sequence is synthesized)
ccagtcacttccaccacgtgggcaaaaccaggcaacagaacgcacaggatcctgacagacattcagaatagcagcatcacatgtctccgcatcttgtgtgcgcacggagctcaagtgaac

SEQ ID NO: 464226 - DNA, 120 bp, Artificial Sequence
  ENSG00000157999_4 (sequence is synthesized)
actcaaggggaaatcagcaacaaacgttcaccactccacctggccatagcatatggttgctatccagttctctccattttgacccaaaatggtgccgatgtcaatgctattaatgaagcc

SEQ ID NO: 464227 - DNA, 120 bp, Artificial Sequence
  ENSG00000157999_5 (sequence is synthesized)
ggaacacgcccctgaagcttgcagtgtgcactgcatcaagcaaagcaggccgactcctcggggcgggggtcagctgcatccgtctgctactcactcacggagccaaagtcaacgcccagg

SEQ ID NO: 464228 - DNA, 120 bp, Artificial Sequence
  ENSG00000157999_6 (sequence is synthesized)
actacaagggccaaacagccatccatgaggcatgctttggaggcagagaggcaatcatcaatctcctgcttgaatttgaagcaaatgttaacattttaacaagaaacggggaatctccaa

SEQ ID NO: 464229 - DNA, 120 bp, Artificial Sequence
  ENSG00000157999_7 (sequence is synthesized)
tttatatgtaccttcagcgcagttgcaatgtaagagatacggcacttctggccaggctactttatcacacttatcctctgagaatgaccaataaccaaggaattctacctgcaggaatca

SEQ ID NO: 464230 - DNA, 120 bp, Artificial Sequence
  ENSG00000157999_8 (sequence is synthesized)
tgctaccagaattccgcctcttaagggacaccctaataaagcaatcgcaaaaacctttatccctacagggtatctgcaaaagaaacatcaggaatatttatggtgagaaatacaaacagc

SEQ ID NO: 464231 - DNA, 120 bp, Artificial Sequence
  ENSG00000157999_9 (sequence is synthesized)
acttgaagcaattcctcccagtgacaatatggaattctgtctactgctgttatgacttggcatatacctcttgaaataagacctcccagtttcacagcagagggactttcagccactcaa

SEQ ID NO: 464232 - DNA, 120 bp, Artificial Sequence
  ENSG00000157999_10 (sequence is synthesized)
actgcattttctggctagacatgtcccagaaaatgcttcacctatcacctgtgacatcccaaatgtacaaactactgattcttgaacatgttccaaaatacaaagtgatttgtctattaa

SEQ ID NO: 464233 - DNA, 120 bp, Artificial Sequence
  ENSG00000158006_0 (sequence is synthesized)
aaacgtctggggctgcttctgaggaatcagcttgactggccagcaagttcagctccggcaagtcatttgattcacccggtgatgaaatgggggtcaaccagtctgtgggctttccacctg

SEQ ID NO: 464234 - DNA, 120 bp, Artificial Sequence
  ENSG00000158006_1 (sequence is synthesized)
tcacaggaccccacctcgtaggctgtggggatgtgatggagggtcagaatctccaggggagcttctttcgactcttctacccctgccaaaaggcagaggagaccatggagcagcccctgt

SEQ ID NO: 464235 - DNA, 120 bp, Artificial Sequence
  ENSG00000158006_2 (sequence is synthesized)
ggattccccgctatgagtactgcactggcctggccgagtacctgcagtttaataagcgctgcgggggcttgctgttcaacctggcggtgggatcttgtcgcctgcctgttagctggaatg

SEQ ID NO: 464236 - DNA, 120 bp, Artificial Sequence
  ENSG00000158006_3 (sequence is synthesized)
gcccctttaagacaaaggactctggataccccttgatcatcttctcccatggcctaggagccttcaggactttgtattcagccttctgcatggagctggcctcacgtggctttgtggttg

SEQ ID NO: 464237 - DNA, 120 bp, Artificial Sequence
  ENSG00000158006_4 (sequence is synthesized)
ctgtgccagagcacagggaccggtcagcggcaaccacctatttctgcaagcaggccccagaagagaaccagcccaccaatgaatcgctgcaggaggaatggatccctttccgtcgagttg

SEQ ID NO: 464238 - DNA, 120 bp, Artificial Sequence
  ENSG00000158006_5 (sequence is synthesized)
aggaaggggagaaggaatttcatgttcggaatccccaggtgcatcagcgggtaagcgagtgtttacgggtgttgaagatcctgcaagaggtcactgctgggcagactgtcttcaacatct

SEQ ID NO: 464239 - DNA, 120 bp, Artificial Sequence
  ENSG00000158006_6 (sequence is synthesized)
tgcctggtggcttggatctgatgactttgaagggcaacattgacatgagccgtgtggctgtgatgggacattcatttggaggggccacagctattctggctttggccaaggagacccaat

SEQ ID NO: 464240 - DNA, 120 bp, Artificial Sequence
  ENSG00000158006_7 (sequence is synthesized)
ttcggtgtgcggtggctctggatgcttggatgtttcctctggaacgtgacttttaccccaaggcccgaggacctgtgttctttatcaatactgagaaattccagacaatggagagtgtca

SEQ ID NO: 464241 - DNA, 120 bp, Artificial Sequence
  ENSG00000158006_8 (sequence is synthesized)
atttgatgaagaagatatgtgcccagcatgaacagtctaggatcataaccgttcttggttctgttcatcggagtcaaactgactttgcttttgtgactggcaacttgattggtaaattct

SEQ ID NO: 464242 - DNA, 120 bp, Artificial Sequence
  ENSG00000158006_9 (sequence is synthesized)
tctccactgaaacccgtgggagcctggacccctatgaagggcaggaggttatggtacgggccatgttggccttcctgcagaagcacctcgacctgaaagaagactataatcaatggaaca

SEQ ID NO: 464243 - DNA, 120 bp, Artificial Sequence
  ENSG00000158006_10 (sequence is synthesized)
accttattgaaggcattggaccgtcgctcaccccaggggccccccaccatctgtccagcctgtaggcacaactggccatttgtaaagtcacttcagccaagttttcatttgggagctacc

SEQ ID NO: 464244 - DNA, 120 bp, Artificial Sequence
  ENSG00000158006_11 (sequence is synthesized)
caagggcacccatgagctcctatcaagaagtgatcaacgtgaccccttttcacagattgaaaggtgtaatcacactgctgcttggataactgggtactttgatcttagatttgatcttaa

SEQ ID NO: 464245 - DNA, 120 bp, Artificial Sequence
  ENSG00000158006_12 (sequence is synthesized)
aatcactttgggactgggatcccttgctgattgacaaacagactttctgggaccttgatggagtggggaacaagcagtagagtgggactgggggagacccaggccccgggctgagcactg

SEQ ID NO: 464246 - DNA, 120 bp, Artificial Sequence
  ENSG00000158006_13 (sequence is synthesized)
tgaggcctggatgtgaagactcagcccagcgaagctcattcccttacccccggccagtgctgctgcttcagtggaagagatgaagccaaaggacagaatgaaaatccctaccttcagaga

SEQ ID NO: 464247 - DNA, 120 bp, Artificial Sequence
  ENSG00000158006_14 (sequence is synthesized)
ccagcccaacaccatctcttcctacctctcagccttctccctccccagggccacttgttgaagtctgagcactttatgtaaatttctaggtgtgagccgtgatcacattttctatttatt

SEQ ID NO: 464248 - DNA, 120 bp, Artificial Sequence
  ENSG00000158006_15 (sequence is synthesized)
tccaagtcttctcattgtatggaacatagtactacttatacttacagtagtaagttatacttgtgagcccacagagtggcagacagcatggctctcacagcacagggagaaaaactgagg

SEQ ID NO: 464249 - DNA, 120 bp, Artificial Sequence
  ENSG00000158006_16 (sequence is synthesized)
tacacagaggtacctcagaagctctggatgtctttgggggttttgctaagtgtatcttgataggaaacaacaaaagcaggttgagatggggaagatgacagaacaacagtgttaaatggc

SEQ ID NO: 464250 - DNA, 120 bp, Artificial Sequence
  ENSG00000158006_17 (sequence is synthesized)
catttgcacaggcctttgccacaacagagaagtagtttggtcagctaaaactcagctgcagcctggacagtagagcgagaccccatcttaaaaataaagaaggctgggcgtggtggctca

SEQ ID NO: 464251 - DNA, 120 bp, Artificial Sequence
  ENSG00000158006_18 (sequence is synthesized)
aaaaaaaaagaaaaagaaaaatttaaaataaataaaatttaaaaacgcagaaggccactcccagagaggcctaggagtaccttggtcattttttcttgcctcaaatattataaacctcca

SEQ ID NO: 464252 - DNA, 120 bp, Artificial Sequence
  ENSG00000158006_19 (sequence is synthesized)
ttcttgcctcaaatattataaacctccaacttgctcagaatcagggtgcttttattgtctgttttctggctctgaggcccttgccccaaatttaagtcagatacagactgaatttccatt

SEQ ID NO: 464253 - DNA, 120 bp, Artificial Sequence
  ENSG00000158006_20 (sequence is synthesized)
ctgttctgtttataatatgaatgatattaatactcttgtttgcttaatgttatgttggaattttctgtttaatctgcagtagagcaagatggagagccatctggaattgacttccttctg

SEQ ID NO: 464254 - DNA, 120 bp, Artificial Sequence
  ENSG00000158006_21 (sequence is synthesized)
tctttcttctgtgttcgcttactacttgggcccatgtgggaaaaaaactttaaaaggaaggaagtcttcttagggatccagttcaaagctatttgggggcatcaaactgaaactctcttc

SEQ ID NO: 464255 - DNA, 120 bp, Artificial Sequence
  ENSG00000158006_22 (sequence is synthesized)
tccactactcaagacttcgtgcctcagtccaagtaggtaagagcaaaagggaaatgcatctctacacaatggcccatggtcagggccaccagagcaagctgggcctagatctccacctgt

SEQ ID NO: 464256 - DNA, 120 bp, Artificial Sequence
  ENSG00000158006_23 (sequence is synthesized)
cagtgactggccattctaagaggtgaaacagcagatcgttgaggctgtgagggaggatctttgaattcccatgagacatagcataagaagggtatcattaaagccctgggctctaaagtt

SEQ ID NO: 464257 - DNA, 120 bp, Artificial Sequence
  ENSG00000158006_24 (sequence is synthesized)
acagagcctggttttgagtcctggctccaccactgccaactgggtaaatttgagcaaatggtattctctttcttatctcagctcctgcgtttctaaaatgagggtctgcgttatgaatag

SEQ ID NO: 464258 - DNA, 120 bp, Artificial Sequence
  ENSG00000158006_25 (sequence is synthesized)
ttaggaggattaagtgagaggatgtataacccatgggttacttaaaagtatatttcctaccttccaaacatgagatttttctagttatagtttcttttctagcttgattgctttgtggtc

SEQ ID NO: 464259 - DNA, 120 bp, Artificial Sequence
  ENSG00000158006_26 (sequence is synthesized)
agagaaaatgacccatatggtttccatccttcaaaatttgttgaaacttggttgttggcctagtatgagatcaatgttgtaaatgtgccatgtatgtttaaaaagactatatattctgaa

SEQ ID NO: 464260 - DNA, 120 bp, Artificial Sequence
  ENSG00000158006_27 (sequence is synthesized)
aagggtccccattccttctttccgatccgcgattaccctggactcgaagtcagcagacccggttctaggccagctctgcctctcaccctctgtgaccttgggcaaatcatacaactctgg

SEQ ID NO: 464261 - DNA, 120 bp, Artificial Sequence
  ENSG00000158006_28 (sequence is synthesized)
tacgacgaccaaagggccacgggttcatgggtcgtttctcatttccgtcgagttaaacgtctggggctgcttctgaggaatcagcttgactgggactttgtattcagccttctgcatgga

SEQ ID NO: 464262 - DNA, 120 bp, Artificial Sequence
  ENSG00000158008_0 (sequence is synthesized)
agttgccgactggagagggatgggaggagataccatagggtttggggggcttggcacagcggccctggcctctgcactgtgatagctccaagccagatggtgcaaggcagctgctgggct

SEQ ID NO: 464263 - DNA, 120 bp, Artificial Sequence
  ENSG00000158008_1 (sequence is synthesized)
gcggggaagaggggctgcacttcctgagctggtgcagcggcagagtggataaggatcaggaccccgagccctcctggccctccaaggcagggggacaccggctgcacccaggctgtgacc

SEQ ID NO: 464264 - DNA, 120 bp, Artificial Sequence
  ENSG00000158008_2 (sequence is synthesized)
tcagctgacgccgatgatccacatgggatgcagggtctaattttagctccagccacaggggccacagcccagaagcgtctgccagcgggcacaggggcagccagggctgctcaggcaagg

SEQ ID NO: 464265 - DNA, 120 bp, Artificial Sequence
  ENSG00000158008_3 (sequence is synthesized)
ggaggagtgggaagaccagcccagctccctccagcctgtccctggccaagccgcctcctgtgggagctctgactggtccccatggcctggcagacagccctcctctcagttgagggcaag

SEQ ID NO: 464266 - DNA, 120 bp, Artificial Sequence
  ENSG00000158008_4 (sequence is synthesized)
gtcaaggggtgcagccaggagggcagggggacacggccctgcattctggacaggggttgcgtcagccagagcagtgcccaggggcaggggtccctgctgggagggaaaaggctggcttgg

SEQ ID NO: 464267 - DNA, 120 bp, Artificial Sequence
  ENSG00000158008_5 (sequence is synthesized)
ttgtccaaaggccgagaaggcagagtcctgagagcaggggggccaggccagcaagctgggtcccacctggcctcctcctgcctggctggtgactcactatctgaccttagacaggcggcc

SEQ ID NO: 464268 - DNA, 120 bp, Artificial Sequence
  ENSG00000158008_6 (sequence is synthesized)
tggtctcgatgggcctcagtcttcccatctgtacaatgacagcacaggactagcaggtcggtcccagctctggtctcccgccccaggccctgctcttcctgcttgctggcagaggcctcc

SEQ ID NO: 464269 - DNA, 120 bp, Artificial Sequence
  ENSG00000158008_7 (sequence is synthesized)
cagcttccctagccctgactgtgggtggccacatgcagtcgtggaggagaagaaagtccctgtggctggcactgtcagcctcctggctcctgcttgtcctgctgggaggcttctcccttc

SEQ ID NO: 464270 - DNA, 120 bp, Artificial Sequence
  ENSG00000158008_8 (sequence is synthesized)
tccgcctggcattgcctcccagacctcggcccggggcttcccaaggctggccccgctggctggatgcagagctcctgcagagcttctcccagcctggagagctcccagaagatgccgttt

SEQ ID NO: 464271 - DNA, 120 bp, Artificial Sequence
  ENSG00000158008_9 (sequence is synthesized)
cacctcctcaagcccctcatggtggcagctgcaactgggaatcttgctttgatacctcaaagtgcaggggcgatggccttaaggtattcgtgtacccagcggttggaaccatctctgaga

SEQ ID NO: 464272 - DNA, 120 bp, Artificial Sequence
  ENSG00000158008_10 (sequence is synthesized)
ctcatcgcaggatcctggcttccattgagggctctcgcttctacacattcagccctgctggggcctgcctcctcctcctcctcagcctggacgcccagactggagagtgcagctcaatgc

SEQ ID NO: 464273 - DNA, 120 bp, Artificial Sequence
  ENSG00000158008_11 (sequence is synthesized)
ctctgcaatggaacaggggcaggaaccatctggtcctccgtctccacccggctccctgccccaggaccttccagctgggacaggctatggtggctgaggccagccccacggtggactcct

SEQ ID NO: 464274 - DNA, 120 bp, Artificial Sequence
  ENSG00000158008_12 (sequence is synthesized)
tccggcccggctttgatgtggccctcccttttctccctgaagcccacccgttgcgaggtggggctcctggccagctgcggcaacacagcccccagcccggggtagccctgctagccctgg

SEQ ID NO: 464275 - DNA, 120 bp, Artificial Sequence
  ENSG00000158008_13 (sequence is synthesized)
aagaggagaggggtgggtggcgcacagcagacactggctcctctgcctgcccctgggatgggcgctgtgagcaagaccctggacctgggcagacccagcgccaggagacgctgcccaatg

SEQ ID NO: 464276 - DNA, 120 bp, Artificial Sequence
  ENSG00000158008_14 (sequence is synthesized)
ccaccttctgcctcatctctggccaccgtcccgaggctgcctcgcgcttcctccaagccctgcaggccggctgcatcccagtgcttctcagcccccgctgggagctgcccttctccgagg

SEQ ID NO: 464277 - DNA, 120 bp, Artificial Sequence
  ENSG00000158008_15 (sequence is synthesized)
tcatcgactggaccaaggcagccatcgtagctgatgagaggctcccacttcaggtcctggctgccctccaggagatgtcccctgcacgggtcctcgccctgcgtcagcagacccagtttc

SEQ ID NO: 464278 - DNA, 120 bp, Artificial Sequence
  ENSG00000158008_16 (sequence is synthesized)
aggaccggatttttggaacatcagctcacccctcactgctgtggaacagccccccaggggcactcctggccctgtctactttttccacaagcccccaggacttccccttctactacctgc

SEQ ID NO: 464279 - DNA, 120 bp, Artificial Sequence
  ENSG00000158008_17 (sequence is synthesized)
aacagggctcccgccctgagggcagattcagcgccctgatctgggtggggcccccaggccagccccctctgaagctcatccaggcggtggcaggctcccagcactgtgcccagatcttgg

SEQ ID NO: 464280 - DNA, 120 bp, Artificial Sequence
  ENSG00000158008_18 (sequence is synthesized)
ttctctggagcaatgagaggccactcccatccaggtggccggagacagctgtgcccttgacagtcattgatgggcacaggaaggttagtgatcgcttctacccatatagcaccatcagaa

SEQ ID NO: 464281 - DNA, 120 bp, Artificial Sequence
  ENSG00000158008_19 (sequence is synthesized)
cagatgccatcctcagcctcgatgcccgcagcagtctttccacaagtgaggtggactttgcctttctggtgtggcagagcttcccagagcggatggtgggcttcctgacgtcgagccatt

SEQ ID NO: 464282 - DNA, 120 bp, Artificial Sequence
  ENSG00000158008_20 (sequence is synthesized)
tctgggacgaggcccatggtggctggggctacactgctgagaggaccaacgaattctccatggttctcaccacagccgccttctaccataggtattaccacactctcttcacccactccc

SEQ ID NO: 464283 - DNA, 120 bp, Artificial Sequence
  ENSG00000158008_21 (sequence is synthesized)
tgcccaaggctctgaggaccctggcagatgaggcacccacctgtgtggacgtcctgatgaatttcatagtagcagcagtcaccaagctgccccctatcaaggtgccctatggcaagcagc

SEQ ID NO: 464284 - DNA, 120 bp, Artificial Sequence
  ENSG00000158008_22 (sequence is synthesized)
gccaggaggctgctccactggcgcctgggggcccggggcccaggccaaagccgcctgccccagcccccgactgcatcaaccagatagcggcagcgttcggccacatgcccttgctgtcct

SEQ ID NO: 464285 - DNA, 120 bp, Artificial Sequence
  ENSG00000158008_23 (sequence is synthesized)
ctcgtctgcgtctggacccggtgctgtttaaggacccggtgtccgtgcagcgcaagaagtaccgcagcctggagaagccctaggggggcgacccgcggagaccccagcagaggtcgcagc

SEQ ID NO: 464286 - DNA, 120 bp, Artificial Sequence
  ENSG00000158008_24 (sequence is synthesized)
ccagctcccagggggcccggcgcctgccggcgggctccgctcttgggacaccggagaacctatcatgtcagccagcgggcccacacgtcggaccccggttggccaatcacaacagggggg

SEQ ID NO: 464287 - DNA, 120 bp, Artificial Sequence
  ENSG00000158008_25 (sequence is synthesized)
cgtggccttaccttctcctgctcgccctcagccgcggagcctctgcggaggctgagccccgcgaccggagcgccgctctccgcttctccacccagctaacttctgctcgtctttcagagc

SEQ ID NO: 464288 - DNA, 120 bp, Artificial Sequence
  ENSG00000158008_26 (sequence is synthesized)
attgtctcctccagggacttgcctggccctcctccccctccgcccccaatgggttcggtctcctttgcgctttcgcagtccagtgtttgccgcggttcccgcacggtcaggccccaggac

SEQ ID NO: 464289 - DNA, 120 bp, Artificial Sequence
  ENSG00000158008_27 (sequence is synthesized)
tggcttgcgagccccggggggcgggtcgtgtcgtgtccttttctctctggctaggcaggtgtgccgcaaatatttgacgaatagatggatggcagacattaactgcgtgcctggccctat

SEQ ID NO: 464290 - DNA, 120 bp, Artificial Sequence
  ENSG00000158008_28 (sequence is synthesized)
gagggcggcggcgggacagggtgagcggagagacagaactgtccccgccccaccccgccacccattcctagggttcctagtcccgggaaggcaactacccaaagacgcctgggttgtcag

SEQ ID NO: 464291 - DNA, 120 bp, Artificial Sequence
  ENSG00000158008_29 (sequence is synthesized)
gctcaatccttgagcctcaaccaaggagcagaggggtgcgggtaaacgaggagtggggcgaggaaagcgggatgggaacaagtggcctgtccccgcacggcccgcggctcagcctcggcc

SEQ ID NO: 464292 - DNA, 120 bp, Artificial Sequence
  ENSG00000158008_30 (sequence is synthesized)
gtctgccctgcactaccaaggccgaccactagaggtcagcgtcgcgccgcactcttcacccgcatgtccagagggcggccgggatgtggagggtgagcgctgtgggcagctcgggggctg

SEQ ID NO: 464293 - DNA, 120 bp, Artificial Sequence
  ENSG00000158008_31 (sequence is synthesized)
aaagctgggaagagaaatctgaagaacagccccatctctttcgcctgcacacttggaactcagcaagaagggactgtttctaggtgggctgggcgcgagcagggactgtcccgagcggta

SEQ ID NO: 464294 - DNA, 120 bp, Artificial Sequence
  ENSG00000158008_32 (sequence is synthesized)
taggtgagaatggagttggggggggacactaggtcctccggggttcacccacctggagctggaattatcacttccgaaataaagcgcgtgtccttgccccctcacgctccaggctataaa

SEQ ID NO: 464295 - DNA, 120 bp, Artificial Sequence
  ENSG00000158008_33 (sequence is synthesized)
ctagggactaccacagacaactctcttgagttctgaagccacaggtcactaccctcatgtcaccagaatccctgccttctacaagcccagaggcaaggacagagcagcggtgaaaggacc

SEQ ID NO: 464296 - DNA, 120 bp, Artificial Sequence
  ENSG00000158008_34 (sequence is synthesized)
atggatccaactaacccttctcccatgtgcagtttacaaagctgacttctcaaacttcttccaccttgagaaagatcactcctgcccctcgcaacccgccttctgccccagatcccagac

SEQ ID NO: 464297 - DNA, 120 bp, Artificial Sequence
  ENSG00000158008_35 (sequence is synthesized)
tgccccagcctcatctggagagccccaccaagaccctttccaagccctaacatttttcctggcccccggggattccctactcaggtcattcttcatggggttctgttccctcccactcta

SEQ ID NO: 464298 - DNA, 120 bp, Artificial Sequence
  ENSG00000158008_36 (sequence is synthesized)
atagcctgtgtctcattcccccaggctcccgccctgagggcagattcagcgccctgatctgggtggggcccccaggccagccccctctgaagctcatccaggcggtggcaggctcccagc

SEQ ID NO: 464299 - DNA, 120 bp, Artificial Sequence
  ENSG00000158014_0 (sequence is synthesized)
gacccgagacacgggagcgcttggcacgcggagccagagccggagctgcagccgcagcgggagccgggggagctcaggggccgcaggagccgggccggagtgagcgcacctcgcggggcc

SEQ ID NO: 464300 - DNA, 120 bp, Artificial Sequence
  ENSG00000158014_1 (sequence is synthesized)
ctcggggcaggtgggtgagcgccacccggagtcccgcgcgcaactttcagggcgcactcggcggggcggctgcgcggctgccgggactcggcgcgggactgcatggaggccaaggagaag

SEQ ID NO: 464301 - DNA, 120 bp, Artificial Sequence
  ENSG00000158014_2 (sequence is synthesized)
cagcatctgttggacgccaggccggcaatccggtcatacacgggatctctgtggcaggaaggggctggctggattcctctgccccgacctggcctggacttgcaggccattgagctggct

SEQ ID NO: 464302 - DNA, 120 bp, Artificial Sequence
  ENSG00000158014_3 (sequence is synthesized)
gcccagagcaaccatcactgccatgctcagaagggtcctgacagtcactgtgaccccaagaaggggaaggcccagcgccagctgtatgtagcctctgccatctgcctgttgttcatgatc

SEQ ID NO: 464303 - DNA, 120 bp, Artificial Sequence
  ENSG00000158014_4 (sequence is synthesized)
ggagaagtcgttggtgggtacctggcacacagcttggctgtcatgactgacgcagcacacctgctcactgactttgccagcatgctcatcagcctcttctccctctggatgtcctcccgg

SEQ ID NO: 464304 - DNA, 120 bp, Artificial Sequence
  ENSG00000158014_5 (sequence is synthesized)
ccagccaccaagaccatgaactttggctggcagagagctgagatcttgggagccctggtctctgtactgtccatctgggtcgtgacgggggtactggtgtacctggctgtggagcggctg

SEQ ID NO: 464305 - DNA, 120 bp, Artificial Sequence
  ENSG00000158014_6 (sequence is synthesized)
atctctggggactatgaaattgacggggggaccatgctgatcacgtcgggctgcgctgtggctgtgaacatcataatggggttgacccttcaccagtctggccatgggcacagccacggc

SEQ ID NO: 464306 - DNA, 120 bp, Artificial Sequence
  ENSG00000158014_7 (sequence is synthesized)
accaccaaccagcaggaggagaaccccagcgtccgagctgccttcatccatgtgatcggcgactttatgcagagcatgggtgtcctagtggcagcctatattttatacttcaagccagaa

SEQ ID NO: 464307 - DNA, 120 bp, Artificial Sequence
  ENSG00000158014_8 (sequence is synthesized)
tacaagtatgtagaccccatctgcaccttcgtcttctccatcctggtcctggggacaaccttgaccatcctgagagatgtgatcctggtgttgatggaagggacccccaagggcgttgac

SEQ ID NO: 464308 - DNA, 120 bp, Artificial Sequence
  ENSG00000158014_9 (sequence is synthesized)
ttcacagctgttcgtgatctgctgctgtcggtggagggggtagaagccctgcacagcctgcatatctgggcactgacggtggcccagcctgttctgtctgtccacatcgccattgctcag

SEQ ID NO: 464309 - DNA, 120 bp, Artificial Sequence
  ENSG00000158014_10 (sequence is synthesized)
aatacagacgcccaggctgtgctgaagacagccagcagccgcctccaagggaagttccacttccacaccgtgaccatccagatcgaggactactcggaggacatgaaggactgtcaggca

SEQ ID NO: 464310 - DNA, 120 bp, Artificial Sequence
  ENSG00000158014_11 (sequence is synthesized)
tgccagggcccctcagactgactgctcagccaggcaccaactggggcatgaacaggacctgcaggtggctggactgagtgtcccccaggcccagccaggactttgcctaccccagctgtg

SEQ ID NO: 464311 - DNA, 120 bp, Artificial Sequence
  ENSG00000158014_12 (sequence is synthesized)
ttgtaaaccaggtccccctcctgacctctgccccactccaggaatggagctcttcccagcctcccatctgactacagccagggtggggactcagcgggtataaagctagtgtgaccctgc

SEQ ID NO: 464312 - DNA, 120 bp, Artificial Sequence
  ENSG00000158014_13 (sequence is synthesized)
tcctgggccagctctggaagggctgtatttgggcctaatcctcagcaaatgttctaccactcgcaggggcaaaggtggtgagccacgggacgtccaaggggaggctggccccagcgcgcc

SEQ ID NO: 464313 - DNA, 120 bp, Artificial Sequence
  ENSG00000158014_14 (sequence is synthesized)
catactgcctgcctcatgccccattctcagcctggctggcctttgcctttatgaatctgagcccctccatctgcctatagcaataggcacgggggtgaggaccctcacactctcatttga

SEQ ID NO: 464314 - DNA, 120 bp, Artificial Sequence
  ENSG00000158014_15 (sequence is synthesized)
gcctccctgaggcagggagccaggaggcacctgaggcctatctgtgccttagtcacttcagctatgagccaaatgttccctttcctggaggggagaggcttcttactaggtaagagacag

SEQ ID NO: 464315 - DNA, 120 bp, Artificial Sequence
  ENSG00000158014_16 (sequence is synthesized)
gtttcctctttccttatttcctcagctgtgccaacacaaaaaacaactttggcacaggtggtgggcagggggtagagagatttcagcttgggttctgcactaacagcctccaagccccct

SEQ ID NO: 464316 - DNA, 120 bp, Artificial Sequence
  ENSG00000158014_17 (sequence is synthesized)
ggcacttctgttgccctgagagtgtcccaggggattcagagtctccagaaagatatggctgggccaactctgttgcctacctggcctgacccagtcggagcctgacatggtggagggaaa

SEQ ID NO: 464317 - DNA, 120 bp, Artificial Sequence
  ENSG00000158014_18 (sequence is synthesized)
gggagacaagtggggctgcactcggtccagaggccagctaggagggaaaccgcagcttcctggggcttgtgtgtgaagattcctgacttaggggtggcttttgtttacaagatgcaagag

SEQ ID NO: 464318 - DNA, 120 bp, Artificial Sequence
  ENSG00000158014_19 (sequence is synthesized)
gggaaacctgtccccgactcatcgagacaacatgcccagttatcagggagtcctgtgtcacaaggtctgtctctgccattgtaagcaagtgccttgggcgagctggcctctgccccacag

SEQ ID NO: 464319 - DNA, 120 bp, Artificial Sequence
  ENSG00000158014_20 (sequence is synthesized)
tctcatctgtacaccgacagggttgatgcctccctcacagggttgagaacaagagccagttggccaagtacctgtggttgttgaagattggttacttttaccatcctggggacagggaac

SEQ ID NO: 464320 - DNA, 120 bp, Artificial Sequence
  ENSG00000158014_21 (sequence is synthesized)
tctgtggcccgaggctgcctcactgaggagtcaggtgggcttcccagcctccccaggggcagtgctgagtttgtcttgactgttctggcccaaggtgggaggaggtgggtttggtcactt

SEQ ID NO: 464321 - DNA, 120 bp, Artificial Sequence
  ENSG00000158014_22 (sequence is synthesized)
gcctcccactttaaatctctgtctttccatctgtgaaatgacctctttgtgccttcccagcactgtcatcctgatcgcctgtgttctaggtaggtgggtccttcagcccctccaggtctg

SEQ ID NO: 464322 - DNA, 120 bp, Artificial Sequence
  ENSG00000158014_23 (sequence is synthesized)
tgaaaagtctgtggaaagcactggcctggagaggggtggggggttgctggtgggtgctccattccaccacaatctcaggggactcaacctcccctacccaactccccacccccacccaag

SEQ ID NO: 464323 - DNA, 120 bp, Artificial Sequence
  ENSG00000158014_24 (sequence is synthesized)
cccacccccacccaagccatggcaggccccaggaacttgatcctgggctttgccgtatgccaagtccttacacccctctcaagagacagtcattggctgggcacggtggctcatgcctgc

SEQ ID NO: 464324 - DNA, 120 bp, Artificial Sequence
  ENSG00000158014_25 (sequence is synthesized)
ccggttcccagggtcttcacctcctctggcctctgaagggccccgggccccaggactcccattcccctatcatccccgtctgaatacaggcttctcacctctggtttgtcgagctcggag

SEQ ID NO: 464325 - DNA, 120 bp, Artificial Sequence
  ENSG00000158014_26 (sequence is synthesized)
cgtccttagctatttttcccagtggacacaaggcctcacagagaaatgggactagagtcggccctccttacctcatctcagagctgagcgttccctctcttcccctctggccaggtcata

SEQ ID NO: 464326 - DNA, 120 bp, Artificial Sequence
  ENSG00000158019_0 (sequence is synthesized)
gggtacctgtaccccacgtagtcgccggttaccgatcggactaagttccagaagcaagagataaagtaataatgggtactgtggggaaaaacacagaagaacaattcggtaatatagtgg

SEQ ID NO: 464327 - DNA, 120 bp, Artificial Sequence
  ENSG00000158019_1 (sequence is synthesized)
tgatttacaagtcaagttaaaatgtccccagaagtggccttgaaccgaatatctccaatgctctcccctttcatatctagcgtggtccggaatggaaaagtgggactggatgctacaaac

SEQ ID NO: 464328 - DNA, 120 bp, Artificial Sequence
  ENSG00000158019_2 (sequence is synthesized)
tgtttgaggataactgacttaaaatctggctgcacatcattgactcctgggcccaactgtgaccgatttaaactgcacataccatatgctggagagacattaaagtgggatatcattttc

SEQ ID NO: 464329 - DNA, 120 bp, Artificial Sequence
  ENSG00000158019_3 (sequence is synthesized)
aatgcccaatacccagaactgcctcccgattttatctttggagaagatgctgaattcctgccagacccctcagctttgcagaatcttgcctcctggaatccttcaaatcctgaatgtctc

SEQ ID NO: 464330 - DNA, 120 bp, Artificial Sequence
  ENSG00000158019_4 (sequence is synthesized)
ttacttgtggtgaaggaacttgtgcaacaatatcaccaattccaatgtagccgcctccgggagagctcccgcctcatgtttgaataccagacattactggaggagccacagtatggagag

SEQ ID NO: 464331 - DNA, 120 bp, Artificial Sequence
  ENSG00000158019_5 (sequence is synthesized)
aacatggaaatttatgctgggaaaaaaaacaactggactggtgaattttcagctcgtttccttttgaagctgcccgtagatttcagcaatatccccacataccttctcaaggatgtaaat

SEQ ID NO: 464332 - DNA, 120 bp, Artificial Sequence
  ENSG00000158019_6 (sequence is synthesized)
gaagaccctggagaagatgtggccctcctctctgttagttttgaggacactgaagccacccaggtgtaccccaagctgtacttgtcacctcgaattgagcatgcacttggaggctcctca

SEQ ID NO: 464333 - DNA, 120 bp, Artificial Sequence
  ENSG00000158019_7 (sequence is synthesized)
ctcttcatatcccagcttttccaggaggaggatgtctcattgattacgttcctcaagtatgccacctgctcaccaacaaggtgcagtacgtgattcaagggtatcacaaaagaagagagt

SEQ ID NO: 464334 - DNA, 120 bp, Artificial Sequence
  ENSG00000158019_8 (sequence is synthesized)
atattgctgcttttctcagtcactttggcacaggtgtcgtggaatatgatgcagaaggctttacaaaactcactctgctgctgatgtggaaagatttttgttttcttgtacacattgacc

SEQ ID NO: 464335 - DNA, 120 bp, Artificial Sequence
  ENSG00000158019_9 (sequence is synthesized)
tgcctctgtttttccctcgagaccagccaactctcacatttcagtccgtttatcactttaccaacagtggacagctttactcccaggcccaaaaaaattatccgtacagccccagatggg

SEQ ID NO: 464336 - DNA, 120 bp, Artificial Sequence
  ENSG00000158019_10 (sequence is synthesized)
atggaaatgaaatggccaaaagagcaaaggcttatttcaaaacctttgtccctcagttccaggaggcagcatttgccaatggaaagctctaggaaacaccagtcttgagaggtggccagc

SEQ ID NO: 464337 - DNA, 120 bp, Artificial Sequence
  ENSG00000158019_11 (sequence is synthesized)
cagactgcctgtccacatgcgtgtcagcacatacagccgcttcctggaagccgcctggaatgtcttcacggcagcgttttgctcacacagcagcttttgcacgccccaggcagccccgac

SEQ ID NO: 464338 - DNA, 120 bp, Artificial Sequence
  ENSG00000158019_12 (sequence is synthesized)
tgctgaaatccaacttgagctggctggtggtccctggatcctagagcccttcacttcgggttactccctctttcttgcctctatttcttagttggaagaaataaactcacaaattatggt

SEQ ID NO: 464339 - DNA, 120 bp, Artificial Sequence
  ENSG00000158019_13 (sequence is synthesized)
gcagtaattttccggggaaagtaaagcctcaggaatgcccacgcctttcttccaaagcctttgtctctgagacctcttaagttctaagattaaatgcccctcgctgttcttcctctgaaa

SEQ ID NO: 464340 - DNA, 120 bp, Artificial Sequence
  ENSG00000158019_14 (sequence is synthesized)
tatctcctaagatattgttcactagcatttaccacttttcttatctgccattcaattctagtttgattaaaagtaaggcagttggcagggaatacgttgtggttaaataggcatgcacag

SEQ ID NO: 464341 - DNA, 120 bp, Artificial Sequence
  ENSG00000158019_15 (sequence is synthesized)
aaattcctaatatttaggcatgcccggtaatttttatgtgtttttttctctataggcggcttttacgtaatactcaataaagagtccactgctttagaatacctggccatttcgaaacag

SEQ ID NO: 464342 - DNA, 120 bp, Artificial Sequence
  ENSG00000158019_16 (sequence is synthesized)
tttttaggtaggagtggctgctgtccatcactgctgctaacccccctgtggaaccgctgcgccacgacttgtcactgatttatctcctgttgttaccgaagtgtaagagtcctacctcaa

SEQ ID NO: 464343 - DNA, 120 bp, Artificial Sequence
  ENSG00000158019_17 (sequence is synthesized)
aatgtaccagaaccaattcaacctttacctaatgacagcccttccttaccagactcataaaaattgactgccacagaaacccaccaagtcatcatctcatcatatgttgattcagttggt

SEQ ID NO: 464344 - DNA, 120 bp, Artificial Sequence
  ENSG00000158019_18 (sequence is synthesized)
tttgttcagttcttgacattttatgtttcaggttattttatttgtgttgtggaccattgttttatgactagaatgttcatgtctttttttctgttttttctttgtgaagagcatgccgtc

SEQ ID NO: 464345 - DNA, 120 bp, Artificial Sequence
  ENSG00000158019_19 (sequence is synthesized)
agagttttaaaagtgtgtttttcattcattggcttgttttcttattgtgtttgctgcagtccagcaacaaacatattctgaatctgataccatttggtaaactctcttaatgtgaatatt

SEQ ID NO: 464346 - DNA, 120 bp, Artificial Sequence
  ENSG00000158019_20 (sequence is synthesized)
caccactctggggatcagaagtatcagtgccaagtggtccctttcatctcctcataattcttccccagccacttagtgggttagtcaggccctgccttctcttcagccagccctgcagtc

SEQ ID NO: 464347 - DNA, 120 bp, Artificial Sequence
  ENSG00000158019_21 (sequence is synthesized)
ctcagcagccgggccaagaaaggtctttgggggcgcaagtctttggagggcaggtctttggggagcgctttgagtaatattagagctttcactaaaccctggcctattacgtcccctccc

SEQ ID NO: 464348 - DNA, 120 bp, Artificial Sequence
  ENSG00000158019_22 (sequence is synthesized)
ctgagatttacctttatatactcaagttctttcatgccaggaaggtaggctgaaggcttcgaaaacctgcagctcatacccaaagctagcactgtctatccctggagacccagcgcccaa

SEQ ID NO: 464349 - DNA, 120 bp, Artificial Sequence
  ENSG00000158019_23 (sequence is synthesized)
aagctccactgggcgcatagcgcacggcacgcctcctcccccgagccgcagactgagtaactggccccggactaacctgaccagaagcaagagataaagtaataatgggtactgtgggga

SEQ ID NO: 464350 - DNA, 120 bp, Artificial Sequence
  ENSG00000158019_24 (sequence is synthesized)
gcagcccgtgggagcaagtcctggcctttgcagttgcaaaaactggctgcaagctgctccagccccagaggaactggccaagctccagagggcctccttggagggcctcagagggagaga

SEQ ID NO: 464351 - DNA, 120 bp, Artificial Sequence
  ENSG00000158022_0 (sequence is synthesized)
gacagaattcgggcaccaggagaaggaagccaacaggatccgacccggtgttttgtgacaaaggcaagacccccaggtctacttagagcaaagttagtagaggaggcagctaggcgtggc

SEQ ID NO: 464352 - DNA, 120 bp, Artificial Sequence
  ENSG00000158022_1 (sequence is synthesized)
tctcattccttcccacagaatggattataagtcgagcctgatccaggatgggaatcccatggagaacttggagaagcagctgatctgccctatctgcctggagatgtttaccaagccagt

SEQ ID NO: 464353 - DNA, 120 bp, Artificial Sequence
  ENSG00000158022_2 (sequence is synthesized)
ggtcatcttgccgtgccagcacaacctgtgccggaagtgtgccaatgacatcttccaggctgcaaatccctactggaccagccggggcagctcagtgtccatgtctggaggccgtttccg

SEQ ID NO: 464354 - DNA, 120 bp, Artificial Sequence
  ENSG00000158022_3 (sequence is synthesized)
ctgccccacctgccgccacgaggtgatcatggatcgtcacggagtgtacggcctgcagaggaacctgctggtggagaacatcatcgacatctacaaacaggagtgctccagtcggccgct

SEQ ID NO: 464355 - DNA, 120 bp, Artificial Sequence
  ENSG00000158022_4 (sequence is synthesized)
gcagaagggcagtcaccccatgtgcaaggagcacgaagatgagaaaatcaacatctactgtctcacgtgtgaggtgcccacctgctccatgtgcaaggtgtttgggatccacaaggcctg

SEQ ID NO: 464356 - DNA, 120 bp, Artificial Sequence
  ENSG00000158022_5 (sequence is synthesized)
cgaggtggccccattgcagagtgtcttccagggacaaaagactgaactgaataactgtatctccatgctggtggcggggaatgaccgtgtgcagaccatcatcactcagctggaggattc

SEQ ID NO: 464357 - DNA, 120 bp, Artificial Sequence
  ENSG00000158022_6 (sequence is synthesized)
ccgtcgagtgaccaaggagaacagtcaccaggtaaaggaagagctgagccagaagtttgacacgttgtatgccatcctggatgagaagaaaagtgagttgctgcagcggatcacgcagga

SEQ ID NO: 464358 - DNA, 120 bp, Artificial Sequence
  ENSG00000158022_7 (sequence is synthesized)
ccagtccctggacgagcctgggggagccaccttcctcttgactgccaagcaactcatcaaaagcattgtggaagcttccaagggctgccagctggggaagacagagcagggctttgagaa

SEQ ID NO: 464359 - DNA, 120 bp, Artificial Sequence
  ENSG00000158022_8 (sequence is synthesized)
catggacttctttactttggatttagagcacatagcagacgccctgagagccattgactttgggacagatgaggaagaggaagaattcattgaagaagaagatcaggaagaggaagagtc

SEQ ID NO: 464360 - DNA, 120 bp, Artificial Sequence
  ENSG00000158022_9 (sequence is synthesized)
cacagaagggaaggaagaaggacaccagtaaggagctggatgaatgagaggcccccagatgcagagagactggagagggtggggaggggcccagcggccttggtgacaggcccagggtgg

SEQ ID NO: 464361 - DNA, 120 bp, Artificial Sequence
  ENSG00000158022_10 (sequence is synthesized)
gaggggtcggggcccctggaggggcaatggggaggtgatgtcttctctctgctcagagagcagggactagggtaggaccctcaccgctgcgtccagcagacactgaaccagaattggaaa

SEQ ID NO: 464362 - DNA, 120 bp, Artificial Sequence
  ENSG00000158022_11 (sequence is synthesized)
cgtgcttgaaacaatcacacaggacacttttctacattggtgcaaaatggaatattttgtacatttttaaaatgtgatttttgtatatacttgtatatgtatgccaatttggtgcttttt

SEQ ID NO: 464363 - DNA, 120 bp, Artificial Sequence
  ENSG00000158022_12 (sequence is synthesized)
gtaaaggaacttttgtataataatgcctggtcgttgggtgacctgcgattgtcagaaagaggggaaggaagccaggttgatacagctgcccacttcctttcctgagcaggaggatggggt

SEQ ID NO: 464364 - DNA, 120 bp, Artificial Sequence
  ENSG00000158022_13 (sequence is synthesized)
agcactcacagggacgatgtgctgtatttcagtgcctatcccagacatacggggtggtaactgagtttgtgttatatgttgttttaataaatgcacaatgctctcttcctgttcttcaaa

SEQ ID NO: 464365 - DNA, 120 bp, Artificial Sequence
  ENSG00000158022_14 (sequence is synthesized)
taagtgaaataagtggccgagggatggaggatgggctggttggagtgggggtctccatcatctccagcaaaatgctgtgctgaagtctgaggcagagggatgggctcagagagaggggct

SEQ ID NO: 464366 - DNA, 120 bp, Artificial Sequence
  ENSG00000158022_15 (sequence is synthesized)
gcccgacccttccatctaggagctgcccaggactccagaggaggggatggaattgatttaggtcagtgaggggttgcgtggggctgggagggggttgaggttgggaggctgaaggaggag

SEQ ID NO: 464367 - DNA, 120 bp, Artificial Sequence
  ENSG00000158022_16 (sequence is synthesized)
gcagtgagcagagatcgtgccactgcacaatcctttctatctcccttcctgggctgtgagtttctcggggcagggaaacagatcactcatccatctgtcacgttgtgatgtatactagtt

SEQ ID NO: 464368 - DNA, 120 bp, Artificial Sequence
  ENSG00000158022_17 (sequence is synthesized)
atctgtcacgttgtgatgtatactagttgcctgatgtatatactagtactcagaaaaatgtctgatgaatgaataaaattcattcatcgaacattttcatcatagcattggctattaacc

SEQ ID NO: 464369 - DNA, 120 bp, Artificial Sequence
  ENSG00000158022_18 (sequence is synthesized)
ccttgaatccccgtggctcacttgctgggtcccatccctgacccactagcctggtgccggggggagaccaatttctggaggaagctctgggtacccagtcttgccctaagcctgcctctg

SEQ ID NO: 464370 - DNA, 120 bp, Artificial Sequence
  ENSG00000158022_19 (sequence is synthesized)
ttgctcatccctgcatgtgatttgagagggccagtctttcaggcctggaggaaactcaagccccaccagccgcttggcatcggaatgctcagctggtcccctcctggggctcatgtgacc

SEQ ID NO: 464371 - DNA, 120 bp, Artificial Sequence
  ENSG00000158023_0 (sequence is synthesized)
agaactagggagctggtggagaaggtggcggccgctggaaggaggcccgggaggtggctgaggggtccaggcggcgggacgactctggccttttgaagaccgggaggaaactctacagag

SEQ ID NO: 464372 - DNA, 120 bp, Artificial Sequence
  ENSG00000158023_1 (sequence is synthesized)
aagaatgtcagatgcagcagaagctccccgagaagcaacaggagaaaatggagaaacagaaatgaaagaagaggaggaacctaatccaaattataaagaagtagaagatccacaacagga

SEQ ID NO: 464373 - DNA, 120 bp, Artificial Sequence
  ENSG00000158023_2 (sequence is synthesized)
atcaaaagatgacacaatagcatggagagagtctcaggaggaggagaggaaaacgggcgaggaggaaggggaggaggaggggaaggaggacaaaaagattgtcatggaagaaactgagga

SEQ ID NO: 464374 - DNA, 120 bp, Artificial Sequence
  ENSG00000158023_3 (sequence is synthesized)
aaaggctggagaagtccaagagaaggaggcttcaggaatacaggaagaaaccacagtagagccccaagaagtcacagcgtccatgatccgtttggagacacagattactgattcccagtc

SEQ ID NO: 464375 - DNA, 120 bp, Artificial Sequence
  ENSG00000158023_4 (sequence is synthesized)
aatcacatcaggaattttcccaaaaacccaaagaggtagcaagtcaaagctttccttacaattggaggatgcagaaacagatgagcttttaagagacctgagcacacaaattgaatttct

SEQ ID NO: 464376 - DNA, 120 bp, Artificial Sequence
  ENSG00000158023_5 (sequence is synthesized)
tgatttggatcaaatcagtcctgaggaacaacagattagttcccctgaaaggcagccctcaggagagcttgaggagaaaaccgaccggatgccccaagatgaactgggacaagaaagaag

SEQ ID NO: 464377 - DNA, 120 bp, Artificial Sequence
  ENSG00000158023_6 (sequence is synthesized)
ggacttggagccagaaaacagagaggagggacaagaaaggagagtatccgacatccagtccaaagcagggatctcccgggagtcactggtgtccagcaccacagaggacattctgtttca

SEQ ID NO: 464378 - DNA, 120 bp, Artificial Sequence
  ENSG00000158023_7 (sequence is synthesized)
aaaggataaaagcaccccggtgtatcccttgaccatgacctggtcgtttggatggaacagttctcttcctgtttactatattcgagaggaaaggcagagagttcttctgtatgtttgtgc

SEQ ID NO: 464379 - DNA, 120 bp, Artificial Sequence
  ENSG00000158023_8 (sequence is synthesized)
tcacactgcgatcatctacaacgtgttcaggaacaatcaataccaccttcagggccacgccaatattatctcctgcctctgcgtcagtgaagacaggcggtggatcgccacagcagacaa

SEQ ID NO: 464380 - DNA, 120 bp, Artificial Sequence
  ENSG00000158023_9 (sequence is synthesized)
agggccagactgcctggtgattatatgggactccttcacaggtattcctgtgcacacaatatttgacagctgccctgaagggaatggcatcatggccatggccatgacccacgacgccaa

SEQ ID NO: 464381 - DNA, 120 bp, Artificial Sequence
  ENSG00000158023_10 (sequence is synthesized)
gtatctggcaaccatctcagatgctgaagtccagaaggtatgcatctggaagtggactttggcagtggaaacgccagcatgcactctcgaactccccacagagtacggtgttcagaacta

SEQ ID NO: 464382 - DNA, 120 bp, Artificial Sequence
  ENSG00000158023_11 (sequence is synthesized)
cgttacttttaacccaacaaataataaagaattggtgagcaatagtaaaacacgggcaatatattatgcatggtatgaagagagggatacactggctcacagtgccccacttttaactga

SEQ ID NO: 464383 - DNA, 120 bp, Artificial Sequence
  ENSG00000158023_12 (sequence is synthesized)
aaaaaccttcaacaagcttgtgggaaagtttagccagtccatctttcacttgaatttaacacaaatactctcagccacaatggaagggaagctggttgtctgggacatacaccgcccacc

SEQ ID NO: 464384 - DNA, 120 bp, Artificial Sequence
  ENSG00000158023_13 (sequence is synthesized)
ctcatctgcctccacctttttgggctttccctatatcaagccttgtaaattggttcatttgcagaaagagggtatcacggtacttaccacaattgatagctacattgtcacaggtgacat

SEQ ID NO: 464385 - DNA, 120 bp, Artificial Sequence
  ENSG00000158023_14 (sequence is synthesized)
taaggggaacattaagttctatgatcacaccctgtctattgttaactggtacagtcacttgaaactgggcgccataagaactctgtccttttcaaagaccccagcaactcctcctactga

SEQ ID NO: 464386 - DNA, 120 bp, Artificial Sequence
  ENSG00000158023_15 (sequence is synthesized)
ctatcctcctgactgcactttaaaaggtgacctttttgtcttaaggaattttatcattggaacatctgatgccgcggtgtaccacttaacaacagatgggaccaaacttgagaagttatt

SEQ ID NO: 464387 - DNA, 120 bp, Artificial Sequence
  ENSG00000158023_16 (sequence is synthesized)
tgtagagcccaaggatgccatttgtgccatctcctgccacccatatcaacccctcattgccatcgggagcatctgtgggatgatcaaagtgtggaattatgaaaacaaacaatatctttt

SEQ ID NO: 464388 - DNA, 120 bp, Artificial Sequence
  ENSG00000158023_17 (sequence is synthesized)
cagcagggtttttgagaaggggcttggagtccagagtctgacctacaaccccgaaggagcccttcttggagctggctttacagaggggacagtttacattcttgatgcaatgtctttaga

SEQ ID NO: 464389 - DNA, 120 bp, Artificial Sequence
  ENSG00000158023_18 (sequence is synthesized)
aaatgaaagcccagagcctttcaaatattccagaaccagtgtgactcatataagcttttcccatgactcccagtatatggcaactgctgatagaagttttactgtggctgtttacatgct

SEQ ID NO: 464390 - DNA, 120 bp, Artificial Sequence
  ENSG00000158023_19 (sequence is synthesized)
ggtggtcagaaatggacagagggtctgggagtacttagcaagacttcgctctcatcgcaaaagcattcgaagtctcctgtttggggtttacctggacagcaatgagcctagactgctgag

SEQ ID NO: 464391 - DNA, 120 bp, Artificial Sequence
  ENSG00000158023_20 (sequence is synthesized)
ccttgggacagacaggctcttgatagagtatgatcttctcaggagctacaaagaccacctggaagtcctggacattcaccacaccgaccagggctgctatcccacctgcatggtctggta

SEQ ID NO: 464392 - DNA, 120 bp, Artificial Sequence
  ENSG00000158023_21 (sequence is synthesized)
cccaccactcaccagggaactcttcctgcttatttgcaacagtggctacaaagtgaagctttttaatgctactaccaaaatgtgcagaaagacgcttctggggccagcttatggttcccc

SEQ ID NO: 464393 - DNA, 120 bp, Artificial Sequence
  ENSG00000158023_22 (sequence is synthesized)
tattgagcagacacaagtcctcccagtgagaagcatggcggagctacagaaacgctacttggtgtttattaacagagacaaggtgggacttcagatcttaccagttgacggcaatccaca

SEQ ID NO: 464394 - DNA, 120 bp, Artificial Sequence
  ENSG00000158023_23 (sequence is synthesized)
taagacatctgctattgtttgccacccgaacggggtggccggcatggccgtttcctatgatggctgctacgccttcactgcgggagggcacgatcgctcggtggtgcagtggaaaatcac

SEQ ID NO: 464395 - DNA, 120 bp, Artificial Sequence
  ENSG00000158023_24 (sequence is synthesized)
cttaagtgtcctggaggcagcggtttctcttgggggtgaagacttgaccccattctatggtctgctgtctggtggccgggaaggaaaattctacagggagctagaagactacttctacta

SEQ ID NO: 464396 - DNA, 120 bp, Artificial Sequence
  ENSG00000158023_25 (sequence is synthesized)
ttctcagctccgcagtcaaggcatcgacacaatggagaccagaaaggtgtcagaacacatttgcctgtcagagcttccttttgtcatgagagcaattggcttttacccatctgaagagaa

SEQ ID NO: 464397 - DNA, 120 bp, Artificial Sequence
  ENSG00000158023_26 (sequence is synthesized)
gattgatgatatatttaacgaaatcaaatttggtgaatatgtggacactggaaagctaatcgacaagatcaacttaccagatttcctaaaagtgtaccttaaccacaagccaccttttgg

SEQ ID NO: 464398 - DNA, 120 bp, Artificial Sequence
  ENSG00000158023_27 (sequence is synthesized)
taacaccatgagtggcatccacaagagctttgaggtgctcggttataccaactccaaagggaaaaaggccattcgaagagaggacttcctgagactgctcgttactaaaggtgagcatat

SEQ ID NO: 464399 - DNA, 120 bp, Artificial Sequence
  ENSG00000158023_28 (sequence is synthesized)
gacggaggaggagatgttggattgctttgcttcactgtttggcctgaatcccgagggatggaaatccgagcctgcaacctgctccgtcaaaggttcagaaatttgccttgaagaagaact

SEQ ID NO: 464400 - DNA, 120 bp, Artificial Sequence
  ENSG00000158023_29 (sequence is synthesized)
tccagacgaaatcactgcagaaatattcgcgactgaaattcttggcttaaccatttcagaagattccggccaggatggtcagtgaagttaccaggaatgtttaaagcacaaaggactttg

SEQ ID NO: 464401 - DNA, 120 bp, Artificial Sequence
  ENSG00000158023_30 (sequence is synthesized)
ggtgtgtgtgcatgcacatgtgtgtgttttccatgaggcactgctttttatgcatttccctcccccctctcatctttagaacatttagacattaaagcaagtttctggtgagcaatggaa

SEQ ID NO: 464402 - DNA, 120 bp, Artificial Sequence
  ENSG00000158023_31 (sequence is synthesized)
agaactagggagctggtggagaaggtggcggccgctggaaggaggcccgggaggtggctgaggggtccaggcggcgggacgactctggccttttgaagaccggggtgggtgctctctagg

SEQ ID NO: 464403 - DNA, 120 bp, Artificial Sequence
  ENSG00000158023_32 (sequence is synthesized)
catcagacacatcaagaagctaactccaaggggtctgatgactgcccaagcaatggaggaggcagtggagctgggattcacagccagggctttctaagtccaccccacaccttaacaaac

SEQ ID NO: 464404 - DNA, 120 bp, Artificial Sequence
  ENSG00000158023_33 (sequence is synthesized)
attcattacaggaggaaaataaaggacttttgtctccaatctttgtgatatggtttggctctgtgttcctacccaaatctcatcttgaattgtactccgataattcccgtgtatggtggg

SEQ ID NO: 464405 - DNA, 120 bp, Artificial Sequence
  ENSG00000158023_34 (sequence is synthesized)
ttgaattgtactccgataattcccgtgtatggtgggagggacctggtgggagatggttggatggtgggggagcagggggtggtttcccccatgttgttctcgtggtagtgaataagtctc

SEQ ID NO: 464406 - DNA, 76 bp, Artificial Sequence
  ENSG00000158023_35 (sequence is synthesized)
tctcacaagatctgatggtttgataaggggaaacctgtttcacttggctctcattctctcttgccactgccatgtg

SEQ ID NO: 464407 - DNA, 120 bp, Artificial Sequence
  ENSG00000158023_36 (sequence is synthesized)
gtattttgttttgtatctcaagggctgacttcattctatcactgtcgtattttcccactctccttggaactaaaagcaagcctgtctttagaaacacatggtattgtttattgtctctct

SEQ ID NO: 464408 - DNA, 120 bp, Artificial Sequence
  ENSG00000158023_37 (sequence is synthesized)
gtttctaatcagaatcaacttacaaaacagcagttgatattaattttatagtgagaatttaaaacatctgtattttttacacttctgcaaaaatgtggacagcgtagatcatatctccac

SEQ ID NO: 464409 - DNA, 120 bp, Artificial Sequence
  ENSG00000158023_38 (sequence is synthesized)
agatataacacaaagggcagctattcagcagggtgccgacctcacggacacttacacacatctctagttttcaaagggctttcatcttataactgtaccgagaagtgggtattcatatat

SEQ ID NO: 464410 - DNA, 120 bp, Artificial Sequence
  ENSG00000158023_39 (sequence is synthesized)
ttttaagtgacttgcccaagactgtactagtaaacaatgactctacatctcctgtcttgaaagtgttaagtaggtcagttgtccttttatccctccctcctctcagcagctttgctcatt

SEQ ID NO: 464411 - DNA, 120 bp, Artificial Sequence
  ENSG00000158023_40 (sequence is synthesized)
ttcacccctctctgagcctcccccatttgtccttcatgcctgccctcctcacagcactctgcctcctttgttcctgatatttgggacccacttcattttcatcatttacctttccaagca

SEQ ID NO: 464412 - DNA, 120 bp, Artificial Sequence
  ENSG00000158023_41 (sequence is synthesized)
tcctattccttggtgtctgactttccactcgttggcctggtcaactgttccacatcaccctttcagttgacgtgtgttgttacaggagtgtccttagctgatgcctagatcaaaaacacc

SEQ ID NO: 464413 - DNA, 120 bp, Artificial Sequence
  ENSG00000158023_42 (sequence is synthesized)
acgaggtatttaccaaggacccagtcagtactcagtgttgtgccagggactcaagatgtctgggtgcaacttaaggaattcactctctagaagtccagaaatacgcaggcagaaatcagc

SEQ ID NO: 464414 - DNA, 120 bp, Artificial Sequence
  ENSG00000158023_43 (sequence is synthesized)
aggcagctccccttggagcttcattgaatgcatggcactgaacacagtggtgatggcagagagagaaggagagattgctgtgggcaggctcagatagtcaggggaagcaggatgcgcaga

SEQ ID NO: 464415 - DNA, 120 bp, Artificial Sequence
  ENSG00000158023_44 (sequence is synthesized)
tgggctggggtggaaggaggcaggagtccagcctcactagggccagagggctgggagtggccttgaccatccattcgtttcacaaatagttatagctgctatgtttcacagtataggtct

SEQ ID NO: 464416 - DNA, 120 bp, Artificial Sequence
  ENSG00000158023_45 (sequence is synthesized)
gtagtaatgaacaaaacagatgtattccctgctctcatggagcttacagtctagaacagagacagatgttaaacaagtgaacacataaatgattacaaattgtaaccagtgcttgaaagg

SEQ ID NO: 464417 - DNA, 120 bp, Artificial Sequence
  ENSG00000158023_46 (sequence is synthesized)
agatgtgaaaacgctctaagggagaaaaatcagggtaagagaagacttaactttagattgagtgggcagggattgaagaggtgctgtttctgctgagacctggaggatgcgaatgagcca

SEQ ID NO: 464418 - DNA, 120 bp, Artificial Sequence
  ENSG00000158023_47 (sequence is synthesized)
gccaaagacagtctgggggagaacattccaaacagagggagcaacaagtgttcaggcctgtgtgtggggcctggaaagaaggctggtgtggctgctgcaccatgagggagacagagaagg

SEQ ID NO: 464419 - DNA, 120 bp, Artificial Sequence
  ENSG00000158023_48 (sequence is synthesized)
aaggagggaagaggggccatttcccagcagggagtgctgccatttgtgttcccagaagattcctctcttgtgtgcataaaaggattgtaagaagataagagtggaagcagaggccgagca

SEQ ID NO: 464420 - DNA, 90 bp, Artificial Sequence
  ENSG00000158023_49 (sequence is synthesized)
ttgtaagaagataagagtggaagcagttcagcacaggctgtggccaaggaggctgaggtgggtatatcgcttgagcccaggagtttgagg

SEQ ID NO: 464421 - DNA, 120 bp, Artificial Sequence
  ENSG00000158023_50 (sequence is synthesized)
ttgggattacagatgtgagccactgcacccagctagaaccttccttctgaaatgtttgtcttcttctcagtcgtcgtgggatctggaatggtagaaatttaagaagaagaaaaaaaggcc

SEQ ID NO: 464422 - DNA, 120 bp, Artificial Sequence
  ENSG00000158023_51 (sequence is synthesized)
agaagaaaaaaaggcctctgctttccaatagctttcgcctggccagagtccaggcttctgagaatttcaatttaatctgtggtggggacaaaggatcattataaactaattatcacttca

SEQ ID NO: 464423 - DNA, 120 bp, Artificial Sequence
  ENSG00000158023_52 (sequence is synthesized)
ctggagggtgtttttaagttcttgcagtgacaagttgtcacattttctttttgcttcatccagatgcatgaatcaaagcaactgaagtctgaaagggaatgaaatgccatgagccagtat

SEQ ID NO: 464424 - DNA, 120 bp, Artificial Sequence
  ENSG00000158023_53 (sequence is synthesized)
ctgtaacctgcgggtgacaactcgagagcaacaagtgactgggtttaagatgatctccttttaaaggcgtctttaaagcaaaaggaagcatgtgtgttagggatccacgcgcatgtgatg

SEQ ID NO: 464425 - DNA, 120 bp, Artificial Sequence
  ENSG00000158023_54 (sequence is synthesized)
aaccacatagagcagtgaagtggtgcaaatggaaaattcagtagccagtacatggggcgaggaggtagtgagatggcacgagggaacagcacatgcgtgaatgcaaaggcgtacgccaca

SEQ ID NO: 464426 - DNA, 120 bp, Artificial Sequence
  ENSG00000158023_55 (sequence is synthesized)
ttttttgtagagacagagtttcaccaggttgtgcaggctggtctctagttcctgggttcaagcagttctcctgtcccagcctcccaaaatgctgagatggcaaggtgtgagtcaccgttc

SEQ ID NO: 464427 - DNA, 120 bp, Artificial Sequence
  ENSG00000158023_56 (sequence is synthesized)
caaggtgtgagtcaccgttcctgaccatcatctctcaaaaaaaaaaaaaaaaaaaaggcatgcatgatggctcactcctgcatccctacactttgggaggcagctgtgctgcagcctggg

SEQ ID NO: 464428 - DNA, 120 bp, Artificial Sequence
  ENSG00000158023_57 (sequence is synthesized)
tgatagagcgagattctgtctcttaaagaaaaaaaatttaagtcttccaatccctgaatatggaaagtctttccatttacttatgttttctttagttttttttttttttacaatattttg

SEQ ID NO: 464429 - DNA, 120 bp, Artificial Sequence
  ENSG00000158023_58 (sequence is synthesized)
tagcttttagagcacaaatcttgcatttttgttaaattgattcctaagtactttattcttcttaatcctattataattggaattgttttattaatttattataattattgtgctgttcac

SEQ ID NO: 464430 - DNA, 120 bp, Artificial Sequence
  ENSG00000158023_59 (sequence is synthesized)
tgctagtgtgtaaagaaatacaatagtttgtttttttttttttgagttagagttttgcacttgtcacccaggctggagtgtaatggcgccatctcagctcactacagcctccacctcccc

SEQ ID NO: 464431 - DNA, 78 bp, Artificial Sequence
  ENSG00000158023_60 (sequence is synthesized)
taggcatacgctaccacgccgggctaatttcgtatttttagtggagacagattttcaccgtgttggccaggctggtct

SEQ ID NO: 464432 - DNA, 120 bp, Artificial Sequence
  ENSG00000158023_61 (sequence is synthesized)
ggtgatctacccaccttggcctcccagagtgctggaattacaagcctgagccaccatgcccggcctcaattgattttttttttaagacagggtctcactttgtgtcccaggctggagtgc

SEQ ID NO: 464433 - DNA, 90 bp, Artificial Sequence
  ENSG00000158023_62 (sequence is synthesized)
aggctggagtgcagtggcatgatcatgggctcactgcagcctcgaacttgtgggctcaagcagaaccataggtgcatgccacatgcctga

SEQ ID NO: 464434 - DNA, 89 bp, Artificial Sequence
  ENSG00000158023_63 (sequence is synthesized)
ctcagccccctgagtagctggaaccataggtgcatgccacatgcctgattaattttttgttttctgtagaagcagggtcttttaacctc

SEQ ID NO: 464435 - DNA, 120 bp, Artificial Sequence
  ENSG00000158023_64 (sequence is synthesized)
acaggggtgagccactgcacctggcctataattgatgtttatattattgatcttataccctgcaaccttgctgaagttgtttaccagttctaatagtttttagtgtaatatatatatata

SEQ ID NO: 464436 - DNA, 120 bp, Artificial Sequence
  ENSG00000158023_65 (sequence is synthesized)
tctcccattcaattctgggtgccttttatcttcttttcctgcctaatttccctggctagaacctccaggacagtgtggaatggaagtggtgccaggtggctcatgcctgtaatcccagca

SEQ ID NO: 464437 - DNA, 120 bp, Artificial Sequence
  ENSG00000158023_66 (sequence is synthesized)
gcctatagtcccaggaactctggaggctgaggtgagaggatcgcctgaacctgagaggtcaaggctacagtgagcagaggttgcctcactgcactccagtctgggtcaaagagtgagacc

SEQ ID NO: 464438 - DNA, 120 bp, Artificial Sequence
  ENSG00000158023_67 (sequence is synthesized)
aaaaaaaaaaaaaaaaaaaagggggaagtggtgagagtggacatccttgtctttttttctgatcttaggaggagaaagcatttagtccttcatcattaagtatgatgttagctgtgggtt

SEQ ID NO: 464439 - DNA, 120 bp, Artificial Sequence
  ENSG00000158023_68 (sequence is synthesized)
atgttagctgtgggtttttcacacatgcccgttattgggttgaggaagcttctttctattcctagtttgttgagtgtttttaccatgtaaagttgttagattttgttaaatgcttttttt

SEQ ID NO: 464440 - DNA, 120 bp, Artificial Sequence
  ENSG00000158023_69 (sequence is synthesized)
ctatgtctgtttagatgatcatgtggtttctgtcctttattctgttaataataatgtattatattaattgaggttgacatgttaaaccaaccttgcattcttgggataaatcccacttga

SEQ ID NO: 464441 - DNA, 120 bp, Artificial Sequence
  ENSG00000158023_70 (sequence is synthesized)
tcatggtgcacaatcattttgtatgctcctggatttaatttcttgtattttctggaggatttttccatctaaaataattggaaagtattcctttttcctctatttttgtgcagtttgtgg

SEQ ID NO: 464442 - DNA, 79 bp, Artificial Sequence
  ENSG00000158023_71 (sequence is synthesized)
ttcttggctcactgtaacctcaacttccagggttcaagtgattctcatactgtgccaggctaatttttgtatttttagt

SEQ ID NO: 464443 - DNA, 120 bp, Artificial Sequence
  ENSG00000158023_72 (sequence is synthesized)
tgtgggtagaagtatgtgttcattctttgagtacaaatgtttcagtaatgtaacaatatagtatctctacttaggaagcaatgaatatatattaaaatgtttttatttaactgtagtatt

SEQ ID NO: 464444 - DNA, 120 bp, Artificial Sequence
  ENSG00000158023_73 (sequence is synthesized)
gaggcttgagatgacttcgtccaaagaagactgacttctgctccttaaaggcacttagcagagtggtcagcttaatctaatcagagcttgaggtcgtttgaggctgattttcaggctttg

SEQ ID NO: 464445 - DNA, 120 bp, Artificial Sequence
  ENSG00000158023_74 (sequence is synthesized)
tgaagtctgcctcatgcacttgcttttgccagttccttaccctacccaggcttttgtgctgttctgatatgaattctcaaacactggcattagtagtttacacccctgtggtatgtaaca

SEQ ID NO: 464446 - DNA, 120 bp, Artificial Sequence
  ENSG00000158023_75 (sequence is synthesized)
ttcataaaatgttcagaaaatgataggtaaggaataggcgtggagacggggtggaaatggcagaaatggaacttaaaaagcttttttccagcctgtccctcagtgctgtctcctgcagcc

SEQ ID NO: 464447 - DNA, 120 bp, Artificial Sequence
  ENSG00000158023_76 (sequence is synthesized)
cttctccccaggctgtagccacccacctcccatgcacatttcaaacacataccccatggctccccaggaagagcttgctttgttgttcttgctgtggctgtttggtttctgtatttaaaa

SEQ ID NO: 464448 - DNA, 120 bp, Artificial Sequence
  ENSG00000158023_77 (sequence is synthesized)
ctttccgtcacttccatagtttctgcagggttggtttttgggaagggagccagcagcccatgctattcaccatcttggcaggaattagaatccccttccaatatcttgcattcattccaa

SEQ ID NO: 464449 - DNA, 120 bp, Artificial Sequence
  ENSG00000158023_78 (sequence is synthesized)
gatattgtgtggccctgtcaaatttagaaatgtatacgcagcagtctttatctaaaaggatacagaataaaggttattggtgaatactggtttacttttgcttgttccaatttattttat

SEQ ID NO: 464450 - DNA, 120 bp, Artificial Sequence
  ENSG00000158023_79 (sequence is synthesized)
tgaatactggtttacttttgcttgttccaatttattttattattattattgttattattttaaattgaccactatcagaaaagcttgttatagccaggcgcagtggcccacacctgtaat

SEQ ID NO: 464451 - DNA, 120 bp, Artificial Sequence
  ENSG00000158023_80 (sequence is synthesized)
tttatagatgatgaattataatagatcaaactggaaagggaacacatttgacactgtttattttaatcaccagtatttaaatgatattcctatttttttttacgaaatgcggtatctttt

SEQ ID NO: 464452 - DNA, 120 bp, Artificial Sequence
  ENSG00000158023_81 (sequence is synthesized)
aaatgcggtatcttttctgttttatattcctactcatttgttttaattaaaattattatttaattttaacattcagcttaaccagaaacagaaaatttatcattaatgtattttcatact

SEQ ID NO: 464453 - DNA, 120 bp, Artificial Sequence
  ENSG00000158023_82 (sequence is synthesized)
aaatcaaaagcaaataatccaattttatttattaaattttattgaagtaatgaggcaaatgtttatttgaatttatttaacaagactaaaatacaagttttatggtttttttggagatga

SEQ ID NO: 464454 - DNA, 120 bp, Artificial Sequence
  ENSG00000158023_83 (sequence is synthesized)
tcactatgttgcccaggctggcctcaaattcctgggctcaagtgatcttcccgcttaatcctctcaagtagctgggattagaggggtgagccggccacacctggctctaaaatacagcag

SEQ ID NO: 464455 - DNA, 120 bp, Artificial Sequence
  ENSG00000158023_84 (sequence is synthesized)
aaaatacagcaggttttttttttttttttttttgagaccttggtcttttttcccttttagaaaggaattagcaaacagattagtgatacatatactgacacagggcaaaatcatgagaat

SEQ ID NO: 464456 - DNA, 120 bp, Artificial Sequence
  ENSG00000158023_85 (sequence is synthesized)
tagtgatacatatactgacacagggcaaaatcatgagaataaaaaacattgaggctgagcacagtggctcatgactgtacttccagcaccatgggaggccaaggcaggaggatcacttga

SEQ ID NO: 464457 - DNA, 90 bp, Artificial Sequence
  ENSG00000158023_86 (sequence is synthesized)
ggccaggagtttaagactagcctgagcaacataacaagacctcatctctacaaaaaattatttaaaaaaatttaacagtgctcagaaggc

SEQ ID NO: 464458 - DNA, 120 bp, Artificial Sequence
  ENSG00000158023_87 (sequence is synthesized)
tgggcaacagagtgagactctgtctcaacaaaacaaaacacaacaaaacaaaaaacgtttcaagttaaacatggaatagctatgtgactcagcaattccaaggtaagatgtaaaagaatt

SEQ ID NO: 464459 - DNA, 120 bp, Artificial Sequence
  ENSG00000158023_88 (sequence is synthesized)
aaggtagaaacaagccaagtgttcatcaactgatgagtaggtaaacaaaatgtggtctatccatacaatggaatgttattgtatgaagtgctgatacatgctgtgacatggatcagcctt

SEQ ID NO: 464460 - DNA, 120 bp, Artificial Sequence
  ENSG00000158023_89 (sequence is synthesized)
gaaagtatgatgctaaatgaaagacaccagacacgaaagtcacgtgttgtatgatgccatttctatggaatgtccagcataggcaagtccacagatacagagtaaactggtggttttcaa

SEQ ID NO: 464461 - DNA, 120 bp, Artificial Sequence
  ENSG00000158023_90 (sequence is synthesized)
ggcctggagagagacggagtggctgcttaataggtaggagatttccttttggggttatgaaaatgtcttggatctagatggttgctcagcattgtgaatgtatgaaacaccgctgaattg

SEQ ID NO: 464462 - DNA, 120 bp, Artificial Sequence
  ENSG00000158023_91 (sequence is synthesized)
cacactttaacatggttatgattaattttatgttaagtggattttacctcaataaaaaattgtagaacaaaaccaaaacacattgagtcactgattgtgagtgatagtcattatttaaga

SEQ ID NO: 464463 - DNA, 120 bp, Artificial Sequence
  ENSG00000158023_92 (sequence is synthesized)
cattgagtcactgattgtgagtgatagtcattatttaagatatttattatagctttattttattttatttttgagatggggtctcactctgtcatccaggctgcagtgcagtggtgcgat

SEQ ID NO: 464464 - DNA, 86 bp, Artificial Sequence
  ENSG00000158023_93 (sequence is synthesized)
gattgtgactttacatagtacttaatgcaaattcgaattctctattaataagcctttaaaactttaataaataccttaaggtcggc

SEQ ID NO: 464465 - DNA, 79 bp, Artificial Sequence
  ENSG00000158023_94 (sequence is synthesized)
gactttacatagtacttaatgcaaattcgaattctctattaataagcctttaaaactttaataaataccttaaggtcgg

SEQ ID NO: 464466 - DNA, 120 bp, Artificial Sequence
  ENSG00000158023_95 (sequence is synthesized)
gcgccactgcactccaggctgggcgatagatgtgtttctgcttgaagacaccttatttaatatagaactccatctcaagaaaaaaaaagtcataatcatttgtggcattttttatatttt

SEQ ID NO: 464467 - DNA, 120 bp, Artificial Sequence
  ENSG00000158023_96 (sequence is synthesized)
gtcataatcatttgtggcattttttatattttttatgtatttgcttttctttcagaatgtttttagatatttcccaagacagcaagttctcttacctgtagaaactgcaaatttctgacc

SEQ ID NO: 464468 - DNA, 120 bp, Artificial Sequence
  ENSG00000158023_97 (sequence is synthesized)
ttgtttagatgtatttgttttgcttttattattaatgccgttcttcctttggaaactgggtctttttgagtagtgattattttttcctcttatcagtatgaagagagggatacactggct

SEQ ID NO: 464469 - DNA, 120 bp, Artificial Sequence
  ENSG00000158023_98 (sequence is synthesized)
cacagtgccccacttttaactgaaaaagggaacaatgaggtcttgacatggttttacaaagagaaatgcaaattgtcaccctcactcagtggagcgagaagataggagaactgcagttgg

SEQ ID NO: 464470 - DNA, 120 bp, Artificial Sequence
  ENSG00000158023_99 (sequence is synthesized)
ccatgcaatcaacctttaatcggttggggtttaggatccagtggagaccaggcctgggttctccaagttaataaaacccagtcaggacctgggagtccaagaaggaaaaggtctctggaa

SEQ ID NO: 464471 - DNA, 120 bp, Artificial Sequence
  ENSG00000158023_100 (sequence is synthesized)
ctgcacataacaaagcatgtctgttgggaatcccacatgaataagttatgaaaagaacagtgagtggtggcttttgttcccgcgctctgtccgtccttttgtttcttctgggcttatttt

SEQ ID NO: 464472 - DNA, 120 bp, Artificial Sequence
  ENSG00000158023_101 (sequence is synthesized)
ccctttgttccactgacctgtcatcttgccggcttgggtgggtgaatattggccacccgtagaggatccagtttgacagctgtttcaggagaataggttcagaaatttgccttgaagaag

SEQ ID NO: 464473 - DNA, 120 bp, Artificial Sequence
  ENSG00000158023_102 (sequence is synthesized)
gttttctgcatacttgcttctctctcggtatgatttgtagaaatttatttaagagggcatgccaaaagacaaaaacaaaaaataaaaagttgagatggatgggcacaatgagattattct

SEQ ID NO: 464474 - DNA, 120 bp, Artificial Sequence
  ENSG00000158023_103 (sequence is synthesized)
gtctgcagacttgtttttcataaatgaaagtactaaaaaataccatcagttctcattattgttggtagttatgttatataaagtctctgtaaacaccaaattagcagatacttaactatt

SEQ ID NO: 464475 - DNA, 120 bp, Artificial Sequence
  ENSG00000158023_104 (sequence is synthesized)
gctcttaagggaaatataggggtaggtttctgtgagcctctggtcacattttcaccaattgatcaatacataagcttgttttatgtgtatttctatttaaagacactttatttaatatat

SEQ ID NO: 464476 - DNA, 120 bp, Artificial Sequence
  ENSG00000158023_105 (sequence is synthesized)
aacattgattcattaacattgaactcatggccaacagcactataactcatgacttgaacaaaactcatctaacctacatattttctccataaagcacatcacagcattcttttgcttagg

SEQ ID NO: 464477 - DNA, 120 bp, Artificial Sequence
  ENSG00000158023_106 (sequence is synthesized)
aacactagccagcacttcagcactatgtttcagggtcaatttaaatactaaaatcaccaagaaaaatgcaaacaaccaaaaatgcaaacaacatggcactaaatagaccatgaaaaggac

SEQ ID NO: 464478 - DNA, 120 bp, Artificial Sequence
  ENSG00000158023_107 (sequence is synthesized)
acttgtttatagtcagagctgagacaagaaggcggagcattgccctgcctgccctcaactggaaatgtgcatgttgagtgagtaaaattatttgtcacactgcacatgcacttctgcaaa

SEQ ID NO: 464479 - DNA, 120 bp, Artificial Sequence
  ENSG00000158023_108 (sequence is synthesized)
tgaccgtgagagtgctgcaagtattgattttgggattacaaatcaattcttaaagtaggtaaattcgcaaatacagaatccacaaataatgagccatttgaaatgataaaaatgtattga

SEQ ID NO: 464480 - DNA, 120 bp, Artificial Sequence
  ENSG00000158023_109 (sequence is synthesized)
aacagtgctgctcttagaaagaacttggtgctcttgtttgactaatcattattttactattcctcttgtgttcaagtcagaagaggtaaaccttaggatcttctctgtattattagagaa

SEQ ID NO: 464481 - DNA, 120 bp, Artificial Sequence
  ENSG00000158023_110 (sequence is synthesized)
tcgggcagcatagagaatagggcatttctatgtacagtgcttaaatattttctactgatgggaaaataccttatgataaaaggaggctgggataattattttatgctattttataaccag

SEQ ID NO: 464482 - DNA, 120 bp, Artificial Sequence
  ENSG00000158023_111 (sequence is synthesized)
agcatgctttgactcacaacaggcattagtttcttcaccagtctctgaaacctccataagagaagtttaacaggtataaacagtgattaaccactctctcgtttgctttaaacaaacaat

SEQ ID NO: 464483 - DNA, 120 bp, Artificial Sequence
  ENSG00000158023_112 (sequence is synthesized)
gtaattgaacagagtacataacccttcacttgctcttagcaaacttccagaggttcagaactgcctggaccatggcaattcatgggagacggttttagtgattgttttctttttctttct

SEQ ID NO: 464484 - DNA, 120 bp, Artificial Sequence
  ENSG00000158023_113 (sequence is synthesized)
tttgaaaccaaaagaggccagacatagtagctaacacctgtaatcccaatgatttgggaggccgaggtgggaggatcattggaggacaggaattcaagaccagcctaggaaacacagcag

SEQ ID NO: 464485 - DNA, 120 bp, Artificial Sequence
  ENSG00000158023_114 (sequence is synthesized)
gaccccactgctacaaaaacactttttaaaaattagccaggccttgtggcacacatctgtagccccagttatccaggaggctgaggcgggaggacccctgcgggccaggagtttgaggtt

SEQ ID NO: 464486 - DNA, 120 bp, Artificial Sequence
  ENSG00000158023_115 (sequence is synthesized)
acagtgagctataaggcaggtatgttggtctgcctttatgttgggagggaaaagcagtggtcttcgctaaactcctgtcccttccggcgctctccatccccacactggtgcggccactcc

SEQ ID NO: 464487 - DNA, 120 bp, Artificial Sequence
  ENSG00000158023_116 (sequence is synthesized)
tccggtttgtgtacacaacgcttctgaagccaaagctgtctcagcatactgtgggtgcacacagtccagcttctgtgtcccctcaggccaggctctcccactccaactgggttcacttgc

SEQ ID NO: 464488 - DNA, 120 bp, Artificial Sequence
  ENSG00000158023_117 (sequence is synthesized)
agccttcatacctttcaaaaacacatagcttttttattatatgtagctggacaaagaaaagggaggacgaaggcacaaagagtcaggcttttggctttccacagacagcgagggggcacc

SEQ ID NO: 464489 - DNA, 120 bp, Artificial Sequence
  ENSG00000158042_0 (sequence is synthesized)
agtttccagttccggcctccaaggggcgggcagaagttggaaacatgcggctgtcggtcgctgcagcgatctcccatggccgcgtatttcgccgtatgggcctcggtcccgagtcccgca

SEQ ID NO: 464490 - DNA, 120 bp, Artificial Sequence
  ENSG00000158042_1 (sequence is synthesized)
tccatctgttgcggaacttgctcacagggctggtgcggcacgaacgcatcgaggcaccatgggcgcgtgtggacgaaatgaggggctacgcggagaagctcatcgactatgggaagctgg

SEQ ID NO: 464491 - DNA, 120 bp, Artificial Sequence
  ENSG00000158042_2 (sequence is synthesized)
gagacactaacgaacgagccatgcgcatggctgacttctggctcacagagaaggatttgatcccaaagctgtttcaagtactggcccctcggtacaaagatcaaactgggggctacacaa

SEQ ID NO: 464492 - DNA, 120 bp, Artificial Sequence
  ENSG00000158042_3 (sequence is synthesized)
gaatgctgcagatcccaaatcggagtttggatcgggccaagatggcagtgatcgagtataaagggaattgcctcccacccctgcctctgcctcgcagagacagccaccttacactcctaa

SEQ ID NO: 464493 - DNA, 120 bp, Artificial Sequence
  ENSG00000158042_4 (sequence is synthesized)
accagctgctgcagggtttgcggcaggacctcaggcaaagccaggaagcaagcaaccacagctcccacacagctcaaacaccagggatttaactggatctgaagagtctgcagcccttaa

SEQ ID NO: 464494 - DNA, 120 bp, Artificial Sequence
  ENSG00000158042_5 (sequence is synthesized)
tcagtacccatgatcacaggcctttggagcacttttactctctgagaagaactggagctagagatgtaaaatggacagtcttgatggggttgagaaccttctggggagccagatgaccct

SEQ ID NO: 464495 - DNA, 120 bp, Artificial Sequence
  ENSG00000158042_6 (sequence is synthesized)
ctctttgcacaatagataaaagtctttatatgaatatatataaatttatttattttttccttcctgtgggatttctggagaatgagaattatccaaatgctcagtctacctgagatagta

SEQ ID NO: 464496 - DNA, 120 bp, Artificial Sequence
  ENSG00000158042_7 (sequence is synthesized)
aattcatggcttatgcttctggtccttaaatttgggttatttttggttagtgcaattttgtttttcttaatgccagtttacatgggaatgcatcctataattccaaatgttgccagaggt

SEQ ID NO: 464497 - DNA, 120 bp, Artificial Sequence
  ENSG00000158042_8 (sequence is synthesized)
ggttgtgttttgacatctggtctcctagagatgagtgcttgggatttcttagagaaagattacttcctgacaggggtaggggagtgacaatctgcaagtgaaacttccttaaacaatcta

SEQ ID NO: 464498 - DNA, 120 bp, Artificial Sequence
  ENSG00000158042_9 (sequence is synthesized)
ctgcaatcagtcctctgttttgaggcaggatcacacattaccttaatgtgttcccttcaaccccctgaatgggcctgggaggagaggacccaagaactcagatgttccaccagtttggcc

SEQ ID NO: 464499 - DNA, 120 bp, Artificial Sequence
  ENSG00000158042_10 (sequence is synthesized)
aaaggggtggagacattcagcagaggatgttgggctccaggataagctccttcctcttggtgaggggaaggggtaagaaagagggtctatgcgagagaaggattaggaaattaaacctcc

SEQ ID NO: 464500 - DNA, 120 bp, Artificial Sequence
  ENSG00000158042_11 (sequence is synthesized)
taggaatttcctggaagtttttattgttgtcaaatctggcctctctgggaacccagaaaagggaaatccggcttcagaatgtgagaagctgggagcccctttcttggcacagccaggctg

SEQ ID NO: 464501 - DNA, 120 bp, Artificial Sequence
  ENSG00000158042_12 (sequence is synthesized)
ccgttcccttgggttcagaggctttagtagggtagtagttatggaaggacttagaaaggagccatcagtcttggtccaaacacttgatagcagtgcctgataattgccatatccccagta

SEQ ID NO: 464502 - DNA, 120 bp, Artificial Sequence
  ENSG00000158042_13 (sequence is synthesized)
aagtgggtagaagagattttatcttaggctctatcttctgagtgtatttggcccactgaacccatccactgtctgagataataagtaagagtaagggtaaagggatcactggtgtagcag

SEQ ID NO: 464503 - DNA, 120 bp, Artificial Sequence
  ENSG00000158042_14 (sequence is synthesized)
acatggcttcagtgacagaacgaactattctggtgctaatttagctgtagctgccttagtctgatactcatctactcccaacagagctctttatctctttttctctactatggtttgttc

SEQ ID NO: 464504 - DNA, 120 bp, Artificial Sequence
  ENSG00000158042_15 (sequence is synthesized)
ttcacactatagccagaaagctcttatattttaaatgaaatatagtagacactcaaaacatttatgaaataaagctacaactctgcttctgctaaaaaatatacccctcttctgtcttag

SEQ ID NO: 464505 - DNA, 120 bp, Artificial Sequence
  ENSG00000158042_16 (sequence is synthesized)
catgaatatccaccctagctaggtatctaggagtcatacctaacttctagagaaaccactttccttaaaaccacatctttattttaaatagatggattgtggctgggctcctgtagcttt

SEQ ID NO: 464506 - DNA, 120 bp, Artificial Sequence
  ENSG00000158042_17 (sequence is synthesized)
tcctcttagaccccagaaatatatctccctttgggacttccaacagttccctacatgctttttgagcatctgctagttcccagcatcaatttaggcagaagggatacaatatccactgtt

SEQ ID NO: 464507 - DNA, 120 bp, Artificial Sequence
  ENSG00000158042_18 (sequence is synthesized)
catctaatagagactagagataagaaacaacctgtaccatcaatgagctcacaataacaggccactgccactaccacagtggcctcaagggacactgcttcccctttaatgttttggtcc

SEQ ID NO: 464508 - DNA, 120 bp, Artificial Sequence
  ENSG00000158042_19 (sequence is synthesized)
ggaaagggaccgggaccaacctggtaaaccattccccaagtctgagtcccccagaaccttgggctgaacccgcccctccatcgcctctaatggaagactggttagggctgcggagttagg

SEQ ID NO: 464509 - DNA, 120 bp, Artificial Sequence
  ENSG00000158042_20 (sequence is synthesized)
ggtggcgtagattggagatgcttggctagtggaaagaatggattgccttccggcattagagaaattagattggcaccttgttttcttgctcggttggatccgtgatgttatgtcctcaca

SEQ ID NO: 464510 - DNA, 120 bp, Artificial Sequence
  ENSG00000158050_0 (sequence is synthesized)
ggagtcgaccgctcgggcagcgccaccgccacgagagcccgggacgcgggaaagaccgaaaggaagaggaagaggcaccggtggccatggggctggaggcggcgcgcgagctggagtgcg

SEQ ID NO: 464511 - DNA, 120 bp, Artificial Sequence
  ENSG00000158050_1 (sequence is synthesized)
cggcgctgggcacgctgctgcgggatccgcgggaggcggaacgcacgctgctgctggactgccgccccttcctggccttctgccggcgccacgtgcgcgccgcgcggccagtgccttgga

SEQ ID NO: 464512 - DNA, 120 bp, Artificial Sequence
  ENSG00000158050_2 (sequence is synthesized)
cgttctcgcctgcctgctgcccgaccgcgcgctgcggacgcgcctggtccgcggggagctggcgcgggccgtggtgctggacgagggcagtgcctcggtggcggagctccggcccgacag

SEQ ID NO: 464513 - DNA, 120 bp, Artificial Sequence
  ENSG00000158050_3 (sequence is synthesized)
acgagggcagtgcctcggtggcggagctccggcccgacagcccggctcatgtgctgctggccgcgctgctgcacgagacccgcgcggggcccactgccgtgtacttcctgcgaggaggct

SEQ ID NO: 464514 - DNA, 120 bp, Artificial Sequence
  ENSG00000158050_4 (sequence is synthesized)
tcgacggcttccagggctgctgtcccgatctgtgctctgaggcccccgcccctgcgctgccgccaacaggggacaaaaccagccgctccgactccagggctcctgtctacgaccagggtg

SEQ ID NO: 464515 - DNA, 120 bp, Artificial Sequence
  ENSG00000158050_5 (sequence is synthesized)
gccctgtggagatcttgccctacctgttcctgggcagctgcagtcactcgtcagacctgcaggggctgcaggcctgtggcatcacagccgtcctcaacgtgtccgccagctgccccaacc

SEQ ID NO: 464516 - DNA, 120 bp, Artificial Sequence
  ENSG00000158050_6 (sequence is synthesized)
actttgagggccttttccgctacaagagtatccctgtggaggacaaccagatggtggagatcagtgcctggttccaggaggccataggcttcattgactgggtgaagaacagcggaggcc

SEQ ID NO: 464517 - DNA, 120 bp, Artificial Sequence
  ENSG00000158050_7 (sequence is synthesized)
ctggtgcactgccaggcgggtatctcgcgctctgccaccatctgtctggcatacctcatgcagagtcgccgtgtgcggctggacgaggcctttgacttcgttaagcagcgccggggggtc

SEQ ID NO: 464518 - DNA, 120 bp, Artificial Sequence
  ENSG00000158050_8 (sequence is synthesized)
atctcccccaacttcagtttcatggggcagctgctgcagtttgagacccaggtgctgtgtcactgaggtggtgcccctctgcctgcctgccccactgtgctggcaggagctgactgtgga

SEQ ID NO: 464519 - DNA, 120 bp, Artificial Sequence
  ENSG00000158050_9 (sequence is synthesized)
ctggtgggctcccctctgggccagcacagtcccctcacctctggcagggctgctacctcctcagagtttcagaagcccccacatgggggctctaggaatgccggcatgctggtctttccg

SEQ ID NO: 464520 - DNA, 120 bp, Artificial Sequence
  ENSG00000158050_10 (sequence is synthesized)
acctggtgctcttctgctgggggactgaggctggccctcattcggggtcgggaaccaagggtgtgtctgctctttccctccccatcctctggcagaaatcagctagacgctataccgtgg

SEQ ID NO: 464521 - DNA, 120 bp, Artificial Sequence
  ENSG00000158050_11 (sequence is synthesized)
actctccctggtccaccaccatgttgaagcccttggcagcctgagagctccaaggaacaagctgtgacaaccaggagccctgtctgtgggttcgtctgcccagggcctggagcccaagcc

SEQ ID NO: 464522 - DNA, 120 bp, Artificial Sequence
  ENSG00000158050_12 (sequence is synthesized)
ctgtgttcctggggaagctggggacttgggaagtgatgggtgtgtcatgttgcgtgtgtctgtctgtgagcctttcacacctgtgctggcgctggaaaattatttgtgctcagctgacat

SEQ ID NO: 464523 - DNA, 120 bp, Artificial Sequence
  ENSG00000158050_13 (sequence is synthesized)
ttaacactccctcccccgcttcctcctagccctgtgggcaggggttggaaacttagcactttatatttatacagaacattcaggatatgtcaataaaatattgttatatttaaaaaacaa

SEQ ID NO: 464524 - DNA, 120 bp, Artificial Sequence
  ENSG00000158050_14 (sequence is synthesized)
gtggggcatggctgctcgcgcgtgcctgtatgggtctgtgtatgtttgcatgtgtatgttgggagcatgaagggaaatgtatgtcccggtgtgtcctccgcacattcctgagacctgtct

SEQ ID NO: 464525 - DNA, 120 bp, Artificial Sequence
  ENSG00000158050_15 (sequence is synthesized)
caggtcaggaggactggctgaggagtcctcttgtctcggccagcccatggggtctccacccgctgctgctccagctctccggggctgggctggaaaggcctcaccgcccctctgttccct

SEQ ID NO: 464526 - DNA, 120 bp, Artificial Sequence
  ENSG00000158055_0 (sequence is synthesized)
agagttaacagctgcacctgttgaggtatacctccagtcgccggcacctgtacctgtagccaatcagcgccagcgctgctgggaacctacctgtcagcaaaatctcgacacccaaacctc

SEQ ID NO: 464527 - DNA, 120 bp, Artificial Sequence
  ENSG00000158055_1 (sequence is synthesized)
aacataaatcaaacactttcccgggcagagaatgtctgtgtcaggcaagaattagagacaagcggtcagcagagcctcagtgctgatcgtcggagcttgggagcaggaagatgtcgaatg

SEQ ID NO: 464528 - DNA, 120 bp, Artificial Sequence
  ENSG00000158055_2 (sequence is synthesized)
aacttgatttcaggtctgtgcggctgctaaagaacgacccagtcaacttgcagaaattctcttacactagtgaggatgaggcctggaagacgtacctagaaaacccgttgacagctgcca

SEQ ID NO: 464529 - DNA, 120 bp, Artificial Sequence
  ENSG00000158055_3 (sequence is synthesized)
caaaggccatgatgagagtcaatggagatgatgacagtgttgcggccttgagcttcctctatgattactacatgggtcccaaggagaagcggatattgtcctccagcactgggggcagga

SEQ ID NO: 464530 - DNA, 120 bp, Artificial Sequence
  ENSG00000158055_4 (sequence is synthesized)
atgaccaaggaaagaggtactaccatggcatggaatatgagacggacctcactccccttgaaagccccacacacctcatgaaattcctgacagagaacgtgtctggaaccccagagtacc

SEQ ID NO: 464531 - DNA, 120 bp, Artificial Sequence
  ENSG00000158055_5 (sequence is synthesized)
cagatttgctcaagaagaataacctgatgagcttggagggggccttgcccacccctggcaaggcagctcccctccctgcaggccccagcaagctggaggccggctctgtggacagctacc

SEQ ID NO: 464532 - DNA, 120 bp, Artificial Sequence
  ENSG00000158055_6 (sequence is synthesized)
tgttacccaccactgatatgtatgataatggctccctcaactccttgtttgagagcattcatggggtgccgcccacacagcgctggcagccagacagcaccttcaaagatgacccacagg

SEQ ID NO: 464533 - DNA, 120 bp, Artificial Sequence
  ENSG00000158055_7 (sequence is synthesized)
agtcgatgctcttcccagatatcctgaaaacctccccggaacccccatgtccagaggactaccccagcctcaaaagtgactttgaatacaccctgggctcccccaaagccatccacatca

SEQ ID NO: 464534 - DNA, 120 bp, Artificial Sequence
  ENSG00000158055_8 (sequence is synthesized)
agtcaggcgagtcacccatggcctacctcaacaaaggccagttctaccccgtcaccctgcggaccccagcaggtggcaaaggccttgccttgtcctccaacaaagtcaagagtgtggtga

SEQ ID NO: 464535 - DNA, 120 bp, Artificial Sequence
  ENSG00000158055_9 (sequence is synthesized)
tggttgtcttcgacaatgagaaggtcccagtagagcagctgcgcttctggaagcactggcattcccggcaacccactgccaagcagcgggtcattgacgtggctgactgcaaagaaaact

SEQ ID NO: 464536 - DNA, 120 bp, Artificial Sequence
  ENSG00000158055_10 (sequence is synthesized)
tcaacactgtggagcacattgaggaggtggcctataatgcactgtcctttgtgtggaacgtgaatgaagaggccaaggtgttcatcggcgtaaactgtctgagcacagacttttcctcac

SEQ ID NO: 464537 - DNA, 120 bp, Artificial Sequence
  ENSG00000158055_11 (sequence is synthesized)
tgacaagggagctgagaggaagatgcgcgatgacgagcggaagcagttccggaggaaggtcaagtgccctgactccagcaacagtggcgtcaagggctgcctgctgtcgggcttcagggg

SEQ ID NO: 464538 - DNA, 120 bp, Artificial Sequence
  ENSG00000158055_12 (sequence is synthesized)
caatgagacgacctaccttcggccagagactgacctggagacgccacccgtgctgttcatccccaatgtgcacttctccagcctgcagcgctctggaggggcagccccctcggcaggacc

SEQ ID NO: 464539 - DNA, 120 bp, Artificial Sequence
  ENSG00000158055_13 (sequence is synthesized)
cagcagctccaacaggctgcctctgaagcgtacctgctcgcccttcactgaggagtttgagcctctgccctccaagcaggccaaggaaggcgaccttcagagagttctgctgtatgtgcg

SEQ ID NO: 464540 - DNA, 120 bp, Artificial Sequence
  ENSG00000158055_14 (sequence is synthesized)
gagggagactgaggaggtgtttgacgcgctcatgttgaagaccccagacctgaaggggctgaggaatgcgatctctgagaagtatgggttccctgaagagaacatttacaaagtctacaa

SEQ ID NO: 464541 - DNA, 120 bp, Artificial Sequence
  ENSG00000158055_15 (sequence is synthesized)
gaaatgcaagcgaggaatcttagtcaacatggacaacaacatcattcagcattacagcaaccacgtcgccttcctgctggacatgggggagctggacggcaaaattcagatcatccttaa

SEQ ID NO: 464542 - DNA, 120 bp, Artificial Sequence
  ENSG00000158055_16 (sequence is synthesized)
ggagctgtaaggcctctcgagcatccaaaccctcacgacctgcaaggggccagcagggacgtggccccacgccacacacaacctctccacatgcctcagcgctgttacttgaatgccttc

SEQ ID NO: 464543 - DNA, 120 bp, Artificial Sequence
  ENSG00000158055_17 (sequence is synthesized)
cctgagggaagaggcccttgagtcacagacccacagacgtcagggccagggagagacctagggggtcccctggcctggatccccatggtatgcttgaatctgctccctgaacttcctgcc

SEQ ID NO: 464544 - DNA, 120 bp, Artificial Sequence
  ENSG00000158055_18 (sequence is synthesized)
agtgcctccccgtaccccaaaacaatgtcaccatggttaccacctacccagaagactgttccctcctcccaagacccttgtctgcagtggtgctcctgcaggctgcccgttaagatggtg

SEQ ID NO: 464545 - DNA, 120 bp, Artificial Sequence
  ENSG00000158055_19 (sequence is synthesized)
gcggcacacgctccctcccgcagcaccacgccagctggtgcggcccccactctctgtcttccttcaacttcagacaaaggatttctcaacctttggtcagttaacttgaaaactcttgat

SEQ ID NO: 464546 - DNA, 120 bp, Artificial Sequence
  ENSG00000158055_20 (sequence is synthesized)
tttcagtgcaaatgacttttaaaagacactatattggagtctctttctcagacttcctcagcgcaggatgtaaatagcactaacgatcgactggaacaaagtgaccgctgtgtaaaacta

SEQ ID NO: 464547 - DNA, 120 bp, Artificial Sequence
  ENSG00000158055_21 (sequence is synthesized)
actactgccttgccactcactgttgtatacatttcttatttacgattttcatttgttatatatatatataaatatactgtatatatatgcaacattttatatttttcatggatatgtttt

SEQ ID NO: 464548 - DNA, 120 bp, Artificial Sequence
  ENSG00000158055_22 (sequence is synthesized)
atttcaaaaaatgtgtatttcacatttcttggactttttttagctgttattcagtgatgcattttgtatactcacgtggtatttagtaataaaaatctatctatgtattacgtcacatta

SEQ ID NO: 464549 - DNA, 120 bp, Artificial Sequence
  ENSG00000158055_23 (sequence is synthesized)
tgttcccatcctgtgactcaagtgaggaacatgggttttggagatggattttggaggcagagggacctggattcaaatcccagccccaccaccgtcaacagcctgcacttcactgtaaac

SEQ ID NO: 464550 - DNA, 120 bp, Artificial Sequence
  ENSG00000158055_24 (sequence is synthesized)
tcggaatgacacacccacctggaggagaggtggaaggacgacggcaggtcacatctgagagctctcagctcagagtatgtggcccctgaatacattctggctattactttgcatttaaaa

SEQ ID NO: 464551 - DNA, 120 bp, Artificial Sequence
  ENSG00000158055_25 (sequence is synthesized)
gggcccaaggaagtaaggttattttccaaggtcaaacagcaagtctgtaacatagcctcaggcttcctgccccactgccctctaggagacttcctgcctgggagcccagcctcactgtcc

SEQ ID NO: 464552 - DNA, 120 bp, Artificial Sequence
  ENSG00000158055_26 (sequence is synthesized)
gaaacacaagactgaaactgtgaaggtttctggcaccactttttgatcctctgaaggggccttggaaatcagacgaccccaatcccatcgaggctttctatcttcttgccaaaaggaact

SEQ ID NO: 464553 - DNA, 120 bp, Artificial Sequence
  ENSG00000158055_27 (sequence is synthesized)
aggagatgtgccaaactgttaagagtggttatttctgagcagaagaatgtggatgaattccattcttcctatttttctggtcccaaggagaagcggatattgtcctccagcactgggggc

SEQ ID NO: 464554 - DNA, 120 bp, Artificial Sequence
  ENSG00000158055_28 (sequence is synthesized)
ggctggggtctcgggaaggagccgagagagggtcctggctcctaggtggggcctgccttagcacagaccagtggggagcagcctgcccctcagccagtttcaagacctttattgaatcat

SEQ ID NO: 464555 - DNA, 120 bp, Artificial Sequence
  ENSG00000158055_29 (sequence is synthesized)
aggggtttaaacatgtatatatggtcctatagcttcagtgacctattgtattgaagagaagaatgttatgaagaaacagatttcgtaaccattaaaacgttcatgcttagggcacacaaa

SEQ ID NO: 464556 - DNA, 120 bp, Artificial Sequence
  ENSG00000158055_30 (sequence is synthesized)
tgagtgagtaaacatcggtggatacctgccgctctcagagcgtggaggctggatggggtttcctggagggggaagagcggggaggccggcaccgggattcacagagcaatttgtaagggt

SEQ ID NO: 464557 - DNA, 120 bp, Artificial Sequence
  ENSG00000158062_0 (sequence is synthesized)
aaaccgcgtgacaacaagatggcggcgctgcgggacggctagcggccctgcgtgtactttcccaagcaccaccaggccaaaggtctctcagttcagagcagaaagccgtatacccagagg

SEQ ID NO: 464558 - DNA, 120 bp, Artificial Sequence
  ENSG00000158062_1 (sequence is synthesized)
agcaggcagataacagaaacttccagaaacctctgtggagacagtggaagaggcaaaagggagttcctgacagctggattctagaagtagaactatgagctcacctttggcctcccttag

SEQ ID NO: 464559 - DNA, 120 bp, Artificial Sequence
  ENSG00000158062_2 (sequence is synthesized)
caagacccgaaaagtgcccctgccctcggagcctatgaatcctgggaggcgaggaatccgcatctatggagatgaagatgaggtggacatgttgagtgatgggtgtggctcagaagaaaa

SEQ ID NO: 464560 - DNA, 120 bp, Artificial Sequence
  ENSG00000158062_3 (sequence is synthesized)
gatctcagtcccttcctgctatggcggcataggtgcccctgtgagtcggcaagtccctgcatcccatgactcggagctgatggccttcatgacgaggaagttgtgggacctggagcagca

SEQ ID NO: 464561 - DNA, 120 bp, Artificial Sequence
  ENSG00000158062_4 (sequence is synthesized)
ggtgaaggcccagactgatgagatactgtccaaggatcagaagatagcggccctagaggacctggtgcagaccctccggccacacccagccgaggcaaccctgcagcggcaggaggaact

SEQ ID NO: 464562 - DNA, 120 bp, Artificial Sequence
  ENSG00000158062_5 (sequence is synthesized)
ggagacgatgtgtgtgcagctgcagcggcaggtcagggagatggagcggttcctcagtgactatggcctgcagtgggtgggcgagcccatggaccaggaggactcagagagcaagacagt

SEQ ID NO: 464563 - DNA, 120 bp, Artificial Sequence
  ENSG00000158062_6 (sequence is synthesized)
ctcagagcatggcgagagggactggatgacagccaagaagttctggaagccaggggactcattggcgccccctgaggtggactttgacaggctgctggccagcctgcaggatcttagtga

SEQ ID NO: 464564 - DNA, 120 bp, Artificial Sequence
  ENSG00000158062_7 (sequence is synthesized)
gggcccttccagcccttctacgatccctccacacagcgctgcctccgagacatattggatggcttctttccctcagagctccagcgactgtaccccaatggggtcccctttaaggtgagt

SEQ ID NO: 464565 - DNA, 120 bp, Artificial Sequence
  ENSG00000158062_8 (sequence is synthesized)
gacttgcgcaatcaggtctacctggaggatggactggaccccttcccaggcgagggccgtgtggtgggcaggcagctgatgcacaaggccttggacagggtggaggagcacccaggctcc

SEQ ID NO: 464566 - DNA, 120 bp, Artificial Sequence
  ENSG00000158062_9 (sequence is synthesized)
aggatgactgctgagaaatttctgaacaggctccccaagtttgtgatccggcaaggcgaggtgattgacatccggggccccatcagggacaccttgcagaactgctgcccattgcctgcc

SEQ ID NO: 464567 - DNA, 120 bp, Artificial Sequence
  ENSG00000158062_10 (sequence is synthesized)
cggatccaggagattgtggtggagacgcccaccttggccgctgagcgagagaggagccaggagtcacccaacacgccggcacccccgctctccatgctgcgcatcaagtctgagaatggg

SEQ ID NO: 464568 - DNA, 120 bp, Artificial Sequence
  ENSG00000158062_11 (sequence is synthesized)
gaacaggccttcctactgatgatgcagcctgacaacaccattggggacgtgcgagctctgctagcgcaggccagggtcatggatgcctctgcctttgagatcttcagcacattcccgccc

SEQ ID NO: 464569 - DNA, 120 bp, Artificial Sequence
  ENSG00000158062_12 (sequence is synthesized)
accctctaccaggacgatacactcacgctgcaggctgcaggccttgtgcccaaagcagcactgctgctgcgggcacgccgagccccgaagtccagcctgaaattcagtcctggtccctgt

SEQ ID NO: 464570 - DNA, 120 bp, Artificial Sequence
  ENSG00000158062_13 (sequence is synthesized)
cccggtcccggtcccggccccagtcccggtcccggtcccggccccagtcccggtcccggtcccggccccagtccctgtcctggacccagtcccagcccccaataaagcacccgccccctc

SEQ ID NO: 464571 - DNA, 120 bp, Artificial Sequence
  ENSG00000158062_14 (sequence is synthesized)
attattccacaacaccccttgggtgccccaacgcgcctagcaccctgtaagtgctccccagctgtggatacaggtttctctcagggcagcccgcaagcagtgcagccccagccagaagag

SEQ ID NO: 464572 - DNA, 120 bp, Artificial Sequence
  ENSG00000158062_15 (sequence is synthesized)
ctggaaggctgggcggccaggcccgctgtgtccccagttttcctgttggagtccatctgctgtgctctcaggagagaaggctgggtctctgggagctcacatcctgtatgccctccctcc

SEQ ID NO: 464573 - DNA, 120 bp, Artificial Sequence
  ENSG00000158062_16 (sequence is synthesized)
atgccaagcaactttggggagtcctggcagtggtgccaggcgttgctcttacctgtaccataaccaggaggctgatggttgctcaggcctccctcaaactagccaatgagaagtgcacgg

SEQ ID NO: 464574 - DNA, 120 bp, Artificial Sequence
  ENSG00000158062_17 (sequence is synthesized)
gtcctggtcgcctaggaaaccgcgtgacaacaagatggcggcgctgcgggacggctagcggccctgcgtgggagttcctgacagctggattctagaagtagaactatgagctcacctttg

SEQ ID NO: 464575 - DNA, 120 bp, Artificial Sequence
  ENSG00000158062_18 (sequence is synthesized)
cccggctggcgggcctggctgctgggtctttgtcttctaggttcctctttctcccaagaagggctaagtggatcctgtgaagggagggatgcagtggggggaaggagctggccccagctg

SEQ ID NO: 464576 - DNA, 120 bp, Artificial Sequence
  ENSG00000158062_19 (sequence is synthesized)
ggtttacattctcagctgggacagcagagcctcactgtgtatgtgtgcagccagcagatacctgtgcacaggcacagacccaccaactcgtggggacacttcaacaccgcacaaagccat

SEQ ID NO: 464577 - DNA, 120 bp, Artificial Sequence
  ENSG00000158062_20 (sequence is synthesized)
tttgccactagacccatgcccccaaattagcagaactgcagctgggtacccacctcccatgatacactcattcttagccattgtgctccaacacaggcgcatgggatggccacactcact

SEQ ID NO: 464578 - DNA, 120 bp, Artificial Sequence
  ENSG00000158062_21 (sequence is synthesized)
gacaggcatggagatgtgcactacacaccaaggcacaagcatgatatggacacatgcatgtgaactggagggtggcccacccagacatctccagaaaccactggtccatacaggtatttg

SEQ ID NO: 464579 - DNA, 120 bp, Artificial Sequence
  ENSG00000158062_22 (sequence is synthesized)
tgtgtcagacatatccaaacacatgcactaacaaacacagaggtgacagtcacaagagaacagctcagccacccttcccacagagcagtctcagcacagtcacaactaccaaccttgccc

SEQ ID NO: 464580 - DNA, 120 bp, Artificial Sequence
  ENSG00000158062_23 (sequence is synthesized)
agggcagggacccaggaggcccaggccacaaccaaccagacacagtgccaatggaacaggacatcatttaattgcctctagggtcctcctgggagagggactgcggggcctttggcagag

SEQ ID NO: 464581 - DNA, 120 bp, Artificial Sequence
  ENSG00000158062_24 (sequence is synthesized)
ctctggctgatggaaccaacagaggtgcccatcagccagtgccaggcaggatggcggccccaatgcttggctgggggcagccagcatttggggctgttgcttaagacaatttctgagact

SEQ ID NO: 464582 - DNA, 120 bp, Artificial Sequence
  ENSG00000158062_25 (sequence is synthesized)
acctttggggattttgaagggagtggggatacacagcctccccagacacctcccattctgaggggaagccgctgcactccctgggggaccccagtctgatgccctccaggaggataagtc

SEQ ID NO: 464583 - DNA, 120 bp, Artificial Sequence
  ENSG00000158062_26 (sequence is synthesized)
tgaagccgggctgggaagggagcggagaggcccgaaacagagcagcaggcagcgccctctgctggcaccctggagacagcctcggctgcggggcccctgccttctagtcctccccagctt

SEQ ID NO: 464584 - DNA, 120 bp, Artificial Sequence
  ENSG00000158062_27 (sequence is synthesized)
tcaggacaccttgacaacctggggtccctgcagaagtggcccggctgtcccccaagtctcctgaagctatctgggtagggtgggaggcagtgctgtgagccacaaatgcaaagcagaggg

SEQ ID NO: 464585 - DNA, 120 bp, Artificial Sequence
  ENSG00000158062_28 (sequence is synthesized)
tgttgggactcaaagacatgaggtagagctggccccatgggtaggtgccaccaccagagcccatgaggcttcgtgttctagaaggtggtgggttagtgccgcactgagggcgtgtccggg

SEQ ID NO: 464586 - DNA, 120 bp, Artificial Sequence
  ENSG00000158062_29 (sequence is synthesized)
agggagcatgtgtcaccagggctcaggaaacagcatgagtcatgacgcgggggtgtttaaggcattcgtgccacagcggggacctcggagctatgccttgataaggcaagtgaggttaca

SEQ ID NO: 464587 - DNA, 120 bp, Artificial Sequence
  ENSG00000158062_30 (sequence is synthesized)
tgtacgatgatgcggtttgtgctgcagactggaaaaaagcaggggctttgtcctctcctgaccccctcacactctgccttcacggtaggctcctgagaggggggtctccaaggagggtgt

SEQ ID NO: 464588 - DNA, 120 bp, Artificial Sequence
  ENSG00000158062_31 (sequence is synthesized)
cagtactgcagcttcagctggcgtggatggggtgcttacaggagcagcagggctgagggagatgacagcagtacgaaccgtggctctcctgaggcctgggtttcctcatatgtaaaatgg

SEQ ID NO: 464589 - DNA, 120 bp, Artificial Sequence
  ENSG00000158062_32 (sequence is synthesized)
gacctttctgcccctggagtccccacgcaggctggagcccgagccccgagggcctgcgagctccgcggctcccacaggagaggttcaagaccctgcttaccatgactacgcgtggaggcg

SEQ ID NO: 464590 - DNA, 120 bp, Artificial Sequence
  ENSG00000158062_33 (sequence is synthesized)
gaaggaggcgacacggcctccagggctgggttagatcgtgatagacgtcgctccctgagcgcgtcctgggggcattagggagtcctggcagcgggccggaccgtgtccccgccagagctc

SEQ ID NO: 464591 - DNA, 120 bp, Artificial Sequence
  ENSG00000158062_34 (sequence is synthesized)
aagagggataattcctcccaagatcaatttagcaaaatagcggcactgtcgggatcacacattcaggtcctgaatgtgaggctgccagcagtttcattaacctaatcccaggctccttcc

SEQ ID NO: 464592 - DNA, 120 bp, Artificial Sequence
  ENSG00000158062_35 (sequence is synthesized)
tcccgcacctgagggttgctcaggcctccctcaaactagccaatgagaagtgcacgggtcctggtcgcctaggaaaccgcgtgacaacaagatggcggcgctgcgggacggctagcggcc

SEQ ID NO: 464593 - DNA, 120 bp, Artificial Sequence
  ENSG00000158062_36 (sequence is synthesized)
attaggaagagtagccagggaagtggaaacttcaggctaccccctgggcttggagccctgagtctgtccccaggggctgacttcctgcattcctctagggagttcctgacagctggattc

SEQ ID NO: 464594 - DNA, 120 bp, Artificial Sequence
  ENSG00000158077_0 (sequence is synthesized)
gtatcccgcgcctcccgacctttggccgctggcattcctgcgcgggcgggagctgcgggcgctcgggggataaggcgaggacgcaccagcattaatggaataggagaactcccgaagctt

SEQ ID NO: 464595 - DNA, 120 bp, Artificial Sequence
  ENSG00000158077_1 (sequence is synthesized)
ttagggccctgggaaagggggcgtggctggaaacggagctactggcttcggagaattctgtgaccctcaccaccgcgacgaccccgaggaaacgctgtcaggtcgcctttggttggcaag

SEQ ID NO: 464596 - DNA, 120 bp, Artificial Sequence
  ENSG00000158077_2 (sequence is synthesized)
gcgtggttgtcctcgctgtcccgcgccttggcggaatgggcacctcactagccctggcactagctagcatcgctctaaactcaagaggcctgaatatttggacaagatggcagattcatc

SEQ ID NO: 464597 - DNA, 120 bp, Artificial Sequence
  ENSG00000158077_3 (sequence is synthesized)
atcatcttctttctttcctgattttgggctgctattgtatttggaggagctaaacaaagaggaattaaatacattcaagttattcctaaaggagaccatggaacctgagcatggcctgac

SEQ ID NO: 464598 - DNA, 120 bp, Artificial Sequence
  ENSG00000158077_4 (sequence is synthesized)
accctggaatgaagtgaagaaggccaggcgggaggacctggccaatttgatgaagaaatattatccaggagagaaagcctggagtgtgtctctcaaaatctttggcaagatgaacctgaa

SEQ ID NO: 464599 - DNA, 120 bp, Artificial Sequence
  ENSG00000158077_5 (sequence is synthesized)
ggatctgtgtgagagagcgaaagaagagatcaactggtcggcccagactataggaccagatgatgccaaggctggagagacacaagaagatcaggaggcagtgctgggtgatggaacaga

SEQ ID NO: 464600 - DNA, 120 bp, Artificial Sequence
  ENSG00000158077_6 (sequence is synthesized)
atacagaaatagaataaaggaaaaattttgcatcacttgggacaagaagtctttggctggaaagcctgaagatttccatcatggaattgcagagaaagatagaaaactgttggaacactt

SEQ ID NO: 464601 - DNA, 120 bp, Artificial Sequence
  ENSG00000158077_7 (sequence is synthesized)
gttcgatgtggatgtcaaaaccggtgcacagccacagatcgtggtgcttcagggagctgctggagttgggaaaacaaccttggtgagaaaggcaatgttagattgggcagagggcagtct

SEQ ID NO: 464602 - DNA, 120 bp, Artificial Sequence
  ENSG00000158077_8 (sequence is synthesized)
ctaccagcagaggtttaagtatgttttttatctcaatgggagagaaattaaccagctgaaagagagaagctttgctcaattgatatcaaaggactggcccagcacagaaggccccattga

SEQ ID NO: 464603 - DNA, 120 bp, Artificial Sequence
  ENSG00000158077_9 (sequence is synthesized)
agaaatcatgtaccagccaagtagcctcttgtttattattgacagtttcgatgaactgaactttgcctttgaagaacctgagtttgcactgtgcgaagactggacccaagaacacccagt

SEQ ID NO: 464604 - DNA, 120 bp, Artificial Sequence
  ENSG00000158077_10 (sequence is synthesized)
gtccttcctcatgagtagtttgctgaggaaagtgatgctccctgaggcatccttattggtgacaacaagactcacaacttctaagagactaaagcagttgttgaagaatcaccattatgt

SEQ ID NO: 464605 - DNA, 120 bp, Artificial Sequence
  ENSG00000158077_11 (sequence is synthesized)
agagctactaggaatgtctgaggatgcaagagaggagtatatttaccagttttttgaagataagaggtgggccatgaaagtattcagttcactaaaaagcaatgagatgctgtttagcat

SEQ ID NO: 464606 - DNA, 120 bp, Artificial Sequence
  ENSG00000158077_12 (sequence is synthesized)
gtgccaagtccccctagtgtgctgggccgcttgtacttgtctgaagcagcaaatggagaagggtggtgatgtcacattgacctgccaaacaaccacagctctgtttacctgctatatttc

SEQ ID NO: 464607 - DNA, 120 bp, Artificial Sequence
  ENSG00000158077_13 (sequence is synthesized)
tagcttgttcacaccagtagatggaggctctcctagtctacccaaccaagcccagctgagaagactgtgccaagtcgctgccaaaggaatatggactatgacttacgtgttttacagaga

SEQ ID NO: 464608 - DNA, 120 bp, Artificial Sequence
  ENSG00000158077_14 (sequence is synthesized)
aaatctcagaaggcttgggttaactcaatctgatgtctctagttttatggacagcaatattattcagaaggacgcagagtatgaaaactgctatgtgttcacccaccttcatgttcagga

SEQ ID NO: 464609 - DNA, 120 bp, Artificial Sequence
  ENSG00000158077_15 (sequence is synthesized)
aaaggcagttgggaagctgggaacccttcctgccagccttttgaagatttgaagtcattacttcaaagcacaagttataaagacccccatttgacacagatgaagtgctttttgtttggc

SEQ ID NO: 464610 - DNA, 120 bp, Artificial Sequence
  ENSG00000158077_16 (sequence is synthesized)
cttttgaatgaagatcgagtaaaacaactggagaggacttttaactgtaaaatgtcactgaagataaaatcaaagttacttcagtgtatggaagtattaggaaacagtgactattctcca

SEQ ID NO: 464611 - DNA, 120 bp, Artificial Sequence
  ENSG00000158077_17 (sequence is synthesized)
tcacagctgggatttctggagttgtttcactgtctgtatgagactcaagataaagcgtttataagccaggcaatgagatgtttcccaaaggttgccattaatatttgtgagaaaatacat

SEQ ID NO: 464612 - DNA, 120 bp, Artificial Sequence
  ENSG00000158077_18 (sequence is synthesized)
ttgcttgtatcttctttctgccttaagcactgccggtgtttgcggaccatcaggctgtctgtaactgtggtatttgagaagaagatattaaaaacaagcctcccaactaacacttgggat

SEQ ID NO: 464613 - DNA, 120 bp, Artificial Sequence
  ENSG00000158077_19 (sequence is synthesized)
ggtgatcgcattactcactgttggcaagatctctgttctgtgcttcatacaaatgaacacttgagagaattggacctgtaccatagcaaccttgataaatcagcaatgaatatcctgcat

SEQ ID NO: 464614 - DNA, 120 bp, Artificial Sequence
  ENSG00000158077_20 (sequence is synthesized)
catgaactaaggcacccaaactgtaaactacaaaagctactgttgaaatttatcactttccctgatggttgtcaggatatctctacttctttgattcataacaagaatctgatgcatctt

SEQ ID NO: 464615 - DNA, 120 bp, Artificial Sequence
  ENSG00000158077_21 (sequence is synthesized)
gacctaaaagggagtgatataggggataatggagtaaagtcattgtgtgaggccttgaaacacccagagtgtaaactacagactctcaggctggaatcttgcaacctaactgtattttgt

SEQ ID NO: 464616 - DNA, 120 bp, Artificial Sequence
  ENSG00000158077_22 (sequence is synthesized)
tgtctaaatatatctaatgctctcatcagaagccagagcctgatatttctgaatctgtcaaccaataatctgttggatgatggagtgcagcttttgtgtgaggccttaagacatccaaag

SEQ ID NO: 464617 - DNA, 120 bp, Artificial Sequence
  ENSG00000158077_23 (sequence is synthesized)
tgttatctagagagactgtccttagaaagctgtggtctcacagaggctggctgtgagtatctttctttggctctcatcagcaataaaagactgacacatttgtgcttggcagacaatgtc

SEQ ID NO: 464618 - DNA, 120 bp, Artificial Sequence
  ENSG00000158077_24 (sequence is synthesized)
ttgggtgatggtggagtaaagcttatgagtgatgccctgcaacatgcacaatgtactctgaagagccttgtgctgaggcgttgccatttcacttcacttagcagtgaatatctgtcaact

SEQ ID NO: 464619 - DNA, 120 bp, Artificial Sequence
  ENSG00000158077_25 (sequence is synthesized)
tctcttctacacaacaagagcctgacgcatctggatctaggatcaaactggctacaagacaatggagtgaagcttctgtgtgatgtctttcggcatccaagctgtaatcttcaggacttg

SEQ ID NO: 464620 - DNA, 120 bp, Artificial Sequence
  ENSG00000158077_26 (sequence is synthesized)
gaattgatgggctgtgttctcactaatgcatgttgtctggatctggcttctgttattttgaataacccaaacctgaggagcctggaccttgggaacaacgatttgcaggatgatggagtg

SEQ ID NO: 464621 - DNA, 120 bp, Artificial Sequence
  ENSG00000158077_27 (sequence is synthesized)
aaaattctgtgtgatgctttgagatatccaaactgtaacattcagaggctcgggttggaatactgtggtttgacatctctctgctgtcaagatctctcctctgctcttatctgcaacaaa

SEQ ID NO: 464622 - DNA, 120 bp, Artificial Sequence
  ENSG00000158077_28 (sequence is synthesized)
agactgataaaaatgaatctgacacagaataccttaggatatgaaggaattgtgaagttatataaagtcttgaagtctcctaagtgtaaactacaagttctagggttgtgcaaagaggca

SEQ ID NO: 464623 - DNA, 120 bp, Artificial Sequence
  ENSG00000158077_29 (sequence is synthesized)
tttgatgaggaagcccagaagctgctggaagctgtgggagttagcaatccacacttaatcattaagccagattgtaactatcataatgaagaagatgtgtcttggtggtggtgtttctga

SEQ ID NO: 464624 - DNA, 120 bp, Artificial Sequence
  ENSG00000158079_0 (sequence is synthesized)
agtgaaagttcctcactgagtgagtggggctgactcttcctgcctccggctcttgcctcccagtgccatgcaggtgcaggatgcaaccaggcggccctcagccgtgcgcttcctcagctc

SEQ ID NO: 464625 - DNA, 120 bp, Artificial Sequence
  ENSG00000158079_1 (sequence is synthesized)
ctttctccagggccgccggcactccacctcagacccagtactgcggctgcagcaggcccggcggggctctggcttgggctccggctctgccacgaagctgctgtcctcgtcctctctcca

SEQ ID NO: 464626 - DNA, 120 bp, Artificial Sequence
  ENSG00000158079_2 (sequence is synthesized)
ggtgatggtggctgtttcctcagtcagccatgcagagggaaacccaactttccccgaaagaaaaagaaatttagaacgtccaacaccaaagtacacaaaagtaggggagcgtttacggca

SEQ ID NO: 464627 - DNA, 120 bp, Artificial Sequence
  ENSG00000158079_3 (sequence is synthesized)
tgtcattcctggacacatggcatgttccatggcgtgtggcggtagagcttgcaagtatgagaacccagcccgctggagtgagcaggagcaagccattaagggggtttactcatcctgggt

SEQ ID NO: 464628 - DNA, 120 bp, Artificial Sequence
  ENSG00000158079_4 (sequence is synthesized)
cactgataatatactggccatggcccgcccatcctctgagctcctggagaagtaccacatcattgatcagttcctcagccatggcataaaaacaataatcaacctccagcgccctggtga

SEQ ID NO: 464629 - DNA, 120 bp, Artificial Sequence
  ENSG00000158079_5 (sequence is synthesized)
gcatgctagctgtgggaaccctctggaacaagaaagtggcttcacataccttcctgaggctttcatggaggctggcatttacttctacaatttcggatggaaggattatggtgtagcgtc

SEQ ID NO: 464630 - DNA, 120 bp, Artificial Sequence
  ENSG00000158079_6 (sequence is synthesized)
tcttactactatcctagatatggtgaaggtgatgacatttgccttacaggaaggaaaagtagctatccattgtcatgcagggcttggtcgaacaggtgttttaatagcctgttacttagt

SEQ ID NO: 464631 - DNA, 120 bp, Artificial Sequence
  ENSG00000158079_7 (sequence is synthesized)
ttttgcaacgagaatgactgctgaccaagcaattatatttgtgcgggcaaagcgacccaattccatacaaaccagaggacagctcctctgtgtaagggaatttactcagtttctaactcc

SEQ ID NO: 464632 - DNA, 120 bp, Artificial Sequence
  ENSG00000158079_8 (sequence is synthesized)
tctccgcaatatattctcttgctgtgatcccaaagcacatgctgtcaccttacctcaatatctaattcgccagcgtcatctgcttcatggttatgaggcacgacttctgaaacacgtgcc

SEQ ID NO: 464633 - DNA, 120 bp, Artificial Sequence
  ENSG00000158079_9 (sequence is synthesized)
aaaaattatccacctagtttgcaaattgctgctggacttagcggagaacaggccagtgatgatgaaggatgtgtccgaaggacctggtctctctgctgaaatagaaaagacaatgtctga

SEQ ID NO: 464634 - DNA, 120 bp, Artificial Sequence
  ENSG00000158079_10 (sequence is synthesized)
gatggtcaccatgcagctggataaagagttactgaggcatgacagtgatgtgtccaacccgcctaaccccactgcagtggcagcagattttgacaatcgaggcatgattttctccaatga

SEQ ID NO: 464635 - DNA, 120 bp, Artificial Sequence
  ENSG00000158079_11 (sequence is synthesized)
gcaacagtttgaccctctttggaaaaggcggaatgttgagtgccttcaacccctgactcatctgaaaaggcggctcagctacagtgactcagatttaaagagggccgagaacctcctgga

SEQ ID NO: 464636 - DNA, 120 bp, Artificial Sequence
  ENSG00000158079_12 (sequence is synthesized)
gcaaggggagactccacagacagtgcctgcccagatcttggttggccacaagcccaggcagcagaagctcataagccattgttacatcccacagtctccagaaccagacttacacaagga

SEQ ID NO: 464637 - DNA, 120 bp, Artificial Sequence
  ENSG00000158079_13 (sequence is synthesized)
agccttggttcgcagcacactttctttctggagtcagtcaaagtttggaggcctggaaggactcaaagataatgggtcaccaattttccatggaaggatcattccaaaggaagcacagca

SEQ ID NO: 464638 - DNA, 120 bp, Artificial Sequence
  ENSG00000158079_14 (sequence is synthesized)
gagtggagctttctctgcagatgtttcaggctcacacagccctggggagccagtttcacccagctttgcaaatgtccataaggatccaaaccctgctcaccagcaagtgtctcactgtca

SEQ ID NO: 464639 - DNA, 120 bp, Artificial Sequence
  ENSG00000158079_15 (sequence is synthesized)
gtgtaaaactcatggtgttgggagccctggctctgtcaggcagaacagcaggacaccccgaagccctctggactgtggctccagtcccaaagcacagttcttggttgaacatgaaaccca

SEQ ID NO: 464640 - DNA, 120 bp, Artificial Sequence
  ENSG00000158079_16 (sequence is synthesized)
ggacagtaaagatctgtctgaagcagcttcacactctgcattacagtctgaattgagtgctgaggcaagaagaatactggcggccaaagccctagcaaatttaaatgaatctgtagaaaa

SEQ ID NO: 464641 - DNA, 120 bp, Artificial Sequence
  ENSG00000158079_17 (sequence is synthesized)
ggaggaactaaaaaggaaggtagaaatgtggcagaaagagcttaattcccgagatggagcttgggaaagaatatgtggcgagagggaccctttcatcctatgcagcttgatgtggtcttg

SEQ ID NO: 464642 - DNA, 120 bp, Artificial Sequence
  ENSG00000158079_18 (sequence is synthesized)
agcactttttttattagagaagggacagcaccagactattctctgcgtgttgcactgcatagtgaacctgcagacaattcccgtggatgtggaggaagctttccttgcccatgccattaa

SEQ ID NO: 464643 - DNA, 120 bp, Artificial Sequence
  ENSG00000158079_19 (sequence is synthesized)
ggcattcactaaggttaattttgattctgaaaatggaccaacagtttacaacaccctgaagaaaatatttaagcacacgctggaagaaaaaagaaaaatgacaaaagatggccctaagcc

SEQ ID NO: 464644 - DNA, 120 bp, Artificial Sequence
  ENSG00000158079_20 (sequence is synthesized)
tggcctctagctttcactcgtggtgaatatttcagacctaaagatccagatagtatctctgttcatatgtgaataagttgaagattgtggggctactttttctcatagcactttattttg

SEQ ID NO: 464645 - DNA, 120 bp, Artificial Sequence
  ENSG00000158079_21 (sequence is synthesized)
aatgttgttagtttgtgctgagaatggtcgtccgtatttgaaccaattatttattttaaaatatatttaagctacatttttgttttgaaaaattgccataaatttggtgccactttcttt

SEQ ID NO: 464646 - DNA, 120 bp, Artificial Sequence
  ENSG00000158079_22 (sequence is synthesized)
tatttatttgactgagttaatattattgtattaacattttaagtatatggtgtttacattcttatttcttttgacattttggaaataatcataacttgtctttccaaaataaccattttc

SEQ ID NO: 464647 - DNA, 120 bp, Artificial Sequence
  ENSG00000158079_23 (sequence is synthesized)
ttgatggaactcttcctagagtttttaccaaatagctaactttagtagtaaaacctcattgtgtatccattcccccacagatgaactaagaaagtcaccaagtgtcttaagctgttttat

SEQ ID NO: 464648 - DNA, 120 bp, Artificial Sequence
  ENSG00000158079_24 (sequence is synthesized)
atttgttacgaagaaggctattgctacaatatttttaaaggtttcttttttaactttgaaattttttgtttttccttttctttttataaatgtaacagagggtttcaaagcatattattt

SEQ ID NO: 464649 - DNA, 120 bp, Artificial Sequence
  ENSG00000158079_25 (sequence is synthesized)
ttcagagagatttagttttactttaatggagtgactgtgaagtggttgggattttttgcttgtagaaagtagacttgctctttgtcagatttccaaacaaccttgccagccttggctgtc

SEQ ID NO: 464650 - DNA, 120 bp, Artificial Sequence
  ENSG00000158079_26 (sequence is synthesized)
aaaaggaggcaggagcagttctcaacacaccaagccttattcccactcccttgggttgctgctgagccaaatagcatctttacagaggaagtgggatcagaggcaggaagtgtggaaagt

SEQ ID NO: 464651 - DNA, 120 bp, Artificial Sequence
  ENSG00000158079_27 (sequence is synthesized)
tgctaagaagcagggcttgcctctgtcctcccggggactccacagggatattcgtgcagggcaggggctctgtgccagccctgctctctcagatgccacagccactctgcagaggtgact

SEQ ID NO: 464652 - DNA, 120 bp, Artificial Sequence
  ENSG00000158079_28 (sequence is synthesized)
cttggagctggaggaagtcaaaactgggccactgtttgtactgatggtgtattagcatgagcagcgtggccctggccccacactcccaaatctgccactccatagacccacttgcctcaa

SEQ ID NO: 464653 - DNA, 120 bp, Artificial Sequence
  ENSG00000158079_29 (sequence is synthesized)
ggctttatatttggctgctttcttacaatgagaattaagatttttaaactgaagttgaccatacaggttgcattagccctaactggcttcatgtaagaagggtgactgcctaaactagtt

SEQ ID NO: 464654 - DNA, 120 bp, Artificial Sequence
  ENSG00000158079_30 (sequence is synthesized)
ccttgtaagctgaaccatcaattatcagttgaagccatacttttatttaaattaatatacgtagataccagaggccaagccacagagaggataatagttcttcccaataaaggtgatatt

SEQ ID NO: 464655 - DNA, 120 bp, Artificial Sequence
  ENSG00000158079_31 (sequence is synthesized)
aatcagactaatttcgaactaaagaagttactgcttaaagacggaatttcaggggaagcaagactcatttagaacaaatgaaatttctccagtcctacatttctgaattgacttctagca

SEQ ID NO: 464656 - DNA, 120 bp, Artificial Sequence
  ENSG00000158079_32 (sequence is synthesized)
catcaaaaatatttcagtcattatcagtctcattaactgaaatgccaaatgctaaatgcagtgttctttcacactgttttaattttcttgggaaattgagtccagtggatgttaatggag

SEQ ID NO: 464657 - DNA, 120 bp, Artificial Sequence
  ENSG00000158079_33 (sequence is synthesized)
tgggttgcccatccctgaaatgtcttattttcaagtgcctggcctgggaaagaaggggaagaaacaattgcattatatccaaagatacactataaaaatagagtttttaccaaaaaaaga

SEQ ID NO: 464658 - DNA, 120 bp, Artificial Sequence
  ENSG00000158079_34 (sequence is synthesized)
tgtttgttctcatctcagtaggcctcatttgggcaagtgacccacaggtcttttggcgagtttgctatttgcctgttgaaatacttgtttcaacttagagaacagttatgatgtgaccat

SEQ ID NO: 464659 - DNA, 120 bp, Artificial Sequence
  ENSG00000158079_35 (sequence is synthesized)
agcatggcacaactaaaaatctaagcctgaaacctgaaaaaagagatatgacaagggaaattaatcaggctatacataagtattgtatttatttgaataaaaataaaaagagcaacccat

SEQ ID NO: 464660 - DNA, 120 bp, Artificial Sequence
  ENSG00000158079_36 (sequence is synthesized)
ctcagcaggggcgccccgccacggggagcagcccaggcgctcgccccaggacgttgtccggcgggctgggctgggacccctctgcctccagggcgcgtcgggagcagcagggatcggtgc

SEQ ID NO: 464661 - DNA, 120 bp, Artificial Sequence
  ENSG00000158079_37 (sequence is synthesized)
tctgcctccagggcgcgtcgggagcagcagggatcggtgccgcgccgtgagggtgcgcagaggctgccctcgggcccgctacccacagaccctccgcggggcagcgtctccgggccggcc

SEQ ID NO: 464662 - DNA, 120 bp, Artificial Sequence
  ENSG00000158079_38 (sequence is synthesized)
cctggtccgccgaccgcagacgacttgtgacacggacggcgcgtcctgctgaccccagccggcgccgagggcttggaatctcgagcgggaaaagactaccatggctgcaggagtcttgcc

SEQ ID NO: 464663 - DNA, 120 bp, Artificial Sequence
  ENSG00000158079_39 (sequence is synthesized)
gccgcgccctggtccgccgaccgcagacgacttgtgacacggacggcgcgtcctgctgaccccagccggcgccgagggcttggaatctcgagcgggaaaaggctagagtgcagtgacgcg

SEQ ID NO: 464664 - DNA, 120 bp, Artificial Sequence
  ENSG00000158079_40 (sequence is synthesized)
attacagctcaccgaggttgcagcctcaacctcctaggatcagactaccatggctgcaggagtcttgcctcagaatgaacaaccatattctaccttggtgaataacagcgagtgtgttgc

SEQ ID NO: 464665 - DNA, 120 bp, Artificial Sequence
  ENSG00000158079_41 (sequence is synthesized)
gaacatatctgtaaggcagatgatactatttctacagtctttgttaatcttgtgaattcagtatcacagatgaggatgctaaaggtcatgaaggttagagggtaagtgacttgctcaggg

SEQ ID NO: 464666 - DNA, 120 bp, Artificial Sequence
  ENSG00000158079_42 (sequence is synthesized)
tcacgtggcatgcgtgtggcagagtcagggtacagcacatgtgtttaacactttccattatcccaagattcttggctaacctccctggagagcctcaggaaacatcatgataagatagtc

SEQ ID NO: 464667 - DNA, 120 bp, Artificial Sequence
  ENSG00000158079_43 (sequence is synthesized)
attttgctaagagcatttttgattagtgtcagttctgcccagcttgtctccttcataagattgaatcaagagctactttgttttatacatgatctatgggatatgaaggactgtgaataa

SEQ ID NO: 464668 - DNA, 120 bp, Artificial Sequence
  ENSG00000158079_44 (sequence is synthesized)
caaagtattggtgtattcataagataataaagagaagcccagtaccagagggcccttgtggcataatagaaacagcacagactctggagtaaggcagaactgggtatgaacacccccttt

SEQ ID NO: 464669 - DNA, 120 bp, Artificial Sequence
  ENSG00000158079_45 (sequence is synthesized)
gccattttctagcttttggctcctaggtgagttatttcatctttcttgagccccattatatgtattggtgaggaagctccctgctgggtgccatttgagagttagagataagacatgtat

SEQ ID NO: 464670 - DNA, 120 bp, Artificial Sequence
  ENSG00000158079_46 (sequence is synthesized)
tacagtctctgtcccactgtgtgcatgtagtaaatattgggtaggtgaatgaatgagtgaatggtagcaattattacacttaacttctattttgttaaaatgtatttgactcactaaaac

SEQ ID NO: 464671 - DNA, 120 bp, Artificial Sequence
  ENSG00000158079_47 (sequence is synthesized)
ataaatctgaaccctgtcagaaattcatgaaaatccttatctcacttttcccttgctctctgtgaggtaaagtattaaaatctcatgcttaaattttctctaggcatttggagtattaga

SEQ ID NO: 464672 - DNA, 120 bp, Artificial Sequence
  ENSG00000158079_48 (sequence is synthesized)
tacataggatgctaaaaagatatttcaaagaagtacatatgccccatttaccagctttcaagcacctttattttatttttgcagacttcgaagctcaaagcttttccttttccttagacc

SEQ ID NO: 464673 - DNA, 120 bp, Artificial Sequence
  ENSG00000158079_49 (sequence is synthesized)
ccaggttaatgtataaatgttcccttatttctactttctcatctaccatctactttattgcaaaaaaatagttctgttttgttcaccagaaggctgaaaaggaagactcttgtgaactgt

SEQ ID NO: 464674 - DNA, 120 bp, Artificial Sequence
  ENSG00000158079_50 (sequence is synthesized)
ttctgtggtttctgaataaagtagagaacttggattaactaagccctttccctgtgctataagctttaaccgaccttatctcagtcaatcagcccaacagcttgtgaagcaggggatgag

SEQ ID NO: 464675 - DNA, 120 bp, Artificial Sequence
  ENSG00000158079_51 (sequence is synthesized)
tttcatagagagaaactggggcttacagaattcagtgtcttagtccagtgtccagcctggaagtggagaggctgggaggggtcccagttctgcactctggagcctgagtctttcactctt

SEQ ID NO: 464676 - DNA, 120 bp, Artificial Sequence
  ENSG00000158079_52 (sequence is synthesized)
gtgggcagcgcaagaatcatgcagtgtcaaatggtgcacctccctctcctctccctgtctctgtctctgtctgtctgtctctttctcttcctttttagaaagagcttaattcccgagatg

SEQ ID NO: 464677 - DNA, 120 bp, Artificial Sequence
  ENSG00000158089_0 (sequence is synthesized)
gtttccctatcggcggcagcgggcaaggcggcggcggcggcggcggcagccgcggtggcggcgtggggaacatctcggcagccaccgcgcttctcccgctggagcgggcgtccagcttgg

SEQ ID NO: 464678 - DNA, 120 bp, Artificial Sequence
  ENSG00000158089_1 (sequence is synthesized)
ctgccctcggtccttccctgccacgtttcgggtcgccctgcaccccccacccaggctcgcttctcttcgaagcgggaagggcgccttgcaggatcctgccgcccctccaaccggatcctg

SEQ ID NO: 464679 - DNA, 120 bp, Artificial Sequence
  ENSG00000158089_2 (sequence is synthesized)
ggtctagagctccccagagcgaggcgctcgccaggactcctgccccgccaaccctgaccgccggggggtgcccccgggacgtagcgccgcggagaggaagcggcaaaggggaccatgcgg

SEQ ID NO: 464680 - DNA, 120 bp, Artificial Sequence
  ENSG00000158089_3 (sequence is synthesized)
cgcctgactcgtcggctggttctgccagtcttcggggtgctctggatcacggtgctgctgttcttctgggtaaccaagaggaagttggaggtgccgacgggacctgaagtgcagacccct

SEQ ID NO: 464681 - DNA, 120 bp, Artificial Sequence
  ENSG00000158089_4 (sequence is synthesized)
aagccttcggacgctgactgggacgacctgtgggaccagtttgatgagcggcggtatctgaatgccaaaaagtggcgcgttggtgacgacccctataagctgtatgctttcaaccagcgg

SEQ ID NO: 464682 - DNA, 120 bp, Artificial Sequence
  ENSG00000158089_5 (sequence is synthesized)
gagagtgagcggatctccagcaatcgggccatcccggacactcgccatctgagatgcacactgctggtgtattgcacggaccttccacccactagcatcatcatcaccttccacaacgag

SEQ ID NO: 464683 - DNA, 120 bp, Artificial Sequence
  ENSG00000158089_6 (sequence is synthesized)
gcccgctccacgctgctcaggaccatccgcagtgtattaaaccgcacccctacgcatctgatccgggaaatcatattagtggatgacttcagcaatgaccctgatgactgtaaacagctc

SEQ ID NO: 464684 - DNA, 120 bp, Artificial Sequence
  ENSG00000158089_7 (sequence is synthesized)
atcaagttgcccaaggtgaaatgcttgcgcaataatgaacggcaaggtctggtccggtcccggattcggggcgctgacatcgcccagggcaccactctgactttcctcgacagccactgt

SEQ ID NO: 464685 - DNA, 120 bp, Artificial Sequence
  ENSG00000158089_8 (sequence is synthesized)
gaggtgaacagggactggctccagcctctgttgcacagggtcaaagaggactacacgcgggtggtgtgccctgtgatcgatatcattaacctggacaccttcacctacatcgagtctgcc

SEQ ID NO: 464686 - DNA, 120 bp, Artificial Sequence
  ENSG00000158089_9 (sequence is synthesized)
tcggagctcagaggggggtttgactggagcctccacttccagtgggagcagctctccccagagcagaaggctcggcgcctggaccccacggagcccatcaggactcctatcatagctgga

SEQ ID NO: 464687 - DNA, 120 bp, Artificial Sequence
  ENSG00000158089_10 (sequence is synthesized)
tgatatggacatggacatctggggtggggagaactttgaaatctccttccgagtgtggatgtgcgggggcagcctagagatcgtcccctgcagccgagtggggcacgtcttccggaagaa

SEQ ID NO: 464688 - DNA, 120 bp, Artificial Sequence
  ENSG00000158089_11 (sequence is synthesized)
gcacccctacgttttccctgatggaaatgccaacacgtatataaagaacaccaagcggacagctgaagtgtggatggatgaatacaagcaatactattacgctgcccggccattcgccct

SEQ ID NO: 464689 - DNA, 120 bp, Artificial Sequence
  ENSG00000158089_12 (sequence is synthesized)
ggagaggcccttcgggaatgttgagagcagattggacctgaggaagaatctgcgctgccagagcttcaagtggtacctggagaatatctaccctgaactcagcatccccaaggagtcctc

SEQ ID NO: 464690 - DNA, 120 bp, Artificial Sequence
  ENSG00000158089_13 (sequence is synthesized)
catccagaagggcaatatccgacagagacagaagtgcctggaatctcaaaggcagaacaaccaagaaaccccaaacctaaagttgagcccctgtgccaaggtcaaaggcgaagatgcaaa

SEQ ID NO: 464691 - DNA, 120 bp, Artificial Sequence
  ENSG00000158089_14 (sequence is synthesized)
gtcccaggtatgggccttcacatacacccagcagatcctccaggaggagctgtgcctgtcagtcatcaccttgttccctggcgccccagtggttcttgtcctttgcaagaatggagatga

SEQ ID NO: 464692 - DNA, 120 bp, Artificial Sequence
  ENSG00000158089_15 (sequence is synthesized)
ccgacagcaatggaccaaaactggttcccacatcgagcacatagcatcccacctctgcctcgatacagatatgttcggtgatggcaccgagaacggcaaggaaatcgtcgtcaacccatg

SEQ ID NO: 464693 - DNA, 120 bp, Artificial Sequence
  ENSG00000158089_16 (sequence is synthesized)
tgagtcctcactcatgagccagcactgggacatggtgagctcttgaggacccctgccagaagcagcaagggccatggggtggtgcttccctggaccagaacagactggaaactgggcagc

SEQ ID NO: 464694 - DNA, 120 bp, Artificial Sequence
  ENSG00000158089_17 (sequence is synthesized)
aagcagcctgcaaccacctcagacatcctggactgggaggtggaggcagagccccccaggacaggagcaactgtctcagggaggacagaggaaaacatcacaagccaatggggctcaaag

SEQ ID NO: 464695 - DNA, 120 bp, Artificial Sequence
  ENSG00000158089_18 (sequence is synthesized)
acaaatcccacatgttctcaaggccgttaagttccagtcctggccagtcattccctgattggtatctggagacagaaacctaatgggaagtgtttattgttccttttcctacaaaggaag

SEQ ID NO: 464696 - DNA, 120 bp, Artificial Sequence
  ENSG00000158089_19 (sequence is synthesized)
cagtctctggaggccagaaagaaaagccttctttttcactaggccaggactacattgagagatgaagaatggaggttgtttccaaaagaaataaagagaaacttagaagttgtctctgga

SEQ ID NO: 464697 - DNA, 120 bp, Artificial Sequence
  ENSG00000158089_20 (sequence is synthesized)
actgaaaaattagctggtgcctgtatttcaggcttattgtttcctaggatctcagggagatcaggccacgtggtctgtggattaattaaggcacccagataattggctattaatagatgg

SEQ ID NO: 464698 - DNA, 120 bp, Artificial Sequence
  ENSG00000158089_21 (sequence is synthesized)
ccaattgatggctgccagctgggtgctgaattgactaatgtccttatggtgggcaggtggtctttatcagaagaggagctagctgaaagactttactaattaaagggtgaatcaggaaaa

SEQ ID NO: 464699 - DNA, 120 bp, Artificial Sequence
  ENSG00000158089_22 (sequence is synthesized)
gaagataagaggtagcttttttccccaccacttggtgtgatgttttacagtttacaaagcatttatatccacagttgcctcatttgatccttactgcgactttgtgaggtttggtccttg

SEQ ID NO: 464700 - DNA, 120 bp, Artificial Sequence
  ENSG00000158089_23 (sequence is synthesized)
tttttcaaggtggctgggatgagcccttgggcgcctcaggtgcctgtatcacccactcctccctaccaaagagggcatcttcctacaggaggacaccttgctgtatgtcatttcccatgt

SEQ ID NO: 464701 - DNA, 120 bp, Artificial Sequence
  ENSG00000158089_24 (sequence is synthesized)
ctggatgacagccccccgagagacacctgtgactgctcccacctgcagaaagaaggcaacaagtaattcactgagcagatgcacactgctggtgtattgcacggaccttccacccactag

SEQ ID NO: 464702 - DNA, 120 bp, Artificial Sequence
  ENSG00000158089_25 (sequence is synthesized)
tgttgagagcagattggacctgaggaagaatctgcgctgccagagcttcaagtggtacctggagaatatctaccctgaactcagtggactctcctctctccctgtgactctcctccagca

SEQ ID NO: 464703 - DNA, 120 bp, Artificial Sequence
  ENSG00000158089_26 (sequence is synthesized)
tttagcaactgctatggcacaagcaccagctaaccaaagtatgtgctggatcataggaagatgatgggtcgtagagtggaggggcatgcaggacaatgggaactgcgagtaggactttgg

SEQ ID NO: 464704 - DNA, 120 bp, Artificial Sequence
  ENSG00000158089_27 (sequence is synthesized)
aattttgaagacacagtgtttcagagagcgagatggtgactgctgtgattagaaatttgagaagcaattggtggttgaacatgcaatggggcaaaccattttaacatgaattggggatgt

SEQ ID NO: 464705 - DNA, 120 bp, Artificial Sequence
  ENSG00000158089_28 (sequence is synthesized)
gcctgagaagacccaactttcccaaaggaaccaagaacacagccttggaagaaatgagctggaaatatcgcgctcatctaaccactgatgtagagctatagaacacgtgaccagtgacag

SEQ ID NO: 464706 - DNA, 120 bp, Artificial Sequence
  ENSG00000158089_29 (sequence is synthesized)
tctgtgagtggactctccatgtgactaattatgacatgggattatctatgctcctggttccagtttaagaagaaaataagagaaaatcttttaaatttcctccttgatgtctcatcagaa

SEQ ID NO: 464707 - DNA, 120 bp, Artificial Sequence
  ENSG00000158089_30 (sequence is synthesized)
cagtcttcggggtgctctggatcacggtgctgctgttcttctgggtaaccaagaggaagttggaggtgccgacgggacctgaagtgcagacccctaagggttcttcccaaagttagtgca

SEQ ID NO: 464708 - DNA, 120 bp, Artificial Sequence
  ENSG00000158089_31 (sequence is synthesized)
taaatttcctccttgatgtctcatcagaattggagccgcttttcctctgcaatactggtttggtccttgtttttcaaggtggctgggatgagcccttgggcgcctcaggtgcctgtatca

SEQ ID NO: 464709 - DNA, 120 bp, Artificial Sequence
  ENSG00000158089_32 (sequence is synthesized)
cccactcctccctaccaaagagggcatcttcctacagaattgaaaacagtttgcagctgacacctgagcctacccatttcgttctgaatgcaatttcagcagcccactgtagctcccctg

SEQ ID NO: 464710 - DNA, 120 bp, Artificial Sequence
  ENSG00000158089_33 (sequence is synthesized)
tcactgttccatcagtggagggactgggacagacccacaggagtgctttttccaccatcatctcagccctcagtagagcaggagtgaggaagcgggaggcttgaggcaagagtgtgaaac

SEQ ID NO: 464711 - DNA, 120 bp, Artificial Sequence
  ENSG00000158089_34 (sequence is synthesized)
atcagacatcacctttgccctcagggctctggagacctcaagcatccacataatatttaaaataataaaaccaatgagtagacaataaaggaccaagatggatatctgggctgtatattc

SEQ ID NO: 464712 - DNA, 120 bp, Artificial Sequence
  ENSG00000158092_0 (sequence is synthesized)
accgcgcgtgccccgcctctctcccaagagctacgcggcggcggcggagcgcaggcctcgtgccgttacggccatcacggcggccgcagtggcgtcctggagccctcctcagtgctgaag

SEQ ID NO: 464713 - DNA, 120 bp, Artificial Sequence
  ENSG00000158092_1 (sequence is synthesized)
ctgctgaaagatggcagaagaagtggtggtagtagccaaatttgattatgtggcccaacaagaacaagagttggacatcaagaagaatgagagattatggcttctggatgattctaagtc

SEQ ID NO: 464714 - DNA, 120 bp, Artificial Sequence
  ENSG00000158092_2 (sequence is synthesized)
ctggtggcgagttcgaaattccatgaataaaacaggttttgtgccttctaactatgtggaaaggaaaaacagtgctcggaaagcatctattgtgaaaaacctaaaggataccttaggcat

SEQ ID NO: 464715 - DNA, 120 bp, Artificial Sequence
  ENSG00000158092_3 (sequence is synthesized)
tggaaaagtgaaaagaaaacctagtgtgccagattctgcatctcctgctgatgatagttttgttgacccaggggaacgtctctatgacctcaacatgcccgcttatgtgaaatttaacta

SEQ ID NO: 464716 - DNA, 120 bp, Artificial Sequence
  ENSG00000158092_4 (sequence is synthesized)
catggctgagagagaggatgaattatcattgataaaggggacaaaggtgatcgtcatggagaaatgcagtgatgggtggtggcgtggtagctacaatggacaagttggatggttcccttc

SEQ ID NO: 464717 - DNA, 120 bp, Artificial Sequence
  ENSG00000158092_5 (sequence is synthesized)
aaactatgtaactgaagaaggtgacagtcctttgggtgaccatgtgggttctctgtcagagaaattagcagcagtcgtcaataacctaaatactgggcaagtgttgcatgtggtacaggc

SEQ ID NO: 464718 - DNA, 120 bp, Artificial Sequence
  ENSG00000158092_6 (sequence is synthesized)
tctttacccattcagctcatctaatgatgaagaacttaatttcgagaaaggagatgtaatggatgttattgaaaaacctgaaaatgacccagagtggtggaaatgcaggaagatcaatgg

SEQ ID NO: 464719 - DNA, 120 bp, Artificial Sequence
  ENSG00000158092_7 (sequence is synthesized)
tatggttggtctagtaccaaaaaactatgttaccgttatgcagaataatccattaacttcaggtttggaaccatcacctccacagtgtgattacattaggccttcactcactggaaagtt

SEQ ID NO: 464720 - DNA, 120 bp, Artificial Sequence
  ENSG00000158092_8 (sequence is synthesized)
attatggcaaagtcaccaggcatcaagcagaaatggcattaaatgaaagaggacatgaaggggatttcctcattcgtgatagtgaatcttcgccaaatgatttctcagtatcactaaaag

SEQ ID NO: 464721 - DNA, 120 bp, Artificial Sequence
  ENSG00000158092_9 (sequence is synthesized)
cacaagggaaaaacaagcattttaaagtccaactaaaagagactgtctactgcattgggcagcgtaaattcagcaccatggaagaacttgtagaacattacaaaaaggcaccaattttta

SEQ ID NO: 464722 - DNA, 120 bp, Artificial Sequence
  ENSG00000158092_10 (sequence is synthesized)
caagtgaacaaggagaaaaattatatcttgtcaagcatttatcatgatactgctgaccagaagtgactgctgtgtagctgtaatttgtcatgtaattgaagactgagaaaatgttgggtc

SEQ ID NO: 464723 - DNA, 120 bp, Artificial Sequence
  ENSG00000158092_11 (sequence is synthesized)
cagtcgtgcttgattggaaattgttgtttctaaatctatatgagaattgacaataagtatttttattataactcagcccatacatatatactatgtatgcagtgcatctgcatagaacag

SEQ ID NO: 464724 - DNA, 120 bp, Artificial Sequence
  ENSG00000158092_12 (sequence is synthesized)
ttccttatccttggccttctgttttattgtttttttctttgctgttttccctttgcttctaatattacagttttgtattttgtaaacaaaaatcaaataatgcatatcagaatctttata

SEQ ID NO: 464725 - DNA, 120 bp, Artificial Sequence
  ENSG00000158092_13 (sequence is synthesized)
tggaagaaatcctttattgcctttcctttgtttccttgtaaaggcaccctgttctgttatggtttttcattatataaaattattatatctatatatgacatatgctaaaatttcttggag

SEQ ID NO: 464726 - DNA, 120 bp, Artificial Sequence
  ENSG00000158092_14 (sequence is synthesized)
agtgttaatcttttctgtgactaaatagcaataataagtggaaaattagaaattatttccaggtattatatttgtcacaggccattgtaaataccaagtatattgtgtctgccataattt

SEQ ID NO: 464727 - DNA, 120 bp, Artificial Sequence
  ENSG00000158092_15 (sequence is synthesized)
ttaaaaatacattcattgtcttcagtcatacagcaagacacatgagacatagattagaaaacatgttgtacaattttaatttacaactgttggaaataaaaatcacttaatttttttcca

SEQ ID NO: 464728 - DNA, 120 bp, Artificial Sequence
  ENSG00000158092_16 (sequence is synthesized)
accgcgcgtgccccgcctctctcccaagagctacgcggcggcggcggagcgcaggcctcgtgccgttacggccatcacggcggccgcagtggcgtcctggagccctcctcaggtgagctg

SEQ ID NO: 464729 - DNA, 120 bp, Artificial Sequence
  ENSG00000158092_17 (sequence is synthesized)
aaatagatgctctagtgttatttatttttttaatcccacttgtattattttacctctagagcatcttgtattaggacatgttatatttatgccagtgggaaataagttatggccaagttt

SEQ ID NO: 464730 - DNA, 120 bp, Artificial Sequence
  ENSG00000158092_18 (sequence is synthesized)
gaagcagtgagatacttgtttttttctcctcactaaatatcagtaattgtcaggaatggtattacctattttcatttcctcttttcagctttaagttttgttgattgggacactaaaact

SEQ ID NO: 464731 - DNA, 120 bp, Artificial Sequence
  ENSG00000158092_19 (sequence is synthesized)
gatgtatacctgaggaaaaaatagaatgtgctcatggttagggaaaattatattatttttaattttttaatttgttttttaaccaagtaggaatttgggtgtatggataagaggccaatc

SEQ ID NO: 464732 - DNA, 120 bp, Artificial Sequence
  ENSG00000158092_20 (sequence is synthesized)
tgcttctgtaggctatagaagaaaaccagttgtattttatggtcataatttgtccccctattattctggagatttaaatttaagtaaagtagccatcagtattttaattgaaaaatacta

SEQ ID NO: 464733 - DNA, 120 bp, Artificial Sequence
  ENSG00000158092_21 (sequence is synthesized)
aagccacataactgagtaggatgtcgtatgatactttcaacaaattccctaatgctgcctaagcatatggatgttttaattctttgctgttataaatagatatctaatacgccagaatta

SEQ ID NO: 464734 - DNA, 120 bp, Artificial Sequence
  ENSG00000158092_22 (sequence is synthesized)
ctgatggtaaaattgaagttgtgtaacttgtgaattttttttatcaatgttttaaatattatttaaatcttaaaatcatttaaagacttatgttgccactgggtggcagccatggcttct

SEQ ID NO: 464735 - DNA, 120 bp, Artificial Sequence
  ENSG00000158092_23 (sequence is synthesized)
cccactaagcaacagaagtgaccaaatataattaagacaaattttcatctctattacatctgcttttaaaacattttagttcatattctattatttttctaactcagtactcctttgttg

SEQ ID NO: 464736 - DNA, 120 bp, Artificial Sequence
  ENSG00000158092_24 (sequence is synthesized)
agggtaattattagtagttaagtttttaatggaaataaaaatcatgtatgcttatctttgctgtaaaatcaaatgaatataaattgaggaaaactttaaattgttgtaggatgactagta

SEQ ID NO: 464737 - DNA, 120 bp, Artificial Sequence
  ENSG00000158092_25 (sequence is synthesized)
gtaaacatcatcttaatttttaacatatatttgatgatgctttccttttctctgtatgtttctgggttttcccccagtcttccttatgaaaaaaatgtatgtttgtaaaaagagaacaat

SEQ ID NO: 464738 - DNA, 120 bp, Artificial Sequence
  ENSG00000158092_26 (sequence is synthesized)
taatgctttgcatcacagacataaactattcatagtaaactgcactgagctgatattaatagagcagacttttgagaaagtaggagtgtagtagcactggaaacagaatgcaaatttctg

SEQ ID NO: 464739 - DNA, 120 bp, Artificial Sequence
  ENSG00000158092_27 (sequence is synthesized)
ttccataattaggtttattgtagctatagcgctcccagataacccatgtgtgctagtaatatctattgtgtgctcttactatggtataaaaacctcgctggaagctacttattttgtact

SEQ ID NO: 464740 - DNA, 120 bp, Artificial Sequence
  ENSG00000158092_28 (sequence is synthesized)
taaatattttaccaatttttaaaaagtcttaatccaatgcttataccagtgactgtttttataatacttgaagtaactttaagaactgaaacaaccctggaaaactctacatagctagat

SEQ ID NO: 464741 - DNA, 120 bp, Artificial Sequence
  ENSG00000158092_29 (sequence is synthesized)
agtaacaatacttgtataagaaaccaagtttccttattcccagcctggtgtctgtatcgtgacacactactctgtgtatgcttggttttagactaggaggagagtcctgggaagggcaat

SEQ ID NO: 464742 - DNA, 120 bp, Artificial Sequence
  ENSG00000158092_30 (sequence is synthesized)
attacagaagttttcttccacatgaggagaatgcttagtttcaaatttaaatacatgtgtcagatggaaccctgcctaactcacttctacaaataacttccccaaaatcttagaaggttt

SEQ ID NO: 464743 - DNA, 120 bp, Artificial Sequence
  ENSG00000158092_31 (sequence is synthesized)
tttagaacatgatataagctttgtgacaaaaacaaatgccattgtgtcccttatttagtcataaaaccttaggattcagctgaatatatattcacacatgtatattacacatatatcact

SEQ ID NO: 464744 - DNA, 120 bp, Artificial Sequence
  ENSG00000158092_32 (sequence is synthesized)
atacagttaacacatgcaccttgcactattagtgacaaataatactgctaaacaaaataggcttcatgcaatctattgccattgctagaagaataaataggcctagcagatgggcaactt

SEQ ID NO: 464745 - DNA, 120 bp, Artificial Sequence
  ENSG00000158092_33 (sequence is synthesized)
gggttgttagaataaggtcattcttgcagaatatggcacttaaattatctccagctgtaatgtcctaccatataatccagaggttgcatagaagcagagttgtcacagtctctgtagcac

SEQ ID NO: 464746 - DNA, 120 bp, Artificial Sequence
  ENSG00000158092_34 (sequence is synthesized)
gtttgtgagaattctctaggcaggcccagcccttctctagaagtttgaatttcactcccaccttgttgctggggtaccttcttcagggtacatctaaacacagtggccttatacagaaat

SEQ ID NO: 464747 - DNA, 120 bp, Artificial Sequence
  ENSG00000158092_35 (sequence is synthesized)
gttgttcaacccacacagtgctttaaaaaattaattgccaacatttaaaaatcagggagtttcacataaaattcagacttcttgtttccctttaaaaatgagaagctaataacatgagtt

SEQ ID NO: 464748 - DNA, 120 bp, Artificial Sequence
  ENSG00000158092_36 (sequence is synthesized)
gaattcccacaagtcaacaatgagctggaatctaatatggatggtcctcttatctttaccagtgcacatggtgaaaaaattcaaacagtataataaagtcttctttcaagtcaaaatata

SEQ ID NO: 464749 - DNA, 120 bp, Artificial Sequence
  ENSG00000158092_37 (sequence is synthesized)
gtttcagtgttgcagaacagacgaggaagctcactgagaattatcctgagctgtgttaacaaactgacagaacacagaatttttactcaaaatggattggttaaacgtctttaaagattt

SEQ ID NO: 464750 - DNA, 120 bp, Artificial Sequence
  ENSG00000158092_38 (sequence is synthesized)
gatgaattatcattgataaaggggacaaaggtttggaaccatcacctccacagtgtgattacattaggccttcactcactggaaagtttgctggcaatccttggtattatggcaaagtca

SEQ ID NO: 464751 - DNA, 120 bp, Artificial Sequence
  ENSG00000158092_39 (sequence is synthesized)
ggtcaacccagaagaccagtgaaggtcataagtgttaacatgcagtttctgtaaatctaggcccatgctccaagtcaaggcagagtgataccaatgagtagaactaactctcaccttcta

SEQ ID NO: 464752 - DNA, 120 bp, Artificial Sequence
  ENSG00000158092_40 (sequence is synthesized)
gcaggggctttttgaaccatgaatcactgttggagtttagacttataggcagaattgcctctttggcaccaaggcaacttatgtacatggcacataatgaattttaacatctaatgacct

SEQ ID NO: 464753 - DNA, 120 bp, Artificial Sequence
  ENSG00000158092_41 (sequence is synthesized)
tatgttttgaacttcacttaaaaccctccattttgtttttctatttgataagagaactgtggatcattactgtacattagcacctacagagctcttttctattttgtttctctttttccc

SEQ ID NO: 464754 - DNA, 120 bp, Artificial Sequence
  ENSG00000158092_42 (sequence is synthesized)
tattttttaaaagaaaagcaactttgttttaaatgaaacctgcaacttagttctttgtacataattctggcagcagtgtgcataattgacttgaaaaggcaagggctaggtaagtttgag

SEQ ID NO: 464755 - DNA, 120 bp, Artificial Sequence
  ENSG00000158092_43 (sequence is synthesized)
aagagctacgcggcggcggcggagcgcaggcctcgtgccgttacggccatcacggcggccgcagtggcgtcctggagccctcctcagagatagggtctcactgtgttgttcagactggtt

SEQ ID NO: 464756 - DNA, 120 bp, Artificial Sequence
  ENSG00000158092_44 (sequence is synthesized)
ctcgtgccgttacggccatcacggcggccgcagtggcgtcctggagccctcctcaggtgagctggagctgcccggctcggcagcgggaagagacagtctcactgtgttgcccaggctggt

SEQ ID NO: 464757 - DNA, 120 bp, Artificial Sequence
  ENSG00000158092_45 (sequence is synthesized)
tttgaactcctgcgctcaagtgatcttcccatctctgcctcccaaagagctaggattacaggagtgagccactgcacccagcagcttgatgtttctaaggttcatccatgttatagcaca

SEQ ID NO: 464758 - DNA, 120 bp, Artificial Sequence
  ENSG00000158092_46 (sequence is synthesized)
gatactgcttaggatattagaatttgatgacactcattttccttaaaaatggcctttctttttccttgatgaaagatatcactacttttccatttattaaatcatggttaatcttggctt

SEQ ID NO: 464759 - DNA, 120 bp, Artificial Sequence
  ENSG00000158092_47 (sequence is synthesized)
gcggcggcggcggagcgcaggcctcgtgccgttacggccatcacggcggccgcagtggcgtcctggagccctcctcaggtgagctggagctgcccggctcggcagcgggaagagataggg

SEQ ID NO: 464760 - DNA, 120 bp, Artificial Sequence
  ENSG00000158104_0 (sequence is synthesized)
ctctagtcccagtaggaggtttgactaagatcaatcatgacgacttacagtgacaaaggggcaaagcctgagagaggccgattcctccacttccactctgtgaccttctgggttggcaac

SEQ ID NO: 464761 - DNA, 120 bp, Artificial Sequence
  ENSG00000158104_1 (sequence is synthesized)
gccaagcaggccacgtcattctactgcagcaagatgggctttgaacctctagcctacaggggcctggagaccggttcccgggaggtggtcagccatgtaatcaaacaagggaagattgtg

SEQ ID NO: 464762 - DNA, 120 bp, Artificial Sequence
  ENSG00000158104_2 (sequence is synthesized)
tttgtcctctcctcagcgctcaacccctggaacaaagagatgggcgatcacctggtgaaacacggtgacggagtgaaggacattgcgttcgaggtggaagattgtgactacatcgtgcag

SEQ ID NO: 464763 - DNA, 120 bp, Artificial Sequence
  ENSG00000158104_3 (sequence is synthesized)
aaagcacgggaacggggcgccaaaatcatgcgggagccctgggtagagcaagacaagtttgggaaggtgaagtttgctgtgctgcagacgtatggggacaccacacacaccctggtggag

SEQ ID NO: 464764 - DNA, 120 bp, Artificial Sequence
  ENSG00000158104_4 (sequence is synthesized)
aagatgaactacatcggccaattcttgcctggatatgaggccccagcgttcatggaccccctacttcctaaactgcccaaatgcagtctggagatgatcgaccacattgtgggaaaccag

SEQ ID NO: 464765 - DNA, 120 bp, Artificial Sequence
  ENSG00000158104_5 (sequence is synthesized)
agctctctgcgatccattgtggtggccaactatgaagagtccatcaagatgcccatcaatgagccagcgcctggcaagaagaagtcccagatccaggaatatgtggactataacgggggc

SEQ ID NO: 464766 - DNA, 120 bp, Artificial Sequence
  ENSG00000158104_6 (sequence is synthesized)
gctggggtccagcacatcgctctcaagaccgaagacatcatcacagcgattcgccacttgagagagagaggcctggagttcttatctgttccctccacgtactacaaacaactgcgggag

SEQ ID NO: 464767 - DNA, 120 bp, Artificial Sequence
  ENSG00000158104_7 (sequence is synthesized)
aagctgaagacggccaagatcaaggtgaaggagaacattgatgccctggaggagctgaaaatcctggtggactacgacgagaaaggctacctcctgcagatcttcaccaaaccggtgcag

SEQ ID NO: 464768 - DNA, 120 bp, Artificial Sequence
  ENSG00000158104_8 (sequence is synthesized)
gaccggcccacgctcttcctggaagtcatccagcgccacaaccaccagggttttggagccggcaacttcaactcactgttcaaggctttcgaggaggagcagaacctgcggggtaacctc

SEQ ID NO: 464769 - DNA, 120 bp, Artificial Sequence
  ENSG00000158104_9 (sequence is synthesized)
accaacatggagaccaatggggtggtgcccggcatgtaagccccgcccaccccacggaggccacagccacacagccacgccccctgattctggaactcgcccaacttccctactggctgc

SEQ ID NO: 464770 - DNA, 120 bp, Artificial Sequence
  ENSG00000158104_10 (sequence is synthesized)
tccccttgggtcccgcccaccagcggactcggcccccaaggctccgcccacactgaccacgcccctcggcggggccgccctctgctccagccctcccgattaaagcgtgccccggtccaa

SEQ ID NO: 464771 - DNA, 120 bp, Artificial Sequence
  ENSG00000158104_11 (sequence is synthesized)
tgagcagcatagaagaaataatgccttttgagggacagttgcatttaacagacagccttactaaggcaagagttctggagccgccactgcactccagccggccttggcttctgagctttg

SEQ ID NO: 464772 - DNA, 120 bp, Artificial Sequence
  ENSG00000158104_12 (sequence is synthesized)
gattctgggcagtaatggtcacattcccagcgtcctggaaaagcttgcccttggcttctggccctgactctgcctcccactgactagtggacgtcactgcccctctctgggcctggcaac

SEQ ID NO: 464773 - DNA, 120 bp, Artificial Sequence
  ENSG00000158104_13 (sequence is synthesized)
accatcctgttcaatgaggctgcggctggatcagaggtccccaggcctggaaccttccagggctgggctcagctccccaccccatcccccagacgacttacagtgacaaaggggcaaagc

SEQ ID NO: 464774 - DNA, 120 bp, Artificial Sequence
  ENSG00000158104_14 (sequence is synthesized)
agcaggtagaagccggggcaaggtgctggagtgagcagacggcagggcagagggctgcctgacaagggcaggcctccagcagggtctgtgattggcccttgggagggaggatcaggccag

SEQ ID NO: 464775 - DNA, 120 bp, Artificial Sequence
  ENSG00000158104_15 (sequence is synthesized)
aatgtgcaggcagcagtctatcttcccaggagggtctctgcccctgaggcaatagggcaggcaggctgaggggggccaggggctctcttgcggaagtcccccatgctggccccttgaccc

SEQ ID NO: 464776 - DNA, 120 bp, Artificial Sequence
  ENSG00000158104_16 (sequence is synthesized)
gggaaggtgaagtttgctgtgctgcagacgaaaggagaagtgacttacccaagatcacgcatctggttagggtcagatgcaggttggaacccggggctacgttagcgctatgaaatgtgc

SEQ ID NO: 464777 - DNA, 80 bp, Artificial Sequence
  ENSG00000158106_0 (sequence is synthesized)
actcaggagcccgcggcccaggtggtgcgggcggccctagcccggctgcggagcgctgcgcgagcggcgggctggctgac

SEQ ID NO: 464778 - DNA, 120 bp, Artificial Sequence
  ENSG00000158106_1 (sequence is synthesized)
ggaggagaggccggacggcgcgggcgccggcgaggagagcccgcggctgcagggctgtgactccctgacgcagatccagtgcggccagctgcagagccgcagggcccagattcaccagca

SEQ ID NO: 464779 - DNA, 120 bp, Artificial Sequence
  ENSG00000158106_2 (sequence is synthesized)
gattgacaaggagctgcagatgcggacgggcgctgagaacctctacagagccaccagcaacaaccgggtgagagagacggtcgccctggagctgagctacgtcaactccaacctgcagct

SEQ ID NO: 464780 - DNA, 120 bp, Artificial Sequence
  ENSG00000158106_3 (sequence is synthesized)
gctgaaggaggagctggaggagctcagcggtggcgtggaccctggccggcatgggagcgaagctgtcactgtccccatgatccccctgggcctgaaggagaccaaggagctggactggtc

SEQ ID NO: 464781 - DNA, 120 bp, Artificial Sequence
  ENSG00000158106_4 (sequence is synthesized)
tacaccgctgaaggagctgatctcagtgcactttggagaggacggcgcctcctacgaggcagaaatcagggagctggaggccctgcggcaggccatgcggacccccagccggaatgagtc

SEQ ID NO: 464782 - DNA, 120 bp, Artificial Sequence
  ENSG00000158106_5 (sequence is synthesized)
gggcctggagctgctcacagcctattacaaccagctgtgcttcctggatgcgcgcttcctcacccctgccaggagcctcgggctcttcttccactggtacgactcgcttactggggtccc

SEQ ID NO: 464783 - DNA, 120 bp, Artificial Sequence
  ENSG00000158106_6 (sequence is synthesized)
ggcccagcagcgtgccctggccttcgagaagggcagcgttctcttcaacatcggtgccctccacacgcagattggggcgcgccaggaccgctcctgcaccgagggtgcccgccgcgctat

SEQ ID NO: 464784 - DNA, 120 bp, Artificial Sequence
  ENSG00000158106_7 (sequence is synthesized)
ggaggccttccagagggccgctggggccttcagcctcctgagggagaacttctcccatgcgccgagcccagacatgagcgctgcgtccctctgcgcactggagcagctcatgatggccca

SEQ ID NO: 464785 - DNA, 120 bp, Artificial Sequence
  ENSG00000158106_8 (sequence is synthesized)
ggcccaggaatgtgtgtttgagggcctctcaccacctgcctccatggccccccaagactgcctggcccagctgcgcctggcgcaggaggccgcccaggtggcagccgagtacaggctagt

SEQ ID NO: 464786 - DNA, 120 bp, Artificial Sequence
  ENSG00000158106_9 (sequence is synthesized)
gcaccggaccatggcccagccacccgtccacgactacgtgcctgtctcctggactgccctggtgcatgtcaaggccgagtacttccgctccctggcccactaccacgtagccatggccct

SEQ ID NO: 464787 - DNA, 120 bp, Artificial Sequence
  ENSG00000158106_10 (sequence is synthesized)
ctgcgacggctccccagcgaccgagggagagctccccacgcacgagcaggtcttcctgcagccccccacctcctctaagccccgaggccctgtgctgccgcaggagctggaggagcgcag

SEQ ID NO: 464788 - DNA, 120 bp, Artificial Sequence
  ENSG00000158106_11 (sequence is synthesized)
gcagcttggcaaggcacacctgaagcgtgccatcctggggcaggaggaggcgctgcggctgcacgccctgtgccgcgtcctgcgcgaggtggacctgcttcgggctgtgatctcccagac

SEQ ID NO: 464789 - DNA, 120 bp, Artificial Sequence
  ENSG00000158106_12 (sequence is synthesized)
gctgcagcgctcactggccaagtatgcggagctcgaccgtgaggatgacttctgtgaggctgccgaggccccggacatccagcctaagacccaccagaagccagaggccaggatgccacg

SEQ ID NO: 464790 - DNA, 120 bp, Artificial Sequence
  ENSG00000158106_13 (sequence is synthesized)
cctgtcccaggggaaggggcctgacatcttccatcggctggggcccctgtctgtgttctcagccaagaaccggtggcggctggtggggcccgtccacctgacccgaggagagggcggctt

SEQ ID NO: 464791 - DNA, 120 bp, Artificial Sequence
  ENSG00000158106_14 (sequence is synthesized)
tggcctcacgcttcggggagactcgcctgtcctcatcgctgccgtcattccagggagccaggccgcggcggctggcctgaaggagggcgactacattgtgtcagtgaatgggcagccatg

SEQ ID NO: 464792 - DNA, 120 bp, Artificial Sequence
  ENSG00000158106_15 (sequence is synthesized)
gactgcccagcttgggggaccgccggcccgtcctgctgggccccagggggcttctaaggagccagagggagcatggttgcaagaccccggcatccacgtgggccagtccccggcccctcc

SEQ ID NO: 464793 - DNA, 120 bp, Artificial Sequence
  ENSG00000158106_16 (sequence is synthesized)
tcaactggagccgaaaggcccagcagggcaagactggaggctgcccccagccctgtgccccagtgaagccagctccgccctcatccttgaagcacccagggtggccgtgagggccaggat

SEQ ID NO: 464794 - DNA, 120 bp, Artificial Sequence
  ENSG00000158106_17 (sequence is synthesized)
ccctgcacgcctcagccctggctccagctggcagcaagcaccgagcatgccctccccacccagaggacctccgggcaatgcctgtcccgcctcatgctggaggctgcctcgggcacctgc

SEQ ID NO: 464795 - DNA, 120 bp, Artificial Sequence
  ENSG00000158106_18 (sequence is synthesized)
ctgcccattaaagactggtcagacctgtctgagcccagtgatgggagctgtggcctcttcacccacacacagaaggatgccagtccctctgtcggtctgaggtcagcttcctggggctgc

SEQ ID NO: 464796 - DNA, 120 bp, Artificial Sequence
  ENSG00000158106_19 (sequence is synthesized)
cccaccctgagggctccttacagggtgctcctcacagccatcccatctgtacccccgggctctgtccaccctgctgctgccctgggcacagaccctgaggtctcagtcctgcctccagcc

SEQ ID NO: 464797 - DNA, 120 bp, Artificial Sequence
  ENSG00000158106_20 (sequence is synthesized)
aagtttctgcctggtgcccagtgattcctgctgggcaccccttcgctcactgcccctccaccatgcagcagccagacacacccacagcacccgcagacctctaggccgggtcccagacat

SEQ ID NO: 464798 - DNA, 120 bp, Artificial Sequence
  ENSG00000158106_21 (sequence is synthesized)
ggccttcccccaaaatacttcctgctgtcctgtctgtgcacagagcaagggactccccacctctgcgccctgtgctggtcatcatgggctctgtgctggtcaacccagcaagtgtcccgt

SEQ ID NO: 464799 - DNA, 120 bp, Artificial Sequence
  ENSG00000158106_22 (sequence is synthesized)
ttgcccaggagtccctggtgtcgtggcccaggtctcatggtggccctaagcctgccagccctgctgcccgccttgctgtcctgctctgagcatgggtgccaccctccagctcctgggcgt

SEQ ID NO: 464800 - DNA, 120 bp, Artificial Sequence
  ENSG00000158106_23 (sequence is synthesized)
gtcacttctctctgagcctggggcctgcatgggcccccagccctccccagcctgcttgggccgctcctgctggcctccacaggccgtgagctgtcagtgtctcaagcaggggaagtgagg

SEQ ID NO: 464801 - DNA, 120 bp, Artificial Sequence
  ENSG00000158106_24 (sequence is synthesized)
gctgcctccaggcctccgtgtactgggtggacaatggcccccaaaggccgtcggcaagaacaccacctccaggacccctacagcagtgggctcaggacttgggcaccaagaggagagggt

SEQ ID NO: 464802 - DNA, 120 bp, Artificial Sequence
  ENSG00000158106_25 (sequence is synthesized)
gggaagggctgcagagtcagggctgcacccaagaggagccacggagccggagccggagcggaggcccccaccgagggccccagggcctggcaggttccggaagagacagggccagcggga

SEQ ID NO: 464803 - DNA, 120 bp, Artificial Sequence
  ENSG00000158106_26 (sequence is synthesized)
gtcattccctgcagccactagggggcagccgccacccgctcagcagccctgggaggcggcacgggcaggtgcgccttgggagggctgaggcaaagaccccgggtagaaaggcggccccca

SEQ ID NO: 464804 - DNA, 120 bp, Artificial Sequence
  ENSG00000158106_27 (sequence is synthesized)
gctctgcgagacccctgccctcttgtccagtcccttccgagggtccgcaggtgagagcagcctgccctgcatcccaggctctggttccagggtccagggccctgcgctgccacctccctc

SEQ ID NO: 464805 - DNA, 120 bp, Artificial Sequence
  ENSG00000158106_28 (sequence is synthesized)
gtgcttcagccaagaaaatgggggtgcaagtagggtgtttggggtcccagagacgcaggcgccgcggcgcgatcttcctgggcaggagggcagggctccccaacctgcctgagccggggt

SEQ ID NO: 464806 - DNA, 120 bp, Artificial Sequence
  ENSG00000158106_29 (sequence is synthesized)
gggggtccaggtcccccacttgcccttgtgggaaaatccctgtctcagcagaatgggccaaggtcacgcaggtctccccagcacgtgttaatttggttaataaaactgtggatcaaggag

SEQ ID NO: 464807 - DNA, 120 bp, Artificial Sequence
  ENSG00000158106_30 (sequence is synthesized)
ggtcttcctgcagccccccacctcctctaagccccgaggccctgtgctgccgcaggagctggaggagcgcaggcagcttggtaaggcgcccatgggtggagtgccctggggctcagatgg

SEQ ID NO: 464808 - DNA, 120 bp, Artificial Sequence
  ENSG00000158106_31 (sequence is synthesized)
tcaccaacggtggcagggtgtcccccaccaccctcatgctgtttgccacctgctgtccccgtgctgacgagttgggccacctacctatccctggatggcctgtgcctgatgggtgacggc

SEQ ID NO: 464809 - DNA, 120 bp, Artificial Sequence
  ENSG00000158106_32 (sequence is synthesized)
ccagcgcaggggccccaggagtgctgggcagcctctgagcaggtgggagaccactgggagcagctcatccctggcccctgctttgcacgtggcagagccctcctgcacagccagctcctc

SEQ ID NO: 464810 - DNA, 120 bp, Artificial Sequence
  ENSG00000158106_33 (sequence is synthesized)
acccccgtggcgcgcacccccaacgaaagtggctgtgatgagccccacagccctggcgttgcccactccttctgccacgtcccagggcccacgggcccacatggtgtgtgacatcccagt

SEQ ID NO: 464811 - DNA, 120 bp, Artificial Sequence
  ENSG00000158109_0 (sequence is synthesized)
ggctgcggcgacggcggtcgcgtcggcgtcagggtcggggtcggtaaggggtgcggcaatgctgcaactgcgggactcggtggactcggccggtacgagccccacggcggtgctggcggc

SEQ ID NO: 464812 - DNA, 120 bp, Artificial Sequence
  ENSG00000158109_1 (sequence is synthesized)
gcaggcggcggcccgggcggggggcggccgggggcggggacgccgctgcgccagacactctggcctctcagcatccacgaccccacgcgccgcgcccgcgtcaaggagtacttcgtgttc

SEQ ID NO: 464813 - DNA, 120 bp, Artificial Sequence
  ENSG00000158109_2 (sequence is synthesized)
ggagtacttcgtgttccggcccggcagcatcgagcaggcagtggaggagatccgcgtggtggtgcggcccgtggaggacggcgagatccagggagtgtggctgcttaccgaggtggatca

SEQ ID NO: 464814 - DNA, 120 bp, Artificial Sequence
  ENSG00000158109_3 (sequence is synthesized)
ctggaacaatgagaaggagcggctggtgctggtcacggagcagtccctgcttatctgtaaatacgacttcatcagtctccagtgccagcaggtggtgcggatagcgctcaacgcagtaga

SEQ ID NO: 464815 - DNA, 120 bp, Artificial Sequence
  ENSG00000158109_4 (sequence is synthesized)
caccatttcctacggagaattccagtttccccctaaatcgctcaacaagcgagaaggttttgggattcgaattcagtgggacaagcaaagtcgtccttccttcataaacagatggaatcc

SEQ ID NO: 464816 - DNA, 120 bp, Artificial Sequence
  ENSG00000158109_5 (sequence is synthesized)
ctggtctaccaacgtgccctatgccactttcacagaacacccgatggctggcgcagatgagaagacagcatctctgtgtcagttggaaagcttcaaggctctgttaatccaagctgtcaa

SEQ ID NO: 464817 - DNA, 120 bp, Artificial Sequence
  ENSG00000158109_6 (sequence is synthesized)
aaaagcccaaaaagaaagccctttgccaggacaggcgaatggcgtgctgatcctggagcgccccctgctcatcgagacctacgtgggactcatgtccttcattaacaacgaggcgaaact

SEQ ID NO: 464818 - DNA, 120 bp, Artificial Sequence
  ENSG00000158109_7 (sequence is synthesized)
gggctactccatgaccaggggcaaaataggcttttagccgctgcgttctgggagctcctcccccttctgggagctcctccccctccccagaaggccaagggatgtgggggctgggggact

SEQ ID NO: 464819 - DNA, 120 bp, Artificial Sequence
  ENSG00000158109_8 (sequence is synthesized)
gggaggcctggcagtcttcatgctgccctgctgctgctggaaggatggggatctttcacctttagggatctcagcacaattagaatcgtaaagtgaattctatctatttaattggatatt

SEQ ID NO: 464820 - DNA, 120 bp, Artificial Sequence
  ENSG00000158109_9 (sequence is synthesized)
ggactctgctcatataagctacagacaaaagccaaaagactctcgctgtccctgtgctgctggtatttcattctctgtaacttcagttctggtgttttccttgagtatctacttggcttc

SEQ ID NO: 464821 - DNA, 120 bp, Artificial Sequence
  ENSG00000158109_10 (sequence is synthesized)
cgtggtttttcccaccccagctgccccagcacgcgggacccatagcacaccccttagcgcttgcctaggttgctgaaaacagggaggcacctggtatctcgagtgcctgcagttgcaagt

SEQ ID NO: 464822 - DNA, 120 bp, Artificial Sequence
  ENSG00000158109_11 (sequence is synthesized)
atgtttacacctggtgtccaattttgtattttaaaatgtaatccatttttacttcagctcatccaaaagcagccagcagaccggttgactgagaccggtctgtggctgtgggccccttgg

SEQ ID NO: 464823 - DNA, 120 bp, Artificial Sequence
  ENSG00000158109_12 (sequence is synthesized)
tgacccgctgctcttttggaaatgggtgacctgaagtgacactttttccacaattaacccaagttgtgttaatacttcaggtctgtttcccagacccagaaagctttacagaaaatcatt

SEQ ID NO: 464824 - DNA, 120 bp, Artificial Sequence
  ENSG00000158109_13 (sequence is synthesized)
gtaagacaatttattaatttgagaaagtcaccttgacagttctttgcacacaagttttacacctctctggattcgaagtttgtattgtattcatagttaaagggaatcgggtactttgct

SEQ ID NO: 464825 - DNA, 79 bp, Artificial Sequence
  ENSG00000158109_14 (sequence is synthesized)
tgtattgtattcatagttaaagggaatcgggtactttgcttgttgaataatgcactttaaaacaaggaaccgtatcagg

SEQ ID NO: 464826 - DNA, 120 bp, Artificial Sequence
  ENSG00000158109_15 (sequence is synthesized)
gcagcctgggcaacatggtgaaacccgtctctaccaaacagacaaaaagcagccaggcgtggtggcacatctgtggtcccagctacttgagaggctgagccaggaggatcgcttgagccc

SEQ ID NO: 464827 - DNA, 88 bp, Artificial Sequence
  ENSG00000158109_16 (sequence is synthesized)
tcatctaccagatccttatgacgcagctgatgcctgccttggttcctaccactctggtgtagacagaggactttgtccaagtctcaca

SEQ ID NO: 464828 - DNA, 120 bp, Artificial Sequence
  ENSG00000158109_17 (sequence is synthesized)
ccactctggtgtagacagaggactttgtccaagtctcacactaaacatgcccgggcttcgatgtgcctggaggatttccccacagggacccacgcacctccctgtatctgcgcagcttgc

SEQ ID NO: 464829 - DNA, 120 bp, Artificial Sequence
  ENSG00000158109_18 (sequence is synthesized)
tcgtgtggctggaagcgctgtcgataagcttcacgcactggcttgccagttcttcagctctaggacttgtagctttaagcaaacggtgtggcatgggttgagtgtggccacctgcaggat

SEQ ID NO: 464830 - DNA, 120 bp, Artificial Sequence
  ENSG00000158109_19 (sequence is synthesized)
gtgcagggctgcctcagaagctggctggggactctagcctctgtgttcataaagacattaagaagtggatggatgttgttccttttttgaagttgtcattaaagtaggtgcaacaaccaa

SEQ ID NO: 464831 - DNA, 120 bp, Artificial Sequence
  ENSG00000158113_0 (sequence is synthesized)
gccgggcaacgcggcccgggccatggaggcgtcgtacgagtccgagtccgagtccgagtctgaggccgggcctgggactcagcggcccgggaccgggaccgtgagcgcggccgtgcgcga

SEQ ID NO: 464832 - DNA, 120 bp, Artificial Sequence
  ENSG00000158113_1 (sequence is synthesized)
gcacttgcggaagctgtgtctgcgcgagttcccgtgcggtgccggcagctggaataagtcgcgctttcttcctcaaacttggcgaacttggagggagcttgtccccagagaggaggatgt

SEQ ID NO: 464833 - DNA, 120 bp, Artificial Sequence
  ENSG00000158113_2 (sequence is synthesized)
ggtgagccccggagaggagacggtggaggccctgctgggcctggtccgcagccgccactccccctgggctctgctgaacaactcgaatgcagaagacagtttcctgagagaattggccat

SEQ ID NO: 464834 - DNA, 120 bp, Artificial Sequence
  ENSG00000158113_3 (sequence is synthesized)
ccggaacccgctgacgatcacagacaccttcttctactcctacttccggtccctgcgggtaatagacaagaaggtcaccctggtggataaagacctcctgaaatttctaaagctggagga

SEQ ID NO: 464835 - DNA, 120 bp, Artificial Sequence
  ENSG00000158113_4 (sequence is synthesized)
gttggtactgagcgccaatcgaatcaaggaggtggatgccaccaatctgccccccacactcaaggtgctggagctctacggcaatgagatcagcagcatggagtgtctgtgtgcccaccc

SEQ ID NO: 464836 - DNA, 120 bp, Artificial Sequence
  ENSG00000158113_5 (sequence is synthesized)
acccgccggcctgcagcacttggggttaggccacaacaaacttctaggccccttggaaagtctctacgtcaccgctaatcactggcccaacctcgtctccctggacctgggcttcaacga

SEQ ID NO: 464837 - DNA, 120 bp, Artificial Sequence
  ENSG00000158113_6 (sequence is synthesized)
cctgacagacctgcagagcatggtcaccagcctgaggaccctccggcacctgcgactcctggtgctgcagggaaacccactggccttggtgccctactaccgcggcctcaccatcgacag

SEQ ID NO: 464838 - DNA, 120 bp, Artificial Sequence
  ENSG00000158113_7 (sequence is synthesized)
cctggcccagctctgcgtgctggacgacatcaccgtgtctcccaatgagaagcatctcttccgggggctcagcctcaatggcgatctcttggcacaggaggcgcagtttgtggtgaccat

SEQ ID NO: 464839 - DNA, 120 bp, Artificial Sequence
  ENSG00000158113_8 (sequence is synthesized)
gaaagatgaagaaggcgaaatgaatgagtccgcgggcgtcctggccgagatcgtcaagccctctcccagcttagaattattagttgaggaatctcctgaagaggtcgtggaagacgtcat

SEQ ID NO: 464840 - DNA, 120 bp, Artificial Sequence
  ENSG00000158113_9 (sequence is synthesized)
cgaagacattgttgaagaggttactgaagaggtcgaagggtctctggagtctgaggtggaggagtcaggagagtcggagctgtctgtcatctcggggccttcgaccatcttgcagatgcc

SEQ ID NO: 464841 - DNA, 120 bp, Artificial Sequence
  ENSG00000158113_10 (sequence is synthesized)
gagggcctctgcagaagagctggccaagttgaggctgcgtatagatccccggctctgcccgtccccagggactgtcctcttcagcactgcccacaagccctgggctgaggtcatcccctg

SEQ ID NO: 464842 - DNA, 120 bp, Artificial Sequence
  ENSG00000158113_11 (sequence is synthesized)
cagttacgagatgcagcactctctcagggacctggtcccactgaaggccttcctgctggcggggaccaccgtgaccatcgtggaggagaagattctctcctggcctgtggtgctacctgc

SEQ ID NO: 464843 - DNA, 120 bp, Artificial Sequence
  ENSG00000158113_12 (sequence is synthesized)
tgttgacagtcccctgtctgccaagaaaggaaagggggagaaagacaagaaagggaaggagaaagacaggacggggaaaggagagaaagagccggccaaggagtggaaggtgctgaagaa

SEQ ID NO: 464844 - DNA, 120 bp, Artificial Sequence
  ENSG00000158113_13 (sequence is synthesized)
gaagaaagagccgcccaaggagctccggcaggacccccccatcctccaggtgctgggccggggcctggtgatcctggagcccctgctcgccggggagcccctggtgtccaccgtgtgcaa

SEQ ID NO: 464845 - DNA, 120 bp, Artificial Sequence
  ENSG00000158113_14 (sequence is synthesized)
cttcggcgtggtccgcacattgacatctgacaggctgacgttggccagggattcaaagaagattaagaaagttgccaaaaaagaaaagccgaaagccgtgattccgatctacgaaggcga

SEQ ID NO: 464846 - DNA, 120 bp, Artificial Sequence
  ENSG00000158113_15 (sequence is synthesized)
ttaccaccctgagcccctgaccgtagaggtgcagatccagctgaaccagtgccgctcggcggaggaggctctgcgcatgttcgccgtgtagggcgtgggcagtaaaggctgttcccagca

SEQ ID NO: 464847 - DNA, 120 bp, Artificial Sequence
  ENSG00000158113_16 (sequence is synthesized)
cagtgagctgagatcgcgccatttcacgccagcctgaagaagtaaacgttggagggcatatgctgctggacttcaaaacccatgcctatatgaacatgtgatttgtgatacttatctgtg

SEQ ID NO: 464848 - DNA, 120 bp, Artificial Sequence
  ENSG00000158113_17 (sequence is synthesized)
ggttaagatggccttaaaaaggtttttttttttttaatctctttaatgtttggcttaattgaagacagctggattcttacagctacttctgcagtcaactgcttgcaatatgttgctgta

SEQ ID NO: 464849 - DNA, 120 bp, Artificial Sequence
  ENSG00000158113_18 (sequence is synthesized)
attgacgtgcacaaagaaaatccaacctcaggcccataattggaaaagagggagtattttaatagaccttaaaataatataatttctttaatattacaccaaatttgacaagtggtaatt

SEQ ID NO: 464850 - DNA, 120 bp, Artificial Sequence
  ENSG00000158113_19 (sequence is synthesized)
gcagaagagaaaacgcaggtggttggggccaggctgtctgatccggatgggggacttttccctcggggcagaataagtcgcgctttcttcctcaaacttggcgaacttggagggagcttg

SEQ ID NO: 464851 - DNA, 120 bp, Artificial Sequence
  ENSG00000158113_20 (sequence is synthesized)
ccttggaaagtctctacgtcaccgctaatcactggtaactcgggagcccagatggaaagtgagagggagggattaagtatcaggttggggcgattctaccccagtggcttgagaactcag

SEQ ID NO: 464852 - DNA, 120 bp, Artificial Sequence
  ENSG00000158113_21 (sequence is synthesized)
atctgccccccacactcaaggagcccttttggcctcccagagacgcattcctatgggttgagaaggtgccagatgttatgcagctcccccactgccaatccagcatcaccccccattcca

SEQ ID NO: 464853 - DNA, 80 bp, Artificial Sequence
  ENSG00000158122_0 (sequence is synthesized)
gacagagcggacccaggccctcggccgccccgcgtcatggccgcgccggccccggtcacgcggcaggttagcggcgccgc

SEQ ID NO: 464854 - DNA, 120 bp, Artificial Sequence
  ENSG00000158122_1 (sequence is synthesized)
cccctggcggccgccgtggccgagctgccggtgctggacgcccgcgggcagcgggtaccgttcggcgcgctgttccgggagcgccgcgccgtggtggtgttcgtgcggcatttcctgtgt

SEQ ID NO: 464855 - DNA, 120 bp, Artificial Sequence
  ENSG00000158122_2 (sequence is synthesized)
tacatctgcaaggaatacgtagaggatctggccaaaatccccaggagtttcttacaagaagcaaatgtcacccttatagtgattggacagtcatcctaccatcatattgagcctttttgc

SEQ ID NO: 464856 - DNA, 120 bp, Artificial Sequence
  ENSG00000158122_3 (sequence is synthesized)
aagctgactggatattctcatgaaatctatgtcgatcctgagagagaaatttataaaagattgggaatgaaaagaggtgaagaaattgcttcctcaggacagagcccccacataaaatca

SEQ ID NO: 464857 - DNA, 120 bp, Artificial Sequence
  ENSG00000158122_4 (sequence is synthesized)
aatctactctcaggaagccttcagagcctgtggcgggcagtgactggccctctctttgattttcaaggagacccagctcagcaaggtggaaccctcattttaggtccaggtaacaacatc

SEQ ID NO: 464858 - DNA, 120 bp, Artificial Sequence
  ENSG00000158122_5 (sequence is synthesized)
cattttatacaccgcgataggaataggttggatcacaaacctatcaactctgttttacagcttgtaggagttcagcatgtgaactttacaaacagaccttcagttatccatgtgtgactt

SEQ ID NO: 464859 - DNA, 120 bp, Artificial Sequence
  ENSG00000158122_6 (sequence is synthesized)
aaaatgcactcagtcactttcaactggaccttctggaatgtgaccttcaatgcctgggtgtaatatcctcgtgcagtgtctaacctgctgtcccttcccagcctttgaggagttagggaa

SEQ ID NO: 464860 - DNA, 120 bp, Artificial Sequence
  ENSG00000158122_7 (sequence is synthesized)
gcataaagggggcttgaacctgttgaattgcatgctgggaagcatcagttgtcaaaatatgttatatacttccattttataacttttaacattttatacaaaaaaaatgaatatacaaaa

SEQ ID NO: 464861 - DNA, 120 bp, Artificial Sequence
  ENSG00000158122_8 (sequence is synthesized)
tataactttaaaagctataaaatcataaatactctaaattattttacattatggtatattcagtcaatgaaagagttttttggcaatataaattctgacagtatataaggggacaggaga

SEQ ID NO: 464862 - DNA, 120 bp, Artificial Sequence
  ENSG00000158122_9 (sequence is synthesized)
acaacacaagaccattatattcagtgaagaaggcaaaatatcaaatctgtcaacaatgtaactgcatttttatatgtatatatttgtatttttgtatgctttggaaaaagacaggaaata

SEQ ID NO: 464863 - DNA, 120 bp, Artificial Sequence
  ENSG00000158122_10 (sequence is synthesized)
aacaccaaaatgttgccagtaggtatctctgtgttaagattagtgttattattttcttttctgtacttttctgtatttcccaactgttatataatgagcatgattaatattgtagggcca

SEQ ID NO: 464864 - DNA, 120 bp, Artificial Sequence
  ENSG00000158122_11 (sequence is synthesized)
ggaaaaggtctttaaacattataggacaattttatgccacataacaaccttcacaaaagagcaaaattatataagctgtagtccacttttccatcgtaattgctttactcagaggaagtg

SEQ ID NO: 464865 - DNA, 120 bp, Artificial Sequence
  ENSG00000158122_12 (sequence is synthesized)
catatagccagtgtccacagcaccttctcaaactacatacttgctatccgtttcactaggattttggggggttgggggagctatggagaaaaaaattgttttagatatttaagatatgta

SEQ ID NO: 464866 - DNA, 65 bp, Artificial Sequence
  ENSG00000158122_13 (sequence is synthesized)
gtgttataactgtgttgggattacaggtatgagccaccttgcctggctttttttttttttttttt

SEQ ID NO: 464867 - DNA, 120 bp, Artificial Sequence
  ENSG00000158122_14 (sequence is synthesized)
tcggcctcccaaagtgctagaattgcaggcgttagccaccattcccggccaagaattgttaaaattttttaaaacttggtaacttaaatgtacactatggtttagttatgcattcctaga

SEQ ID NO: 464868 - DNA, 120 bp, Artificial Sequence
  ENSG00000158122_15 (sequence is synthesized)
cactatggtttagttatgcattcctagagaactgctatttctcaccctcaaactgctcttatttgggagacttgttatctttcatttttctagaattttttttttttttttgagacggag

SEQ ID NO: 464869 - DNA, 120 bp, Artificial Sequence
  ENSG00000158122_16 (sequence is synthesized)
ccggcctatttttctagaatcttaatatgtttagttgggaggtgtcccagaaatcctgatgaaaagtatagcaaaatcagaattttggtaatgattagcaagtataatactgctttgaac

SEQ ID NO: 464870 - DNA, 120 bp, Artificial Sequence
  ENSG00000158122_17 (sequence is synthesized)
agcaagtataatactgctttgaactcagtacttttatatgaagcatataaagttacaaaaaaaactaatgtattcaaatatttgaatatatcttcatgtttgtataatgtttttattcaa

SEQ ID NO: 464871 - DNA, 120 bp, Artificial Sequence
  ENSG00000158122_18 (sequence is synthesized)
ggcagggagagggcgagggcgaggcccgcttcccacgcgccgggcgcccgagccgccggtcccggccccgcgggcgtcgcctttgctcgcgtcacgcacggcgaagtacagggatccttc

SEQ ID NO: 464872 - DNA, 120 bp, Artificial Sequence
  ENSG00000158125_0 (sequence is synthesized)
acagagcagtgataactacctgccagtgtctcttaggagtgaggtacctggagttcggggaccccaacctgtgacaatgacagcagacaaattggttttctttgtgaatggcagaaaggt

SEQ ID NO: 464873 - DNA, 120 bp, Artificial Sequence
  ENSG00000158125_1 (sequence is synthesized)
ggtggagaaaaatgcagatccagagacaacccttttggcctacctgagaagaaagttggggctgagtggaaccaagctcggctgtggagaggggggctgcggggcttgcacagtgatgct

SEQ ID NO: 464874 - DNA, 120 bp, Artificial Sequence
  ENSG00000158125_2 (sequence is synthesized)
ctccaagtatgatcgtctgcagaacaagatcgtccacttttctgccaatgcctgcctggcccccatctgctccttgcaccatgttgcagtgacaactgtggaaggaataggaagcaccaa

SEQ ID NO: 464875 - DNA, 120 bp, Artificial Sequence
  ENSG00000158125_3 (sequence is synthesized)
gacgaggctgcatcctgtgcaggagagaattgccaaaagccacggctcccagtgcgggttctgcacccctggcatcgtcatgagtatgtacacactgctccggaatcagcccgagcccac

SEQ ID NO: 464876 - DNA, 120 bp, Artificial Sequence
  ENSG00000158125_4 (sequence is synthesized)
catggaggagattgagaatgccttccaaggaaatctgtgccgctgcacaggctacagacccatcctccagggcttccggacctttgccagggatggtggatgctgtggaggagatgggaa

SEQ ID NO: 464877 - DNA, 120 bp, Artificial Sequence
  ENSG00000158125_5 (sequence is synthesized)
taatccaaattgctgcatgaaccagaagaaagaccactcagtcagcctctcgccatctttattcaaaccagaggagttcacgcccctggatccaacccaggagcccatttttcccccaga

SEQ ID NO: 464878 - DNA, 120 bp, Artificial Sequence
  ENSG00000158125_6 (sequence is synthesized)
gttgctgaggctgaaagacactcctcggaagcagctgcgatttgaaggggagcgtgtgacgtggatacaggcctcaaccctcaaggagctgctggacctcaaggctcagcaccctgacgc

SEQ ID NO: 464879 - DNA, 120 bp, Artificial Sequence
  ENSG00000158125_7 (sequence is synthesized)
caagctggtcgtggggaacacggagattggcattgagatgaagttcaagaatatgctgtttcctatgattgtctgcccagcctggatccctgagctgaattcggtagaacatggacccga

SEQ ID NO: 464880 - DNA, 120 bp, Artificial Sequence
  ENSG00000158125_8 (sequence is synthesized)
cggtatctcctttggagctgcttgccccctgagcattgtggaaaaaaccctggtggatgctgttgctaagcttcctgcccaaaagacagaggtgttcagaggggtcctggagcagctgcg

SEQ ID NO: 464881 - DNA, 120 bp, Artificial Sequence
  ENSG00000158125_9 (sequence is synthesized)
ctggtttgctgggaagcaagtcaagtctgtggcgtccgttggagggaacatcatcactgccagccccatctccgacctcaaccccgtgttcatggccagtggggccaagctgacacttgt

SEQ ID NO: 464882 - DNA, 120 bp, Artificial Sequence
  ENSG00000158125_10 (sequence is synthesized)
gtccagaggcaccaggagaactgtccagatggaccacaccttcttccctggctacagaaagaccctgctgagcccggaggagatactgctctccatagagatcccctacagcagggaggg

SEQ ID NO: 464883 - DNA, 120 bp, Artificial Sequence
  ENSG00000158125_11 (sequence is synthesized)
ggagtatttctcagcattcaagcaggcctcccggagagaagatgacattgccaaggtaaccagtggcatgagagttttattcaagccaggaaccacagaggtacaggagctggccctttg

SEQ ID NO: 464884 - DNA, 120 bp, Artificial Sequence
  ENSG00000158125_12 (sequence is synthesized)
ctatggtggaatggccaacagaaccatctcagccctcaagaccactcagaggcagctttccaagctctggaaggaggagctgctgcaggacgtgtgtgcaggactggcagaggagctgca

SEQ ID NO: 464885 - DNA, 120 bp, Artificial Sequence
  ENSG00000158125_13 (sequence is synthesized)
tctgcctcccgatgcccctggtggcatggtggacttccggtgcaccctcaccctcagcttcttcttcaagttctacctgacagtccttcagaagctgggccaagagaacctggaagacaa

SEQ ID NO: 464886 - DNA, 120 bp, Artificial Sequence
  ENSG00000158125_14 (sequence is synthesized)
gtgtggtaaactggaccccactttcgccagtgcaactttactgtttcagaaagaccccccagccgatgtccagctcttccaagaggtgcccaagggtcagtctgaggaggacatggtggg

SEQ ID NO: 464887 - DNA, 120 bp, Artificial Sequence
  ENSG00000158125_15 (sequence is synthesized)
ccggcccctgccccacctggcagcggacatgcaggcctctggtgaggccgtgtactgtgacgacattcctcgctacgagaatgagctgtctctccggctggtcaccagcacccgggccca

SEQ ID NO: 464888 - DNA, 120 bp, Artificial Sequence
  ENSG00000158125_16 (sequence is synthesized)
cgccaagatcaagtccatagatacatcagaagctaagaaggttccagggtttgtttgtttcatttccgctgatgatgttcctgggagtaacataactggaatttgtaatgatgagacagt

SEQ ID NO: 464889 - DNA, 120 bp, Artificial Sequence
  ENSG00000158125_17 (sequence is synthesized)
ctttgcgaaggataaggttacttgtgttgggcatatcattggtgctgtggttgctgacaccccggaacacacacagagagctgcccaaggggtgaaaatcacctatgaagaactaccagc

SEQ ID NO: 464890 - DNA, 120 bp, Artificial Sequence
  ENSG00000158125_18 (sequence is synthesized)
cattatcacaattgaggatgctataaagaacaactccttttatggacctgagctgaagatcgagaaaggggacctaaagaaggggttttccgaagcagataatgttgtgtcaggggagat

SEQ ID NO: 464891 - DNA, 120 bp, Artificial Sequence
  ENSG00000158125_19 (sequence is synthesized)
atacatcggtggccaagagcacttctacctggagactcactgcaccattgctgttccaaaaggcgaggcaggggagatggagctctttgtgtctacacagaacaccatgaagacccagag

SEQ ID NO: 464892 - DNA, 120 bp, Artificial Sequence
  ENSG00000158125_20 (sequence is synthesized)
ctttgttgcaaaaatgttgggggttccagcaaaccggattgtggttcgagtgaagagaatgggaggaggctttggaggcaaggagacccggagcactgtggtgtccacggcagtggccct

SEQ ID NO: 464893 - DNA, 120 bp, Artificial Sequence
  ENSG00000158125_21 (sequence is synthesized)
ggctgcatataagaccggccgccctgtgcgatgcatgctggaccgtgatgaggacatgctgataactggtggcagacatcccttcctggccagatacaaggttggcttcatgaagactgg

SEQ ID NO: 464894 - DNA, 120 bp, Artificial Sequence
  ENSG00000158125_22 (sequence is synthesized)
gacagttgtggctcttgaggtggaccacttcagcaatgtggggaacacccaggatctctctcagagtattatggaacgagctttattccacatggacaactgctataaaatccccaacat

SEQ ID NO: 464895 - DNA, 120 bp, Artificial Sequence
  ENSG00000158125_23 (sequence is synthesized)
gatgctcattgccgagtgctggatgagtgaagttgcagtgacctgtgggatgcctgcagaggaggtgcggagaaaaaacctgtacaaagaaggggacctgacacacttcaaccagaagct

SEQ ID NO: 464896 - DNA, 120 bp, Artificial Sequence
  ENSG00000158125_24 (sequence is synthesized)
tgagggtttcaccttgcccagatgctgggaagaatgcctagcaagctctcagtatcatgctcggaagagtgaggttgacaagttcaacaaggagaattgttggaaaaagagaggattgtg

SEQ ID NO: 464897 - DNA, 120 bp, Artificial Sequence
  ENSG00000158125_25 (sequence is synthesized)
cataattcccaccaagtttggaataagctttacagttccttttctgaatcaggcaggagccctacttcatgtgtacacagatggctctgtgctgctgacccacggggggactgagatggg

SEQ ID NO: 464898 - DNA, 120 bp, Artificial Sequence
  ENSG00000158125_26 (sequence is synthesized)
ccaaggccttcataccaaaatggtccaggtggccagtagagctctgaaaatccccacctctaagatttatatcagcgagacaagcactaacactgtgcccaacacctctcccacggctgc

SEQ ID NO: 464899 - DNA, 120 bp, Artificial Sequence
  ENSG00000158125_27 (sequence is synthesized)
ctctgtcagcgctgacctcaatggacaggccgtctatgcggcttgtcagaccatcttgaaaaggctggaaccctacaagaagaagaatcccagtggctcctgggaagactgggtcacagc

SEQ ID NO: 464900 - DNA, 120 bp, Artificial Sequence
  ENSG00000158125_28 (sequence is synthesized)
tgcctacatggacacagtgagcttgtctgccactgggttttatagaacacccaatctgggctacagctttgagactaactcagggaaccccttccactacttcagctatggggtggcttg

SEQ ID NO: 464901 - DNA, 120 bp, Artificial Sequence
  ENSG00000158125_29 (sequence is synthesized)
ctctgaagtagaaatcgactgcctaacaggagatcataagaacctccgcacagatattgtcatggatgttggctccagtctaaaccctgccattgatattggacaggtggaaggggcatt

SEQ ID NO: 464902 - DNA, 120 bp, Artificial Sequence
  ENSG00000158125_30 (sequence is synthesized)
tgtccagggccttggcctcttcaccctagaggagctacactattcccccgaggggagcctgcacacccgtggccctagcacctacaagatcccggcatttggcagcatccccattgagtt

SEQ ID NO: 464903 - DNA, 120 bp, Artificial Sequence
  ENSG00000158125_31 (sequence is synthesized)
cagggtgtccctgctccgcgactgccccaacaagaaggccatctatgcatcgaaggctgttggagagccgcccctcttcctggctgcttctatcttctttgccatcaaagatgccatccg

SEQ ID NO: 464904 - DNA, 120 bp, Artificial Sequence
  ENSG00000158125_32 (sequence is synthesized)
tgcagctcgagctcagcacacaggtaataacgtgaaggaactcttccggctagacagccctgccaccccggagaagatccgcaatgcctgcgtggacaagttcaccaccctgtgtgtcac

SEQ ID NO: 464905 - DNA, 120 bp, Artificial Sequence
  ENSG00000158125_33 (sequence is synthesized)
tggtgtcccagaaaactgcaaaccctggtctgtgagggtctaaagagagagtcctcagcagagtcttcttgtgctgcctttgggcttccatggagcaggaggaacataccacagaacatg

SEQ ID NO: 464906 - DNA, 120 bp, Artificial Sequence
  ENSG00000158125_34 (sequence is synthesized)
gatctattaaagtcacagaatgacagacctgtgatttgtcaagatgggatttggaagacaagtgaatgcaatggaagattttgatcaaaaatgtaatttgtaaacacaatgataagcaaa

SEQ ID NO: 464907 - DNA, 120 bp, Artificial Sequence
  ENSG00000158125_35 (sequence is synthesized)
ttcaaaactgttatgcctaaatggtgaatatgcaattaggatcattttctgtctgttttaatcatgtatctggaatagggtcgggaagggtttgtgctattccccacttactggacagcc

SEQ ID NO: 464908 - DNA, 120 bp, Artificial Sequence
  ENSG00000158125_36 (sequence is synthesized)
tgtataacctcaagttctgatggtgtctgtcctttgaagaggattcccacaaacctctagaagcttaaaccgaagttactttaaatcgtgtgccttcctgtgaaagcctggccttcaaac

SEQ ID NO: 464909 - DNA, 120 bp, Artificial Sequence
  ENSG00000158125_37 (sequence is synthesized)
caatgaacagcaaagcataaccttgaatctatactcaaattttgcaatgaggcagtggggtaaggttaaatcctctaaccatctttgaatcattggaaagaataaagaatgaaacaaatt

SEQ ID NO: 464910 - DNA, 120 bp, Artificial Sequence
  ENSG00000158125_38 (sequence is synthesized)
caaggttaattggatctgattttgtgaagctgcataaagcaagattactctataatacaaaaatccaaccaactcaattattgagcacgtacaatgttctagatttctttcccttcctct

SEQ ID NO: 464911 - DNA, 120 bp, Artificial Sequence
  ENSG00000158125_39 (sequence is synthesized)
ttgaagagaatatttgtattccaaatactctttgagtatttacaaaaaagattatgtttaatctttacatttgaagccaaagtaatttccacctagaaatgatgctatcagtcctggcat

SEQ ID NO: 464912 - DNA, 80 bp, Artificial Sequence
  ENSG00000158125_40 (sequence is synthesized)
ggcaggagaattagagctcctgtctttaaaaaaaatttttttaattagttggtcttgatagtgcatgcctgtagtcccaa

SEQ ID NO: 464913 - DNA, 120 bp, Artificial Sequence
  ENSG00000158125_41 (sequence is synthesized)
ctcctgtctttaaaaaaaatttttttaattagttggtcttgatagtgcatgcctgtagtcccaactacttgaaaggctgaggtggagagatcatttgagctcaggaggttgaggctgcag

SEQ ID NO: 464914 - DNA, 120 bp, Artificial Sequence
  ENSG00000158125_42 (sequence is synthesized)
tcctgcctgagcgactgagcaagatcttgtctctgaagaaaaaaaaagaaataaaaatgctgctatcaaaatcaagcccaaccagaggtagaagagccaagaagcctgggttctcatcct

SEQ ID NO: 464915 - DNA, 120 bp, Artificial Sequence
  ENSG00000158125_43 (sequence is synthesized)
agctctgtctcttctgtctctatctttgtgatcttggactgtcaattccccttcctgtgatccattttactgcaaacataagggttgcagtaaagggttgtctcacgtcttctgctttaa

SEQ ID NO: 464916 - DNA, 120 bp, Artificial Sequence
  ENSG00000158125_44 (sequence is synthesized)
aagcctataaatatatgacctgaaaactccagttacataaaggatctgcagctatctaaggcttggttttcttactgtcatatgatacctgggtctaatgaactctgctgagatcacctc

SEQ ID NO: 464917 - DNA, 120 bp, Artificial Sequence
  ENSG00000158125_45 (sequence is synthesized)
aagtttctgcggttggtaaagagaacaagggaagaacaaacatcccttttattgctccaaatggtgatttaatccctacatggtgctgggtggacaatgtgtcactgtcacatgccttca

SEQ ID NO: 464918 - DNA, 120 bp, Artificial Sequence
  ENSG00000158125_46 (sequence is synthesized)
ctgtataaatccaaccttctgccagagagaatctgtggttctggccatggagggaggatagtggaaatgatatagttggactggtgcttgatgtcactaataaatgaaactgtcagctgg

SEQ ID NO: 464919 - DNA, 120 bp, Artificial Sequence
  ENSG00000158125_47 (sequence is synthesized)
gtttttattacgattataccccaacacgaataatcattccagtactgaaatttggttattcttagctgtgtgatttgggcaagaaacttaacttttctgtgcctcagcttcttcatctat

SEQ ID NO: 464920 - DNA, 120 bp, Artificial Sequence
  ENSG00000158156_0 (sequence is synthesized)
attcccttccgtatggaaatgaggttaactcatttgcaggaacctaacgcccgccctcccccgactcggatcgctggcgtgaacccagcggccccgtgctctccgggtatccctggatcg

SEQ ID NO: 464921 - DNA, 120 bp, Artificial Sequence
  ENSG00000158156_1 (sequence is synthesized)
aggcgcacgcgttgttgcaaagtctcgcacttagggattagaatgtgcctttgcgtttcgttttgttttgcaacaatacaggtgtgagggatcgcagccctggtccaggctctagtctcc

SEQ ID NO: 464922 - DNA, 120 bp, Artificial Sequence
  ENSG00000158156_2 (sequence is synthesized)
ccgccctctcgctttcttgggcctccgggcgcctcaaaggtaaaactaggccatttgaagcctgcgaagcgaagggcagtcggtcttcaggcctagcgggcttggctgggctgggtcggt

SEQ ID NO: 464923 - DNA, 120 bp, Artificial Sequence
  ENSG00000158156_3 (sequence is synthesized)
ggacccctgggctggcggcgggagcagagcatcgagcggcttttagctggggttcgggcggaggacctgggacaaccgcgggcctcgctcctccccggacggggcgggacggggaagtcc

SEQ ID NO: 464924 - DNA, 120 bp, Artificial Sequence
  ENSG00000158156_4 (sequence is synthesized)
gcccacctccttcctgcctcggcaaccccgggccctgagggcaggccccaaccgcggaggagcaggagagggcggaggccggcgggccatgccctggtcgtcccgcggcgccctccttcg

SEQ ID NO: 464925 - DNA, 120 bp, Artificial Sequence
  ENSG00000158156_5 (sequence is synthesized)
ggcgggccatgccctggtcgtcccgcggcgccctccttcgggacctggtcctgggcgtgctgggcaccgccgccttcctgctcgacctgggcaccgacctgtgggccgccgtccagtatg

SEQ ID NO: 464926 - DNA, 120 bp, Artificial Sequence
  ENSG00000158156_6 (sequence is synthesized)
cgctcggcggccgctacctgtgggcggcgctggtgctggcgctgctgggcctggcctccgtggcgctgcagctcttcagctggctctggctgcgcgctgaccctgccggcctgcacgggt

SEQ ID NO: 464927 - DNA, 120 bp, Artificial Sequence
  ENSG00000158156_7 (sequence is synthesized)
cgcagcccccgcgccgctgcctggcgctgctgcatctcctgcagctgggttacctgtacaggtgcgtgcaggagctgcggcaggggctgctggtgtggcagcaggaggagccctctgagt

SEQ ID NO: 464928 - DNA, 120 bp, Artificial Sequence
  ENSG00000158156_8 (sequence is synthesized)
ttgacttggcctacgccgacttcctcgccctggacatcagcatgctgcggctcttcgagaccttcttggagacggcaccacagctcacgctggtgctggccatcatgctgcagagtggcc

SEQ ID NO: 464929 - DNA, 120 bp, Artificial Sequence
  ENSG00000158156_9 (sequence is synthesized)
gggctgagtactaccagtgggttggcatctgcacatccttcctgggcatctcgtgggcactgctcgactaccaccgggccttgcgcacctgcctcccctccaagccgctcctgggcctgg

SEQ ID NO: 464930 - DNA, 120 bp, Artificial Sequence
  ENSG00000158156_10 (sequence is synthesized)
gctcctccgtgatctacttcctgtggaacctgctgctgctgtggccccgagtcctggctgtggccctgttctcagccctcttccccagctatgtggccctgcacttcctgggcctgtggc

SEQ ID NO: 464931 - DNA, 120 bp, Artificial Sequence
  ENSG00000158156_11 (sequence is synthesized)
cagctccgagtggctgtaccgggtgacggtggccaccatcctctatttctcctggttcaacgtggctgagggccgcacccgaggccgggccatcatccacttcgccttcctcctgagtga

SEQ ID NO: 464932 - DNA, 120 bp, Artificial Sequence
  ENSG00000158156_12 (sequence is synthesized)
cagcattctcctggtggccacctgggtgactcatagctcctggctgcccagcgggattccactgcagctgtggctgcctgtgggatgcggctgcttctttctgggcctggctctgcggct

SEQ ID NO: 464933 - DNA, 120 bp, Artificial Sequence
  ENSG00000158156_13 (sequence is synthesized)
tgtgtactaccactggctgcaccctagctgctgctggaagcccgaccctgaccaggtagacggggcccggagtctgctttctccagaggggtatcagctgcctcagaacaggcgcatgac

SEQ ID NO: 464934 - DNA, 120 bp, Artificial Sequence
  ENSG00000158156_14 (sequence is synthesized)
ccatttagcacagaagtttttccccaaggctaaggatgaggctgcttcgccagtgaagggataggtgaacggcgtcctttgaagcaggatcagacccagccagcagagatggagagtgac

SEQ ID NO: 464935 - DNA, 120 bp, Artificial Sequence
  ENSG00000158156_15 (sequence is synthesized)
tctgttggcagaaggcaggcgaggataagctaacgatgctgctgtggcctctatgcactcagcaagagcgggacgcctgtgctgggccgggcaccagggatggtgctgagtcgggcagag

SEQ ID NO: 464936 - DNA, 120 bp, Artificial Sequence
  ENSG00000158156_16 (sequence is synthesized)
gcctcctttcaaggagttcacagtgaacaagatgagaagggctgggccctggagggtcaagagccccaattatgtacaagacactttgggaggaaagaagactaccttttccccctgcca

SEQ ID NO: 464937 - DNA, 120 bp, Artificial Sequence
  ENSG00000158156_17 (sequence is synthesized)
ttggtatagctggtgccccaaaacttccacctccctccctggctacctctaaaatgactggtataggtgctgccccaccccttagctcccctatcctgggctaggaggccacaggggctg

SEQ ID NO: 464938 - DNA, 120 bp, Artificial Sequence
  ENSG00000158156_18 (sequence is synthesized)
tcctctagaattcttccttccctcccccacaccattcattcaattcatgaaacaaatctttgccaagagcagtttatgtgccaggaacatcattctgtccttgcaacctggaacaagacc

SEQ ID NO: 464939 - DNA, 120 bp, Artificial Sequence
  ENSG00000158156_19 (sequence is synthesized)
agctaccagcctagcttcatccgctacttgcaccaaccagtcccgggttagatcccaaatgctagaagccagggatgcccaactctgggtggccccagtcagaacctctgggatctcagt

SEQ ID NO: 464940 - DNA, 120 bp, Artificial Sequence
  ENSG00000158156_20 (sequence is synthesized)
gaagctggcctggcctctgctcctgctctcaaggggctgcttttcaaccaagagccttgtgagcctggtctgagccttgcacagccactgagtattttttttgccttagccagtgtacct

SEQ ID NO: 464941 - DNA, 120 bp, Artificial Sequence
  ENSG00000158156_21 (sequence is synthesized)
cctacctcagtctatgtgagaggaagagaatgtgtgtgcctgtgggtctctacaagtgacagatgtgttgttttcaacagtattattaggttatgaataaagcctcatgaaatcctccaa

SEQ ID NO: 464942 - DNA, 84 bp, Artificial Sequence
  ENSG00000158156_22 (sequence is synthesized)
agctcacgctggtgctggccatcatgctgcagagtggccgggctgagtactaccagtagacgaggtcccacttggttggcatct

SEQ ID NO: 464943 - DNA, 120 bp, Artificial Sequence
  ENSG00000158158_0 (sequence is synthesized)
gcgcctcctcctggcggcgccggtgctgctggtgctgctgtgggcgctgggggcccggggccagggcagcccccagcagggcacgatcgtgggcatgaggctggcgagctgcaacaagtc

SEQ ID NO: 464944 - DNA, 120 bp, Artificial Sequence
  ENSG00000158158_1 (sequence is synthesized)
gcatgaggctggcgagctgcaacaagtcgtgtgggacgaacccggatggcatcatcttcgtgtccgagggcagcaccgtgaacctgaggctgtacggctacagcctgggcaacatctcca

SEQ ID NO: 464945 - DNA, 120 bp, Artificial Sequence
  ENSG00000158158_2 (sequence is synthesized)
gcaacctgatctccttcaccgaggtggacgatgccgagaccctccacaagtccaccagctgcctcgagctcaccaaggacctggtcgtccagcagctggtcaacgtgagccgcgggaaca

SEQ ID NO: 464946 - DNA, 120 bp, Artificial Sequence
  ENSG00000158158_3 (sequence is synthesized)
cgtccggcgtgctggtggtgctcaccaagttcctccggaggagcgagagcatgaagctgtatgcactgtgcacccgggcccagcccgacgggccctggctgaagtggacggacaaggact

SEQ ID NO: 464947 - DNA, 120 bp, Artificial Sequence
  ENSG00000158158_4 (sequence is synthesized)
cactgctcttcatggtggaggagcctgggaggttcctgcctctctggctgcacattctcctaattacggtgctgctggtgctgtcgggcatattttctggcctcaacctcgggcttatgg

SEQ ID NO: 464948 - DNA, 120 bp, Artificial Sequence
  ENSG00000158158_5 (sequence is synthesized)
ccctggaccccatggagctgcgcatcgtgcagaactgtggcaccgagaaggagaggcgctatgcccgcaagattgagcccatccggcgcaagggcaactaccttctctgctcgttgctcc

SEQ ID NO: 464949 - DNA, 120 bp, Artificial Sequence
  ENSG00000158158_6 (sequence is synthesized)
tagggaacgtgctggtcaacacctccctcacaatccttctagacaacctcatcgggtccggcctcatggcggtggcctcctccaccattggcattgtcatctttggggagatcctacctc

SEQ ID NO: 464950 - DNA, 120 bp, Artificial Sequence
  ENSG00000158158_7 (sequence is synthesized)
aggccctgtgctcccgacatgggctggctgtgggtgccaacaccatccttctcaccaaattctttatgctactcaccttccccctcagttttcccattagcaagctcctggacttttttc

SEQ ID NO: 464951 - DNA, 120 bp, Artificial Sequence
  ENSG00000158158_8 (sequence is synthesized)
tgggccaggagattcgcactgtttacaaccgggagaagctgatggagatgttgaaggtgacggagccctataatgacctcgtgaaagaggagctcaatatgatccagggtgccctggaac

SEQ ID NO: 464952 - DNA, 120 bp, Artificial Sequence
  ENSG00000158158_9 (sequence is synthesized)
tacggaccaaaactgtagaggatatcatgacccagctccaggactgcttcatgatccgcagcgatgccatcctggacttcaacaccatgtcggagataatggaaagcggctatactcgca

SEQ ID NO: 464953 - DNA, 120 bp, Artificial Sequence
  ENSG00000158158_10 (sequence is synthesized)
tcccggtgttcgaagacgagcagtccaatattgtagatattctctacgtcaaagacttggcctttgtggaccccgatgactgcacccccctcaagactatcactcgcttctataaccacc

SEQ ID NO: 464954 - DNA, 120 bp, Artificial Sequence
  ENSG00000158158_11 (sequence is synthesized)
cggtgcactttgtcttccatgacaccaagttggatgccatgctggaggagttcaagaaggggaagtcccacctggccatcgtgcagaaggtaaacaacgagggtgagggtgaccccttct

SEQ ID NO: 464955 - DNA, 120 bp, Artificial Sequence
  ENSG00000158158_12 (sequence is synthesized)
acgaggtcctgggcctggtcaccctggaggacgtgatcgaggagatcatcaagtcggagatcctggacgagtccgacatgtacactgacaaccgaagccggaagcgggtgtctgagaaga

SEQ ID NO: 464956 - DNA, 120 bp, Artificial Sequence
  ENSG00000158158_13 (sequence is synthesized)
acaagcgtgacttctctgccttcaaggatgcggacaatgagctcaaagtgaaaatctccccgcagctcctcctggccgctcatcgcttcctagccacagaggtctctcagtttagcccct

SEQ ID NO: 464957 - DNA, 120 bp, Artificial Sequence
  ENSG00000158158_14 (sequence is synthesized)
ccctgatatcagagaagatcctgctgcggctactcaagtacccagatgtcattcaggaactcaagtttgacgagcacaataagtactacgcccgccattacctgtacacccgaaataagc

SEQ ID NO: 464958 - DNA, 120 bp, Artificial Sequence
  ENSG00000158158_15 (sequence is synthesized)
cggccgactacttcatcctcatcctgcaggggaaggtggaggtggaggcagggaaggagaacatgaagtttgagacgggcgccttctcctactatgggactatggccctgacctcggtcc

SEQ ID NO: 464959 - DNA, 120 bp, Artificial Sequence
  ENSG00000158158_16 (sequence is synthesized)
cctccgaccgttccccagcacaccccaccccactcagccgctcagcctccctcagttacccagaccgcacagacgtctcaactgcagcaaccttggcaggcagcagcaaccagtttggca

SEQ ID NO: 464960 - DNA, 120 bp, Artificial Sequence
  ENSG00000158158_17 (sequence is synthesized)
gctctgtcctgggccagtacatctctgacttcagcgtccgggcactcgtggacttgcagtacatcaagatcactcggcagcagtaccagaacgggctgctggcttctcgcatggagaaca

SEQ ID NO: 464961 - DNA, 120 bp, Artificial Sequence
  ENSG00000158158_18 (sequence is synthesized)
taactccttgctgcacaaagcctcccacgagaatgccatctgacaggagggcccggggccccctgcccaccctgcgggggcctccccagtgggcccacatgaagagagggaacctgttag

SEQ ID NO: 464962 - DNA, 120 bp, Artificial Sequence
  ENSG00000158158_19 (sequence is synthesized)
tccagaaaggatacggatagatagcctgtctgactgaacagccagatggcccccagcctatgggggatctggcctctgccagggacctctgagtagctctgaggtggcactgtccagccc

SEQ ID NO: 464963 - DNA, 120 bp, Artificial Sequence
  ENSG00000158158_20 (sequence is synthesized)
tggatagggggggcagtgggccagctaccgtaagcaaaggctgttttttactgagagaatttctaaagtaggctcatcacttttttttaaatatcattttgggaagggaagacagggtta

SEQ ID NO: 464964 - DNA, 120 bp, Artificial Sequence
  ENSG00000158158_21 (sequence is synthesized)
aggaactttatttaaaaaaaaaatatttttttcctaaaaactataaaagaggaagggtttcttgtcccgggaagcaacggacataatctgttcccagccatggccttccagcttgtgtcc

SEQ ID NO: 464965 - DNA, 120 bp, Artificial Sequence
  ENSG00000158158_22 (sequence is synthesized)
ctgattcagggagctctcccttcctcctcctcctcctcctccggaggtgggatcccagagcctgccagtggaggcttatctgttgggaggaagacagctcttcacagaagcaaagaacaa

SEQ ID NO: 464966 - DNA, 120 bp, Artificial Sequence
  ENSG00000158158_23 (sequence is synthesized)
aatggcatggagatcagctgcctgagcacctgcgctgtagcttatctgacaacgctgaggccacgagctcctgggtagctgtgatcagggacatgataatctgagctatgcagaggagca

SEQ ID NO: 464967 - DNA, 120 bp, Artificial Sequence
  ENSG00000158158_24 (sequence is synthesized)
catctgttgtcaactgctgtacccagaaatctagaactctgccgacagcctctcctggtgagtcgggactcagctgaggacacatccccaccctgcctcccatctggccctttggacaac

SEQ ID NO: 464968 - DNA, 120 bp, Artificial Sequence
  ENSG00000158158_25 (sequence is synthesized)
tggccctttgtgacagggctgactcaagtgttaggcagggtctcaggcctttgattgctcacccctgctccccaggccctgccctcacttttaccaaaggttctccctcggcgggagggc

SEQ ID NO: 464969 - DNA, 120 bp, Artificial Sequence
  ENSG00000158158_26 (sequence is synthesized)
atctgtgttggaggtgatttgtctgggttcttccttttggttccagaaggaactgtcagtcatcagcatctgcgttgttagcagtcagtaccacccccgccccacaatgacagtcaaggc

SEQ ID NO: 464970 - DNA, 120 bp, Artificial Sequence
  ENSG00000158158_27 (sequence is synthesized)
tgacttgttgactgaagcctttttcccagaccccttatttcgaatccccaagcttcagtccctcttgggggtggagacaagaggacatgtgggaagccacggaagcaggttctttatgtc

SEQ ID NO: 464971 - DNA, 120 bp, Artificial Sequence
  ENSG00000158158_28 (sequence is synthesized)
ctctcctctgtggctggcaaggctcacctggccttatccacccacttatggaacctcaggagaggagggctcctcctaaaggcatgcagcttgcagcccctctttctcacacgtgtgatc

SEQ ID NO: 464972 - DNA, 120 bp, Artificial Sequence
  ENSG00000158158_29 (sequence is synthesized)
ctagcgtgagaggtcatcctgcccttgctgaagttagtagtactgtactaagagctctgccctcatgtgaattcctgccctggcgcctcttccctggggctgaatcaggccctgctgcaa

SEQ ID NO: 464973 - DNA, 120 bp, Artificial Sequence
  ENSG00000158158_30 (sequence is synthesized)
aactccaggcttcccagggttggggaggctgtgggaccaaggtccatgttggtccttccactgggtgcagcaggagctgggtcccgagagcctggcaggtgaaactctgcaggccttccg

SEQ ID NO: 464974 - DNA, 120 bp, Artificial Sequence
  ENSG00000158158_31 (sequence is synthesized)
cctgattattatttattcactcctttcctcaccccaagtgccctgctctccaggtgcctagagtatcctaactcttaggaccagggattgtcttgcaccaagtatgcctacccctggcca

SEQ ID NO: 464975 - DNA, 120 bp, Artificial Sequence
  ENSG00000158158_32 (sequence is synthesized)
gtctgaggtctcctagccatagaactgactcctggaagcctggagagaaggtggtgacacccatgggttctcaactgtaaggaaaaaagacaccagacttttgttccctagtgggggaaa

SEQ ID NO: 464976 - DNA, 120 bp, Artificial Sequence
  ENSG00000158158_33 (sequence is synthesized)
gcccttagtcttgtacaggagcagcttgctcccaagtccttttggaagctggcagagctatattcctgacagccctgactgccaggtagagcaaaagacattggtgggggtatgtgaagc

SEQ ID NO: 464977 - DNA, 120 bp, Artificial Sequence
  ENSG00000158158_34 (sequence is synthesized)
aaaaggggcaggtgcacacacctccacagtgacctctgtgcacacggttaccaccaactggctggccctcctcctcttccctggcccattgatcatcccttctcacagagggtcatcatt

SEQ ID NO: 464978 - DNA, 120 bp, Artificial Sequence
  ENSG00000158158_35 (sequence is synthesized)
atttccaaatattgtttgtctgatgacttcctcttcccagtgcaatttttcccttcctatttcaacctctggttcctgggatgagccataccctggaactggcccacccactgtgtcttc

SEQ ID NO: 464979 - DNA, 120 bp, Artificial Sequence
  ENSG00000158158_36 (sequence is synthesized)
cacgtaagggagacctttgcaaagggcatccaaatgggtaggcaggtgacagccgccgtatttattttgcataatattttaatttgtatatttttgtgatttattttggcgttatgagtt

SEQ ID NO: 464980 - DNA, 120 bp, Artificial Sequence
  ENSG00000158158_37 (sequence is synthesized)
tgactctcggggagttttgttgttatgactcttgtgtcttttgtcacaaaacaatgatatttgctaaacgatatatggaatttatttttgattggtaataaaaaatcaaatatgtataaa

SEQ ID NO: 464981 - DNA, 120 bp, Artificial Sequence
  ENSG00000158158_38 (sequence is synthesized)
aaagagcagagaatcgccaagaaatcagggtgctcagctatctgcaggtgtggacccagggcccaagcctgtggcttccagtcagtccagcccgcacctctcccatgggagggcctgaga

SEQ ID NO: 464982 - DNA, 120 bp, Artificial Sequence
  ENSG00000158158_39 (sequence is synthesized)
gcgcgggaacatcctgggcccctgggatctcagaggctggaccttcctgggagactcattgaggaagtcccacctggccatcgtgcagaaggtaaacaacgagggtgagggtgacccctt

SEQ ID NO: 464983 - DNA, 120 bp, Artificial Sequence
  ENSG00000158158_40 (sequence is synthesized)
aatcctgcgggagcttgggtgaagggaggaaagagcagagaatcgccaagaaatcagggtgctcagctatctgcagggaagtcccacctggccatcgtgcagaaggtaaacaacgagggt

SEQ ID NO: 464984 - DNA, 120 bp, Artificial Sequence
  ENSG00000158161_0 (sequence is synthesized)
aacgccgcggtttcctccgctcgattggttctactgtgggtctggactgatctccatgtcctgttgtggggcttttacagcctttggattgtgaaaactgctgagagagacttgcaatcc

SEQ ID NO: 464985 - DNA, 120 bp, Artificial Sequence
  ENSG00000158161_1 (sequence is synthesized)
agtcacataagtataataaagaaatattggtcctcatggaagaagagcaagatttaccagagcaaccagtgaaaaaagccaagatgcaggaatcaggagagcaaactataagtcaagtaa

SEQ ID NO: 464986 - DNA, 120 bp, Artificial Sequence
  ENSG00000158161_2 (sequence is synthesized)
gcaatccagatgtcagtgatcagaagcctgaaacatcaagccttgcttcaaaccttcccatgtcagaggaaattatgacatgcaccgattacatccctcgctcatccaatgattatacct

SEQ ID NO: 464987 - DNA, 120 bp, Artificial Sequence
  ENSG00000158161_3 (sequence is synthesized)
cacaaatgtattctgcaaaaccttatgcacatattctctcagttcctgtttcggaaactgcttaccctggacagactcaataccagacactacagcagactcaaccctatgctgtctacc

SEQ ID NO: 464988 - DNA, 120 bp, Artificial Sequence
  ENSG00000158161_4 (sequence is synthesized)
ctcaggcaacccaaacgtatggactacctccttttggtgcattgtggccaggtatgaaacctgaaagtggtttaattcagactccatctccaagtcaacacagtgttcttacctgcacta

SEQ ID NO: 464989 - DNA, 120 bp, Artificial Sequence
  ENSG00000158161_5 (sequence is synthesized)
cagggttaaccacaagccagccaagcccagcacattattcttatcccattcaagcttcaagcacaaatgccagcctgatatctacttcttctacaattgccaatattccagcagcagcag

SEQ ID NO: 464990 - DNA, 120 bp, Artificial Sequence
  ENSG00000158161_6 (sequence is synthesized)
tagccagcatctcaaaccaggattatcccacctatactattcttggtcagaatcagtaccaggcctgctaccccagctccagctttggagtcacaggtcagactaacagtgatgcagaga

SEQ ID NO: 464991 - DNA, 120 bp, Artificial Sequence
  ENSG00000158161_7 (sequence is synthesized)
gcaccacattagcagcaaccacataccagtcggagaagcctagtgtcatggcgcctgcacctgcagcacagagactttcctctggagacccttctacaagtccatctttgtcccagacta

SEQ ID NO: 464992 - DNA, 120 bp, Artificial Sequence
  ENSG00000158161_8 (sequence is synthesized)
caccaagtaaagatactgatgatcagtccaggaaaaacatgactagcaagaaccggggcaagaggaaagctgatgccacttcttcccaagacagtgaattagaacgggtatttctgtggg

SEQ ID NO: 464993 - DNA, 120 bp, Artificial Sequence
  ENSG00000158161_9 (sequence is synthesized)
acttggatgaaaccatcatcatcttccactcacttcttactggatcctatgcccagaaatatggaaaggacccaacagtagtgattggctcaggtttaacaatggaagaaatgatttttg

SEQ ID NO: 464994 - DNA, 120 bp, Artificial Sequence
  ENSG00000158161_10 (sequence is synthesized)
aagtggctgatactcatctatttttcaatgacttagaggagtgtgaccaggtacatgtggaagatgtggcttctgatgacaatggccaagacttgagcaactacagtttctcaacagatg

SEQ ID NO: 464995 - DNA, 120 bp, Artificial Sequence
  ENSG00000158161_11 (sequence is synthesized)
gtttcagtggctcaggaggtagtggcagccatggttcatctgtgggtgttcagggaggtgtggactggatgaggaaactagctttccgctaccggaaagtgagagaaatctatgataagc

SEQ ID NO: 464996 - DNA, 120 bp, Artificial Sequence
  ENSG00000158161_12 (sequence is synthesized)
ataaaagcaacgtgggtggtctcctcagtccccagaggaaggaagcactgcagagattaagagcagaaattgaagttttaacagattcctggttaggaactgcattaaagtccttacttc

SEQ ID NO: 464997 - DNA, 120 bp, Artificial Sequence
  ENSG00000158161_13 (sequence is synthesized)
tcatccagtccagaaagaattgtgtgaatgttctgatcactaccacccagctggttccagccctggccaaggttctcctatatggactaggagaaatatttcctattgagaacatctata

SEQ ID NO: 464998 - DNA, 120 bp, Artificial Sequence
  ENSG00000158161_14 (sequence is synthesized)
gtgctaccaaaattggtaaggagagctgctttgagagaattgtgtcaaggtttggaaagaaagtcacatatgtagtgattggagatggacgagatgaagaaattgcagccaaacagcaca

SEQ ID NO: 464999 - DNA, 120 bp, Artificial Sequence
  ENSG00000158161_15 (sequence is synthesized)
acatgcctttctggaggatcacaaaccatggagacctagtatcccttcaccaggctttagagcttgattttctctaagaactggaatgaggagccttccccttgagctccttttcactcc

SEQ ID NO: 465000 - DNA, 120 bp, Artificial Sequence
  ENSG00000158161_16 (sequence is synthesized)
tgaagggagctggagactggaaccaactgagaactttctctgtctgtctctctctgtgtctctgtctctatctctctctctttctctctttctctctctccctctctccctccctccctt

SEQ ID NO: 465001 - DNA, 120 bp, Artificial Sequence
  ENSG00000158161_17 (sequence is synthesized)
cctctctccctccctctctgcctctctctctctctctctctctgtctttatccatggaatgctggcgagaacacaatcagaaccaacagctgcaatttttgctaagagtgagctgcagcc

SEQ ID NO: 465002 - DNA, 120 bp, Artificial Sequence
  ENSG00000158161_18 (sequence is synthesized)
ccgtgttcatctccatacagaagcagggacagttggatagagagaacaatggactcactgcagctacagtgcttttaatttttctgtgttttgtttttgtttttttgttttcaaaaaatg

SEQ ID NO: 465003 - DNA, 120 bp, Artificial Sequence
  ENSG00000158161_19 (sequence is synthesized)
aaaaagaaaaggaaattcctggggcagagttgcactcttagtccatgaccagattgagaattactgataacttgtggtgatcagataaatgcagcagacttttatgataacatctcttgc

SEQ ID NO: 465004 - DNA, 120 bp, Artificial Sequence
  ENSG00000158161_20 (sequence is synthesized)
agtcttagagtctccttagcttagaatctcacttatttccagcgaatgtgtatgttatttttataggtaagggtctgatctttgacgcaggtttcccccactttctttttctagcaagaa

SEQ ID NO: 465005 - DNA, 120 bp, Artificial Sequence
  ENSG00000158161_21 (sequence is synthesized)
ggggtgtttaaagtcttgaaaatagtaattgaaatatctaaaatacctccctgtggcagtagcacctctatagctgctccagtggtctgctctctaggatgatacctttcctgttcttct

SEQ ID NO: 465006 - DNA, 120 bp, Artificial Sequence
  ENSG00000158161_22 (sequence is synthesized)
atctcctagctggtgaactgtggggcactggacactgagtaacttaaactttggcatttcccatctagaagccttagtcttctttccagtcccttttccctttagtcaaatggcacaacc

SEQ ID NO: 465007 - DNA, 120 bp, Artificial Sequence
  ENSG00000158161_23 (sequence is synthesized)
ctaaaaactccttcagcttgactgtcattcagactgtatcacaggaggcttagcttccaaactggagagaaggaactaaagtgtcttatgaatttcagcttcttggctcttgagaccgaa

SEQ ID NO: 465008 - DNA, 120 bp, Artificial Sequence
  ENSG00000158161_24 (sequence is synthesized)
cctcatgtccacctccaggcagctctggccagtccccgggtattagacccaagaattcaaatcaaatctaaaaacatgcttataactacattttggccaaaactgccaatgtatttgact

SEQ ID NO: 465009 - DNA, 120 bp, Artificial Sequence
  ENSG00000158161_25 (sequence is synthesized)
tcctttgtggaagccctaagccatatgaaggatgtcccaggtatgtatttacccagatctctgcctgaaactgaagagcagattgctgtatttaaattttcccatggaaaaccctgcttc

SEQ ID NO: 465010 - DNA, 120 bp, Artificial Sequence
  ENSG00000158161_26 (sequence is synthesized)
tcaaatcccattctaaagtaggaaaccagaaagactttgctgattgtggggggaagggagaaacagacaggttttcacattgttgccaaggctggtcttgaacacctggcctcaagcgat

SEQ ID NO: 465011 - DNA, 120 bp, Artificial Sequence
  ENSG00000158161_27 (sequence is synthesized)
ccacctcggcctctcaaagtgttgggattgtaggcatgagccactgcacccagccagactttcctgatttaaatgagagtactgcatcattccctacttcatggcccaaaacttaatcct

SEQ ID NO: 465012 - DNA, 120 bp, Artificial Sequence
  ENSG00000158161_28 (sequence is synthesized)
tcctgggccaaatgcaggagcatctctcgacctctgggcagattggtgggtgcccaggcactagtcacagccttccagcccagccatgattgttggatgccccatccctccaagagcaat

SEQ ID NO: 465013 - DNA, 120 bp, Artificial Sequence
  ENSG00000158161_29 (sequence is synthesized)
ttgggcatctactcaggcaggataaaattccctagagctgaggaagttcagcctctcccaggctacacagagagagatgatacaagcacctcagattgagatgcaggattggtccgcaga

SEQ ID NO: 465014 - DNA, 120 bp, Artificial Sequence
  ENSG00000158161_30 (sequence is synthesized)
aggaggcattgttgaccaaccccagctataattgcttgtcaccagagattctgcatacccatttccagagatgttgcagcacaaagaggcaagactccttccaatgccaggccacccaga

SEQ ID NO: 465015 - DNA, 120 bp, Artificial Sequence
  ENSG00000158161_31 (sequence is synthesized)
tagcaagagagagaggctggtatacacattccttcagaactcattgaaaagcgctcataactcgtgattttaaggagtaagtttttgctgagtagctgaagtcagtgctcctttacttag

SEQ ID NO: 465016 - DNA, 120 bp, Artificial Sequence
  ENSG00000158161_32 (sequence is synthesized)
ctgcctctttggccttgtttcctgtggggttgggaggagggagatgtagtgtgaggtaggccttcccttggtctgtattcagcatagttgcctagatgctgctctgccttgtttgatggt

SEQ ID NO: 465017 - DNA, 120 bp, Artificial Sequence
  ENSG00000158161_33 (sequence is synthesized)
tgatcttaggaagctctaggttttactctgaggcctcaaaccctccccctatgcagtatagctgttgggtttttgtcctggacaaaggccacggctgttgtgctgcgcttcaggtttgtg

SEQ ID NO: 465018 - DNA, 120 bp, Artificial Sequence
  ENSG00000158161_34 (sequence is synthesized)
aggctgcggagtggtacccccaccatgcacgcaagcacacacacacagatacttccctctccacccttttgggagctctttattttagaatgtaacttgaactcacttttatcattggcc

SEQ ID NO: 465019 - DNA, 120 bp, Artificial Sequence
  ENSG00000158161_35 (sequence is synthesized)
tttttcctcttactctgacttcctagcttagctctttccaaaaggaacttgaacttggccaagagaggtaaggaggctgagcagagcagtctttgctcattcctggttgttgccaccctc

SEQ ID NO: 465020 - DNA, 120 bp, Artificial Sequence
  ENSG00000158161_36 (sequence is synthesized)
atttaaatggaagagagaaaacaggagcttcttggctgtttgccaaaatgaattgtccagggaacacagtgctctctgtaattaccctgcctttttctccaccccaacacaaaaatctgg

SEQ ID NO: 465021 - DNA, 120 bp, Artificial Sequence
  ENSG00000158161_37 (sequence is synthesized)
aaaggaaaataagtgggtaggattaagagctgttagaagctgaggaccaaaggacactgtgggtccattcatcaagggggagaccctcttcattagagtcctcatgaaattagccaaatg

SEQ ID NO: 465022 - DNA, 75 bp, Artificial Sequence
  ENSG00000158161_38 (sequence is synthesized)
agaccctcttcattagagtcctcatgaaattagccaaatgatgagtccttccctagctgggcatggagatggagt

SEQ ID NO: 465023 - DNA, 120 bp, Artificial Sequence
  ENSG00000158161_39 (sequence is synthesized)
tgggttctacaggatgggtctgtaatgtcacggtgagggctctctctagtagtagatctggagtgaggtgtgtcttgggttgaggaggtggcttgactttcgaatgtaaaactgactgtg

SEQ ID NO: 465024 - DNA, 120 bp, Artificial Sequence
  ENSG00000158161_40 (sequence is synthesized)
ccttagcatcaccctgtccagtgcccctggggcagctggtagtgtccagaagaatggacacctgctccagatttagatgcccatctgggcttttgtttgatttgcggcgttcctgtcttc

SEQ ID NO: 465025 - DNA, 120 bp, Artificial Sequence
  ENSG00000158161_41 (sequence is synthesized)
tgtaaagctagtgagttgtcccaagagactgatgccacagcttgttcgcagtttacacaaactcagctttaaaattccaaatagaatctgacttgcaaactctagctgcagcatgtggag

SEQ ID NO: 465026 - DNA, 120 bp, Artificial Sequence
  ENSG00000158161_42 (sequence is synthesized)
cttctagatgtttactaccttgaatggttgtcagtgtcactgaaccacaggggagaggagtatggggtagagcaatggtctgggccaaggaatggtgagcttagggtcttcctctgactc

SEQ ID NO: 465027 - DNA, 120 bp, Artificial Sequence
  ENSG00000158161_43 (sequence is synthesized)
cttactcctcaaggaggcagttagggtccctcttaagcaggcttctatttcttaccactaaattggtttcctttttcatccagaagttagaactccccagatattcacactataggatct

SEQ ID NO: 465028 - DNA, 120 bp, Artificial Sequence
  ENSG00000158161_44 (sequence is synthesized)
gaattccgagattctaaaatatcttaaaccacaagagagaaaatctagttctgcctcagccccagtcagcaggccatctgtcccttcctctcctctgagtcagacagctctggcaagcaa

SEQ ID NO: 465029 - DNA, 120 bp, Artificial Sequence
  ENSG00000158161_45 (sequence is synthesized)
ggctccttggctagttcctaatgcactgacaggagccctcccattaaggacgacttctactcaaaatgcgactctccctctgaacttcagatgcctctgttagcaggaaaaggcattgat

SEQ ID NO: 465030 - DNA, 120 bp, Artificial Sequence
  ENSG00000158161_46 (sequence is synthesized)
tggattggatatatttatgtgactgcgggcatttgtggctgtagaatccgtgaccgtaatgttatatgtaatgggaactatcttataaacttgaaaaaaataaagtttttattttctata

SEQ ID NO: 465031 - DNA, 120 bp, Artificial Sequence
  ENSG00000158161_47 (sequence is synthesized)
ttgttctttctcacttcttaagtttatcaaacatgtttttgaagctcacagagataatgtgcactatgttatgtgccctttaattcctgagcaaaataaactaaattggccacgttaaaa

SEQ ID NO: 465032 - DNA, 120 bp, Artificial Sequence
  ENSG00000158161_48 (sequence is synthesized)
atttttcaatgacttagagacatagtcctcactcaggaactgaaagttctgtgaagaatttgacctgaatgtgttcctgccccccaggagtgtgaccaggtacatgtggaagatgtggct

SEQ ID NO: 465033 - DNA, 120 bp, Artificial Sequence
  ENSG00000158163_0 (sequence is synthesized)
aagccacgagctgaccgacgcaccgaggagctctctgtccgcggtcccgcaggttggcggcactggagtgggccgggcaggctctgcctccgccgcagagagcgcccggactgcgtgggg

SEQ ID NO: 465034 - DNA, 120 bp, Artificial Sequence
  ENSG00000158163_1 (sequence is synthesized)
ctggggaagcatcccgggaacggcgggcggtgagcattccgggaaccatctctgggctgtctggggcggtggagcaagtctggaggcgggacgtggggcgagtatgggagccgccacctc

SEQ ID NO: 465035 - DNA, 120 bp, Artificial Sequence
  ENSG00000158163_2 (sequence is synthesized)
gagacgtcttcccgccgtccccggctccaggagaccccacggccttctctcagctccttggcctactgccgtggccttggtgcccccctcctctggtggtcagctcagggcttcctctgc

SEQ ID NO: 465036 - DNA, 120 bp, Artificial Sequence
  ENSG00000158163_3 (sequence is synthesized)
ccatgcagtccccagctgccactgctgagggcctcagtggccccctctttggggcctacacgttccccaccttcaagtttcagcctcgccatgatagcatggactggagacgcattagca

SEQ ID NO: 465037 - DNA, 120 bp, Artificial Sequence
  ENSG00000158163_4 (sequence is synthesized)
ccctggatgtagaccgcgtggcccgggaactggatgtggccactctgcaggagaatattgctggcatcaccttctgcaacttggaccgggaggtgtgcagccgctgtgggcagcctgtgg

SEQ ID NO: 465038 - DNA, 120 bp, Artificial Sequence
  ENSG00000158163_5 (sequence is synthesized)
acccggcactgctcaaggtgctgcgcctggcgcagctcatcattgagtacctgctgcactgccaggattgcctgagtgccagtgttgcccagctggaggcacggctgcagaccagcctgg

SEQ ID NO: 465039 - DNA, 120 bp, Artificial Sequence
  ENSG00000158163_6 (sequence is synthesized)
gccagcagcagcgtggtcagcaggagctgggacgccaggctgacgagctcaagggtgtgcgggaggagagccgccggcgtcgcaagatgatcagcaccctgcagcagctgctaatgcaga

SEQ ID NO: 465040 - DNA, 120 bp, Artificial Sequence
  ENSG00000158163_7 (sequence is synthesized)
caggcacccacagctaccacacgtgccacctgtgtgacaagacattcatgaatgccacctttctccggggccacatccagcgcaggcatgcaggcgtggcagaaggtggaaaacagaaga

SEQ ID NO: 465041 - DNA, 120 bp, Artificial Sequence
  ENSG00000158163_8 (sequence is synthesized)
aacaggaacagccagtggaagaggtgttagaagagctacgggccaagctaaagtggacccaaggggagctggaagcccagagggaggcggagaggcagcggcagctccaggaagcagagc

SEQ ID NO: 465042 - DNA, 120 bp, Artificial Sequence
  ENSG00000158163_9 (sequence is synthesized)
tcattcatcagagggaaatagaagctaagaaagaatttgataaatggaaagagcaagagtggaccaaactttatggggaaatagataaactaaaaaaattattttgggatgaatttaaaa

SEQ ID NO: 465043 - DNA, 120 bp, Artificial Sequence
  ENSG00000158163_10 (sequence is synthesized)
atgtcgccaagcagaactctacactagaagagaaactgcgggcactgcagtcccacagtgtgatggagtccaagctgggatcactgcgagatgaggagtcagaggagtggcttcggcagg

SEQ ID NO: 465044 - DNA, 120 bp, Artificial Sequence
  ENSG00000158163_11 (sequence is synthesized)
cacgggagcttcaggccctgagagagaagacagaaattcagaaaacggagtggaaaagaaaagtgaaggaactgcatgaagagcacatggctgagaagaaagagctacaggaggagaacc

SEQ ID NO: 465045 - DNA, 120 bp, Artificial Sequence
  ENSG00000158163_12 (sequence is synthesized)
agaggctccaggcctccctgtctcaggatcagaagaaggcagctgcccagtcccagtgccagatcagcaccctccgtgcccagctgcaggaacaagctaggatcattgcctcccaggagg

SEQ ID NO: 465046 - DNA, 120 bp, Artificial Sequence
  ENSG00000158163_13 (sequence is synthesized)
agatgatccagtccttgtctctcaggaaggtggaagggatccacaaggtgccaaaggctgtggacacagaggaggactctccagaggaagagatggaggactcccaggatgaacagcaca

SEQ ID NO: 465047 - DNA, 120 bp, Artificial Sequence
  ENSG00000158163_14 (sequence is synthesized)
ctctgaggcgtaaccccactttgctgaagcacttcagaccaatcctggaggacaccctggaagagaagctcgaaagcatggggataaggaaggatgcaaagggaatctcgattcagactc

SEQ ID NO: 465048 - DNA, 120 bp, Artificial Sequence
  ENSG00000158163_15 (sequence is synthesized)
tcagacacctggaatccctgctgagagtccagcgggagcagaaggcccggaagttttctgaatttctgagtctgaggggaaagcttgtcaaggaagtcaccagcagagcgaaggagagac

SEQ ID NO: 465049 - DNA, 120 bp, Artificial Sequence
  ENSG00000158163_16 (sequence is synthesized)
aggagaatggcgctgtggtgtcccagccagacgggcagccttcagtcaaaagccagcagagcacactggtcaccagagaggcccagccaaagaccaggaccctgcaggtggccttgccat

SEQ ID NO: 465050 - DNA, 120 bp, Artificial Sequence
  ENSG00000158163_17 (sequence is synthesized)
ccacaccggcagagccacccccaccaactcgtcagagccatggcagccatggctccagcctgacccaggtgtccgcccccgctccacgccccggactgcatggaccctccagcacccctc

SEQ ID NO: 465051 - DNA, 120 bp, Artificial Sequence
  ENSG00000158163_18 (sequence is synthesized)
cttcctcggggcccgggatgagcacgcccccgttcagttctgaagaggactcagagggagaccgtgtgcagcgtgtgtctctacagcccccaaaagttccttccaggatggtgccccggc

SEQ ID NO: 465052 - DNA, 120 bp, Artificial Sequence
  ENSG00000158163_19 (sequence is synthesized)
ccaaggatgactgggactggtctgacacagagacctcggaggagaatgcccagccccctggccagggctcaggaacactggtgcagtcgatggtcaaaaacctggagaagcagctagaag

SEQ ID NO: 465053 - DNA, 120 bp, Artificial Sequence
  ENSG00000158163_20 (sequence is synthesized)
ctccagcaaagaagcctgctggaggggtcagtctgttttttatgcccaatgctgggccacagagggctgccacaccaggaaggaagcctcagctttctgaagatgagagtgacttggaga

SEQ ID NO: 465054 - DNA, 120 bp, Artificial Sequence
  ENSG00000158163_21 (sequence is synthesized)
tctcctccttggaagatcttcctctggacctggaccagagagagaaacccaagcccttgtctcgctcaaagctcccagagaagtttggcactggtccacagagctctggccaacccaggg

SEQ ID NO: 465055 - DNA, 120 bp, Artificial Sequence
  ENSG00000158163_22 (sequence is synthesized)
tccctgcctggtgattcaccccagaagctagctggctagagggttagcctggctggggccagctcaggtccacttcaacagaagaggctgctgggcctcttgtcttcacaaacaaccaag

SEQ ID NO: 465056 - DNA, 120 bp, Artificial Sequence
  ENSG00000158163_23 (sequence is synthesized)
agatcatcctcttggagagaagcagtgcagggaatggatatgatctcatccctcctgacctgtgaggggccctgctgtagatggccacaggtgcctgactaggagcccctaggtccccag

SEQ ID NO: 465057 - DNA, 120 bp, Artificial Sequence
  ENSG00000158163_24 (sequence is synthesized)
gcttgagaaagggttaaaatagaacctccaggtagttttcttcctctacctccacatccccccaagactgaaaagagtcactaactctcttttcccaagccttttataaaactgcaggaa

SEQ ID NO: 465058 - DNA, 120 bp, Artificial Sequence
  ENSG00000158163_25 (sequence is synthesized)
cactgtggagatggttcctatctggggtccttttggggacatatgcctcagtcagtcattcagtgattgatccaaaattatttactgagtgcctacctactctgcgccaggctctctagc

SEQ ID NO: 465059 - DNA, 120 bp, Artificial Sequence
  ENSG00000158163_26 (sequence is synthesized)
ctctcactactgagttagggtgcaggcagaggctggggcagaatgtttacagccagtgccagcacaaggtagtaatctagtgacagagaacagggtgttatggggagcatatgagaggcc

SEQ ID NO: 465060 - DNA, 120 bp, Artificial Sequence
  ENSG00000158163_27 (sequence is synthesized)
atctatcccagcctgggtgatcctggagagtttcccagggttgtgatatgtggcaggcctactcatgggtgggaagggaggatggccacttggctggaccttgtatccccaaaggaccac

SEQ ID NO: 465061 - DNA, 120 bp, Artificial Sequence
  ENSG00000158163_28 (sequence is synthesized)
ccacacgtgtaatttttgatattatttccaaaatcaggttttatacatagccattgtatatttttagtgtgaaaaacattaatatattatatgcaaacatttaaatatagtacaatgttt

SEQ ID NO: 465062 - DNA, 120 bp, Artificial Sequence
  ENSG00000158163_29 (sequence is synthesized)
aggtttgtaaatgattgcctggcagccaccttggaaacttggctccctcaagttctcctcttgactgcattcttgaggaagcagaagagacagacgcaagctgtggagctgagtcgggtt

SEQ ID NO: 465063 - DNA, 120 bp, Artificial Sequence
  ENSG00000158163_30 (sequence is synthesized)
cagacaagccctgctgaaatacagggagaatttagaatccccaacactaaccctgtggtgatttgctgtaaactctgtcagcgcttgcactttggtcaagaaaactcaggccttctctca

SEQ ID NO: 465064 - DNA, 120 bp, Artificial Sequence
  ENSG00000158163_31 (sequence is synthesized)
gaaaatccacgtataagtggacccatggctgttcaaccccacgttgtttcggggtcaactgtatttcaaacattttctgatcttgaattactgtaagaaactcattttacattgtgaccc

SEQ ID NO: 465065 - DNA, 120 bp, Artificial Sequence
  ENSG00000158163_32 (sequence is synthesized)
ggaaggaagcctcaggtaggatgtaggatgcttagagtttactctggaattctctacagaaccagctctgagtttggggggcctggggtgaaggttggggagggcccagcaagtgtcatc

SEQ ID NO: 465066 - DNA, 120 bp, Artificial Sequence
  ENSG00000158163_33 (sequence is synthesized)
ctttgccctagtgggacattgtgggtgacctccctctgcccctgtgcacatggagagatggccagtttggaatacttgtatccaagttaacattaaaaagccttttggttcattatataa

SEQ ID NO: 465067 - DNA, 120 bp, Artificial Sequence
  ENSG00000158163_34 (sequence is synthesized)
ctcaaagcagagttctcacaatgttctctgctggttgtaacccgctctattccacctctttgcagatccagtccttgtctctcaggaaggtggaagggatccacaaggtgccaaaggctg

SEQ ID NO: 465068 - DNA, 120 bp, Artificial Sequence
  ENSG00000158163_35 (sequence is synthesized)
gaggaggactctccagaggaaggtgggaccttactttctttcctgggtgtccagtgcagaaacagatttgctgccctcctccttgtttagtttgtctctacttaactgtatctggacatc

SEQ ID NO: 465069 - DNA, 120 bp, Artificial Sequence
  ENSG00000158163_36 (sequence is synthesized)
cgaagctggagtggagggatctaaggacatgaaataatatttcttaacaccttctgtgtgccaggcatgtgacatgcaggtactaacatacaatctgctggtttagtgatggggaagccc

SEQ ID NO: 465070 - DNA, 120 bp, Artificial Sequence
  ENSG00000158163_37 (sequence is synthesized)
ggagtcctcagggagtggcctggggtgagaccctcccataggctctaagagtctcattctcatcagtgtattccagactgaggaagaaatggggcagcagtcaggagagctcgggatttt

SEQ ID NO: 465071 - DNA, 120 bp, Artificial Sequence
  ENSG00000158163_38 (sequence is synthesized)
gagtatagcagaatttaagtgaaatggaaactacactctttaatttgttcttccatggaattgctttttctatgcaagggctgagcccccaggagagcccttgtgaagggaatgctgatt

SEQ ID NO: 465072 - DNA, 120 bp, Artificial Sequence
  ENSG00000158163_39 (sequence is synthesized)
aaaccggggcaagtccagcctctcagcaaggccaggaagccattcacttggatcctggattttactaacggattaaacgtggcattcccgccttcccccatccgttacagacctaaaaat

SEQ ID NO: 465073 - DNA, 120 bp, Artificial Sequence
  ENSG00000158164_0 (sequence is synthesized)
aacgctaacctggtccggagcgagtctgggtctcagccccgcgaacagcctttcacgagtcttcaagctttcaggctatcttctagtcaagatgagtgataagccagacttgtcggaagt

SEQ ID NO: 465074 - DNA, 120 bp, Artificial Sequence
  ENSG00000158164_1 (sequence is synthesized)
ggagaagtttgacaggtcaaaactgaagaaaactaatactgaagaaaaaaatactcttccctcaaaggaaactatccagcaagagaaagagtgtgttcaaacatcataaaatggggatcg

SEQ ID NO: 465075 - DNA, 120 bp, Artificial Sequence
  ENSG00000158164_2 (sequence is synthesized)
tcttgattttaggcttgttttttgtaaacccatgtgtttgtagagattttaggcgtcttcggatatcttctcacctatgttccctggctaagaagtcagaggtagccaatgtttccttaa

SEQ ID NO: 465076 - DNA, 120 bp, Artificial Sequence
  ENSG00000158164_3 (sequence is synthesized)
attcatttttaaacttaccattggtgcatatgttccagatggcagatgctgtcaataatctcaccattgatgacctttgtgtatgtagttcttgcatcctatactggataagcctgtttt

SEQ ID NO: 465077 - DNA, 120 bp, Artificial Sequence
  ENSG00000158164_4 (sequence is synthesized)
aacctgctatgatgggtgcttccattgcttcataatcttcatgaagttgcatgcttttgcagcttttcacagtttatttgcatttctaatgtagtaataaagtaaccaatataatcatta

SEQ ID NO: 465078 - DNA, 120 bp, Artificial Sequence
  ENSG00000158169_0 (sequence is synthesized)
agaatgcactgctgacacgtgtgcgcgcgcgcggctccactgccgggcgaccgcgggaaaattccaaaaaaactcaaaaagccaatacgaggcaaagccaaattttcaagccacagatcc

SEQ ID NO: 465079 - DNA, 120 bp, Artificial Sequence
  ENSG00000158169_1 (sequence is synthesized)
cgggcggtggcttcctttccgccactgcccaaactgctgaagcagctcccgcgaggaccacccgatttaatgtgtgccgaccatttccttcagtgctggacaggctgctgtgaagggaca

SEQ ID NO: 465080 - DNA, 120 bp, Artificial Sequence
  ENSG00000158169_2 (sequence is synthesized)
tcaccttttcgctttttccaagatggctcaagattcagtagatctttcttgtgattatcagttttggatgcagaagctttctgtatgggatcaggcttccactttggaaacccagcaaga

SEQ ID NO: 465081 - DNA, 120 bp, Artificial Sequence
  ENSG00000158169_3 (sequence is synthesized)
cacctgtcttcacgtggctcagttccaggagttcctaaggaagatgtatgaagccttgaaagagatggattctaatacagtcattgaaagattccccacaattggtcaactgttggcaaa

SEQ ID NO: 465082 - DNA, 120 bp, Artificial Sequence
  ENSG00000158169_4 (sequence is synthesized)
agcttgttggaatccttttattttagcatatgatgaaagccaaaaaattctaatatggtgcttatgttgtctaattaacaaagaaccacagaattctggacaatcaaaacttaactcctg

SEQ ID NO: 465083 - DNA, 120 bp, Artificial Sequence
  ENSG00000158169_5 (sequence is synthesized)
gatacagggtgtattatctcatatactttcagcactcagatttgataaagaagttgctcttttcactcaaggtcttgggtatgcacctatagattactatcctggtttgcttaaaaatat

SEQ ID NO: 465084 - DNA, 120 bp, Artificial Sequence
  ENSG00000158169_6 (sequence is synthesized)
ggttttatcattagcgtctgaactcagagagaatcatcttaatggatttaacactcaaaggcgaatggctcccgagcgagtggcgtccctgtcacgagtttgtgtcccacttattaccct

SEQ ID NO: 465085 - DNA, 120 bp, Artificial Sequence
  ENSG00000158169_7 (sequence is synthesized)
gacagatgttgaccccctggtggaggctctcctcatctgtcatggacgtgaacctcaggaaatcctccagccagagttctttgaggctgtaaacgaggccattttgctgaagaagatttc

SEQ ID NO: 465086 - DNA, 120 bp, Artificial Sequence
  ENSG00000158169_8 (sequence is synthesized)
tctccccatgtcagctgtagtctgcctctggcttcggcaccttcccagccttgaaaaagcaatgctgcatctttttgaaaagctaatctccagtgagagaaattgtctgagaaggatcga

SEQ ID NO: 465087 - DNA, 120 bp, Artificial Sequence
  ENSG00000158169_9 (sequence is synthesized)
atgctttataaaagattcatcgctgcctcaagcagcctgccaccctgccatattccgggttgttgatgagatgttcaggtgtgcactcctggaaaccgatggggccctggaaatcatagc

SEQ ID NO: 465088 - DNA, 120 bp, Artificial Sequence
  ENSG00000158169_10 (sequence is synthesized)
cactattcaggtgtttacgcagtgctttgtagaagctctggagaaagcaagcaagcagctgcggtttgcactcaagacctactttccttacacttctccatctcttgccatggtgctgct

SEQ ID NO: 465089 - DNA, 120 bp, Artificial Sequence
  ENSG00000158169_11 (sequence is synthesized)
gcaagaccctcaagatatccctcggggacactggctccagacactgaagcatatttctgaactgctcagagaagcagttgaagaccagactcatgggtcctgcggaggtccctttgagag

SEQ ID NO: 465090 - DNA, 120 bp, Artificial Sequence
  ENSG00000158169_12 (sequence is synthesized)
ctggttcctgttcattcacttcggaggatgggctgagatggtggcagagcaattactgatgtcggcagccgaaccccccacggccctgctgtggctcttggccttctactacggcccccg

SEQ ID NO: 465091 - DNA, 120 bp, Artificial Sequence
  ENSG00000158169_13 (sequence is synthesized)
tgatgggaggcagcagagagcacagactatggtccaggtgaaggccgtgctgggccacctcctggcaatgtccagaagcagcagcctctcagcccaggacctgcagacggtagcaggaca

SEQ ID NO: 465092 - DNA, 120 bp, Artificial Sequence
  ENSG00000158169_14 (sequence is synthesized)
gggcacagacacagacctcagagctcctgcacaacagctgatcaggcaccttctcctcaacttcctgctctgggctcctggaggccacacgatcgcctgggatgtcatcaccctgatggc

SEQ ID NO: 465093 - DNA, 120 bp, Artificial Sequence
  ENSG00000158169_15 (sequence is synthesized)
tcacactgctgagataactcacgagatcattggctttcttgaccagaccttgtacagatggaatcgtcttggcattgaaagccctagatcagaaaaactggcccgagagctccttaaaga

SEQ ID NO: 465094 - DNA, 120 bp, Artificial Sequence
  ENSG00000158169_16 (sequence is synthesized)
gctgcgaactcaagtctagaaggcacgcaggccgtgtgggtgcccggcgtgagggatcaggctcgccagggccacaggacaggtgatgacctgtggccacgcatttgtggagtaagtgcc

SEQ ID NO: 465095 - DNA, 120 bp, Artificial Sequence
  ENSG00000158169_17 (sequence is synthesized)
ctcgctgggctgtgagaatgagctgtacacatcttgggacaatctgctagtatctattttacaaaatgcagagccaggtccctcagcccagactcagtcagacatgttcactaatgactc

SEQ ID NO: 465096 - DNA, 120 bp, Artificial Sequence
  ENSG00000158169_18 (sequence is synthesized)
aagtgagccttcggtactcctggtgcccgcccggccagaccgtcagcttgataattactaaagcaaaggcctgggtgggagaacaggtttctagtttttacccaagtcaagctgcacatc

SEQ ID NO: 465097 - DNA, 120 bp, Artificial Sequence
  ENSG00000158169_19 (sequence is synthesized)
gaatttggtcatgaaccattaaagaatttagagagaacttagctctttttagactctttttaggagtcagggatctgggataaagccacactgtcttgctgtatggagaaattcttcaag

SEQ ID NO: 465098 - DNA, 120 bp, Artificial Sequence
  ENSG00000158169_20 (sequence is synthesized)
gggagtcagggtccctcaggcttcccttgtgtctccctggacctgcctgacaggccacaggagcagacagcacacccaagcccgggcctccggcacactctttccactctgtatttgcta

SEQ ID NO: 465099 - DNA, 120 bp, Artificial Sequence
  ENSG00000158169_21 (sequence is synthesized)
aatgatgctaactgctaccaaaaggcccttgggacatcagaggagccggcaggcgaaggtagaggatgtgttccagaaacattagaaggcaggattaattcagttagttagttctcttgt

SEQ ID NO: 465100 - DNA, 87 bp, Artificial Sequence
  ENSG00000158169_22 (sequence is synthesized)
attagaaggcaggattaattcagttagttagttctcttgttaaatggaaatgggaattggaaattcctgataaagaattggcctggc

SEQ ID NO: 465101 - DNA, 88 bp, Artificial Sequence
  ENSG00000158169_23 (sequence is synthesized)
ctttgggaggccaaggcagggggattacttcagcccaggagttccagactgcctggctaacatggcaatggggtgcaatggcatgcat

SEQ ID NO: 465102 - DNA, 82 bp, Artificial Sequence
  ENSG00000158169_24 (sequence is synthesized)
atctcttaaaaaaaggcattgttagtgtaatctcaaggttaacatttatttcatgtcagtacagggtgctttttcctttcag

SEQ ID NO: 465103 - DNA, 120 bp, Artificial Sequence
  ENSG00000158169_25 (sequence is synthesized)
catttatttcatgtcagtacagggtgctttttcctttcagggacattctggaattgtattggttgtacattcttttgtgtctattctgtttgtcaagtgagtcaagacttgcttttgtcc

SEQ ID NO: 465104 - DNA, 120 bp, Artificial Sequence
  ENSG00000158169_26 (sequence is synthesized)
attttgatttgtgtgtattagtctgagtcttggctccgttttgaggtatgagcaaagttttgctggattagaagttaacctttagggaaattccttattttggtatgtggcaatgctaat

SEQ ID NO: 465105 - DNA, 120 bp, Artificial Sequence
  ENSG00000158169_27 (sequence is synthesized)
agatccactgaagatctggaaaattccaggaacttttcacctgagcctttcttctgagaaatgctgcagtcagaagggtgtgctggtaaagtattttggtggcagctgccatcatggtca

SEQ ID NO: 465106 - DNA, 120 bp, Artificial Sequence
  ENSG00000158169_28 (sequence is synthesized)
ttgccttcatataacatgcttcgtgctcatggtcattgccttcatataacatgcttcgtgccatcatgatccttgccttcatataacaaacatgcttcgtcagaggtgttggggttgaaa

SEQ ID NO: 465107 - DNA, 120 bp, Artificial Sequence
  ENSG00000158169_29 (sequence is synthesized)
aaggagctgcatgcttcactggagttgagggcctctctcctgttctgactttaagccagaacttgtggctgggccatggaagctgtgactcctctgtggacatggtggcagcagggaacc

SEQ ID NO: 465108 - DNA, 120 bp, Artificial Sequence
  ENSG00000158169_30 (sequence is synthesized)
cctagagagaggggccactgggaccaggcctcctgttgtggagggactcctgggacagtcctccaccctgtcctgtggtcctgtgtacagggttggcctcttcctcctcccctgccaggc

SEQ ID NO: 465109 - DNA, 120 bp, Artificial Sequence
  ENSG00000158169_31 (sequence is synthesized)
ctctgcccatgccccttccttccttctcctgggactggtgaagctaggcatctggaagacttcttcctagcctggaagccctgacctcggcccatctgcagaatctcccagttccttcac

SEQ ID NO: 465110 - DNA, 120 bp, Artificial Sequence
  ENSG00000158169_32 (sequence is synthesized)
agctgccgagtcctctcacgggtgcggtggaggcggccttgccggtggtgctttctgggcagccaggggttcctgggtgggaggactgtccctctggggacgtggcactgaagtgcctgc

SEQ ID NO: 465111 - DNA, 120 bp, Artificial Sequence
  ENSG00000158169_33 (sequence is synthesized)
tggcttcatgtggccctttgccctttcccagcctgagagatgctcaaaggtggggagctgggggagccacccctcggccattccctccacctccaagacaggtggcggccgggcaggcac

SEQ ID NO: 465112 - DNA, 120 bp, Artificial Sequence
  ENSG00000158169_34 (sequence is synthesized)
tcttaagcccacctccccctcttgttgccttcgatttcggcaaagcctgggcaggtgccaccgggaaggaatggcatccgagatgctgggcggggacgcggcgtggccgagggggccttg

SEQ ID NO: 465113 - DNA, 120 bp, Artificial Sequence
  ENSG00000158169_35 (sequence is synthesized)
acggcgttggcggggcctgggcacaggggcagccgcagggaggcagggatggcaaggcgtgaagccaccctggaaggaactggaccaaggtcttcagaggtgcgacagggtctggaatct

SEQ ID NO: 465114 - DNA, 120 bp, Artificial Sequence
  ENSG00000158169_36 (sequence is synthesized)
gaccttactctagcaggagtttttgtagactctccctgatagtttagtttttgataaagcatgctggtaaaaccactaccctcagagagagccaaaaatacagaagaggcggagagcgcc

SEQ ID NO: 465115 - DNA, 120 bp, Artificial Sequence
  ENSG00000158169_37 (sequence is synthesized)
cctccaaccaggctgttattcccctggactccgtgacatctgtggaattttttagctctttaaaatctgtaatttgttgtctattttttcattctaaataaaacttcagtttgcacctaa

SEQ ID NO: 465116 - DNA, 120 bp, Artificial Sequence
  ENSG00000158169_38 (sequence is synthesized)
gggagccggcgctggggtcgcgcggaagggagcccccggagaggcgggagccgggtgttggcgttttggttctttttgttcattgagcgcaggcagctatgtcttcttcaaaggagagga

SEQ ID NO: 465117 - DNA, 120 bp, Artificial Sequence
  ENSG00000158169_39 (sequence is synthesized)
actatgatggcatatgtcatggcaacctgcaggcatggtgatctccagccttgtggtcagaggcgttctcctgtccccaccgaggtggccagagacgagacgctgccagcccattctcct

SEQ ID NO: 465118 - DNA, 120 bp, Artificial Sequence
  ENSG00000158169_40 (sequence is synthesized)
gcaaaacgaagacccttcttccccaaggtcatttgatctgttattgctcagctgccatatctgccccagggtcgcgtcctccaaggcgtgccctgcagaggcgggctgttctgaggggtg

SEQ ID NO: 465119 - DNA, 120 bp, Artificial Sequence
  ENSG00000158169_41 (sequence is synthesized)
tgccggcagcagagcctggccacagccagggccctgtctcgctccccagcagcccggccagggcttgcttccatcttgactgtctcctttcttggatcagtcaacagatcctcacattac

SEQ ID NO: 465120 - DNA, 120 bp, Artificial Sequence
  ENSG00000158169_42 (sequence is synthesized)
tggctttatttacatctcttactaaagtaatcagatgatattaaccactttgcttctgaaaaagaagttggtcatttcctaaataacagagcagctaagtatgggactggataactgtct

SEQ ID NO: 465121 - DNA, 120 bp, Artificial Sequence
  ENSG00000158169_43 (sequence is synthesized)
gtggcaaagacagttgttattttatgtggaatataataattacaggaagcaatgctttgattaaaggcattggcacctcccttgcaagcattgatttgctaggttcttaaaacttcaact

SEQ ID NO: 465122 - DNA, 120 bp, Artificial Sequence
  ENSG00000158169_44 (sequence is synthesized)
gccagtgctctatgctgatcttagtagttaaagaggacaaggctcattttgtatagagccctgcttctcttggctttggcattttctgttgtttgaaaacacacagactaataaagatgt

SEQ ID NO: 465123 - DNA, 120 bp, Artificial Sequence
  ENSG00000158169_45 (sequence is synthesized)
ctgcgtattttgtttaaaggcttgcatggcataggaaagaaaaatagttttagattttaaaaagttgaaatttggtgataatttattttggatcagaaataaagctttgtgaaaaaatta

SEQ ID NO: 465124 - DNA, 120 bp, Artificial Sequence
  ENSG00000158169_46 (sequence is synthesized)
ctcttactctgtgacttgctttcttcacatgacagtaactcctggactgtttctgtagcagccacacaagtctcctttatattgccaatatctatctttatcccaaagacaagatgaatg

SEQ ID NO: 465125 - DNA, 120 bp, Artificial Sequence
  ENSG00000158169_47 (sequence is synthesized)
tttattcccggagggaggcgggttcgcagaggccagtgtcttccctccattctttttgtggacgccaggccatatcttcaaagcccgtgagagatttttcagatttaatgtgtgccgacc

SEQ ID NO: 465126 - DNA, 120 bp, Artificial Sequence
  ENSG00000158169_48 (sequence is synthesized)
gaactggactaattatactttgtatattatacattcgaatttatttttgctttattcggtcatattttctcttgatttctccaaaaacgtttaccaaggcatcagaaaagaaaagcaggc

SEQ ID NO: 465127 - DNA, 120 bp, Artificial Sequence
  ENSG00000158169_49 (sequence is synthesized)
tctatattggtattttttgttttgtcctctaataaaaagcattaacttgattgattggctggttgtggaagatgtgttgctgcatgtatgtgcaactgtgcatgtacattttaaaacaaa

SEQ ID NO: 465128 - DNA, 120 bp, Artificial Sequence
  ENSG00000158169_50 (sequence is synthesized)
tggtacttttaaccagttccatatttcagcaggtagttccaataacaattatacaaatttcgtgtttatgagaaccagctacagggaggccagcctggccagtagaaagttggattgatt

SEQ ID NO: 465129 - DNA, 120 bp, Artificial Sequence
  ENSG00000158169_51 (sequence is synthesized)
atctgggccatggagagagccagaggaaactcacatgagtggtagttccaagttggtagtgttagggcctcaaatcgggctggaaatgagcaccaaatgatttttaaaagttttatttta

SEQ ID NO: 465130 - DNA, 120 bp, Artificial Sequence
  ENSG00000158169_52 (sequence is synthesized)
ggctgggatatgtgcattctctgtcttgtttgtggatcttgagtgattgacttaatgtgaaaaaatacatacaggagaagcaccttggaagttttgcaatgttttaataaaaatgcagaa

SEQ ID NO: 465131 - DNA, 84 bp, Artificial Sequence
  ENSG00000158169_53 (sequence is synthesized)
ggaggcggaaggatcacttgatcccaggagttcgagtccagcgtgggcaacagagagagccctgtctctacaaaaagttaagaa

SEQ ID NO: 465132 - DNA, 120 bp, Artificial Sequence
  ENSG00000158169_54 (sequence is synthesized)
cttgatcccaggagttcgagtccagcgtgggcaacagagagagccctgtctctacaaaaagttaagaaattagccggccatagtgatgcggggctgtggtcccagttactcgggaggctg

SEQ ID NO: 465133 - DNA, 120 bp, Artificial Sequence
  ENSG00000158169_55 (sequence is synthesized)
tcgaggccacagtgaactgtgattgcgccactgcactccacactgggcagcagactgagaccgtgtctggaaaaataaaattggtaacaattcagattggccaccagagttggactgggg

SEQ ID NO: 465134 - DNA, 120 bp, Artificial Sequence
  ENSG00000158169_56 (sequence is synthesized)
cactgcagcctcaaactcctgggctccaggaatcatgccacctcagccacctgagtaactaggactacagcttggtccatctgtacatggtcatccgttggactttgtatcccactggtt

SEQ ID NO: 465135 - DNA, 120 bp, Artificial Sequence
  ENSG00000158169_57 (sequence is synthesized)
ctgtacatggtcatccgttggactttgtatcccactggtttgagtttctcaggagaccccacccgactggaaacaggtgtccataaatgcatcagtctgagcagctatagatgaagttac

SEQ ID NO: 465136 - DNA, 120 bp, Artificial Sequence
  ENSG00000158169_58 (sequence is synthesized)
cttagagctgggcaaaaatgtctgagtgtgaacactaatgggaagagacacttgagaatcaaacaacaaatcagtttgagaacaagacgacacagaggaatcagcggtggcccactgtgc

SEQ ID NO: 465137 - DNA, 120 bp, Artificial Sequence
  ENSG00000158169_59 (sequence is synthesized)
agaaggtagtaataaattacctgtagaatcaaggagagaaagaggcagaaataacttggagccaagtcacaaggcaagaagaagcttcctaatattttaataactaatgtgttcctcagc

SEQ ID NO: 465138 - DNA, 120 bp, Artificial Sequence
  ENSG00000158169_60 (sequence is synthesized)
caacaaaataaaacatttcttaatactcctgaagcctgtttcagcacaaaagctgaaaatgaccggtaggatattttgctctttggagaagttagcaacttttcattataagtcctggta

SEQ ID NO: 465139 - DNA, 120 bp, Artificial Sequence
  ENSG00000158169_61 (sequence is synthesized)
gaaacctgatgcctattacattagagttggattctgagagtaattaaagtgtgatggtctacataacttgtgttttatatagagcactgttaattatatttctctctcttgggactatgc

SEQ ID NO: 465140 - DNA, 120 bp, Artificial Sequence
  ENSG00000158169_62 (sequence is synthesized)
aaactataccggtgactctcctggttatctgggcatttgctctcttgtgtctctgacttgctggctactgtaatggtgttagctgattccttataataaatccctgtgtgtgtgtgtgtc

SEQ ID NO: 465141 - DNA, 120 bp, Artificial Sequence
  ENSG00000158169_63 (sequence is synthesized)
ttctttttgtggacgccaggccatatcttcaaagcccgtgagagatttttcaggtgctgtttgttggtttgctctttttaattttttagatttaatgtgtgccgaccatttccttcagtg

SEQ ID NO: 465142 - DNA, 120 bp, Artificial Sequence
  ENSG00000158169_64 (sequence is synthesized)
cccctcccggtctgtggaaacattgccttccaagaaaccggtacctggtgccgagaaagttacggaccctgctataaaggatctgttttggaacacaaatgggcattttcatctggcatc

SEQ ID NO: 465143 - DNA, 120 bp, Artificial Sequence
  ENSG00000158169_65 (sequence is synthesized)
atctcatactttgagctctggccaaaaagatagggaaccagggactgggccagtgaagctccccccagctcccagggctaccggaggccagcttctgcagactcaaataatcagaaccca

SEQ ID NO: 465144 - DNA, 120 bp, Artificial Sequence
  ENSG00000158169_66 (sequence is synthesized)
tcaccgaaatattcaaggagaaattagataacttttattcttcttcatgaacccccttttcatcttaacgcaagctgttaagtgcattaagatgtgatgtgatttagtccagcgtggtag

SEQ ID NO: 465145 - DNA, 120 bp, Artificial Sequence
  ENSG00000158169_67 (sequence is synthesized)
tggtcactggtttgccaataataattctaaattgttatgtacccattaccgaataaacaggctgcaggcacgggcctgacctcgaggcacatctagccatttgaggaggtcacacaggca

SEQ ID NO: 465146 - DNA, 120 bp, Artificial Sequence
  ENSG00000158169_68 (sequence is synthesized)
cacttcagtagaactggcagtacaggcaggctccacggcatgcgggcagagggatgtttaaagtttctctaatacttactgattctgtattatggatcgcctgagcttttatagaaaatg

SEQ ID NO: 465147 - DNA, 120 bp, Artificial Sequence
  ENSG00000158169_69 (sequence is synthesized)
tgggacatacaggagtatacagaggaataagctgcctgtaacccctgcccagggagaccaccgtatgcacttgtatgtggggcgttttcagtacagcagtggttcgttcttctaaccaaa

SEQ ID NO: 465148 - DNA, 120 bp, Artificial Sequence
  ENSG00000158169_70 (sequence is synthesized)
accactcccaaatctacttcacacatggtttccctagatcctcatctgccctttgagcagggctgacagaggaaggcattactggtctgggaccatcaccaaacaggtgagcaccatggt

SEQ ID NO: 465149 - DNA, 120 bp, Artificial Sequence
  ENSG00000158169_71 (sequence is synthesized)
gaagtgagaagtggaggaagcgcatggctgcacggatggcttggagcaggtcaggatgaataggcatgcgcatgtatgcatgtgccaatacctgtatcgaaatgttttctacattaacgt

SEQ ID NO: 465150 - DNA, 120 bp, Artificial Sequence
  ENSG00000158169_72 (sequence is synthesized)
ctggttttagattttgaaatatacaggcataacaataaaaagaagaggccttggaaaaagcagcacccacctgctgggaacccctccctggccgcacagaagggaaagggcacttgtttg

SEQ ID NO: 465151 - DNA, 120 bp, Artificial Sequence
  ENSG00000158169_73 (sequence is synthesized)
ggtcctgtggtcttccctctacctctctagggaaggagatttgaaactcctacacagtagggtggaatgttaaatgcttgcttttccttctctctaataaatctctctaaaatgagaaaa

SEQ ID NO: 465152 - DNA, 76 bp, Artificial Sequence
  ENSG00000158169_74 (sequence is synthesized)
tgtggagatttaatgtgtgccgaccatttccttcagtgctggacaggctgctgtgaagggacatcaccttttcgct

SEQ ID NO: 465153 - DNA, 120 bp, Artificial Sequence
  ENSG00000158169_75 (sequence is synthesized)
aaagaagagctgctcagctgaggcagttttgctgccgaggggatttgagcaatgtctggggacgtgtggttgtcacaacttgtgagggggctcctggcattgaggaggtagaaggcggga

SEQ ID NO: 465154 - DNA, 120 bp, Artificial Sequence
  ENSG00000158169_76 (sequence is synthesized)
gatcggtttaaacctgcttatcttaatggtgtttcaacagccttattaaggggcttgaccaatatgtagtttatcaacaccagcctttggtgtagtggggtgagttgtgctcctgttgga

SEQ ID NO: 465155 - DNA, 120 bp, Artificial Sequence
  ENSG00000158169_77 (sequence is synthesized)
gaagcagattctagggccccacccacagagtgcatacttgagaggcagaggtgtgaacattgcccttgagctcaggagctccacagcagcctgagcaacatactgagagcccatctccta

SEQ ID NO: 465156 - DNA, 120 bp, Artificial Sequence
  ENSG00000158169_78 (sequence is synthesized)
aaaaacaaaaacaaaaaagtgctgaataataagtccattttaaacatatgataagatttcagattttctgaggaaaaaattaattagacttggcttcttctctgacttgaaattagcaat

SEQ ID NO: 465157 - DNA, 120 bp, Artificial Sequence
  ENSG00000158169_79 (sequence is synthesized)
acttttatacatctcaaagtgtggtttatgaaagaggcaaaattgtcaatgactacttgttgaattttgcttcctaaccatgtaatggggacaagtgtttccgaaaacatgttttatatg

SEQ ID NO: 465158 - DNA, 120 bp, Artificial Sequence
  ENSG00000158169_80 (sequence is synthesized)
gttagttttcctgcagatgggaattgttcgctgaattatactttgtccacttaggcttaggtagatatggattctgtgaaagtggaaatcattgaacagtttaaatactggattaaaaga

SEQ ID NO: 465159 - DNA, 120 bp, Artificial Sequence
  ENSG00000158169_81 (sequence is synthesized)
aaaggaactatggtaattgcagatctgttagatggaatctgtcgtgccctaataagagtgataaggaagaccattaactgttggaagcaagttgttgggttcgaggttgggaattgggca

SEQ ID NO: 465160 - DNA, 120 bp, Artificial Sequence
  ENSG00000158169_82 (sequence is synthesized)
tgatttgtttcctgtgtcactgcttaggttaatttactcagactgccatttttgtgttggaaggaaataaggtctaggccctaagcttagactgtcttcatgcctaaagaagtccaacca

SEQ ID NO: 465161 - DNA, 120 bp, Artificial Sequence
  ENSG00000158169_83 (sequence is synthesized)
ttcattattacttcgctaaaggatgcattaacatgaatatatataataaagataatgactccttttttctcaacaaattttaaattaacttaaacatgcctgattttcagaaagaattaa

SEQ ID NO: 465162 - DNA, 120 bp, Artificial Sequence
  ENSG00000158169_84 (sequence is synthesized)
aagtaaaaccatacctttaatttaggactgacttctgcatttcgattgtagattattctaatatgaagagtgctatttgcatgttggaatatcttttaattcttaatttgtaagttacaa

SEQ ID NO: 465163 - DNA, 120 bp, Artificial Sequence
  ENSG00000158169_85 (sequence is synthesized)
ggcttcctttccgccactgcccaaactgctgaagcagctcccgcgaggaccacccgggtcttgccctgtcaaccaggagtgcagtggcacgaacatagctcactgcagcctcaaactcct

SEQ ID NO: 465164 - DNA, 120 bp, Artificial Sequence
  ENSG00000158169_86 (sequence is synthesized)
agaaagtcaagaaatttccattccgcccatttgggtttgtgtgaaatcgagtgtaaattcggccgctgcctagctccctctctcaggggccagtgcttacccgtttctgggggttgtttc

SEQ ID NO: 465165 - DNA, 120 bp, Artificial Sequence
  ENSG00000158169_87 (sequence is synthesized)
gtgctgggcctggcgtcactgcctctgtggatgtccttgaggtgaagaacatgggtgcaaagaccaagcgtgtccccgcccaggatgtgtcctgcctgtgagaaggcctgtcccactcat

SEQ ID NO: 465166 - DNA, 120 bp, Artificial Sequence
  ENSG00000158169_88 (sequence is synthesized)
cctgacagatgttgaccccctggtggaggctctcctcatctgtcatggacgtgaacctcaggaaatcctccagccagagttctttgaggctgtaaacgaggccattttgctttgcaggga

SEQ ID NO: 465167 - DNA, 120 bp, Artificial Sequence
  ENSG00000158169_89 (sequence is synthesized)
agacacccagtgttgttgggggaagactcctgtaagtatatagattatcgagagagctggcgttttcatgatgttaaggctgtctgtccgcctgttcaagaacacatacgttttaccatt

SEQ ID NO: 465168 - DNA, 120 bp, Artificial Sequence
  ENSG00000158169_90 (sequence is synthesized)
tgttaagcttttgtgatctgaagggagtgttgtatatatttttcacacattggatttacacatttcttgttcctaatgttttgttgtatttgtgttttcaatgttttcactgtcataaat

SEQ ID NO: 465169 - DNA, 120 bp, Artificial Sequence
  ENSG00000158169_91 (sequence is synthesized)
gggccgggtgcgcgggcacaaaggggccgctgcacatggcaggcaggcgagcagatgccagcagacagctttttgttttgtggaaggtagtacttgcaagggatgaaactggatatttta

SEQ ID NO: 465170 - DNA, 120 bp, Artificial Sequence
  ENSG00000158169_92 (sequence is synthesized)
ctgaggagatttctaagcaaaatgtcgaagaagtgacttggttcctcccagttgattgtagtaaaatgcaagaagagagaaatgaattgaaaaaggaattgttgagcaaaaatgaaccag

SEQ ID NO: 465171 - DNA, 120 bp, Artificial Sequence
  ENSG00000158169_93 (sequence is synthesized)
agtttaaagatttggaaaattctctgtctgttcatatgacgaaaaatgagaaagtgtgtactgaagagaacactaagggtgtggtggaccaaccatttcataaagagattagtgtggctg

SEQ ID NO: 465172 - DNA, 120 bp, Artificial Sequence
  ENSG00000158169_94 (sequence is synthesized)
tgtaccatgaacttaatcagccatttcaacagaggccgggaatacagatgggattacacctgcagagacactgctggctgggactaaaaaaaacagaacatggaatggaatgaaggaagg

SEQ ID NO: 465173 - DNA, 120 bp, Artificial Sequence
  ENSG00000158169_95 (sequence is synthesized)
ccgtgactttgtgctatcatctagtaaaagggatgaagggccccgaggcaatttggaggtcctctgcctccaatttgaaggactattgccctggtttcaatagtccagacagcttccaac

SEQ ID NO: 465174 - DNA, 120 bp, Artificial Sequence
  ENSG00000158169_96 (sequence is synthesized)
taccctagtggctccagaaggcagggcatcaaaccaaggattactcccaagccttaagatttcatggagtttgctttgtagtttggacttgcttgggactgggtcaccccttccttctgt

SEQ ID NO: 465175 - DNA, 120 bp, Artificial Sequence
  ENSG00000158169_97 (sequence is synthesized)
gtttcttgcttttggaatgggaatgcctatcctatgcctgtcccaccaatgtattttggaagtatacaacttgtttggtttcacagattcgcagctggagaggaattttgccccaggatg

SEQ ID NO: 465176 - DNA, 120 bp, Artificial Sequence
  ENSG00000158169_98 (sequence is synthesized)
aatcataactcaagtctcactgtacctaatttagaagatatttagaaaagactttggactttagacattagcgttgttgctggaatgagttaagactttggaggatggaatgaatgtaca

SEQ ID NO: 465177 - DNA, 120 bp, Artificial Sequence
  ENSG00000158169_99 (sequence is synthesized)
gatgctccttgacttagaatggggttatgtcccaataaacccattgtaagtaaaaaaatatataagtaaaaatgcattcagtaccctgataaacccatggtaaagtcaaaaaatcagaag

SEQ ID NO: 465178 - DNA, 120 bp, Artificial Sequence
  ENSG00000158169_100 (sequence is synthesized)
atgcttttcaacttacaatggggttatttatttcctgatagacccatcgcaaaatttaaaaattgtaagttgaaccatcatatgttgaggacaatgtgtatttggcacatgagaaggaca

SEQ ID NO: 465179 - DNA, 120 bp, Artificial Sequence
  ENSG00000158169_101 (sequence is synthesized)
tgaattttggggggccaggggtagaatgctatggactgaacttatgtgtctccctaaaattcgtacgttatgaccctagttcctaatgtgatgaggaaataaatgttcattgtttaggcc

SEQ ID NO: 465180 - DNA, 82 bp, Artificial Sequence
  ENSG00000158186_0 (sequence is synthesized)
aattgtacacttcaaaaggtggaattttatggtgttgaattatatctttatttttttaacggggggaaaatgacgccgctgg

SEQ ID NO: 465181 - DNA, 120 bp, Artificial Sequence
  ENSG00000158186_1 (sequence is synthesized)
tatctttatttttttaacggggggaaaatgacgccgctggagaggagttagcggaactgaaacaatgaaatggtgcgcgagtgtcgcctgtccccgtcgcatccatcccaacgaagtttg

SEQ ID NO: 465182 - DNA, 120 bp, Artificial Sequence
  ENSG00000158186_2 (sequence is synthesized)
ggccctggaacggtgcacccagaaggcctgcggggagagacgctggggcatgatctggaagaaagacgtctcaggattcgaagggaatgcagctaaggtggcggcggaggttcgcctagg

SEQ ID NO: 465183 - DNA, 120 bp, Artificial Sequence
  ENSG00000158186_3 (sequence is synthesized)
actggggaggcgtccctaggctcagaagttggcccggccggagcggagatttaaaggttggagcgcagaggctcttaaagaggccgagtcgaattcccactcggcgtccaccttaaagcc

SEQ ID NO: 465184 - DNA, 120 bp, Artificial Sequence
  ENSG00000158186_4 (sequence is synthesized)
agctccccggcaccacggatctgacccgggtctgacctacgagaaacatggcaaccagcgccgtccccagtgacaacctccccacatacaagctggtggtggtgggggatgggggtgtgg

SEQ ID NO: 465185 - DNA, 120 bp, Artificial Sequence
  ENSG00000158186_5 (sequence is synthesized)
gcaaaagtgccctcaccatccagtttttccagaagatctttgtgcctgactatgaccccaccattgaagactcctacctgaaacatacggagattgacaatcaatgggccatcttggacg

SEQ ID NO: 465186 - DNA, 120 bp, Artificial Sequence
  ENSG00000158186_6 (sequence is synthesized)
ttctggacacagctgggcaggaggaattcagcgccatgcgggagcaatacatgcgcacgggggatggcttcctcatcgtctactccgtcactgacaaggccagctttgagcacgtggacc

SEQ ID NO: 465187 - DNA, 120 bp, Artificial Sequence
  ENSG00000158186_7 (sequence is synthesized)
gcttccaccagcttatcctgcgcgtcaaagacagggagtcattcccgatgatcctcgtggccaacaaggtcgatttgatgcacttgaggaagatcaccagggagcaaggaaaagaaatgg

SEQ ID NO: 465188 - DNA, 120 bp, Artificial Sequence
  ENSG00000158186_8 (sequence is synthesized)
cgaccaaacacaatattccgtacatagaaaccagtgccaaggacccacctctcaatgtcgacaaagccttccatgacctcgttagagtaattaggcaacagattccggaaaaaagccaga

SEQ ID NO: 465189 - DNA, 120 bp, Artificial Sequence
  ENSG00000158186_9 (sequence is synthesized)
agaagaagaagaaaaccaaatggcggggagaccgggccacaggcacccacaaactgcaatgtgtgatcttgtgacaggcctgaggccctgggcacagtgacggtggcctggccagccctc

SEQ ID NO: 465190 - DNA, 120 bp, Artificial Sequence
  ENSG00000158186_10 (sequence is synthesized)
gggacccctccccacctaactgcactgaaaccatttctaaccacaacccttggcccaaggacttggtacaggaagggagaagggcaggtgggcagggagcagacagggtctggctttgcc

SEQ ID NO: 465191 - DNA, 120 bp, Artificial Sequence
  ENSG00000158186_11 (sequence is synthesized)
cagagggcacgggctttcccacctctcaaagagacaaggaagccacctgtaagcagaagcagcatccaagtgcccctggcccccccatgtgttgattcaacccggttcctccccctctct

SEQ ID NO: 465192 - DNA, 120 bp, Artificial Sequence
  ENSG00000158186_12 (sequence is synthesized)
cggtgggtgtgttgtttattgtaactacatagtgttggtttgatgtggaagtgtttatccacatacaaagtacaaaacaagccatgaacaagcttctttcccttaccccccatccacaat

SEQ ID NO: 465193 - DNA, 120 bp, Artificial Sequence
  ENSG00000158186_13 (sequence is synthesized)
gtctgagcttggatgtcttttatagatttttaaattattttagtgattattattttattaaaggggtctgggctcactgcctggtgaagtttcaagtgttcagcagacctctctggtaac

SEQ ID NO: 465194 - DNA, 120 bp, Artificial Sequence
  ENSG00000158186_14 (sequence is synthesized)
atatctggaatattgttgttgttttttaaccgagttttcccatcagtgccaaaactcaactcaatctgaaagtagagtgtctgagaggacagaaggtaatgggaactgtagctggaggcc

SEQ ID NO: 465195 - DNA, 120 bp, Artificial Sequence
  ENSG00000158186_15 (sequence is synthesized)
tcaggccatgggtcaaacctgggagggaaagagaccctacacatggcctagaaatgagagaagagagaggtatttacccagaggattttcctatggttggggatgcaaatattagaaaac

SEQ ID NO: 465196 - DNA, 120 bp, Artificial Sequence
  ENSG00000158186_16 (sequence is synthesized)
agattgtattttgctgaggggagtggctgtcatgagcatgtcagttctaaaaggggttttcattatcctggaaatgtataaactaaagtaagctgattggctttgcaaacatgttcattt

SEQ ID NO: 465197 - DNA, 120 bp, Artificial Sequence
  ENSG00000158186_17 (sequence is synthesized)
ctgtgctgcttggtgcctctctgatacgaatacactgacacgtcaaagtaacctaatgtggacaccatccagaaaactccagttcatgctggatcttaaccaaaaatgattcaatactgt

SEQ ID NO: 465198 - DNA, 120 bp, Artificial Sequence
  ENSG00000158186_18 (sequence is synthesized)
tatcactaaaacagcaccaagacctgaagccatcttcccttggagtcaactgactaccacctctataagcctagtcaatgagcagaccccttccagtatttgtaaaagtagtactaggtt

SEQ ID NO: 465199 - DNA, 120 bp, Artificial Sequence
  ENSG00000158186_19 (sequence is synthesized)
gcctttttggcaatttttattgacctgttgaatcttgactataaaatgatctgagaagtaaggaaggctgggctgatgtgtggctctcatataccttctgcaagggggcagtctccccag

SEQ ID NO: 465200 - DNA, 120 bp, Artificial Sequence
  ENSG00000158186_20 (sequence is synthesized)
ctccctgatgatgctcacccccgcccccccacctcaggtgctgctggtgtgagccaaagactggagtttttccagctggggtgggagtggagagacaacaggaacaacgctgcaccaaag

SEQ ID NO: 465201 - DNA, 120 bp, Artificial Sequence
  ENSG00000158186_21 (sequence is synthesized)
aaaaggtcagaataaaaggcagcacagctggtgaccttattttctagatgttacaaatcaggtcactatgcaaactagaatatcctcagcaggtggcctggccactctggagaaagaaac

SEQ ID NO: 465202 - DNA, 120 bp, Artificial Sequence
  ENSG00000158186_22 (sequence is synthesized)
ccaaggaaagtgagcacccaactggatgccaagacacccgggttctgaaaatgtgctgtgttcctacctcggcaagatcaccagcactgaggggcccagctggagaatgattctgctaca

SEQ ID NO: 465203 - DNA, 120 bp, Artificial Sequence
  ENSG00000158186_23 (sequence is synthesized)
aaaggagacagttgagacttttgcttgttggaaatcaaacttcttatttgtctaaattgcccctttttctgttcctaaaaggaaggataagagagaacattccaggtgaggcacttcaaa

SEQ ID NO: 465204 - DNA, 120 bp, Artificial Sequence
  ENSG00000158186_24 (sequence is synthesized)
gtttccttagaccctatagtgttaagaggtattttaaacactaaaaggacaaagctcttcccaatccttatgcttccctaagtggtatctgcagcagtttgttgtgtgcagtttgatggc

SEQ ID NO: 465205 - DNA, 120 bp, Artificial Sequence
  ENSG00000158186_25 (sequence is synthesized)
agctgcaaactggaggtgaggcggaggaaaggcaggtaggaaggagtaaggatggagatgctcagaatcaagagcatggcggagtaggagaagaagccctgcacacagggcagtgtccac

SEQ ID NO: 465206 - DNA, 120 bp, Artificial Sequence
  ENSG00000158186_26 (sequence is synthesized)
agccagaaaactcctgctgggcaccaaccactacgagcataccccatgcccaccgtggagctgcaactcctcgacagcactgagtttgatagtctcactggaagcagatcagctgatgta

SEQ ID NO: 465207 - DNA, 120 bp, Artificial Sequence
  ENSG00000158186_27 (sequence is synthesized)
gaacagagacctcggccataaaggtgagaagacatagggatttcaaccacacagttgggacagaagggacagtgcatctgttcatccatcctgcacttggcccacgttgaactccatggt

SEQ ID NO: 465208 - DNA, 120 bp, Artificial Sequence
  ENSG00000158186_28 (sequence is synthesized)
gcctgagagagactagttaagggttggtcttctgtatcctctgctgttgagcctctggtaagctttcatctcccatgaactcatttccccataaatgaaatgggtaaataatgccccatt

SEQ ID NO: 465209 - DNA, 120 bp, Artificial Sequence
  ENSG00000158186_29 (sequence is synthesized)
tgtagaagtgggccctcatgactgaggtagcttccagataggccagagtagagtgtagagtgtgccccgtgacatccctccatcttctcctccattatcatctagcagggtcagactggg

SEQ ID NO: 465210 - DNA, 120 bp, Artificial Sequence
  ENSG00000158186_30 (sequence is synthesized)
aaacctggttggccacgccacaccatgaccgaggagccaactgggacttctggctgtttgacatcctcatgttcccgttggtcttccggagaatagtgctaccctcacatcccctggagc

SEQ ID NO: 465211 - DNA, 120 bp, Artificial Sequence
  ENSG00000158186_31 (sequence is synthesized)
acagccttcctgaaatgccctcaccccatgcctttgccattgtgtgctctcagatttcttccactgtttgacaccctccttagagggctgctcttttttttccagagataatcctagcca

SEQ ID NO: 465212 - DNA, 120 bp, Artificial Sequence
  ENSG00000158186_32 (sequence is synthesized)
tcctctccactcccacggctggggacaatggccacttactacctgtgcactttgccactcgggacacctggatggtttctcttaggactttgcccacctccttctcatggcacttgctgt

SEQ ID NO: 465213 - DNA, 120 bp, Artificial Sequence
  ENSG00000158186_33 (sequence is synthesized)
ggaaaatgcctggctggcctcgtggggcctgtctcacttttccaggagacatgacccactaacgtggcaactttaacccaaaggcccctcagacatgttacagcaaatctggagccacag

SEQ ID NO: 465214 - DNA, 120 bp, Artificial Sequence
  ENSG00000158186_34 (sequence is synthesized)
acaggttccctccattggcagcccattgtgtttgaaattccatgtcgggtttacttggaatgaaagatacttgaattattgtgcgcctgtgagcgcccagcttctgtttcatagtcttaa

SEQ ID NO: 465215 - DNA, 120 bp, Artificial Sequence
  ENSG00000158186_35 (sequence is synthesized)
caggtggccattgtcgtgaaacgagtgatgcctgaagatctcagtgatgtttgaaccttctgtgtaactttttattaagtctttgtatctctcgactgattaataaagaagagaaacacg

SEQ ID NO: 465216 - DNA, 80 bp, Artificial Sequence
  ENSG00000158186_36 (sequence is synthesized)
ggggcgcacgctggcggcgcggtcgctttaaggaggcgccggggcggggacggaccggagtggccggctggcggggagcc

SEQ ID NO: 465217 - DNA, 120 bp, Artificial Sequence
  ENSG00000158186_37 (sequence is synthesized)
gctgtggtcacaactagggcctgggctcatgcattgaactgatctggctgaggcatcagacacggtgccagtcctgccctgcggggaagacaagagcacaaagtgacaagccagtgtggt

SEQ ID NO: 465218 - DNA, 63 bp, Artificial Sequence
  ENSG00000158186_38 (sequence is synthesized)
ctcactagatcacaggcacgtgccgccatgccgggttgacttttgtatttttagtagagacgg

SEQ ID NO: 465219 - DNA, 120 bp, Artificial Sequence
  ENSG00000158186_39 (sequence is synthesized)
gatggcgttaacgaggggagggatccgccagggagttgacaaattcatctgaataataaaacgcagcctgcttcataaacaacccttcactgcccccggaggtttggggagctggagctg

SEQ ID NO: 465220 - DNA, 120 bp, Artificial Sequence
  ENSG00000158186_40 (sequence is synthesized)
tggtcacaactagggcctgggctcatgcattgaactgatctggctgaggcatcagacacggtgccagtcctgccctgcggggaagacaagagcacaaagtgacaagccagtgtggactca

SEQ ID NO: 465221 - DNA, 120 bp, Artificial Sequence
  ENSG00000158186_41 (sequence is synthesized)
ctctgtcctggacctgaccagagagggtggctgacaaggctcggaatcgtggcctccagaggtttgtctggcagcagaagtaagatggagatatgactttaagagctctgaaactccact

SEQ ID NO: 465222 - DNA, 120 bp, Artificial Sequence
  ENSG00000158186_42 (sequence is synthesized)
gtaataacagcaaccaacagggcttccaaagaccaggcacttgaagtggatttgctcatcatttgacaagacacctcttgacaagacacctccagaaggattttgtttattgtaaaggat

SEQ ID NO: 465223 - DNA, 120 bp, Artificial Sequence
  ENSG00000158186_43 (sequence is synthesized)
tgaaaaagagccaacagcttgcccaagatcatatctgaagtccatgcttttggccacgtggctgtcctgggcttcggaaggctctggtgcagcctgtgttagagttttgtaatatattgt

SEQ ID NO: 465224 - DNA, 120 bp, Artificial Sequence
  ENSG00000158186_44 (sequence is synthesized)
tttataattattcactatagacattcactggtgggttgaagtgtgaggcagtgagctgtgggtattaataactgactcgtgtcagaagcttagcagtgaacaaagcactttctcggatac

SEQ ID NO: 465225 - DNA, 120 bp, Artificial Sequence
  ENSG00000158186_45 (sequence is synthesized)
ggttcttagagcttctcctgcttcttttcccggggaagaaacttgagctgctaacattttgtaaacctcctaatttcctgtaaatcacatgtccctgctgagtggggctgaaaatgtttc

SEQ ID NO: 465226 - DNA, 120 bp, Artificial Sequence
  ENSG00000158186_46 (sequence is synthesized)
gggcaatggttttcacccttaggtctgttcacactgcccagcagccagttagcttctctctgtagtttatggtgtagtttgtcctttttctgccggggtgggaggcatggggctttcatg

SEQ ID NO: 465227 - DNA, 120 bp, Artificial Sequence
  ENSG00000158186_47 (sequence is synthesized)
accggctgtgcgtggcgttttgcccccatcgcgggctcccgcgtaacggtgtgcgttcgtgaaatcggccacgaccaagaccccagtggggagggcctgcgcgccgctcagagagaccct

SEQ ID NO: 465228 - DNA, 120 bp, Artificial Sequence
  ENSG00000158186_48 (sequence is synthesized)
ggatagaatcagaatgtatttttgataaatgaaacagtctttcatcttcaagtatataaaaagatcactttattctatttttagggagctattaaatatctctgtgcctagagaacaaga

SEQ ID NO: 465229 - DNA, 120 bp, Artificial Sequence
  ENSG00000158186_49 (sequence is synthesized)
gctattgggggctggggcttctgtggggggttttgaaagcacctgggttcctcagaacctctgggcatttttaagggtgtaacagggctttgaggatctctgtgccactttgatcaagtt

SEQ ID NO: 465230 - DNA, 120 bp, Artificial Sequence
  ENSG00000158186_50 (sequence is synthesized)
gagctttgccttccagattccgtacatagaaaccagtgccaaggacccacctctcaatgtcgacaaagccttccatgacctcgttagagtaattaggcaacagattccggaaaaaagcca

SEQ ID NO: 465231 - DNA, 120 bp, Artificial Sequence
  ENSG00000158195_0 (sequence is synthesized)
gcccagggcggggaatcgcgtaatggcggacacaggcagggcgagcgcggctgggggcgtagcgcgctgagggggtccggccgtttggcagcccgcgaggcggtccgcgggagcacactc

SEQ ID NO: 465232 - DNA, 120 bp, Artificial Sequence
  ENSG00000158195_1 (sequence is synthesized)
tgtgcggagactgggcggccggccgacccttcctgtcgctgacggcgactgcgggaggccaggttgtttttcaccattcagaacattgcctgaagcaggtccaccatgccgttagtaacg

SEQ ID NO: 465233 - DNA, 120 bp, Artificial Sequence
  ENSG00000158195_2 (sequence is synthesized)
aggaacatcgagccaaggcacctgtgccgtcagacgttgcctagcgttagaagcgagctggaatgcgtgaccaacatcaccctggcaaatgtcatccgacagctgggcagcctgagtaaa

SEQ ID NO: 465234 - DNA, 120 bp, Artificial Sequence
  ENSG00000158195_3 (sequence is synthesized)
tatgcagaggacatttttggagagctctttactcaggcaaatacctttgcctctcgggtaagctcccttgctgagagggtcgaccgactacaggttaaagtcactcagctggatcccaag

SEQ ID NO: 465235 - DNA, 120 bp, Artificial Sequence
  ENSG00000158195_4 (sequence is synthesized)
gaagaagaagtgtcactgcaaggaatcaacacccgaaaagccttcagaagttccaccattcaagaccagaagctttttgacagaaactctctcccagtgcctgtcttagaaacatacaat

SEQ ID NO: 465236 - DNA, 120 bp, Artificial Sequence
  ENSG00000158195_5 (sequence is synthesized)
acctgtgatactcctccccctctcaacaatcttaccccttacagggacgatggaaaagaggcactcaaattctacacagacccttcatacttctttgatctttggaaggagaagatgctg

SEQ ID NO: 465237 - DNA, 120 bp, Artificial Sequence
  ENSG00000158195_6 (sequence is synthesized)
caggacaccaaggatatcatgaaagagaagagaaagcataggaaagaaaagaaagataatccaaatcgagggaatgtaaacccacgtaaaatcaagacacgtaaggaagagtgggagaaa

SEQ ID NO: 465238 - DNA, 120 bp, Artificial Sequence
  ENSG00000158195_7 (sequence is synthesized)
atgaagatggggcaagaatttgtggagtccaaagaaaagctggggacttctgggtatccacccactttggtgtaccagaatggcagcattggctgtgttgaaaacgtggatgcaagtagc

SEQ ID NO: 465239 - DNA, 120 bp, Artificial Sequence
  ENSG00000158195_8 (sequence is synthesized)
tatccgccaccaccacagtcagactctgcttcttcaccttctccttccttctccgaggacaacttgcctcctccaccagcagaattcagttacccagtggacaaccaaagaggatctggt

SEQ ID NO: 465240 - DNA, 120 bp, Artificial Sequence
  ENSG00000158195_9 (sequence is synthesized)
ttggctggacccaaaagatccagtgtggtcagcccaagccatccaccaccagctcctcctctaggctctccaccaggccctaaacccgggtttgctccaccacctgcccctccgccacct

SEQ ID NO: 465241 - DNA, 120 bp, Artificial Sequence
  ENSG00000158195_10 (sequence is synthesized)
ccgcctccaatgataggcatcccacctccaccaccgcctgtaggatttgggtctccagggacgcctccaccaccctcacccccatctttcccacctcaccctgattttgctgcccctcca

SEQ ID NO: 465242 - DNA, 120 bp, Artificial Sequence
  ENSG00000158195_11 (sequence is synthesized)
cctcctcctccaccaccagcagctgactacccaactctgccaccacctcccttgtcccagccaacaggaggagcacctcctcctccccctcctcctcctcctccggggccccctcctccc

SEQ ID NO: 465243 - DNA, 120 bp, Artificial Sequence
  ENSG00000158195_12 (sequence is synthesized)
cctttcactggtgcagatggccagcctgctataccaccaccgctttctgataccaccaagcccaagtcctccttgcctgccgtgagcgatgcccgtagcgacctgctttcagccatccgt

SEQ ID NO: 465244 - DNA, 120 bp, Artificial Sequence
  ENSG00000158195_13 (sequence is synthesized)
caaggttttcagctgcgcagggttgaggagcagcgggaacaagagaagcgggatgttgtgggcaatgacgtggccaccatcttgtctcgtcgcattgctgttgagtacagtgactcagaa

SEQ ID NO: 465245 - DNA, 120 bp, Artificial Sequence
  ENSG00000158195_14 (sequence is synthesized)
gatgactcctctgaatttgatgaggacgactggtccgattaactctttctgcctgctgcccaccttctttttctttccttcctacctgccttctttgatgccaaccccaacagacccgta

SEQ ID NO: 465246 - DNA, 120 bp, Artificial Sequence
  ENSG00000158195_15 (sequence is synthesized)
gggggagaaaagggaggaaaaaagtaattttaaggggccaaagctttccctgaagcaaccaaagatatatccaagtgcttcctccaagtcaacatgtatttcctctccccattttcaggc

SEQ ID NO: 465247 - DNA, 120 bp, Artificial Sequence
  ENSG00000158195_16 (sequence is synthesized)
cctgtggggctcctgaggttcagtagctgggatgttccctctttccttcaagtgcctgttgcatattgaaaggaaggagaaatcccaaagcagattcctttgatcgggtttctgttggag

SEQ ID NO: 465248 - DNA, 120 bp, Artificial Sequence
  ENSG00000158195_17 (sequence is synthesized)
atggggcttcccttaggagccatattcaactacagccttctaaaacctgtgccctcagccacttcgaatgccagccaccttctggttctaaaacggggagtggtctgaatgaacacagct

SEQ ID NO: 465249 - DNA, 120 bp, Artificial Sequence
  ENSG00000158195_18 (sequence is synthesized)
gacccctttcccgcgcactgaaagggcagagtaggccgaagggtccaagggccagactgcctcaccctctgccctaatcagcagggtgggcctgccttttgctaagcgatctctatgcct

SEQ ID NO: 465250 - DNA, 120 bp, Artificial Sequence
  ENSG00000158195_19 (sequence is synthesized)
gggatgccctttattccaggaggcatcaagcctctaaagaatgtctcacctcctctgcccaaaaatgatgcctttctgtaggctggtgttgttgcctccctcccaggatccctttggtga

SEQ ID NO: 465251 - DNA, 120 bp, Artificial Sequence
  ENSG00000158195_20 (sequence is synthesized)
gtatggtgttcaggatgcaccaccaccacctctagataccttcaggcaacacagcccagttttaacctctagtatccatgaccaaactatccctgacacatgaggacaggggcctcttct

SEQ ID NO: 465252 - DNA, 120 bp, Artificial Sequence
  ENSG00000158195_21 (sequence is synthesized)
ggctgtcaggagcaaagcctgaagacttggagctgcaggactggaagaacagtggagccccgtgggtctcaccctttaaggatgctgaggcctagagatgggaagtgacttgctcaaggt

SEQ ID NO: 465253 - DNA, 120 bp, Artificial Sequence
  ENSG00000158195_22 (sequence is synthesized)
cacacaattggatagtgacatagctagagcgcagagttcctgattccaagtcacctgtgctttctgggaccaaagaatgggcacctgctggagtccgggcagagctttctcagttgtatt

SEQ ID NO: 465254 - DNA, 120 bp, Artificial Sequence
  ENSG00000158195_23 (sequence is synthesized)
ggctcagggtctgtgccagccctgtcggtgctgctcagaccttcatagcctctcttgtcattctttgttgccccttttctgtcaccagccaaccacatagccttgggaccagcctctctg

SEQ ID NO: 465255 - DNA, 120 bp, Artificial Sequence
  ENSG00000158195_24 (sequence is synthesized)
ggggaccagaagtagtgagagaaggaaggggataggcagctttgacaggtgctgctttcaattcctctgcaactcctcccccttttatttccccaatttaaacaaagattctgccaactg

SEQ ID NO: 465256 - DNA, 120 bp, Artificial Sequence
  ENSG00000158195_25 (sequence is synthesized)
tggaaacttcagtccctcaggctggcagccatgccagtacctgcctgggggtggggggtgcctggcagccatgaagcaggctgaaaggcagaggggctccaggtcctgtttccagctccc

SEQ ID NO: 465257 - DNA, 120 bp, Artificial Sequence
  ENSG00000158195_26 (sequence is synthesized)
ctcactgcacatggtgaagctcgctccctccctccctcccttcccgcttttcccagagctaatacacaggtgctattattcagaaaaaaactggtcagctctagccaacagtgaggtttc

SEQ ID NO: 465258 - DNA, 120 bp, Artificial Sequence
  ENSG00000158195_27 (sequence is synthesized)
ttttcttctgccctaactattgtgtagcctcttatgctgaaatcggcttctgctggcttctccggctttcagagccctgaaacaaagagaaacaggatctgtccctacccagcacagcaa

SEQ ID NO: 465259 - DNA, 120 bp, Artificial Sequence
  ENSG00000158195_28 (sequence is synthesized)
atggttgtagtaattgccaaagccctcataaagccctccggcttgaggagagagtgtatagtcatgggttctgcctctgtgcccttgctggccgcttctcctctgccttctttcctggaa

SEQ ID NO: 465260 - DNA, 120 bp, Artificial Sequence
  ENSG00000158195_29 (sequence is synthesized)
ctcagggtgtggggactgagcctgtaggggacagcatgccgtcttgctgtggccactcccaagtgtgccctcttccctctttacacatcaggtgtctctggcacaggacttggcactaag

SEQ ID NO: 465261 - DNA, 120 bp, Artificial Sequence
  ENSG00000158195_30 (sequence is synthesized)
ctccatgctgagacaccaggctatgtgggcccccaccttgtttcccagcctgcaccttagaagccgaaggtgctttcatcagaaccctaaaatggtcgttgaaggcgcctgggccgcagc

SEQ ID NO: 465262 - DNA, 120 bp, Artificial Sequence
  ENSG00000158195_31 (sequence is synthesized)
ccagcagtagttggagaggcaggcagagggcagtggttctcccaaataggagacctggggcctggccaggccagggtttgggcctaatggctttgactaaattacccccatcctccttgc

SEQ ID NO: 465263 - DNA, 120 bp, Artificial Sequence
  ENSG00000158195_32 (sequence is synthesized)
ccggaaaagggagagctagagccactcactgtcattctgctctgaccttgaagggggcggtgttggcctggcttctggaatggactgagtccatcgtggaaagggctgggggcaggagga

SEQ ID NO: 465264 - DNA, 120 bp, Artificial Sequence
  ENSG00000158195_33 (sequence is synthesized)
ggtggggaggggcactgcctgcggaaggtaggattagatcattagctcagtgacctcctagggtttcgatgtgctatgttctcatcctacagttggtttggtaatgatctgcaagtcccg

SEQ ID NO: 465265 - DNA, 120 bp, Artificial Sequence
  ENSG00000158195_34 (sequence is synthesized)
gagagcaacagcacagctctgcctgacgctctcattaaaatctatgcagccaagctcggcactttgtagcagccggccttgcgaagcctcctcagctcggggggccggggacccagtgag

SEQ ID NO: 465266 - DNA, 85 bp, Artificial Sequence
  ENSG00000158195_35 (sequence is synthesized)
ctttagacccagagccctttaagatgataaaggacccaatgcaggtaatcctgtttttggactcacgtaatgtagaatgcaaagt

SEQ ID NO: 465267 - DNA, 120 bp, Artificial Sequence
  ENSG00000158195_36 (sequence is synthesized)
taatcctgtttttggactcacgtaatgtagaatgcaaagtttagtgattatttaatctgggcctaagctagtgagagtatggaacaatggcccataaggactcctaagcgccgaagccaa

SEQ ID NO: 465268 - DNA, 120 bp, Artificial Sequence
  ENSG00000158195_37 (sequence is synthesized)
ggagcctcctcccttcctggttcaccccgcccaagggacctgcccccattcctgtggccctggggcccagcttccaatagtgtcagaagcaacttgtggctttgccttggttgtgagatg

SEQ ID NO: 465269 - DNA, 120 bp, Artificial Sequence
  ENSG00000158195_38 (sequence is synthesized)
ggtacattccaaaggagcagcctgggggagggggcaggctcagccagcccttggaggctcagagcagctggcccaggctccagctcgcctccagtggaagcccgagcgccctcagaaacg

SEQ ID NO: 465270 - DNA, 120 bp, Artificial Sequence
  ENSG00000158195_39 (sequence is synthesized)
accctggccaatgtcaacgcagagccgaggcggtgttgtcacggctaatgtgaaatctcttcccgtggcgcccatcctctgactctgcagtgccagcttggacagattgaggtctctgtg

SEQ ID NO: 465271 - DNA, 120 bp, Artificial Sequence
  ENSG00000158195_40 (sequence is synthesized)
gctttggtgaccctgcttaagcattcccaccgtgtcccagctctgctctaggactgcctcccactgcggcccctcacctgacttcagggtatggggagggagggagccagtgctccaagg

SEQ ID NO: 465272 - DNA, 120 bp, Artificial Sequence
  ENSG00000158195_41 (sequence is synthesized)
ccagggggctttgctcatgagagatgtcaggcttcctggaggcatcaggctttgagccctgctggggtccaactgacctgggaccaggtgtcgcgcagagatgtgcctcattctgtgcct

SEQ ID NO: 465273 - DNA, 120 bp, Artificial Sequence
  ENSG00000158195_42 (sequence is synthesized)
ccttctgtgcctcctaccatgttccctttaactgtgcctcagtgtgggttagggaacaattttgttattgtattaagtttattcagttaattcacttgaggaactaaccagtttttactt

SEQ ID NO: 465274 - DNA, 120 bp, Artificial Sequence
  ENSG00000158195_43 (sequence is synthesized)
tctgtctagaatgatgtacatgtagtagagtaagccataatgctcccaaagtgccttgttttctctgatacaaacatatttataaggacatattcctgtgggttcttgggtgtgtttgcc

SEQ ID NO: 465275 - DNA, 120 bp, Artificial Sequence
  ENSG00000158195_44 (sequence is synthesized)
acatcaagattttagggaaggggggtatatgtgtagtagggatgccgtttgaaaacaggcactcttcccctgaggatgggaaaggagctcttcagttggagatctaggcagtgggttaag

SEQ ID NO: 465276 - DNA, 120 bp, Artificial Sequence
  ENSG00000158195_45 (sequence is synthesized)
ccagacccctaaagtgaccctttcctcttctgccctattcttctcagaccctcagaaagacatccaatttttttaaatccctgtagctccaagcctggtctcatttgcttccctgccagg

SEQ ID NO: 465277 - DNA, 120 bp, Artificial Sequence
  ENSG00000158195_46 (sequence is synthesized)
ctcatcgtgtgtataccacatttgtgccccactgacctgaaggttccatgtaactgtatacacatgaatacttaaatgccaacatttaaaataatttgataaagtctttgtagccactca

SEQ ID NO: 465278 - DNA, 120 bp, Artificial Sequence
  ENSG00000158201_0 (sequence is synthesized)
cgccgcgtccgctctcgcccgctctcgcccgctcgccagccggctctcctcccgccgcaggacccgcgcgccgcgctcgggggccatgcagcgcctggccatggacctgcggatgttgtc

SEQ ID NO: 465279 - DNA, 120 bp, Artificial Sequence
  ENSG00000158201_1 (sequence is synthesized)
ggccatggacctgcggatgttgtcccgggagctctccctctacctggaacaccaagtccgggtggggttcttcggctcgggggtgggcttatcccttatcctgggcttcagcgtcgctta

SEQ ID NO: 465280 - DNA, 120 bp, Artificial Sequence
  ENSG00000158201_2 (sequence is synthesized)
tgccttctactacctgagcagcattgccaagaaaccccagttagtgaccgggggtgagagtttcagccgcttccttcaagaccactgtcccgtggttacagaaacgtactacccgacggt

SEQ ID NO: 465281 - DNA, 120 bp, Artificial Sequence
  ENSG00000158201_3 (sequence is synthesized)
ctggtgctgggagggtcgaggacagaccctgcttagacctttcatcacttcgaagcccccggtgcagtacaggaatgaacttattaaaactgcagatggaggacagatttcactggactg

SEQ ID NO: 465282 - DNA, 120 bp, Artificial Sequence
  ENSG00000158201_4 (sequence is synthesized)
gtttgataatgataacagtacgtgttatatggatgccagcaccagacctactatcttattgttgcctggcctcacgggaacaagcaaggagtcatatatccttcatatgatccatcttag

SEQ ID NO: 465283 - DNA, 120 bp, Artificial Sequence
  ENSG00000158201_5 (sequence is synthesized)
tgaagaattaggatacagatgtgtggtttttaacaacagaggagtggcgggggagaatctcttgacgccaaggacttattgttgtgctaacactgaagacttggagacagttattcacca

SEQ ID NO: 465284 - DNA, 120 bp, Artificial Sequence
  ENSG00000158201_6 (sequence is synthesized)
tgtacacagcctgtacccttctgctcctttcctggcagcaggggtttcaatgggaggaatgctgcttctaaattacttgggcaaaattgggtccaaaacgcctttgatggcagctgcaac

SEQ ID NO: 465285 - DNA, 120 bp, Artificial Sequence
  ENSG00000158201_7 (sequence is synthesized)
tttttccgttggttggaacaccttcgcttgctcagagtcattggaaaaaccactgaactggctactttttaattactatttgacaacctgccttcagtcttcagttaataagcaccgaca

SEQ ID NO: 465286 - DNA, 120 bp, Artificial Sequence
  ENSG00000158201_8 (sequence is synthesized)
tattatactgatgccagtccgagtcctagactgaagtcagtaggaattccagtattgtgtctaaattctgtggatgatgttttctcacccagtcatgctattccaatagaaactgctaag

SEQ ID NO: 465287 - DNA, 120 bp, Artificial Sequence
  ENSG00000158201_9 (sequence is synthesized)
caaaatcctaatgttgctttggtccttacttcttatggaggccatattggttttctggagggaatctggccaagacagtccacttacatggatcgtgtcttcaagcaatttgtgcaagcc

SEQ ID NO: 465288 - DNA, 120 bp, Artificial Sequence
  ENSG00000158201_10 (sequence is synthesized)
atggttgagcatggacatgaactctcttaacatgtagttctttgggtgcattttgtctgaaccacaattgtgaaggcagctcagcttagtgcacaaattttaactgttgtatataaagca

SEQ ID NO: 465289 - DNA, 120 bp, Artificial Sequence
  ENSG00000158201_11 (sequence is synthesized)
aataagccagcagatgggtgaagaggtccagaatgatatgcaaaaactactttttagagaaacaaaacaactttgtagcaacaaattaaatatagtattagattgttacttacgtagatt

SEQ ID NO: 465290 - DNA, 120 bp, Artificial Sequence
  ENSG00000158201_12 (sequence is synthesized)
ttatttttactatgccttaccaagtacatccttaaacaaagtagtatgtacatgaaattgcacttaaccaaaactattgtgtaaaacaaattttaattcctcagggttttaatttaaact

SEQ ID NO: 465291 - DNA, 120 bp, Artificial Sequence
  ENSG00000158201_13 (sequence is synthesized)
agtatttttttagattatttgttttaggtgatttaatggtactttaataactactaagaaatattggctatttcaatgtaagttataaggtggtacattcctaagggtatttatagttga

SEQ ID NO: 465292 - DNA, 120 bp, Artificial Sequence
  ENSG00000158201_14 (sequence is synthesized)
tgataacatgaaaactgaaataagataaaatacaacgtgctaaatcttttatgtattctaactttaaaagacaagtgcaacaaagttagactgacttctatatgtgctcttttactctga

SEQ ID NO: 465293 - DNA, 120 bp, Artificial Sequence
  ENSG00000158201_15 (sequence is synthesized)
caaagttagactgacttctatatgtgctcttttactctgataatattaaattaggactaacttatgttttataatgattataatttacatgcttatttttaaaatagtatatgtggacac

SEQ ID NO: 465294 - DNA, 120 bp, Artificial Sequence
  ENSG00000158201_16 (sequence is synthesized)
gacacgtttgagtatggtactttgtttaattgaaggtatttgtattggtcttgccccatctgcatcaagccttccttgcatgttcatggtctttttgttagtgccaactctaactgtgct

SEQ ID NO: 465295 - DNA, 120 bp, Artificial Sequence
  ENSG00000158201_17 (sequence is synthesized)
gactttaaatggcatgtatgtgcgctgcaagacaggaaaatgataaattattaatactacagtatgtgcaaacaaaggttattttctcatatgtatgactccttgctcctgtttacattt

SEQ ID NO: 465296 - DNA, 120 bp, Artificial Sequence
  ENSG00000158201_18 (sequence is synthesized)
ctgcattttacaaatcattaacctcacattgtaatttttgtgctttacttgtcactacttccagacgccaaggacttattgttgtgctaacactgaagacttggagacagttattcacca

SEQ ID NO: 465297 - DNA, 120 bp, Artificial Sequence
  ENSG00000158201_19 (sequence is synthesized)
ggttttccctttctaaaataatctctgagagggaagctattttattggctgtctctttgagaggactataagctagctgtatggacactttttaaataaatgtctgattatgtttatcat

SEQ ID NO: 465298 - DNA, 120 bp, Artificial Sequence
  ENSG00000158201_20 (sequence is synthesized)
attttattaaatgcggttgattgaatgaacgaaggaaggaaagaattaattcaggtgaattttaatatttttcttaactacgggtctctgtgactgcggattttgtgagcctgaaggttt

SEQ ID NO: 465299 - DNA, 120 bp, Artificial Sequence
  ENSG00000158201_21 (sequence is synthesized)
gtctgaagcccatgaagtcgattgcatcactcaccggctgccatgttgaccttctgattcctgacgcactcccagccatccctggagctgcgttctgaagctgaacttgtagcatgactt

SEQ ID NO: 465300 - DNA, 120 bp, Artificial Sequence
  ENSG00000158201_22 (sequence is synthesized)
tcatcactccagttacagaaataatcacttattgctctctccagctgcagtggccttcaaaattatttttccccagaatgctgcttctaaattacttgggcaaaattgggtccaaaacgc

SEQ ID NO: 465301 - DNA, 120 bp, Artificial Sequence
  ENSG00000158201_23 (sequence is synthesized)
gggagaatctcttgtgacttaggcactggaggaaatgaagatcaacacgatttcgaaagcaaaagttgcagagtgttatggtcttactcaagtgccttgtaataaatagcttgacgtgaa

SEQ ID NO: 465302 - DNA, 120 bp, Artificial Sequence
  ENSG00000158201_24 (sequence is synthesized)
tagcatagtagacactctgcagatttaggctgagttaatgaatgaaattagaatcatctgagcattgactgagcccttccccccatccccaccccaatggagagtgtgttatggagggag

SEQ ID NO: 465303 - DNA, 120 bp, Artificial Sequence
  ENSG00000158201_25 (sequence is synthesized)
aacagcaattacagacccctgagagagtacacagtggccgtcatgccacattctggggcctggattcactaatcttgtcgccctggctcagctcccaagtgcaaaaaatattcagaatca

SEQ ID NO: 465304 - DNA, 120 bp, Artificial Sequence
  ENSG00000158201_26 (sequence is synthesized)
gcttgtaggttgtccctatttatcaaaggtgatctctgcctcttctgaccacctgagtttgcaggtgcacttggctagtctccagttgttgatgccacagcttttctgagtaaccattat

SEQ ID NO: 465305 - DNA, 120 bp, Artificial Sequence
  ENSG00000158201_27 (sequence is synthesized)
taagctcagtcaccaggtacaatttaattttttgcaagtgattagcaactttgagtttcaagttcagctctagaatcttagagtcattataaaaggtactgcttttttgtgcctcagctt

SEQ ID NO: 465306 - DNA, 120 bp, Artificial Sequence
  ENSG00000158201_28 (sequence is synthesized)
ttttttttagctgataattattgtaatggaacactctgtgagttgtatttaaagtagagttgtatcttttgttaaacttgaaacacttgtgtgaaaagctgatggtaagtttaccttaaa

SEQ ID NO: 465307 - DNA, 73 bp, Artificial Sequence
  ENSG00000158201_29 (sequence is synthesized)
aaacacttgtgtgaaaagctgatggtaagtttaccttaaaaaaataattttagtaaagccggtggattgcttg

SEQ ID NO: 465308 - DNA, 120 bp, Artificial Sequence
  ENSG00000158201_30 (sequence is synthesized)
cctagtctacaaaaattagcagggcatggtggcatgcacctatagttccagctactgacaaggctgaggtaggacgatcagttgagcccgggaggtagagactgtagtgaaccatgatcg

SEQ ID NO: 465309 - DNA, 120 bp, Artificial Sequence
  ENSG00000158201_31 (sequence is synthesized)
attatactgatgccagtccgagtcctagactgaagtcagtaggaattccagtattgtgtctaaattctgtggatgatgttttctcacccagtcatggtaatcttagaagctgaaacttac

SEQ ID NO: 465310 - DNA, 120 bp, Artificial Sequence
  ENSG00000158201_32 (sequence is synthesized)
cttacatggtgattgttttagcatattttcattggattaaggaagtccagtatttctctacccgtttttatatttcactgccctttttaccaataaaaagttcccaacattttaacctta

SEQ ID NO: 465311 - DNA, 120 bp, Artificial Sequence
  ENSG00000158201_33 (sequence is synthesized)
tcttggtaagtaaatttaaatgacaacagtcttaactttttaaagaatcatttctagttttataacaaaaagcatattctttttatttaaaataactctgtttatgtaagcaatacaaat

SEQ ID NO: 465312 - DNA, 120 bp, Artificial Sequence
  ENSG00000158220_0 (sequence is synthesized)
gcatttccaggcgctgctctccgtcgcagagaaccctgagctcggcgcgccgagagtcccagcagggcaagggggcgcggcgtcctggtcctcgagcttgggagacagatgcgcatgggc

SEQ ID NO: 465313 - DNA, 120 bp, Artificial Sequence
  ENSG00000158220_1 (sequence is synthesized)
gtgggggcatgcggacctaagctcgggtgaagctctcgggaagggcaagactgcggcgacgagatgcgagcagaggagccctgcgcccccggggcccccagcgccctgggagcccagcgc

SEQ ID NO: 465314 - DNA, 120 bp, Artificial Sequence
  ENSG00000158220_2 (sequence is synthesized)
acgccgggccccgagctgcgcctgtccagccagctgctgcccgagctctgtaccttcgtggtgcgcgtgctgttctacctggggcctgtctacctagctggctacctggggctcagcata

SEQ ID NO: 465315 - DNA, 120 bp, Artificial Sequence
  ENSG00000158220_3 (sequence is synthesized)
acctggttgctgctcggcgccctgctgtggatgtggtggcgcaggaaccgccgcgggaagcttgggcgcctggccgccgccttcgaattccttgacaatgaacgcgagttcatcagccgc

SEQ ID NO: 465316 - DNA, 120 bp, Artificial Sequence
  ENSG00000158220_4 (sequence is synthesized)
gagctgcggggccagcacctgccagcctggatccacttcccggacgtggagcgggtcgagtgggccaacaagatcatctctcagacctggccctacctaagcatgatcatggaaagcaag

SEQ ID NO: 465317 - DNA, 120 bp, Artificial Sequence
  ENSG00000158220_5 (sequence is synthesized)
ttccgggagaaacttgagcccaagatccgagagaagagcatccacctgaggacctttacctttaccaagctctactttggacagaagtgtcccagggtcaacggtgtcaaggcacacact

SEQ ID NO: 465318 - DNA, 120 bp, Artificial Sequence
  ENSG00000158220_6 (sequence is synthesized)
aatacgtgcaaccgaagacgtgtgactgtggacctgcagatctgctacatcggggactgtgagatcagtgtggagctgcagaagattcaggctggtgtgaacgggatccagttgcagggc

SEQ ID NO: 465319 - DNA, 120 bp, Artificial Sequence
  ENSG00000158220_7 (sequence is synthesized)
accctgcgggtcatcctggagcccctcctagtggacaagccctttgtgggagccgtgactgtgttcttccttcagaagccgcacctacagatcaactggactggcctgaccaacctgctg

SEQ ID NO: 465320 - DNA, 120 bp, Artificial Sequence
  ENSG00000158220_8 (sequence is synthesized)
gatgcgccgggaatcaatgatgtgtcagacagcttactggaggacctcattgccacccacctggtgctgcccaaccgtgtgactgtgcctgtgaagaaggggctggatctgaccaacctg

SEQ ID NO: 465321 - DNA, 120 bp, Artificial Sequence
  ENSG00000158220_9 (sequence is synthesized)
cgcttccctctgccctgtggggtgatcagagtgcacttgctggaggcagagcagctggcccagaaggacaactttctggggctccgaggcaagtcagatccctacgccaaggtgagcatc

SEQ ID NO: 465322 - DNA, 120 bp, Artificial Sequence
  ENSG00000158220_10 (sequence is synthesized)
ggcctacagcatttccggagtaggaccatctacaggaacctgaaccccacctggaacgaagtgtttgagttcatggtgtacgaagtccctggacaggacctggaggtagacctgtatgat

SEQ ID NO: 465323 - DNA, 120 bp, Artificial Sequence
  ENSG00000158220_11 (sequence is synthesized)
gaggataccgacagggatgacttcctgggcagcctgcagatctgccttggagatgtcatgaccaacagagtggtggatgagtggtttgtcctgaatgacacaaccagcgggcggctgcac

SEQ ID NO: 465324 - DNA, 120 bp, Artificial Sequence
  ENSG00000158220_12 (sequence is synthesized)
ctgcggctggagtggctttcattgcttactgaccaagaagttctgactgaggaccatggtggcctttccactgccattctcgtggtcttcttggagagtgcctgcaacttgccgagaaac

SEQ ID NO: 465325 - DNA, 120 bp, Artificial Sequence
  ENSG00000158220_13 (sequence is synthesized)
ccttttgactacctgaatggtgaatatcgagccaaaaaactctccaggtttgccagaaacaaggtcagcaaagacccttcttcctatgtcaaactatctgtaggcaagaagacacataca

SEQ ID NO: 465326 - DNA, 120 bp, Artificial Sequence
  ENSG00000158220_14 (sequence is synthesized)
agtaagacctgtccccacaacaaggaccctgtgtggagccaggtgttctccttctttgtgcacaatgtggccactgagcggctccatctgaaggtgcttgatgatgaccaggagtgtgct

SEQ ID NO: 465327 - DNA, 120 bp, Artificial Sequence
  ENSG00000158220_15 (sequence is synthesized)
ctgggaatgctggaggtccccctgtgccagatcctcccctatgctgacctcactcttgagcagcgctttcagctggaccactcaggcctggacagcctcatctccatgaggctggtgctt

SEQ ID NO: 465328 - DNA, 120 bp, Artificial Sequence
  ENSG00000158220_16 (sequence is synthesized)
cggttcctgcaagtggaggaacgagagctggggagcccatacacaggacctgaagccctaaagaaaggccctctgctcatcaagaaagtggctaccaaccagggtcccaaagcccaacct

SEQ ID NO: 465329 - DNA, 120 bp, Artificial Sequence
  ENSG00000158220_17 (sequence is synthesized)
caggaagaaggccctacagatttgccatgtcccccagaccctgcttctgatactaaggacgtatccaggagtaccacaaccaccaccagtgctaccaccgttgccactgagcccacatcc

SEQ ID NO: 465330 - DNA, 120 bp, Artificial Sequence
  ENSG00000158220_18 (sequence is synthesized)
caagagacaggcccagagcctaaaggcaaggacagtgccaaaaggttctgtgagcccatcggggagaagaagagtccagccaccatcttcctgactgtcccaggtccccactctccaggg

SEQ ID NO: 465331 - DNA, 120 bp, Artificial Sequence
  ENSG00000158220_19 (sequence is synthesized)
cccatcaagtcacccagacccatgaaatgccctgcctccccattcgcatggccgcccaagaggctggctcccagcatgtcctcgctcaactccttggcctcttcttgctttgacctggca

SEQ ID NO: 465332 - DNA, 120 bp, Artificial Sequence
  ENSG00000158220_20 (sequence is synthesized)
gatatcagcctcaacattgaaggtggggacctcaggcgacggcagctgggtgagattcagctcacagtgcgctatgtgtgtctgcggcgctgcctcagcgtgctaatcaatggctgcaga

SEQ ID NO: 465333 - DNA, 120 bp, Artificial Sequence
  ENSG00000158220_21 (sequence is synthesized)
aacctaacaccatgtaccagcagtggagctgatccctacgtccgtgtctacttgttgccagaaaggaagtgggcatgtcgtaagaagacttcagtgaagcggaagaccttggaacccctg

SEQ ID NO: 465334 - DNA, 120 bp, Artificial Sequence
  ENSG00000158220_22 (sequence is synthesized)
tttgatgagacatttgaattttttgttcccatggaagaagtaaagaagaggtcactagatgttgcagtgaaaaatagtaggccacttggctcacacagaagaaaggagttaggaaaagta

SEQ ID NO: 465335 - DNA, 120 bp, Artificial Sequence
  ENSG00000158220_23 (sequence is synthesized)
ctgattgacttatcaaaagaagatctgattaagggcttttcacaatggtatgagctgactccaaatggacagcccagaagctgatgatgagaattcttatcactcacctttatattaaaa

SEQ ID NO: 465336 - DNA, 120 bp, Artificial Sequence
  ENSG00000158220_24 (sequence is synthesized)
cttacatccaatatatgtatattttgtcatttaaatcagaacaaccacttgaaattatatacatacaattcttgtgtggaatttaactccatgactgaatagcataaggaagaggttatt

SEQ ID NO: 465337 - DNA, 120 bp, Artificial Sequence
  ENSG00000158220_25 (sequence is synthesized)
taaaagcaagaactactttttttggttggatttttttgttcaagtccagaaagaaatgttatatttgtgcctactaaattatccaaacctcagtgtttatatacttaaacaagtgccact

SEQ ID NO: 465338 - DNA, 120 bp, Artificial Sequence
  ENSG00000158220_26 (sequence is synthesized)
ttttagtaggtaattatataccatctgatttaggacttacctgaatgtatgtaccagaaagtgtcctgcctctggcataggggctgggggaggtctgtttctggagccactaccagcatt

SEQ ID NO: 465339 - DNA, 120 bp, Artificial Sequence
  ENSG00000158220_27 (sequence is synthesized)
cctgggcagtgactggccaaagggaagtcacttttttatggaaatagaaagtgacccaactcaaaactgccaagagctaacactgccaaagcccttctggctgccacctgtggtacttgt

SEQ ID NO: 465340 - DNA, 120 bp, Artificial Sequence
  ENSG00000158220_28 (sequence is synthesized)
atgcctggatatttgttcttttatttgacctggagctaaaaatgtatttccctactggcaaaaatgttatactgatatacttaaataccttgagttaaatactcttgtgtagtctaaggg

SEQ ID NO: 465341 - DNA, 120 bp, Artificial Sequence
  ENSG00000158220_29 (sequence is synthesized)
ccaaactccagcgtgtagcattatttccataggaaaatgcaaaccaagttccaagcccaggtctatgtctgactctcatagcaaagcactggagactgctgaagagtgtcaccatcagag

SEQ ID NO: 465342 - DNA, 120 bp, Artificial Sequence
  ENSG00000158220_30 (sequence is synthesized)
aaaaggaagctttcagataagtttaggctattcaacttttctaaagagatggttggttcacctaaataacatgttaaaagcaaagtattaaattatatgcttaaacaagcgcctctttta

SEQ ID NO: 465343 - DNA, 120 bp, Artificial Sequence
  ENSG00000158220_31 (sequence is synthesized)
catttcagactttacaagaccaaatatacttctcatcccctccaacattcctggacctcctcttctctcttaccaacaccaacactacctgccgtcagttttctgtctctgcctctgcct

SEQ ID NO: 465344 - DNA, 120 bp, Artificial Sequence
  ENSG00000158220_32 (sequence is synthesized)
tcactgccacttttctgaagcagggcaacattcgagaacaaagttttgtcatgttactcttattccagtttcctgccatctgattcacatgcagatgttctattccagagtagtccaaat

SEQ ID NO: 465345 - DNA, 120 bp, Artificial Sequence
  ENSG00000158220_33 (sequence is synthesized)
actatgctctgctgactcaagtcatgtctcaaacctatttcctctattaagtaagtcagtcaatccatagtgaaatggactcttcctaccgcctgtagcatttactgttgatactgagta

SEQ ID NO: 465346 - DNA, 120 bp, Artificial Sequence
  ENSG00000158220_34 (sequence is synthesized)
ttttccattttaatagttcccagcctttataacactaagttttaagaaatgttgattaggcatctgctaaggttacatgctaagcagctacttatattgtatttggtatttaattttgtt

SEQ ID NO: 465347 - DNA, 120 bp, Artificial Sequence
  ENSG00000158220_35 (sequence is synthesized)
tattctccagttgaacagtagggaacaattcaagctacttgaattgtttttcaccctcaccatccaagaccgtgttaagtacatagaagatgcatggtgaaattcgtttctgctgaggtt

SEQ ID NO: 465348 - DNA, 120 bp, Artificial Sequence
  ENSG00000158220_36 (sequence is synthesized)
tctattttaaatggcaaattctcataataaaatggagcattgatgcctaccctgtctaccttatgatggcattctaattgccccctaaatagacaagtgccttgaaaatggagaagcacc

SEQ ID NO: 465349 - DNA, 120 bp, Artificial Sequence
  ENSG00000158220_37 (sequence is synthesized)
agagaaataagggaatgtatcatatgtacatcgaaacattagcaaccctaaaacagctaatcaaaatggcagataagtgaaaacctacccctcttcttccaaacttaaaccacaaacatt

SEQ ID NO: 465350 - DNA, 120 bp, Artificial Sequence
  ENSG00000158220_38 (sequence is synthesized)
tattttaaacgtggtcaattgaaccgtttttacctgtgtcaggcaacacaggtaaatacctggtgatggtctgaagaggagttaaaatgttgaagggaaccagaattttagtacacagca

SEQ ID NO: 465351 - DNA, 120 bp, Artificial Sequence
  ENSG00000158220_39 (sequence is synthesized)
gacaggaggcaaggttatataggcgctgtgtgaggggcagggagcctgaaaagttgttaataccttggctgccactgaggacaagaattggttttcagcagtgggtggaaacaatcagct

SEQ ID NO: 465352 - DNA, 120 bp, Artificial Sequence
  ENSG00000158220_40 (sequence is synthesized)
aatatgcaggagcatagggtctgaagttaacatcatcttggtacagaaacccccaaacctaagacggaatgtgaatattggtttagaacctggaagcctgtgaagccttgatggaggcaa

SEQ ID NO: 465353 - DNA, 120 bp, Artificial Sequence
  ENSG00000158220_41 (sequence is synthesized)
ccataaaattggccccacagggttgccactcccatccagggcacatatgcgacaactgcagcagatggctgtcactaaagggaaactcacgggcaaaaataaattatgaaacaaaacaaa

SEQ ID NO: 465354 - DNA, 120 bp, Artificial Sequence
  ENSG00000158220_42 (sequence is synthesized)
aacagactttaaaaaaaatacaaagtacacaggaatatcaaactgaaaaatagccatagataatatttcagccagaaggaaaatgtaccagtaaggcagaaatagcatgtgagaagcagt

SEQ ID NO: 465355 - DNA, 120 bp, Artificial Sequence
  ENSG00000158220_43 (sequence is synthesized)
ggaaagcaaagaaatccataaaatacattggcaaacctaagcaagttttgatgatgattgttcacaagatataaacaaataaccaaagatttttgcaagggttcagaaacatagtagaac

SEQ ID NO: 465356 - DNA, 120 bp, Artificial Sequence
  ENSG00000158220_44 (sequence is synthesized)
taaaatgttagtactaacaactaagaaggggcagctaggctgattaagaaagtaagtattcaagaccatatcttatttaggaagctaaagatactcatcttaaaaatataactgtgtcag

SEQ ID NO: 465357 - DNA, 120 bp, Artificial Sequence
  ENSG00000158220_45 (sequence is synthesized)
tcactaattcattacctctcagcttcaaattgacgtctgtctcctttgctgctttcccggcaggctgatgtttggctttgccaatagggggcgatggaaggacactctatagcaggaaga

SEQ ID NO: 465358 - DNA, 120 bp, Artificial Sequence
  ENSG00000158220_46 (sequence is synthesized)
aggggcttttcttctgatgttttccatggctgctagctaattggcatacagagctgttctcaatcaatcacctaagtacccccacagtttacccttggctcatggccttcatgttttatc

SEQ ID NO: 465359 - DNA, 120 bp, Artificial Sequence
  ENSG00000158220_47 (sequence is synthesized)
agcaggcaacaccttttggcaagtttcttagccacaagtgggttgcatggtcctatggctgccagcggaaatctaaatctcagcctggtagggaggcacttagtttctaacttcctttct

SEQ ID NO: 465360 - DNA, 120 bp, Artificial Sequence
  ENSG00000158220_48 (sequence is synthesized)
tgttcactctcccttacccctgggggtaaggatctgcatcctgaagttgatattctgtatcccctagagtccacttctaccccgtttagtagtaaatacaagaattgctaactagtaaaa

SEQ ID NO: 465361 - DNA, 120 bp, Artificial Sequence
  ENSG00000158220_49 (sequence is synthesized)
aaggtttgatggaagaagggctcttgaaacagagttaagaggtttttaagccaggcgggctgggaagcttgaagtgcaccttgagcaggttctcctggcagcgtttaaagtcagcccctt

SEQ ID NO: 465362 - DNA, 120 bp, Artificial Sequence
  ENSG00000158220_50 (sequence is synthesized)
aggataaatcctcaagtcccttgactttccctgcaaaagggtctttatatttgctacacagtacccagagcagcctatctacacaggacattaataatggtgtactttaaaaaatatatg

SEQ ID NO: 465363 - DNA, 120 bp, Artificial Sequence
  ENSG00000158220_51 (sequence is synthesized)
tttcatttaatcttcacaaaagatctgtagagtaagcaaagagaggcaaaaacaatgtcttgtccaagatctcatgaccaacaagtggtggagctgggatcttttagggccctgagccct

SEQ ID NO: 465364 - DNA, 120 bp, Artificial Sequence
  ENSG00000158220_52 (sequence is synthesized)
gcctggagagcagcacagctcatcagtccccaaagccccctggctctgggcatttgacagactagctcatacagatcataattgcctctactctgagtcactatcttccctgacagaaga

SEQ ID NO: 465365 - DNA, 120 bp, Artificial Sequence
  ENSG00000158220_53 (sequence is synthesized)
caaggaccaggtctggcctgatcccattctagttttcagaataggaccagatgcccatagaagcacagtacagactgaagtaaacccaaacttggctggggctcagatactagtagtgga

SEQ ID NO: 465366 - DNA, 120 bp, Artificial Sequence
  ENSG00000158220_54 (sequence is synthesized)
ttctaaaatcgcctgtatgaaaaatacctcgctggatggaaaagtagatatgaacttacatttctgtgcaagttgttttttcacaaaatatcttcctaagaggcagcatggtgtggtaga

SEQ ID NO: 465367 - DNA, 120 bp, Artificial Sequence
  ENSG00000158220_55 (sequence is synthesized)
agcctgctgggaggcagcgcaaatatcctctcagccttcacatgtggtgcattggctttatttcacactaatgcttgacagtcccagaaaaatggtacaaacaccatcgcccacgtcata

SEQ ID NO: 465368 - DNA, 120 bp, Artificial Sequence
  ENSG00000158220_56 (sequence is synthesized)
attactaaagacattttgtccttggggtgtatcccacttgggaggtagtgtcaaatttactgcattctaaacttacttggaatatttcctctgtttgtgacaactgaccatgaatattta

SEQ ID NO: 465369 - DNA, 120 bp, Artificial Sequence
  ENSG00000158220_57 (sequence is synthesized)
gttatgttgcctggcagcctgccagatgctggaaggggctatggctgaacaagacaacatagtctatgacttcatgaagcttctgtacgttagtggggaaaatggagtgccagagaagtt

SEQ ID NO: 465370 - DNA, 120 bp, Artificial Sequence
  ENSG00000158220_58 (sequence is synthesized)
tatcaaaatggccacctacatttactgctcatagaggctaaagtgttcctgaatatggaatgttccctactctttctgtttaaatgaagtctctctggtagtaaaaagatttgaatgttc

SEQ ID NO: 465371 - DNA, 120 bp, Artificial Sequence
  ENSG00000158220_59 (sequence is synthesized)
gtagaattatgtaataaatggctgtcatttatgaagggtttactatgggcttagcatgttacctgatttaattcaaccttcacaataaccctacaagatggaactatcataaaagtttaa

SEQ ID NO: 465372 - DNA, 120 bp, Artificial Sequence
  ENSG00000158220_60 (sequence is synthesized)
taaattcatccaaggtcccaaaaggaatcatgatacaaaggcagattccacttcagggttcccgttcttcctactatgaagtaggataattatacatgaatgctggatggaactgaattc

SEQ ID NO: 465373 - DNA, 120 bp, Artificial Sequence
  ENSG00000158220_61 (sequence is synthesized)
catctgaaagtaaactcactgtgaattattatcctacatggctctatactcctcaagcaggaatgcttctttgtctttgggggtggcggaagagggccaatgcttgttatggcgagagaa

SEQ ID NO: 465374 - DNA, 120 bp, Artificial Sequence
  ENSG00000158220_62 (sequence is synthesized)
gtgatgggctctttctttacagaggtggggacctcaggcgacggcagctgggtgagattcagctcacagtgcgctatgtgtgtctgcggcgctgcctcagcgtgctaatcaatggctgca

SEQ ID NO: 465375 - DNA, 120 bp, Artificial Sequence
  ENSG00000158220_63 (sequence is synthesized)
tatgaaaatagagtaatagcagaaagccaataaagttgatatatacaacttccaaattagcagtgaagaagaaaaggttataaagaaaaatcaaccctgcaaaacgtaggaggggaaagc

SEQ ID NO: 465376 - DNA, 120 bp, Artificial Sequence
  ENSG00000158220_64 (sequence is synthesized)
aaagacatagtagacaatacaaaagatggtcaagatacgtctaaatatatttgtaattacaataaacaacactattaaaatctagaatgtcaaaagtaaaaagcagttatatgctgttta

SEQ ID NO: 465377 - DNA, 120 bp, Artificial Sequence
  ENSG00000158220_65 (sequence is synthesized)
taagaggttcacatgaaacagaaatgttgaaagtaaaaagattaaaagatccatccaagaatcatttagatttctgtttatattaatggcagcaaacaatatattaagaaacagatgctc

SEQ ID NO: 465378 - DNA, 120 bp, Artificial Sequence
  ENSG00000158220_66 (sequence is synthesized)
cctattgccacttctgttcaacaatgtattgcagcctgagtaataatagggcaaaaataggtacatctaaccaaaacttctatgtgcagatgatatgatcatgagcatgaaatccaagat

SEQ ID NO: 465379 - DNA, 120 bp, Artificial Sequence
  ENSG00000158220_67 (sequence is synthesized)
aatctaaattgctagaattaaccagaaagtcttcagcaagcttgcttgatacaatgttaaaaaaactgtagttctgttccctaagagaaaataagtgcataaaaatatcaatctatatga

SEQ ID NO: 465380 - DNA, 120 bp, Artificial Sequence
  ENSG00000158220_68 (sequence is synthesized)
atacattcaacaacccctataagaaaactaaaactttttaaataaatgttaaacctaaaatggagagctatgccacgtttgaggttggaaaacccaacaaatgccatttctctccaaatt

SEQ ID NO: 465381 - DNA, 120 bp, Artificial Sequence
  ENSG00000158220_69 (sequence is synthesized)
aattatatgtttaatgaaagcccaataaatcaacaggttgtgtgtgtaacttgataagcagattcaatgtacatggaactacaaaaggtagaaagccgcctactcaacgccaaagttcat

SEQ ID NO: 465382 - DNA, 120 bp, Artificial Sequence
  ENSG00000158220_70 (sequence is synthesized)
tttcaagctgtaataactaagacagaatggtactagtgcagggagccaactgggccaaaagaacagaaaagagcccagaaacagacccattcacatatactcaatttatgacagaggtag

SEQ ID NO: 465383 - DNA, 120 bp, Artificial Sequence
  ENSG00000158220_71 (sequence is synthesized)
cactgtgaacaaagggaaaagatagacttttcaataaaaggtgctgggacaattggatattcatgtgagaaaatacgaaatggtcctttactcatatcacattaaaaaatcaatcaactc

SEQ ID NO: 465384 - DNA, 120 bp, Artificial Sequence
  ENSG00000158220_72 (sequence is synthesized)
caggtatattagactgtgtaaagcaaaactatacagctgtaagataatataggagaataatttcacaacttgtgactaaggcaagatttcataacacgcaaagagcactaactaaaagac

SEQ ID NO: 465385 - DNA, 120 bp, Artificial Sequence
  ENSG00000158220_73 (sequence is synthesized)
cacacatctctccgtgaaaattaggtacttctgttcataaaaataaactataggctggtgcggtggcacacacttttagtcccaactacttggaaggccgaggtgggagggaccacttga

SEQ ID NO: 465386 - DNA, 120 bp, Artificial Sequence
  ENSG00000158220_74 (sequence is synthesized)
gggttggtcctgtcctggggctcgcacagtaatgacagcccagggggactggggcattagagtagctttctctcaaagagaagtaactgggtggccccagttcccccagatgctcctggg

SEQ ID NO: 465387 - DNA, 120 bp, Artificial Sequence
  ENSG00000158234_0 (sequence is synthesized)
gcggcggccatctctgggcggcggcggcgggcggtgtttgcgcggtcggtgagacccgcgcgggtgagacgctggccctccttacagcctagaaaaaatgacagatctcgtagctgtttg

SEQ ID NO: 465388 - DNA, 120 bp, Artificial Sequence
  ENSG00000158234_1 (sequence is synthesized)
ggatgttgctttaagtgacggagtccacaagatcgaatttgaacatgggactacatcaggcaaacgagtagtatatgtagatggaaaggaagagataagaaaagagtggatgttcaaatt

SEQ ID NO: 465389 - DNA, 120 bp, Artificial Sequence
  ENSG00000158234_2 (sequence is synthesized)
agtgggcaaagaaacattctatgttggagctgcaaagacaaaagcgaccataaatatagacgctatcagtggttttgcttatgaatatactctggaaattaatgggaaaagtctcaagaa

SEQ ID NO: 465390 - DNA, 120 bp, Artificial Sequence
  ENSG00000158234_3 (sequence is synthesized)
tatggacgtatggtgcaatggtaaaaaattggagacagcgggtgagtttgtagatgatgggactgaaactcacttcagtatcgggaaccatgactgttacataaaggctgtcagtagtgg

SEQ ID NO: 465391 - DNA, 120 bp, Artificial Sequence
  ENSG00000158234_4 (sequence is synthesized)
gaagcggaaagaagggattattcatactctcattgtggataatagagaaatcccagagattgcaagttaatgaattttcatcttaagaagtaaagatcaggactttttaattactgtggt

SEQ ID NO: 465392 - DNA, 120 bp, Artificial Sequence
  ENSG00000158234_5 (sequence is synthesized)
aattaaatgtgttcagtatgtacttatcagtacatttagtctgcaatgttttaattttttaaaaagttacatgaaactaacattccaagggtcaggaaaaaaaccaattatgtatagtca

SEQ ID NO: 465393 - DNA, 120 bp, Artificial Sequence
  ENSG00000158234_6 (sequence is synthesized)
taaaaattacaatttatgatgcaaataatgtaaaatgttttaaagacaaatggcaaataagatatggaccaaagtcactaatgttttacaacagtaacctttactataataaatactttt

SEQ ID NO: 465394 - DNA, 120 bp, Artificial Sequence
  ENSG00000158234_7 (sequence is synthesized)
ggccacgcggcctacgcagccgagtcggaaccaaccggttgtttggtgaaacctaccccagagcctcccgcggcccacagagcacagccctccttacagcctagaaaaaatgacagatct

SEQ ID NO: 465395 - DNA, 120 bp, Artificial Sequence
  ENSG00000158234_8 (sequence is synthesized)
tgggtccgtggcggcgggaggggtggcctcctgcgctggtcgccccaggggacctgagaggcgcgacaaacagtcggcgcgtttggtactcgcgcctgcagagctttcaacctccgcgcc

SEQ ID NO: 465396 - DNA, 120 bp, Artificial Sequence
  ENSG00000158234_9 (sequence is synthesized)
ggctgcgcctgtttctcggccaggggagcaaggccacgcggcctacgcagccgagtcggaaccaaccggttgtttggtgaaacctaccccagagcctcccgcggcccacagagcacagac

SEQ ID NO: 465397 - DNA, 80 bp, Artificial Sequence
  ENSG00000158234_10 (sequence is synthesized)
gaggcagcagaccgggtggggtcggtgtcgcgcctgcgcccgcccggacgcctcgggcccgcccgctccgcaccctggaa

SEQ ID NO: 465398 - DNA, 120 bp, Artificial Sequence
  ENSG00000158234_11 (sequence is synthesized)
attacacatggatgaaaaagatgctatggacgtatggtgcaatggtaaaaaattggagacagcggtaagttgactatttgatgactctaagtgccatgtgtctcagttaccattgaattg

SEQ ID NO: 465399 - DNA, 120 bp, Artificial Sequence
  ENSG00000158234_12 (sequence is synthesized)
ttgctgcatttcctaattatagagatcttataatgaatcaaggccctcttgataaaaacaaaaaagggattaagtactcctgacttcagattctgaaaacctttgccagatggtgcctgg

SEQ ID NO: 465400 - DNA, 88 bp, Artificial Sequence
  ENSG00000158234_13 (sequence is synthesized)
ggagtagctgggatttacagacgtgcgctaccatgcccggcaaatttttctatttttgcaaagacaggatttcaccgttttgtccagg

SEQ ID NO: 465401 - DNA, 120 bp, Artificial Sequence
  ENSG00000158234_14 (sequence is synthesized)
taccatgcccggcaaatttttctatttttgcaaagacaggatttcaccgttttgtccaggctggtcttgaactattgacctcaagtgatccgaccgccttgacctcccaaagtgctggga

SEQ ID NO: 465402 - DNA, 120 bp, Artificial Sequence
  ENSG00000158234_15 (sequence is synthesized)
cgcctggccactttctccaaagttttaaaccaaagccttcttcggcagagctacgacccttcctctatggcccattctatcctatgctgcttccctttataaggacactcccactgttgt

SEQ ID NO: 465403 - DNA, 120 bp, Artificial Sequence
  ENSG00000158234_16 (sequence is synthesized)
gcaagtaaaatacctaaaaagagcccctagttaaaaaattatatccccagaggttggtgtcctcttgtgttgatccatttgaagtggtgcgttatcactgcttctcaaacttgcatgcac

SEQ ID NO: 465404 - DNA, 120 bp, Artificial Sequence
  ENSG00000158234_17 (sequence is synthesized)
ttccctaggtgctgctaatgctactggtccacagatcacactttaggaatgctttacaccatacactcaaagcagatggttcttttctgaaagcgagatttttgtaaaatgagtgataca

SEQ ID NO: 465405 - DNA, 120 bp, Artificial Sequence
  ENSG00000158234_18 (sequence is synthesized)
atatcagatgacacgaaggtagacgaacaggaaagggcactctcacgaaccccggaggacaagtggaattttagaccagcagtgccaatgcgaggagaaagaggctcccccagtcactgt

SEQ ID NO: 465406 - DNA, 120 bp, Artificial Sequence
  ENSG00000158234_19 (sequence is synthesized)
ggccaggcacactgaaatccccatctagatagactccagtgtgtttgacttttgctatcaggtgcttggattactatggctgtggatgggatgaatgtaggagtgaatttcaagcaggag

SEQ ID NO: 465407 - DNA, 120 bp, Artificial Sequence
  ENSG00000158234_20 (sequence is synthesized)
tgaaacagtagtagtgtgcacaggggagagagtgggaaacagaaagtgtgggactaggagccgaaatcactgggtggtaatccccatgtcttatggggtctgtgggccaagcagggagtg

SEQ ID NO: 465408 - DNA, 120 bp, Artificial Sequence
  ENSG00000158234_21 (sequence is synthesized)
ctatccctgggacccacctttcatgctggctccagatgtgaacatcagggctagagataatcggaagctctcttctctggtcacattttgcatgttgtagttgcttttatctcatttgta

SEQ ID NO: 465409 - DNA, 120 bp, Artificial Sequence
  ENSG00000158234_22 (sequence is synthesized)
tagtataggtttaagacagtgagaaaaggtgattttggtagttggaggaaaggaggtctgggattaattcattcagaagaccacctagaacctacttggtctgatagctgtttctgagga

SEQ ID NO: 465410 - DNA, 120 bp, Artificial Sequence
  ENSG00000158234_23 (sequence is synthesized)
ggtgacaaaaccagaaatcaaaaattacaaagatgaagccacacgtggtagcacaggtctgtagtggcttcctacttgggaggctgacgtgagagggacccttgagcctaggagttttag

SEQ ID NO: 465411 - DNA, 120 bp, Artificial Sequence
  ENSG00000158234_24 (sequence is synthesized)
gccagcctgagcaacatagtgagacccatctctaaaaaaattaatcaatcaattgaaatttaaaagttacgaagatgaatgcttttctgtttctgagtcctgaagaatttaatttgggct

SEQ ID NO: 465412 - DNA, 120 bp, Artificial Sequence
  ENSG00000158234_25 (sequence is synthesized)
cactctaaattgagtgcttgagctgttctctgggttaaatctactgatagagacttcttttatgcagagaggcttggagagtgcttcagtattttatggccccctttggaaaaactccag

SEQ ID NO: 465413 - DNA, 120 bp, Artificial Sequence
  ENSG00000158234_26 (sequence is synthesized)
ttaccactaacatggatcagatacctactgtgtgcccaatgccatacctggtggttcttcctgttctttttttcctaccctggaattctctagatagggaatcagcacttttgaattgca

SEQ ID NO: 465414 - DNA, 120 bp, Artificial Sequence
  ENSG00000158234_27 (sequence is synthesized)
tgcatttcctcccatattcaagaaattctccagtgcacatgtaaagagaatgctgttttatggtattaagaatatggttgtactgggcgaggtgactcatgcatgtaatcccagcacttt

SEQ ID NO: 465415 - DNA, 88 bp, Artificial Sequence
  ENSG00000158234_28 (sequence is synthesized)
gggaggctgaggcgggcagattgcttgaacctaggagttagagactagtctgggtgacatggcatagagcatggtggcacatgcctat

SEQ ID NO: 465416 - DNA, 89 bp, Artificial Sequence
  ENSG00000158234_29 (sequence is synthesized)
tacctgagcccagggagattgaggctgcagtgagccaaggttgcaccacggcactccagcctcggtaacagaatgtgagaccctgtctc

SEQ ID NO: 465417 - DNA, 120 bp, Artificial Sequence
  ENSG00000158234_30 (sequence is synthesized)
aatttcttaggtactgtcactttaatattttgacattttagaggttttaatctaatattttcatcttggaaggattaattggttatttaattagtattttggcctactataattgcttta

SEQ ID NO: 465418 - DNA, 120 bp, Artificial Sequence
  ENSG00000158246_0 (sequence is synthesized)
aggcgctagggtcggttagtcgtcgccgtctgaggtgttccctggctttgtctcgccgtcgttgccgccccgtccctgccttcgtgccccccgccttggcccctgcccagccgctctccc

SEQ ID NO: 465419 - DNA, 120 bp, Artificial Sequence
  ENSG00000158246_1 (sequence is synthesized)
tgtcctcctccccttaaccacccccacggtttctgccgtcggggcccgggggccgggcggatgatgccgtcggagagcggagctgagcgcagggaccgggcggctgctcaggtggggacg

SEQ ID NO: 465420 - DNA, 120 bp, Artificial Sequence
  ENSG00000158246_2 (sequence is synthesized)
gctgcggccacggcggtggccacggcagccccggcaggcggcggccccgacccggaggccttatcggccttccccggacggcacctgagtgggctgagctggccacaggtgaagcgactg

SEQ ID NO: 465421 - DNA, 120 bp, Artificial Sequence
  ENSG00000158246_3 (sequence is synthesized)
gacgctcttctgagcgagccgattcccattcacgggcgcggcaacttccccacgctgagcgtgcagccccggcagatcgtgcaggtggtccgcagcaccctggaggagcagggactacat

SEQ ID NO: 465422 - DNA, 120 bp, Artificial Sequence
  ENSG00000158246_4 (sequence is synthesized)
gtgcacagtgtgcggctgcatggttcagctgccagccacgtgctgcaccctgagagtggcctgggctacaaggatctggacctggtgttccgggtggacctgcgcagtgaggcatccttc

SEQ ID NO: 465423 - DNA, 120 bp, Artificial Sequence
  ENSG00000158246_5 (sequence is synthesized)
cagctgaccaaggcagtggtgctggcctgcctactagacttcctgccggccggtgtgagccgggccaagatcacgccactgacactcaaggaggcatacgtgcagaagctggtgaaagtg

SEQ ID NO: 465424 - DNA, 120 bp, Artificial Sequence
  ENSG00000158246_6 (sequence is synthesized)
tgcacagactcggaccgctggagcctcatctcactgtccaacaagagcggcaagaacgtggagctcaagtttgtggactcggtgagacgccagtttgaattcagcatagactccttccag

SEQ ID NO: 465425 - DNA, 120 bp, Artificial Sequence
  ENSG00000158246_7 (sequence is synthesized)
atcatcctggactccctgttgctctttggccagtgctcgtccactcccatgtctgaggccttccacccaacggtcacaggcgaaagcctgtacggggacttcaccgaggccctggagcac

SEQ ID NO: 465426 - DNA, 120 bp, Artificial Sequence
  ENSG00000158246_8 (sequence is synthesized)
ctgcggcaccgtgtcatcgccacgcgcagtcccgaggagatccgaggtggtggcctcctcaagtactgccacctcctggtgcggggcttccggccccggcccagcaccgatgtgcgcgcc

SEQ ID NO: 465427 - DNA, 120 bp, Artificial Sequence
  ENSG00000158246_9 (sequence is synthesized)
gatgcagcccgccgttacgcctgcctggtgacactgcaccgggtggtcaacgagagcaccgtgtgcctcatgaaccacgagcgccgccagacgctggacctcattgccgcactggcgctg

SEQ ID NO: 465428 - DNA, 120 bp, Artificial Sequence
  ENSG00000158246_10 (sequence is synthesized)
caggcactggctgagcagggcccagctgccactgccgccctggcctggcgccctccaggcactgacggggttgtgccagccactgtcaattactacgtgacccccgtgcaacctctcctg

SEQ ID NO: 465429 - DNA, 120 bp, Artificial Sequence
  ENSG00000158246_11 (sequence is synthesized)
gctcacgcctatcccacctggctgccttgtaactgactcagaccctggccagaagggaagggactgggcctcacggggtggggtggggcctccaagagtgtgtggaggacatgaccagag

SEQ ID NO: 465430 - DNA, 120 bp, Artificial Sequence
  ENSG00000158246_12 (sequence is synthesized)
gcgcagaatgtgccaggaggcccagcactgcagggttgggcctttgattgaacagaccagactttcccgagcacgaggcccctgtgggcttaatgccagcctggggctctcagcaggagg

SEQ ID NO: 465431 - DNA, 120 bp, Artificial Sequence
  ENSG00000158246_13 (sequence is synthesized)
accctttggttattgcatcacacttttggaccagcatgccggtggggtgcaggcgccatttgtcttggaagtcaatttccttcaggagacaaagcaagtttggggtggtagccttaatgc

SEQ ID NO: 465432 - DNA, 120 bp, Artificial Sequence
  ENSG00000158246_14 (sequence is synthesized)
ccagcaccttggattgattcccatggtctaagagggtctttttgactaaggccagcctgtggtgatcccagcagctttggagggcctgcagcccacacactgactgatacatggtatgtt

SEQ ID NO: 465433 - DNA, 120 bp, Artificial Sequence
  ENSG00000158246_15 (sequence is synthesized)
acagggacttgtcactttggatcaggctgggccactacagggcctgatgggccaacttgggtaatcactgggaggagggaaactgaggcccgaggcagatacctgggtttggggagggct

SEQ ID NO: 465434 - DNA, 120 bp, Artificial Sequence
  ENSG00000158246_16 (sequence is synthesized)
gggtttagcccggttctctgaactacatacccccagctgtgaagccttcctcttgaggggttgaggtgggcagtatacaggagccaagcagcccagggtgggtcgcagcccaggcccctt

SEQ ID NO: 465435 - DNA, 120 bp, Artificial Sequence
  ENSG00000158246_17 (sequence is synthesized)
ccagggtgccactcctttcccccttgtgttgcaaggagccctcctgcctgggagcttgttctttggaaggtgctgagcctgaatttgccacagtcaagtcaacgttcccaccccactggc

SEQ ID NO: 465436 - DNA, 120 bp, Artificial Sequence
  ENSG00000158246_18 (sequence is synthesized)
ttggttacagggctctcacatggggtaggggagccatactcccacccccttgcgtattcccctgggtttgttgatattttgcactcttaacacctgccaataaagacggtctacactgaa

SEQ ID NO: 465437 - DNA, 80 bp, Artificial Sequence
  ENSG00000158258_0 (sequence is synthesized)
agtgagcgcggctgctgccggcgagctagcggcgcagcggcgggaacccgaggccgagcgccgcggcggcagcgctagaa

SEQ ID NO: 465438 - DNA, 120 bp, Artificial Sequence
  ENSG00000158258_1 (sequence is synthesized)
aggcaccgggaggcgagagccggcgcggacagtaggcggcggctgcagctcgttggcggctgctgcgaggatgctgcctgggcggctgtgctgggtgccgctcctgctggcgctgggcgt

SEQ ID NO: 465439 - DNA, 120 bp, Artificial Sequence
  ENSG00000158258_2 (sequence is synthesized)
ggggagcggcagcggcggtggcggggacagccggcagcgccgcctcctcgcggctaaagtcaataagcacaagccatggatcgagacttcatatcatggagtcataactgagaacaatga

SEQ ID NO: 465440 - DNA, 120 bp, Artificial Sequence
  ENSG00000158258_3 (sequence is synthesized)
cacagtcattttggacccaccactggtagccctggataaagatgcaccggttccttttgcaggggaaatctgtgcgttcaagatccatggccaggagctgccctttgaggctgtggtgct

SEQ ID NO: 465441 - DNA, 120 bp, Artificial Sequence
  ENSG00000158258_4 (sequence is synthesized)
caacaagacatcaggagagggccggctccgtgccaagagccccattgactgtgagttgcagaaggagtacacattcatcatccaggcctatgactgtggtgctgggccccacgagacagc

SEQ ID NO: 465442 - DNA, 120 bp, Artificial Sequence
  ENSG00000158258_5 (sequence is synthesized)
ctggaaaaagtcacacaaggccgtggtccatatacaggtgaaggatgtcaacgagtttgctcccaccttcaaagagccagcctacaaggctgttgtgacggagggcaagatctatgacag

SEQ ID NO: 465443 - DNA, 120 bp, Artificial Sequence
  ENSG00000158258_6 (sequence is synthesized)
cattctgcaggtggaggccattgacgaggactgctccccacagtacagccagatctgcaactatgaaatcgtcaccacagatgtgccttttgccatcgacagaaatggcaacatcaggaa

SEQ ID NO: 465444 - DNA, 120 bp, Artificial Sequence
  ENSG00000158258_7 (sequence is synthesized)
cactgagaagctgagctatgacaaacaacaccagtatgagatcctggtgaccgcctacgactgtggacagaagcccgctgctcaggacaccctggtgcaggtggatgtgaagccagtttg

SEQ ID NO: 465445 - DNA, 120 bp, Artificial Sequence
  ENSG00000158258_8 (sequence is synthesized)
caagcctggctggcaagactggaccaagaggattgagtaccagcctggctccgggagcatgcccctgttccccagcatccacctggagacgtgcgatggagccgtgtcttccctccagat

SEQ ID NO: 465446 - DNA, 120 bp, Artificial Sequence
  ENSG00000158258_9 (sequence is synthesized)
cgtcacagagctgcagactaattacattgggaagggttgtgaccgggagacctactctgagaaatcccttcaaaagttatgtggagcctcctctggcatcattgacctcttgccatcccc

SEQ ID NO: 465447 - DNA, 120 bp, Artificial Sequence
  ENSG00000158258_10 (sequence is synthesized)
tagcgctgccaccaactggactgcaggactgctggtggacagcagtgagatgatcttcaagtttgacggcaggcagggtgccaaagtccccgatgggattgtgcccaagaacctgaccga

SEQ ID NO: 465448 - DNA, 120 bp, Artificial Sequence
  ENSG00000158258_11 (sequence is synthesized)
tcagttcaccatcaccatgtggatgaaacacggccccagccctggtgtgagagccgagaaggaaaccatcctctgcaactcagacaaaaccgaaatgaaccggcatcactatgccctgta

SEQ ID NO: 465449 - DNA, 120 bp, Artificial Sequence
  ENSG00000158258_12 (sequence is synthesized)
tgtgcacaactgccgcctcgtctttctcttgcggaaggacttcgaccaggctgacacctttcgccccgcggagttccactggaagctggatcagatttgtgacaaagagtggcactacta

SEQ ID NO: 465450 - DNA, 120 bp, Artificial Sequence
  ENSG00000158258_13 (sequence is synthesized)
tgtcatcaatgtggagtttcctgtggtaaccttatacatggatggagcaacatatgaaccatacctggtgaccaacgactggcccattcatccatctcacatagccatgcaactcacagt

SEQ ID NO: 465451 - DNA, 120 bp, Artificial Sequence
  ENSG00000158258_14 (sequence is synthesized)
cggcgcttgttggcaaggaggagaagtcaccaaaccacagtttgctcagttctttcatggaagcctggccagtctcaccatccgccctggcaaaatggaaagccagaaggtgatctcctg

SEQ ID NO: 465452 - DNA, 120 bp, Artificial Sequence
  ENSG00000158258_15 (sequence is synthesized)
cctgcaggcctgcaaggaagggctggacattaattccttggaaagccttggccaaggaataaagtatcacttcaacccctcgcagtccatcctggtgatggaaggtgacgacattgggaa

SEQ ID NO: 465453 - DNA, 120 bp, Artificial Sequence
  ENSG00000158258_16 (sequence is synthesized)
cattaaccgtgctctccagaaagtctcctacatcaactccaggcagttcccaacggcgggtgtgcggcgcctcaaagtatcctccaaagtccagtgctttggggaagacgtatgcatcag

SEQ ID NO: 465454 - DNA, 120 bp, Artificial Sequence
  ENSG00000158258_17 (sequence is synthesized)
tatccctgaggtagatgcctatgtgatggtcctccaggccatcgagccccggatcaccctccggggcacagaccacttctggagacctgctgcccagtttgaaagtgccaggggagtgac

SEQ ID NO: 465455 - DNA, 120 bp, Artificial Sequence
  ENSG00000158258_18 (sequence is synthesized)
cctcttccctgatatcaagattgtgagcaccttcgccaaaaccgaagcccccggggacgtgaaaaccacagaccccaaatcagaagtcttagaggaaatgcttcataacttagatttctg

SEQ ID NO: 465456 - DNA, 120 bp, Artificial Sequence
  ENSG00000158258_19 (sequence is synthesized)
tgacattttggtgatcggaggggacttggacccaaggcaggagtgcttggagctcaaccacagtgagctccaccaacgacacctggatgccactaattctactgcaggctactccatcta

SEQ ID NO: 465457 - DNA, 120 bp, Artificial Sequence
  ENSG00000158258_20 (sequence is synthesized)
cggtgtgggctccatgagccgctatgagcaggtgctacatcacatccgctaccgcaactggcgtccggcttcccttgaggcccggcgtttccggattaagtgctcagaactcaatgggcg

SEQ ID NO: 465458 - DNA, 120 bp, Artificial Sequence
  ENSG00000158258_21 (sequence is synthesized)
ctacactagcaatgagttcaacttggaggtcagcatccttcatgaagaccaagtctcagataaggagcatgtcaatcatctgattgtgcagcctcccttcctccagtctgtccatcatcc

SEQ ID NO: 465459 - DNA, 120 bp, Artificial Sequence
  ENSG00000158258_22 (sequence is synthesized)
tgagtcccggagtagcatccagcacagttcagtggtcccaagcattgccacagtggtcatcatcatctccgtgtgcatgcttgtgtttgtcgtggccatgggtgtgtaccgggtccggat

SEQ ID NO: 465460 - DNA, 120 bp, Artificial Sequence
  ENSG00000158258_23 (sequence is synthesized)
cgcccaccagcacttcatccaggagactgaggctgccaaggaatctgagatggactgggacgattctgcgctgactatcacagtcaaccccatggagaaacatgaaggaccagggcatgg

SEQ ID NO: 465461 - DNA, 120 bp, Artificial Sequence
  ENSG00000158258_24 (sequence is synthesized)
ggaagatgagactgagggagaagaggaggaagaagccgaggaagaaatgagctccagcagtggctctgacgacagcgaagaggaggaggaggaggaagggatgggcagaggcagacatgg

SEQ ID NO: 465462 - DNA, 120 bp, Artificial Sequence
  ENSG00000158258_25 (sequence is synthesized)
gcagaatggagccaggcaagcccagctggagtgggatgactccaccctcccctactagtgcccaggggtctgctgcctggcccacatgtcccttttgtaaaccctgacccagtgtatgcc

SEQ ID NO: 465463 - DNA, 120 bp, Artificial Sequence
  ENSG00000158258_26 (sequence is synthesized)
catgtctatcatacctcacctctgatgtctgtgacatgtctgggaaggccttctccagcttcctggagcccaccctttaagccttgggcactccctgtgtttcatccatggggaagttcc

SEQ ID NO: 465464 - DNA, 120 bp, Artificial Sequence
  ENSG00000158258_27 (sequence is synthesized)
aagaagcccagcatggccatcagtgaggacttcagggtagactttgtcctgtagcctccacttctgccctaagttccccagcatcctgactacctgtctgcagagtttgcctttgttttt

SEQ ID NO: 465465 - DNA, 120 bp, Artificial Sequence
  ENSG00000158258_28 (sequence is synthesized)
tcctgcagggaagaaggcccacctttgtgtcactcacctccccaggctcagagtccccaaggccctggggttccaactcactgtgcgtctcctccacacagaccagtaggttctcctatg

SEQ ID NO: 465466 - DNA, 120 bp, Artificial Sequence
  ENSG00000158258_29 (sequence is synthesized)
ctgactccaggttgcttcatacaaggagggtggttgaacttcacacacgtaaggtcttagtgcttaacagtttaaaggaaagtccttgttgaggcagaactaagtttacagggaaaggta

SEQ ID NO: 465467 - DNA, 120 bp, Artificial Sequence
  ENSG00000158258_30 (sequence is synthesized)
cacacattctctctctctctctctctctgtctatctagttccccagcttggagagcctttccccttgcttctttctgaggccatataagcttataagaaaagtcccaaaccaagaatagg

SEQ ID NO: 465468 - DNA, 120 bp, Artificial Sequence
  ENSG00000158258_31 (sequence is synthesized)
tccttggccacaagcagggtctgatcccccatcagagctatctgagcctgcctgtctgggcacctgctgcaaccatgcagctaccctgccaggggcactcagcaaacagaaccacagggc

SEQ ID NO: 465469 - DNA, 120 bp, Artificial Sequence
  ENSG00000158258_32 (sequence is synthesized)
ccaggaggcattccacacaggcactgccccaggacaacacaacaaggacagtcacaacaaggacaacaaggacacaacacaacacacaacaaggacagtcacaacaagcctagagccaga

SEQ ID NO: 465470 - DNA, 120 bp, Artificial Sequence
  ENSG00000158258_33 (sequence is synthesized)
aagcagatggaaatgctaatgaggtcaaacgtaggcttcatggtgggtggagtgggggtggctgggctcccccaggacagaggggaccctgaggttggcaaggctctcaccactcagcct

SEQ ID NO: 465471 - DNA, 120 bp, Artificial Sequence
  ENSG00000158258_34 (sequence is synthesized)
tatggtcccttatctcctatcttccctcttgagaaaatacacgctttctgcatgtattagaaacgcacgagctccaccaagtctacaatgaaagtttgaaatttaactgcaaggaattag

SEQ ID NO: 465472 - DNA, 120 bp, Artificial Sequence
  ENSG00000158258_35 (sequence is synthesized)
aagcatatttgcaatcattgcagcttcttctttcttctgctcataaaaggaggaacactttagatagagggcaaatatatctgaaaacctaatttctttctttttttgataaggaaatct

SEQ ID NO: 465473 - DNA, 120 bp, Artificial Sequence
  ENSG00000158258_36 (sequence is synthesized)
tttccatctccatcctaacatgcacaacctgtgaagagaattgtttctatagtaactggtctgtgatcttttgtggccaagagaatagcaggcaagaattagggccttgacagaatttcc

SEQ ID NO: 465474 - DNA, 120 bp, Artificial Sequence
  ENSG00000158258_37 (sequence is synthesized)
acgaagctctgagaacatgtttgtttcgaatgtctgattcctctttgtcatcaatgtgtatgctctgtccccatccttcactcctcctcaagctcacaccaattggtttggcacaggcac

SEQ ID NO: 465475 - DNA, 120 bp, Artificial Sequence
  ENSG00000158258_38 (sequence is synthesized)
agagctggtccctagttaagtggcatttatgttaaaaaaaaatagttcagaatctcagccttttctttgtgtcatcaaaacagcttaagaaggggactactgccaatgtcctctagtctg

SEQ ID NO: 465476 - DNA, 120 bp, Artificial Sequence
  ENSG00000158258_39 (sequence is synthesized)
acctccacccagggaggacccatggcaggtcttttcaactttctgattcatgagaacaaccttgtgaagcttttcccacctcctaaagtgttttctgcatctgttccttcctttggacct

SEQ ID NO: 465477 - DNA, 120 bp, Artificial Sequence
  ENSG00000158258_40 (sequence is synthesized)
cacaacaaatcctgtgaagtaactgagacatctgttgttagatacatttttgtgatgagtaaactgaggcttcgtgattcaatgtcttgttcagagtcattcaaaagtatagacaagacc

SEQ ID NO: 465478 - DNA, 120 bp, Artificial Sequence
  ENSG00000158258_41 (sequence is synthesized)
agtctccccaacttccactcctggtgcaggattctacttatgttcataggtatgcacctaacagacactgctgcaaacctactatgtgctaagcatcctaccaatagctgtgagaaaaag

SEQ ID NO: 465479 - DNA, 120 bp, Artificial Sequence
  ENSG00000158258_42 (sequence is synthesized)
aaaagctgaataagataagctccttccctacattatatttgcagacgggaaataaacaggcctagaaattacacaagagacaaatgaagaggaagagaagtcacaagagaagaaggatgc

SEQ ID NO: 465480 - DNA, 120 bp, Artificial Sequence
  ENSG00000158258_43 (sequence is synthesized)
ggtcacaaacttaaccagtgctcttatttttcccttctcagggaaaaacaccagaagaagctggggttttatattcattggatggaaacagatatttctcctgggaattctcccaaccaa

SEQ ID NO: 465481 - DNA, 120 bp, Artificial Sequence
  ENSG00000158258_44 (sequence is synthesized)
atagcccttttctattaggctgtgtctgtacatccacaagaggaaagtctataggactgattagttttcacaatcccatttaaataaaaaaaagatctttagttgggcatttaggagcaa

SEQ ID NO: 465482 - DNA, 120 bp, Artificial Sequence
  ENSG00000158258_45 (sequence is synthesized)
ctgaattctcccaaaattgtggcagcaaaaagaacacttcatatgcttaaaacccattctttttgaattagattttgattttaaatatttaagtctggtgtttgtgagaacacttttctc

SEQ ID NO: 465483 - DNA, 120 bp, Artificial Sequence
  ENSG00000158258_46 (sequence is synthesized)
tttgctcagtcttttcgatctggttgggtagggaaggtgttcctcatgctctctgggtggctgccttattcatagttgagagagctgttaggtaaaatctttatatgtgttggggttttt

SEQ ID NO: 465484 - DNA, 120 bp, Artificial Sequence
  ENSG00000158258_47 (sequence is synthesized)
ttggtagggggggtagcaggtaaaggtggcccatggctagggcagcaaagatgaataatttgaggaagcatttggttggtggactcatttgcagagaaacagtggtgacaacaaatcaga

SEQ ID NO: 465485 - DNA, 120 bp, Artificial Sequence
  ENSG00000158258_48 (sequence is synthesized)
gctgtttccctcaactctggctataagaggtcattctctgcatgtcagctacaaagatcaggcacttgaatgaatccgctgggttggcaggcattggtcatcttcgcaacaccctcttcc

SEQ ID NO: 465486 - DNA, 120 bp, Artificial Sequence
  ENSG00000158258_49 (sequence is synthesized)
tcaccatggatgagaacaagacgggagtggttatatcccagtaacagaagctttgggaggtatccaggtgagcagggtaatgtggcttgccctcccccagatattctgatcccaagaaaa

SEQ ID NO: 465487 - DNA, 120 bp, Artificial Sequence
  ENSG00000158258_50 (sequence is synthesized)
aggtgtcattaatcagtctggcattttccaccctccatatgctggcatccaggaaccaaaacccctgaaggcctagacaccctatgacctctaactgagatgttggcagccaggcagatg

SEQ ID NO: 465488 - DNA, 120 bp, Artificial Sequence
  ENSG00000158258_51 (sequence is synthesized)
caggctcatgtccaggaggaactgctgactggtttggccacagcccagttcattgcttgtcttgccaagtggacaaccagattctgccttcctgagcttgaaaataggctacaactctca

SEQ ID NO: 465489 - DNA, 120 bp, Artificial Sequence
  ENSG00000158258_52 (sequence is synthesized)
ggtgattcagatgacatggaggagaagttggaggagaagattgaaatgcttaaatcccagtgcagaatgagttgcttcagtggagtaaagcaaccggctagttggtagcctgccttaaaa

SEQ ID NO: 465490 - DNA, 120 bp, Artificial Sequence
  ENSG00000158258_53 (sequence is synthesized)
aatactaaacatatatcatcatacatttgatcaaatgctgtaagcacagccaaggcccaaattcatctagataccaaaaatgtgatttcagtgaaatctcttttcattgccgctttcttt

SEQ ID NO: 465491 - DNA, 71 bp, Artificial Sequence
  ENSG00000158258_54 (sequence is synthesized)
tgtgatttcagtgaaatctcttttcattgccgctttcttttgttgttgtttgttttttgagccagagtctt

SEQ ID NO: 465492 - DNA, 120 bp, Artificial Sequence
  ENSG00000158258_55 (sequence is synthesized)
tgatctgcccaccttggcctccaaggtaatgagattataggagtgagccaccgcacccagccctcattaccactttcttgaatttactcaatcatcctatcaagcagggtttagaccaac

SEQ ID NO: 465493 - DNA, 120 bp, Artificial Sequence
  ENSG00000158258_56 (sequence is synthesized)
atctttgcatttaataagggctctactttgtatacatggaccatccagtgagagagctgggggtggtgagaagcaatgtcccccattcctatatgtcaggtgtcagcaaactatctgtaa

SEQ ID NO: 465494 - DNA, 120 bp, Artificial Sequence
  ENSG00000158258_57 (sequence is synthesized)
agaggcaaatagtaaatattttgggctttgtgagccatttggtacctgtcacagaatagtcagccctccatatctgaggtttccaaatccatggattcaaccaaccttgaatcaaaaata

SEQ ID NO: 465495 - DNA, 120 bp, Artificial Sequence
  ENSG00000158258_58 (sequence is synthesized)
tttttttcattattattccttgaacaatacagtttaacaggatttacatagcatttacactgtattaggtattataagtaacctagagatgatttgaagaacacaggaagttgtgcatag

SEQ ID NO: 465496 - DNA, 120 bp, Artificial Sequence
  ENSG00000158258_59 (sequence is synthesized)
gctatatgcaaatactatgcattttatataaaggaattgaacatctgtggattttggtgtccgaggggagttctggaaccaatcccctacagatactgagggatgactgtactcagctct

SEQ ID NO: 465497 - DNA, 120 bp, Artificial Sequence
  ENSG00000158258_60 (sequence is synthesized)
cctattgtagcatgaaaacagacaatacgtacaacaaatgaatgtttcaatacaactttatctagtttccataaaacaatttaaaaacactaaaaaagcaggcagtttggatttatgtaa

SEQ ID NO: 465498 - DNA, 120 bp, Artificial Sequence
  ENSG00000158258_61 (sequence is synthesized)
ttttcatatctttttttacccttttgatttacatttttaataatttaaaaatataaaaaccttcctcagcccacaggccatacgaaaattagcagccagctagatttggcccaaggccaa

SEQ ID NO: 465499 - DNA, 120 bp, Artificial Sequence
  ENSG00000158258_62 (sequence is synthesized)
agtttggcaacccgtaccatacaccatggaagttagccttccacctcaggagaaagcaagctgctctcataagcctctcaccaactacccagtagtctttgcctccaaactgaacaacag

SEQ ID NO: 465500 - DNA, 120 bp, Artificial Sequence
  ENSG00000158258_63 (sequence is synthesized)
gaaaaagtgccatagtttttaattaagctgttttaaaagtccatgttccgggggaaaacaaaaaagaaacaaacaaaacacttgttatttgctgaactgacaaactgacagatattccac

SEQ ID NO: 465501 - DNA, 120 bp, Artificial Sequence
  ENSG00000158258_64 (sequence is synthesized)
gagagttgaaagccttggatcgaggtgattgcctggttactgagtgctaactccactgaggcaagtgttagccccccaaggctcagtgccttcccagcacagctcagcccataatgatct

SEQ ID NO: 465502 - DNA, 120 bp, Artificial Sequence
  ENSG00000158258_65 (sequence is synthesized)
ctgagcaggagtgttcattatctcagactgattttcatttcagccctactcttgccattgctctaaaaatgatcctaaagacttgtgactgtttgaatcaatagcaacatcatcagtaga

SEQ ID NO: 465503 - DNA, 120 bp, Artificial Sequence
  ENSG00000158258_66 (sequence is synthesized)
aagcccgaccaagcacacttcgaaattagcaatcttcttggctctatggctcaatatcagcaagaagaaaaaaagacaactttttttttaatcatccccacatttaaattaaccaaatag

SEQ ID NO: 465504 - DNA, 120 bp, Artificial Sequence
  ENSG00000158258_67 (sequence is synthesized)
tttttacaaaaaagtaggtaagtgggtttaattctttgaaagtatttgccagtgaaaagtagatgatttttaggtaagataacgtttaggcctctgggggatccccaaagccttctgcaa

SEQ ID NO: 465505 - DNA, 120 bp, Artificial Sequence
  ENSG00000158258_68 (sequence is synthesized)
tgtactctggcaggctatgaatggtacaggattctgcatctatatgagacatttattgaggctgacaagcaaaagcccttggcacaatttaattttcacataaccactttccattgtcca

SEQ ID NO: 465506 - DNA, 120 bp, Artificial Sequence
  ENSG00000158258_69 (sequence is synthesized)
gctgcaggcaaaagaaatgagcaatgaaagttttgaagtctaccccagtaccctcatttcctgtctttatttcctttactttatagatgtattctatacctgctatgtagataatgctct

SEQ ID NO: 465507 - DNA, 120 bp, Artificial Sequence
  ENSG00000158258_70 (sequence is synthesized)
agttttccctttagtgccaactggaaaaggagagttggctttacaggggctgtggattaagagccaggcttcattccatcccagggagacaaaaagagacagaagaagttacctccagca

SEQ ID NO: 465508 - DNA, 120 bp, Artificial Sequence
  ENSG00000158258_71 (sequence is synthesized)
gcaccccagaaagctgacagatattccctgtatgcaggtagtaaacagatgggagtctgtgtttgcagctatgttcagtgtaattcagcagaccttcactgggcacttgtgatgggtcag

SEQ ID NO: 465509 - DNA, 120 bp, Artificial Sequence
  ENSG00000158258_72 (sequence is synthesized)
gccctgtgccagcaacaggggaagggaggatgaacaaggcatgtttccctgaccatgaggagctcttggcctgtgagctgttgggatgtccctttgtggtgttggaagctgtgcacgagc

SEQ ID NO: 465510 - DNA, 120 bp, Artificial Sequence
  ENSG00000158258_73 (sequence is synthesized)
agtcaggactttggggacagaagtttagtgttagggaggcagggtaacttgctttgacagctacccaccctaagtcagatgacaggtgtaattctaggggccctgatatgcatcactgag

SEQ ID NO: 465511 - DNA, 120 bp, Artificial Sequence
  ENSG00000158258_74 (sequence is synthesized)
gcagactgaggagctctccagggaagtaggcaatatttccctgaatattcctcaattccaatcaaggctgactcagttcacttatggatgaaagccagttaccctgcccactgggcagaa

SEQ ID NO: 465512 - DNA, 120 bp, Artificial Sequence
  ENSG00000158258_75 (sequence is synthesized)
ataacatggttgacagctgacattcagagaaaataagacagaagcagtccttaaatataaacagcagccaggtggacctggaaatttaggaagggtgatgcaggtagaggggccagcagg

SEQ ID NO: 465513 - DNA, 120 bp, Artificial Sequence
  ENSG00000158258_76 (sequence is synthesized)
agccaagtctcaaaaggcacaagccagactgatgcaagggagccctcctgaggcccaacatcagagctgaagatctaaggagggcccacctccacgagacctgctgagggcttacatttg

SEQ ID NO: 465514 - DNA, 120 bp, Artificial Sequence
  ENSG00000158258_77 (sequence is synthesized)
gtgctgaggagcagtggttccctgggccagctgcatcacctgggaacatgtgagaagtgcatattcttgggccccaccccagacctactgaatgagaagctctggaggcaggcagtctgt

SEQ ID NO: 465515 - DNA, 120 bp, Artificial Sequence
  ENSG00000158258_78 (sequence is synthesized)
gatttaatgagctttctgacacacactaaagtttgagaaccactgatgcagaggatgaggagatgacttgagctggcatcgggaagaactgactattaactaacaaggtaaaatcaatga

SEQ ID NO: 465516 - DNA, 120 bp, Artificial Sequence
  ENSG00000158258_79 (sequence is synthesized)
ctagtgcagtgagggtgccaaagcaaaccacccccagcccccatcctgggcctttttggctccagtttatactcactgaagcagtggtttcaaggaaccttggtcctagtccgcatcctt

SEQ ID NO: 465517 - DNA, 120 bp, Artificial Sequence
  ENSG00000158258_80 (sequence is synthesized)
cacctgcccttgggcatgagacaattcctgcctgcctgccccttctatcctagagagagagactgcccaggagaggctgccatgaggtcactcatccccaggaaggccacctgccaggtt

SEQ ID NO: 465518 - DNA, 120 bp, Artificial Sequence
  ENSG00000158258_81 (sequence is synthesized)
tctgtaagctgagcagcctcttcgagggccatattttgtggagaaacactgaaactgcagcagtgaccctggtcactaggagagctgctttctacacagcctgtatgctggtggagacac

SEQ ID NO: 465519 - DNA, 120 bp, Artificial Sequence
  ENSG00000158258_82 (sequence is synthesized)
ccagggcctggcagagtgtggagggggtcatttaaggacgttgccaggttgccgcagcactgctctgtttgtttgtaatgagactggggcatgcagcatcacaattcaaacactgaattg

SEQ ID NO: 465520 - DNA, 120 bp, Artificial Sequence
  ENSG00000158258_83 (sequence is synthesized)
cttggggaatggatggccttccttggaagggcagtaactcattctggatgttactaaaagtagaaaacaaaaatccaaaaacaaacctacagcctcatttacaattagaatctgtctggg

SEQ ID NO: 465521 - DNA, 120 bp, Artificial Sequence
  ENSG00000158258_84 (sequence is synthesized)
ccttctgatttctaaagtctgtgaggctgccaggattcaccaattctcctttcccctgaggcccagcaactattgatttatagcttaaactctgtgaaggtccacagacctttgaaagga

SEQ ID NO: 465522 - DNA, 120 bp, Artificial Sequence
  ENSG00000158258_85 (sequence is synthesized)
acttgctggtactttgtcagtcgtgtacacctaactgactcctcctacgaggtacagtctcctcatacaaggggttttgagatggagagtcagagggccagggccctgggctttggggtg

SEQ ID NO: 465523 - DNA, 120 bp, Artificial Sequence
  ENSG00000158258_86 (sequence is synthesized)
gaaggacagaagagtagcagtctaggaaagggactagacatgtagcctaggaaaactagcaccatctgttgagttctgaagaacccagattctctcctgctcacagcctcagcagtcttt

SEQ ID NO: 465524 - DNA, 120 bp, Artificial Sequence
  ENSG00000158258_87 (sequence is synthesized)
tcagagtcctcctgaatggcccaaagacacccctgtttctggggaacagaagggagctggtacctctggaccattgaggcaacacctccccagaggcaggaccccgcccccatgagaaca

SEQ ID NO: 465525 - DNA, 120 bp, Artificial Sequence
  ENSG00000158258_88 (sequence is synthesized)
tgcagttgaatgatgtggtgcctggccaggaccttggaaaacgtggccatgtgagactagtatagatctccaactattgctgcctctgctgatatggccacctccttaaggtaagaagac

SEQ ID NO: 465526 - DNA, 120 bp, Artificial Sequence
  ENSG00000158258_89 (sequence is synthesized)
taccgacttagctattgtggcaccacgggagcctagcactgcacctggcccatgacatgtgtgccacaaatgttgaattgaattgaatcccagagatcacttgacctcagtgaagggact

SEQ ID NO: 465527 - DNA, 120 bp, Artificial Sequence
  ENSG00000158258_90 (sequence is synthesized)
gggtttgaagaattaagaccccccagtggagaaagcctcctccaacttccttctcggtttgtgagtcaaggtcctttgtaaaatcagatcgacgagggtggaagtgcagtgaacagagga

SEQ ID NO: 465528 - DNA, 120 bp, Artificial Sequence
  ENSG00000158258_91 (sequence is synthesized)
caacatttgtgatgcacgtgggagaaaacaggagtggggttgtttggggactaccccttcctagctatagtcagtaaatggagcccctaagcaaggagcaggggtagatgtgcctgggtg

SEQ ID NO: 465529 - DNA, 120 bp, Artificial Sequence
  ENSG00000158258_92 (sequence is synthesized)
aggcctgcttgctccaccgtcgaggtcatgggcagcatcccaactgaggagagaaaaccctaatttgttaatgacccagccttgtgctgctctccagttcctttcatcagatttactgca

SEQ ID NO: 465530 - DNA, 120 bp, Artificial Sequence
  ENSG00000158258_93 (sequence is synthesized)
gagcagattcatcaacatgaagttcaattcccagtagactaatgaaaagagggcaacagacttgagaagagccaaaatgcagacagtgtgtattaatcacagacaacagaaacgtgttag

SEQ ID NO: 465531 - DNA, 120 bp, Artificial Sequence
  ENSG00000158258_94 (sequence is synthesized)
ctttaatgtctgtttgcttttatcttgaaatgaaaatgcatctctgttacctggaccctttttactgcacatttcagaacagaaatgggacacccacacacgtattgagggtccttttcc

SEQ ID NO: 465532 - DNA, 120 bp, Artificial Sequence
  ENSG00000158258_95 (sequence is synthesized)
ccggcaggaggagctaccagagaaatgagcccacattttgtgtgcagagagaatcaacccacaggtctcagctgcagactccagcacctctgcagagaaggcaggcaaagggatgaggag

SEQ ID NO: 465533 - DNA, 120 bp, Artificial Sequence
  ENSG00000158258_96 (sequence is synthesized)
gtagcatctcctcttcagaaggattcataagggcctctgtgaggagggccttgcttgtgcctgtgggtcatggatgttaatataaaggctcatccacccttggtggcaaaagtgcatcca

SEQ ID NO: 465534 - DNA, 120 bp, Artificial Sequence
  ENSG00000158258_97 (sequence is synthesized)
tcctggccaatatagaacactcacatctggagcccacgcccacccacctccagctcctctacatggctgcaagagcatggctgatgtgtgggattcagaagaggtctgctcatgttcact

SEQ ID NO: 465535 - DNA, 120 bp, Artificial Sequence
  ENSG00000158258_98 (sequence is synthesized)
ttgtttttctgtttttgttttgtttttggcgtggaggagaaatttagacttgaaagtcagggctgatcactcaaaaagtaagataggagatattgagggaaaatgtgactcatagttgga

SEQ ID NO: 465536 - DNA, 120 bp, Artificial Sequence
  ENSG00000158258_99 (sequence is synthesized)
agataggagatattgagggaaaatgtgactcatagttggagaggaaacaggagagtgggtacaagtgacagcaccaggaacaaccccctcccccagatgccaaagcattgctctgtatct

SEQ ID NO: 465537 - DNA, 120 bp, Artificial Sequence
  ENSG00000158258_100 (sequence is synthesized)
aaagatgcatccaagtttgcaaaaaattatgggtaaatctggccatgtgaccaaagaggcagtcaaatcaattgcttccaaagtcagagctgtttgaaggtgatcagctcttaattgaac

SEQ ID NO: 465538 - DNA, 120 bp, Artificial Sequence
  ENSG00000158258_101 (sequence is synthesized)
tagtcatgatgaatcaatccaactgactgcatccagtctgacctcggtggtttccataaagggttgttgatgtcctgagctggacagggtgggcaggaggttgaagaaaaccagttggtg

SEQ ID NO: 465539 - DNA, 120 bp, Artificial Sequence
  ENSG00000158258_102 (sequence is synthesized)
agtatagaaaagaaattgcatgtagaagttgtttgttctcaaagaaatctgtaggtgttagagctgggtttgttatgttattgtcagggacattataatattggtaaggaggagagaatg

SEQ ID NO: 465540 - DNA, 120 bp, Artificial Sequence
  ENSG00000158258_103 (sequence is synthesized)
atttggtaggggtattcgagaaatttgagtacaaaatataaattatcagagatgagtaggctatggacagctgattatatatatgtgtgtgtgtgtatatgtgtgcatatatgtgtacat

SEQ ID NO: 465541 - DNA, 120 bp, Artificial Sequence
  ENSG00000158258_104 (sequence is synthesized)
atacacataccccaaagccatatacatatctataatacagaagtaagaataaagtcataagtaccagcatattttaaatccttagaagcactggttgggatgttacatgttttttcactg

SEQ ID NO: 465542 - DNA, 120 bp, Artificial Sequence
  ENSG00000158258_105 (sequence is synthesized)
ttgttgtttaccgttagctctcaaagcagtgggaatagtgcttggcacatagtaggagtttggtaaacatttggaaattgaagacccagcttatcactccttcatagagactcagtagta

SEQ ID NO: 465543 - DNA, 120 bp, Artificial Sequence
  ENSG00000158258_106 (sequence is synthesized)
tgagtataccccaaattgaatgagccacagagaaatgcatccagccacactccctcttagctgaggagaagcctctgtgaatccacagattccatgcaatattcagccagccgcagacac

SEQ ID NO: 465544 - DNA, 120 bp, Artificial Sequence
  ENSG00000158258_107 (sequence is synthesized)
aaggtctggctcccttgtcgtgagagtgaaggcatgctgcacacagtgggtttgcatgcacctagactgcatctgctgaacacccaacagctgtttctacaagctaaagttgtagcttct

SEQ ID NO: 465545 - DNA, 120 bp, Artificial Sequence
  ENSG00000158258_108 (sequence is synthesized)
ctctaccactgtctaaagctgtagcttgtctctactattgtctctacaccgttgcccaaacacttggtataatgctattgaatttttcacctccaggcatgattttgtaaccaatgtaaa

SEQ ID NO: 465546 - DNA, 120 bp, Artificial Sequence
  ENSG00000158258_109 (sequence is synthesized)
ggttctgggttcagccagtctaaaaagtctaataatttcttctctcagtccttcccttctcccttgtctggagctgccaccgccatttaaaagtgttggacgctgtttattcccagcttc

SEQ ID NO: 465547 - DNA, 120 bp, Artificial Sequence
  ENSG00000158258_110 (sequence is synthesized)
tcaacctcagtgtgtgtgggaaaggcctgaaagagagaggtatgttttctctcctccagagtctctgtggtgttgacacagcagagagaggagggggagcagcctcgtcttgcagaatca

SEQ ID NO: 465548 - DNA, 120 bp, Artificial Sequence
  ENSG00000158258_111 (sequence is synthesized)
ccttcaatcactgctactgtctgggccattactgccagtctggccggtgtctcccacagtggatggctttgcctccagcggtggaccagtgtgtacctgacatgtatcagacttctgagc

SEQ ID NO: 465549 - DNA, 120 bp, Artificial Sequence
  ENSG00000158258_112 (sequence is synthesized)
tcttcaagctgcctcaaagaatgaatctttttagtctagaaaatgtgtttatttgataaatatactattgtgtatgagtgtgaaacaatgcagactttggagtatctcattagaaggact

SEQ ID NO: 465550 - DNA, 120 bp, Artificial Sequence
  ENSG00000158258_113 (sequence is synthesized)
gtatgaatttatagaaaattgaatctaatttcagaagagcgcactgtcttctcagtcaacaaggttgcccagccacagagggtcagagaaaatgtcctttcccctccccactccttttca

SEQ ID NO: 465551 - DNA, 120 bp, Artificial Sequence
  ENSG00000158258_114 (sequence is synthesized)
tagaatcctctctcaggcctaactgagctgtcatatccaattcagactgacacagagtgaggggcgctgagagtctctatgtatataaagatataggaagaaaataaggatcatcacagg

SEQ ID NO: 465552 - DNA, 120 bp, Artificial Sequence
  ENSG00000158258_115 (sequence is synthesized)
aatctgttgggcttctccccatgactgtgatcttacccatgtttgaatcacaaactttaaatttataataattatgattcttgcagttttcaagtaatttgttaaatgcctattcaacac

SEQ ID NO: 465553 - DNA, 120 bp, Artificial Sequence
  ENSG00000158258_116 (sequence is synthesized)
agacagatttttattttcagctgtggcttgtaaatgcctacaaactgattcatgttggtggtcgttatgacactttctgtgaattggtgaataaatatgattttagaatttcacagtaaa

SEQ ID NO: 465554 - DNA, 120 bp, Artificial Sequence
  ENSG00000158258_117 (sequence is synthesized)
ggcagcagttgggaaggtcccaactgaggtcccttgggaatgttccctcacaaaacaggagttgcctttcgtcagctgtcctcaacttctgctattcctctgaggatgcctcaaaggatc

SEQ ID NO: 465555 - DNA, 120 bp, Artificial Sequence
  ENSG00000158258_118 (sequence is synthesized)
tgtgttcttgttttcttcctaagcaagatgttctgttgttttaccaccttgaatccacctttctctatcttgtatcttatctaatgcctagaaggtactactttctataaattctcagag

SEQ ID NO: 465556 - DNA, 120 bp, Artificial Sequence
  ENSG00000158258_119 (sequence is synthesized)
agctaggaatttgaagtgatctgggtgtgcgtttgaagtgttctgatttaagggcgcagtgcgtggtacacaggaagtccttgacaaatgtttattaaattgaattaagttaaccaaccc

SEQ ID NO: 465557 - DNA, 80 bp, Artificial Sequence
  ENSG00000158270_0 (sequence is synthesized)
cggcggcgagggaggacgggggcgcagacggccggcgcgcggcgcggctaccatgggcgtgcggtgagcagccgctcggg

SEQ ID NO: 465558 - DNA, 120 bp, Artificial Sequence
  ENSG00000158270_1 (sequence is synthesized)
acgacttcctcggctgcgcggcgctcgcgcggagctccccggccggcggtgcgtccccacggtcaccatgaaagacgacttcgcagaggaggaggaggtgcaatccttcggttacaagcg

SEQ ID NO: 465559 - DNA, 120 bp, Artificial Sequence
  ENSG00000158270_2 (sequence is synthesized)
gtttggtattcaggaaggaacacaatgtaccaaatgtaaaaataactgggcactgaagttttctatcatattattatacattttgtgtgccttgctaacaatcacagtagccattttggg

SEQ ID NO: 465560 - DNA, 120 bp, Artificial Sequence
  ENSG00000158270_3 (sequence is synthesized)
atataaagttgtagagaaaatggacaatgtcacaggtggcatggaaacatctcgccaaacctatgatgacaagctcacagcagtggaaagtgacctgaaaaaattaggtgaccaaactgg

SEQ ID NO: 465561 - DNA, 120 bp, Artificial Sequence
  ENSG00000158270_4 (sequence is synthesized)
gaagaaagctatcagcaccaactcagaactctccaccttcagatcagacattctagatctccgtcagcaacttcgtgagattacagaaaaaaccagcaagaacaaggatacgctggagaa

SEQ ID NO: 465562 - DNA, 120 bp, Artificial Sequence
  ENSG00000158270_5 (sequence is synthesized)
gttacaggcgagcggggatgctctggtggacaggcagagtcaattgaaagaaactttggagaataactctttcctcatcaccactgtaaacaaaaccctccaggcgtataatggctatgt

SEQ ID NO: 465563 - DNA, 120 bp, Artificial Sequence
  ENSG00000158270_6 (sequence is synthesized)
cacgaatctgcagcaagataccagcgtgctccagggcaatctgcagaaccaaatgtattctcataatgtggtcatcatgaacctcaacaacctgaacctgacccaggtgcagcagaggaa

SEQ ID NO: 465564 - DNA, 120 bp, Artificial Sequence
  ENSG00000158270_7 (sequence is synthesized)
cctcatcacgaatctgcagcggtctgtggatgacacaagccaggctatccagcgaatcaagaacgactttcaaaatctgcagcaggtttttcttcaagccaagaaggacacggattggct

SEQ ID NO: 465565 - DNA, 120 bp, Artificial Sequence
  ENSG00000158270_8 (sequence is synthesized)
gaaggagaaagtgcagagcttgcagacgctggctgccaacaactctgcgttggccaaagccaacaacgacaccctggaggatatgaacagccagctcaactcattcacaggtcagatgga

SEQ ID NO: 465566 - DNA, 120 bp, Artificial Sequence
  ENSG00000158270_9 (sequence is synthesized)
gaacatcaccactatctctcaagccaacgagcagaacctgaaagacctgcaggacttacacaaagatgcagagaatagaacagccatcaagttcaaccaactggaggaacgcttccagct

SEQ ID NO: 465567 - DNA, 120 bp, Artificial Sequence
  ENSG00000158270_10 (sequence is synthesized)
ctttgagacggatattgtgaacatcattagcaatatcagttacacagcccaccacctgcggacgctgaccagcaatctaaatgaagtcaggaccacttgcacagatacccttaccaaaca

SEQ ID NO: 465568 - DNA, 120 bp, Artificial Sequence
  ENSG00000158270_11 (sequence is synthesized)
cacagatgatctgacctccttgaataataccctggccaacatccgtttggattctgtttctctcaggatgcaacaagatttgatgaggtcgaggttagacactgaagtagccaacttatc

SEQ ID NO: 465569 - DNA, 120 bp, Artificial Sequence
  ENSG00000158270_12 (sequence is synthesized)
agtgattatggaagaaatgaagctagtagactccaagcatggtcagctcatcaagaattttacaatactacaaggtccaccgggccccaggggtccaagaggtgacagaggatcccaggg

SEQ ID NO: 465570 - DNA, 120 bp, Artificial Sequence
  ENSG00000158270_13 (sequence is synthesized)
accccctggcccaactggcaacaagggacagaaaggagagaagggggagcctggaccacctggccctgcgggtgagagaggcccaattggaccagctggtccccccggagagcgtggcgg

SEQ ID NO: 465571 - DNA, 120 bp, Artificial Sequence
  ENSG00000158270_14 (sequence is synthesized)
caaaggatctaaaggctcccagggccccaaaggctcccgtggttcccctgggaagcccggccctcagggctccagtggggacccaggccccccgggcccaccaggcaaagagggactccc

SEQ ID NO: 465572 - DNA, 120 bp, Artificial Sequence
  ENSG00000158270_15 (sequence is synthesized)
cggccctcagggccctcctggcttccagggacttcagggcaccgttggggagcctggggtgcctggacctcggggactgccaggcttgcctggggtaccaggcatgccaggccccaaggg

SEQ ID NO: 465573 - DNA, 120 bp, Artificial Sequence
  ENSG00000158270_16 (sequence is synthesized)
cccccccggccctcctggcccatcaggagcggtggtgcccctggccctgcagaatgagccaaccccagcaccggaggacaatggctgcccgcctcactggaagaacttcacagacaaatg

SEQ ID NO: 465574 - DNA, 120 bp, Artificial Sequence
  ENSG00000158270_17 (sequence is synthesized)
ctactatttttcagttgagaaagaaatttttgaggatgcaaagcttttctgtgaagacaagtcttcacatcttgttttcataaacactagagaggaacagcaatggataaaaaaacagat

SEQ ID NO: 465575 - DNA, 120 bp, Artificial Sequence
  ENSG00000158270_18 (sequence is synthesized)
ggtagggagagagagccactggatcggcctcacagactcagagcgtgaaaatgaatggaagtggctggatgggacatctccagactacaaaaattggaaagctggacagccggataactg

SEQ ID NO: 465576 - DNA, 120 bp, Artificial Sequence
  ENSG00000158270_19 (sequence is synthesized)
gggtcatggccatgggccaggagaagactgtgctgggttgatttatgctgggcagtggaacgatttccaatgtgaagacgtcaataacttcatttgcgaaaaagacagggagacagtact

SEQ ID NO: 465577 - DNA, 120 bp, Artificial Sequence
  ENSG00000158270_20 (sequence is synthesized)
gtcatctgcattataacggactgtgatgggatcacatgagcaaattttcagctctcaaaggcaaaggacactcctttctaattgcatcaccttctcatcagattgaaaaaaaaaaagcac

SEQ ID NO: 465578 - DNA, 120 bp, Artificial Sequence
  ENSG00000158270_21 (sequence is synthesized)
tgaaaaccaattactgaaaaaaaattgacagctagtgttttttaccatccgtcattacccaaagacttgggaactaaaatgttccccagggtgatatgctgattttcattgtgcacatgg

SEQ ID NO: 465579 - DNA, 120 bp, Artificial Sequence
  ENSG00000158270_22 (sequence is synthesized)
actgaatcacatagattctcctccgtcagtaaccgtgcgattatacaaattatgtcttccaaagtatggaacactccaatcagaaaaaggttatcattggtcgttgagttatgggaagaa

SEQ ID NO: 465580 - DNA, 120 bp, Artificial Sequence
  ENSG00000158270_23 (sequence is synthesized)
tatgcagacatacagatatataggccaactattagtaataatatgaaatatacttaaagagcttttaaaactttgtatttttgtacaaaatatttgtcttttacaatttttttccttttt

SEQ ID NO: 465581 - DNA, 120 bp, Artificial Sequence
  ENSG00000158270_24 (sequence is synthesized)
aatacatggagccaaagaaaacaataatggtactaataaaaactcctagggtttcctgtcagatttaattctacccagtggcaaagaattttttcaattgtggctttaaaaaaataatta

SEQ ID NO: 465582 - DNA, 120 bp, Artificial Sequence
  ENSG00000158270_25 (sequence is synthesized)
tttttttttttttttaatgtttcatttcctcagaggaaccaatcacttggaatgtctagaaatatccttgcagattttgccagtgtcaatcaagcctgcacacatgcacagtgaagcggg

SEQ ID NO: 465583 - DNA, 120 bp, Artificial Sequence
  ENSG00000158270_26 (sequence is synthesized)
cagtgtcaatcaagcctgcacacatgcacagtgaagcgggctgtgcctgccttgagcccatcaccagccaacattcttgacgtgtgcctgaccagacacagaagaaatgggcaactcaag

SEQ ID NO: 465584 - DNA, 120 bp, Artificial Sequence
  ENSG00000158270_27 (sequence is synthesized)
acgtgcttccacttcattttggtggagtcgggaggtgtgggggatggagaggcatctgttgggaagggcactgaatctggcctatctggaaggccctgtgtcatggctgagctatgactg

SEQ ID NO: 465585 - DNA, 120 bp, Artificial Sequence
  ENSG00000158270_28 (sequence is synthesized)
tacttggcatcagatccctacagagccaacattaactgtcaggaacgtatggcgtcacatcagccaaaggcagagatgctagaaagatgggaaccggctacgtgttacctggaaagtttg

SEQ ID NO: 465586 - DNA, 120 bp, Artificial Sequence
  ENSG00000158270_29 (sequence is synthesized)
ttttcttaagtcatattccaaaaacataactccaaggcatacgcatgataaaatgcaagaataaacttttggccactttgtggaactcttaaaagaacctttccagccgggcgcagtggc

SEQ ID NO: 465587 - DNA, 120 bp, Artificial Sequence
  ENSG00000158270_30 (sequence is synthesized)
tcaaaaaaaaaaaaaaaaaaaaaacctttcctctgagcccatcttcctttcgctccttgactttccttgacttgctgttggaaagtctaatatgaaaagggctgaaactaggcattaaat

SEQ ID NO: 465588 - DNA, 120 bp, Artificial Sequence
  ENSG00000158270_31 (sequence is synthesized)
aagggctgaaactaggcattaaatataactgatgctcaaaggtaagatttccatccaacagattccttctccctcccaagggtcttcccaggcagtgctgctacttatcccaaataaaat

SEQ ID NO: 465589 - DNA, 120 bp, Artificial Sequence
  ENSG00000158270_32 (sequence is synthesized)
cgacagagcgagactcatctcaaaaagaaaaaaaaaaaagaataaagacagagtttgactttcccacctgcgaacaagtggactgtactgctttgcccacagtctccattccccattcat

SEQ ID NO: 465590 - DNA, 120 bp, Artificial Sequence
  ENSG00000158270_33 (sequence is synthesized)
gactgtactgctttgcccacagtctccattccccattcatgctgttttcacagcccagtaatggccaactgctcagcacctgtgtgccctgctgtcaggcaggtgggacccacagtcctc

SEQ ID NO: 465591 - DNA, 120 bp, Artificial Sequence
  ENSG00000158270_34 (sequence is synthesized)
tgggcctaaactgctgaagcctgcaccacaaggcgggcacggcattccaacacctcttcaggctcaacagcctttagaggctacactgagtcctctttttcatgctcttcctggttttca

SEQ ID NO: 465592 - DNA, 120 bp, Artificial Sequence
  ENSG00000158270_35 (sequence is synthesized)
agtgtcaattaaaatttgtcttcagaagaaacttgaaaataagtatctgatgccgtcatcaggatagactagtattagctttcgcagctgaagttattgctctcccagccctaataataa

SEQ ID NO: 465593 - DNA, 120 bp, Artificial Sequence
  ENSG00000158270_36 (sequence is synthesized)
cttaccaagtgcttattatttatcaggcactggtccaagtccttcaatcagattgtctcacctgatcctcccaacagccctaggaagcaggtcttactacactccccatttcacagggac

SEQ ID NO: 465594 - DNA, 120 bp, Artificial Sequence
  ENSG00000158270_37 (sequence is synthesized)
tggggcttggggaggtgatgcggtttcctgggtcactccattactgagtagtgagacaggattcagacgcaagctttgaaaatgttctaattttctttagaaggaagggcccttcttaat

SEQ ID NO: 465595 - DNA, 120 bp, Artificial Sequence
  ENSG00000158270_38 (sequence is synthesized)
agcacactgaataaaatcaaatgaataatcacacattacaagatgcctcctatacgtctctatatttagctacttacataccaggtttcttttttgtttgtttttgtttttaagacagag

SEQ ID NO: 465596 - DNA, 82 bp, Artificial Sequence
  ENSG00000158270_39 (sequence is synthesized)
ctctcccgcctcagcctctgcagtagcttagggactacaggtgcgtgccaccatgccaggctaatttttgtgtttttagtag

SEQ ID NO: 465597 - DNA, 120 bp, Artificial Sequence
  ENSG00000158270_40 (sequence is synthesized)
ggtgtgagccaccgtgcccggcctacacaccagctttctattcacctacacacaactgatgctcttttggagtggagagttttagtaaaatatgatggggtcttcaggcacctgagttgc

SEQ ID NO: 465598 - DNA, 120 bp, Artificial Sequence
  ENSG00000158270_41 (sequence is synthesized)
cacctgagttgctacttactactatgagaagatagaaaatgttttttcctctaaacagcttttgaaagaatgaatgcacaacaaggcaaaaaataaaaactttcttttccttttctacga

SEQ ID NO: 465599 - DNA, 120 bp, Artificial Sequence
  ENSG00000158270_42 (sequence is synthesized)
gtaagtccaagccctccctccagccagggggacagggcagtgcatgtgcttgagactgagccaacccccagtgtgtggccccacccatgttatttttgtttttgtttttgttttgagaca

SEQ ID NO: 465600 - DNA, 71 bp, Artificial Sequence
  ENSG00000158270_43 (sequence is synthesized)
atccaccttgtcccccgctgcatattatttaacagcaaaggcatcataggggctggcacaggagccctgct

SEQ ID NO: 465601 - DNA, 120 bp, Artificial Sequence
  ENSG00000158270_44 (sequence is synthesized)
acagcaaaggcatcataggggctggcacaggagccctgctgccagaacaggcctccataccaggcatgtgtttctctctaaacgccattgggttctctagtgctcatttgttttatgtat

SEQ ID NO: 465602 - DNA, 120 bp, Artificial Sequence
  ENSG00000158270_45 (sequence is synthesized)
tctcactctgtcacccaggctggaatgacgaagtgaagtagtgcaaacatagctcactgcagctttgacctcctgggcttaggtgatcttcccactcagactcctgcgtagctgggacca

SEQ ID NO: 465603 - DNA, 89 bp, Artificial Sequence
  ENSG00000158270_46 (sequence is synthesized)
ctgcagctttgacctcctgggcttaggtgatcttcccactcagactcctgcgtagctgggaccacaggggtcctttttgtagagacagg

SEQ ID NO: 465604 - DNA, 120 bp, Artificial Sequence
  ENSG00000158270_47 (sequence is synthesized)
tcaagcaaccctcctgcctcagtcttgcaaagtgctgggattccaggtgggagccactgcacctggctcttgcacttgtttatttataggagccagccctcagaagacaaacacaatgca

SEQ ID NO: 465605 - DNA, 120 bp, Artificial Sequence
  ENSG00000158270_48 (sequence is synthesized)
aaacatttccttcagggaagcctgctggccgccctgagcgctcttccctcgttttacatcctcactctggagatagatgggctccctcggttagctccatcaacatgtggatggaaccct

SEQ ID NO: 465606 - DNA, 120 bp, Artificial Sequence
  ENSG00000158270_49 (sequence is synthesized)
ctgctattgatgactacatttaatttctttttgagaaaggtgttagatgttacggtgccttctagtcttttgataattaaacctttggcaaaactcgaatgtttggttagcaaccaagcc

SEQ ID NO: 465607 - DNA, 120 bp, Artificial Sequence
  ENSG00000158270_50 (sequence is synthesized)
tatttttctctcctttgacccaaccgctattctacttgattttggtcggtgaggcccgggttatttttgttgatccgtgagcccagttttggtgctgggttctcacatccaagtgttcct

SEQ ID NO: 465608 - DNA, 120 bp, Artificial Sequence
  ENSG00000158270_51 (sequence is synthesized)
gggttccgtatgattccagactgacgctgaacatctgtgcctgccctgcttcttgttgttgcttctgttatttctgtcattgtgaagacggatccagacacagaagaacaaagacccagt

SEQ ID NO: 465609 - DNA, 120 bp, Artificial Sequence
  ENSG00000158270_52 (sequence is synthesized)
caaagatcttttccagattatgtggttttggcttgtgctctgcagtccactttgggtcatgcttgctgcgagcacgtccgtgaacgtcagctgtgggcctcgtgcagggacgctcaggct

SEQ ID NO: 465610 - DNA, 120 bp, Artificial Sequence
  ENSG00000158270_53 (sequence is synthesized)
gctcccagcgggaccacagttttggcctctgaaacacagctgaagaaaggcagagtgctttctgtgatcttttaatcaatgttttccacttttgcattcctaggctgcccgcctcactgg

SEQ ID NO: 465611 - DNA, 120 bp, Artificial Sequence
  ENSG00000158286_0 (sequence is synthesized)
agagggaggccccgcgcagagtgggaaccatcgcccggtgcgggcctgaacttccagggccggctactcctcggcagagcgaccgcgcggtgtctcagagcgcggcccggagccgcacta

SEQ ID NO: 465612 - DNA, 120 bp, Artificial Sequence
  ENSG00000158286_1 (sequence is synthesized)
agagcgctggacggcgggagagaggctcggaggaccggtagctcccagcaaagcggcccagcggatgtcgggagctatcttcgggcccctggagggcccgagctccctggatgccccgag

SEQ ID NO: 465613 - DNA, 120 bp, Artificial Sequence
  ENSG00000158286_2 (sequence is synthesized)
catccacccgctggtgtgcccgctgtgccacgtgcagtacgagcgcccgtgtcttctggactgtttccacgacttctgtgccggctgcctgcgtggccgcgcgaccgacggccgcctcac

SEQ ID NO: 465614 - DNA, 120 bp, Artificial Sequence
  ENSG00000158286_3 (sequence is synthesized)
ctgcccgctgtgccaacaccagacggtgctgaagggtcccagcgggctcccgccggtggaccggctgctgcagttcctggtggacagctcaggggatggcgtggaggcggtgcgctgtgc

SEQ ID NO: 465615 - DNA, 120 bp, Artificial Sequence
  ENSG00000158286_4 (sequence is synthesized)
caactgtgacctggagtgcagcgagcaggacgtggagaccacgtacttctgcaacacgtgcggacagcccctatgcgcgcgctgccgcgacgagacgcaccgagcacgcatgttcgcgcg

SEQ ID NO: 465616 - DNA, 120 bp, Artificial Sequence
  ENSG00000158286_5 (sequence is synthesized)
ccacgacatcgtggccctgggtcagcgaagccgcgacgtgccccagaagtgcacgctgcacgcagagccctacctcttgttctccaccgacaagaagttgctgttgtgcatccgctgctt

SEQ ID NO: 465617 - DNA, 120 bp, Artificial Sequence
  ENSG00000158286_6 (sequence is synthesized)
ccgcgacatgcagaaggagagccgggcacactgcgtggacctggaatcggcttacgtgcagggctgcgagcggctggagcaggcggtgctggccgtgaaggccctgcagacggccacgcg

SEQ ID NO: 465618 - DNA, 120 bp, Artificial Sequence
  ENSG00000158286_7 (sequence is synthesized)
ggaggccatcgcgctgctgcaggccatggtggaggaggtgcggcacagcgccgccgaggaggaggacgctatccacgccctcttcggcagcatgcaggacaggctggcagagaggaaagc

SEQ ID NO: 465619 - DNA, 120 bp, Artificial Sequence
  ENSG00000158286_8 (sequence is synthesized)
gctgctgctgcaggctgtgcagagccaatacgaagagaaggacaaggccttcaaggagcagctctctcacttggccaccttgctgcccaccctgcaggtccacctggtcatctgctcctc

SEQ ID NO: 465620 - DNA, 120 bp, Artificial Sequence
  ENSG00000158286_9 (sequence is synthesized)
cttcctcagcttggccaacaaggctgagttcctggacctgggctatgagctgatggagaggctgcagggcatcgtcacgcggccgcaccacctaaggcctattcagagcagcaagattgc

SEQ ID NO: 465621 - DNA, 120 bp, Artificial Sequence
  ENSG00000158286_10 (sequence is synthesized)
cagtgaccaccgagctgaattcgcgcgctgtctggagccactgctgctgctggggccacgtcgggtggcagctgctgcaagtggtgctaacacgctggcagggggcttaggccccaaggc

SEQ ID NO: 465622 - DNA, 120 bp, Artificial Sequence
  ENSG00000158286_11 (sequence is synthesized)
gctgacggggccccactgcccctccccagtaggaaagatgtcggggtcacccgtccaaaagcccacgctgcaccggtccatcagcaccaaggtgctgctggcggagggcgagaacacgcc

SEQ ID NO: 465623 - DNA, 120 bp, Artificial Sequence
  ENSG00000158286_12 (sequence is synthesized)
cttcgcagagcactgccgccactatgaggactcctaccggcacctgcaggcagagatgcagagcctaaaggaccaggtacaggagctgcaccgagacctcaccaagcaccactcgctcat

SEQ ID NO: 465624 - DNA, 120 bp, Artificial Sequence
  ENSG00000158286_13 (sequence is synthesized)
caaggcggagatcatgggagacgtcctgcacaagtccctgcaactggacgtgcagatcgcctcggagcacgcctccttagagggcatgagggtcgtcttccaggagatttgggaggaagc

SEQ ID NO: 465625 - DNA, 120 bp, Artificial Sequence
  ENSG00000158286_14 (sequence is synthesized)
ctatcagcgagtggctaatgagcaggagatttatgaagcccagctccatgaccttctccagctgaggcaggagaatgcctacctgaccaccatcaccaagcagatcacgccctacgtccg

SEQ ID NO: 465626 - DNA, 120 bp, Artificial Sequence
  ENSG00000158286_15 (sequence is synthesized)
ctccattgccaaggtgaaggagcggctggagcccaggtttcaggcacccgtggatgagcagtcagagagtctacagaacacgcacgacgacagcaggaacaacgcggcctcagccaggaa

SEQ ID NO: 465627 - DNA, 120 bp, Artificial Sequence
  ENSG00000158286_16 (sequence is synthesized)
aaagagagagaagacatcagagcctaaaggaaacagctgggctccgaacggcctctcagaagagcctctactgaaaaatatggatcatcacagatccaaacagaaaaatgggggcgatgt

SEQ ID NO: 465628 - DNA, 120 bp, Artificial Sequence
  ENSG00000158286_17 (sequence is synthesized)
ccccacatggagggaacacccgacttagcaaatgggaccggtccccagggtcaggctcttagagcaggcacaagactgggacactggacagaaggttgttcccatgatggttttttttat

SEQ ID NO: 465629 - DNA, 74 bp, Artificial Sequence
  ENSG00000158286_18 (sequence is synthesized)
ccaaagtgctgagattacaggggtgagtcaccgcgcctggccaatgttgttgttgtttttaagacagaagctca

SEQ ID NO: 465630 - DNA, 120 bp, Artificial Sequence
  ENSG00000158286_19 (sequence is synthesized)
ttatttctttaaaaggtaatcatttgtcaagagtaaaacccagaagctctgacaggccataatttcagatcctttggcttgggcagttttgattttccccgtgtttgcatggcatgaagt

SEQ ID NO: 465631 - DNA, 120 bp, Artificial Sequence
  ENSG00000158286_20 (sequence is synthesized)
cttcgtccttgtcacagtagcttgggatgactcccagtccacatggaaaacatcagggagtgacaatccagcaagaaatccctcgctagttccacacctacgcaccgagcgtcggtgtgc

SEQ ID NO: 465632 - DNA, 120 bp, Artificial Sequence
  ENSG00000158286_21 (sequence is synthesized)
caggccctgtgctgggcagagtgtggtatgtcagggtgtgccggttttaggtaacaagactccaccactgagtggcacctgccctattgcaaaggaatccagttcctccggaataacagt

SEQ ID NO: 465633 - DNA, 120 bp, Artificial Sequence
  ENSG00000158286_22 (sequence is synthesized)
cccactgttaacctggtgctactgggaagttccacacagtaatctgagcagtgactcatggaaggatgaggaacgtttgctccagcttctctccctttccagcaagggcagagctcctaa

SEQ ID NO: 465634 - DNA, 120 bp, Artificial Sequence
  ENSG00000158286_23 (sequence is synthesized)
agccaggggttagcacctggccagcttatgtggcagatggtctcagttacaacttcgctgctttcccaaactcctgcagccctcctgagtccgacttccgttgatagcaaggcactgggt

SEQ ID NO: 465635 - DNA, 120 bp, Artificial Sequence
  ENSG00000158286_24 (sequence is synthesized)
ggcagcaaccttttttctagtagttttttcccagcagttttccatttctccacagtatccttttcatttagaggagcttaataaatgctttttaaaaagtaacccacgtgacgtaaaatt

SEQ ID NO: 465636 - DNA, 120 bp, Artificial Sequence
  ENSG00000158286_25 (sequence is synthesized)
ttacaagtttttgtggcaaaatgatgcccagatagtcacatttaagcaaatattcagcttgattcagtgattaacagcaaatgggtctacgtgctaacatggcagcacattcaacacata

SEQ ID NO: 465637 - DNA, 120 bp, Artificial Sequence
  ENSG00000158286_26 (sequence is synthesized)
acacatcactcacattgacgtccactgtccctgcacctgctacttcaggggcactgaggctcctgttccaaggccttacaaacctatgtggtggcctgcagggcaaaaggaattatcatt

SEQ ID NO: 465638 - DNA, 120 bp, Artificial Sequence
  ENSG00000158286_27 (sequence is synthesized)
acaactggttagaggtaggaattcagaaagaaattgaggaggccaaacacacgtcgtttgaggctaaaggcttaagacgcttcttacccaagagtgacctcagagtttcacatcccagac

SEQ ID NO: 465639 - DNA, 120 bp, Artificial Sequence
  ENSG00000158286_28 (sequence is synthesized)
aatcacactgtggttgagtgaaatcaagtgcagttttatttaagaactggaaagaataatcagtatctgtgaaagaaaatccaatttagaatatttaaataaacatttatgtaaaaagaa

SEQ ID NO: 465640 - DNA, 120 bp, Artificial Sequence
  ENSG00000158286_29 (sequence is synthesized)
gctaacccacatactagcagaggaggaagtcagagtcggccactaaccagatgcaaatccccacactcttccccttagcgcttgaccgtgcctcccagctgctaactggcctcaaatgat

SEQ ID NO: 465641 - DNA, 120 bp, Artificial Sequence
  ENSG00000158286_30 (sequence is synthesized)
gcatgtgaggtcaggattcattgagtagaatgcccccaccaagtgcctccctctttaattagaggtcatcatggaaatggtcgggatatttacgtggtgcctggcttgagtaaaaatctg

SEQ ID NO: 465642 - DNA, 120 bp, Artificial Sequence
  ENSG00000158286_31 (sequence is synthesized)
ttttataaaggcagtttctgccctctccccgcgtcccccacccccctccacggacctacttacccagcctctgagccgcagtgccctcctctgtaaagtgggtatatcagagcgccaagt

SEQ ID NO: 465643 - DNA, 120 bp, Artificial Sequence
  ENSG00000158286_32 (sequence is synthesized)
gcctggattacaggaaagggctgcgtttagctgcgcacccggccacggctgggacaaacacgcgcagtgacacgcggcggctgcggttcccgcgctggccgcggtcgggctctggcgctc

SEQ ID NO: 465644 - DNA, 120 bp, Artificial Sequence
  ENSG00000158286_33 (sequence is synthesized)
ttcctggacctgggctatgtgagtctcctctgctcctgcagatgccccctccccaccaggagcccaccctgcagaccaaagccaccaactcaggggtgggcagcctgtcacctggagcct

SEQ ID NO: 465645 - DNA, 120 bp, Artificial Sequence
  ENSG00000158286_34 (sequence is synthesized)
ggaccagggatctcggggctgaccccctcccaactccatcatctgcaaacctgttagggtcactgttacaaggacagtgaagccaggaagggggcatgagcctacagtcccccgtggggc

SEQ ID NO: 465646 - DNA, 120 bp, Artificial Sequence
  ENSG00000158286_35 (sequence is synthesized)
ggagtgaccactggagtccagccgccccctctcctgtggatttggggatgggatgggggtttgtccgggtgagtcccagaagagggctggcgctgctaagggacaccaagtcaagtgcca

SEQ ID NO: 465647 - DNA, 120 bp, Artificial Sequence
  ENSG00000158286_36 (sequence is synthesized)
aagacagacgtgctccgcctccatctcccctcttcctgccccctggctgccacacctccaccggcctgaggccctcctcactgccacaggagctgatggagaggctgcagggcatcgtca

SEQ ID NO: 465648 - DNA, 120 bp, Artificial Sequence
  ENSG00000158286_37 (sequence is synthesized)
aggcgtgagccaccgcgcccggcctacccttgaagaccccgcagccaaggtcctccggccccgctctgcgcggcgctctggtcttggggctccggactctgtcatgccgggcaggggcca

SEQ ID NO: 465649 - DNA, 120 bp, Artificial Sequence
  ENSG00000158286_38 (sequence is synthesized)
gggcaggggccagtccgatccttgcacccttgcctggcaccgtccctggagccttggcgtcctggcctctcctccccgcgggctggaggtggagtggccgggccggaaccagtgcgcaaa

SEQ ID NO: 465650 - DNA, 120 bp, Artificial Sequence
  ENSG00000158286_39 (sequence is synthesized)
gcagatggcgagcgcggaggtcggttcggccccgccgcgcctcaaggcagcagccaccctggggaaggtggatgccggaagaggcgtcgcctgcgggtcacccagaggacacccggcggg

SEQ ID NO: 465651 - DNA, 120 bp, Artificial Sequence
  ENSG00000158286_40 (sequence is synthesized)
agcatgtcttcagaggacgacctggcagtggattctccagcacctccctagggcaccttggccccaaatgtgaaccccattataccggtggggagactgaggtccagaacaagggacttg

SEQ ID NO: 465652 - DNA, 120 bp, Artificial Sequence
  ENSG00000158286_41 (sequence is synthesized)
agccagtgtccagacagtggcagaggctaaggccattcgatctggggagagctcactggtccccaattcagggtggagttgtggacctgcacaggaggggcagtccagtttgcaggcctg

SEQ ID NO: 465653 - DNA, 120 bp, Artificial Sequence
  ENSG00000158286_42 (sequence is synthesized)
ggccgaccctgaagggcctctgctacccaagtggcatagaagcagctacagcccaggggaggtggggacagcatgctgttccctctgggctgtaaaaggcacaggggactctggcctgcg

SEQ ID NO: 465654 - DNA, 120 bp, Artificial Sequence
  ENSG00000158286_43 (sequence is synthesized)
gaggccagaaaatgtatcgggaatcccaggaggacggcccgactggggcaaaagctccagcgttctggacaagtgctgagcaatgtgtgacccagacgtacagagaggattagcaggagg

SEQ ID NO: 465655 - DNA, 120 bp, Artificial Sequence
  ENSG00000158286_44 (sequence is synthesized)
tagggactgcaggtagggcctgttatgtccatcattgcatgcgtccataccagggctgcaggccaagccctggaatcccagccctgggtctggcttggggaggagaaccttaaagccctc

SEQ ID NO: 465656 - DNA, 120 bp, Artificial Sequence
  ENSG00000158286_45 (sequence is synthesized)
actgctcttcccctccccccgcccccaagtgtgactccagatggccagggtgtacaccacctttcggccactattgagtgtgccaagggggccgtgagaggccctcacacccttttgttg

SEQ ID NO: 465657 - DNA, 120 bp, Artificial Sequence
  ENSG00000158290_0 (sequence is synthesized)
agttcagtttagaaactgccagtcttggtatagaacaacctaggcttatctgtttaagtcccataggtagtattattagagaataacccaggctttgggaactgtataactctgagatcg

SEQ ID NO: 465658 - DNA, 120 bp, Artificial Sequence
  ENSG00000158290_1 (sequence is synthesized)
tttgaaattttcgttttgtttttcttttggctccaaccaggcctctgttgttagactaatggggtttcccctgcagagattggtcagccctgcagtctatcatcccggaaggtgttaaat

SEQ ID NO: 465659 - DNA, 120 bp, Artificial Sequence
  ENSG00000158290_2 (sequence is synthesized)
acacatgaaagccagcctcggcgggcagaacctagcccgccgaaagggcgggcattgctaaagtgttttcaaaaggtcttcccaatcctctgctttagacagctcggaccttagatagaa

SEQ ID NO: 465660 - DNA, 120 bp, Artificial Sequence
  ENSG00000158290_3 (sequence is synthesized)
gaacacaacggatcctccagtgactgacgacccaaaggacggatgatgtcacagtcatctggatcaggagatgggaatgatgatgaggctactacctctaaagacggtggtttttcttcc

SEQ ID NO: 465661 - DNA, 120 bp, Artificial Sequence
  ENSG00000158290_4 (sequence is synthesized)
cccagtccctcagctgctgctgctgctcaggaggtcagatctgccactgatggtaataccagcaccactccgcccacctctgccaagaagagaaagttaaacagcagcagcagtagcagc

SEQ ID NO: 465662 - DNA, 120 bp, Artificial Sequence
  ENSG00000158290_5 (sequence is synthesized)
agtaacagtagtaacgagagagaagactttgattccacctcttcctcctcttccactcctcctttacaacccagggattcggcatccccttcaacctcgtccttctgcctgggggtttca

SEQ ID NO: 465663 - DNA, 120 bp, Artificial Sequence
  ENSG00000158290_6 (sequence is synthesized)
gtggctgcttccagccacgtaccgatacagaagaagctgcgttttgaagacaccctggagtttgtagggtttgatgcgaagatggctgaggaatcctcctcctcctcctcctcatcttca

SEQ ID NO: 465664 - DNA, 120 bp, Artificial Sequence
  ENSG00000158290_7 (sequence is synthesized)
ccaactgctgcaacatctcagcagcagcaacttaaaaataagagtatattaatctcttctgtggcttcggtgcatcatgcaaacggcctagccaaatcttctaccaccgtctctagcttt

SEQ ID NO: 465665 - DNA, 120 bp, Artificial Sequence
  ENSG00000158290_8 (sequence is synthesized)
gctaacagcaaacctggctctgctaagaagttagtgatcaagaactttaaagataagcctaaattaccagaaaactacacagatgaaacctggcaaaaactgaaagaagcagtggaagct

SEQ ID NO: 465666 - DNA, 120 bp, Artificial Sequence
  ENSG00000158290_9 (sequence is synthesized)
attcagaatagtacttcaattaagtacaatttagaagaactctaccaggctgtagaaaatctctgttcttacaagatttctgcaaacttgtacaaacagctgagacagatctgcgaagat

SEQ ID NO: 465667 - DNA, 120 bp, Artificial Sequence
  ENSG00000158290_10 (sequence is synthesized)
cacatcaaagcacagattcatcaattcagagaggattcattggatagcgttctttttttaaagaagattgatagatgctggcaaaaccattgcagacaaatgatcatgatcaggagcatt

SEQ ID NO: 465668 - DNA, 120 bp, Artificial Sequence
  ENSG00000158290_11 (sequence is synthesized)
tttttgtttctggatagaacttacgttcttcagaattcaatgctaccctccatttgggacatgggactggagttatttagggctcatattataagtgatcagaaagtgcagaataagaca

SEQ ID NO: 465669 - DNA, 120 bp, Artificial Sequence
  ENSG00000158290_12 (sequence is synthesized)
attgatggcattcttctcttgattgagagggaaaggaatggtgaagcaattgatagaagtttacttcgaagccttttaagcatgctgtctgatttgcaaatttatcaagattcttttgaa

SEQ ID NO: 465670 - DNA, 120 bp, Artificial Sequence
  ENSG00000158290_13 (sequence is synthesized)
cggctctatgcagctgaaggccaaaaattaatgcaagaaagagaggttcctgaatatctacatcatgttaacaaacgtctagaagaagaagcagacagacttattacttacttagatcag

SEQ ID NO: 465671 - DNA, 120 bp, Artificial Sequence
  ENSG00000158290_14 (sequence is synthesized)
accacccagaagtcattaattgctactgtagaaaaacaacttctaggtgaacacttaacagcaattcttcagaaaggtttaaataacctccttgatgaaaaccgaattcaagatttgtct

SEQ ID NO: 465672 - DNA, 120 bp, Artificial Sequence
  ENSG00000158290_15 (sequence is synthesized)
cttctgtatcagctcttcagtagagttcgaggtggagttcaggttcttttgcagcagtggatcgaatatatcaaggcatttggcagcactattgtaattaatcctgaaaaagataaaacc

SEQ ID NO: 465673 - DNA, 120 bp, Artificial Sequence
  ENSG00000158290_16 (sequence is synthesized)
atggttcaagaattgctggattttaaagataaggttgaccatataattgatatctgctttctgaagaatgagaaatttatcaatgccatgaaagaagcatttgaaacgttcattaacaaa

SEQ ID NO: 465674 - DNA, 120 bp, Artificial Sequence
  ENSG00000158290_17 (sequence is synthesized)
agaccaaataaaccagctgaacttatagctaagtatgtagattcaaaacttcgtgcaggcaacaaagaagctacagatgaagaacttgagaaaatgttggataaaattatgatcatattt

SEQ ID NO: 465675 - DNA, 120 bp, Artificial Sequence
  ENSG00000158290_18 (sequence is synthesized)
agatttatctatggcaaggatgtttttgaggccttctataagaaagatttagccaagcgcctgttagtcggaaagagtgcatctgtagatgctgaaaaatcaatgctgtccaaacttaaa

SEQ ID NO: 465676 - DNA, 120 bp, Artificial Sequence
  ENSG00000158290_19 (sequence is synthesized)
catgaatgcggagctgctttcaccagcaaacttgaaggaatgtttaaagacatggaactttctaaagacatcatgattcagttcaaacagtatatgcagaatcagaatgttccgggaaat

SEQ ID NO: 465677 - DNA, 120 bp, Artificial Sequence
  ENSG00000158290_20 (sequence is synthesized)
attgagttaactgtgaatatcctgacaatgggctattggccgacatatgtgcctatggaagttcatttaccaccagagatggtaaaacttcaggagattttcaagacattttacctaggc

SEQ ID NO: 465678 - DNA, 120 bp, Artificial Sequence
  ENSG00000158290_21 (sequence is synthesized)
aaacatagtggcaggaaacttcagtggcagtcaaccctaggacactgtgtgttaaaagcagaatttaaagagggtaaaaaggaactccaggtctctctttttcaaacactggtgctgcta

SEQ ID NO: 465679 - DNA, 120 bp, Artificial Sequence
  ENSG00000158290_22 (sequence is synthesized)
atgtttaatgagggagaggagttcagtttagaagagatcaagcaggcaactggaatagaggatggagagttaaggagaacactgcagtcattagcctgtggcaaagctagagttctggcg

SEQ ID NO: 465680 - DNA, 120 bp, Artificial Sequence
  ENSG00000158290_23 (sequence is synthesized)
aaaaatccaaagggcaaagacattgaagatggtgacaagttcatttgtaatgatgatttcaaacataaacttttcaggataaagatcaatcaaatccagatgaaagaaacggttgaagaa

SEQ ID NO: 465681 - DNA, 120 bp, Artificial Sequence
  ENSG00000158290_24 (sequence is synthesized)
caagcaagcactacagaaagagtatttcaagacagacagtatcaaattgatgctgcaattgttcgaattatgaagatgagaaagacacttagccacaatctccttgtttcagaagtgtac

SEQ ID NO: 465682 - DNA, 120 bp, Artificial Sequence
  ENSG00000158290_25 (sequence is synthesized)
aaccagttgaaatttccagtaaagcctgctgatcttaagaagagaatagaatctttaattgaccgggactacatggaaagagataaagaaaatccaaaccagtacaactatattgcatag

SEQ ID NO: 465683 - DNA, 120 bp, Artificial Sequence
  ENSG00000158290_26 (sequence is synthesized)
aatgttggccttgcagcatttggtgtcatatgcagtagccagtggataaactaacctgttgattcaatattatttgactccttttttactaccgatgaccaaatgaagcagtgtaattaa

SEQ ID NO: 465684 - DNA, 120 bp, Artificial Sequence
  ENSG00000158290_27 (sequence is synthesized)
atagttgagtggactttttctcagtggttaacatgcccattttaaagagtaatacttacctttaagaagaatgttgttgaactctttgcatgttatttagtatgatgtgcagaaaacact

SEQ ID NO: 465685 - DNA, 120 bp, Artificial Sequence
  ENSG00000158290_28 (sequence is synthesized)
taagaacgtacctggtcttcatgaattcctctttggaactgggaaagagatccctgtggctattaaaaaggggggagggttcttacacaccattaattatgaagcaaaaggtttatttgc

SEQ ID NO: 465686 - DNA, 120 bp, Artificial Sequence
  ENSG00000158290_29 (sequence is synthesized)
tccaacgtatctgcagggaactggctccaggaaccctgcagataccaaaatcggtgcatattcaactcccacagtcagctctgcggaacccacagatacaaaaagttggccttcccttta

SEQ ID NO: 465687 - DNA, 120 bp, Artificial Sequence
  ENSG00000158290_30 (sequence is synthesized)
caggtttccaatcctgcaaatcctgtattttccattcctgcttgattgctgatgtggaacccgcccatgcagagggccgactgtatttattgaaaaaatatgtgtataaatggaccatca

SEQ ID NO: 465688 - DNA, 120 bp, Artificial Sequence
  ENSG00000158290_31 (sequence is synthesized)
ctcatgcctccatgtctttgcacacactgttccccttttcaagtaatccatagatctctagatctcactgtcctgatactacaaattaagtttggatttgtatgattaatatacaggtta

SEQ ID NO: 465689 - DNA, 120 bp, Artificial Sequence
  ENSG00000158290_32 (sequence is synthesized)
caacgttaagcccccatattgtggaccatagagagtccattcttccaccaggttggagggtgcatcccccgcccttgagtaatttccagaaatccacaaggtatgcttaaatgttacaaa

SEQ ID NO: 465690 - DNA, 120 bp, Artificial Sequence
  ENSG00000158290_33 (sequence is synthesized)
aatcaatcctagttgtcatttgttatctctgccagctattctttctgcatactgtcatggtctgccttcaataagtcaccacttcctgtcttgaaactttttttaaaaaaaccttttagt

SEQ ID NO: 465691 - DNA, 120 bp, Artificial Sequence
  ENSG00000158290_34 (sequence is synthesized)
ttttttaattttaaaaatttctgcaaacactatggcgacttgtgtaattttaatacatacaaaagatgtatgatgtgtaatttatggagcataattattaaataaacatccaggaatcta

SEQ ID NO: 465692 - DNA, 120 bp, Artificial Sequence
  ENSG00000158290_35 (sequence is synthesized)
cttttttggtggagggttcattttccgggggtggttaggatccttgtgctgaagcatacaccgggtgtttctgtgcagtattttgaggtctttttcaacctattgtatttaatctgttat

SEQ ID NO: 465693 - DNA, 120 bp, Artificial Sequence
  ENSG00000158290_36 (sequence is synthesized)
cccgttttgtgatttcccttgaaaagagaaatgaattgtcatagctattgatattttactaggtgatgttctgttacactgaaagggatgttttttaaaaaaaattatttggaaacaagt

SEQ ID NO: 465694 - DNA, 120 bp, Artificial Sequence
  ENSG00000158290_37 (sequence is synthesized)
tttcaagtagggggacagttgcttacataatatcttgtatattcacatcctaaaaattttcatttatgagtatgggatgtgtgtatatggcttagccccaagttaactgtgctgattaac

SEQ ID NO: 465695 - DNA, 120 bp, Artificial Sequence
  ENSG00000158290_38 (sequence is synthesized)
aagtacttataaaaatagctaaagtagaaaattaatgatcagttgtactagaggaacatcatagaagagaaaaatccaactctttatattaaaaatgaatacaataagaaaattgcaaaa

SEQ ID NO: 465696 - DNA, 120 bp, Artificial Sequence
  ENSG00000158290_39 (sequence is synthesized)
gagaccaaaatgaacgtgttttgtaaattgttacaggagcaaaaactttgcaactagttttcaacatactttagactttaaatgttgtttggacagttttgtcttcaacttggaccaatt

SEQ ID NO: 465697 - DNA, 120 bp, Artificial Sequence
  ENSG00000158290_40 (sequence is synthesized)
gtagattgttacaggcttcctaggatttagcattcctattttctctaccaaagttttttttagaagcatcccaactcttctctttgttgataaataagcctttcctgtcatcttcatttt

SEQ ID NO: 465698 - DNA, 120 bp, Artificial Sequence
  ENSG00000158290_41 (sequence is synthesized)
aacttgctaaaaccctagatacaaaggtcctccctcatttttcccacagagcccctgtttgggaatttgagattctgtgtcatgctggttttcctttcagaattgcttgaaatcgagttc

SEQ ID NO: 465699 - DNA, 120 bp, Artificial Sequence
  ENSG00000158290_42 (sequence is synthesized)
tcttagccactggacacctagttttcaggagaatgtcccaagattgtttatatatacaaaatggcaaaagtactgtttttcgaattgataattcaagcaaaggcttctctttactgtcac

SEQ ID NO: 465700 - DNA, 120 bp, Artificial Sequence
  ENSG00000158290_43 (sequence is synthesized)
tgatttttttttgtttttattttgtttccttgtttctatttccttgaagctttgaagggaggagaagcagaaaattttgtttatgtttgttaaaaatcagaactacttaatgctttttgc

SEQ ID NO: 465701 - DNA, 120 bp, Artificial Sequence
  ENSG00000158290_44 (sequence is synthesized)
cacagcatatttccttgcctgttggagccgttaggaagattacctatgtcctaatcttcaacctgagaagatttttgactcttgtgtctactgttgattgtttgcttgagttctcaaaga

SEQ ID NO: 465702 - DNA, 120 bp, Artificial Sequence
  ENSG00000158290_45 (sequence is synthesized)
cctgtggccaggtattttaaaaagtcgtctatttctttctagttgcatcaacttgcacactggtgtctaactatatgtggtattcggaacttgtaattcttattgagcagccattgccta

SEQ ID NO: 465703 - DNA, 120 bp, Artificial Sequence
  ENSG00000158290_46 (sequence is synthesized)
tattttctcagctcctcactgatttctttatatgagctcagctgacaagcaaatgcagctattttgtttaccctctcttcataccggaccatcaacaacagtgttctaactcatccctga

SEQ ID NO: 465704 - DNA, 120 bp, Artificial Sequence
  ENSG00000158290_47 (sequence is synthesized)
tggtctgtgagatgtagactattacacaagattcaagttactcgtaagcaacttttagatagagttggtcctgttaggaggagactcttgatgtcaccttcagtatcttgaaagcgggtc

SEQ ID NO: 465705 - DNA, 120 bp, Artificial Sequence
  ENSG00000158290_48 (sequence is synthesized)
ccctccccgaggctcttaattctttgaaaacttgatgctgtttcagctgaaaaattagcaagactgttaaaaaaaaaaagttgaggggagctgtttaagaaactgaaaagtaattgcaaa

SEQ ID NO: 465706 - DNA, 120 bp, Artificial Sequence
  ENSG00000158290_49 (sequence is synthesized)
ctacattggataattgtgactttcagttgttgttctgtatcagttgaatttttgtgctcttttccctgtgtacgtggtggttctatttttctccaataaaacttttatttaaaaaaagtt

SEQ ID NO: 465707 - DNA, 120 bp, Artificial Sequence
  ENSG00000158290_50 (sequence is synthesized)
gggaaggaaggcgctgccaggaaaggggatcgcgaaggggagcgggagcaggagcgaactagcgcgagcgtctggggcactttagccgcccctttccagccgccccctcacgcgcgagct

SEQ ID NO: 465708 - DNA, 120 bp, Artificial Sequence
  ENSG00000158290_51 (sequence is synthesized)
gaaaacataaattgagcaagctcctgaggtttccaacttattgtacataatatccagagttgttttttttaagataaagcattgttcttggttttattatttgtataaaaatttcccatt

SEQ ID NO: 465709 - DNA, 120 bp, Artificial Sequence
  ENSG00000158290_52 (sequence is synthesized)
tattttatacctaaatagtagataaggttactacaggattaaagagtttgactctgaattaatggggcatacactttggggtaaggatttctttttattcttatgaaagttacagatcat

SEQ ID NO: 465710 - DNA, 80 bp, Artificial Sequence
  ENSG00000158292_0 (sequence is synthesized)
gagcggcgggagctgagcgaagcgcggcggcggcggcggcgcctaggggagggaggggcggcggggccgagcccacctag

SEQ ID NO: 465711 - DNA, 80 bp, Artificial Sequence
  ENSG00000158292_1 (sequence is synthesized)
cggcccgggggcgcgggaaccgcagccggagccggaggcgggagcagcgagccggagccccgggcgctcgaatgcaggat

SEQ ID NO: 465712 - DNA, 120 bp, Artificial Sequence
  ENSG00000158292_2 (sequence is synthesized)
cagcgagccggagccccgggcgctcgaatgcaggatgctcgtggtccccagcatccttgagccaccaggagtgagggctgctgctccctgagacctggctccaaggaggatgccacagcc

SEQ ID NO: 465713 - DNA, 120 bp, Artificial Sequence
  ENSG00000158292_3 (sequence is synthesized)
gcctgccagctccggtctgcaccatgagtgatgagcggcggctgcctggcagtgcagtgggctggctggtatgtgggggcctctccctgctggccaatgcctggggcatcctcagcgttg

SEQ ID NO: 465714 - DNA, 120 bp, Artificial Sequence
  ENSG00000158292_4 (sequence is synthesized)
gcgccaagcagaagaagtggaagcccttggagttcctgctgtgtacactcgcggccacccacatgctaaatgtggccgtgcccatcgccacctactccgtggtgcagctgcggcggcagc

SEQ ID NO: 465715 - DNA, 120 bp, Artificial Sequence
  ENSG00000158292_5 (sequence is synthesized)
gccccgacttcgagtggaatgagggtctctgcaaggtcttcgtgtccaccttctacaccctcaccctggccacctgtttctctgtcacctccctctcctaccaccgcatgtggatggtct

SEQ ID NO: 465716 - DNA, 120 bp, Artificial Sequence
  ENSG00000158292_6 (sequence is synthesized)
gctggcctgtcaactaccggctgagcaatgccaagaagcaggcggtgcacacagtcatgggtatctggatggtgtccttcatcctgtcggccctgcctgccgttggctggcacgacacca

SEQ ID NO: 465717 - DNA, 120 bp, Artificial Sequence
  ENSG00000158292_7 (sequence is synthesized)
gcgagcgcttctacacccatggctgccgcttcatcgtggctgagatcggcctgggctttggcgtctgcttcctgctgctggtgggcggcagcgtggccatgggcgtgatctgcacagcca

SEQ ID NO: 465718 - DNA, 120 bp, Artificial Sequence
  ENSG00000158292_8 (sequence is synthesized)
tcgccctcttccagacgctggccgtgcaggtggggcgccaggccgaccgccgcgccttcaccgtgcccaccatcgtggtggaggacgcgcagggcaagcggcgctcctccatcgatggct

SEQ ID NO: 465719 - DNA, 120 bp, Artificial Sequence
  ENSG00000158292_9 (sequence is synthesized)
cggagcccgccaaaacctctctgcagaccacgggcctcgtgaccaccatagtcttcatctacgactgcctcatgggcttccctgtgctggtggtgagcttcagcagcctgcgggccgacg

SEQ ID NO: 465720 - DNA, 120 bp, Artificial Sequence
  ENSG00000158292_10 (sequence is synthesized)
cctcagcgccctggatggcactctgcgtgctgtggtgctccgtggcccaggccctgctgctgcctgtgttcctctgggcctgcgaccgctaccgggctgacctcaaagctgtccgggaga

SEQ ID NO: 465721 - DNA, 120 bp, Artificial Sequence
  ENSG00000158292_11 (sequence is synthesized)
agtgcatggccctcatggccaacgacgaggagtcagacgatgagaccagcctggaaggtggcatctccccggacctggtgttggagcgctccctggactatggctatggaggtgattttg

SEQ ID NO: 465722 - DNA, 120 bp, Artificial Sequence
  ENSG00000158292_12 (sequence is synthesized)
tggccctagataggatggccaagtatgagatctccgccctggaggggggcctgccccagctctacccactgcggcccttgcaggaggacaagatgcaatacctgcaggtcccgcccacgc

SEQ ID NO: 465723 - DNA, 120 bp, Artificial Sequence
  ENSG00000158292_13 (sequence is synthesized)
aatacctgcaggtcccgcccacgcggcgcttctcccacgacgatgcggacgtgtgggccgccgtcccgctgcccgccttcctgccgcgctggggctccggcgaggacctggccgccctgg

SEQ ID NO: 465724 - DNA, 80 bp, Artificial Sequence
  ENSG00000158292_14 (sequence is synthesized)
ccgagcggcgccgcgccagcctcctggccttcgcggaggacgcaccaccgtcccgcgcgcgccgccgctcggccgagagc

SEQ ID NO: 465725 - DNA, 80 bp, Artificial Sequence
  ENSG00000158292_15 (sequence is synthesized)
ccccgggcccggcccccgctccgcctcggcctcgctgctgcccgacgccttcgccctgaccgccttcgagtgcgagccac

SEQ ID NO: 465726 - DNA, 80 bp, Artificial Sequence
  ENSG00000158292_16 (sequence is synthesized)
gcccccgacggcgcagatcccggagaggccccgacgcccccaagcagcgcccagcggagcccagggccacgcccctctgc

SEQ ID NO: 465727 - DNA, 120 bp, Artificial Sequence
  ENSG00000158292_17 (sequence is synthesized)
cgagtcctcgggctacgccacgctgcactcggactcgctgggctccgcgtcctaggaccgccggcgcctccccacggacgccaggcaggccaggccgctctccggggccgcagcaccaaa

SEQ ID NO: 465728 - DNA, 120 bp, Artificial Sequence
  ENSG00000158292_18 (sequence is synthesized)
gacgcccgcctccgccccgcgcgcagacatgcgccacccctcccaggggtgagggggcgttggcctcagcgtttgtcttccggctcctcccagctggccttgtcccaggggcgacggctg

SEQ ID NO: 465729 - DNA, 120 bp, Artificial Sequence
  ENSG00000158292_19 (sequence is synthesized)
ccccggacgactgcgctgggcaccgcatgtcccgggccgagtgaggtcgggcctggggagctgagtgacatcccaagcttgggcttgggtagtgagtgacatgtgcacacgtccagctgc

SEQ ID NO: 465730 - DNA, 120 bp, Artificial Sequence
  ENSG00000158292_20 (sequence is synthesized)
gccatcaccagccctgcgcaacaggacgtcgggagcagggaacctgagacagggccactgcgggatcggacaaagccccgctttggagaggctgagctggagccattggcctccccaggg

SEQ ID NO: 465731 - DNA, 120 bp, Artificial Sequence
  ENSG00000158292_21 (sequence is synthesized)
gctttccacccacactgcaccataaccgccacacccttcggggggggggagggtacagagggtctctaagcacaggggtgttcagagcccgaacaagctttgatcaggtttccctgcttc

SEQ ID NO: 465732 - DNA, 120 bp, Artificial Sequence
  ENSG00000158292_22 (sequence is synthesized)
cgacctgtcctgcctcagtttccccatctgtgatgagcaggtgaccacgttaactctcagggctgtttgaagtctcttggttgtaggccctcgccactgagtggcccaggtgtgagaggt

SEQ ID NO: 465733 - DNA, 120 bp, Artificial Sequence
  ENSG00000158292_23 (sequence is synthesized)
agtctagagccctctgcggcctttgtggaggtccgttttcagcatgtggcctggtgtggctccctaggcctgaggcctcccactctcagtgccccctgcccccttgggaacccacactcc

SEQ ID NO: 465734 - DNA, 120 bp, Artificial Sequence
  ENSG00000158292_24 (sequence is synthesized)
accccagctaagcacaacactgtggaccaccaccaatggcacctgagccaccttgaccaccattagtgtccccaccctcattactctgccgtcgttgcctgtccccaccacatcatctcc

SEQ ID NO: 465735 - DNA, 120 bp, Artificial Sequence
  ENSG00000158292_25 (sequence is synthesized)
ctccatggctcccaccatgacgctggcaggtgcaagcggagagcacgagggcagcagggcctggccttccgtgtccctgcgtcatccccagcctcactccccacccgtgcaggcctggcc

SEQ ID NO: 465736 - DNA, 120 bp, Artificial Sequence
  ENSG00000158292_26 (sequence is synthesized)
aggaagggatcctggcaggggcttccaggttctcagctcaaggcctggtcccgggcaggcgtccaacccctgggagcaatgtatttctttgccttccatcctgggcagaccccttacagg

SEQ ID NO: 465737 - DNA, 120 bp, Artificial Sequence
  ENSG00000158292_27 (sequence is synthesized)
cctgggcattgccatgggccctgggtcttcccaggctaaggagaaccaggaacagctataaccttgagctagtgaaatagggtagatgagaaggctgtctcctccagacccctaccccta

SEQ ID NO: 465738 - DNA, 120 bp, Artificial Sequence
  ENSG00000158292_28 (sequence is synthesized)
cacagtggccccacaatatgaagacctggggtaattccaaggtgagcatagagcctgcctgtgcccagttccttctggccctcaggtggccaagcccatctcttcatccttcagataggg

SEQ ID NO: 465739 - DNA, 120 bp, Artificial Sequence
  ENSG00000158292_29 (sequence is synthesized)
tcccactcccagaagaagctgctggggtgggggtgggaggctgcctaagcctgtctgtgcttcagaggcccctccagtccctggctgtggggtaactgggggtatgagctgtggccacag

SEQ ID NO: 465740 - DNA, 120 bp, Artificial Sequence
  ENSG00000158292_30 (sequence is synthesized)
gtgagcaaggcagggaactgcaatccagccctggccgcgggaggggccatctctggccaatgctgctgtgccttcaaggactgacaagttacgtaggggcagaggtcgccagctagccag

SEQ ID NO: 465741 - DNA, 120 bp, Artificial Sequence
  ENSG00000158292_31 (sequence is synthesized)
tgtctcctccatctggggggcgtctgtccacttgtcaccttaggttttcactcatttgtcaccttggggttttgctctgtgtgtttcatatccaacggcaatacttgcagggggacagag

SEQ ID NO: 465742 - DNA, 120 bp, Artificial Sequence
  ENSG00000158292_32 (sequence is synthesized)
tcctctaaatactccaatcctgcggtttttacaaacataaagggggagaccccaagtggaggaccctgggcctggagctccctcccaaactttgtccagcatccagcctgttccctgggc

SEQ ID NO: 465743 - DNA, 120 bp, Artificial Sequence
  ENSG00000158292_33 (sequence is synthesized)
tcactggggagggagttgtcttcatagcacacccagagccagggatccctttgtagttttttgacaacggagcatttctcttctgtacaggacccaataaaaacttccttatgatttgca

SEQ ID NO: 465744 - DNA, 120 bp, Artificial Sequence
  ENSG00000158296_0 (sequence is synthesized)
agtcccgggccggcccgtaccgccaggcgatcgcgctgatggcggcgctggcagcagcggccaagaaggtgtggagcgcgcggcggctgctggtgctgctgttcacgccgctcgcgctgc

SEQ ID NO: 465745 - DNA, 120 bp, Artificial Sequence
  ENSG00000158296_1 (sequence is synthesized)
tgccggtggtcttcgccctcccgcccaaggaaggccgctgcttgtttgtcatcctgctcatggcggtgtactggtgcacggaggccctgccgctctcagtgacggcgctgctgcccatcg

SEQ ID NO: 465746 - DNA, 120 bp, Artificial Sequence
  ENSG00000158296_2 (sequence is synthesized)
tcctcttccccttcatgggcatcttgccctccaacaaggtctgcccccagtacttcctcgacaccaacttcctcttcctcagtgggctgatcatggccagcgccattgaggagtggaacc

SEQ ID NO: 465747 - DNA, 120 bp, Artificial Sequence
  ENSG00000158296_3 (sequence is synthesized)
tgcaccggcgaatcgccctcaagatcctgatgcttgttggagtccagccggccaggctcatcctggggatgatggtgaccacctcgttcttgtccatgtggctgagcaacaccgcctcca

SEQ ID NO: 465748 - DNA, 120 bp, Artificial Sequence
  ENSG00000158296_4 (sequence is synthesized)
ctgccatgatgcttcccattgccaatgccatcctgaaaagtctctttggccagaaggaggttcgaaaggaccccagccaggagagtgaagagaacacagctgctgtgcggagaaacggcc

SEQ ID NO: 465749 - DNA, 120 bp, Artificial Sequence
  ENSG00000158296_5 (sequence is synthesized)
tacacactgtgcccacggagatgcagtttctcgccagcacagaagccaaagaccaccctggggagacagaggttccactggatctgccggctgactccaggaaggaggatgaatatcgtc

SEQ ID NO: 465750 - DNA, 120 bp, Artificial Sequence
  ENSG00000158296_6 (sequence is synthesized)
ggaacatctggaagggcttcctcatctccatcccctactcagccagtattgggggcacagccacactcacgggcacagcccctaacctcatcctgcttggccagctcaagagtttctttc

SEQ ID NO: 465751 - DNA, 120 bp, Artificial Sequence
  ENSG00000158296_7 (sequence is synthesized)
cgcagtgtgacgtggtgaatttcggctcctggttcattttcgccttccctcttatgctgttgttcctgttggcaggctggctctggatctccttcctgtacgggggactgagcttcaggg

SEQ ID NO: 465752 - DNA, 120 bp, Artificial Sequence
  ENSG00000158296_8 (sequence is synthesized)
gctggaggaagaataaatctgagataagaaccaatgcagaagatagggctcgagctgtaattcgggaagaataccagaacctggggcccatcaagtttgccgaacaggctgttttcatcc

SEQ ID NO: 465753 - DNA, 120 bp, Artificial Sequence
  ENSG00000158296_9 (sequence is synthesized)
ttttctgcatgtttgccatcctcctcttcacccgggacccgaagttcatccctggctgggccagcctcttcaatcctgggtttctttctgatgctgtcaccggcgtggctattgtcacca

SEQ ID NO: 465754 - DNA, 120 bp, Artificial Sequence
  ENSG00000158296_10 (sequence is synthesized)
tcttgttcttcttcccgtcccaaaggccctctctcaagtggtggtttgacttcaaagctcccaacacagagacagagcccttgctgacctggaagaaggcccaggagacagtgccctgga

SEQ ID NO: 465755 - DNA, 120 bp, Artificial Sequence
  ENSG00000158296_11 (sequence is synthesized)
acatcatccttctcctgggagggggcttcgccatggccaaaggctgtgaggaatcggggctgtctgtatggattggtgggcagctgcaccccctggagaatgtgccccccgccctggctg

SEQ ID NO: 465756 - DNA, 120 bp, Artificial Sequence
  ENSG00000158296_12 (sequence is synthesized)
tgctgctcatcactgtggtcatcgccttcttcactgagtttgccagcaacacggcgaccatcatcatcttcctgccggtcctggcagagctggccatccgcctgagagtgcaccccctgt

SEQ ID NO: 465757 - DNA, 120 bp, Artificial Sequence
  ENSG00000158296_13 (sequence is synthesized)
atctgatgattccgggcacagtcggctgctcctttgccttcatgctcccggtctcaacgccccccaactccatcgccttcgcctctggacacttgctggtcaaagacatggtgcggacag

SEQ ID NO: 465758 - DNA, 120 bp, Artificial Sequence
  ENSG00000158296_14 (sequence is synthesized)
gcctcctgatgaacctgatgggtgtcctgctgctcagtttggctatgaatacctgggcacagaccatcttccagctgggcaccttcccggactgggctgatatgtactcggtcaatgtca

SEQ ID NO: 465759 - DNA, 120 bp, Artificial Sequence
  ENSG00000158296_15 (sequence is synthesized)
cagcattgccacccaccttggccaatgacacatttcggaccctctgagtccccctggaggactcccttgaggctgaaccctctcaaagggctgtcaccatcacctgctgctaggacacta

SEQ ID NO: 465760 - DNA, 120 bp, Artificial Sequence
  ENSG00000158296_16 (sequence is synthesized)
gccattatctaggatactttctctctctttcatgcagttcaaagcccaggtatctctcagatctgctgcctgagaaataagctcctttatcagttagctgttttatcattaggatacaag

SEQ ID NO: 465761 - DNA, 120 bp, Artificial Sequence
  ENSG00000158296_17 (sequence is synthesized)
acagcccagtgtcatcaacagtgagcaaatctggcatggtgtttgtctcgtacagttgggataggaggccattcattcccatgggcacagctaacattatcccccagtgattactttcga

SEQ ID NO: 465762 - DNA, 120 bp, Artificial Sequence
  ENSG00000158296_18 (sequence is synthesized)
ttacactgaagagaccaccttgtctttaaagatcactttcctgggctgcaatgttccaacccagttgttccagctgttcacaaccagtgtgtgattttgcttagttggtgcccattctgc

SEQ ID NO: 465763 - DNA, 120 bp, Artificial Sequence
  ENSG00000158296_19 (sequence is synthesized)
accagttgttttacccctgccgataaccagcagtcagagattcttttttaatccttggagacagggaaagggacagatagctttccaaggacatgagactgtgcaaagcctctttgctgt

SEQ ID NO: 465764 - DNA, 120 bp, Artificial Sequence
  ENSG00000158296_20 (sequence is synthesized)
ttctctgggctcctgagcataccaggggaagttctagaaaccgcagctgacatctcgacccaagagatttaggattctcctgtttcatctgggtcagtttggccataattctggggtcag

SEQ ID NO: 465765 - DNA, 120 bp, Artificial Sequence
  ENSG00000158296_21 (sequence is synthesized)
gccaggcctgggtcctgccctcccatggggtgactcatgacccctccagccaggactctcctacatgtggcccccataggcctctgtggctgcaaggcggtcagttgctgcttgtcccag

SEQ ID NO: 465766 - DNA, 120 bp, Artificial Sequence
  ENSG00000158296_22 (sequence is synthesized)
caggtggccttgatctctccatgccccaccttaagtggtaagcatgtttaattatcaaaggccccatttgtcaggggtgagagaaaagtcaaaagataaattggggccttgtaaaaggcc

SEQ ID NO: 465767 - DNA, 120 bp, Artificial Sequence
  ENSG00000158296_23 (sequence is synthesized)
agggtaaaatgtctcaggcaagcaaaagattgtccccttctgcatatgggtaaaactgagacgtccccgtgagcccgaggctggaagtggtgtctgccttcaagggttaatccctctttg

SEQ ID NO: 465768 - DNA, 120 bp, Artificial Sequence
  ENSG00000158296_24 (sequence is synthesized)
ttccaagcagaagcattctggcatcccagtgaagagctcaggccctcaggaagtgtctgctgaatggaatggcccagcattagcccagtattggaaaagacaccagcccaggggccctga

SEQ ID NO: 465769 - DNA, 120 bp, Artificial Sequence
  ENSG00000158296_25 (sequence is synthesized)
ctcgtcacacttccctttcctaagcctctgagggtggagattcccctaggagcgcttggccagctgggaaggcagcgcccagctgcacttgttgttgatacagcataagtgaatcatggg

SEQ ID NO: 465770 - DNA, 120 bp, Artificial Sequence
  ENSG00000158296_26 (sequence is synthesized)
catttccctgagagcagtgggagaggccctctgagttggaagttgagctccacctcctttccaagtgagcactcagtgttgaatcacagttacaacccactggggctggtgggagatgcg

SEQ ID NO: 465771 - DNA, 120 bp, Artificial Sequence
  ENSG00000158296_27 (sequence is synthesized)
ttgtatgggactggaagcaagaggttcattcaaagagaaactcatgggatttgtaaccagatgaatcatgatttctaagacttctgatcaaaaatactgtgaaataaagaatgttaatca

SEQ ID NO: 465772 - DNA, 120 bp, Artificial Sequence
  ENSG00000158296_28 (sequence is synthesized)
actttggacctggagatgatttgcctttctgaacataagagagcttcaaagccccaaattcctgggctggggattccacagagttgacctctctgattttctactgctcttccctcccct

SEQ ID NO: 465773 - DNA, 120 bp, Artificial Sequence
  ENSG00000158296_29 (sequence is synthesized)
ctccagctacatactctgcctcagggccttcgcatgtgctgttccctctgcctagaacactctctcccaagtatatgtctggttccccgactcactttattcaagtccctgctcaggtgt

SEQ ID NO: 465774 - DNA, 120 bp, Artificial Sequence
  ENSG00000158296_30 (sequence is synthesized)
caccttccctgagaggcttccctgacctcctgtctaaaatgtcaccctcattactctccacccccttactctgctataatttctccttaataggacactgtataacttattttcttatta

SEQ ID NO: 465775 - DNA, 120 bp, Artificial Sequence
  ENSG00000158296_31 (sequence is synthesized)
tcttcttctccctctagaatataaatttatgaaaatacaaatgttattttttttactgctgtaactccagttcctagaacaatttccagcacatagcaagtgttcagtaaatatttgctg

SEQ ID NO: 465776 - DNA, 120 bp, Artificial Sequence
  ENSG00000158296_32 (sequence is synthesized)
cttgaatctgctccagaattaacaagaaagccatctcttcctctgatctggggtctgttttgttcattactttgttcactccttcttccatttattcattcaataaacatttattgggaa

SEQ ID NO: 465777 - DNA, 120 bp, Artificial Sequence
  ENSG00000158296_33 (sequence is synthesized)
actgctgccctgagaacaagccggggcaggccctgccgcaggcctccttccccctctgcccccagcccaggcctccttccccctctgccctgagccctgggcctccttccccttctgccc

SEQ ID NO: 465778 - DNA, 120 bp, Artificial Sequence
  ENSG00000158296_34 (sequence is synthesized)
ctggacagggcactgggagtgtggcagggggcaattgggactcccttgttcccctggagtttaacctagtggtaaacactttcagacgacgaatcatgctatttggggattttgtacagg

SEQ ID NO: 465779 - DNA, 120 bp, Artificial Sequence
  ENSG00000158296_35 (sequence is synthesized)
gtgaggaagtggcactaaggtccaaaggaagctacatatgggtggtccctgctacaccagcctcccaagcctcccagtgcaccttctaggagacaagcaaggaaggccgctgcttgtttg

SEQ ID NO: 465780 - DNA, 120 bp, Artificial Sequence
  ENSG00000158296_36 (sequence is synthesized)
tgacttcaaaggtaaggtggtcaaggctggggtctcggtgggctcagtgaggactgcggcatggagtgtggtcatcaagggcctggagccccccactgcactaaccacgtggtccttcct

SEQ ID NO: 465781 - DNA, 120 bp, Artificial Sequence
  ENSG00000158296_37 (sequence is synthesized)
gcttctcctttcactgtctgagccattgccttgtctggggactgagggctgccccaggtggtagtccaggacaggggttagcaactacagtcttcagaccaaatccagcctgctatctgt

SEQ ID NO: 465782 - DNA, 120 bp, Artificial Sequence
  ENSG00000158296_38 (sequence is synthesized)
attttactacatgtgaaagttacatgaaatctaaatttcagtgtccatgtatcaaattttgctttcccctaaggaatttgtggaaatttattttctttagttatataagtacctacacaa

SEQ ID NO: 465783 - DNA, 120 bp, Artificial Sequence
  ENSG00000158296_39 (sequence is synthesized)
tagcctcaattttgcctcttggcccacaaaagcaaaaaatgtttatttttcttgtcctttgcagaaaaatgaccccttggcccaaagcaggagttgcaccttggttgcccagggagccac

SEQ ID NO: 465784 - DNA, 120 bp, Artificial Sequence
  ENSG00000158296_40 (sequence is synthesized)
acatggaaaacacaagctgggtttcaaccgtataggaagtgttggggactgaggaaaaactgcctaaaggcattcagattccatttttaaaaaatcactgagtacctctaaccaaaatgt

SEQ ID NO: 465785 - DNA, 120 bp, Artificial Sequence
  ENSG00000158296_41 (sequence is synthesized)
agagaacacaggaatagaacccaatactttcctctctgaggaaaggctgaaacttcaagctccccttgtgataagacttggtcagataactgagtctggtcaatggaatatgagtggaaa

SEQ ID NO: 465786 - DNA, 120 bp, Artificial Sequence
  ENSG00000158296_42 (sequence is synthesized)
tgatgtgtgcaacttccgggttctgtccttcctgccgggtggaatgtgaatatgatggcacctgggacccaaagacaggagccacatcttgagagatagatggcagatctgcccctgtgg

SEQ ID NO: 465787 - DNA, 120 bp, Artificial Sequence
  ENSG00000158296_43 (sequence is synthesized)
ctttggatcatttacctcagtgaacacaacaagcattatccatgaaaccataggttttgtgtgctagttctagtttttaaaatatgaattaaattaaatacgtatctgttaaaacttaaa

SEQ ID NO: 465788 - DNA, 120 bp, Artificial Sequence
  ENSG00000158296_44 (sequence is synthesized)
gaaaatgtgaagatcagctaaatctcagtctctaattctgatatacatctttcctgacttttaaacaatgcctatctgagaactgttctacattgtgatcacgctgttatcggactgcat

SEQ ID NO: 465789 - DNA, 120 bp, Artificial Sequence
  ENSG00000158296_45 (sequence is synthesized)
acatttgtcaagacttgttaaactatacccttaaaatgggtgcattttattgcatgttaattatacctcaatgaaacatatgccaattggcttttagaaccctattaaaagaagattttt

SEQ ID NO: 465790 - DNA, 120 bp, Artificial Sequence
  ENSG00000158296_46 (sequence is synthesized)
ttaacagaaatgtgatcacgtcaacatattatttgtaatccgctttttaattttgtattgaatttcaaaagttatgcatactcataaaaattcaaacaatgctgaattgaaaaaggaaaa

SEQ ID NO: 465791 - DNA, 120 bp, Artificial Sequence
  ENSG00000158301_0 (sequence is synthesized)
agcagcgacagaaatatggtagtggtcgccacgttagggtccgtgggggcctcctgaggcagcctggtgccaacccgcacgcccaggctggggctcatcctggccctgcccacctcgggg

SEQ ID NO: 465792 - DNA, 120 bp, Artificial Sequence
  ENSG00000158301_1 (sequence is synthesized)
tcggaactacggtgggcctgggatgggggcgtcaagcactttcgcgccgtatccctccgccccccttcccgacaccctcgcggcgagcggttcttgccgcatcctgcgcagcccctgcct

SEQ ID NO: 465793 - DNA, 120 bp, Artificial Sequence
  ENSG00000158301_2 (sequence is synthesized)
actttggtgcagaggcgtggggggcgggacgcgtctttcccgttcggatcgcggggaaagcagtggctccaagtgagccagaggagagctgaggagaggagggggaggccgacgacctgg

SEQ ID NO: 465794 - DNA, 120 bp, Artificial Sequence
  ENSG00000158301_3 (sequence is synthesized)
gccctgggcctctgaaggcctactttaaggctggccaattctgcaagaaaggcaaggaggaggagactggctcacagctctggaggacccccttctgtcagctgtggggcttgacaccac

SEQ ID NO: 465795 - DNA, 120 bp, Artificial Sequence
  ENSG00000158301_4 (sequence is synthesized)
ttgaacaagaaaaggagggggaaactgcaccacatcagtgaagatccacctccagtggctgctctgctggtggtggagttgctgctgacaaccaccctcaacgggtctgcacccatccag

SEQ ID NO: 465796 - DNA, 120 bp, Artificial Sequence
  ENSG00000158301_5 (sequence is synthesized)
gaaatatctgtcttcctttagcttggttgtacctgttctcactctatctgtattattgaattattgactgagactgtgtttgggaaggaggctgagtgactactggactggatattgact

SEQ ID NO: 465797 - DNA, 120 bp, Artificial Sequence
  ENSG00000158301_6 (sequence is synthesized)
ctaactcttattcccaagcttatatccttaatcacctaaagatcagagtgtgaagaaacaaacctgtgacagatctgtggttgaggtttagactacgggaggagtatattacctgacttt

SEQ ID NO: 465798 - DNA, 120 bp, Artificial Sequence
  ENSG00000158301_7 (sequence is synthesized)
ctttgtaacttgtaccatgactggggcagagattgagcctagtgcccaggccaagcctgaaaagaaggctggggaagaggttatcgctgggcctgagagagagaatgatgtccctctggt

SEQ ID NO: 465799 - DNA, 120 bp, Artificial Sequence
  ENSG00000158301_8 (sequence is synthesized)
ggtcagacccaaggttaggacccaggcaactactggggcaaggcccaaaactgagaccaagtctgtgcctgcggcaaggcccaaaactgaggcccaagcaatgtctggggcaaggcccaa

SEQ ID NO: 465800 - DNA, 120 bp, Artificial Sequence
  ENSG00000158301_9 (sequence is synthesized)
aactgaggtccaagtaatgggtggtgcaagacccaaaacggaggctcaaggaatcacaggggccaggcccaaaaccgatgccagggcagtaggtggcgctcgttctaaaactgatgccaa

SEQ ID NO: 465801 - DNA, 120 bp, Artificial Sequence
  ENSG00000158301_10 (sequence is synthesized)
ggcaatccctggagcaaggcccaaggatgaggcccaggcatgggcccagagtgaatttgggactgaagcagtgtcacaggcagaaggagtgtcccagactaatgccgttgcttggccact

SEQ ID NO: 465802 - DNA, 120 bp, Artificial Sequence
  ENSG00000158301_11 (sequence is synthesized)
ggccactgctgagtctggatcagttactaaatctaagggcctgtctatggatagagaactagtcaatgtggatgctgaaacctttcctggcacccagggtcagaaaggaatccagccctg

SEQ ID NO: 465803 - DNA, 120 bp, Artificial Sequence
  ENSG00000158301_12 (sequence is synthesized)
gtttggaccaggggaggagactaatatggggtcttggtgctattccaggcccagggccagagaggaggcctctaatgagtctgggttctggtcagcagatgagacctctacagcgtcttc

SEQ ID NO: 465804 - DNA, 120 bp, Artificial Sequence
  ENSG00000158301_13 (sequence is synthesized)
tttctggactggagaagagacaagtgtcagatcatggcccagggaagagtccaataccaggtccaggcacagggctaaacatcagactaatcccaggtccaggcccagatccaagcaaga

SEQ ID NO: 465805 - DNA, 120 bp, Artificial Sequence
  ENSG00000158301_14 (sequence is synthesized)
agcctatgttgattcctggtctggatctgaggatgaggccagcaacccattctccttctgggttggagaaaataccaataacttgttcaggcccagagtcagggaggaggcaaatatcag

SEQ ID NO: 465806 - DNA, 120 bp, Artificial Sequence
  ENSG00000158301_15 (sequence is synthesized)
gtccaagctcaggacaaatagagaagattgttttgaatctgagtctgaagatgagttctataagcagtcctgggttttgcctggagaagaggccaatagtagattcaggcacagagacaa

SEQ ID NO: 465807 - DNA, 120 bp, Artificial Sequence
  ENSG00000158301_16 (sequence is synthesized)
agaagatcctaatactgccttgaaactcagggcccagaaagatgttgacagtgatagggtcaaacaagaacccaggtttgaggaggaagtcattattgggtcctggttctgggcagaaaa

SEQ ID NO: 465808 - DNA, 120 bp, Artificial Sequence
  ENSG00000158301_17 (sequence is synthesized)
agaggccagtttggagggtggagcttcagcaatctgtgaatctgagccaggaactgaggagggggccattggcggatccgcgtactgggctgaggaaaagtccagtttgggggctgtggc

SEQ ID NO: 465809 - DNA, 120 bp, Artificial Sequence
  ENSG00000158301_18 (sequence is synthesized)
cagagaagaggccaagccggagtctgaagaagaggccatatttgggtcctggttctgggacagagatgaggcctgctttgacctaaatccctgtcctgtgtacaaggtcagtgataggtt

SEQ ID NO: 465810 - DNA, 120 bp, Artificial Sequence
  ENSG00000158301_19 (sequence is synthesized)
cagagatgcagctgaggagcttaatgcatcctccaggccccaaacctgggacgaggtcactgttgaattcaaacctggtctttttcatggggttggcttccgatccacaagcccctttgg

SEQ ID NO: 465811 - DNA, 120 bp, Artificial Sequence
  ENSG00000158301_20 (sequence is synthesized)
aattcccgaagaggcttctgaaatgcttgaggcaaagcccaagaacctggaacttagcccagaaggagaagagcaggaatctttgcttcagcctgatcagcctagtcctgagttcacatt

SEQ ID NO: 465812 - DNA, 120 bp, Artificial Sequence
  ENSG00000158301_21 (sequence is synthesized)
tcagtatgatccttcctaccggtcagtccgggaaattcgagagcatcttagggccagggagagtgcagagtctgagagttggtcctgcagctgcatacaatgtgagctgaaaattggttc

SEQ ID NO: 465813 - DNA, 120 bp, Artificial Sequence
  ENSG00000158301_22 (sequence is synthesized)
tgaagagtttgaagaattccttttattaatggacaaaattcgggatccttttattcatgaaatatctaaaattgcaatgggtatgagaagtgcttctcaatttacccgagatttcattcg

SEQ ID NO: 465814 - DNA, 120 bp, Artificial Sequence
  ENSG00000158301_23 (sequence is synthesized)
agattcaggtgttgtctcacttattgaaaccttgcttaattatccatcctctagagttaggacaagttttttggaaaatatgattcacatggctccaccttatccaaatctaaacatgat

SEQ ID NO: 465815 - DNA, 120 bp, Artificial Sequence
  ENSG00000158301_24 (sequence is synthesized)
tgagacattcatatgtcaagtgtgtgaggaaacccttgcacatagtgtggattcccttgagcagctgactggaataaggatgcttagacacctcactatgactattgactatcacacact

SEQ ID NO: 465816 - DNA, 120 bp, Artificial Sequence
  ENSG00000158301_25 (sequence is synthesized)
gattgccaactatatgtccgggtttctctccttattaaccacagccaatgcgagaacgaagtttcacgttctgaaaatgctattgaatttgtctgaaaatcctgctgtggcaaaaaaact

SEQ ID NO: 465817 - DNA, 120 bp, Artificial Sequence
  ENSG00000158301_26 (sequence is synthesized)
attcagtgccaaagctctttcaatatttgtgggtctctttaacatagaagagacaaatgataatattcaaattgttattaaaatgtttcagaatatcagtaacattataaaaagtggaaa

SEQ ID NO: 465818 - DNA, 120 bp, Artificial Sequence
  ENSG00000158301_27 (sequence is synthesized)
gatgtccttaattgatgatgatttcagtcttgagccgcttatttctgcatttcgtgaatttgaggagttagctaagcaactacaagcccaaatagacaaccaaaatgatcctgaggtggg

SEQ ID NO: 465819 - DNA, 120 bp, Artificial Sequence
  ENSG00000158301_28 (sequence is synthesized)
acaacaaagttaatatgattaaccacctgccgctgatcagccttatgttcccaaagagccctgagtagtgctttggtgttcacagtctgtttttttgttgtaacttatattttttaatgc

SEQ ID NO: 465820 - DNA, 120 bp, Artificial Sequence
  ENSG00000158301_29 (sequence is synthesized)
tgatgttaactttgtcaaactcttgttttgagctggatcattttgtggatgccaaatgaatatcaaaactgaaaacacatttgttgatatttgtcttgctgtccagattgcggtattttt

SEQ ID NO: 465821 - DNA, 120 bp, Artificial Sequence
  ENSG00000158301_30 (sequence is synthesized)
cagtattaagttttcaatgaactgtgtcacctaagtaagctaccctgctattcgttgtttaaatatatggttctctatttgagtctgtgttttcaataaagttctatgttaaaattggca

SEQ ID NO: 465822 - DNA, 120 bp, Artificial Sequence
  ENSG00000158301_31 (sequence is synthesized)
ttgaacaagaaaaggagggggaaactgcaccacatcagtgaaggaggcagccggtccagagagactttctcaaagcccagctgtcccacctagcattcaacatcagtcgcactgcatacg

SEQ ID NO: 465823 - DNA, 120 bp, Artificial Sequence
  ENSG00000158301_32 (sequence is synthesized)
cgcgtctttcccgttcggatcgcggggaaagcagtggctccaagtgagccagaggagagctgaggagaggagggggaggccgacgacctgggccctgggcctctgaaggctccaggttga

SEQ ID NO: 465824 - DNA, 120 bp, Artificial Sequence
  ENSG00000158301_33 (sequence is synthesized)
tgtcaaagtcttgtgtctgtgcggtaggtctggcgtattctgacaggacacagtgagcgtctgtagaggagaggcttgaaataaaggagcacgaatattgcctggatttctggaggccta

SEQ ID NO: 465825 - DNA, 79 bp, Artificial Sequence
  ENSG00000158315_0 (sequence is synthesized)
agcgattctcctgcctcagcatccccagtagctgggattaaaggcatctgccacctcacctggctaattttttgggtac

SEQ ID NO: 465826 - DNA, 120 bp, Artificial Sequence
  ENSG00000158315_1 (sequence is synthesized)
tataggcgtgagccaccgcgccctgcccgagtcaggtttttttattgcaaaagatgggaactgattctggctaattaaatcaggaaatgaattttattgaaagcacattgagtaagttac

SEQ ID NO: 465827 - DNA, 120 bp, Artificial Sequence
  ENSG00000158315_2 (sequence is synthesized)
acattgagtaagttacagaatcacttgaaggctgtagaaacaaggcttgggaaaaaagcagaaacagagaccaggtacctagaattacaccaaattccatcacagagccagataggtgag

SEQ ID NO: 465828 - DNA, 120 bp, Artificial Sequence
  ENSG00000158315_3 (sequence is synthesized)
gacagcctcagtgctgctgctgctgaacgcccagtgctgctgcctttgtcacagccacagctggcgttggatgctggatgccatgctgaccccagtggcaaggcgtctggacactggata

SEQ ID NO: 465829 - DNA, 120 bp, Artificial Sequence
  ENSG00000158315_4 (sequence is synthesized)
ctgctgccactgctgcaaccactgtaaagaattttttccatcctcacctccagcctcagaaatcctaagcaaatgcagctgattggtcaagctgccctagctgcctagggacatgcaaaa

SEQ ID NO: 465830 - DNA, 120 bp, Artificial Sequence
  ENSG00000158315_5 (sequence is synthesized)
gtgaatattgggcatggttaatgtctgtagtgggatccgtttcctgctgcccaccaggagaagataaattccccaagaaaactgacaaatgacgactacgtacatgttgtcaaagaatcc

SEQ ID NO: 465831 - DNA, 120 bp, Artificial Sequence
  ENSG00000158315_6 (sequence is synthesized)
actggaagtctttgacatttgcagattcaacacttgcaattttggaaaggccttggaaagcagtcgttgcgccagacagcccagggaagagcggcagcctgaggacctagggccacctgc

SEQ ID NO: 465832 - DNA, 120 bp, Artificial Sequence
  ENSG00000158315_7 (sequence is synthesized)
tgaatatggggagagagatgaaagaagagctggaggaagaggagaaaatgagagaggatgggggaggtaaagatcgggccaagagtaaaaaggtccacaggattgtctcaaaatggatgc

SEQ ID NO: 465833 - DNA, 120 bp, Artificial Sequence
  ENSG00000158315_8 (sequence is synthesized)
tgcccgaaaagtcccgaggaacatacttggagagagctaactgcttcccgcctcccgtgttcatcatctccatcagcctggccgagctggcagtgtttatttactatgctgtgtggaagc

SEQ ID NO: 465834 - DNA, 120 bp, Artificial Sequence
  ENSG00000158315_9 (sequence is synthesized)
ctcagaaacagtggatcacgttggacacaggcatcttggagagtccctttatctacagtcctgagaagagggaggaagcctggaggtttatctcatacatgctggtacatgctggagttc

SEQ ID NO: 465835 - DNA, 120 bp, Artificial Sequence
  ENSG00000158315_10 (sequence is synthesized)
agcacatcttggggaatctttgtatgcagcttgttttgggtattcccttggaaatggtccacaaaggcctccgtgtggggctggtgtacctggcaggagtgattgcagggtcccttgcca

SEQ ID NO: 465836 - DNA, 120 bp, Artificial Sequence
  ENSG00000158315_11 (sequence is synthesized)
gctccatctttgacccactcagatatcttgtgggagcttcaggaggagtctatgctctgatgggaggctattttatgaatgttctggtgaattttcaagaaatgattcctgcctttggaa

SEQ ID NO: 465837 - DNA, 120 bp, Artificial Sequence
  ENSG00000158315_12 (sequence is synthesized)
ttttcagactgctgatcatcatcctgataattgtgttggacatgggatttgctctctatagaaggttctttgttcctgaagatgggtctccggtgtcttttgcagctcacattgcaggtg

SEQ ID NO: 465838 - DNA, 120 bp, Artificial Sequence
  ENSG00000158315_13 (sequence is synthesized)
gatttgctggaatgtccattggctacacggtgtttagctgctttgataaagcactgctgaaagatccaaggttttggatagcaattgctgcatatttagcttgtgtcttatttgctgtgt

SEQ ID NO: 465839 - DNA, 120 bp, Artificial Sequence
  ENSG00000158315_14 (sequence is synthesized)
ttttcaacattttcctatctccagcaaactgacctgcccctattgtaagtcaattaataaaaagagccatctggaggaaataaaaaaaaaaggaagactctatgaagaaacagagaagtc

SEQ ID NO: 465840 - DNA, 120 bp, Artificial Sequence
  ENSG00000158315_15 (sequence is synthesized)
tcagaaaaggctaacaattttatatagaggacaaaacagcattaaactcatcagttgcaaagattgcctataaaaggaccttaggatttaaggaaggggcttcttaatgtagaaagggaa

SEQ ID NO: 465841 - DNA, 120 bp, Artificial Sequence
  ENSG00000158315_16 (sequence is synthesized)
ctgtctggaggatttttgtttggggagggacggaggagcgcctggcagagcgggatcttcagggcagcgggcaaccccttggcccaggaagcctggaacgcaaggaccggagggcgtggg

SEQ ID NO: 465842 - DNA, 67 bp, Artificial Sequence
  ENSG00000158315_17 (sequence is synthesized)
aaggaaggggcttcttaatgtagaaagggaagaagaagagagaaaagaagggtagtaaaaactagag

SEQ ID NO: 465843 - DNA, 120 bp, Artificial Sequence
  ENSG00000158315_18 (sequence is synthesized)
tcccaggcatatggtattctataaaacagacttactctccttggaggatatattttggagaatgcttcataaaatctatgaatactgtacaatgctgataataaaaactttttatacctg

SEQ ID NO: 465844 - DNA, 120 bp, Artificial Sequence
  ENSG00000158321_0 (sequence is synthesized)
ctgcagccgcccggggacacgccgtgcaccctccggctcggggctttctcggcggcggcggcggcagcagcagcagcgttagcggcggcggcgagagcagcgttcccggctgcgcttctc

SEQ ID NO: 465845 - DNA, 120 bp, Artificial Sequence
  ENSG00000158321_1 (sequence is synthesized)
cccggctgcgcttctccctcaggcggggcggcgagagaagcggcggcggcggcggcggcacaccggtgtctctcccgctggagatttctttctgctttcctcatcgactgactgactcac

SEQ ID NO: 465846 - DNA, 120 bp, Artificial Sequence
  ENSG00000158321_2 (sequence is synthesized)
cccctcccttttttgaggaagggtgacctcttctctgggactggaaaaaatatttttgtgaggaggggggcgggtggcagcgacagggtttgcttcttctcttctttcatctccctctcc

SEQ ID NO: 465847 - DNA, 120 bp, Artificial Sequence
  ENSG00000158321_3 (sequence is synthesized)
tcccccctcgaagaccgaaaagcaaaccccacaactgctccagcagcatcctccttcccttcctccgcctcccttctcctccgccgctcgcagtttcgccctctcttccgctaatgattg

SEQ ID NO: 465848 - DNA, 120 bp, Artificial Sequence
  ENSG00000158321_4 (sequence is synthesized)
cattattatgctcccctctctggggggtctcgcccctcttgggtcgctccggagccccggcctcccctggctgcatttcttaaaaatttgggagcctgggagtgagttttctccgaggcg

SEQ ID NO: 465849 - DNA, 120 bp, Artificial Sequence
  ENSG00000158321_5 (sequence is synthesized)
tgtgtgagaggcggcgggggtgttttcctgcgcgaggggcgggtgaagttcattgcccccacttttcccgcgacctttttcggacccgattttggatcgagttgaggggggcgcgggcgt

SEQ ID NO: 465850 - DNA, 120 bp, Artificial Sequence
  ENSG00000158321_6 (sequence is synthesized)
tttcggggggcggggggcgcggcggagaatggccgcggggagggctccccggagcctcccagtctcttgatcaaagcattccgctattctgatttattgcttgcttggtgagttattttt

SEQ ID NO: 465851 - DNA, 120 bp, Artificial Sequence
  ENSG00000158321_7 (sequence is synthesized)
ttttcctctaaaggagacctgtgtgttcagccattactttgctcggcgctgctcccaggcatctccgaccctcggtgctgtggggagccccacacttgggctcctcgcctctcgccctcg

SEQ ID NO: 465852 - DNA, 120 bp, Artificial Sequence
  ENSG00000158321_8 (sequence is synthesized)
ctccccgtccctcctcccctctctccgccccttcccccttttctttctcctctctttcttcccctctctcccttctttcggccgccgtctcccccgcgccctcctcggggcggagggaag

SEQ ID NO: 465853 - DNA, 120 bp, Artificial Sequence
  ENSG00000158321_9 (sequence is synthesized)
ccgtgaagggggagggagggctcggtgtcaatttttttttgtgtggctgcggccgtagcctgtggcgggcaagcggggagaccccggcgcagcagaaccatggatggcccgacgcggggc

SEQ ID NO: 465854 - DNA, 120 bp, Artificial Sequence
  ENSG00000158321_10 (sequence is synthesized)
gcagcagaaccatggatggcccgacgcggggccatggactccgcaaaaagcggcggtcgcggtcgcagcgagaccgggagaggcgctcccggggcgggctgggggccggcgcggccggcg

SEQ ID NO: 465855 - DNA, 120 bp, Artificial Sequence
  ENSG00000158321_11 (sequence is synthesized)
ctcgcctcgtcgtcgggctccgacaaggaagacaatgggaagcccccgtcctccgccccgtcccggcccagacccccgcggaggaagcggagagagtccacctcggcagaagaggacatc

SEQ ID NO: 465856 - DNA, 120 bp, Artificial Sequence
  ENSG00000158321_12 (sequence is synthesized)
attgatggatttgccatgaccagctttgtcacttttgaagcgctggagaaagatgtagcacttaagcctcaggaacgtgtggagaaacgccagacgcccctgaccaagaagaaacgagaa

SEQ ID NO: 465857 - DNA, 120 bp, Artificial Sequence
  ENSG00000158321_13 (sequence is synthesized)
gcacttaccaatggcttgtcctttcattcaaagaagagcagactcagccacccacaccactacagctcagatcgagaaaatgaccgcaatctctgccagcaccttgggaagagaaagaaa

SEQ ID NO: 465858 - DNA, 120 bp, Artificial Sequence
  ENSG00000158321_14 (sequence is synthesized)
atgccgaaggcactcagacagctcaagccaggacagaacagctgcagggacagtgacagtgaaagtgccagtggagaatccaagggcttccaccggagcagctctcgggaaaggctcagt

SEQ ID NO: 465859 - DNA, 120 bp, Artificial Sequence
  ENSG00000158321_15 (sequence is synthesized)
gatagttcagctccttccagcttgggaacaggctacttctgtgacagtgacagtgaccaggaagagaaggcatcagatgccagctctgaaaaactcttcaacactgttattgtaaacaaa

SEQ ID NO: 465860 - DNA, 120 bp, Artificial Sequence
  ENSG00000158321_16 (sequence is synthesized)
gatccggagttaggtgttggcacgctaccagaacatgacagccaggatgcagggccgattgtccccaagatatcgggtctagagagaagccaggagaagagccaggactgttgcaaagag

SEQ ID NO: 465861 - DNA, 120 bp, Artificial Sequence
  ENSG00000158321_17 (sequence is synthesized)
ccaatctttgagcctgtggtgcttaaagacccctgccctcaggtcgcacagccaataccccagccgcagacggagccccaactccgagctccttctccggaccctgacttggtgcagcgc

SEQ ID NO: 465862 - DNA, 120 bp, Artificial Sequence
  ENSG00000158321_18 (sequence is synthesized)
acagaggccccacctcaacccccacctctgagtacacagccaccacagggccctcctgaggcccagctccagcctgccccgcagcctcaggtgcagaggccacccaggccacagtccccc

SEQ ID NO: 465863 - DNA, 120 bp, Artificial Sequence
  ENSG00000158321_19 (sequence is synthesized)
acccagctgctccatcagaacctcccacctgtgcaggcccacccctctgctcagagcctctcccagccattgtcagcctacaacagcagtagcttaagcctcaacagtttaagcagcagc

SEQ ID NO: 465864 - DNA, 120 bp, Artificial Sequence
  ENSG00000158321_20 (sequence is synthesized)
agaagcagcactccagcgaagactcagcccgccccacctcacatctcccaccacccctctgcctccccgttccccctctccctgcccaaccacagccccctgcacagcttcacacccacc

SEQ ID NO: 465865 - DNA, 120 bp, Artificial Sequence
  ENSG00000158321_21 (sequence is synthesized)
ctccagccccccgcacactcacatcaccccaatatgtttgcccctcccactgctctgcctcctccaccaccactgacatcaggaagtctgcaggtggccggacacccggccgggagcact

SEQ ID NO: 465866 - DNA, 120 bp, Artificial Sequence
  ENSG00000158321_22 (sequence is synthesized)
tactcagagcaagacatcttgcgacaggaactgaacactcgttttttggcctctcagagtgctgaccgcggggcttccctgggccctccgccctacctgcggaccgagttccatcagcac

SEQ ID NO: 465867 - DNA, 120 bp, Artificial Sequence
  ENSG00000158321_23 (sequence is synthesized)
cagcaccagcaccagcacacccaccagcacacgcaccagcacaccttcacgccgttcccccacgccatcccacccaccgccatcatgccgacgccagcacctcccatgtttgacaaatac

SEQ ID NO: 465868 - DNA, 120 bp, Artificial Sequence
  ENSG00000158321_24 (sequence is synthesized)
cctacaaaagttgacccattctaccggcacagtctcttccattcctatcctcctgcagtgtcgggcatcccccctatgatcccacccactggcccttttggttcactacaaggagcattt

SEQ ID NO: 465869 - DNA, 120 bp, Artificial Sequence
  ENSG00000158321_25 (sequence is synthesized)
cagccgaagacatccaaccctatcgatgtcgctgctcggcctgggacagtcccacacactttactccaaaaggacccgaggttgacagatcctttcagacctatgttaaggaaaccaggg

SEQ ID NO: 465870 - DNA, 120 bp, Artificial Sequence
  ENSG00000158321_26 (sequence is synthesized)
aagtggtgtgctatgcatgttcacatcgcctggcagatttaccaccaccaacagaaagtcaagaaacagatgcagtcagacccacataagctggactttggactgaaacctgagttcctg

SEQ ID NO: 465871 - DNA, 120 bp, Artificial Sequence
  ENSG00000158321_27 (sequence is synthesized)
agccgccctccaggccccagtctttttggagccatccaccacccccatgacctggcacggccttcaactttgttctctgccgctggtgctgcacacccaactgggaccccttttgggcca

SEQ ID NO: 465872 - DNA, 120 bp, Artificial Sequence
  ENSG00000158321_28 (sequence is synthesized)
cctcctcatcacagcaacttcctcaaccctgctgcccacctagagccttttaatcggccgtctacattcacaggcctagcagcagttggtggcaatgccttcgggggacttggaaatcct

SEQ ID NO: 465873 - DNA, 120 bp, Artificial Sequence
  ENSG00000158321_29 (sequence is synthesized)
tccgttacacccaactcaatgttcggccacaaggatggccccagtgtgcagaactttagcaaccctcacgaaccctggaaccggctgcaccgaacgcctccgtcgttcccgacccctccg

SEQ ID NO: 465874 - DNA, 120 bp, Artificial Sequence
  ENSG00000158321_30 (sequence is synthesized)
ccctggctgaagccaggggagctggagcgcagcgcgtccgctgcagctcatgacagagatagagatgtagataaacgagactcatctgttagtaaagatgacaaagaaagggaaagcgtc

SEQ ID NO: 465875 - DNA, 120 bp, Artificial Sequence
  ENSG00000158321_31 (sequence is synthesized)
agcacctgtcctcccggtgaatgccctgggacatacccgcagctccactgaacagatccgggctcatctgaacactgaggctcgggagaaggacaaacccaaagagagggagagagacca

SEQ ID NO: 465876 - DNA, 120 bp, Artificial Sequence
  ENSG00000158321_32 (sequence is synthesized)
ctcggaatcccgcaaggacctggccgccgacgagcacaaggcgaaagagggccacctgcccgagaaggacgggcacggccacgaggggcgcgccgcgggcgaagaggccaagcagctggc

SEQ ID NO: 465877 - DNA, 120 bp, Artificial Sequence
  ENSG00000158321_33 (sequence is synthesized)
ccgggtgccgtctccctacgtgcggaccccggtggtggagagtgccaggcccaacagcacctcgagccgggaggccgagccgcgcaagggtgagccggcctacgagaaccccaagaagag

SEQ ID NO: 465878 - DNA, 120 bp, Artificial Sequence
  ENSG00000158321_34 (sequence is synthesized)
ctccgaggtcaaggtgaaggaggagcggaaggaagaccatgacctgcctccagaggccccgcagacccaccgggcctcggagccgccgcctcccaactcctcgtccagcgtgcacccggg

SEQ ID NO: 465879 - DNA, 120 bp, Artificial Sequence
  ENSG00000158321_35 (sequence is synthesized)
gcccctggcctcgatgcccatgacggtgggggtgacgggcattcaccccatgaacagcatcagcagcctggacaggactcgcatgatgacccccttcatgggcatcagccccctcccggg

SEQ ID NO: 465880 - DNA, 120 bp, Artificial Sequence
  ENSG00000158321_36 (sequence is synthesized)
cggagagcgcttcccgtacccttctttccactgggaccccatccgggaccccttgagggatccttaccgagaacttgacattcaccggagagacccgctgggcagggacttcctgctaag

SEQ ID NO: 465881 - DNA, 120 bp, Artificial Sequence
  ENSG00000158321_37 (sequence is synthesized)
gaacgacccgctccaccggctctcgactccccggctgtacgaagccgaccgctccttcagggaccgggagcctcacgactacagccaccaccaccaccaccaccaccacccgctgtctgt

SEQ ID NO: 465882 - DNA, 120 bp, Artificial Sequence
  ENSG00000158321_38 (sequence is synthesized)
ggaccctcggcgggagcacgagcggggaggccacctggacgagcgggagcgcttgcacatgctcagagaagactacgagcacacgcggctccactccgtgcaccccgcctccctcgacgg

SEQ ID NO: 465883 - DNA, 120 bp, Artificial Sequence
  ENSG00000158321_39 (sequence is synthesized)
acacctcccccaccccagcctcatcaccccgggactccccagcatgcactatccccgcatcagccccaccgcgggcaaccagaacggactcctcaacaagacccctccgacagcagcgct

SEQ ID NO: 465884 - DNA, 120 bp, Artificial Sequence
  ENSG00000158321_40 (sequence is synthesized)
gagcgcacctcccccgctcatctccacgctggggggccgcccggtctctcccagaaggacgactcctctgtccgcagagataagggagaggcccccttcccacacgctgaaggatatcga

SEQ ID NO: 465885 - DNA, 120 bp, Artificial Sequence
  ENSG00000158321_41 (sequence is synthesized)
ggcccgataagccgagaacaggagcaagaacgaggaagaagaaaccctaggcagacaccaggccaggcttgagagacagaactcctgcatggctcacacagactgggggggaaagcccca

SEQ ID NO: 465886 - DNA, 120 bp, Artificial Sequence
  ENSG00000158321_42 (sequence is synthesized)
ccccttccccttgtaaaaaatgtatagactcagtgcacattttgaaatgttttgtatattatatgttgagatttttcagatcttttagcccagtcatatgttctcacgtctcctactttt

SEQ ID NO: 465887 - DNA, 120 bp, Artificial Sequence
  ENSG00000158321_43 (sequence is synthesized)
tgtttctcgtataaaactttttgatttgaaccaaaacagtgaagatgacaacacacaccaattggatgataattgtagcgggggcggtgggggggagaagtccacgccatccatcatgca

SEQ ID NO: 465888 - DNA, 120 bp, Artificial Sequence
  ENSG00000158321_44 (sequence is synthesized)
aaattctttcagatgaggtgggaaggccgtgtacatagttatgtaaaaagagattgcttcatgagctaatggttcatatatgcaaaagggtaagatgaaagctttactttgtacaaatgt

SEQ ID NO: 465889 - DNA, 120 bp, Artificial Sequence
  ENSG00000158321_45 (sequence is synthesized)
aaatagataaagtaacataatacattaatacttcttaaaatgtgctatttgcaaacttacttaatatcagtgaacacagtcggctaaagctgtgttcccatatattgttatagacagcta

SEQ ID NO: 465890 - DNA, 120 bp, Artificial Sequence
  ENSG00000158321_46 (sequence is synthesized)
aacccttcaactatgcaatgaatgttcgggcttttcacaaaagcccgcctaactcaaaggagccttttcaaatccatttacagcatacttaaggtcatattttccctgaacaagcgctta

SEQ ID NO: 465891 - DNA, 120 bp, Artificial Sequence
  ENSG00000158321_47 (sequence is synthesized)
cgtgatatgactctgttttccttgcttgttttttttcaaacggagaaacatcctgttttgcaaattggaccccaggctggaacttagcatctgaagttgccgcttgtgggctctggggga

SEQ ID NO: 465892 - DNA, 120 bp, Artificial Sequence
  ENSG00000158321_48 (sequence is synthesized)
aagtgtagccccggagaggtaactgaggacatgagcaaccagtgccagggagggtgggatttgccagatgccaaaatcaggggacgggtggtggtgtctgtcagacacacacaggtcgcc

SEQ ID NO: 465893 - DNA, 120 bp, Artificial Sequence
  ENSG00000158321_49 (sequence is synthesized)
agtgacttcacacacacctcatgtgagaaccatgccttttttagtgtgtcctatttcatacctgtacacacttcctcgttttgtaatgagatttacttacacccaaacagatcctgaaag

SEQ ID NO: 465894 - DNA, 120 bp, Artificial Sequence
  ENSG00000158321_50 (sequence is synthesized)
aaagcttcaagttttctcagatgatggatatgttttcactgtattcaataactgacggatgtaaggtgcacgtttcctgatgtgacgcactgtattccagctggtgatcaagtctgggaa

SEQ ID NO: 465895 - DNA, 120 bp, Artificial Sequence
  ENSG00000158321_51 (sequence is synthesized)
cagccgtaacaggtcaaccttgtggagccatcgcgagttagagggtgaaagatggcagaaaaaaaagtcttgtgtgtgagtgtgttttttgagtttgcatcaatcttaatgtctcttcat

SEQ ID NO: 465896 - DNA, 120 bp, Artificial Sequence
  ENSG00000158321_52 (sequence is synthesized)
aatacttttataatacattaagcctcttgtctacatatttggagagaatatgactttactagcagagaaatacaatatatcttgtctactggactgtaaaatatatgtatgaaataaaat

SEQ ID NO: 465897 - DNA, 120 bp, Artificial Sequence
  ENSG00000158321_53 (sequence is synthesized)
tagttccatttggtcttctagtatattaaagtgctatctgacgttgttatcctgtttttgcaaaaaaaaaaaaaaaaaaaagttaactacagaccattgtttctaataagcagagagatc

SEQ ID NO: 465898 - DNA, 120 bp, Artificial Sequence
  ENSG00000158321_54 (sequence is synthesized)
tattttagtagtaaactgaaggtttagttgtgagcttcagattttgtgaactccagatgttgtgcggtgtttttttttttttttaagacaacaactaaaaaaaatgcaaggaatatgtac

SEQ ID NO: 465899 - DNA, 120 bp, Artificial Sequence
  ENSG00000158321_55 (sequence is synthesized)
actggaactgtagtggtagctttcagtattgtaaagagattgttctatacggacctttttgctgtttatcctgtatgtaataaagtcctttctagatcctatgtgaaaagaaaagtgaag

SEQ ID NO: 465900 - DNA, 120 bp, Artificial Sequence
  ENSG00000158321_56 (sequence is synthesized)
caactgaatcttcagcatgttctcatcggcggagccttcttgtgtaatgtaaactgtgccatgttattaaaaaatgtgaactaagcttccagctgcttgtttgtgtgaggtgaccatcat

SEQ ID NO: 465901 - DNA, 120 bp, Artificial Sequence
  ENSG00000158321_57 (sequence is synthesized)
taccttagggaagaagccatacctgtacaagaccgggctcttgaaaagaaacacctcgaacccagcccgtgtaagaacagaaggctcacctgcagtggctgaccaccctacccaactcgg

SEQ ID NO: 465902 - DNA, 120 bp, Artificial Sequence
  ENSG00000158321_58 (sequence is synthesized)
ttagtgtctcaccaatttgttactataaacatttgcaccccacacagtcgcttgtggtttgttttttgaggagggggggttctgttagtttttcgtatgtccaagatactgtaaaaggta

SEQ ID NO: 465903 - DNA, 120 bp, Artificial Sequence
  ENSG00000158321_59 (sequence is synthesized)
cttctggattttgtagacgtgtgtacagtgtgggccacgttagccagttgtttgtgcctggctacttcaaaactcagcgaaagtgtttgcttttccagcagtgatgagaattctgaccta

SEQ ID NO: 465904 - DNA, 120 bp, Artificial Sequence
  ENSG00000158321_60 (sequence is synthesized)
gggcctgtgacaacagtttttgcttgctcgttgtattgcatttcaatctgtggactcggtcagtcatatgttacttaagaccttccagatttttttttcctgtcttagctttttctctct

SEQ ID NO: 465905 - DNA, 120 bp, Artificial Sequence
  ENSG00000158321_61 (sequence is synthesized)
tttaattacgtggtgtagtcctcatcagtttgcagtctccctgtcctctaaaatctgttttgtttttttccatgatgttaaaaaaacaaaaaaatgttaaattttcttataccgacctga

SEQ ID NO: 465906 - DNA, 80 bp, Artificial Sequence
  ENSG00000158321_62 (sequence is synthesized)
ggagcgcgcgcactcgagcgagcgagcgaaagcacgaacgagcgagcgagcgagcgagcgagcgggcgggcgcggggttg

SEQ ID NO: 465907 - DNA, 120 bp, Artificial Sequence
  ENSG00000158321_63 (sequence is synthesized)
gtctttgctagccggcgagttgcagtcttctgagctaattaggagacggtcatgaggagcgaggcgggccggggcgctccgcgggccggggcggggctggggcgggcggcgcgcagctcc

SEQ ID NO: 465908 - DNA, 120 bp, Artificial Sequence
  ENSG00000158321_64 (sequence is synthesized)
tgggccgaggcatccgcgagccgcgggtagatcgctcgcgtctgatcgccgcccgggagctcccgcggagccggctgccaggactcgttccagctccagtgcggggctgcccgggcgtcc

SEQ ID NO: 465909 - DNA, 120 bp, Artificial Sequence
  ENSG00000158321_65 (sequence is synthesized)
agaggcggcggacggcgtgccggcaagtttccccggcacctgccagtgcccgcgaacccacctcggaagccagacccggggaggcagaggcagaggccggctggctccagccgtggtacc

SEQ ID NO: 465910 - DNA, 120 bp, Artificial Sequence
  ENSG00000158321_66 (sequence is synthesized)
gcacggctgccaccctcggacttccgtcttgagtctcctgaggctgagaagcagcagatgccgaacctgccccctgacgtggacgtacacctcaagacctaaaatgcgccctgcctggag

SEQ ID NO: 465911 - DNA, 120 bp, Artificial Sequence
  ENSG00000158321_67 (sequence is synthesized)
actttgaacttagtcttctggaaatgcggagaccgcttcgggtggttttgtttttgcatcctcttcggctaggtttggctttgggattctctggctacctggatacgcctttcctttgtg

SEQ ID NO: 465912 - DNA, 120 bp, Artificial Sequence
  ENSG00000158321_68 (sequence is synthesized)
ggcaagtctcccgcggatcgcagcaccagcagccaaccctggggcacaccagcctttaaaacccccgagcctggagacgcatggagctagagaagaggacccaactcctgaccacgcatc

SEQ ID NO: 465913 - DNA, 120 bp, Artificial Sequence
  ENSG00000158321_69 (sequence is synthesized)
ttgacagatcctttcagacctatgttaaggaaaccagggaagtggtgtgctatgcatgttcacatcgcctggcagatttaccaccaccaacagaaagtcaaggtcagtccgaccttcgtg

SEQ ID NO: 465914 - DNA, 120 bp, Artificial Sequence
  ENSG00000158321_70 (sequence is synthesized)
agttcagctccttccagcttgggaacaggctacttcccatcgtgtacaactgctttaaaaaaattagctggacatggagaagtgtggaaaccattgttctgttacacaatggcaaaataa

SEQ ID NO: 465915 - DNA, 120 bp, Artificial Sequence
  ENSG00000158321_71 (sequence is synthesized)
gaccattaaaatatacctgtgatagacttagttgtgatgtggatgcattcatgagatcagggaagatgtgccttggagaggaagcatgtcttaaatctggaaatgatatgaagagggatg

SEQ ID NO: 465916 - DNA, 120 bp, Artificial Sequence
  ENSG00000158321_72 (sequence is synthesized)
tcagcaacacttcatcctgggccagtaatagggagagtttcttttctctcgtcaaattgcttaaaggattctagttccgtttggtgtggtcactcacatttgaattctaatactctatgt

SEQ ID NO: 465917 - DNA, 120 bp, Artificial Sequence
  ENSG00000158321_73 (sequence is synthesized)
gggtgtgtgtgtttgcacgggacggccagcccagtgctcgcatcttccttagctcctttgagcgagctgctgtttcagctgttcttctagtttgtggaagaaaatgccaattactcttag

SEQ ID NO: 465918 - DNA, 120 bp, Artificial Sequence
  ENSG00000158321_74 (sequence is synthesized)
aaaacacagtctctcctgctcactgcgagcataggacacaaagagaccgacttgccgatgggagaaaagaggaatgagttacggtctgagcccagaaattggacagtgtcagcttgtata

SEQ ID NO: 465919 - DNA, 120 bp, Artificial Sequence
  ENSG00000158321_75 (sequence is synthesized)
gggaacaggctacttctgtgacagtgacagtgaccaggaagagaaggtaagaccccccctcccccattgtgggcacagcacataacacactgaacaccagagtcctcccacacacagctg

SEQ ID NO: 465920 - DNA, 120 bp, Artificial Sequence
  ENSG00000158321_76 (sequence is synthesized)
cagggtaggatgccagcttcatgttgacaggaccttttctctttaggaaagatgggcattattcacacagtgacatttcctatgctatgacacgtttaatttgtcagatctacctttttt

SEQ ID NO: 465921 - DNA, 120 bp, Artificial Sequence
  ENSG00000158321_77 (sequence is synthesized)
tcatttaaacaagacctttaatattgcatatatgtgacactgagtttttactttatggaagatgactcatagactcaaaaacattttaaaagacaaaattatttattttaataaccatct

SEQ ID NO: 465922 - DNA, 120 bp, Artificial Sequence
  ENSG00000158321_78 (sequence is synthesized)
gatttttaaaaatccatgatgagaacgttaaacttgctagtttgtgtttataatgtcatttctgcatttattttactgacccatatgcttttctgtacctattggccttcttgatagaaa

SEQ ID NO: 465923 - DNA, 120 bp, Artificial Sequence
  ENSG00000158321_79 (sequence is synthesized)
tgttaatggtctgtgtctaggaatctcatcatggggtacgggtgggcaagggaggtcagatgggaactgccctcttcccatccgggcggaccgccaggtaggaggacagttcttccagca

SEQ ID NO: 465924 - DNA, 120 bp, Artificial Sequence
  ENSG00000158321_80 (sequence is synthesized)
ggtacatgctctgtttcgaggctcatgggcaccagcctctgtgtatccagatcaacatggatcaagaaaaggaactcagtttctgaggttccagaagattggatcacaactcggtaaagt

SEQ ID NO: 465925 - DNA, 120 bp, Artificial Sequence
  ENSG00000158321_81 (sequence is synthesized)
gagctttctgctgcctgaagcaaagggattatttgtctgtttggtctttctttctagccgttccaatccccaaccaaagttccttccatttttactgctgctttatgttattttgaaaag

SEQ ID NO: 465926 - DNA, 120 bp, Artificial Sequence
  ENSG00000158321_82 (sequence is synthesized)
agttacctgaatatcacggtttctgtattgcttggtatcaaaaggatggactcggcctcccttcccccgtttctggatctgtcctgtgccctgtgctttgactttcacctcctacatgct

SEQ ID NO: 465927 - DNA, 120 bp, Artificial Sequence
  ENSG00000158321_83 (sequence is synthesized)
ccagcctccaagagagatctaaaggctcttgttctgtactgtcgttaatttgaattcagcatatgtagcctgttataaaatgcgagacatcatcatttgagcaggtcaagcatattcaga

SEQ ID NO: 465928 - DNA, 120 bp, Artificial Sequence
  ENSG00000158321_84 (sequence is synthesized)
tgaagacaaatggtgcttatttgatttccttaaaatcaggaaatgaaaaaaatgctctctggagaaatcatgttctgcctgacttggatgatagaccaatgcatgtcccccagataagaa

SEQ ID NO: 465929 - DNA, 120 bp, Artificial Sequence
  ENSG00000158321_85 (sequence is synthesized)
caggctctcgccttgaggtttttatctctgaaggacggccaggactgtcagcttgctgacatgtgcattatccatgtcattttaaacaaagtgacctatggaagggtacgctgtgctgtg

SEQ ID NO: 465930 - DNA, 120 bp, Artificial Sequence
  ENSG00000158321_86 (sequence is synthesized)
acatggtaatgggctgttggatgacagtgaaagtacacactggaaagggggctgtggattattcttttgtttaactgacaagtaggagctgcctttctccagcccccaggagccttagct

SEQ ID NO: 465931 - DNA, 120 bp, Artificial Sequence
  ENSG00000158321_87 (sequence is synthesized)
ccttggaagtaggactcctggtgtctcaggcagccagtgtgtagtgggtgccagggacatgtgcacagcagtaatggttagtgttcaagacacggtcattggcccccaaacccccgaggc

SEQ ID NO: 465932 - DNA, 120 bp, Artificial Sequence
  ENSG00000158321_88 (sequence is synthesized)
cacattcccacatggtgggcatcactggtacccagggagggactggtaccttctggccattccagatctatcagcaatggttgatctcactttctaagtctgtgccacttttccaaaagg

SEQ ID NO: 465933 - DNA, 120 bp, Artificial Sequence
  ENSG00000158321_89 (sequence is synthesized)
tgtgccacttttccaaaaggataaatcttattcagggtcgtacaaccaagctgacattctttccttaaaaggaaatgtggggccaggcgcagtggctcacgcttgtgatcccagcacttt

SEQ ID NO: 465934 - DNA, 120 bp, Artificial Sequence
  ENSG00000158321_90 (sequence is synthesized)
caggcagaaattttgacaaataccctacaaaagttgacccattctaccggcacagtgatccctcctgtttttgaaatgcattaaaatctccaatcatttaggacttctatctgatttaac

SEQ ID NO: 465935 - DNA, 120 bp, Artificial Sequence
  ENSG00000158321_91 (sequence is synthesized)
gtgtgatcattccatcatggcttcttgactaatggcatcaaactgagattacgtggcttgctcatgtcgatgtctttctatgggacgggaatttgaatatgtcacttgcctcctactaaa

SEQ ID NO: 465936 - DNA, 120 bp, Artificial Sequence
  ENSG00000158321_92 (sequence is synthesized)
ggaaggagcccagagactcttgtggacagagccgggtcgagagttgggcgttttctcttcgtgtgttttggtggtttcccccctggtctttgacgatcgcccttcgggagccctgctaaa

SEQ ID NO: 465937 - DNA, 120 bp, Artificial Sequence
  ENSG00000158321_93 (sequence is synthesized)
gaaccaaaccatgaacttggggctgaccggaccgtttaaccctttgcaaccaggcatcagatgccagctctgaaaaactcttcaacactgttattgtaaacaaaggtaagacccattcat

SEQ ID NO: 465938 - DNA, 120 bp, Artificial Sequence
  ENSG00000158321_94 (sequence is synthesized)
tctcctgagtaatggcttatttttatgttagtttcattgtcattgcctaggaagaaagaagagctagagtgatctttctcttataattctgaagctactgttgatgtttcatgtttttgc

SEQ ID NO: 465939 - DNA, 120 bp, Artificial Sequence
  ENSG00000158321_95 (sequence is synthesized)
ttgagatggaagtctgcatactttgtgatgcattaacattaacaaccagtttattttaaaagaatacattgagtccctatttaaactgatttgactaatcactactactatgtgacttta

SEQ ID NO: 465940 - DNA, 120 bp, Artificial Sequence
  ENSG00000158321_96 (sequence is synthesized)
ctcgagaagaatagttctcaaaatgcctgaactttattgttacttatcaactacccagcaataggagaaatataaatagctgatgtgcattgcagactccagtaatcaatggatgtttag

SEQ ID NO: 465941 - DNA, 120 bp, Artificial Sequence
  ENSG00000158321_97 (sequence is synthesized)
aattcacagtattatggtcataaaccaagccttactctgctgtgggctttctgtaaagttaataaacgagcgagagggcagaatttaaatatgcactatcccattaatttcttccaaacc

SEQ ID NO: 465942 - DNA, 120 bp, Artificial Sequence
  ENSG00000158321_98 (sequence is synthesized)
acgatctagagtaagagaggctaatgatatagcagtacattaagggaaaactaaccttaaatcattgccagtaggtttctgcgcagctttcatttgttagcagtatcgttggaaataagg

SEQ ID NO: 465943 - DNA, 120 bp, Artificial Sequence
  ENSG00000158321_99 (sequence is synthesized)
aaatttaggggagtctgtaatcactggctctgaaaggtgtgtaatttgaaagggacaaaccatataaactatttaatcttcccctttccactgtcgagcctgatttaggggctggcatga

SEQ ID NO: 465944 - DNA, 120 bp, Artificial Sequence
  ENSG00000158321_100 (sequence is synthesized)
taattgctaagtaaagatgtgctttctgtgataatctctttctgggttacatgggcgacacttggtagcacttgaacagacttgggccttcacaaagtgaaatttgagaccatttcagcc

SEQ ID NO: 465945 - DNA, 120 bp, Artificial Sequence
  ENSG00000158321_101 (sequence is synthesized)
gtcagaaattgataaccagagttagatagaagtttaaaatgactcaactatgtaagtatgtcatgatgtatagtgaacttctggaaaatgtctaatagctataaataatgtaaagtcatc

SEQ ID NO: 465946 - DNA, 120 bp, Artificial Sequence
  ENSG00000158321_102 (sequence is synthesized)
aatgtaagggtattggtaaagagagcctaattctcctggatggatggaaaggacacctctccccagataccagttagtagacagctttaaaagccaggggtctgaaggccattctccctc

SEQ ID NO: 465947 - DNA, 120 bp, Artificial Sequence
  ENSG00000158321_103 (sequence is synthesized)
agacctacccggtgtggtttggagctcaaaacagtgaaactcctggtgtgtgatgtgagcaaatcatgttgccagagggcacattgctattgattaaacttgtacaggggcttgtcagcg

SEQ ID NO: 465948 - DNA, 120 bp, Artificial Sequence
  ENSG00000158321_104 (sequence is synthesized)
tagatgtaccaaggcttgtgaagtgggggaggggacacttggcacttttgatagtgtgaaaatgggttaattattctctaaaagggcttcatttaaaagtaaaattctaacattttaatt

SEQ ID NO: 465949 - DNA, 120 bp, Artificial Sequence
  ENSG00000158321_105 (sequence is synthesized)
ctcctaatgaagcactacaaatttgttaattagagcaattgtttgagtgacaggcatgtaaccaagttgtcattttctcttcacagttgacagatcctttcagacctatgttaaggaaac

SEQ ID NO: 465950 - DNA, 120 bp, Artificial Sequence
  ENSG00000158321_106 (sequence is synthesized)
acatcctctcctgcaaccccaaccctccgtaccgcaggcaagaaaacattgatgtttctgcatctggcagcatgtctctgggagaagaggccggcggaagggagtttgatgtgtgagtga

SEQ ID NO: 465951 - DNA, 120 bp, Artificial Sequence
  ENSG00000158321_107 (sequence is synthesized)
caaggcagtcctggagtgcagtttccggagcaagatcacacacagtgttttaggagctcagggaaggtgtgcaggaacataaaggggaagggggccaggtttgaaagagtggatttttcc

SEQ ID NO: 465952 - DNA, 120 bp, Artificial Sequence
  ENSG00000158321_108 (sequence is synthesized)
agaggctgtgagctccactgtgagctgccaaggcccatactgctgggggatctttaatgcatggcgcaaggctcctgtgccccaatcccggaggagcggtgacagtccagggaagagagg

SEQ ID NO: 465953 - DNA, 120 bp, Artificial Sequence
  ENSG00000158321_109 (sequence is synthesized)
gcagtgtgttttagtttaaccttcatttgtttctcttttctccattcctcatcccaattcaggtatcagatcctttgacaattgttaacctgcccagctgggatttttggcattaagcta

SEQ ID NO: 465954 - DNA, 120 bp, Artificial Sequence
  ENSG00000158321_110 (sequence is synthesized)
tgactgtaacgtttctactaataaattagattttttaaaagagtgctgcttgccaagaagcaaagtcattacatagtgtgtatatgttcaatgtatggctataaaagtctccttagccaa

SEQ ID NO: 465955 - DNA, 120 bp, Artificial Sequence
  ENSG00000158321_111 (sequence is synthesized)
acataatcgacagttaaaataaatttaaaataaccgtgctacctctagattttaaaattgttaaggtgaagataggtggtctaattttactctatttccatttttcttattcacagggta

SEQ ID NO: 465956 - DNA, 120 bp, Artificial Sequence
  ENSG00000158321_112 (sequence is synthesized)
tatttgttctgtaaaaccacatatgtatcttatagtctgcagctgatgtatttatctgcctaaatacacatttctccaatggaatattctgtaatatcaagcatttcttttttagatgga

SEQ ID NO: 465957 - DNA, 120 bp, Artificial Sequence
  ENSG00000158321_113 (sequence is synthesized)
aattaattttataacagttgaacatcatctttgtcaatcagcagctttatctaccataaagaacaaaaacgtacttggcgtggcctgctttaacttttgtagttcctatgtttaaactga

SEQ ID NO: 465958 - DNA, 120 bp, Artificial Sequence
  ENSG00000158321_114 (sequence is synthesized)
acagaggaatattatgtgaacaaattggaaaattatataaagaaataaaaatctttttactattatagttatctttaccccatagctttcaaaaaggcatttgaagcaatttaataaaat

SEQ ID NO: 465959 - DNA, 120 bp, Artificial Sequence
  ENSG00000158321_115 (sequence is synthesized)
aggaataacagtaagtactagatgtgagaggtgagaaaacaactttgtaaatcacccatctcacgaagttgcacagaggttcctgatagcccagacaatgaaataatgtgataattccta

SEQ ID NO: 465960 - DNA, 120 bp, Artificial Sequence
  ENSG00000158321_116 (sequence is synthesized)
ttttcagaaaagataactagctccttattttgttttgggtgtagaatgggggaagtggtatatttttgctaagttctaaattcttaggaaaatgttcacatgggttttgagagtcactgt

SEQ ID NO: 465961 - DNA, 120 bp, Artificial Sequence
  ENSG00000158321_117 (sequence is synthesized)
ataactgacaatgtccccagttacagatttccagaaaattcagacatggaattcatgttactcattttagttctaacctttgatgaaagattagggcattagattgaagcttaagtaagc

SEQ ID NO: 465962 - DNA, 120 bp, Artificial Sequence
  ENSG00000158321_118 (sequence is synthesized)
aaaggcattcttcaggtgatgtggttcattctaatcagtaattttatgatggtgttcatattccattccaatgatcaaatggactagtaagcttgagaaataagacaaactagagagaga

SEQ ID NO: 465963 - DNA, 120 bp, Artificial Sequence
  ENSG00000158321_119 (sequence is synthesized)
gattattttataaatatgaaggaggctagtgaaattttggtccagatggaaagccacccactctcccaggtcaggactgcatagatgaagtataagcaaaaccgtcattcacactttgaa

SEQ ID NO: 465964 - DNA, 120 bp, Artificial Sequence
  ENSG00000158321_120 (sequence is synthesized)
agatgtcattatatgtggtgtcagatttttcaccctgttcagtactgggcactgatttttaaaaccacttatctatattttttaaatgtcttctgactcattggattgattttgtggacc

SEQ ID NO: 465965 - DNA, 120 bp, Artificial Sequence
  ENSG00000158321_121 (sequence is synthesized)
tactggtagtctttggatatcccccagttaatctttgcttccatgatgagcatttattgaattctattcttatgccaggcactgtactagattttaggagtacagtagtcaggttttcct

SEQ ID NO: 465966 - DNA, 120 bp, Artificial Sequence
  ENSG00000158321_122 (sequence is synthesized)
tgccttcatggagtctctggtcaaatactttggttcttatatagcggttcatgttccgacacgtggttacccacacaggctttagttaacatctgcatcacctgctgcacattctcatct

SEQ ID NO: 465967 - DNA, 120 bp, Artificial Sequence
  ENSG00000158321_123 (sequence is synthesized)
aaaatgcgtatgtgaaagtacagttgtagccactcagtgtcactcaccagtggggctttaggcctgagactttccgatagcctctaattatgtaaaaccatgcctgtattcaggagtcag

SEQ ID NO: 465968 - DNA, 120 bp, Artificial Sequence
  ENSG00000158321_124 (sequence is synthesized)
aagtgatcaaaatgttttaggaagcacaccgtcagcatagatgtgtcaactcagcagcaagatttttcattcttttaaagttacacatttcataaagaagaagggtatcagtgtaaactt

SEQ ID NO: 465969 - DNA, 120 bp, Artificial Sequence
  ENSG00000158321_125 (sequence is synthesized)
ctaaatgcaggacaaaatgcatgattggggatggagattggagtggacttgttcaaagagcagcagcaaatgagacattaaaggaatacataggaagccacttccaagtacttccatttt

SEQ ID NO: 465970 - DNA, 120 bp, Artificial Sequence
  ENSG00000158321_126 (sequence is synthesized)
tctttagttgtgattgtgagatggttccctactagttagagaaggaaaattttaaaatgctttgctaaacagatgatccttaaattggtcactgtataccgtgatgcagcctaatcaaaa

SEQ ID NO: 465971 - DNA, 120 bp, Artificial Sequence
  ENSG00000158321_127 (sequence is synthesized)
tggtattcctttgagtgagtgagccacagagactctcgccaaccccttgtgcagctttctattaacagtataaatactccattgttgtaaagcagtttatggttaacaaagcgctgtcac

SEQ ID NO: 465972 - DNA, 120 bp, Artificial Sequence
  ENSG00000158321_128 (sequence is synthesized)
agacacgttatcttagttttgcagattgcctttgtacatgttattctcatttcctagcatgccctctatccctgctttgcctgcttagcaagctcattcttatccttcaggacataacac

SEQ ID NO: 465973 - DNA, 120 bp, Artificial Sequence
  ENSG00000158321_129 (sequence is synthesized)
caactctgcaaagtcctcttgagacccttctgagcaggtagatggtcccttccccgtacttacacaagccctgatctcatctctgttgtcatttgttcacatcactgtttctccctggag

SEQ ID NO: 465974 - DNA, 120 bp, Artificial Sequence
  ENSG00000158321_130 (sequence is synthesized)
actgagtctctcaagggtaaggacactgtgtgctcttcatttttcttcccagtgcctttgtaaccagtcttcctgggggatactttgtaagtaaaggtgaatactgtatggtgtgcagct

SEQ ID NO: 465975 - DNA, 120 bp, Artificial Sequence
  ENSG00000158321_131 (sequence is synthesized)
taggagagcttaagccacttcctaagttaagatactaagtagtagataagagtaaaacttaagtgtcttaactcctgtttttatcggtttttctggtttatcagtttattgctcatctga

SEQ ID NO: 465976 - DNA, 120 bp, Artificial Sequence
  ENSG00000158321_132 (sequence is synthesized)
aaacaagctgtccacatcatactcatgctgttctacctgtcagagatatattacatggtaaatgtgagtgataaaggaggataagttctttgtcagaatgaggacatttcggttctgtca

SEQ ID NO: 465977 - DNA, 120 bp, Artificial Sequence
  ENSG00000158321_133 (sequence is synthesized)
tcatgcctgaaatgcatgatttcacatgatttccatgtgaaataaaacattggtataaaagggatatggacaaatttgtggatgttagaaccacacctttttctctgaatttattttctt

SEQ ID NO: 465978 - DNA, 120 bp, Artificial Sequence
  ENSG00000158321_134 (sequence is synthesized)
ctcactcctacttggcatattccctgtcattgtttgagagtgtgcaccaatgtcctcgtctcagggacaccatttctttcccgctattagagtgtctggatgatgccgtacccttagtgc

SEQ ID NO: 465979 - DNA, 120 bp, Artificial Sequence
  ENSG00000158321_135 (sequence is synthesized)
actgtcctgttgaaaatttggtacattagttattttaaggtttaaaaacattgctgcctacataatattccacctctttggagcatttgcattggagtgaccagtggcttgaagctctgt

SEQ ID NO: 465980 - DNA, 120 bp, Artificial Sequence
  ENSG00000158321_136 (sequence is synthesized)
atggtggagtgactgatggtagttgaagactgcaaaagtaggtatctgagggctggaaggcattcctggcacccctaaaactaccccactgggggccatccaagcctgtgattaacaaac

SEQ ID NO: 465981 - DNA, 120 bp, Artificial Sequence
  ENSG00000158321_137 (sequence is synthesized)
cctagttatttgctaggtagtttccacatggcatagtaggatatatatatgtgaggcacaatacagtgtttatgtgagaataatatagattatttgaatctaggctgcagaacctacctg

SEQ ID NO: 465982 - DNA, 120 bp, Artificial Sequence
  ENSG00000158321_138 (sequence is synthesized)
aaaatgggttttacagttttgtgtaattgccttttctttgtgtttgcatagaaggcattgcatagctggaagatgatggcaattataatttattatgctgtaattgttacctaaatgttt

SEQ ID NO: 465983 - DNA, 120 bp, Artificial Sequence
  ENSG00000158321_139 (sequence is synthesized)
gaattaggtcatctcagtacccatttggtcccttttcctttttaacttcccctgtccccacctttgcttttggttttaaaaagaaaaaaaaaagctgtgagctacctctccagtgtagga

SEQ ID NO: 465984 - DNA, 120 bp, Artificial Sequence
  ENSG00000158321_140 (sequence is synthesized)
caagacttcctctaatgaatttgttaatctcctttccttttccagctcccaataatatgtattcattttaactctgaatgctgttaaaagttttttggtaagtaccttcattacagcaga

SEQ ID NO: 465985 - DNA, 120 bp, Artificial Sequence
  ENSG00000158321_141 (sequence is synthesized)
cgtctggaggaggcgcgctcggcgcagtcggggagcgaagtccggagcaaggggcccccgcgtagccgccgccccctcctgctaccgtccagccagggagcccgcggcggccgccgatgg

SEQ ID NO: 465986 - DNA, 120 bp, Artificial Sequence
  ENSG00000158321_142 (sequence is synthesized)
atggagttcacttgagctgtgaaccggcgggagaggcaggcgcccgcaagccgagcgcgggccggagcccagccagccccgggcgctcacccgccagcccgcaagctccggccagaggcg

SEQ ID NO: 465987 - DNA, 120 bp, Artificial Sequence
  ENSG00000158321_143 (sequence is synthesized)
cgccgttgcagcgcctcctgggccgcgcgccggcgagatccgcacaaaatccagactcccggagcggctccctccagcaccgcggcgggcccaggaccaggcagcccgcggcgcggctgg

SEQ ID NO: 465988 - DNA, 120 bp, Artificial Sequence
  ENSG00000158321_144 (sequence is synthesized)
gcggctggagaggcgggaccggctgtcggggagccccgggcggccgccggggagaagccgccgcgcgccctcctcctcctcctccctctccctcctccctccctccgcacatggtctcct

SEQ ID NO: 465989 - DNA, 120 bp, Artificial Sequence
  ENSG00000158321_145 (sequence is synthesized)
tcctttgtcctgtcgccgccgccgccgcctcgctcttagctccgcgcgccgcggcggcggctcaggccgctcttctccgcctcgccctcccgccggccggcccgggacgcgccttgttag

SEQ ID NO: 465990 - DNA, 80 bp, Artificial Sequence
  ENSG00000158321_146 (sequence is synthesized)
ggagacagtggcgagcgcgggccgggcgatctcggcgggcgcgctcctcccgccgcccggggcctcggccgcgctggatg

SEQ ID NO: 465991 - DNA, 120 bp, Artificial Sequence
  ENSG00000158321_147 (sequence is synthesized)
ctgaattacataactttccctcatctttagaactttttgtctacccaagcattgcggttcacattatctttgtatacttatttgagcattgtagttatggtgtcattctaaaatgtcgtt

SEQ ID NO: 465992 - DNA, 120 bp, Artificial Sequence
  ENSG00000158321_148 (sequence is synthesized)
ttgtagttatggtgtcattctaaaatgtcgtttgagcaaaaatgtattttgacaaatcattaggtaggaggaactatttgttaccttagaaacaacaaggccgggcacggtggctcacgc

SEQ ID NO: 465993 - DNA, 86 bp, Artificial Sequence
  ENSG00000158321_149 (sequence is synthesized)
tcccagctactcgggaagctgagacagaagaatctctgaacccagaaggcagaggttgtggtgagccgatattgtgccactgtact

SEQ ID NO: 465994 - DNA, 120 bp, Artificial Sequence
  ENSG00000158321_150 (sequence is synthesized)
attcccgttggatttctggaaggaaaaccttgtgagaatgcgtcatacctcttgagatatctgtttgccctctagatgtgattttcattgttctctagtctgcccaccaacagggcaggt

SEQ ID NO: 465995 - DNA, 120 bp, Artificial Sequence
  ENSG00000158321_151 (sequence is synthesized)
aacagggcaggttccccctctattacttctgagaaccacctacccctctttggactctcttaccttctttactcatatgtcatatatcagcattttttttttttttttttgagatggagt

SEQ ID NO: 465996 - DNA, 89 bp, Artificial Sequence
  ENSG00000158321_152 (sequence is synthesized)
agacagggtttcaccgtgttggccaggattgtcttgatctctttacctcgtgatctgccttcttcggccttcacgcccagccatatatc

SEQ ID NO: 465997 - DNA, 120 bp, Artificial Sequence
  ENSG00000158321_153 (sequence is synthesized)
accacgcccagccatatatcagcattcttaactcatctgtacctcaagagcaacacttggaaattcttttgtgaaatggatcaagtaaagagattttttttttttttttgagactgagtc

SEQ ID NO: 465998 - DNA, 72 bp, Artificial Sequence
  ENSG00000158321_154 (sequence is synthesized)
gctcactgcaacctttggattacaggcgcgtgccaccccgcccagctaatttttgtattttcaatagagatg

SEQ ID NO: 465999 - DNA, 120 bp, Artificial Sequence
  ENSG00000158321_155 (sequence is synthesized)
agatggggtttctccatgttgaccaggatggtctagcattaacagaataagtgagagagtagcaccatgaaaaaaaagagatagcacttcagagtgtctgagtattaagaataaataaag

SEQ ID NO: 466000 - DNA, 120 bp, Artificial Sequence
  ENSG00000158321_156 (sequence is synthesized)
tcagagtgtctgagtattaagaataaataaaggatatgtaataagaagcaaaatcttttattttctccattttatttttaaaaaacaccatactctaaagcagtgtgctgttcattatag

SEQ ID NO: 466001 - DNA, 120 bp, Artificial Sequence
  ENSG00000158321_157 (sequence is synthesized)
agtgcaagatgattcattgagttccagaaagaaaatactagtactttttttcttaaaaaaagaaattaaactttactagtattcagtttaacgagcggggaataattgatgtctataatt

SEQ ID NO: 466002 - DNA, 120 bp, Artificial Sequence
  ENSG00000158321_158 (sequence is synthesized)
tttaaatacgtggatttaaggagtgtatactcaaaacttttttttactgagagatgtctactaacataaacggttggagaccactctagcacactgagcagttctctatgataataccac

SEQ ID NO: 466003 - DNA, 120 bp, Artificial Sequence
  ENSG00000158321_159 (sequence is synthesized)
atccatctctccatcagccaaggtagacaattccgagatacaatcacatttctgcacctctcatgaaagtttgtgaggtttatgatgagatgttgtatgagatactgtattcttacagga

SEQ ID NO: 466004 - DNA, 120 bp, Artificial Sequence
  ENSG00000158321_160 (sequence is synthesized)
tatgatgagatgttgtatgagatactgtattcttacaggaattaaatggaataaagtataattatttttatgttattttaatatattagttatagataataacctccccttcttctgtga

SEQ ID NO: 466005 - DNA, 120 bp, Artificial Sequence
  ENSG00000158321_161 (sequence is synthesized)
ggtttttgtgtagctgctttctctcacagtgtttgtaaacttgaacccaagtgcaccgttcacagtctccagctccagctcttcactaacacctttattccttgctgttggccttgggac

SEQ ID NO: 466006 - DNA, 120 bp, Artificial Sequence
  ENSG00000158321_162 (sequence is synthesized)
gctctgagctgccgctcagtcaccacctacaaaaatacagttaatgccagcttgcaaggcaacatcgcagcacatccagggagttgggaatcttcattgatacactctctttcattaaag

SEQ ID NO: 466007 - DNA, 120 bp, Artificial Sequence
  ENSG00000158321_163 (sequence is synthesized)
gaggaggcagagatcatctttcccttacagggattcacattgcttcggttcattatttgcttctatattaaaccagtataactcacaagcatgtcagttgctattgagaaagatctgaag

SEQ ID NO: 466008 - DNA, 120 bp, Artificial Sequence
  ENSG00000158321_164 (sequence is synthesized)
gcttgcaagggcagatcggaaggaaacaatgccaggaattatagaaggatgcggtcgcccttaatacggtgcccgcagagcactgtaattttgcaccgggatgctcagtcatgccgtgtt

SEQ ID NO: 466009 - DNA, 120 bp, Artificial Sequence
  ENSG00000158321_165 (sequence is synthesized)
ttaaagtcctgaggataaagaaaggcgattaaggcagttgccaggagtatggtctgtgatagggaggttgggccactcggttgctggttttctctgctacaaaacgtaatactattgcct

SEQ ID NO: 466010 - DNA, 120 bp, Artificial Sequence
  ENSG00000158321_166 (sequence is synthesized)
ggttggttatagcggtggaagaaatttaggaaacggtgtaaacacccaagtgacctgctcatcggatctgtaattcatttaacctctgagaatacacactgtcaagtgtgcgtgtggaag

SEQ ID NO: 466011 - DNA, 120 bp, Artificial Sequence
  ENSG00000158321_167 (sequence is synthesized)
gggtgaggtagagagtgacgattatgctcattcctgctccaggtacaaacaaaagacagcggctgtaaggactgtgtgtgtgctggatgagaacagccctcttggtattaagggtttctt

SEQ ID NO: 466012 - DNA, 120 bp, Artificial Sequence
  ENSG00000158321_168 (sequence is synthesized)
gtcattctgtcttctctaaagcttttttaagtgtaatttctggcacacagagctcagctcagttaacacttaaaaatgatggcactgagctcattctgctaataacttcatacccactat

SEQ ID NO: 466013 - DNA, 120 bp, Artificial Sequence
  ENSG00000158321_169 (sequence is synthesized)
gctaagtagaatttattcttctggacgtaagcagtcaaggggctccccatttctgatccttacgagacaagtcttacagccatcctgccagctgccaccccaggcttttatccaagactc

SEQ ID NO: 466014 - DNA, 120 bp, Artificial Sequence
  ENSG00000158321_170 (sequence is synthesized)
actgttggtggacctctggctcttctgttcaggaagagagaagcacccacactgcaagaaatcatcattataatgggccttagctaccaaagcaagtgcgtccccctggagggtagatgg

SEQ ID NO: 466015 - DNA, 120 bp, Artificial Sequence
  ENSG00000158321_171 (sequence is synthesized)
aatttgctaaggtctcaggtttttctctgtcagtgctgtctggggacatatttgaaggctctgttaccatggcacctaggctctgagacagggctacatgaagagcaatttttggaaaga

SEQ ID NO: 466016 - DNA, 120 bp, Artificial Sequence
  ENSG00000158321_172 (sequence is synthesized)
tggatgaattggcttcttttgcttcaataattctggaactgcaaggcacccctgggggccctgggctcagcaaagctctggtcttcattgaagcattaattagcttgcactacacagaca

SEQ ID NO: 466017 - DNA, 120 bp, Artificial Sequence
  ENSG00000158321_173 (sequence is synthesized)
gtatgtggccaaaattttatttagctgacaacactgctaacggcctgatgaatattctggaatatattcacttggtggaggcggggtatcatttttacacttcccaggtggaaaataagc

SEQ ID NO: 466018 - DNA, 120 bp, Artificial Sequence
  ENSG00000158321_174 (sequence is synthesized)
cagtatgcagggctgaatagataactcctcaggtgtcttccaattccgaactactgtgacggggatgatgttcctcctgtactgagtggcttcctctccaaacccaggccacaagacttt

SEQ ID NO: 466019 - DNA, 120 bp, Artificial Sequence
  ENSG00000158321_175 (sequence is synthesized)
tgcagcccagggaacagcagtccaaaacataaatcgagttaacagagtgtagacagcaacaacccctacgtttaatccattttcctaagggaatttatatttgtttataggaacttagac

SEQ ID NO: 466020 - DNA, 120 bp, Artificial Sequence
  ENSG00000158321_176 (sequence is synthesized)
aaaatgcaaaggattatggaacagtttttagtaaattctttatccaggccttgtttatacttccattctagaatgtaaccttctttagcataagcagtatgggattctgcccaaaatagt

SEQ ID NO: 466021 - DNA, 120 bp, Artificial Sequence
  ENSG00000158321_177 (sequence is synthesized)
tatttggtgaaccttgtaactgatgtgtataacttgtacatacttaagaaatccagccattttcatcttgctattgggtgctaatcccatgaatataaactagagacttcttcagatgac

SEQ ID NO: 466022 - DNA, 120 bp, Artificial Sequence
  ENSG00000158321_178 (sequence is synthesized)
cctggcaaatctctcgtctaggacaaagcctgccttccaggaagctagcctccttagctagtaagtagcctcgtattaacaagcccatttggtgccctaaggcctttagaaatgtccttc

SEQ ID NO: 466023 - DNA, 120 bp, Artificial Sequence
  ENSG00000158321_179 (sequence is synthesized)
cctaattcacatttgcacactctctttctctgtctccttccttccttcctttcctggcttccttcaggaacaggaatagaggcatcttcaagaagtacacattaggcaaaatacagagaa

SEQ ID NO: 466024 - DNA, 120 bp, Artificial Sequence
  ENSG00000158321_180 (sequence is synthesized)
gaggaggaaatgtggatcaagggacaactgaaggaaaccactaaattagacctgagttccctggcaggcaaagcaaaaacctgtcagagtcagttataagattttcagtgccccaaaaca

SEQ ID NO: 466025 - DNA, 120 bp, Artificial Sequence
  ENSG00000158321_181 (sequence is synthesized)
taagaatcaaccagcttttcctggcattgaaagttgagagacatcagaggacttcatctcctaaaacctaattgagctcacaataatgagttttatagagtcgggtcttatagtatcctt

SEQ ID NO: 466026 - DNA, 120 bp, Artificial Sequence
  ENSG00000158321_182 (sequence is synthesized)
cgatgtgggtgcatgcgaactaacatactcttcaggagaagggattctgcaagtccccagagcagcgtagccaagaaccacagcttcaggaccacccctcctgagccagagatgataacg

SEQ ID NO: 466027 - DNA, 120 bp, Artificial Sequence
  ENSG00000158321_183 (sequence is synthesized)
ggctgggtttctggaagtgtttctcaaagtgaaaacttggtcctccgagatgctctatgaggagtggattccatgatgaaatgttcccctcttagagaacgaaggagcctataagcttat

SEQ ID NO: 466028 - DNA, 120 bp, Artificial Sequence
  ENSG00000158321_184 (sequence is synthesized)
taataagcttattaatggctctaagaagcccttcagtaaagaaacttgcttagctttttttaatccagtatttctccaaatttacttggttataaagcctcccctcctcccatgacccag

SEQ ID NO: 466029 - DNA, 120 bp, Artificial Sequence
  ENSG00000158321_185 (sequence is synthesized)
ggcagttatctctgtctttgtaatactgtgtgtcatcggcttaaaaaagaaatacctgtttttggtggtggccagccacgctgggaaagagaaagagggatgattgattttctgcttcct

SEQ ID NO: 466030 - DNA, 120 bp, Artificial Sequence
  ENSG00000158321_186 (sequence is synthesized)
gcaagtcacaggtccctcccacgctcaaggtgagatgatcacacaagggcattgacaaccaggagctggtactcttattgtcaaatagctttatgctctgttacattaatgagggaaact

SEQ ID NO: 466031 - DNA, 120 bp, Artificial Sequence
  ENSG00000158321_187 (sequence is synthesized)
aactgtcttcagtgggtgaatttacatctgttttgacccaaaagataatttaggatgacttatggaatctgaagctaaatgtcaaatgtaattaaatgttactgttgtgtcttgccttaa

SEQ ID NO: 466032 - DNA, 120 bp, Artificial Sequence
  ENSG00000158321_188 (sequence is synthesized)
cgtggcttgctcatgtcgatgtctttctatgggacgggaatttgaatatgtcacttgcctcctactaaaatcttttttccccctctccgtctttggccacagctcttccattcctatcct

SEQ ID NO: 466033 - DNA, 120 bp, Artificial Sequence
  ENSG00000158321_189 (sequence is synthesized)
actatcattttcatcagcttcacaacccctcagttctgagaaccctccttgccatacaagccactggagtgtctgcgtttcctttctgtggacattgtcacctttcccttcattttggag

SEQ ID NO: 466034 - DNA, 120 bp, Artificial Sequence
  ENSG00000158321_190 (sequence is synthesized)
gaggaagacgcccagcttcggaatgcttgaggcataaaactgatccttggttaagatcagcagaggcttgctgtgtgcaacataaattgtcagaaagatgtagcacttaagcctcaggaa

SEQ ID NO: 466035 - DNA, 120 bp, Artificial Sequence
  ENSG00000158321_191 (sequence is synthesized)
tttgatttgactcacagacattcactaatgagctcttctgaacagctgatttgcattatagcatggcaacatttgttaagtagggcttcccactctaccaggtctgccagctggcagcag

SEQ ID NO: 466036 - DNA, 120 bp, Artificial Sequence
  ENSG00000158321_192 (sequence is synthesized)
aaaagaaagagaagaggcacagagtgggattcaggcttttgccgtcttgtccttggtaaccggggaggcccttgtcaatgtggttttctgagtagcaaacccacgtggggagagaggggg

SEQ ID NO: 466037 - DNA, 120 bp, Artificial Sequence
  ENSG00000158321_193 (sequence is synthesized)
aaagcactcttgtttcacgaaaaaagcctctgcagccaaaatctgctgaaagctttggggaaattgaaggtggttttctctgaaatgtcttcctcctaaccacgttgctctttcttgttc

SEQ ID NO: 466038 - DNA, 120 bp, Artificial Sequence
  ENSG00000158321_194 (sequence is synthesized)
cagaaaccagggaagtggtgtgctatgcatgttcacatcgcctggcagatttaccaccaccaacagaaagtcaagaaacagatgcagtcagacccacataagctggactttggactgaaa

SEQ ID NO: 466039 - DNA, 120 bp, Artificial Sequence
  ENSG00000158352_0 (sequence is synthesized)
ccgttttcttgtccattacgcgctatccctccgcctctccttctttcttttcttttctttttttcccttctccttttcccccctctctccccctttctccagctccgtgtcatttcctcc

SEQ ID NO: 466040 - DNA, 120 bp, Artificial Sequence
  ENSG00000158352_1 (sequence is synthesized)
ttgcgctcgctcgctgcctgagcgtctccagccgggagagtaggcggagcagggcggtgcggggtggcgtagagctggagggcgatggtggcggagctgctgggggcggaggcaacgtag

SEQ ID NO: 466041 - DNA, 120 bp, Artificial Sequence
  ENSG00000158352_2 (sequence is synthesized)
ccccctcggaaaaggagcccggcggcgcctgagcccagccgaggatggagaaccggcctgggtccttccagtacgtccctgtgcagctgcaagggggggcaccctggggcttcaccctta

SEQ ID NO: 466042 - DNA, 120 bp, Artificial Sequence
  ENSG00000158352_3 (sequence is synthesized)
aggggggtctggaacactgtgagccgctcacagtgtctaagattgaagatggaggcaaggcagctttgtcccagaagatgaggactggtgatgagctggtgaatatcaatggcactccat

SEQ ID NO: 466043 - DNA, 120 bp, Artificial Sequence
  ENSG00000158352_4 (sequence is synthesized)
tatatggctcccgccaagaggccctcattctcatcaaaggctccttccggattctcaagctgattgtcaggaggaggaacgcccctgtcagtaggccgcactcatggcatgtggccaagc

SEQ ID NO: 466044 - DNA, 120 bp, Artificial Sequence
  ENSG00000158352_5 (sequence is synthesized)
tgctggagggatgccctgaagcagccaccaccatgcatttcccttctgaagccttcagcttgtcctggcattctggctgcaacacaagtgacgtgtgtgtgcagtggtgtccactctccc

SEQ ID NO: 466045 - DNA, 120 bp, Artificial Sequence
  ENSG00000158352_6 (sequence is synthesized)
ggcattgcagcaccgagaaaagcagctccattggcagcatggagagcctggagcaaccaggccaagccacctatgagagccatctgttgcctattgaccagaacatgtaccctaaccagc

SEQ ID NO: 466046 - DNA, 120 bp, Artificial Sequence
  ENSG00000158352_7 (sequence is synthesized)
gtgactcagcctacagctccttctcggccagctcaaatgcttctgactgtgccctttccctcaggccagaggagccagcctctacagactgcatcatgcaaggcccagggccaactaagg

SEQ ID NO: 466047 - DNA, 120 bp, Artificial Sequence
  ENSG00000158352_8 (sequence is synthesized)
cccccagtggccggcctaatgtggctgagacctcaggaggtagtcggcgcaccaatgggggccacctgacccccagctctcagatgtcatcccgtccacaggagggataccagtcagggc

SEQ ID NO: 466048 - DNA, 120 bp, Artificial Sequence
  ENSG00000158352_9 (sequence is synthesized)
ccgccaaagcagtcaggggcccaccacaacctccagtgaggcgggacagccttcaggcctccagagcccaactcctcaatggagagcagcgcagggcatctgagcctgtggtccccttgc

SEQ ID NO: 466049 - DNA, 120 bp, Artificial Sequence
  ENSG00000158352_10 (sequence is synthesized)
cacagaaggagaaactgagcttagagcctgtgctacccgcaaggaaccctaataggttctgttgcctcagtgggcatgaccaagtgacaagtgagggccatcagaactgtgagttcagtc

SEQ ID NO: 466050 - DNA, 120 bp, Artificial Sequence
  ENSG00000158352_11 (sequence is synthesized)
agcctcctgaatccagccaacagggctctgagcatctactgatgcaggcctcaaccaaagctgttggatccccaaaagcctgtgacagagcttccagcgtggattccaacccactcaatg

SEQ ID NO: 466051 - DNA, 120 bp, Artificial Sequence
  ENSG00000158352_12 (sequence is synthesized)
aggcttctgcagagctagctaaggcttcttttggcagacctccacatctcataggacccacagggcatcgccatagtgcccctgaacagctgctggcatcccacctgcagcatgtgcacc

SEQ ID NO: 466052 - DNA, 120 bp, Artificial Sequence
  ENSG00000158352_13 (sequence is synthesized)
ttgataccaggggcagcaaagggatggagctcccacccgtacaggatgggcaccagtggactctgtcccctttgcacagcagccacaaagggaagaaaagtccatgcccccctacaggag

SEQ ID NO: 466053 - DNA, 120 bp, Artificial Sequence
  ENSG00000158352_14 (sequence is synthesized)
gaacccatgaccagtccagcaaagaaagaaagaccagacaagtggatgacaggtctttagttttgggacaccagagccaaagcagtcccccacatggagaggctgatggacacccctcag

SEQ ID NO: 466054 - DNA, 120 bp, Artificial Sequence
  ENSG00000158352_15 (sequence is synthesized)
aaaaaggtttcctggacccaaacagaacaagcagagcagccagtgaattggccaaccagcaaccctctgcctctggctcccttgttcaacaagccacggactgttcttcaaccactaaag

SEQ ID NO: 466055 - DNA, 120 bp, Artificial Sequence
  ENSG00000158352_16 (sequence is synthesized)
cagctagtggcacagaggcaggtgaagaaggggacagcgagcccaaggagtgcagccggatgggtggtaggcgaagtggagggacccggggccgctcgatccaaaaccggcggaagagtg

SEQ ID NO: 466056 - DNA, 120 bp, Artificial Sequence
  ENSG00000158352_17 (sequence is synthesized)
agcgttttgctaccaatctgcgtaatgaaattcagaggaggaaggcccagctccagaaaagcaagggtcccttgtcacagctgtgtgacactaaggagccagtggaagagacccaggagc

SEQ ID NO: 466057 - DNA, 120 bp, Artificial Sequence
  ENSG00000158352_18 (sequence is synthesized)
ccccagaaagtcctccactcactgcctctaacacatctcttctatcttcatgtaaaaaacctcccagccccagagacaagctcttcaacaaaagcatgatgctcagagctaggtcttccg

SEQ ID NO: 466058 - DNA, 120 bp, Artificial Sequence
  ENSG00000158352_19 (sequence is synthesized)
agtgcctcagccaagcccctgagagccatgaatctaggacaggcttagagggacgaataagccctggccagaggcctggccagtcctctttgggcctgaacacctggtggaaagcacctg

SEQ ID NO: 466059 - DNA, 120 bp, Artificial Sequence
  ENSG00000158352_20 (sequence is synthesized)
acccatcctcctcagaccctgagaaagcacatgctcactgtggagtccgtggaggtcattggagatggtctccagagcataattcacagccacttgtggcagcagccatggaaggccctt

SEQ ID NO: 466060 - DNA, 120 bp, Artificial Sequence
  ENSG00000158352_21 (sequence is synthesized)
ccaacccaggtgacaacaaggaattgaaggcttctactgctcaagctggggaggatgccatcctcttgccttttgcagacagaagaaagttctttgaagagagtagcaaatccttatcta

SEQ ID NO: 466061 - DNA, 120 bp, Artificial Sequence
  ENSG00000158352_22 (sequence is synthesized)
catctcatttgccaggtttaaccactcatagcaacaagacttttacccagagaccaaaacctatagaccaaaacttccagccaatgagctccagctgtagggaattgaggcgccatccca

SEQ ID NO: 466062 - DNA, 120 bp, Artificial Sequence
  ENSG00000158352_23 (sequence is synthesized)
tggaccaatcatatcattccgcagaccaaccatatcatgccacagaccaatcatatcattccatgtcaccccttcagtcagaaactcccacttactcagaatgttttgcaagcaaaggtc

SEQ ID NO: 466063 - DNA, 120 bp, Artificial Sequence
  ENSG00000158352_24 (sequence is synthesized)
tagaaaattccatgtgttgtaagccactacactgtggtgattttgattaccacaggacctgctcttactcctgcagtgttcaaggagctctagtccatgatccttgcatttattgttctg

SEQ ID NO: 466064 - DNA, 120 bp, Artificial Sequence
  ENSG00000158352_25 (sequence is synthesized)
gggaaatctgccctgccttgctaaagagaaatatgatgccaaattgctacaactgccggtgccaccaccaccaatgcattcggtgttcagtttgctatcataatcctcagcacagtgccc

SEQ ID NO: 466065 - DNA, 120 bp, Artificial Sequence
  ENSG00000158352_26 (sequence is synthesized)
ctggcaacacttggaaacccaggaagctgacagtgcaggaatttcctggggacaaatggaatccaataacaggaaacaggaagaccagccagtcagggagggaaatggctcattccaaga

SEQ ID NO: 466066 - DNA, 120 bp, Artificial Sequence
  ENSG00000158352_27 (sequence is synthesized)
ctagcttttcatgggcaacccctttccatccttgccttgagaacccagcactggacttgtcaagctaccgagcaatttcttctcttgacctccttggagacttcaaacatgctttgaaaa

SEQ ID NO: 466067 - DNA, 120 bp, Artificial Sequence
  ENSG00000158352_28 (sequence is synthesized)
aatcagaggaaacttcagtttatgaggaggggagctcccttgcctccatgccccacccactgcgcagccgtgccttctcagagagtcacatcagcttggcgccccaaagcacccgggcct

SEQ ID NO: 466068 - DNA, 120 bp, Artificial Sequence
  ENSG00000158352_29 (sequence is synthesized)
gggggcagcataggagggagctctttagcaaaggtgatgagacccagtcggatcttctcggagccaggaagaaggcctttcctcctcctcgccctcctcctcccaactgggagaagtaca

SEQ ID NO: 466069 - DNA, 120 bp, Artificial Sequence
  ENSG00000158352_30 (sequence is synthesized)
tcccaactgggagaagtacaggctctttcgtgcagcccagcagcagaagcagcaacagcagcagcagaagcaacaggaggaggaggaggaggaggaagaagaagaagaagaggaagagga

SEQ ID NO: 466070 - DNA, 120 bp, Artificial Sequence
  ENSG00000158352_31 (sequence is synthesized)
aggaggaggaagaggagctgccaccccagtatttcagttcagaaacctctggttcctgtgctctcaatcctgaggaggtcctagagcagccacaacccctcagctttggccacctggagg

SEQ ID NO: 466071 - DNA, 120 bp, Artificial Sequence
  ENSG00000158352_32 (sequence is synthesized)
gctcgagacagggttcacaaagtgtcccagcagagcaagaatcctttgcactccattccagtgatttcttgcctccaataaggggtcacttgggatctcaacctgagcaggctcagcccc

SEQ ID NO: 466072 - DNA, 120 bp, Artificial Sequence
  ENSG00000158352_33 (sequence is synthesized)
cttgctactatggcattggtgggctttggaggacatcgggacaggaagccactgaatccgccaaacaagagtttcagcacttttcgcctccttcaggggccccaggaatccctacctctt

SEQ ID NO: 466073 - DNA, 120 bp, Artificial Sequence
  ENSG00000158352_34 (sequence is synthesized)
actcagcttattacaatatttctgtggccaaggcagagctgctgaacaaactgaaagaccaacctgagatggcagagattggcctaggagaggaggaagttgaccatgaactggctcaaa

SEQ ID NO: 466074 - DNA, 120 bp, Artificial Sequence
  ENSG00000158352_35 (sequence is synthesized)
aaaagatacagcttatcgaaagcatcagcagaaaactttctgtcttgcgggaggcccagcgagggctgctagaggacatcaatgccaattctgcccttggggaggaggtggaggccaact

SEQ ID NO: 466075 - DNA, 120 bp, Artificial Sequence
  ENSG00000158352_36 (sequence is synthesized)
taaaagccgtctgcaaatccaatgaatttgaaaagtaccacttgtttgttggggacctggacaaagtggtcaacctgttgctgtcactctctggacgactggcccgggtggagaatgctc

SEQ ID NO: 466076 - DNA, 120 bp, Artificial Sequence
  ENSG00000158352_37 (sequence is synthesized)
tgaacagcatcgattcagaggccaaccaggagaagttggtactgatagagaagaagcagcagctgacggggcagttggcagatgccaaggagctgaaggagcacgtggaccgccgggaga

SEQ ID NO: 466077 - DNA, 120 bp, Artificial Sequence
  ENSG00000158352_38 (sequence is synthesized)
agttggtgtttggcatggtctcccgctacctgcctcaggaccagctccaagattaccagcactttgtcaagatgaaatctgctctcatcattgaacagcgagagctggaggagaagatca

SEQ ID NO: 466078 - DNA, 120 bp, Artificial Sequence
  ENSG00000158352_39 (sequence is synthesized)
agctcggggaagagcaactcaaatgtctcagggagagtctactcctggggcccagcaatttctaattctaccagcactctgccacagcatccctgcccagccatgtgggaagtgctttca

SEQ ID NO: 466079 - DNA, 120 bp, Artificial Sequence
  ENSG00000158352_40 (sequence is synthesized)
atcttctttgttagcagtttctcagcaagtagatagcaattagcagtttgttccagccctctaccctggatgtctctcactaccccttccctagcagtggtcctaaccagctaggagacc

SEQ ID NO: 466080 - DNA, 120 bp, Artificial Sequence
  ENSG00000158352_41 (sequence is synthesized)
ctggggaagccacaagcttctacccaagggagctgcagcaaggtgtgatcttagaaccacactctccttcccacagttgccaagggcaagtacttgctgcacagagaaccaaggaagtgc

SEQ ID NO: 466081 - DNA, 120 bp, Artificial Sequence
  ENSG00000158352_42 (sequence is synthesized)
cttcattctgctttgtactaggacaccaaagacatcaagtactcatcacccacccatatcatcaacagcctctaaaggctcagagggaatctgccttgcagctctactctgccccagggc

SEQ ID NO: 466082 - DNA, 120 bp, Artificial Sequence
  ENSG00000158352_43 (sequence is synthesized)
ttgtggccagccatttctcacagagagctggctgccttgagggcattcacctggcaccagtttcagggcctcacccaagctttgcaggggaaagcacagagggaggaattacactgaaaa

SEQ ID NO: 466083 - DNA, 120 bp, Artificial Sequence
  ENSG00000158352_44 (sequence is synthesized)
aaatgcaagcaaaggttgagtacccccaggtgccccttaggaaggaaccaggtttaaataggctctacccttacctttcccagcagcaagttcaggggaagaggcctactcttagccctg

SEQ ID NO: 466084 - DNA, 120 bp, Artificial Sequence
  ENSG00000158352_45 (sequence is synthesized)
gctagtgtgaccctcttcctgtcctaagactttggtcctaccacctcttgtttcatctttcctttacattgctgggggttaccgcaggtgcctaccccagggcttcaccatatgggccat

SEQ ID NO: 466085 - DNA, 120 bp, Artificial Sequence
  ENSG00000158352_46 (sequence is synthesized)
taatagctctactaaaactgacttctagatgtaggtttcattattgggggagggggttcttattgttatattttaaatggccttttgattttatttatttttatgttttgattatttttt

SEQ ID NO: 466086 - DNA, 120 bp, Artificial Sequence
  ENSG00000158352_47 (sequence is synthesized)
tcttttttaactaataaggcgagaagagggaagttggagagggaaaagttagcccagaaggaaagcattttctgcagatcagcctgaatccaccgtggctaggcatattcttgctcttct

SEQ ID NO: 466087 - DNA, 120 bp, Artificial Sequence
  ENSG00000158352_48 (sequence is synthesized)
cgtgttgctcacaactacctgcctggatgaatttaggaaagttgcaggatacaaggttaaaacacaagatcaaatgaacaatccgaaaatgttattaagaaaacagttccggccgggcat

SEQ ID NO: 466088 - DNA, 120 bp, Artificial Sequence
  ENSG00000158352_49 (sequence is synthesized)
tggcctggccttgtgcttcccttaaagtctaagtgacttgagtttagcattccccagcagggtttaagtttttcttactgatttctttttgaaaccaaagaaatctcctgaaatggagaa

SEQ ID NO: 466089 - DNA, 120 bp, Artificial Sequence
  ENSG00000158352_50 (sequence is synthesized)
aggttcagtcatttctctaccatctccaagctatgggatcagtagaggtgagctcagaaggaactcctctaaccattgctttctcagcctgtggcctggctcaagggaaccaaaactcaa

SEQ ID NO: 466090 - DNA, 120 bp, Artificial Sequence
  ENSG00000158352_51 (sequence is synthesized)
ggtagctgggagctccagccagagccagctccccagagcaattgaagacccagccaggatcttaggcatacaaacaactaaaactgctgctgttgccaaggccctgacaccagtagctag

SEQ ID NO: 466091 - DNA, 120 bp, Artificial Sequence
  ENSG00000158352_52 (sequence is synthesized)
tttctatgctggaaaagcagccctcaggtggacgatggcaagaagggggttatggccaaatgctgccctgttatccagcttagctccctgttcctcactaactggggccaatccttggta

SEQ ID NO: 466092 - DNA, 120 bp, Artificial Sequence
  ENSG00000158352_53 (sequence is synthesized)
tcacacaacccagccaaggcctggcatctcttctagttactgctgagttcctcagggtccttgaaggtcaactgtagcagcagggatgtctcattcaaccaaagaatttgccaaggaact

SEQ ID NO: 466093 - DNA, 120 bp, Artificial Sequence
  ENSG00000158352_54 (sequence is synthesized)
tttgctgctgttacaaatacttgtcactagcttccatttcctcttcattgtatttgaaaacaatgggagaatcttggccagcagggtgtcctggggtagggggtggggtaagcctttctg

SEQ ID NO: 466094 - DNA, 120 bp, Artificial Sequence
  ENSG00000158352_55 (sequence is synthesized)
tggagctctgggtttgctcttagtactgctgccagaaacactgttagaatggcaaccctgccattctcccctccagtggaagattctactttattcaggaaggctggtggcttgcagggg

SEQ ID NO: 466095 - DNA, 120 bp, Artificial Sequence
  ENSG00000158352_56 (sequence is synthesized)
ctaggcttacacaagccagccaagattgagaaggtaggggagtgctttcaatggaggccatagttgtcatcttttcttctgagcaggctctaggacaaacaatgagcaaattgagatgtc

SEQ ID NO: 466096 - DNA, 120 bp, Artificial Sequence
  ENSG00000158352_57 (sequence is synthesized)
ctgtattgggaggatgaggctgatatgtttcatcattctcagaatttgtgggctagagcacctttttgggaatatgggcctagggaaaagaacggtcacttacctggacactatggccat

SEQ ID NO: 466097 - DNA, 120 bp, Artificial Sequence
  ENSG00000158352_58 (sequence is synthesized)
agtcttgagtttttctagtcagcatgtgattggttgtaccttaagtttatgacaccaaaaatactattaactctgttatttttgttcttaatcccatctcaaattagtttctagagttag

SEQ ID NO: 466098 - DNA, 120 bp, Artificial Sequence
  ENSG00000158352_59 (sequence is synthesized)
aatcagaacacaaggatgctcattttcacatggagggaaagttgccaaagcatttaaaaaataaccccaaaagtatatctagcagtgaagcttggtagataaaggtgaactgctaaacag

SEQ ID NO: 466099 - DNA, 120 bp, Artificial Sequence
  ENSG00000158352_60 (sequence is synthesized)
acactggcgtgccacactcctgccagggcagtctcattgtgtgtgacggtgctgcaacactgccagtattacttgagatgcagtctctctcccctgttctcagttcctgggctcagccct

SEQ ID NO: 466100 - DNA, 120 bp, Artificial Sequence
  ENSG00000158352_61 (sequence is synthesized)
cctccaaggcctgccagtgagtagcagtttggaaggcaggccaagggagatccccaaagacagttatcagtcttaacttctgctgtctcccgtcaaatacttatacaggcccccatgggt

SEQ ID NO: 466101 - DNA, 120 bp, Artificial Sequence
  ENSG00000158352_62 (sequence is synthesized)
aataggcaagcatgatggctgatagagaagtcagtgcatgagttactatcacatgtccccccaacccctcctgccacctcccagggctctggataattgaatcttcctgagtcccacagc

SEQ ID NO: 466102 - DNA, 120 bp, Artificial Sequence
  ENSG00000158352_63 (sequence is synthesized)
tggagactcaaccaggatatagctgtaaatgcccaagtagaatctgacagaataagacagagacactgaaaataaagccctagaaaggaagaaattggaagcaaagaaaaggagaggtga

SEQ ID NO: 466103 - DNA, 120 bp, Artificial Sequence
  ENSG00000158352_64 (sequence is synthesized)
aaagataaaaagcctccttcaaggttaggttcaggttctgttttccatttaacctcatgtgccataaagctgcccaggcacaccagagccacatcctgaacccgaccctccctgacagtg

SEQ ID NO: 466104 - DNA, 120 bp, Artificial Sequence
  ENSG00000158352_65 (sequence is synthesized)
ctgctctgccagtagcaagccccagatggaggaagctgggcccatttctggccacttccacccatttggagctttgccagaggagtcgtctatgccaataatatttctgcaacagcatat

SEQ ID NO: 466105 - DNA, 120 bp, Artificial Sequence
  ENSG00000158352_66 (sequence is synthesized)
tatattatttgaagattagtagatctttttgggggggtggggcaggggacagtttctatagatgaagaaccagtgttggttgtacagctgttgggggtcatctatcccatgtgaagctat

SEQ ID NO: 466106 - DNA, 120 bp, Artificial Sequence
  ENSG00000158352_67 (sequence is synthesized)
tctttttccaaatcttgttgtttctgcatttgtgtcctccaccactcccttcttggctgacatagatatgcctgccagattgtcatcaagggtcatatttcaataaaaggtgctaaggac

SEQ ID NO: 466107 - DNA, 120 bp, Artificial Sequence
  ENSG00000158352_68 (sequence is synthesized)
aaaaaaaaatctcatgtgttttaactcaggtgatggaagtctaaagattctgctgaaaagtactggaaaggaatttggtcacctatccatagtccttcacagataaacatatgaccagac

SEQ ID NO: 466108 - DNA, 120 bp, Artificial Sequence
  ENSG00000158352_69 (sequence is synthesized)
ccttacccacatccctaaacccttaccctggcctctgagggatggtattgatgctataccattcatcatccccagttaaatagcaggatctgccatagcctttttaggggaacagctttt

SEQ ID NO: 466109 - DNA, 120 bp, Artificial Sequence
  ENSG00000158352_70 (sequence is synthesized)
agacatctatttcaagaccatcctgagtagggggtacagagtttaagccattggttatttctgttgttatcacagtattgaagcatggtatttttctactcagaaggatctcaggatcac

SEQ ID NO: 466110 - DNA, 120 bp, Artificial Sequence
  ENSG00000158352_71 (sequence is synthesized)
agccctgccctttagctcactgatatatttcttcctctctggttactcagtggcaacatcacatccagtctaaccccatgtttagaatgcagaaaaagtcaacaataggtgtaatctcag

SEQ ID NO: 466111 - DNA, 120 bp, Artificial Sequence
  ENSG00000158352_72 (sequence is synthesized)
gtatagacctaagcagtatacagagtctagttctggagtctagcctgatcgaaggtaagccattctttctagacttcttccaatcttgaattctgtctagtattttcatcttacttctag

SEQ ID NO: 466112 - DNA, 120 bp, Artificial Sequence
  ENSG00000158352_73 (sequence is synthesized)
ctgatagtccaatctcacaccttcatgctcagctccctggaaagcaagggccttggtgatctgctctccaaggcaacctcaaagattagactcaaatgtattccaggaagcaactctgac

SEQ ID NO: 466113 - DNA, 120 bp, Artificial Sequence
  ENSG00000158352_74 (sequence is synthesized)
attgaaaagctttcttttttcgtgatccatattctgttcacattccaactatcctccttctactcaagatatccattgtggtagagtagaaagagtccagctttggcattagaatgaact

SEQ ID NO: 466114 - DNA, 120 bp, Artificial Sequence
  ENSG00000158352_75 (sequence is synthesized)
gtgttcaaatcctggttctgccacttattcaatgaacctgggctactagctcaacttctgaggtcattttcttatctgtaaaatgggaacagtattatcttgcttgcagttattgtaact

SEQ ID NO: 466115 - DNA, 120 bp, Artificial Sequence
  ENSG00000158352_76 (sequence is synthesized)
tgaaaataataaataaaagccactaacaatccaagaagttattaggcagaatcccaggcccaccccaaacccagtgatagcagtctgaattttaactagatttccaggagattcatgaac

SEQ ID NO: 466116 - DNA, 120 bp, Artificial Sequence
  ENSG00000158352_77 (sequence is synthesized)
atattacagcatgggaagtactgacttgttgaaaacatattcagtacatggtaaccattattatagtcctgatctactcaattcattttttccttatcccaggcatattcttgctcttct

SEQ ID NO: 466117 - DNA, 120 bp, Artificial Sequence
  ENSG00000158352_78 (sequence is synthesized)
taaagcattctccaaaaagaagaccttgaggctctctctaaagcttaaaaagactgaaagagaaccatcgtagtctacaagtgagaatgaataaaaaaatcacagaatatttaagccaac

SEQ ID NO: 466118 - DNA, 120 bp, Artificial Sequence
  ENSG00000158352_79 (sequence is synthesized)
ctttcatccttccctttgccaccagggtgctggctggttcctggagcagcgtcttcactcctatccagctcttgacactggctttcgttccctaaggctgtggccatatctaggtccatc

SEQ ID NO: 466119 - DNA, 120 bp, Artificial Sequence
  ENSG00000158352_80 (sequence is synthesized)
caggctgatggtcataccttgccttcagtgctactccttcctgttcttagaactggaacctgactgtgcctgagccccttggatcacactcagcatcttgggctgatggtccctcgcccc

SEQ ID NO: 466120 - DNA, 120 bp, Artificial Sequence
  ENSG00000158352_81 (sequence is synthesized)
agaaggtcttaactggagggcagatgggtcccagctaagggaggacgctggctggagggtttgtcaacgagagtctgagctagccggataccccgctctctcccaagccatctctccacc

SEQ ID NO: 466121 - DNA, 120 bp, Artificial Sequence
  ENSG00000158373_0 (sequence is synthesized)
agtgttctaactattaacgctacgatgcctgaacctaccaagtctgctcctgccccaaagaagggctccaagaaggcggtgactaaggctcagaagaaggacgggaagaagcgcaagcgc

SEQ ID NO: 466122 - DNA, 120 bp, Artificial Sequence
  ENSG00000158373_1 (sequence is synthesized)
agccgcaaggagagctattcagtgtatgtgtacaaggtgctgaagcaggtccatcccgacaccggcatctcttccaaggcaatggggatcatgaattccttcgtcaacgacatcttcgag

SEQ ID NO: 466123 - DNA, 80 bp, Artificial Sequence
  ENSG00000158373_2 (sequence is synthesized)
gcgcctgctgcttccgggggagctggccaagcacgccgtgtcggagggcaccaaggccgtcaccaagtacaccagttcca

SEQ ID NO: 466124 - DNA, 120 bp, Artificial Sequence
  ENSG00000158373_3 (sequence is synthesized)
acagaggagaaatgaatgcataaaataactgataatatgaatctatacatagaacttaggaagtctcatctgcctgaaaatgactgtgtggatcccacccaaatccaactcatcctggtt

SEQ ID NO: 466125 - DNA, 120 bp, Artificial Sequence
  ENSG00000158373_4 (sequence is synthesized)
tgctgcacactggttcatcaaaagaaggttaccgaggggaaggaactaaaggtgtttgcacttcatgttactttttgagtttataaacataaaaacagaatttacttctgttacagacct

SEQ ID NO: 466126 - DNA, 120 bp, Artificial Sequence
  ENSG00000158373_5 (sequence is synthesized)
agttactgggaattcattacttgccatggactacctttgctaagaaaagtctgaatgagaagatggcaggacgtctgaaaaaaaaagttataattaataaaatctgcggagaattgtaaa

SEQ ID NO: 466127 - DNA, 120 bp, Artificial Sequence
  ENSG00000158373_6 (sequence is synthesized)
ccgtcaccaagtacaccagttccaagtaactttgccaagtaagcatctttacacctaatcccaaaggctcttttaagagccacgcatgttttcaataaatgagttgtaatcatttcattc

SEQ ID NO: 466128 - DNA, 120 bp, Artificial Sequence
  ENSG00000158402_0 (sequence is synthesized)
attcttgctcagaggccgtaactttggccttctgctcagggaagactctgagtccgacgttggcctacccagtcggaaggcagagctgcaatctagttaactacctcctttcccctagat

SEQ ID NO: 466129 - DNA, 120 bp, Artificial Sequence
  ENSG00000158402_1 (sequence is synthesized)
ttcctttcattctgctcaagtcttcgcctgtgtccgatccctatctactttctctcctcttgtaggcaagcctcagactccaggcttgagctaggttttgtttttctcctggtgagaatt

SEQ ID NO: 466130 - DNA, 120 bp, Artificial Sequence
  ENSG00000158402_2 (sequence is synthesized)
cgaagaccatgtctacggaactcttctcatccacaagagaggaaggaagctctggctcaggacccagttttaggtctaatcaaaggaaaatgttaaacctgctcctggagagagacactt

SEQ ID NO: 466131 - DNA, 120 bp, Artificial Sequence
  ENSG00000158402_3 (sequence is synthesized)
cctttaccgtctgtccagatgtccctagaactccagtgggcaaatttcttggtgattctgcaaacctaagcattttgtctggaggaaccccaaaacgttgcctcgatctttcgaatctta

SEQ ID NO: 466132 - DNA, 120 bp, Artificial Sequence
  ENSG00000158402_4 (sequence is synthesized)
gcagtggggagataactgccactcagcttaccacttctgcagaccttgatgaaactggtcacctggattcttcaggacttcaggaagtgcatttagctgggatgaatcatgaccagcacc

SEQ ID NO: 466133 - DNA, 120 bp, Artificial Sequence
  ENSG00000158402_5 (sequence is synthesized)
taatgaaatgtagcccagcacagcttctttgtagcactccgaatggtttggaccgtggccatagaaagagagatgcaatgtgtagttcatctgcaaataaagaaaatgacaatggaaact

SEQ ID NO: 466134 - DNA, 120 bp, Artificial Sequence
  ENSG00000158402_6 (sequence is synthesized)
tggtggacagtgaaatgaaatatttgggcagtcccattactactgttccaaaattggataaaaatccaaacctaggagaagaccaggcagaagagatttcagatgaattaatggagtttt

SEQ ID NO: 466135 - DNA, 120 bp, Artificial Sequence
  ENSG00000158402_7 (sequence is synthesized)
ccctgaaagatcaagaagcaaaggtgagcagaagtggcctatatcgctccccgtcgatgccagagaacttgaacaggccaagactgaagcaggtggaaaaattcaaggacaacacaatac

SEQ ID NO: 466136 - DNA, 120 bp, Artificial Sequence
  ENSG00000158402_8 (sequence is synthesized)
ttatgtttaaagaagacagtctctctgtgtgacattactatcactcagatgctggaggaagattctaaccaggggcacctgattggtgatttttccaaggtatgtgcgctgccaaccgtg

SEQ ID NO: 466137 - DNA, 120 bp, Artificial Sequence
  ENSG00000158402_9 (sequence is synthesized)
tcagggaaacaccaagatctgaagtatgtcaacccagaaacagtggctgccttactgtcggggaagttccagggtctgattgagaagttttatgtcattgattgtcgctatccatatgag

SEQ ID NO: 466138 - DNA, 120 bp, Artificial Sequence
  ENSG00000158402_10 (sequence is synthesized)
tatctgggaggacacatccagggagccttaaacttatatagtcaggaagaactgtttaacttctttctgaagaagcccatcgtccctttggacacccagaagagaataatcatcgtgttc

SEQ ID NO: 466139 - DNA, 120 bp, Artificial Sequence
  ENSG00000158402_11 (sequence is synthesized)
cactgtgaattctcctcagagaggggcccccgaatgtgccgctgtctgcgtgaagaggacaggtctctgaaccagtatcctgcattgtactacccagagctatatatccttaaaggcggc

SEQ ID NO: 466140 - DNA, 120 bp, Artificial Sequence
  ENSG00000158402_12 (sequence is synthesized)
tacagagacttctttccagaatatatggaactgtgtgaaccacagagctactgccctatgcatcatcaggaccacaagactgagttgctgaggtgtcgaagccagagcaaagtgcaggaa

SEQ ID NO: 466141 - DNA, 120 bp, Artificial Sequence
  ENSG00000158402_13 (sequence is synthesized)
ggggagcggcagctgcgggagcagattgcccttctggtgaaggacatgagcccatgataacattccagccactggctgctaacaagtcaccaaaagacactgcagaaaccctgagcagaa

SEQ ID NO: 466142 - DNA, 120 bp, Artificial Sequence
  ENSG00000158402_14 (sequence is synthesized)
agaggccttctggatggccaaacccaagattattaaaagatgtctctgcaaaccaacaggctaccaacttgtatccaggcctgggaatggattaggtttcagcagagctgaaagctggtg

SEQ ID NO: 466143 - DNA, 120 bp, Artificial Sequence
  ENSG00000158402_15 (sequence is synthesized)
gcagagtcctggagctggctctataaggcagccttgagttgcatagagatttgtattggttcagggaactctggcattccttttcccaactcctcatgtcttctcacaagccagccaact

SEQ ID NO: 466144 - DNA, 120 bp, Artificial Sequence
  ENSG00000158402_16 (sequence is synthesized)
ctttctctctgggcttcgggctatgcaagagcgttgtctaccttctttctttgtattttccttctttgtttccccctctttcttttttaaaaatggaaaaataaacactacagaatgaga

SEQ ID NO: 466145 - DNA, 120 bp, Artificial Sequence
  ENSG00000158402_17 (sequence is synthesized)
gaggtgcccgccccgaggccccagcgccacctgccctccaccacctaccgcggttcctccagctcccagggccgcggccggagcagctctgagcgctcggttcgccccacggtgccctta

SEQ ID NO: 466146 - DNA, 120 bp, Artificial Sequence
  ENSG00000158402_18 (sequence is synthesized)
aaaggcgctggcgcgaaccaacgagtccctgaggagagtagggggacagctccggctcgcagaatccccccaagccacccatggagggcgcagctccgtgtcgtgtctctctcaaagtgt

SEQ ID NO: 466147 - DNA, 120 bp, Artificial Sequence
  ENSG00000158402_19 (sequence is synthesized)
ctctcggacagcgctgttgggaacgagcctggcgctttgatttagggatgggggtggtttcctcactaacgagtcaccccctccaaaatatcgcagaaagtggacggccccagttggagg

SEQ ID NO: 466148 - DNA, 120 bp, Artificial Sequence
  ENSG00000158402_20 (sequence is synthesized)
tatatgaaatattccaaaaggaatgtttcataagttaaccttccagaattctaatttcagattttctgagtgataacctttcttttctacccataagaaaaaaaaaaactccataggtag

SEQ ID NO: 466149 - DNA, 120 bp, Artificial Sequence
  ENSG00000158402_21 (sequence is synthesized)
catagtgtagtgtttcccaacacttgatttcttttagtgacacatataaattcttacgtttctgtgaaattgtaccttgtaccatgaaatgggtaccaatcgagaggctttgtattcaaa

SEQ ID NO: 466150 - DNA, 120 bp, Artificial Sequence
  ENSG00000158402_22 (sequence is synthesized)
aacaggatgcatggacaagaataactccttttactgattctttatatttgattgcaggtcacctggattcttcaggacttcaggaagtgcatttagctgggatgaatcatgaccagcacc

SEQ ID NO: 466151 - DNA, 120 bp, Artificial Sequence
  ENSG00000158402_23 (sequence is synthesized)
taatgaaatgtagcccagtgagtagcctctctttttttgggttttgttttgcttttcaggtgggaggcagagggtttccattgcacctgtggcttgaggatgctggacgttctcagcaaa

SEQ ID NO: 466152 - DNA, 120 bp, Artificial Sequence
  ENSG00000158402_24 (sequence is synthesized)
tgagttgttgtcctgcgtcgaggttgcataggtcagaggagacttatttgagagtgacgtttgagcagacatctgaaagagcgaggaagccaacaagcagatgtcaggaggaatgagtca

SEQ ID NO: 466153 - DNA, 120 bp, Artificial Sequence
  ENSG00000158406_0 (sequence is synthesized)
ttgcttagtcatgtctggccgtggtaaaggtggaaaaggtttgggtaagggaggagctaagcgtcatcgcaaggttttgcgcgataacatccagggcatcactaagccagctatccggcg

SEQ ID NO: 466154 - DNA, 120 bp, Artificial Sequence
  ENSG00000158406_1 (sequence is synthesized)
cttatctatgaggagactcgtggtgttctgaaggtgttcctggagaacgtgattcgtgacgctgtcacttacacagagcacgccaaacgcaagaccgtgacagcaatggatgtggtctac

SEQ ID NO: 466155 - DNA, 120 bp, Artificial Sequence
  ENSG00000158406_2 (sequence is synthesized)
gcgctgaagcgacagggacgcactctttacggcttcggtggctaaggctcctgcttgctgcactcttattttcattttcaaccaaaggcccttttcagggccgcccacttttttcataaa

SEQ ID NO: 466156 - DNA, 120 bp, Artificial Sequence
  ENSG00000158406_3 (sequence is synthesized)
ctgattattttgaactgatgtttgttgctatggagatgctgcctatatgttgatgttgcagacgttaagtcactagcccacagccttgtattccatactcagagaccctgctacttactt

SEQ ID NO: 466157 - DNA, 120 bp, Artificial Sequence
  ENSG00000158406_4 (sequence is synthesized)
gacatctcaacttgaaagtccaattaatatgcacttcaaactttaataggcttcaaacagaatttctttcattatctctgcaaaacagcttctctcatcatcttgaaattagtgaatggc

SEQ ID NO: 466158 - DNA, 120 bp, Artificial Sequence
  ENSG00000158406_5 (sequence is synthesized)
attttactgttttagttggagtcatttctgtggttttctttcacatcctacataacaatccatcagtaagttctatgagctcttctttgaaaacaaacagaatccaactgtttcattccc

SEQ ID NO: 466159 - DNA, 120 bp, Artificial Sequence
  ENSG00000158406_6 (sequence is synthesized)
acttctgctctggtcaagccactgccaacactcacctttattattgtagcaccctcattgcctagttctgtcccacagatttccaataaaaggtgaataaaatcaggtcactcttctgct

SEQ ID NO: 466160 - DNA, 120 bp, Artificial Sequence
  ENSG00000158406_7 (sequence is synthesized)
gggtggggccaagaagcaggaccaaagttccggtatgcgcgctttcagtcttcaattaggtccgaattcccggcatataagggcgttgctttgccttggcgtttaggtttcttaagttgg

SEQ ID NO: 466161 - DNA, 120 bp, Artificial Sequence
  ENSG00000158406_8 (sequence is synthesized)
ggccccacactctggctcttgttatctctttggcctcaaatcccactactcctttccttcctcgcgcagctccgctagcctcaaacttgcttgtctctctctgttgctcaggctggagtg

SEQ ID NO: 466162 - DNA, 90 bp, Artificial Sequence
  ENSG00000158406_9 (sequence is synthesized)
ctctctgttgctcaggctggagtgccgtaacggtggctaaagtgatcctcctgtctcagtctcttgagtagctgggactacaggtgcaca

SEQ ID NO: 466163 - DNA, 120 bp, Artificial Sequence
  ENSG00000158406_10 (sequence is synthesized)
ccggagtaatttttgtattttctgtagagatggggtttaaccatgttacccaggctgtcttaaactcttgggctcaagtgatctgcctaccacggcctcccaaagtgctgggattatagg

SEQ ID NO: 466164 - DNA, 120 bp, Artificial Sequence
  ENSG00000158406_11 (sequence is synthesized)
gggcctgataaaacctatttttagtgaaactcttgctcttctacatatttccaatttttagccacaataaacaaaaatatgttaaaatagaatcaatagaataggattttgtatattatt

SEQ ID NO: 466165 - DNA, 120 bp, Artificial Sequence
  ENSG00000158406_12 (sequence is synthesized)
aaatatatgatgaaaatgaatggtggtaatctaggatgaggaccaaatttcaaacttggataagcagagctatgaggataatgaggccagtcttggtcctgctgggtttgagccacctgt

SEQ ID NO: 466166 - DNA, 120 bp, Artificial Sequence
  ENSG00000158406_13 (sequence is synthesized)
ggaatacttagttcatatagtatttggaagactaattactgcacttcttgttatagactgatttaccctcctccctgctgcatatgttgaagtccttgaaaatatgactgcatttagagt

SEQ ID NO: 466167 - DNA, 120 bp, Artificial Sequence
  ENSG00000158406_14 (sequence is synthesized)
tagggtcgttaaagatataaaatgaagttattgaggtgggtctgaatccaatctgactggtgtccttataagtaaagaagactggacacacacacagagaaaagataatgtgaagacaca

SEQ ID NO: 466168 - DNA, 120 bp, Artificial Sequence
  ENSG00000158406_15 (sequence is synthesized)
gggagaagacagttatcgacacaccatggagagagacctcagaagaaatcaaccttgcccacagggttaatcttaagagtcgtagcctccagaattgtgaaaaaataaatgtttaagcca

SEQ ID NO: 466169 - DNA, 120 bp, Artificial Sequence
  ENSG00000158411_0 (sequence is synthesized)
acatgaccacttcccggaagcgcagcagacccgctcaacttcatcctgggttgaggcggaggagaacttccagaattatggcgaagtccgggctgaggcaggacccgcagagcacagctg

SEQ ID NO: 466170 - DNA, 120 bp, Artificial Sequence
  ENSG00000158411_1 (sequence is synthesized)
cagccactgtgctaaagcgggcagtagaactagattcggagtcgcggtatccgcaggctctggtgtgttaccaagaggggattgatctgctcctgcaggttctgaaaggtaccaaagata

SEQ ID NO: 466171 - DNA, 120 bp, Artificial Sequence
  ENSG00000158411_2 (sequence is synthesized)
atactaagagatgtaatctcagagaaaaaatttccaaatacatggacagagcggaaaacataaagaagtacttggaccaagaaaaagaagatggaaaatatcacaagcaaattaaaatag

SEQ ID NO: 466172 - DNA, 120 bp, Artificial Sequence
  ENSG00000158411_3 (sequence is synthesized)
ctcatcagctgtataactttcttcgattttgtgagatgcttattaagagaccatgtaaagtaaaaactattcaccttctcacctctctggatgaaggcattgagcaagtgcagcaaagta

SEQ ID NO: 466173 - DNA, 120 bp, Artificial Sequence
  ENSG00000158411_4 (sequence is synthesized)
gaggcctgcaagaaatagaagagtcactcaggagtcacggagtgctgttggaagttcaatactcttcttcaatacatgaccgagaaattaggttcaacaatggatggatgattaagattg

SEQ ID NO: 466174 - DNA, 120 bp, Artificial Sequence
  ENSG00000158411_5 (sequence is synthesized)
gaaggggacttgattattttaagaaaccacagagtcgtttttcccttggatattgtgattttgatttaagaccatgtcatgaaacaacagtagacatttttcataagaagcatacaaaaa

SEQ ID NO: 466175 - DNA, 120 bp, Artificial Sequence
  ENSG00000158411_6 (sequence is synthesized)
agcatacaaaaaatatatgatgggtggtagcctaatttgtattatgtctactttaagtgaatattggattttttttaaaagatcacttttataatgtatgaatttaacaataaactttta

SEQ ID NO: 466176 - DNA, 120 bp, Artificial Sequence
  ENSG00000158411_7 (sequence is synthesized)
aagaagtacttggaccaagaaaaagaagaagctaaagaaactcctgggatttctctcagattttgttgtgaatcaaaacacctcaggagttaagcattcctaatgattagaggtcagatg

SEQ ID NO: 466177 - DNA, 120 bp, Artificial Sequence
  ENSG00000158411_8 (sequence is synthesized)
gcctaccaattacaacagagggagaattctgccaaaagaatagaattggtttgccttctagattcatatggtcatggatccagtcttccacagccagattttgatagacatcattggaaa

SEQ ID NO: 466178 - DNA, 120 bp, Artificial Sequence
  ENSG00000158411_9 (sequence is synthesized)
ttgactgtaaaatgagcccattttttactgtttttttaaagccagctgctgggacctggcagttacaaagtaactggaagcaattcttcattgaaaatgggatcagcatgcttttaaaaa

SEQ ID NO: 466179 - DNA, 120 bp, Artificial Sequence
  ENSG00000158411_10 (sequence is synthesized)
aaaggagctggttcctgctgtgtctggggtgaagtgaaagagttaaaaatgatttttccacaccacgaagaagcagttaaatacagaaggtaccaaagataatactaagagatgtaatct

SEQ ID NO: 466180 - DNA, 120 bp, Artificial Sequence
  ENSG00000158411_11 (sequence is synthesized)
gtgtggtctggaccagttgtccctgggagcttacaggatttaatctgtatttccactcccatacaggagttgttcttaattttttgtttgtttgtttgttttggcttttgtttttagttg

SEQ ID NO: 466181 - DNA, 120 bp, Artificial Sequence
  ENSG00000158411_12 (sequence is synthesized)
ggggtgggaatatcagacacccctttgaacatctcatgaaagctatacttactggagaatgttccatgccatttttaaggggttcacaaatccctatgaagcttatgtgtggaccctatg

SEQ ID NO: 466182 - DNA, 120 bp, Artificial Sequence
  ENSG00000158411_13 (sequence is synthesized)
ttaagaaatactacagggaatactgaatgtaaattgtgtattttatttatatttccctttatgaaatgaccaaaatcatgaaagaagctaaagaaactcctgggatttctctcagatttt

SEQ ID NO: 466183 - DNA, 120 bp, Artificial Sequence
  ENSG00000158411_14 (sequence is synthesized)
gttgtgaatcaaaacacctcaggagttaagcattcctaatgattagaggtcaggtaggtattgttccctattattagttccctactcctaagcatccagtttacaaatgtctgtaaatgg

SEQ ID NO: 466184 - DNA, 120 bp, Artificial Sequence
  ENSG00000158411_15 (sequence is synthesized)
ctatagccaaaggtactgctgccctcaaaagccagtgcccccaggccccagcttttcttcctctctatactttctacacccctttccccatctcttcctactatcctgtatcagtacata

SEQ ID NO: 466185 - DNA, 120 bp, Artificial Sequence
  ENSG00000158411_16 (sequence is synthesized)
ccctggggaccccccactgagctcctttgttcagtgggaataaagttatgtttccttagccccgatttgaaatttagaatgaaattttactccaaaacattgatgaaatatagtacctcc

SEQ ID NO: 466186 - DNA, 120 bp, Artificial Sequence
  ENSG00000158411_17 (sequence is synthesized)
agcattgtggttttgagtacatggaattaaattaacctctatacggctatcttggcttaaaaaataaggcatagttgccaatgttatctatgtggaaatatttggaacagaatccaaact

SEQ ID NO: 466187 - DNA, 90 bp, Artificial Sequence
  ENSG00000158411_18 (sequence is synthesized)
atgttatctatgtggaaatatttggaacagaatccaaactactgatttttaaacaaagtgtaaagtataatttaggggctaccattaggg

SEQ ID NO: 466188 - DNA, 120 bp, Artificial Sequence
  ENSG00000158411_19 (sequence is synthesized)
ttttcaatattcattttgaatgaacaaaagcaatagatctatcctcttgatcctgtgacatcccagtctttagcttattaagaagtactataaatttctgtttaaaactgtacacgtgcc

SEQ ID NO: 466189 - DNA, 120 bp, Artificial Sequence
  ENSG00000158411_20 (sequence is synthesized)
gtactataaatttctgtttaaaactgtacacgtgccaagaaagactttgaagcttcatattatactgcattaatttttttttttttttttaaggcagagtcttgctctgttgcccaggct

SEQ ID NO: 466190 - DNA, 81 bp, Artificial Sequence
  ENSG00000158411_21 (sequence is synthesized)
tgcaacatggtagttgggactacaggcacctgacatcatgcctggctactttttatatttttagtagagctggggtttcac

SEQ ID NO: 466191 - DNA, 73 bp, Artificial Sequence
  ENSG00000158411_22 (sequence is synthesized)
tctgccctgcattcatgtttaatactcactttagttattagattgcaagacataaaaagacaagtctgaagag

SEQ ID NO: 466192 - DNA, 120 bp, Artificial Sequence
  ENSG00000158411_23 (sequence is synthesized)
gttattagattgcaagacataaaaagacaagtctgaagaggaggaccagatagccactgagtttcagtatgtggtgctacccatggcgacagggagttattggatacctttatatataca

SEQ ID NO: 466193 - DNA, 120 bp, Artificial Sequence
  ENSG00000158411_24 (sequence is synthesized)
ctactcccttcaacaaactgcctggtctataggatcttgctcaaggacctgttccaggaaacctctagattttcccccttgcctagcctctgtgaaggcagaaatcactaatggagtggt

SEQ ID NO: 466194 - DNA, 120 bp, Artificial Sequence
  ENSG00000158411_25 (sequence is synthesized)
ttgccttaaatacctttgtacgtgtaacatcctgcaatgtatatgatatttagtaggcattcaataagtatttgctgaataagttaaaaaaattaatatgtatctgatgctgattaatca

SEQ ID NO: 466195 - DNA, 120 bp, Artificial Sequence
  ENSG00000158411_26 (sequence is synthesized)
ctctatataaaatataaaatgtgtaaaaaaaaaatggtcactggttttactgttgaagcctgtgttttatagatggaaaatatcacaagcaaattaaaatagaagagaatgcaacaggtt

SEQ ID NO: 466196 - DNA, 120 bp, Artificial Sequence
  ENSG00000158411_27 (sequence is synthesized)
tcagttatgagtcactttttcgcgaataccttaatgagacagttacagaagtttggatagaagatccttatattagacatactcatcaggtatgtgaacatactaaaatataatgaaata

SEQ ID NO: 466197 - DNA, 120 bp, Artificial Sequence
  ENSG00000158411_28 (sequence is synthesized)
atatcttaaagccaaattatgttgaattcacaagtaacaaatgttcatcgagaaaaatgagaaaatacagacaagcaagaagaaaaaaataaaagcattgatagtcctaatcacaattaa

SEQ ID NO: 466198 - DNA, 120 bp, Artificial Sequence
  ENSG00000158411_29 (sequence is synthesized)
attaaaactattctaaactacatttaaggagacaggatggagttatgttcacattagaaaaaaagatgattttgataaaaataattgctctttaaactacctcacattggttgttttttt

SEQ ID NO: 466199 - DNA, 120 bp, Artificial Sequence
  ENSG00000158411_30 (sequence is synthesized)
gagataatagacattgaaactagtatagaacatttccatcttaatccacctgtgatatagattgtatagcttagggataatttaagatagtaataataactgcggcagataatcgtattt

SEQ ID NO: 466200 - DNA, 120 bp, Artificial Sequence
  ENSG00000158417_0 (sequence is synthesized)
acaccatatgtgtcctgttccagtgcgcgggtctgtggagagccgggtgcgagcggcggcagcacgaggggaaaagagctgagcggagaccaaagtcagccgggagacagtgggtctgtg

SEQ ID NO: 466201 - DNA, 120 bp, Artificial Sequence
  ENSG00000158417_1 (sequence is synthesized)
agagaccgaatagaggggctggggccacgagcgccattgacaagcaatggggaagaaacagaaaaacaagagcgaagacagcaccaaggatgacattgatcttgatgccttggctgcaga

SEQ ID NO: 466202 - DNA, 120 bp, Artificial Sequence
  ENSG00000158417_2 (sequence is synthesized)
aatagaaggagctggtgctgccaaagaacaggagcctcaaaagtcaaaagggaaaaagaaaaaagagaaaaaaaagcaggactttgatgaagatgatatcctgaaagaactggaagaatt

SEQ ID NO: 466203 - DNA, 120 bp, Artificial Sequence
  ENSG00000158417_3 (sequence is synthesized)
gtctttggaagctcaaggcatcaaagctgacagagaaactgttgcagtgaagccaacagaaaacaatgaagaggaattcacctcaaaagataaaaaaaagaaaggacagaagggcaaaaa

SEQ ID NO: 466204 - DNA, 120 bp, Artificial Sequence
  ENSG00000158417_4 (sequence is synthesized)
acagagttttgatgataatgatagcgaagaattggaagataaagattcaaaatcaaaaaagactgcaaaaccgaaagtggaaatgtactctgggagtgatgatgatgatgattttaacaa

SEQ ID NO: 466205 - DNA, 120 bp, Artificial Sequence
  ENSG00000158417_5 (sequence is synthesized)
acttcctaaaaaagctaaagggaaagctcaaaaatcaaataagaagtgggatgggtcagaggaggatgaggataacagtaaaaaaattaaagagcgttcaagaataaattcttctggtga

SEQ ID NO: 466206 - DNA, 120 bp, Artificial Sequence
  ENSG00000158417_6 (sequence is synthesized)
aagtggtgatgaatcagatgaatttttgcaatctagaaaaggacagaaaaaaaatcagaaaaacaagccaggtcctaacatagaaagtgggaatgaagatgatgacgcctccttcaaaat

SEQ ID NO: 466207 - DNA, 120 bp, Artificial Sequence
  ENSG00000158417_7 (sequence is synthesized)
taagacagtggcccaaaagaaggcagaaaagaaggagcgcgagagaaaaaagcgagatgaagaaaaagcgaaactgcggaagctgaaagaaaaagaagagttagaaacaggtaaaaagga

SEQ ID NO: 466208 - DNA, 120 bp, Artificial Sequence
  ENSG00000158417_8 (sequence is synthesized)
tcagagtaaacaaaaggaatctcaaaggaaatttgaagaagaaactgtaaaatccaaagtgactgttgatactggagtaattcctgcctctgaagagaaagcagagactcccacagctgc

SEQ ID NO: 466209 - DNA, 120 bp, Artificial Sequence
  ENSG00000158417_9 (sequence is synthesized)
agaagatgacaatgaaggagacaaaaagaagaaagataagaagaaaaagaaaggagaaaaggaagaaaaagagaaagagaagaaaaaaggacctagcaaagccactgttaaagctatgca

SEQ ID NO: 466210 - DNA, 120 bp, Artificial Sequence
  ENSG00000158417_10 (sequence is synthesized)
agaagctctggctaagcttaaagaggaagaagaaagacagaagagagaagaggaagaacgtataaaacggcttgaagaattagaagccaagcgtaaagaagaggaacgattggaacaaga

SEQ ID NO: 466211 - DNA, 120 bp, Artificial Sequence
  ENSG00000158417_11 (sequence is synthesized)
aaaaagagaaaggaaaaagcaaaaagaaaaagaaagaaaagaacgcttgaaaaaagaagggaaacttttaactaaatcccagagagaagccagagccagagccgaagctactcttaaact

SEQ ID NO: 466212 - DNA, 120 bp, Artificial Sequence
  ENSG00000158417_12 (sequence is synthesized)
gctacaagctcagggtgttgaagtgccatcaaaagactctttgccaaagaagaggccaatttatgaagataaaaagaggaaaaaaataccacagcagctagaaagtaaagaagtgtctga

SEQ ID NO: 466213 - DNA, 120 bp, Artificial Sequence
  ENSG00000158417_13 (sequence is synthesized)
atcaatggaattatgtgctgctgtagaagttatggaacaaggagtaccagaaaaggaagagacaccacctcctgttgaaccagaagaagaagaagatactgaggatgctggattggatga

SEQ ID NO: 466214 - DNA, 120 bp, Artificial Sequence
  ENSG00000158417_14 (sequence is synthesized)
ttgggaagctatggccagtgatgaggagacagaaaaagtagaaggaaacaaagttcatatagaagtaaaagaaaaccctgaagaggaggaggaggaggaagaagaggaagaagaagatga

SEQ ID NO: 466215 - DNA, 120 bp, Artificial Sequence
  ENSG00000158417_15 (sequence is synthesized)
agaaagtgaagaagaggaggaagaggagggagaaagtgaaggcagtgaaggtgatgaggaagatgaaaaggtgtcagatgagaaggattcagggaagacattagataaaaagccaagtaa

SEQ ID NO: 466216 - DNA, 120 bp, Artificial Sequence
  ENSG00000158417_16 (sequence is synthesized)
agaaatgagctcagattctgaatatgactctgatgatgatcggactaaagaagaaagggcttatgacaaagcaaaacggaggattgagaaacggcgacttgaacatagtaaaaatgtaaa

SEQ ID NO: 466217 - DNA, 120 bp, Artificial Sequence
  ENSG00000158417_17 (sequence is synthesized)
caccgaaaagctaagagcccctattatctgcgtacttgggcatgtggacacagggaagacaaaaattctagataagctccgtcacacacatgtacaagatggtgaagcaggtggtatcac

SEQ ID NO: 466218 - DNA, 120 bp, Artificial Sequence
  ENSG00000158417_18 (sequence is synthesized)
acaacaaattggggccaccaatgttcctcttgaagctattaatgaacagactaagatgattaaaaattttgatagagagaatgtacggattccaggaatgctaattattgatactcctgg

SEQ ID NO: 466219 - DNA, 120 bp, Artificial Sequence
  ENSG00000158417_19 (sequence is synthesized)
gcatgaatctttcagtaatctgagaaatagaggaagctctctttgtgacattgccattttagttgttgatattatgcatggtttggagccccagacaattgagtctatcaaccttctcaa

SEQ ID NO: 466220 - DNA, 120 bp, Artificial Sequence
  ENSG00000158417_20 (sequence is synthesized)
atctaaaaaatgtcccttcattgttgcactcaataagattgataggttatatgattggaaaaagagtcctgactctgatgtggctgctactttaaagaagcagaaaaagaatacaaaaga

SEQ ID NO: 466221 - DNA, 120 bp, Artificial Sequence
  ENSG00000158417_21 (sequence is synthesized)
tgaatttgaggagcgagcaaaggctattattgtagaatttgcacagcagggtttgaatgctgctttgttttatgagaataaagatccccgcacttttgtgtctttggtacctacctctgc

SEQ ID NO: 466222 - DNA, 120 bp, Artificial Sequence
  ENSG00000158417_22 (sequence is synthesized)
acatactggtgatggcatgggaagtctgatctaccttcttgtagagttaactcagaccatgttgagcaagagacttgcacactgtgaagagctgagagcacaggtgatggaggttaaagc

SEQ ID NO: 466223 - DNA, 120 bp, Artificial Sequence
  ENSG00000158417_23 (sequence is synthesized)
ctcagattcgaggcctcctgttacctcctcctatgaaggaattacgagtgaagaaccagtatgaaaagcataaagaagtagaagcagctcagggggtaaagattcttggaaaagacctgg

SEQ ID NO: 466224 - DNA, 120 bp, Artificial Sequence
  ENSG00000158417_24 (sequence is synthesized)
agaaaacattggctggtttacccctccttgtggcttataaagaagatgaaatccctgttcttaaagatgaattgatccatgagttaaagcagacactaaatgctatcaaattagaagaaa

SEQ ID NO: 466225 - DNA, 120 bp, Artificial Sequence
  ENSG00000158417_25 (sequence is synthesized)
aaggagtctatgtccaggcatctacactgggttctttggaagctctactggaatttctgaaaacatcagaagtgccctatgcaggaattaacattggcccagtgcataaaaaagatgtta

SEQ ID NO: 466226 - DNA, 120 bp, Artificial Sequence
  ENSG00000158417_26 (sequence is synthesized)
tgaaggcttcagtgatgttggaacatgaccctcagtatgcagtaattttggccttcgatgtgagaattgaacgagatgcacaagaaatggctgatagtttaggagttagaatttttagtg

SEQ ID NO: 466227 - DNA, 120 bp, Artificial Sequence
  ENSG00000158417_27 (sequence is synthesized)
cagaaattatttatcatttatttgatgcctttacaaaatatagacaagactacaagaaacagaaacaagaagaatttaagcacatagcagtatttccctgcaagataaaaatcctccctc

SEQ ID NO: 466228 - DNA, 120 bp, Artificial Sequence
  ENSG00000158417_28 (sequence is synthesized)
agtacatttttaattctcgagatccgatagtgatgggggtgacggtggaagcaggtcaggtgaaacaggggacacccatgtgtgtcccaagcaaaaattttgttgacatcggaatagtaa

SEQ ID NO: 466229 - DNA, 120 bp, Artificial Sequence
  ENSG00000158417_29 (sequence is synthesized)
caagtattgaaataaaccataaacaagtggatgttgcaaaaaaaggacaagaagtttgtgtaaaaatagaacctatccctggtgagtcacccaaaatgtttggaagacattttgaagcta

SEQ ID NO: 466230 - DNA, 120 bp, Artificial Sequence
  ENSG00000158417_30 (sequence is synthesized)
cagatattcttgttagtaagatcagccggcagtccattgatgcactcaaagactggttcagagatgaaatgcagaagagtgactggcagcttattgtggagctgaagaaagtatttgaaa

SEQ ID NO: 466231 - DNA, 120 bp, Artificial Sequence
  ENSG00000158417_31 (sequence is synthesized)
tcatctaattttttcacatggagcaggaactggagtaaatgcaatactgtgttgtaatatcccaacaaaaatcagacaaaaaatggaacagacgtatttggacactgatggacttaagta

SEQ ID NO: 466232 - DNA, 120 bp, Artificial Sequence
  ENSG00000158417_32 (sequence is synthesized)
tggaaggaagaaaaataggtgtataaaatgttttccatgagaaaccaagaaacttacactggtttgacagtggtcagttacatgtccccacagttccaatgtgcctgttcactcacctct

SEQ ID NO: 466233 - DNA, 120 bp, Artificial Sequence
  ENSG00000158417_33 (sequence is synthesized)
cccttccccaacccttctctacttggctgctgttttaaagtttgcccttccccaaatttggatttttattacagatctaaagctctttcgattttatactgattaaatcagtactgcagt

SEQ ID NO: 466234 - DNA, 120 bp, Artificial Sequence
  ENSG00000158417_34 (sequence is synthesized)
atttgattaaccaagcttctgcagattttgtgattcttgggacttttttgacgtaagaaatacttctttatttatgcatattcttcccacagtgatttttccagcattcttctgccatat

SEQ ID NO: 466235 - DNA, 120 bp, Artificial Sequence
  ENSG00000158417_35 (sequence is synthesized)
gcctttagggcttttataaaatagaaaattaggcattctgatatttctttagctgctttgtgtgaaaccatggtgtaaaagcacagctggctgctttttactgcttgtgtagtcacgagt

SEQ ID NO: 466236 - DNA, 120 bp, Artificial Sequence
  ENSG00000158417_36 (sequence is synthesized)
ccattgtaatcatcacaattctaaaccaaactaccaataaagaaaacagacatccaccagtaagcaagctctgttaggcttccatgttagtgtagcttctctcccacaagttgtcctcct

SEQ ID NO: 466237 - DNA, 120 bp, Artificial Sequence
  ENSG00000158417_37 (sequence is synthesized)
aggacaagaattatcttacaaactaaactatcatcacactaccttgtatgccagcacctggtaacagtagagatttttatacattaatcttgatctgttttaatcttgatctgttttagt

SEQ ID NO: 466238 - DNA, 120 bp, Artificial Sequence
  ENSG00000158417_38 (sequence is synthesized)
agagatttttatacattaatcttgatctgttttaatcttgatctgttttgtcctagaaaattccatcatacacacatttcctgatatttgggcttagtgcttctaaattgttgcagacac

SEQ ID NO: 466239 - DNA, 120 bp, Artificial Sequence
  ENSG00000158417_39 (sequence is synthesized)
aaaacttaatgattcattcgtagtagtaatctgtagctagttttagggttttgctgaagtcagtgtggggtgtttgtttgaggaaaaagttccaaatatccactagcatagaattttaaa

SEQ ID NO: 466240 - DNA, 120 bp, Artificial Sequence
  ENSG00000158417_40 (sequence is synthesized)
ctatttttattttaaagttatggcataacatataacataaaaatattttatatacgtttgaaaaatctataccgttcttttttatcatcaaagtttctcaatggccagtagaagcaaaaa

SEQ ID NO: 466241 - DNA, 120 bp, Artificial Sequence
  ENSG00000158417_41 (sequence is synthesized)
gacaacaccacctctgatctacgggacataatgttcccaggaaaaaaatcttcaagtgggtgtgagggtgtttctaattcaaaatatgtagatttctccgcatggaagaagtagtaaaga

SEQ ID NO: 466242 - DNA, 120 bp, Artificial Sequence
  ENSG00000158417_42 (sequence is synthesized)
ttttcttaacatgctcctgtgttcatgcttggagacaagaataagatggtttagaagctttaccctttcttggaacaagtagaatcccggtctgagacctctcaggaatttcagagctta

SEQ ID NO: 466243 - DNA, 120 bp, Artificial Sequence
  ENSG00000158417_43 (sequence is synthesized)
gcagtctggcctggaggtttttcagccttttagtataataaacagtagttgcttcctagagttgagtttttaaggattcacaaaaaggagcctgtacaaaatatacatacagttctttat

SEQ ID NO: 466244 - DNA, 120 bp, Artificial Sequence
  ENSG00000158417_44 (sequence is synthesized)
taaacaactgtaaacacttcactgtaaaaatccataaaactttataaacaaacattttgtaaatagaatctatgctacagtaaaataattaacacaattatttacatgcaatactgacaa

SEQ ID NO: 466245 - DNA, 120 bp, Artificial Sequence
  ENSG00000158417_45 (sequence is synthesized)
atttggcactttttgaaaagaaatgtacaaaacacttgctttaaaagaaatttaaaattataaaaactccgagcattactatcatgcactttgcaaatacctcacaagcacttatggcac

SEQ ID NO: 466246 - DNA, 120 bp, Artificial Sequence
  ENSG00000158417_46 (sequence is synthesized)
agctatcagagagcatcaggctctctggtaatatttatgtaacttttaatgtgcttccataagtttgttgtaaaaccacctggacattgtcaagaataaagtcaaatgccatattccaaa

SEQ ID NO: 466247 - DNA, 120 bp, Artificial Sequence
  ENSG00000158417_47 (sequence is synthesized)
cttcttgggtcacctgtacctgtagctccttgggcttcagtttgattgtagaatctgatgggactggatcccccattagggcttgacctctagctgggccttgtctgttgaggaagttgc

SEQ ID NO: 466248 - DNA, 120 bp, Artificial Sequence
  ENSG00000158417_48 (sequence is synthesized)
tctatcaggaaagcagcaccaacagagaaagctaggacttttaggtcccctcgtgcctgacatgcaaaccagatgtgattttggaattctactcccttaggcaggcaagccctgtttttt

SEQ ID NO: 466249 - DNA, 120 bp, Artificial Sequence
  ENSG00000158417_49 (sequence is synthesized)
acactgttctgtatatatgagacacacatgaggaattttctggagctattaatacagttcttgaatgttctgaattttttagagatctttctcatgaaaaaactttttcagattgatagg

SEQ ID NO: 466250 - DNA, 120 bp, Artificial Sequence
  ENSG00000158417_50 (sequence is synthesized)
gtttttacctcagtaggaagaaaatgtggtaactttaaaacaagcagagcctgtcaccttctgttgtgcttcagtattggtaaatatcagtgctccatagtcagtgttgactcagtgctg

SEQ ID NO: 466251 - DNA, 120 bp, Artificial Sequence
  ENSG00000158417_51 (sequence is synthesized)
atctcagtgcttcagttaattggggctccaaggcactttacattattgccttttattttattttgaaaggtttcaagcctgtggaaaagtttaaaaactagtataatgaacactcatgtt

SEQ ID NO: 466252 - DNA, 120 bp, Artificial Sequence
  ENSG00000158417_52 (sequence is synthesized)
taccttccctttctgtcagcatacctaagaaaaattaataatatttcaacaatatcctataatttgcagccctcaacattatttcaccagttattccaaagatgttttggtaactctccc

SEQ ID NO: 466253 - DNA, 120 bp, Artificial Sequence
  ENSG00000158417_53 (sequence is synthesized)
caccaatctggcccagtgccctgcaagctgcattgcactggggcttgttttgtggctgagcctcagtcaagaacagtcctccattctttttgaagtgtccctgttgttttgcaaatccct

SEQ ID NO: 466254 - DNA, 120 bp, Artificial Sequence
  ENSG00000158417_54 (sequence is synthesized)
cctccatttggatttatctgtttctctccctcccaactagacacaggttagaattattggaaagacactcatgcagtttccctgtgtgcctgcctcttgcatgacccagcctgtctgact

SEQ ID NO: 466255 - DNA, 120 bp, Artificial Sequence
  ENSG00000158417_55 (sequence is synthesized)
gctgctgatgctctgatttcctggggaaagtgctagacgccaaccatctccattagaaacttgcccctttataattactctgtaatctgtctggtacctggagttcctaatggatatcct

SEQ ID NO: 466256 - DNA, 120 bp, Artificial Sequence
  ENSG00000158417_56 (sequence is synthesized)
gtttctcaacagcctttatcccagtgcctttagtacccactggcaagcgttgcctaagtcaactattacgtagatggttgcaaaattgtggatatacctgtccccccatttcttacaaag

SEQ ID NO: 466257 - DNA, 120 bp, Artificial Sequence
  ENSG00000158417_57 (sequence is synthesized)
aacctcttcccactgacctttttattgagtcatagactcagtgggtttttttttttttaatataatccattacctttattcttttgatactcagattttctattgtggtcagtaggagct

SEQ ID NO: 466258 - DNA, 120 bp, Artificial Sequence
  ENSG00000158417_58 (sequence is synthesized)
caactggctcctgtatccttgacacacagcagtctgagcatcatcttcctttctggttgagatgttccagcctcatctagtactttccctggcccaaacctggttcttgtaatgggcaat

SEQ ID NO: 466259 - DNA, 120 bp, Artificial Sequence
  ENSG00000158417_59 (sequence is synthesized)
gacatttatttgtgttactttctatgtggctttggcctcctaaaccaaccagagctctccctgttttcactcttactctcctgaatctttttctccacaaaggagtcagggttttttgcc

SEQ ID NO: 466260 - DNA, 120 bp, Artificial Sequence
  ENSG00000158417_60 (sequence is synthesized)
ccaaactctgagatcacatcactcatctgctcacaggccatcattcttaaaatttcaggattggtcctcactctgacttcattcccatcagccacttcaagctcattcctgactcagacc

SEQ ID NO: 466261 - DNA, 120 bp, Artificial Sequence
  ENSG00000158417_61 (sequence is synthesized)
ctttgtgcctgctgatccctcctattacggcacctgtcacgtgaaatggtagagcaaaaataggaaatgacattgggtcaacagggcacttggaatgttttgcaaagcacattatctcct

SEQ ID NO: 466262 - DNA, 120 bp, Artificial Sequence
  ENSG00000158417_62 (sequence is synthesized)
gtcattcttacaaccatcatgaagggaatagggtgttggtggtgccagcctagtttaccaaaatgttacaccgtgagtgatgaaaggatcgcactgccatgacttttaaaacaggctttt

SEQ ID NO: 466263 - DNA, 120 bp, Artificial Sequence
  ENSG00000158423_0 (sequence is synthesized)
agatccccggaggagttgttgctgggcggagtcagagcagttcttgaggttcaaggaggcgggggagacctgagctcacgcttgctgagacagaagtcacagcaggattatgcccctcag

SEQ ID NO: 466264 - DNA, 120 bp, Artificial Sequence
  ENSG00000158423_1 (sequence is synthesized)
ggcaagaggaagagttcagaaactgccgccgtaacccaagaacaaagttgcatgcagagccaacctaagagcttcaaaatcgggattccttactgagaaagatgtataacataaaacagt

SEQ ID NO: 466265 - DNA, 120 bp, Artificial Sequence
  ENSG00000158423_2 (sequence is synthesized)
caacagataccaaggaagcagcagccatcgaggctagaagaaatcgagaaaaagagcgacaaaaccgattcttcaatgtgcggaaccgagtcatgggggtggatgtccaggccctgaaca

SEQ ID NO: 466266 - DNA, 120 bp, Artificial Sequence
  ENSG00000158423_3 (sequence is synthesized)
accaggtgggagaccgaaagcgtcgggaagcagcagaaagaagcaaggaggcagcttatggtaccagccaggtgcagtatgatgtggtagtccagatgttagagaaggaagaggcagatc

SEQ ID NO: 466267 - DNA, 120 bp, Artificial Sequence
  ENSG00000158423_4 (sequence is synthesized)
gaacacgtcagctggccaagaaagtccaggagtttcgggagcagaagcagcagctcaagaacgggcgtgaatttagtctttgggatccaggccaagtctggaaggggcttccaacctatc

SEQ ID NO: 466268 - DNA, 120 bp, Artificial Sequence
  ENSG00000158423_5 (sequence is synthesized)
ttagttacagtaatacctatcctggtccagccagcctgcagtacttctctggggaagacctagacagggacacacggctgagaatgcagcaggggcagttcaggtacaacttggaaaggc

SEQ ID NO: 466269 - DNA, 120 bp, Artificial Sequence
  ENSG00000158423_6 (sequence is synthesized)
cgctcagtaaccagctgcgcctcgccatggatgcacaggccacccatctggccaggctggaggagtcctgtcgtgcggccatgatgtgtgccatggccaacgccaacaaagcgcaggcag

SEQ ID NO: 466270 - DNA, 120 bp, Artificial Sequence
  ENSG00000158423_7 (sequence is synthesized)
ctgtgcaggctgggcgtcagcgctgtgagcgtcagcgtgaacagaaggccaaccttgcggagatccagcaccagagcacgagtgacctactgactgaaaacccccaggtcgcccaacacc

SEQ ID NO: 466271 - DNA, 120 bp, Artificial Sequence
  ENSG00000158423_8 (sequence is synthesized)
ctatggctccctaccgggtcctgccctattgctggaagggcatgactccagagcagcaagctgccatcaggaaagagcaggaagtacaacgctctaagaagcaagcacaccgtcaggctg

SEQ ID NO: 466272 - DNA, 120 bp, Artificial Sequence
  ENSG00000158423_9 (sequence is synthesized)
agaaaacactggatactgaatggaaaagccagaccatgagctcagcccaggcagtgctggagctagaagagcaggagagggaattgtgtgctgtatttcaaaggggtctaggatccttca

SEQ ID NO: 466273 - DNA, 120 bp, Artificial Sequence
  ENSG00000158423_10 (sequence is synthesized)
accagcagctggctaatgagcaaaaagcccagcaggattacctgaattcagtaatctacaccaatcaacctacagcccagtatcaccagcagtttaacaccagcagccgctaagttcagg

SEQ ID NO: 466274 - DNA, 120 bp, Artificial Sequence
  ENSG00000158423_11 (sequence is synthesized)
atgtctatctctctctcccttctcctccatcaagctcacaggtggttaggagtcaaagagaaaaatgctgcatactcccaccttctaacctaggtaataaagttctgcactcaaaatcaa

SEQ ID NO: 466275 - DNA, 120 bp, Artificial Sequence
  ENSG00000158423_12 (sequence is synthesized)
cgggcgaccggcaaatgtcgcgagaatacgtccaggcctaacgggattttcgccttccggcaggagtgggaccaggggcggggactgatgttgcgtatacgaggagcgagctgacgactg

SEQ ID NO: 466276 - DNA, 120 bp, Artificial Sequence
  ENSG00000158423_13 (sequence is synthesized)
caagccaaggttgatgagaattatacaggtaagcagcccggccctccagactcagagacctgaggcctagtggggatctgtcctaagctgagtacagcagccaggggaccagaactgtgt

SEQ ID NO: 466277 - DNA, 120 bp, Artificial Sequence
  ENSG00000158423_14 (sequence is synthesized)
ggggaggtccacttatccatagggttggtgctgaaatgttaggttgtgcagaccccaacctccctgacttccttcagtaactgacagtgtagcattgttcttgattagtttggcactcca

SEQ ID NO: 466278 - DNA, 120 bp, Artificial Sequence
  ENSG00000158423_15 (sequence is synthesized)
cctaatggctctgccacttactagctggtttgggcaaatgaattttcccttctgtgcttcagtttcttcatctttaaaatgagaataataatttataccacatagagtagctactattat

SEQ ID NO: 466279 - DNA, 120 bp, Artificial Sequence
  ENSG00000158423_16 (sequence is synthesized)
gatattgtctgtggccacatccttctcttccattagaagaagcccttcaagggcaaggaccatgtcttatctacttgcactgttcacccttcacatcaaccctgttacagcactctgttc

SEQ ID NO: 466280 - DNA, 120 bp, Artificial Sequence
  ENSG00000158423_17 (sequence is synthesized)
tgctggaccacttattgtagttgtagctaattgtgaaagtatttgtttaatatctgtcttctccctaaaatgtcagcctactgaagatgaaccatctctttcatgtctacccatctccca

SEQ ID NO: 466281 - DNA, 120 bp, Artificial Sequence
  ENSG00000158423_18 (sequence is synthesized)
gttgcatagtacagtgtctgacaggtcttaggaacagcaaggagctcagtgtggctggagcagaaaaaaattgtcagtacctttgctcatgccatgccctcagcctggaatgccctttgc

SEQ ID NO: 466282 - DNA, 120 bp, Artificial Sequence
  ENSG00000158423_19 (sequence is synthesized)
tcttttagcctgtatacaaaatgtatttcaaggatcacctcttcctggaagccttcctcttttccaccatccaaaaccctcttaataccctgtgtacatccctgccattgctcttgccag

SEQ ID NO: 466283 - DNA, 120 bp, Artificial Sequence
  ENSG00000158423_20 (sequence is synthesized)
attgtggtctatgtttgatctgtgtccccaactagacagggagttctctgaggacaggatttaattcgatggtatcattagaacccagcacatggcccttagactgagattcagagatat

SEQ ID NO: 466284 - DNA, 120 bp, Artificial Sequence
  ENSG00000158423_21 (sequence is synthesized)
gaaatgatttacccaaaatcacacagctcagaagcagcagaactgacattgggacccaggtccattggaggcatcttttagttatgcgcttgagaaatcgttgttgctgcacctagttcc

SEQ ID NO: 466285 - DNA, 120 bp, Artificial Sequence
  ENSG00000158423_22 (sequence is synthesized)
ttccacatccctacaactcggacactaaccccctcctaaacattcgtacacacacaaacacaaaacttgctgaacaaatggctggatgagtgaaacaggaatggagcaagccagtacagt

SEQ ID NO: 466286 - DNA, 120 bp, Artificial Sequence
  ENSG00000158423_23 (sequence is synthesized)
agccaaggttgatgagaattatacagcctactgaagatgaaccatctctttcatgtctacccatctcccagttgcatagtacagtgtctgacaggtcttaggaacagcaaggagctcagt

SEQ ID NO: 466287 - DNA, 120 bp, Artificial Sequence
  ENSG00000158423_24 (sequence is synthesized)
ccagcagctggctaatgagcaaaaagcccagtgagttctaggtggtagtggtggagataaatgccaagggagggagaggagggatggtgaggaaccatggagagagggaaagcatgtcag

SEQ ID NO: 466288 - DNA, 120 bp, Artificial Sequence
  ENSG00000158427_0 (sequence is synthesized)
catagctctgcaggggaacaggatcgctggcgcctcctgggccgctaagcgaccccggggctgcccggcttagcgagtgcttcgcagagaggtagccgagtcgaggcagcgcggttccca

SEQ ID NO: 466289 - DNA, 120 bp, Artificial Sequence
  ENSG00000158427_1 (sequence is synthesized)
aggaagtcacggctgcggccaccctccagttcggacctccgggcagccgcggttgctttcagtctctgcccattgagacaaaagagcgtgacaagccgcgcgacgcggccaatcagcggg

SEQ ID NO: 466290 - DNA, 120 bp, Artificial Sequence
  ENSG00000158427_2 (sequence is synthesized)
gcgaggaggcggcctacccaagcagcctctggccctgaagctactgctagcaagactcgggagctggctggcgggggctgaggccgacaggcacgggagccggcgcggcgtcaagtggag

SEQ ID NO: 466291 - DNA, 120 bp, Artificial Sequence
  ENSG00000158427_3 (sequence is synthesized)
ctcggacgcacggaccaggcccatttccctttcatctacagcaatgttcttactcctctcctgctgtaaagccactcatcttcgatttccctgaggacttctgctcctacagactctcga

SEQ ID NO: 466292 - DNA, 120 bp, Artificial Sequence
  ENSG00000158427_4 (sequence is synthesized)
cggagtaaagcttccgatagaggggaaacagattcgctactagtgttgatagtcaagttactaaggttctttatcaacgtctcggagcagatttgagaggcccctgaatcgtcccgggaa

SEQ ID NO: 466293 - DNA, 120 bp, Artificial Sequence
  ENSG00000158427_5 (sequence is synthesized)
ttttcttcggtgagcatttgtggagactctgggatgtaggttggattaaacttctgtgatgggtccatcggcgtcttgacacaacactaagcttctcctggatctttgaaacgtagcaga

SEQ ID NO: 466294 - DNA, 120 bp, Artificial Sequence
  ENSG00000158427_6 (sequence is synthesized)
aggcctgggaggtggggcctggggagggcgaggtctgctctgaagtcaccaagctcctgatcttagaagagatggtgggcgcaggctctggaggctcaagcggaggaggggaaggaggcg

SEQ ID NO: 466295 - DNA, 120 bp, Artificial Sequence
  ENSG00000158427_7 (sequence is synthesized)
agtccggaaaccctcggccaatcagagagggctggggcggcgcctgctagaaggcttagcactgcagggctctgggcgggaaggctaacctggtgcggagccagcctgggtctcagcccc

SEQ ID NO: 466296 - DNA, 120 bp, Artificial Sequence
  ENSG00000158427_8 (sequence is synthesized)
gcgtacggcctttcacgagtcttcaagccttcaggctttcttctagtcaagatgagtgataaaccagacttgtcggaagtggagaagtttgacaggtcaaaactgaagaaaactaatact

SEQ ID NO: 466297 - DNA, 120 bp, Artificial Sequence
  ENSG00000158427_9 (sequence is synthesized)
gaagaaaaaaatactcttccctcaaaggaaactatccagcaggagaaagagtgtgttcaaacatcataaaatggggatctcctccaaagagcagatttcagcattgcctgacagtcttgg

SEQ ID NO: 466298 - DNA, 120 bp, Artificial Sequence
  ENSG00000158427_10 (sequence is synthesized)
ttttaggcttgtttttttgtaaacctgtgtgtttgtagagatttcagacatcttctgatttcttctcacctatattccctggttaagaggtcaggggtagtgaatgtttccttaagttcc

SEQ ID NO: 466299 - DNA, 120 bp, Artificial Sequence
  ENSG00000158427_11 (sequence is synthesized)
tttttaaacttcccattggtatgtaaattccaaatggcagatgctgtcaataaccttgccatggatgacctttgtgtaggtagtccttgcacctcatgcaggataagccaattttaactt

SEQ ID NO: 466300 - DNA, 120 bp, Artificial Sequence
  ENSG00000158427_12 (sequence is synthesized)
tctacaatgggtgcctcaatagtttcataatcttcatgaagttgcatcctttggcagcttcttacagtttattttcacttccaatgtagcaataaaataataaatataatcgttgttgtc

SEQ ID NO: 466301 - DNA, 120 bp, Artificial Sequence
  ENSG00000158427_13 (sequence is synthesized)
gccagcctgggtctcagccccgcgtacggcctttcacgagtcttcaagccttcaggtgagtacctgcggcctcgcaggagccagaggaccatggggacgggaaggcgtgggggtcgcgag

SEQ ID NO: 466302 - DNA, 120 bp, Artificial Sequence
  ENSG00000158427_14 (sequence is synthesized)
gcgggggatgccgcgccttcgggagccagaggggctggggttggggctggtgcttggtgtctgcgccgccgccaggcccggcgagtccgagcctttgtctttctggggcgccgccttctg

SEQ ID NO: 466303 - DNA, 120 bp, Artificial Sequence
  ENSG00000158427_15 (sequence is synthesized)
cgagcgatgccgagccctcccgggggccggtccctggaaagaaggccccggggagtcggggtgggaggcggtggttggaggggtaggggacccttaaagcggccagtccgcggtagctgc

SEQ ID NO: 466304 - DNA, 120 bp, Artificial Sequence
  ENSG00000158427_16 (sequence is synthesized)
aggtcagaggcttcgaggatgaagagtttgggggccgcccggaatgggccttgtggggctgggccctggttcctttccctcccgtggccgttagactgggcgtctaacaacgctaatagt

SEQ ID NO: 466305 - DNA, 120 bp, Artificial Sequence
  ENSG00000158427_17 (sequence is synthesized)
tatttgaaaaagtatgcaaactgctcctgacagactggcctatgcgcccggccctgctattatttattggttagttccaatttcccagctccgagcttggcgtctgatcgcttggcagag

SEQ ID NO: 466306 - DNA, 120 bp, Artificial Sequence
  ENSG00000158427_18 (sequence is synthesized)
gagggtcttagggtaacctcgacagaatggaggcatgttcgacacttctgactgcttgggggcctctgcattctacgccagggactagacgaagtgtcttactccaccagggtggggccg

SEQ ID NO: 466307 - DNA, 120 bp, Artificial Sequence
  ENSG00000158427_19 (sequence is synthesized)
ggcttgctcatgaaagctctacctggtatatcctattgtctcttctgaacaaactcgagactttcacagggcaccaggcatttcgtcaggtccacagctacgcacgtctgagcctcatct

SEQ ID NO: 466308 - DNA, 120 bp, Artificial Sequence
  ENSG00000158427_20 (sequence is synthesized)
cctccctctctgcagtgaaaacgtgaaagaagacccacttctatttggtttattccgttctgctgaagtcctgggtctgatcctagttagctgtcccttcttacagcgtttacaaaccag

SEQ ID NO: 466309 - DNA, 120 bp, Artificial Sequence
  ENSG00000158427_21 (sequence is synthesized)
tgccacaaggagctattatgagacgtgtattgtagtgccttaatgtactgtcgtctttggggatttaaaatagatagaaattaatacaacttatctcattctttttttgtgtgctgctcc

SEQ ID NO: 466310 - DNA, 120 bp, Artificial Sequence
  ENSG00000158427_22 (sequence is synthesized)
caaaagtaaatagaaagtgaagatgctcaaatggtgctatgttctgtttcaaaataattacctggttaaaaccagtctttattttttcttctatccctgtctggtcttgtgcttctatca

SEQ ID NO: 466311 - DNA, 120 bp, Artificial Sequence
  ENSG00000158427_23 (sequence is synthesized)
cctccattttatccttgctgtgattttaagagtcagacaaatggctctgtgtttctagagcatcttggtttctggtgcgttatgatccaatgacatttactgcctatcagaaacggcaaa

SEQ ID NO: 466312 - DNA, 120 bp, Artificial Sequence
  ENSG00000158427_24 (sequence is synthesized)
tgatgtggagttgaaattattctaacaaaaatataacttttctaatatctgttgctgtttttctgttgaaaatgagcaggtagaatatacattgataggaaatgtgaaaatttttgcttg

SEQ ID NO: 466313 - DNA, 120 bp, Artificial Sequence
  ENSG00000158427_25 (sequence is synthesized)
tgataggaaatgtgaaaatttttgcttgtgatcccttagtccgaagatagttctgccaggtaagttttcttaaaaatgtttttttctgtcctggcgcggtggctcacgcctgcaatccca

SEQ ID NO: 466314 - DNA, 120 bp, Artificial Sequence
  ENSG00000158427_26 (sequence is synthesized)
aagactcgggagctggctggcgggggctgaggccgacaggcacgggagccggcgcggcgtcaagtggagctcggacgcacggaccaggcccatttccctttcatctgttgtagttctagc

SEQ ID NO: 466315 - DNA, 120 bp, Artificial Sequence
  ENSG00000158427_27 (sequence is synthesized)
agtgagaacttctcactgaatgccacagaaattaaagacacagttgttggaggtatgatgtcagacagcatttgtcaccaaggttggcagaaaatggctagtccaggagagttgaaaatg

SEQ ID NO: 466316 - DNA, 120 bp, Artificial Sequence
  ENSG00000158427_28 (sequence is synthesized)
agcttccacatctgcaaatcgggatgtgttggaacagtactcaacttgtggattcaaggaagtatgaacacagagtctgcataaggaaaggaaaaagatgcatttatctcctaattacac

SEQ ID NO: 466317 - DNA, 120 bp, Artificial Sequence
  ENSG00000158427_29 (sequence is synthesized)
tggtgatttccacttatgtcactctgtacatccatgtccctttcttcattttaacttcttatttaaaaataatttcaaacatttaaaaatgttgcaagcataaataaagcttaaagaaca

SEQ ID NO: 466318 - DNA, 120 bp, Artificial Sequence
  ENSG00000158427_30 (sequence is synthesized)
cccatgtcccctttaccctaattcccctattattaatgtttctccccatttgctttattatttaagtgtgcactctgtctatacacacacaggatattttttccctgaactgtgaattgc

SEQ ID NO: 466319 - DNA, 120 bp, Artificial Sequence
  ENSG00000158427_31 (sequence is synthesized)
atacatcaattttcagtattcctcgattcaatgtttgcaaatccaaattcttttaaaaaagactgtgttttatctctatgacaatggaaccgttattgcagaatattataaaatgaaaag

SEQ ID NO: 466320 - DNA, 120 bp, Artificial Sequence
  ENSG00000158427_32 (sequence is synthesized)
tcacatggtatatgtgatactgtgaaatatatatttgctcttcgatcctgtttcctggcatgcaactcttaaaatccttagaatttccaaagtgatatctttttgtatgctaataattga

SEQ ID NO: 466321 - DNA, 120 bp, Artificial Sequence
  ENSG00000158427_33 (sequence is synthesized)
ctgatggctggcagcctctggttgcttcaggatgggaactagtcaccagagagaccaaggcgccattagagggttgggacttaacagcctcattcccgacctccagggaggggagagggg

SEQ ID NO: 466322 - DNA, 120 bp, Artificial Sequence
  ENSG00000158427_34 (sequence is synthesized)
actgggtttggttagcttccagatagctgaatatatggaggttcctggagggtggtgacccaaggagggcatggaagctctgagccccttccccagtacctcaccctatgcatctcttca

SEQ ID NO: 466323 - DNA, 120 bp, Artificial Sequence
  ENSG00000158427_35 (sequence is synthesized)
tctctatcctttgcaatatcctttataataaactggtcaacgttaggtatttccctgagttctgtgagcctttctgacaaattaatcaaacccaaagagggggtcatgtgaaccgaaact

SEQ ID NO: 466324 - DNA, 120 bp, Artificial Sequence
  ENSG00000158427_36 (sequence is synthesized)
tgaagcccatctgtcagaagttctggaggactggatttgcgactggtgtctgaagggcctgggaacagtcttgtgagacctagtcctcagcttgtgggatatgacgctatctccaggtag

SEQ ID NO: 466325 - DNA, 120 bp, Artificial Sequence
  ENSG00000158427_37 (sequence is synthesized)
atttgtgtcagaattgaattggagtacacccagctggtgtttgctgcagaactgattgctcacttagtgtgtgggaaaaccccacacatttgaacatggaaatattctttgttgattgcc

SEQ ID NO: 466326 - DNA, 120 bp, Artificial Sequence
  ENSG00000158427_38 (sequence is synthesized)
gtgatgtgaaagcaaaggaaaaagtttgtgtgttttcccctcagagcatattttaaagctaagttgctaataattgcttaaatttactatatttgcctttataaaaactttatgtatgtt

SEQ ID NO: 466327 - DNA, 120 bp, Artificial Sequence
  ENSG00000158427_39 (sequence is synthesized)
taaagcttgaagctattcaattataatataaacgtggatttacaactgaagcatgttataatttaaataattgagttttacaaattggttcatataaaatcctaggcaatactgtaaaat

SEQ ID NO: 466328 - DNA, 120 bp, Artificial Sequence
  ENSG00000158427_40 (sequence is synthesized)
tatacagacttgtcaactttttccacttaaatcttctgagcaaaatttaagggtgtagtagttttcaagtaatttcaaatgtcaatattaatatttagttttgtgatgtttatgtgggca

SEQ ID NO: 466329 - DNA, 120 bp, Artificial Sequence
  ENSG00000158427_41 (sequence is synthesized)
tattttctgatataaaaaatgacttttaggagttgagatcaataaaataaggaggtaataaatacctacatctgtttaaagacataaaatatacaatttaacactaaagctacttggtat

SEQ ID NO: 466330 - DNA, 120 bp, Artificial Sequence
  ENSG00000158427_42 (sequence is synthesized)
agaatttgctgttttatgaactaaacatttctggtgttcatggtgagcataaatgttatggtctgaattttgtcacctgtgacctcctgattaatatgctgaagccctaatccctagcat

SEQ ID NO: 466331 - DNA, 120 bp, Artificial Sequence
  ENSG00000158427_43 (sequence is synthesized)
gattgtatctggagataggttgtttcagaagtaatttacgttatgaagtgataacagtcagggcctaatctaataggactgtggccttataaggagagagagaccagtctctaacatgcg

SEQ ID NO: 466332 - DNA, 120 bp, Artificial Sequence
  ENSG00000158428_0 (sequence is synthesized)
acagaccgggtagaggcaggcccacagcatgtcctccaaggtttactccacaggctccagagctaaggaccaccagccctcgggtccggagtgtctgccactcccagaggccaatgctga

SEQ ID NO: 466333 - DNA, 120 bp, Artificial Sequence
  ENSG00000158428_1 (sequence is synthesized)
agccatcgacttcctcagctccctccacaaggaggagctacagatgctgttcttctctgagacgctggccatggtctcagacaccggggagcctcagggagagctgaccattgaggtgca

SEQ ID NO: 466334 - DNA, 120 bp, Artificial Sequence
  ENSG00000158428_2 (sequence is synthesized)
gagagggaaataccaggaaaaactcggcatgctgacatactgcctcttcgtgcatgcctctagccgaggcttcttggacaaaatgctctgcggaaattccctcctgggctatctctcaga

SEQ ID NO: 466335 - DNA, 120 bp, Artificial Sequence
  ENSG00000158428_3 (sequence is synthesized)
gaagctggagctcatggaacagcacagccaagacttcatcaagttcctcatcctccccatggaacggaagatgagtttgctgaagcaggatgatcagctggctgtgaccagaagtatcaa

SEQ ID NO: 466336 - DNA, 120 bp, Artificial Sequence
  ENSG00000158428_4 (sequence is synthesized)
ggagggtgaggaagtgaagactggagtgacttctttcccctggagctcaatcaagggcttcatctcagaggctgccaacctggtgctgctcagggtgatggcctggcggcggatggtgcc

SEQ ID NO: 466337 - DNA, 120 bp, Artificial Sequence
  ENSG00000158428_5 (sequence is synthesized)
gcaatgcccgcttcctgaccttggacaccgagggcaaactctgctatttgacctatcaaaacctgggcttccagaccatccaggtagaccatcagcaggctgaagtcttcatcgtggagc

SEQ ID NO: 466338 - DNA, 120 bp, Artificial Sequence
  ENSG00000158428_6 (sequence is synthesized)
agactgtccacgcggaggagggcatccccatgtcctgccagtactacctgctctccgatgggcacctggccaagagaatacaggtgggctccccagggtgctgcatcatcaccaagatgc

SEQ ID NO: 466339 - DNA, 120 bp, Artificial Sequence
  ENSG00000158428_7 (sequence is synthesized)
ccatcttgagggaagaggatgagattgagccacgcccagtgtttgagaagaagcccctggtatgggaggaggatatggagctctattcgaagttcctggaccggaaggaggagctccggc

SEQ ID NO: 466340 - DNA, 120 bp, Artificial Sequence
  ENSG00000158428_8 (sequence is synthesized)
tcggccacgccagctatctgcggcagcaccccgaagcccacgcgctcatctccgacttcctgctcttcctgctgctgcgccagccggaggacgtggtcaccttcgccgccgagttcttcg

SEQ ID NO: 466341 - DNA, 120 bp, Artificial Sequence
  ENSG00000158428_9 (sequence is synthesized)
gccccttcgacccgtggcgtccgtcgtcaccggccttgggctcctcccaccggcccaaccctttccgctccctggagccggagggagacgcccgctcgggggcggcctaagcggggccca

SEQ ID NO: 466342 - DNA, 120 bp, Artificial Sequence
  ENSG00000158428_10 (sequence is synthesized)
ggcccggacagggcaggaaaccaggggtcgggctgggacgcgggcgggacgcgccggggcgggtgcgctttccgggctgcggttttgggggaataaatggggccctcccgcttctctgca

SEQ ID NO: 466343 - DNA, 120 bp, Artificial Sequence
  ENSG00000158428_11 (sequence is synthesized)
caccaattcctagaatcttttttcaggaccaagcccttggctttgccttggaccaggacaaggcacggggtgggagagggatgagcgagttcctcatggactcgggatgagggcacatct

SEQ ID NO: 466344 - DNA, 120 bp, Artificial Sequence
  ENSG00000158428_12 (sequence is synthesized)
tacccatcctgtagtttttctgggaccgtattacacctagtcctccagctgcgccaccaccttcccttccttcagcctctgacccacatctcctgtgacgtcaatgcctgtgtccctgca

SEQ ID NO: 466345 - DNA, 120 bp, Artificial Sequence
  ENSG00000158428_13 (sequence is synthesized)
gagtttatttcttaaaatttcagaatagatattcacataatcactacactggggaaaaggtaatcaaaacattgttggctttatctcataacttagtatgttttcggttttggtgcgatc

SEQ ID NO: 466346 - DNA, 120 bp, Artificial Sequence
  ENSG00000158428_14 (sequence is synthesized)
tccaactcctgggctcaagcaatccacctgcttcagccttcctagtagctgggactacaggtatgcaccacagctccaggccaacctttttattttgaatgccgcatagcaggagattcc

SEQ ID NO: 466347 - DNA, 120 bp, Artificial Sequence
  ENSG00000158428_15 (sequence is synthesized)
catagcaggagattccataatttttcttttctttctttctccttccttccttcctctttctctctttctctctctctgtctctttcttgacagagtctcgctctgtcacctagactggaa

SEQ ID NO: 466348 - DNA, 73 bp, Artificial Sequence
  ENSG00000158428_16 (sequence is synthesized)
cctagactggaatgtgtggcatttgcttcagcctcccaagtagccgggactacaggtgcctgccaccacgcct

SEQ ID NO: 466349 - DNA, 90 bp, Artificial Sequence
  ENSG00000158428_17 (sequence is synthesized)
ggccaggctggtctcaaacacctgacctgaagtgatctgcccatcttggcctcctacaagtgtgagccactgcgacaggcctctttctct

SEQ ID NO: 466350 - DNA, 120 bp, Artificial Sequence
  ENSG00000158428_18 (sequence is synthesized)
ggcgtgagccactacaagtgtgagccactgcgacaggcctctttctctttttgagacagtctcgctctgttacccagactggagtacagggatgcaatcttggctcactacaacctccac

SEQ ID NO: 466351 - DNA, 79 bp, Artificial Sequence
  ENSG00000158428_19 (sequence is synthesized)
ggctccatgattttcgagtgctgtacctctaaagatcctttttgttttttttaaacagggggcctaatacttgccaagc

SEQ ID NO: 466352 - DNA, 120 bp, Artificial Sequence
  ENSG00000158428_20 (sequence is synthesized)
ttttgttttttttaaacagggggcctaatacttgccaagccctgtgcgttatttggagatccagaaatgaacaccacccaggaacttaataaacaagagagggaggcagaagtaaagagg

SEQ ID NO: 466353 - DNA, 120 bp, Artificial Sequence
  ENSG00000158428_21 (sequence is synthesized)
gaaggcaggaagtccaagatcatggtgccatcagggttggtttctggtgagggctgtcttcctagcttgcagacaagtgccttctcaatgtgtcctcacatggcctttcttccgtgcatg

SEQ ID NO: 466354 - DNA, 120 bp, Artificial Sequence
  ENSG00000158428_22 (sequence is synthesized)
agtgaagagaaagctctctggcatcacccttttctcataagggcactaatcctatctgattcgggccccacccttatgactgcatgtaaacgtaatgacctccccaaagcccctacctcc

SEQ ID NO: 466355 - DNA, 120 bp, Artificial Sequence
  ENSG00000158428_23 (sequence is synthesized)
aaataccaccacactgggggttagagagacaattcagtccatagcaggcggtctgggaagattctcactctcacatgttgtgttgcactccaggcacctggccaagagaatacaggtggg

SEQ ID NO: 466356 - DNA, 120 bp, Artificial Sequence
  ENSG00000158428_24 (sequence is synthesized)
ctccccagggtgctgcatcatcaccaagatgcccatcttgagggaagagggtgagtgaagcccaggccttgtgcaggcagggagagttaaggggagtggggaaacctgggccttccagga

SEQ ID NO: 466357 - DNA, 120 bp, Artificial Sequence
  ENSG00000158428_25 (sequence is synthesized)
tgcagggggctggacccagtgtgctgtaaacgggacaggagcctggaatcagctggagaacatctgccctccagcccctgaccccaagcaataagaggaggatctttcctactggaagtc

SEQ ID NO: 466358 - DNA, 120 bp, Artificial Sequence
  ENSG00000158428_26 (sequence is synthesized)
ccttcctgcaactctgcccatgtgggcagaatcctggggtttcacctgagccttctgtttgggtgttctcgggatctcgctgtgtatccaaggaaggttccggggtagggacgcccagcc

SEQ ID NO: 466359 - DNA, 120 bp, Artificial Sequence
  ENSG00000158428_27 (sequence is synthesized)
ccatcgacttcctcagctccctccgtgagctcagacagtgtcggggttgggggtgcgggaggggtgcaagtctggagaggagggaagaaagtccagtctctctctctctctctctctctc

SEQ ID NO: 466360 - DNA, 120 bp, Artificial Sequence
  ENSG00000158428_28 (sequence is synthesized)
tcttccttgattctcctgggactcagaaaaggcctgaggcctgtttgttgacattcttcaagggaaggccccccggggacatggggacatggggcaggagtcttcacctgtccgtgccag

SEQ ID NO: 466361 - DNA, 120 bp, Artificial Sequence
  ENSG00000158428_29 (sequence is synthesized)
ggcaggtggggactgtggggacactggtggtcatggggtcagaggattggattggggcccaggagcaggggctttatctgttcccacgggcccctcaccccagacaaggaggagctacag

SEQ ID NO: 466362 - DNA, 120 bp, Artificial Sequence
  ENSG00000158435_0 (sequence is synthesized)
gcgctttacggccgcggggacggagcgagccggcgccagggcccctcgggccgggaagaggggaaggggagcgaggttgatgcccggcggaggggcgagcgcggcgtctggccggcttct

SEQ ID NO: 466363 - DNA, 120 bp, Artificial Sequence
  ENSG00000158435_1 (sequence is synthesized)
ttctcaccgccgcggagcaaagagggtcccgggaagcggcagggtcggcgtccaggagcggcttcgggggctccggcggcggcagaggcggagcaagcggccccgggtccgggagcggag

SEQ ID NO: 466364 - DNA, 120 bp, Artificial Sequence
  ENSG00000158435_2 (sequence is synthesized)
ggggggccccgcgggcaggatgagcttgaccccgaaggagctctcgagcctgctgagcatcatatcggaggaggcgggcggcggcagcaccttcgagggcctgtccaccgccttccacca

SEQ ID NO: 466365 - DNA, 120 bp, Artificial Sequence
  ENSG00000158435_3 (sequence is synthesized)
ctacttcagcaaggccgaccacttccgcctgggctcggtgctcgtcatgctgctccagcagcccgacctgctgcctagcgcggcgcagcgcctcacggcgctctacctgctctgggagat

SEQ ID NO: 466366 - DNA, 120 bp, Artificial Sequence
  ENSG00000158435_4 (sequence is synthesized)
gtaccgcaccgagccgctggccgccaaccccttcgccgccagcttcgcgcacctgctcaaccccgcgccgcccgcccgcggcggccaggaacccgaccgccctccgctctcaggattttt

SEQ ID NO: 466367 - DNA, 120 bp, Artificial Sequence
  ENSG00000158435_5 (sequence is synthesized)
acctcctataactccaccagaaaagttttttctttcccagctgatgctggcacccccacgggaactcttcaaaaagacgcctcgccagattgcactgatggacgttggaaacatgggcca

SEQ ID NO: 466368 - DNA, 120 bp, Artificial Sequence
  ENSG00000158435_6 (sequence is synthesized)
gtctgtggacattagtgggcttcagttagccttggccgaacgccaatctgaattgccaacgcaaagcaaagcgagcttccccagtattctcagtgacccagacccggattcttctaattc

SEQ ID NO: 466369 - DNA, 120 bp, Artificial Sequence
  ENSG00000158435_7 (sequence is synthesized)
tggatttgacagctcagttgcctctcagatcacagaagctttagtcagcggaccaaagccacctattgaaagccattttcgaccagagtttattcgtccaccgcctccactccacatttg

SEQ ID NO: 466370 - DNA, 120 bp, Artificial Sequence
  ENSG00000158435_8 (sequence is synthesized)
tgaggatgaacttgcttggctaaaccccacggagcctgaccacgcgatccagtgggataaatcgatgtgtgttaagaatagcactggtgtggagatcaaacgaataatggccaaagcctt

SEQ ID NO: 466371 - DNA, 120 bp, Artificial Sequence
  ENSG00000158435_9 (sequence is synthesized)
caaaagccccttatcctctccccaacaaacacagctacttggtgagttggaaaaagaccccaaacttgtctaccatattggcctcaccccagccaaacttcctgaccttgtggaaaacaa

SEQ ID NO: 466372 - DNA, 120 bp, Artificial Sequence
  ENSG00000158435_10 (sequence is synthesized)
cgactaactacagctgttgatctacctcctgaatttattcacctttatatatcaaattgcatctctacttgtgaacagattaaggataaatatatgcagaatcggttggtgcgtcttgtg

SEQ ID NO: 466373 - DNA, 120 bp, Artificial Sequence
  ENSG00000158435_11 (sequence is synthesized)
tgtgtgtttctccaatccttgatccgtaacaaaattattaatgtacaggatttgtttatagaagtgcaggcattctgtattgaattcagtaggatacgagaagctgctggtcttttccgg

SEQ ID NO: 466374 - DNA, 120 bp, Artificial Sequence
  ENSG00000158435_12 (sequence is synthesized)
ttgttgaagacattggatactggggaaacaccttctgagaccaaaatgtcaaaataatacctcatcagaaccatcccatccattcactgttcagctgtactgtgatttagtttttacacc

SEQ ID NO: 466375 - DNA, 120 bp, Artificial Sequence
  ENSG00000158435_13 (sequence is synthesized)
gttaaaaccctgagtggattgcttggtttaatgcatataaacagtactttatctacttaaagcaaagttttgctttcttgaatgactttttctgtgagatgaatttttgataagaactag

SEQ ID NO: 466376 - DNA, 120 bp, Artificial Sequence
  ENSG00000158435_14 (sequence is synthesized)
ggaaaacatgtcttttaggtgtcttgctgatgactatccataggaggaatggctatcccaaaaaaagttccgcaaaaaagtagatgagtttcttttttttttaagcactaaagaacaaaa

SEQ ID NO: 466377 - DNA, 120 bp, Artificial Sequence
  ENSG00000158435_15 (sequence is synthesized)
tgcatttttcattaatacaggcttctgatgaaccaggaatcctgttttcgtaaagttccaatgttgatgagagtaaattcttaagcatttgtcctagaggtgaaagcagctgaatgtttc

SEQ ID NO: 466378 - DNA, 120 bp, Artificial Sequence
  ENSG00000158435_16 (sequence is synthesized)
tgaaccatcaagaggcaaacaaacaggagtttgtttcttgaacctgcttatgcacacagctcttaactcctcatgaggcacacagctcttaactcctgatgaaccaaggatttactcata

SEQ ID NO: 466379 - DNA, 120 bp, Artificial Sequence
  ENSG00000158435_17 (sequence is synthesized)
actttctccttgtcatggaggcttaatagacaacagaataaatgcatttcttgggcctcttataaacttgggaattcttagaaagctgcttctattaccaggctgtaatagctggtatag

SEQ ID NO: 466380 - DNA, 120 bp, Artificial Sequence
  ENSG00000158435_18 (sequence is synthesized)
ttttttttttttctcttaagatgttctgttattagtctgagacagccatttttttgttttaaggaaaaatatcagtcagtgctccgggaggtaatttcctgtggggtctgcaccctcctg

SEQ ID NO: 466381 - DNA, 120 bp, Artificial Sequence
  ENSG00000158435_19 (sequence is synthesized)
tctgggtggtggatgtgggtttgagaagtaggagagcagggtggtaccgtgtgggctcttaccctttatgtgattttggacaacagtgccttccattaaagttctttttatcaactgtta

SEQ ID NO: 466382 - DNA, 120 bp, Artificial Sequence
  ENSG00000158435_20 (sequence is synthesized)
aatctggccctttgtttttctctgttacagatagcttgcctcagttggtagcttgtcttttctctctcctcatgatgtccataattttaaaatgtctcctatttccagaacgccaatctg

SEQ ID NO: 466383 - DNA, 120 bp, Artificial Sequence
  ENSG00000158435_21 (sequence is synthesized)
ttttttttttcctttttcagaatcggttggtgcgtcttgtgtgtgtgtttctccaatccttgatccgtaacaaaattattaatgtacaggatttgtttatagaagtgcaggcattctgta

SEQ ID NO: 466384 - DNA, 120 bp, Artificial Sequence
  ENSG00000158445_0 (sequence is synthesized)
gctttcgctttctgcctcgcagccgtcgggatggaggtgagaagacggccgtgacgcgcgcccgcggggccccctgcacccccagcagcccacagcgctccctgcccccctcccccgcag

SEQ ID NO: 466385 - DNA, 120 bp, Artificial Sequence
  ENSG00000158445_1 (sequence is synthesized)
cagcgggccttgccgtcgagtgacagcggcctgggggggcagggggggcgggggcggccggatcagcgatgccggcgggcatgacgaagcatggctcccgctccaccagctcgctgccgc

SEQ ID NO: 466386 - DNA, 120 bp, Artificial Sequence
  ENSG00000158445_2 (sequence is synthesized)
ccgagcccatggagatcgtgcgcagcaaggcgtgctctcggcgggtccgcctcaacgtcggggggctggcgcacgaggtactctggcgtaccctggaccgcctgccccgcacgcggctgg

SEQ ID NO: 466387 - DNA, 120 bp, Artificial Sequence
  ENSG00000158445_3 (sequence is synthesized)
gcaagctccgcgactgcaacacgcacgactcgctgctcgaggtgtgcgatgactacagcctcgacgacaacgagtacttctttgaccgccacccgggcgccttcacctccatcctcaact

SEQ ID NO: 466388 - DNA, 120 bp, Artificial Sequence
  ENSG00000158445_4 (sequence is synthesized)
tctaccgcactgggcgactgcacatgatggaggagatgtgcgcgctcagcttcagccaagagctcgactactggggcatcgacgagatctacctggagtcctgctgccaggcccgctacc

SEQ ID NO: 466389 - DNA, 120 bp, Artificial Sequence
  ENSG00000158445_5 (sequence is synthesized)
accagaagaaagagcagatgaacgaggagctcaagcgtgaggccgagaccctacgggagcgggaaggcgaggagttcgataacacgtgctgcgcagagaagaggaaaaaactctgggacc

SEQ ID NO: 466390 - DNA, 120 bp, Artificial Sequence
  ENSG00000158445_6 (sequence is synthesized)
tactggagaagcccaattcctctgtggctgccaagatccttgccataatttccatcatgttcatcgtcctctccaccattgccctgtccctcaacacgctgcctgagctacagagcctcg

SEQ ID NO: 466391 - DNA, 120 bp, Artificial Sequence
  ENSG00000158445_7 (sequence is synthesized)
atgagttcggccagtccacagacaacccccagctggcccacgtggaggccgtgtgcatcgcatggttcaccatggagtacctgctgaggttcctctcctcgcccaagaagtggaagttct

SEQ ID NO: 466392 - DNA, 120 bp, Artificial Sequence
  ENSG00000158445_8 (sequence is synthesized)
tcaagggcccactcaatgccattgacttgttggccattctgccatactatgtcaccattttcctcaccgaatccaacaagagcgtgctgcaattccagaatgtccgccgcgtggtccaga

SEQ ID NO: 466393 - DNA, 120 bp, Artificial Sequence
  ENSG00000158445_9 (sequence is synthesized)
tcttccgcatcatgcgaattctccgcatccttaagcttgcacgccactccactggcctccagtctctgggcttcactttgcggaggagctacaatgagttgggcttgctcatcctcttcc

SEQ ID NO: 466394 - DNA, 120 bp, Artificial Sequence
  ENSG00000158445_10 (sequence is synthesized)
ttgccatgggcattatgatcttctccagccttgtcttctttgctgagaaggatgaggacgacaccaagttcaaaagcatcccagcctctttctggtgggccaccatcaccatgactactg

SEQ ID NO: 466395 - DNA, 120 bp, Artificial Sequence
  ENSG00000158445_11 (sequence is synthesized)
ttgggtatggagacatctaccccaagactctcctggggaaaattgttgggggactctgctgcattgcaggagtcctggtgattgctcttcccatccccatcatcgtcaataacttctctg

SEQ ID NO: 466396 - DNA, 120 bp, Artificial Sequence
  ENSG00000158445_12 (sequence is synthesized)
agttctataaggagcagaagagacaggagaaagcaatcaaacggcgagaggctctggagagagccaagaggaatggcagcatcgtatccatgaacatgaaggatgcttttgcccggagca

SEQ ID NO: 466397 - DNA, 120 bp, Artificial Sequence
  ENSG00000158445_13 (sequence is synthesized)
ttgagatgatggacattgtggttgagaaaaatggggagaatatgggtaagaaagacaaagtacaagataaccacttgtctcctaacaaatggaaatggacaaagaggacactgtctgaaa

SEQ ID NO: 466398 - DNA, 120 bp, Artificial Sequence
  ENSG00000158445_14 (sequence is synthesized)
ccagctcaagtaagtcctttgaaaccaaggaacagggatcccctgaaaaagccagatcgtcttctagtcctcagcacctgaacgttcagcagttggaagacatgtacaataagatggcca

SEQ ID NO: 466399 - DNA, 120 bp, Artificial Sequence
  ENSG00000158445_15 (sequence is synthesized)
agacccaatcccaacccatcctcaataccaaggagtcagcagcacagagcaaaccaaaggaagaacttgaaatggagagtatccccagccccgtagcccctctgcccactcgcacagaag

SEQ ID NO: 466400 - DNA, 120 bp, Artificial Sequence
  ENSG00000158445_16 (sequence is synthesized)
gggtcattgacatgcgaagtatgtcaagcattgatagtttcattagctgtgccacagacttccctgaggccaccagattctcccacagccctttgacatcactccccagcaagactgggg

SEQ ID NO: 466401 - DNA, 120 bp, Artificial Sequence
  ENSG00000158445_17 (sequence is synthesized)
gcagcacagccccagaagtgggctggcggggagctctgggtgccagtggtggtaggtttgtggaggccaaccccagccctgatgccagccagcactctagtttcttcatcgagagcccca

SEQ ID NO: 466402 - DNA, 120 bp, Artificial Sequence
  ENSG00000158445_18 (sequence is synthesized)
agagttccatgaaaactaacaaccctttgaagctccgagcacttaaagtcaacttcatggagggtgaccccagtccactcctccccgttctagggatgtaccatgaccctctcaggaacc

SEQ ID NO: 466403 - DNA, 120 bp, Artificial Sequence
  ENSG00000158445_19 (sequence is synthesized)
gggggagtgctgcggctgctgtcgctggactggagtgtgccacgcttttggacaaggctgtgctgagcccagagtcctccatctacaccacagcaagtgctaagacacccccccggtctc

SEQ ID NO: 466404 - DNA, 120 bp, Artificial Sequence
  ENSG00000158445_20 (sequence is synthesized)
ctgagaaacacacagcaatagcgttcaactttgaggcgggtgtccaccagtacattgacgcagacacagatgatgagggacagctgctctacagtgtggactccagcccccccaaaagcc

SEQ ID NO: 466405 - DNA, 120 bp, Artificial Sequence
  ENSG00000158445_21 (sequence is synthesized)
tccctgggagcaccagtccgaagttcagcacggggacaagatcggagaaaaaccactttgaaagctcccctttacccacctcccctaagttcttaaggcagaactgtatttactccacag

SEQ ID NO: 466406 - DNA, 120 bp, Artificial Sequence
  ENSG00000158445_22 (sequence is synthesized)
aagcattgactggaaaaggccccagtggtcaggaaaagtgcaaacttgagaaccacatctcccctgacgtccgtgtgttgccagggggaggagcccatggaagcacacgagatcagagca

SEQ ID NO: 466407 - DNA, 120 bp, Artificial Sequence
  ENSG00000158445_23 (sequence is synthesized)
tctgaactgccctgccttggaggagagacttttgggtgaggtccaaagaggagagctgttcagcttacctgccacagagcttttctgcatgaactctggaacagaaaggccctgtaaagc

SEQ ID NO: 466408 - DNA, 120 bp, Artificial Sequence
  ENSG00000158445_24 (sequence is synthesized)
cctcagagagaagagagactccagagaaggctccctaagaccttgagagccatgacaggtccatcagcatgaagttggccaagccatagggcacagcacctccttgtaacaactctatag

SEQ ID NO: 466409 - DNA, 120 bp, Artificial Sequence
  ENSG00000158445_25 (sequence is synthesized)
ccctctttgggagatgacatgagtggaactcacagccaccactaccaccactttagacaggaccgaggccacatactccccattctctcgtggctttccatctcagcctcggagggcaac

SEQ ID NO: 466410 - DNA, 120 bp, Artificial Sequence
  ENSG00000158445_26 (sequence is synthesized)
attgacagtcctcctggcttcagctagagaaggatgctggaacaagcggctggtgttgaaagagtgggttgaccaatttggtattgaatgttgcccagccacccctaggaacacctgtcc

SEQ ID NO: 466411 - DNA, 120 bp, Artificial Sequence
  ENSG00000158445_27 (sequence is synthesized)
atcacctcctggatggattccactgttagacagctacagggaatgattggtcatggggaagtctctgcgccataagccacgatcccagcgcaaaacccttactcaaatgtcttcattgac

SEQ ID NO: 466412 - DNA, 120 bp, Artificial Sequence
  ENSG00000158445_28 (sequence is synthesized)
ttcggtatttcatagtacctgagattttattttgagataccatcagggtgagttgcaccacttgtactcaattctaattgccccctggcaatctgggaagggttcagaaggtgggcaccc

SEQ ID NO: 466413 - DNA, 120 bp, Artificial Sequence
  ENSG00000158445_29 (sequence is synthesized)
agccaacagcatgaactcagagcattgttttagggttggaggaggaacacgctttctttacatcactagtgtagactcaaaagatatgcaagtgtcaaatatgcaaaagaaatagtttat

SEQ ID NO: 466414 - DNA, 120 bp, Artificial Sequence
  ENSG00000158445_30 (sequence is synthesized)
tcaaagagactgtgtgttactgaagaacagcataaaaatatgatttttttacttgcaaaaatgaaaggaaaaaaataccacgcattgaaatgcccagttcagactgaataattcctgctg

SEQ ID NO: 466415 - DNA, 120 bp, Artificial Sequence
  ENSG00000158445_31 (sequence is synthesized)
cagcaaggaaagtacctactataatagaaattctgttttgttttctgtggttttcaagttaaaaaaaaaaaagttaaaataaaaagcactttatgtttttcaaaaataggttctgccagg

SEQ ID NO: 466416 - DNA, 120 bp, Artificial Sequence
  ENSG00000158445_32 (sequence is synthesized)
gacagtgtcaacatcttgcactttaaaataagcactatttcccatagcccaattgttgggactgtagttggattgttgctacctgcccatttctggccagcatgggtaatattgtgctgg

SEQ ID NO: 466417 - DNA, 120 bp, Artificial Sequence
  ENSG00000158445_33 (sequence is synthesized)
tattactgtctgccatatcaaagtctgtgggctccttccctgcccctctgaaaccttcccttaaccctcatgggtcaggaggggttcttgccccttgggtggggcctctcatgaagtcaa

SEQ ID NO: 466418 - DNA, 120 bp, Artificial Sequence
  ENSG00000158445_34 (sequence is synthesized)
gtatacaggagacatgcacatctcaaaaggacacagtgacagttggacattgggtgttttactctgttctctttcttgtcaaccagctattggtttttcagtgtcactgtctgtactaaa

SEQ ID NO: 466419 - DNA, 120 bp, Artificial Sequence
  ENSG00000158445_35 (sequence is synthesized)
agctcaactctccttcctgcagccatcgatgcagccagtacagacaaaagcaataagtatttgtgtgcatcctgagtggttctggtgtatttcttggtgttggttttcctgtcctcgttt

SEQ ID NO: 466420 - DNA, 120 bp, Artificial Sequence
  ENSG00000158445_36 (sequence is synthesized)
gatgacctggcattgtcctgcctgcttttagtccaacagcatggtgttgttggccattcctcagtacagtggcattaggttgaaccactgatgaatacaatgctatagtgttggctcacc

SEQ ID NO: 466421 - DNA, 120 bp, Artificial Sequence
  ENSG00000158445_37 (sequence is synthesized)
tgtcagtaaagatgacatgttattggtctgcctgtctgtagtacaatggaacaatgttgttctcttaatgtaatgttgatggatgatgtcccaagtacaatagtgtagttctgtctatcc

SEQ ID NO: 466422 - DNA, 120 bp, Artificial Sequence
  ENSG00000158445_38 (sequence is synthesized)
tcaatacagtaacaggcatatgtcttcccagtggaagaaagatatggtattggttcacctagtcttaagtctcaatatcatctgttgctggtctgcctgttagtacaatggcatgatcca

SEQ ID NO: 466423 - DNA, 120 bp, Artificial Sequence
  ENSG00000158445_39 (sequence is synthesized)
cctctcagtacacaaatatcatggagctgttctgcctgctcttcatacataaggcataaggttgagccacctgccacacatatgatgagatgggatcattccaccacccttaaaaatatg

SEQ ID NO: 466424 - DNA, 120 bp, Artificial Sequence
  ENSG00000158445_40 (sequence is synthesized)
tcttctctgctgtatacaaacccaattcataacacttctcagcatctccagagactgtagatccccccaagagggtgcagtcctgttctttgccgcattaacagagaaaacgagaacgtc

SEQ ID NO: 466425 - DNA, 120 bp, Artificial Sequence
  ENSG00000158445_41 (sequence is synthesized)
actcttcctaggtatcttcagagtattcgcgcagcaactgcaaagggacttaggggcagggagagtgtgaggtcatcccgtgccaggcagaggaagcagcactcccaaaacactttgctg

SEQ ID NO: 466426 - DNA, 120 bp, Artificial Sequence
  ENSG00000158445_42 (sequence is synthesized)
aacacgcagtctgagctgggggcctcttgaggaatgactgtgggacagttctccgccgaccatctcacatgtctcttctttgttttcatcaccattaatgtccaccatcagcacaaatgt

SEQ ID NO: 466427 - DNA, 120 bp, Artificial Sequence
  ENSG00000158445_43 (sequence is synthesized)
gaaaattcagggaaaaaaacaaatgctttttgataaaagtaaatagttgtgatttccaattcagatatttttagagctgatgctatctgtaaaaaataataataataataatatagtcta

SEQ ID NO: 466428 - DNA, 120 bp, Artificial Sequence
  ENSG00000158445_44 (sequence is synthesized)
ttttacatatcaggaaagtgaacatgtttcaatatagccatatatattgagaaggaacttaccaccccttcttccaatcgaggcatttcatttgttggttgaagcagatgagaactgtac

SEQ ID NO: 466429 - DNA, 120 bp, Artificial Sequence
  ENSG00000158445_45 (sequence is synthesized)
agattgaaaatgatttgtttttttttttttttaaaaaaaacgaaaaccaattggtgcaactctccttgtaaccaaaggccctttctgccttctgtggtcatgtaggacctggcccttcct

SEQ ID NO: 466430 - DNA, 120 bp, Artificial Sequence
  ENSG00000158445_46 (sequence is synthesized)
tccttgtgtattttgtccaaccgtaaagtagcattttattgagtcacttttgaaggacgaattcagaagtatcattaagaacctaccttttcaggcttcatagccagagtcctatagagt

SEQ ID NO: 466431 - DNA, 120 bp, Artificial Sequence
  ENSG00000158445_47 (sequence is synthesized)
tcttatagaaacagaataattgaaattcagcatatactatgcttagaaagtattttgtttgggtttgattgggtttttttttcttttacttgtgtgtgtatgtactgggggagtatagct

SEQ ID NO: 466432 - DNA, 120 bp, Artificial Sequence
  ENSG00000158445_48 (sequence is synthesized)
tttattctgtgctcaattcgaaagagagtattataagttttcccagcccatccacccgctaaaaaagaacatatccaaattttaatatgtatacacccaacctgtacctatgtacgtgaa

SEQ ID NO: 466433 - DNA, 120 bp, Artificial Sequence
  ENSG00000158445_49 (sequence is synthesized)
tttaacttggtggtccatttcccattcattcctgaaccaatgagagcagaaagaaacaagtcaacccaaacaagcaaactaggggctggacgcggcgaatggatgctggtcagtttggca

SEQ ID NO: 466434 - DNA, 120 bp, Artificial Sequence
  ENSG00000158445_50 (sequence is synthesized)
aattcactgaaactcatcaagaacccagctgaacttgcattccaacttccacaattatctgaaagggctagggaccaggtagccatgtgtcccaatcacacgggggagagtctgccaccg

SEQ ID NO: 466435 - DNA, 120 bp, Artificial Sequence
  ENSG00000158445_51 (sequence is synthesized)
gcggtgagagaggtggggaagctttggaggagacagtatattcacctttttatctttgggtaaaagaaaccaacaggactttggtgcagtagatttctcagtgccttctttaggaattct

SEQ ID NO: 466436 - DNA, 120 bp, Artificial Sequence
  ENSG00000158445_52 (sequence is synthesized)
atcttaagcacacttcaaggggaaagaaaaaaggaggagagaacatttgttcccgtgaagtccctttctccaaaggactggggatcaagaaggaagaagagtaagaaggaaaaacaacaa

SEQ ID NO: 466437 - DNA, 120 bp, Artificial Sequence
  ENSG00000158445_53 (sequence is synthesized)
aatcctgaggaggccatttcttttaacccacccagcttgcccctgaaaactgctggtgatacaaactttttcaaactgacttccagcttctccatgtgtcttggtaactgtagcctcgtc

SEQ ID NO: 466438 - DNA, 120 bp, Artificial Sequence
  ENSG00000158445_54 (sequence is synthesized)
tctgccctttctcctaataagatccatgtttctaaggagaaaaacaaaacagtattctcttctgtaaaactgtaatgtattgttgatatttgtaactattgtatatttctgtcttgctcc

SEQ ID NO: 466439 - DNA, 120 bp, Artificial Sequence
  ENSG00000158445_55 (sequence is synthesized)
agtcccagctggagtgtctagttccatggacaaggggatatttaaaattcaccacggacaagagccactaaagccaggtctctatcgctaatctctctcctattcttatttctctaccaa

SEQ ID NO: 466440 - DNA, 120 bp, Artificial Sequence
  ENSG00000158445_56 (sequence is synthesized)
ctaatctcaagtaacaataccccaggctttttttcagcctcaattcaagtaactttgaatcaaaagagagcaaggcaaaaagcctccggacatgcttctttgggaaaggactttttctgt

SEQ ID NO: 466441 - DNA, 120 bp, Artificial Sequence
  ENSG00000158445_57 (sequence is synthesized)
agctgcagagtgggcaggagggagaaggggctcccctgagaccccggcaggacaatggaaagcttccagccccgagctgatgtttcctcacctatcactgcttataggacagcatccaaa

SEQ ID NO: 466442 - DNA, 120 bp, Artificial Sequence
  ENSG00000158445_58 (sequence is synthesized)
tgctttcatgtcactcagcccaggcaacccaaaccagtcctggctacacccagaaataagagttacctctgcattttctgttgccatttttctggctctagaagtatctgatgcgcgact

SEQ ID NO: 466443 - DNA, 120 bp, Artificial Sequence
  ENSG00000158445_59 (sequence is synthesized)
atgtcatagaatgtccacgcatctcagagtagtctatttttctgttcagataaaatatatatatatatgtatttttagcaaatttataatagggcaattgagtctaatttcttcttttgt

SEQ ID NO: 466444 - DNA, 120 bp, Artificial Sequence
  ENSG00000158445_60 (sequence is synthesized)
aatacagaacaatatcttaggagtttcattgttggtcattatcgtagctgatgttttctggtcttttgcagttcctaccattgtcccttgggctgtttgggttttcttccttttgattct

SEQ ID NO: 466445 - DNA, 120 bp, Artificial Sequence
  ENSG00000158445_61 (sequence is synthesized)
gatttcttgagggtggggaaagactttggggtttgacttccttgtgtaggcatttcttgacactaggcctggactctgtcaatgctgtgactttcctcattcatttctgtgtgtttctcc

SEQ ID NO: 466446 - DNA, 120 bp, Artificial Sequence
  ENSG00000158445_62 (sequence is synthesized)
cattcgttgttcttaagaatccagggcatgaatgcaggaatgagacccagggaagcagagctacagatggccctcaaaatcaggatgggatgtgggctggtttcacttatatcccacacc

SEQ ID NO: 466447 - DNA, 120 bp, Artificial Sequence
  ENSG00000158445_63 (sequence is synthesized)
cctttagggatctgaagggactgagttttctcatccccagagatcttggaaccaaaaatctcatgcaagcaaactcatcactggcatttctgagatccagaacacatgtgagtccctcct

SEQ ID NO: 466448 - DNA, 120 bp, Artificial Sequence
  ENSG00000158445_64 (sequence is synthesized)
ggctgggctgctcccacatgtccagcaccctgtcggcctgtaacatcaatcagagctgaaggtcagaggtttttcaggttctcgtgaacctcacaagaacatgctgggcctccgatctca

SEQ ID NO: 466449 - DNA, 120 bp, Artificial Sequence
  ENSG00000158445_65 (sequence is synthesized)
atgctgggcctccgatctcaccaacttgtttatcagttccttgtttcgatctgtttatttatttatttttttgttattattattttgagacaaagtcttgctctgttgcccaggctgcag

SEQ ID NO: 466450 - DNA, 61 bp, Artificial Sequence
  ENSG00000158445_66 (sequence is synthesized)
gcacccagtccatttcaatccatttctaacagcttcaccaaaaaacagtggccagacaccc

SEQ ID NO: 466451 - DNA, 120 bp, Artificial Sequence
  ENSG00000158445_67 (sequence is synthesized)
atttctaacagcttcaccaaaaaacagtggccagacacccttgcagccaaaccctgagaagagatgtccccgaatctgctagctcatctccccttcccttgccagctgcctggctccata

SEQ ID NO: 466452 - DNA, 120 bp, Artificial Sequence
  ENSG00000158445_68 (sequence is synthesized)
gagcaggaggtgtgtggcaaggacaggggcagttttccagcttccacctatccacgcctgggggagtttttggactgtcctgataattaattccagaggcagttttcagtcctgggtggg

SEQ ID NO: 466453 - DNA, 120 bp, Artificial Sequence
  ENSG00000158445_69 (sequence is synthesized)
cggaggacatctcactaggcaggatcttcagcagaaagtgattctccatccgtcaactcatgcaggaagatgaagaaagcccagataatctccaacttgcattcgtttaggttttggtat

SEQ ID NO: 466454 - DNA, 120 bp, Artificial Sequence
  ENSG00000158445_70 (sequence is synthesized)
accacccacctcactgtcagctgcagggcttggggctctgcctagaatcagaaatttgagccaaactgggaccctcagatggcagtgagccatcccatcagataactcccaagaggaagc

SEQ ID NO: 466455 - DNA, 120 bp, Artificial Sequence
  ENSG00000158445_71 (sequence is synthesized)
caactcaaatatgaattttattattctggactatgaccctgatcagagttctcccaccccgaaaacctctgatagtctggtttgaaccagagtcaaataaaacagacaagattttttttt

SEQ ID NO: 466456 - DNA, 120 bp, Artificial Sequence
  ENSG00000158445_72 (sequence is synthesized)
cctctgcacaaaagcaaaaaaacaaaacaaaaaaaagtctgccagtagtttcctgggtttgatgcccagataagcaaacactgttgcctatggctgttgctgttttcatcaagaaagagg

SEQ ID NO: 466457 - DNA, 120 bp, Artificial Sequence
  ENSG00000158445_73 (sequence is synthesized)
ttatatagtttgcatttccatccactctccctgattttatcttaacctagaatttctcctgaactaccccaaatgccaacttgaatttgggtagggctctgttaatcgagggaaccctca

SEQ ID NO: 466458 - DNA, 120 bp, Artificial Sequence
  ENSG00000158445_74 (sequence is synthesized)
tcttcacttataaacctaattctctgttcctccctccaaagatcctgaaaagatctcctaaaggctggccaggatggggtggagtggggcagtgcacctgaagaaaaaaacttagctgcc

SEQ ID NO: 466459 - DNA, 120 bp, Artificial Sequence
  ENSG00000158445_75 (sequence is synthesized)
agctggctgtatgcaagttctccgaaaatttctattgtatgaaagggatggggtcaattgcagctcaaattaaggaagccctcctaacaggctgggttgtctgaccatggagctcaatgc

SEQ ID NO: 466460 - DNA, 120 bp, Artificial Sequence
  ENSG00000158445_76 (sequence is synthesized)
catggtggacagtgagctcccttatatcacaggtgtttaaagagaggctggctagatggtgtaaaaaatgggcattgcagaggggccctagcattgcatggaaactgggctgaacaacca

SEQ ID NO: 466461 - DNA, 85 bp, Artificial Sequence
  ENSG00000158445_77 (sequence is synthesized)
tttcaacactctggatataagctcaagccactgaggcaaaggcatgcagcacaattagcaggaatgcaacttctgggctttggag

SEQ ID NO: 466462 - DNA, 120 bp, Artificial Sequence
  ENSG00000158445_78 (sequence is synthesized)
gcagcacaattagcaggaatgcaacttctgggctttggagctctcagagggggtgtccaagagacaagtctgcttccttccggctccgtcttggaacattttaatgactgtcagtcacca

SEQ ID NO: 466463 - DNA, 120 bp, Artificial Sequence
  ENSG00000158445_79 (sequence is synthesized)
atccaacccatccccagtggcctaccaggcaccacattgggatgagactcatgctacccttccccaggccagccaaggagcaatccacgctgtcccccatccctggctggctgtcttatg

SEQ ID NO: 466464 - DNA, 120 bp, Artificial Sequence
  ENSG00000158445_80 (sequence is synthesized)
gtgcttcagcccctccgcccagctcctgtgccctcatgagcctggggctttctgtataaaagatgcaatgatatctgttccccactagccatccccacaatgaacaacttcccaggcaat

SEQ ID NO: 466465 - DNA, 120 bp, Artificial Sequence
  ENSG00000158445_81 (sequence is synthesized)
agcaaatggctccattccaaaagggcttgtttttttggtaaatcaaataagagaccccactcaagacctttgaaagtccccgtcaatgaaaaaaatccagaagggtcaaaagagaaaggc

SEQ ID NO: 466466 - DNA, 120 bp, Artificial Sequence
  ENSG00000158445_82 (sequence is synthesized)
agcttttaatccagtttcacagcaaaaccaggctcttggctgcctccaagcagaatgccactctcctgcagctgtggcctccatcccaaatcatcctgcatactgcattctctaaggaaa

SEQ ID NO: 466467 - DNA, 120 bp, Artificial Sequence
  ENSG00000158445_83 (sequence is synthesized)
gcatttgacaagagagggtttatgtatggtggattgggagaaagtgagacttcaacctcagggtgaaccgaagactggtttgtctttggttgttttagtatgaggttgggcaggatgata

SEQ ID NO: 466468 - DNA, 120 bp, Artificial Sequence
  ENSG00000158445_84 (sequence is synthesized)
tgtttggatgggtagaatgagcagccgccttcctctgaaaccaaaataaaataaaaaccagttttcaagattcctcccaactcctcactggaggctctgccctgcagaatcactcaagtt

SEQ ID NO: 466469 - DNA, 120 bp, Artificial Sequence
  ENSG00000158445_85 (sequence is synthesized)
gcaacaacacaaggagacaaaaataggatatttcatgaaaatataagaaactcccaattccgtcccattaggatgccctcaaggggccatgcagggatcttcccatacttcctgcttccc

SEQ ID NO: 466470 - DNA, 120 bp, Artificial Sequence
  ENSG00000158445_86 (sequence is synthesized)
tgatctgaaccaagattggaaagaggcaggcagcagagaagatgcccaagaaactctgacatatccacagcttggctctgccccttgggcttcactggggtttgggcctccctcttggtt

SEQ ID NO: 466471 - DNA, 120 bp, Artificial Sequence
  ENSG00000158445_87 (sequence is synthesized)
gagctgagtgtgcctgagtgggtggggacagggaggattctccaggtctatcttgatttcataggtccttctcaatccaaggtcaaaaactgagaatcttattttctgcaccaggaactc

SEQ ID NO: 466472 - DNA, 120 bp, Artificial Sequence
  ENSG00000158445_88 (sequence is synthesized)
agggttatccccaacctatgccgctggcacatgatggtcatccaacctgtgtttttgtgagtgagtgaatgtgtgactggttggcctctgagtggatgactggatgcgtgaatgtgtgag

SEQ ID NO: 466473 - DNA, 120 bp, Artificial Sequence
  ENSG00000158445_89 (sequence is synthesized)
tgaatgggggagttaatgaatccctacctaactgtgaagagaagaaaaatgaggagcccctctcccactgaaacccataactgccccatcaaggtcatctttctttgactcaagatgaca

SEQ ID NO: 466474 - DNA, 120 bp, Artificial Sequence
  ENSG00000158445_90 (sequence is synthesized)
tctcaatttgatgcttgtaggccccaagctgataagggccacagccctctcagagccacacttcctgggggcccacagagcagctctgccctccttcctcttcccctaccctgcatttct

SEQ ID NO: 466475 - DNA, 120 bp, Artificial Sequence
  ENSG00000158445_91 (sequence is synthesized)
cagcctcatgttctattttagctcacacacgacccatgggggggaccaccaagtggttttccaatggactaagccaagggttcgaagttgggacttcctttggtctgggacttcctgggg

SEQ ID NO: 466476 - DNA, 120 bp, Artificial Sequence
  ENSG00000158445_92 (sequence is synthesized)
cagaaacataggagccaacatctggaaactggattgcattccctgagccatgggagtccagctggatattaaggccagcctgccctccagcttttagagccgaagatctttttttctgag

SEQ ID NO: 466477 - DNA, 120 bp, Artificial Sequence
  ENSG00000158445_93 (sequence is synthesized)
ccccaaagccgtcatgatagtatgcccccagatcccatcagctaagaccctgtctctcccaggaacccgtcgtgtgaggttggggcttttctgccagtaaagccattctgatcacctcac

SEQ ID NO: 466478 - DNA, 120 bp, Artificial Sequence
  ENSG00000158445_94 (sequence is synthesized)
ccttgacaggggccaagccaatcacattagccataaatgaccaatgtcctcagccactcttttctcgggggtgcattcgtgggtcctattcatctctcgtcagttaatgtctctagtcct

SEQ ID NO: 466479 - DNA, 82 bp, Artificial Sequence
  ENSG00000158445_95 (sequence is synthesized)
cccagtgtctttttatgcatgtggtgagatgaaattgtgatctttgtgtgacctccagctgctgtcttgtcttgtaaaatat

SEQ ID NO: 466480 - DNA, 120 bp, Artificial Sequence
  ENSG00000158445_96 (sequence is synthesized)
tttgtgtgacctccagctgctgtcttgtcttgtaaaatatgtccaaatgtttaagaatttctaagcaaatggtcccttaatgaagtctgcagagttcaataaaaggtatggaaaaaacaa

SEQ ID NO: 466481 - DNA, 120 bp, Artificial Sequence
  ENSG00000158445_97 (sequence is synthesized)
gcgctccgaagtgcgggacagaatagcagcgagcgcggagccgaagctcagccccgacttgttgatctcgcccaggcagccgccgccgccgccgccgcgggagcaggaggaggaggaggt

SEQ ID NO: 466482 - DNA, 80 bp, Artificial Sequence
  ENSG00000158445_98 (sequence is synthesized)
cccgggcggccgggacgatgcgcggtccctggccccaggaggcggccgccctggggccgtcgggatggaggtgagaagac

SEQ ID NO: 466483 - DNA, 120 bp, Artificial Sequence
  ENSG00000158445_99 (sequence is synthesized)
gtgggaacctggctggcctgttaggaagaggttgcccaacccagagcttgttaagaagagtgcagttacctcagagagacggttcaagtgaaggcataagttaaaaaccagaccccagga

SEQ ID NO: 466484 - DNA, 120 bp, Artificial Sequence
  ENSG00000158445_100 (sequence is synthesized)
aattcctctgtggctgccaaggaaatgagaattataacagaggcaaccatgaagagctgttaggagatgcccctaatgtaaagagcctagcccagcgcctgactcatgggaagcattcag

SEQ ID NO: 466485 - DNA, 120 bp, Artificial Sequence
  ENSG00000158445_101 (sequence is synthesized)
tactggagaagcccaattcctctgtggctgccaaggagaaaacagattttcagttcttgtctgaggtcactcagtaagggaagctgaagaaaatgtggaaggagccccccacggtggctg

SEQ ID NO: 466486 - DNA, 120 bp, Artificial Sequence
  ENSG00000158445_102 (sequence is synthesized)
tggacctcaaccaagaaccctcagaactgaatccctccaacaaaaaagagagagagcttggaagcaaatccttccctaagcagatccttccccagtcaagccttaagatgagaatgcagc

SEQ ID NO: 466487 - DNA, 120 bp, Artificial Sequence
  ENSG00000158445_103 (sequence is synthesized)
cccagccaacacctggactgtggcctatgagaggccccaaagcagaggacctaactaagccacacctggatcccaacctacagaaatcatgagttaataaatgttgtttcaagccaccaa

SEQ ID NO: 466488 - DNA, 120 bp, Artificial Sequence
  ENSG00000158445_104 (sequence is synthesized)
agaggggctgttgtgcacaccccgtctgttgtgacctcggacagccgtcgggatggaggtgagaagacggccgtgacgcgcgcccgcggggccccctgcacccccagcagcccacagcgc

SEQ ID NO: 466489 - DNA, 120 bp, Artificial Sequence
  ENSG00000158445_105 (sequence is synthesized)
ctgggacctactggagaagcccaattcctctgtggctgccaaggggatgcaggatacagaggaacaaatgaagtgacacccccagaaggcaacactcagatgaatccagaagggtcacca

SEQ ID NO: 466490 - DNA, 120 bp, Artificial Sequence
  ENSG00000158445_106 (sequence is synthesized)
taccatcaggggtcaccagcctggcagtcacagaaaacgcatttggcaacttcctgcaactgttgtggaaatgacagcaggccatggtccaagccaaaatggagaagccaggcctcgcag

SEQ ID NO: 466491 - DNA, 120 bp, Artificial Sequence
  ENSG00000158445_107 (sequence is synthesized)
aagaaaccagcaggcagctctgggaggccatttgcacagagcttattttgaagtcttggggttcaaatcccaactctgcctctagatagtcacaacccactggatagagaatagttcaag

SEQ ID NO: 466492 - DNA, 120 bp, Artificial Sequence
  ENSG00000158445_108 (sequence is synthesized)
cagaatgtaatttgagactaacaaaggtgcgcccaggatataaggaaaccacataagctaatgttgacccatgaagcaccccctacacctgatggggcaggcaggaagcggttaccagag

SEQ ID NO: 466493 - DNA, 120 bp, Artificial Sequence
  ENSG00000158445_109 (sequence is synthesized)
cccagaaagtcaggtggggaagcacttgaggggctgtggccttagacagaggcagccaggctgaggcatgtgccttaggggagcacacatctcagcctcaccctccctgcctcctgggga

SEQ ID NO: 466494 - DNA, 120 bp, Artificial Sequence
  ENSG00000158445_110 (sequence is synthesized)
accttgaggccaccagacaaggagccattaatgcagttcacgctcccaggagcattgagcagagaggagcagagaggacaagggtgagaaggggatcggaggcgctaaggaagacactgg

SEQ ID NO: 466495 - DNA, 120 bp, Artificial Sequence
  ENSG00000158445_111 (sequence is synthesized)
cagagccatttattgtgcatctgaggcaagtcacttcccctgcccaatctgtttccttgtctgtaaaactgggatgttacctcactcacttgaggtgaggaataaattatttaaaacata

SEQ ID NO: 466496 - DNA, 88 bp, Artificial Sequence
  ENSG00000158445_112 (sequence is synthesized)
gatcagcctgggaaacaaagggagacactgtctctacaaaaaaatagaaaaattagccgggcacagtagcacaaacctgtagtcccag

SEQ ID NO: 466497 - DNA, 82 bp, Artificial Sequence
  ENSG00000158445_113 (sequence is synthesized)
tgggaaacaaagggagacactgtctctacaaaaaaatagaaaaattagccgggcacagtagcacaagctcgcttgagcccag

SEQ ID NO: 466498 - DNA, 120 bp, Artificial Sequence
  ENSG00000158445_114 (sequence is synthesized)
gtctcaaaaaataaataaataaaaataaaacgtggaaagtacctagcatgaagcccagtaggaaattttttaaaaggcagttgttgttattataactcaagtggggagaaatcaggctga

SEQ ID NO: 466499 - DNA, 120 bp, Artificial Sequence
  ENSG00000158445_115 (sequence is synthesized)
taactcaagtggggagaaatcaggctgagagaggtacattagagttggctgaaaggtacgacagcgagggatgtttgaggcagcctaacatacactatgataaataccaccacactcaac

SEQ ID NO: 466500 - DNA, 120 bp, Artificial Sequence
  ENSG00000158445_116 (sequence is synthesized)
aagcagcctctctccctgtaaaaacatcaggtcaacctgggcagaggcagaagactgcacatgctgccattttaacatcaaggcaaaaaaaaaaagttctcactcacttggcccactccc

SEQ ID NO: 466501 - DNA, 120 bp, Artificial Sequence
  ENSG00000158445_117 (sequence is synthesized)
atctcaacccttcctacccacacagtggggccagtctattttagcaaaagaccatttagttaaaggaggctgacaaggaaaggatccagatttctccttttctgtcttttaaaaaaagcc

SEQ ID NO: 466502 - DNA, 120 bp, Artificial Sequence
  ENSG00000158445_118 (sequence is synthesized)
acagatataaataagcccaagaccgtctgtttctgccaccttctaaacagacctgtgatgaattaatatcaggaccatgggagactgtgaccgaaggatgggttaggctggccgcagacc

SEQ ID NO: 466503 - DNA, 120 bp, Artificial Sequence
  ENSG00000158445_119 (sequence is synthesized)
cagccaattccacaagcccaggctttgaagccagtttggaaactagccatcaggaaactccacaaacctcaatttatcccagacaattttggaggaaaaacccaagtcagcaaagaatat

SEQ ID NO: 466504 - DNA, 120 bp, Artificial Sequence
  ENSG00000158445_120 (sequence is synthesized)
agtcagcaaagaatatggaaattactgagaaggtacgaggtccacggaggctgcatcttaaagaatgattgccatcggccgggcgcagtggttcacacctgtaatcacagcactttggga

SEQ ID NO: 466505 - DNA, 82 bp, Artificial Sequence
  ENSG00000158445_121 (sequence is synthesized)
gacagagcgacactccatttcaaggaaaaaaaaaaagaaattcaaatttaactgagcatcctatgtttcagggggcatccca

SEQ ID NO: 466506 - DNA, 120 bp, Artificial Sequence
  ENSG00000158445_122 (sequence is synthesized)
acaagaacagtgctgaaagggacacagctcaagctacagaggtctccaactggtggcctccaggccatatgaggcccatgcattgtgtgttgctcagtcttcacagtttataaaattgga

SEQ ID NO: 466507 - DNA, 120 bp, Artificial Sequence
  ENSG00000158445_123 (sequence is synthesized)
acaggctacaaacatttcaaagaactttaaaggatttcttgcctctttaaaaatgggaagctccaaccatgcaggtagaagctgccccactatgggaacataatggggacagaagggaat

SEQ ID NO: 466508 - DNA, 120 bp, Artificial Sequence
  ENSG00000158445_124 (sequence is synthesized)
gtggaaaagtgaaaactgatcactgacttgttaggatggagaaattgtgaataaatctgtttaggggttgtttattgcataaggagtctggaagtgacaatgtcagtagcccatgcctgg

SEQ ID NO: 466509 - DNA, 120 bp, Artificial Sequence
  ENSG00000158445_125 (sequence is synthesized)
agaaccggccctctgcaggctccactgctgcggtcccagaagtgctggctgcagtgtctgaaaaacttgcccatctgcaccatctctgccagacggacttgtacttccctctttccaggc

SEQ ID NO: 466510 - DNA, 120 bp, Artificial Sequence
  ENSG00000158445_126 (sequence is synthesized)
acaagatgaaggcctcttgccatgggctggagaaatcagtcgctacaacaccccttgcagacacaggctggagctgcaagtcctgggagagacctgctctatcttctctggcaattgtgg

SEQ ID NO: 466511 - DNA, 120 bp, Artificial Sequence
  ENSG00000158445_127 (sequence is synthesized)
ccactactagaggagctcaggcaggcaaaatctaggaaaagaaaaagaagattgagccaatggctaatacataacagagccgggatttaaacccaagtctagctccagagcctatgtttg

SEQ ID NO: 466512 - DNA, 90 bp, Artificial Sequence
  ENSG00000158445_128 (sequence is synthesized)
tcaactccagcaacatagtgagacccctatctctaaaaaaatttaaaaattagctgagtgtggtagcacgcacctgtagtcacagctact

SEQ ID NO: 466513 - DNA, 64 bp, Artificial Sequence
  ENSG00000158445_129 (sequence is synthesized)
caacatagtgagacccctatctctaaaaaaatttaaaaattagctgagtgtggtagcacaaggt

SEQ ID NO: 466514 - DNA, 120 bp, Artificial Sequence
  ENSG00000158445_130 (sequence is synthesized)
agcaagaccctgtctcaaaaataaataataaaaaaattgtcatacaataaaactatttttttattttgctgtacagttctataaatctgggtttttgttttgtttcgagacggagtctca

SEQ ID NO: 466515 - DNA, 72 bp, Artificial Sequence
  ENSG00000158445_131 (sequence is synthesized)
taatttttgtatttttagtagagatggagagatggggtttcacgatgttggccggggtggtctcaaattcct

SEQ ID NO: 466516 - DNA, 120 bp, Artificial Sequence
  ENSG00000158445_132 (sequence is synthesized)
aggcgtgagccaccatgcctggcccagtacattcatataaccactacggcaatcatgacaccccaaacacttccttgtgcgatccctttacatccacatccgccacccatcctaacttct

SEQ ID NO: 466517 - DNA, 120 bp, Artificial Sequence
  ENSG00000158445_133 (sequence is synthesized)
catccgccacccatcctaacttctggcaacaccatcatctcttcccttcatcatacctttgtcttttccagaatgtcaaataaatggaatcacacagcatgtaaccatttgaggctggct

SEQ ID NO: 466518 - DNA, 120 bp, Artificial Sequence
  ENSG00000158445_134 (sequence is synthesized)
tccctcagtcagcatcgcatctctggggttcatccaagttgttgcacaatcactagtttattccttttcactcggatgaagatgactattacttatcgggggacctgccctgataatcac

SEQ ID NO: 466519 - DNA, 67 bp, Artificial Sequence
  ENSG00000158445_135 (sequence is synthesized)
gatgactattacttatcgggggacctgccctgataatcacgtaggttcttttctattttcctaagca

SEQ ID NO: 466520 - DNA, 66 bp, Artificial Sequence
  ENSG00000158445_136 (sequence is synthesized)
taataagcctgggagcgctatgggagacggggccagttcagatacctatccctaggtgcacattct

SEQ ID NO: 466521 - DNA, 61 bp, Artificial Sequence
  ENSG00000158445_137 (sequence is synthesized)
ttgctcaaacacacatgctgtacaatttttgtagttaacgcaattattacagggtcctgga

SEQ ID NO: 466522 - DNA, 87 bp, Artificial Sequence
  ENSG00000158445_138 (sequence is synthesized)
aaatcacaagggtattgattggggaagtccatgaaatctttacaatttacgtttcaaaagtattaacttggagaactaataaatgtc

SEQ ID NO: 466523 - DNA, 80 bp, Artificial Sequence
  ENSG00000158457_0 (sequence is synthesized)
ctgggcgcctggctggccgggctggtcctgcggccgcgggtgagtctcgtccgctcgcgctgcccaccgcggctccagca

SEQ ID NO: 466524 - DNA, 80 bp, Artificial Sequence
  ENSG00000158457_1 (sequence is synthesized)
ccgggctcctgcgcggcgcggctcggctcatgcccccgggcgcggggcacacaggccggccggcagccgctgggaaatag

SEQ ID NO: 466525 - DNA, 120 bp, Artificial Sequence
  ENSG00000158457_2 (sequence is synthesized)
ataggcccccgggggcggtggcggcggcggggccatggcgcggagaccccgggcgccggccgcctccggggaggagttctccttcgtcagcccgctggtgaaatacctgctcttcttctt

SEQ ID NO: 466526 - DNA, 120 bp, Artificial Sequence
  ENSG00000158457_3 (sequence is synthesized)
caacatgctcttctgggtgatttccatggtgatggtggctgtgggtgtctacgctcggctaatgaagcatgcagaagcagccctagcctgcctggcagtggaccctgccatcctgctgat

SEQ ID NO: 466527 - DNA, 120 bp, Artificial Sequence
  ENSG00000158457_4 (sequence is synthesized)
cgtggtgggtgtcctcatgttcctgctcaccttctgtggctgcattgggtccctccgcgagaacatctgcctcctgcagacgttctccctctgcctcaccgctgtgttcctgctgcagct

SEQ ID NO: 466528 - DNA, 120 bp, Artificial Sequence
  ENSG00000158457_5 (sequence is synthesized)
ggccgctgggatcctgggcttcgtcttctcagacaaggctcgagggaaagtgagtgagatcatcaacaatgccattgtgcactaccgagatgacttggatctgcagaacctcattgattt

SEQ ID NO: 466529 - DNA, 120 bp, Artificial Sequence
  ENSG00000158457_6 (sequence is synthesized)
tggccagaaaaagtttagctgctgtggagggatttcctacaaggactggtctcagaacatgtatttcaactgctcagaagacaaccccagtcgagagcgctgctctgtgccttactcctg

SEQ ID NO: 466530 - DNA, 120 bp, Artificial Sequence
  ENSG00000158457_7 (sequence is synthesized)
ttgcttgcctactcctgaccaggcagtgatcaacactatgtgtggccaaggtatgcaggcctttgactacttggaagctagcaaagtcatctacaccaatggctgtattgacaagttggt

SEQ ID NO: 466531 - DNA, 120 bp, Artificial Sequence
  ENSG00000158457_8 (sequence is synthesized)
caactggatacacagcaacctattcttacttggtggtgtggctctaggcctggccatcccccagctggtgggaattctgctgtcccagatcctagtgaatcagatcaaagatcagatcaa

SEQ ID NO: 466532 - DNA, 120 bp, Artificial Sequence
  ENSG00000158457_9 (sequence is synthesized)
gctacagctctacaaccagcagcaccgggctgacccatggtactgagaatccatcctgcacctcctcaccatggaaactggcaagcctcataaacgaacagcagtgggtgctgaaagcag

SEQ ID NO: 466533 - DNA, 120 bp, Artificial Sequence
  ENSG00000158457_10 (sequence is synthesized)
caccaaatggagatttggattccagccccccagtgacagcccagtgggaagaagcaaactccagatgggcagaaggcagggtgcacaggtggctccagtctcaggaggatgcgcctcctc
